United States Patent Application Publication US 2014/0004565 A1 - sequence listing, part 35

SEQ ID NO: 779892 - RNA, 19 nt, Artificial Sequence
  Description of Artificial Sequence: Synthetic oligonucleotide
aagcucacauccuccaugg

SEQ ID NO: 779893 - RNA, 19 nt, Artificial Sequence
  Description of Artificial Sequence: Synthetic oligonucleotide
uuuacuccaacaucuaggu

SEQ ID NO: 779894 - RNA, 19 nt, Artificial Sequence
  Description of Artificial Sequence: Synthetic oligonucleotide
guggaauauagcgaaaucg

SEQ ID NO: 779895 - RNA, 19 nt, Artificial Sequence
  Description of Artificial Sequence: Synthetic oligonucleotide
aagggugccgucuuuuggg

SEQ ID NO: 779896 - RNA, 19 nt, Artificial Sequence
  Description of Artificial Sequence: Synthetic oligonucleotide
uacgaccugaggaagagcc

SEQ ID NO: 779897 - RNA, 19 nt, Artificial Sequence
  Description of Artificial Sequence: Synthetic oligonucleotide
gacucuaucuuguuuauca

SEQ ID NO: 779898 - RNA, 19 nt, Artificial Sequence
  Description of Artificial Sequence: Synthetic oligonucleotide
agaaagaucggcucccggg

SEQ ID NO: 779899 - RNA, 19 nt, Artificial Sequence
  Description of Artificial Sequence: Synthetic oligonucleotide
uccuaaucgugaaugacug

SEQ ID NO: 779900 - RNA, 19 nt, Artificial Sequence
  Description of Artificial Sequence: Synthetic oligonucleotide
gaagcuaucugccaaacaa

SEQ ID NO: 779901 - RNA, 19 nt, Artificial Sequence
  Description of Artificial Sequence: Synthetic oligonucleotide
gagcucauccccaagaggg

SEQ ID NO: 779902 - RNA, 19 nt, Artificial Sequence
  Description of Artificial Sequence: Synthetic oligonucleotide
ugcuuauuaggaaaugacu

SEQ ID NO: 779903 - RNA, 19 nt, Artificial Sequence
  Description of Artificial Sequence: Synthetic oligonucleotide
aggugagaaacuuguauuc

SEQ ID NO: 779904 - RNA, 19 nt, Artificial Sequence
  Description of Artificial Sequence: Synthetic oligonucleotide
gaauauagcgaaaucggug

SEQ ID NO: 779905 - RNA, 19 nt, Artificial Sequence
  Description of Artificial Sequence: Synthetic oligonucleotide
ugaucuagauacagaaaug

SEQ ID NO: 779906 - RNA, 19 nt, Artificial Sequence
  Description of Artificial Sequence: Synthetic oligonucleotide
uccuuaucaaaacagguuu

SEQ ID NO: 779907 - RNA, 19 nt, Artificial Sequence
  Description of Artificial Sequence: Synthetic oligonucleotide
uaguaaauuucacauuccu

SEQ ID NO: 779908 - RNA, 19 nt, Artificial Sequence
  Description of Artificial Sequence: Synthetic oligonucleotide
uuauuaggaaaugacuggc

SEQ ID NO: 779909 - RNA, 19 nt, Artificial Sequence
  Description of Artificial Sequence: Synthetic oligonucleotide
accaguauccuucauguca

SEQ ID NO: 779910 - RNA, 19 nt, Artificial Sequence
  Description of Artificial Sequence: Synthetic oligonucleotide
uuauccaucacauggucuc

SEQ ID NO: 779911 - RNA, 19 nt, Artificial Sequence
  Description of Artificial Sequence: Synthetic oligonucleotide
cugcaaaccgaucugacag

SEQ ID NO: 779912 - RNA, 19 nt, Artificial Sequence
  Description of Artificial Sequence: Synthetic oligonucleotide
uacuucagacccaagauua

SEQ ID NO: 779913 - RNA, 19 nt, Artificial Sequence
  Description of Artificial Sequence: Synthetic oligonucleotide
auaaauagucacuuguuua

SEQ ID NO: 779914 - RNA, 19 nt, Artificial Sequence
  Description of Artificial Sequence: Synthetic oligonucleotide
aaaccaaagaucaauguuu

SEQ ID NO: 779915 - RNA, 19 nt, Artificial Sequence
  Description of Artificial Sequence: Synthetic oligonucleotide
ucugcagugguauuuuaug

SEQ ID NO: 779916 - RNA, 19 nt, Artificial Sequence
  Description of Artificial Sequence: Synthetic oligonucleotide
aaggugagaaacuuguauu

SEQ ID NO: 779917 - RNA, 19 nt, Artificial Sequence
  Description of Artificial Sequence: Synthetic oligonucleotide
uuagcaacucuacagggau

SEQ ID NO: 779918 - RNA, 19 nt, Artificial Sequence
  Description of Artificial Sequence: Synthetic oligonucleotide
aacucuacagggauuuaac

SEQ ID NO: 779919 - RNA, 19 nt, Artificial Sequence
  Description of Artificial Sequence: Synthetic oligonucleotide
agacccaagauuaugaugu

SEQ ID NO: 779920 - RNA, 19 nt, Artificial Sequence
  Description of Artificial Sequence: Synthetic oligonucleotide
aaugacuggcuaaugaccu

SEQ ID NO: 779921 - RNA, 19 nt, Artificial Sequence
  Description of Artificial Sequence: Synthetic oligonucleotide
cucuacagggauuuaacug

SEQ ID NO: 779922 - RNA, 19 nt, Artificial Sequence
  Description of Artificial Sequence: Synthetic oligonucleotide
acagggauuuaacugaaga

SEQ ID NO: 779923 - RNA, 19 nt, Artificial Sequence
  Description of Artificial Sequence: Synthetic oligonucleotide
uauaguagagguagcucca

SEQ ID NO: 779924 - RNA, 19 nt, Artificial Sequence
  Description of Artificial Sequence: Synthetic oligonucleotide
uauagcgaaaucggugucg

SEQ ID NO: 779925 - RNA, 19 nt, Artificial Sequence
  Description of Artificial Sequence: Synthetic oligonucleotide
uuaucaccauguauguuug

SEQ ID NO: 779926 - RNA, 19 nt, Artificial Sequence
  Description of Artificial Sequence: Synthetic oligonucleotide
agaaccaguauccuucaug

SEQ ID NO: 779927 - RNA, 19 nt, Artificial Sequence
  Description of Artificial Sequence: Synthetic oligonucleotide
uuucuccuaaucgugaaug

SEQ ID NO: 779928 - RNA, 19 nt, Artificial Sequence
  Description of Artificial Sequence: Synthetic oligonucleotide
uguuuaucaccauguaugu

SEQ ID NO: 779929 - RNA, 19 nt, Artificial Sequence
  Description of Artificial Sequence: Synthetic oligonucleotide
uuuguuggcacaagagaac

SEQ ID NO: 779930 - RNA, 19 nt, Artificial Sequence
  Description of Artificial Sequence: Synthetic oligonucleotide
uuugaccuagcuuucucug

SEQ ID NO: 779931 - RNA, 19 nt, Artificial Sequence
  Description of Artificial Sequence: Synthetic oligonucleotide
agcaguaaauucuuuggga

SEQ ID NO: 779932 - RNA, 19 nt, Artificial Sequence
  Description of Artificial Sequence: Synthetic oligonucleotide
acuacauuguaagggugcc

SEQ ID NO: 779933 - RNA, 19 nt, Artificial Sequence
  Description of Artificial Sequence: Synthetic oligonucleotide
uacaaguuucauuuccgug

SEQ ID NO: 779934 - RNA, 19 nt, Artificial Sequence
  Description of Artificial Sequence: Synthetic oligonucleotide
gauguaaccccuuuccaga

SEQ ID NO: 779935 - RNA, 19 nt, Artificial Sequence
  Description of Artificial Sequence: Synthetic oligonucleotide
cuucauuugguaccugggg

SEQ ID NO: 779936 - RNA, 19 nt, Artificial Sequence
  Description of Artificial Sequence: Synthetic oligonucleotide
cugaugcaagcucacaucc

SEQ ID NO: 779937 - RNA, 19 nt, Artificial Sequence
  Description of Artificial Sequence: Synthetic oligonucleotide
uguauguuacuuucucucu

SEQ ID NO: 779938 - RNA, 19 nt, Artificial Sequence
  Description of Artificial Sequence: Synthetic oligonucleotide
aauaagcaggccccgcuca

SEQ ID NO: 779939 - RNA, 19 nt, Artificial Sequence
  Description of Artificial Sequence: Synthetic oligonucleotide
aagccaacuucuuuucucu

SEQ ID NO: 779940 - RNA, 19 nt, Artificial Sequence
  Description of Artificial Sequence: Synthetic oligonucleotide
auuuugaccuagcuuucuc

SEQ ID NO: 779941 - RNA, 19 nt, Artificial Sequence
  Description of Artificial Sequence: Synthetic oligonucleotide
auucauaaguaucugcuua

SEQ ID NO: 779942 - RNA, 19 nt, Artificial Sequence
  Description of Artificial Sequence: Synthetic oligonucleotide
uaagggugccgucuuuugg

SEQ ID NO: 779943 - RNA, 19 nt, Artificial Sequence
  Description of Artificial Sequence: Synthetic oligonucleotide
uggcuaauaagcaggcccc

SEQ ID NO: 779944 - RNA, 19 nt, Artificial Sequence
  Description of Artificial Sequence: Synthetic oligonucleotide
aaucuuuggcuaauaagca

SEQ ID NO: 779945 - RNA, 19 nt, Artificial Sequence
  Description of Artificial Sequence: Synthetic oligonucleotide
ucuuugaagcagcaucuga

SEQ ID NO: 779946 - RNA, 19 nt, Artificial Sequence
  Description of Artificial Sequence: Synthetic oligonucleotide
uauguuacuuucucucucu

SEQ ID NO: 779947 - RNA, 19 nt, Artificial Sequence
  Description of Artificial Sequence: Synthetic oligonucleotide
uuuauuguuaugucuccau

SEQ ID NO: 779948 - RNA, 19 nt, Artificial Sequence
  Description of Artificial Sequence: Synthetic oligonucleotide
uauuaggaaaugacuggcu

SEQ ID NO: 779949 - RNA, 19 nt, Artificial Sequence
  Description of Artificial Sequence: Synthetic oligonucleotide
cuugacguuggguaacugc

SEQ ID NO: 779950 - RNA, 19 nt, Artificial Sequence
  Description of Artificial Sequence: Synthetic oligonucleotide
uuucacugaccaauguaca

SEQ ID NO: 779951 - RNA, 19 nt, Artificial Sequence
  Description of Artificial Sequence: Synthetic oligonucleotide
gguagcuccaaauacagga

SEQ ID NO: 779952 - RNA, 19 nt, Artificial Sequence
  Description of Artificial Sequence: Synthetic oligonucleotide
aauucuucauuugguaccu

SEQ ID NO: 779953 - RNA, 19 nt, Artificial Sequence
  Description of Artificial Sequence: Synthetic oligonucleotide
aaucgugaaugacuguuau

SEQ ID NO: 779954 - RNA, 19 nt, Artificial Sequence
  Description of Artificial Sequence: Synthetic oligonucleotide
uucauguguuguccgauca

SEQ ID NO: 779955 - RNA, 19 nt, Artificial Sequence
  Description of Artificial Sequence: Synthetic oligonucleotide
uauuguuaugucuccauuu

SEQ ID NO: 779956 - RNA, 19 nt, Artificial Sequence
  Description of Artificial Sequence: Synthetic oligonucleotide
uuugggagcaguguacugc

SEQ ID NO: 779957 - RNA, 19 nt, Artificial Sequence
  Description of Artificial Sequence: Synthetic oligonucleotide
aggcuuuacgaccugagga

SEQ ID NO: 779958 - RNA, 19 nt, Artificial Sequence
  Description of Artificial Sequence: Synthetic oligonucleotide
augaucacuacugcccugc

SEQ ID NO: 779959 - RNA, 19 nt, Artificial Sequence
  Description of Artificial Sequence: Synthetic oligonucleotide
agacccgagcaguaaauuc

SEQ ID NO: 779960 - RNA, 19 nt, Artificial Sequence
  Description of Artificial Sequence: Synthetic oligonucleotide
aaagaucggcucccggguc

SEQ ID NO: 779961 - RNA, 19 nt, Artificial Sequence
  Description of Artificial Sequence: Synthetic oligonucleotide
cugcuuauuaggaaaugac

SEQ ID NO: 779962 - RNA, 19 nt, Artificial Sequence
  Description of Artificial Sequence: Synthetic oligonucleotide
accuugcuuacuucagacc

SEQ ID NO: 779963 - RNA, 19 nt, Artificial Sequence
  Description of Artificial Sequence: Synthetic oligonucleotide
cuuaaacuaucuucacuac

SEQ ID NO: 779964 - RNA, 19 nt, Artificial Sequence
  Description of Artificial Sequence: Synthetic oligonucleotide
uuuugaccuagcuuucucu

SEQ ID NO: 779965 - RNA, 19 nt, Artificial Sequence
  Description of Artificial Sequence: Synthetic oligonucleotide
uucuuuuaucugcaguggu

SEQ ID NO: 779966 - RNA, 19 nt, Artificial Sequence
  Description of Artificial Sequence: Synthetic oligonucleotide
gauuuaacugaagaacuga

SEQ ID NO: 779967 - RNA, 19 nt, Artificial Sequence
  Description of Artificial Sequence: Synthetic oligonucleotide
uuuacgaccugaggaagag

SEQ ID NO: 779968 - RNA, 19 nt, Artificial Sequence
  Description of Artificial Sequence: Synthetic oligonucleotide
ucuguauguuacuuucucu

SEQ ID NO: 779969 - RNA, 19 nt, Artificial Sequence
  Description of Artificial Sequence: Synthetic oligonucleotide
agaucaauguuuauuacaa

SEQ ID NO: 779970 - RNA, 19 nt, Artificial Sequence
  Description of Artificial Sequence: Synthetic oligonucleotide
gcuuauuaggaaaugacug

SEQ ID NO: 779971 - RNA, 19 nt, Artificial Sequence
  Description of Artificial Sequence: Synthetic oligonucleotide
aaaucggugucgugagcag

SEQ ID NO: 779972 - RNA, 19 nt, Artificial Sequence
  Description of Artificial Sequence: Synthetic oligonucleotide
uugauguaaccccuuucca

SEQ ID NO: 779973 - RNA, 19 nt, Artificial Sequence
  Description of Artificial Sequence: Synthetic oligonucleotide
uaucuauuacaguaacauc

SEQ ID NO: 779974 - RNA, 19 nt, Artificial Sequence
  Description of Artificial Sequence: Synthetic oligonucleotide
cuuuccugugagcacagag

SEQ ID NO: 779975 - RNA, 19 nt, Artificial Sequence
  Description of Artificial Sequence: Synthetic oligonucleotide
cuuuuggagaaaacacuac

SEQ ID NO: 779976 - RNA, 19 nt, Artificial Sequence
  Description of Artificial Sequence: Synthetic oligonucleotide
ucuacacuccacuggauau

SEQ ID NO: 779977 - RNA, 19 nt, Artificial Sequence
  Description of Artificial Sequence: Synthetic oligonucleotide
agaucuuccuugauguaac

SEQ ID NO: 779978 - RNA, 19 nt, Artificial Sequence
  Description of Artificial Sequence: Synthetic oligonucleotide
agagaauuuuccuuaucaa

SEQ ID NO: 779979 - RNA, 19 nt, Artificial Sequence
  Description of Artificial Sequence: Synthetic oligonucleotide
uucccagaaauucucuggu

SEQ ID NO: 779980 - RNA, 19 nt, Artificial Sequence
  Description of Artificial Sequence: Synthetic oligonucleotide
ugaugugugaaaagagcau

SEQ ID NO: 779981 - RNA, 19 nt, Artificial Sequence
  Description of Artificial Sequence: Synthetic oligonucleotide
uacauuguaagggugccgu

SEQ ID NO: 779982 - RNA, 19 nt, Artificial Sequence
  Description of Artificial Sequence: Synthetic oligonucleotide
ugcaaaccgaucugacagg

SEQ ID NO: 779983 - RNA, 19 nt, Artificial Sequence
  Description of Artificial Sequence: Synthetic oligonucleotide
cuuacaugugugcccaagc

SEQ ID NO: 779984 - RNA, 19 nt, Artificial Sequence
  Description of Artificial Sequence: Synthetic oligonucleotide
uuacuucagacccaagauu

SEQ ID NO: 779985 - RNA, 19 nt, Artificial Sequence
  Description of Artificial Sequence: Synthetic oligonucleotide
agagcucauccccaagagg

SEQ ID NO: 779986 - RNA, 19 nt, Artificial Sequence
  Description of Artificial Sequence: Synthetic oligonucleotide
ucucugaucuagauacaga

SEQ ID NO: 779987 - RNA, 19 nt, Artificial Sequence
  Description of Artificial Sequence: Synthetic oligonucleotide
accaauguacaguccaugu

SEQ ID NO: 779988 - RNA, 19 nt, Artificial Sequence
  Description of Artificial Sequence: Synthetic oligonucleotide
auauagcgaaaucgguguc

SEQ ID NO: 779989 - RNA, 19 nt, Artificial Sequence
  Description of Artificial Sequence: Synthetic oligonucleotide
ugggaaugggcuucaaaac

SEQ ID NO: 779990 - RNA, 19 nt, Artificial Sequence
  Description of Artificial Sequence: Synthetic oligonucleotide
ucaucuacggauucacuua

SEQ ID NO: 779991 - RNA, 19 nt, Artificial Sequence
  Description of Artificial Sequence: Synthetic oligonucleotide
ggaaaauucuguauguuac

SEQ ID NO: 779992 - RNA, 19 nt, Artificial Sequence
  Description of Artificial Sequence: Synthetic oligonucleotide
ucugaucuagauacagaaa

SEQ ID NO: 779993 - RNA, 19 nt, Artificial Sequence
  Description of Artificial Sequence: Synthetic oligonucleotide
gacuguuauccuuuguauc

SEQ ID NO: 779994 - RNA, 19 nt, Artificial Sequence
  Description of Artificial Sequence: Synthetic oligonucleotide
uccacuguuucuccuaauc

SEQ ID NO: 779995 - RNA, 19 nt, Artificial Sequence
  Description of Artificial Sequence: Synthetic oligonucleotide
aguagagguagcuccaaau

SEQ ID NO: 779996 - RNA, 19 nt, Artificial Sequence
  Description of Artificial Sequence: Synthetic oligonucleotide
aagcuaucugccaaacaag

SEQ ID NO: 779997 - RNA, 19 nt, Artificial Sequence
  Description of Artificial Sequence: Synthetic oligonucleotide
aacugcaaaccgaucugac

SEQ ID NO: 779998 - RNA, 19 nt, Artificial Sequence
  Description of Artificial Sequence: Synthetic oligonucleotide
ucuaaaagagaaggugaga

SEQ ID NO: 779999 - RNA, 19 nt, Artificial Sequence
  Description of Artificial Sequence: Synthetic oligonucleotide
acguuggguaacugcaaac

SEQ ID NO: 780000 - RNA, 19 nt, Artificial Sequence
  Description of Artificial Sequence: Synthetic oligonucleotide
uuauuguuaugucuccauu

SEQ ID NO: 780001 - RNA, 19 nt, Artificial Sequence
  Description of Artificial Sequence: Synthetic oligonucleotide
ucauuggaaaaggaagaga

SEQ ID NO: 780002 - RNA, 19 nt, Artificial Sequence
  Description of Artificial Sequence: Synthetic oligonucleotide
cugauuuugaccuagcuuu

SEQ ID NO: 780003 - RNA, 19 nt, Artificial Sequence
  Description of Artificial Sequence: Synthetic oligonucleotide
aggagaugagacccgagca

SEQ ID NO: 780004 - RNA, 19 nt, Artificial Sequence
  Description of Artificial Sequence: Synthetic oligonucleotide
uacaugugugcccaagcaa

SEQ ID NO: 780005 - RNA, 19 nt, Artificial Sequence
  Description of Artificial Sequence: Synthetic oligonucleotide
guaucugcuuauuaggaaa

SEQ ID NO: 780006 - RNA, 19 nt, Artificial Sequence
  Description of Artificial Sequence: Synthetic oligonucleotide
auaugaggaaaauucugua

SEQ ID NO: 780007 - RNA, 19 nt, Artificial Sequence
  Description of Artificial Sequence: Synthetic oligonucleotide
gaaaucggugucgugagca

SEQ ID NO: 780008 - RNA, 19 nt, Artificial Sequence
  Description of Artificial Sequence: Synthetic oligonucleotide
ccuugcuuacuucagaccc

SEQ ID NO: 780009 - RNA, 19 nt, Artificial Sequence
  Description of Artificial Sequence: Synthetic oligonucleotide
cuugacucuaucuuguuua

SEQ ID NO: 780010 - RNA, 19 nt, Artificial Sequence
  Description of Artificial Sequence: Synthetic oligonucleotide
ucuuuugggacgagggcaa

SEQ ID NO: 780011 - RNA, 19 nt, Artificial Sequence
  Description of Artificial Sequence: Synthetic oligonucleotide
aauguacaguccaugucca

SEQ ID NO: 780012 - RNA, 19 nt, Artificial Sequence
  Description of Artificial Sequence: Synthetic oligonucleotide
uaaaaggagcugucuucag

SEQ ID NO: 780013 - RNA, 19 nt, Artificial Sequence
  Description of Artificial Sequence: Synthetic oligonucleotide
cucugaucuagauacagaa

SEQ ID NO: 780014 - RNA, 19 nt, Artificial Sequence
  Description of Artificial Sequence: Synthetic oligonucleotide
uguuguccgaucaaacauu

SEQ ID NO: 780015 - RNA, 19 nt, Artificial Sequence
  Description of Artificial Sequence: Synthetic oligonucleotide
aaucggugucgugagcagg

SEQ ID NO: 780016 - RNA, 19 nt, Artificial Sequence
  Description of Artificial Sequence: Synthetic oligonucleotide
acucuacagggauuuaacu

SEQ ID NO: 780017 - RNA, 19 nt, Artificial Sequence
  Description of Artificial Sequence: Synthetic oligonucleotide
gaucuagauacagaaaugu

SEQ ID NO: 780018 - RNA, 19 nt, Artificial Sequence
  Description of Artificial Sequence: Synthetic oligonucleotide
gacaauucuucauuuggua

SEQ ID NO: 780019 - RNA, 19 nt, Artificial Sequence
  Description of Artificial Sequence: Synthetic oligonucleotide
gaaaagagcauuguccucu

SEQ ID NO: 780020 - RNA, 19 nt, Artificial Sequence
  Description of Artificial Sequence: Synthetic oligonucleotide
acaucuugguuguuuggca

SEQ ID NO: 780021 - RNA, 19 nt, Artificial Sequence
  Description of Artificial Sequence: Synthetic oligonucleotide
caucuagguccucuguucc

SEQ ID NO: 780022 - RNA, 19 nt, Artificial Sequence
  Description of Artificial Sequence: Synthetic oligonucleotide
agcgaaaucggugucguga

SEQ ID NO: 780023 - RNA, 19 nt, Artificial Sequence
  Description of Artificial Sequence: Synthetic oligonucleotide
agauuaugaugugugaaaa

SEQ ID NO: 780024 - RNA, 19 nt, Artificial Sequence
  Description of Artificial Sequence: Synthetic oligonucleotide
aagaucggcucccgggucu

SEQ ID NO: 780025 - RNA, 19 nt, Artificial Sequence
  Description of Artificial Sequence: Synthetic oligonucleotide
uuugggacgagggcaaaga

SEQ ID NO: 780026 - RNA, 19 nt, Artificial Sequence
  Description of Artificial Sequence: Synthetic oligonucleotide
guuccuugccuuuuggaga

SEQ ID NO: 780027 - RNA, 19 nt, Artificial Sequence
  Description of Artificial Sequence: Synthetic oligonucleotide
uaauaagcaggccccgcuc

SEQ ID NO: 780028 - RNA, 19 nt, Artificial Sequence
  Description of Artificial Sequence: Synthetic oligonucleotide
uaaucgugaaugacuguua

SEQ ID NO: 780029 - RNA, 19 nt, Artificial Sequence
  Description of Artificial Sequence: Synthetic oligonucleotide
gcuuguacaaccuuggugu

SEQ ID NO: 780030 - RNA, 19 nt, Artificial Sequence
  Description of Artificial Sequence: Synthetic oligonucleotide
gaaggugagaaacuuguau

SEQ ID NO: 780031 - RNA, 19 nt, Artificial Sequence
  Description of Artificial Sequence: Synthetic oligonucleotide
uguuucuccuaaucgugaa

SEQ ID NO: 780032 - RNA, 19 nt, Artificial Sequence
  Description of Artificial Sequence: Synthetic oligonucleotide
guauguuacuuucucucuc

SEQ ID NO: 780033 - RNA, 19 nt, Artificial Sequence
  Description of Artificial Sequence: Synthetic oligonucleotide
gguguucagacucuucuug

SEQ ID NO: 780034 - RNA, 19 nt, Artificial Sequence
  Description of Artificial Sequence: Synthetic oligonucleotide
caucuacggauucacuuac

SEQ ID NO: 780035 - RNA, 19 nt, Artificial Sequence
  Description of Artificial Sequence: Synthetic oligonucleotide
gacgagggcaaagaucaag

SEQ ID NO: 780036 - RNA, 19 nt, Artificial Sequence
  Description of Artificial Sequence: Synthetic oligonucleotide
uccugugagcacagagggg

SEQ ID NO: 780037 - RNA, 19 nt, Artificial Sequence
  Description of Artificial Sequence: Synthetic oligonucleotide
ugacuggcuaaugaccuug

SEQ ID NO: 780038 - RNA, 19 nt, Artificial Sequence
  Description of Artificial Sequence: Synthetic oligonucleotide
agggguuuugaagacaggu

SEQ ID NO: 780039 - RNA, 19 nt, Artificial Sequence
  Description of Artificial Sequence: Synthetic oligonucleotide
uugaccuagcuuucucuga

SEQ ID NO: 780040 - RNA, 19 nt, Artificial Sequence
  Description of Artificial Sequence: Synthetic oligonucleotide
cugaucuagauacagaaau

SEQ ID NO: 780041 - RNA, 19 nt, Artificial Sequence
  Description of Artificial Sequence: Synthetic oligonucleotide
caagcucacauccuccaug

SEQ ID NO: 780042 - RNA, 19 nt, Artificial Sequence
  Description of Artificial Sequence: Synthetic oligonucleotide
uccucugauuuugaccuag

SEQ ID NO: 780043 - RNA, 19 nt, Artificial Sequence
  Description of Artificial Sequence: Synthetic oligonucleotide
agggacuuuguuuuagcaa

SEQ ID NO: 780044 - RNA, 19 nt, Artificial Sequence
  Description of Artificial Sequence: Synthetic oligonucleotide
uacagggauuuaacugaag

SEQ ID NO: 780045 - RNA, 19 nt, Artificial Sequence
  Description of Artificial Sequence: Synthetic oligonucleotide
cugcauaguaaauuucaca

SEQ ID NO: 780046 - RNA, 19 nt, Artificial Sequence
  Description of Artificial Sequence: Synthetic oligonucleotide
ggaaaugacuggcuaauga

SEQ ID NO: 780047 - RNA, 19 nt, Artificial Sequence
  Description of Artificial Sequence: Synthetic oligonucleotide
uuccuuacaugugugccca

SEQ ID NO: 780048 - RNA, 19 nt, Artificial Sequence
  Description of Artificial Sequence: Synthetic oligonucleotide
ugucacuaaagagauccuc

SEQ ID NO: 780049 - RNA, 19 nt, Artificial Sequence
  Description of Artificial Sequence: Synthetic oligonucleotide
agaacugaugcaagcucac

SEQ ID NO: 780050 - RNA, 19 nt, Artificial Sequence
  Description of Artificial Sequence: Synthetic oligonucleotide
ggcaccaaguauuuaucag

SEQ ID NO: 780051 - RNA, 19 nt, Artificial Sequence
  Description of Artificial Sequence: Synthetic oligonucleotide
uucucuugacguuggguaa

SEQ ID NO: 780052 - RNA, 19 nt, Artificial Sequence
  Description of Artificial Sequence: Synthetic oligonucleotide
ugagaaagaucggcucccg

SEQ ID NO: 780053 - RNA, 19 nt, Artificial Sequence
  Description of Artificial Sequence: Synthetic oligonucleotide
uguaaccccuuuccagaca

SEQ ID NO: 780054 - RNA, 19 nt, Artificial Sequence
  Description of Artificial Sequence: Synthetic oligonucleotide
ugggacgagggcaaagauc

SEQ ID NO: 780055 - RNA, 19 nt, Artificial Sequence
  Description of Artificial Sequence: Synthetic oligonucleotide
uaugaucacuacugcccug

SEQ ID NO: 780056 - RNA, 19 nt, Artificial Sequence
  Description of Artificial Sequence: Synthetic oligonucleotide
uaacugcaaaccgaucuga

SEQ ID NO: 780057 - RNA, 19 nt, Artificial Sequence
  Description of Artificial Sequence: Synthetic oligonucleotide
ugguuguuuggcagggacu

SEQ ID NO: 780058 - RNA, 19 nt, Artificial Sequence
  Description of Artificial Sequence: Synthetic oligonucleotide
cuucacuacuucuugcaga

SEQ ID NO: 780059 - RNA, 19 nt, Artificial Sequence
  Description of Artificial Sequence: Synthetic oligonucleotide
uaggaaaugacuggcuaau

SEQ ID NO: 780060 - RNA, 19 nt, Artificial Sequence
  Description of Artificial Sequence: Synthetic oligonucleotide
uauggcuccacaagugcuu

SEQ ID NO: 780061 - RNA, 19 nt, Artificial Sequence
  Description of Artificial Sequence: Synthetic oligonucleotide
ggagaugagacccgagcag

SEQ ID NO: 780062 - RNA, 19 nt, Artificial Sequence
  Description of Artificial Sequence: Synthetic oligonucleotide
aggcaccaaguauuuauca

SEQ ID NO: 780063 - RNA, 19 nt, Artificial Sequence
  Description of Artificial Sequence: Synthetic oligonucleotide
acauuguaagggugccguc

SEQ ID NO: 780064 - RNA, 19 nt, Artificial Sequence
  Description of Artificial Sequence: Synthetic oligonucleotide
augugugaaaagagcauug

SEQ ID NO: 780065 - RNA, 19 nt, Artificial Sequence
  Description of Artificial Sequence: Synthetic oligonucleotide
ucccagaaauucucuggug

SEQ ID NO: 780066 - RNA, 19 nt, Artificial Sequence
  Description of Artificial Sequence: Synthetic oligonucleotide
ggugucgugagcaggaagc

SEQ ID NO: 780067 - RNA, 19 nt, Artificial Sequence
  Description of Artificial Sequence: Synthetic oligonucleotide
auacugagaaagaucggcu

SEQ ID NO: 780068 - RNA, 19 nt, Artificial Sequence
  Description of Artificial Sequence: Synthetic oligonucleotide
ugagacccgagcaguaaau

SEQ ID NO: 780069 - RNA, 19 nt, Artificial Sequence
  Description of Artificial Sequence: Synthetic oligonucleotide
uuuugggacgagggcaaag

SEQ ID NO: 780070 - RNA, 19 nt, Artificial Sequence
  Description of Artificial Sequence: Synthetic oligonucleotide
agagaaccaguauccuuca

SEQ ID NO: 780071 - RNA, 19 nt, Artificial Sequence
  Description of Artificial Sequence: Synthetic oligonucleotide
cgagcaguaaauucuuugg

SEQ ID NO: 780072 - RNA, 19 nt, Artificial Sequence
  Description of Artificial Sequence: Synthetic oligonucleotide
ucauguguuguccgaucaa

SEQ ID NO: 780073 - RNA, 19 nt, Artificial Sequence
  Description of Artificial Sequence: Synthetic oligonucleotide
uccccaagagggcuuguac

SEQ ID NO: 780074 - RNA, 19 nt, Artificial Sequence
  Description of Artificial Sequence: Synthetic oligonucleotide
guauccuucaugucacuaa

SEQ ID NO: 780075 - RNA, 19 nt, Artificial Sequence
  Description of Artificial Sequence: Synthetic oligonucleotide
ucaccauguauguuugguu

SEQ ID NO: 780076 - RNA, 19 nt, Artificial Sequence
  Description of Artificial Sequence: Synthetic oligonucleotide
aguauuuaucagaaauaau

SEQ ID NO: 780077 - RNA, 19 nt, Artificial Sequence
  Description of Artificial Sequence: Synthetic oligonucleotide
ugaccaauguacaguccau

SEQ ID NO: 780078 - RNA, 19 nt, Artificial Sequence
  Description of Artificial Sequence: Synthetic oligonucleotide
ugcucaucuacggauucac

SEQ ID NO: 780079 - RNA, 19 nt, Artificial Sequence
  Description of Artificial Sequence: Synthetic oligonucleotide
guagagguagcuccaaaua

SEQ ID NO: 780080 - RNA, 19 nt, Artificial Sequence
  Description of Artificial Sequence: Synthetic oligonucleotide
uuggcacaagagaaccagu

SEQ ID NO: 780081 - RNA, 19 nt, Artificial Sequence
  Description of Artificial Sequence: Synthetic oligonucleotide
agggcuuguacaaccuugg

SEQ ID NO: 780082 - RNA, 19 nt, Artificial Sequence
  Description of Artificial Sequence: Synthetic oligonucleotide
gcuuacuucagacccaaga

SEQ ID NO: 780083 - RNA, 19 nt, Artificial Sequence
  Description of Artificial Sequence: Synthetic oligonucleotide
ucugccaaacaagauucau

SEQ ID NO: 780084 - RNA, 19 nt, Artificial Sequence
  Description of Artificial Sequence: Synthetic oligonucleotide
cgaacuaccucaauaugag

SEQ ID NO: 780085 - RNA, 19 nt, Artificial Sequence
  Description of Artificial Sequence: Synthetic oligonucleotide
cagggauuuaacugaagaa

SEQ ID NO: 780086 - RNA, 19 nt, Artificial Sequence
  Description of Artificial Sequence: Synthetic oligonucleotide
acaugugugcccaagcaau

SEQ ID NO: 780087 - RNA, 19 nt, Artificial Sequence
  Description of Artificial Sequence: Synthetic oligonucleotide
guaagggugccgucuuuug

SEQ ID NO: 780088 - RNA, 19 nt, Artificial Sequence
  Description of Artificial Sequence: Synthetic oligonucleotide
auagcgaaaucggugucgu

SEQ ID NO: 780089 - RNA, 19 nt, Artificial Sequence
  Description of Artificial Sequence: Synthetic oligonucleotide
cuucauguguuguccgauc

SEQ ID NO: 780090 - RNA, 19 nt, Artificial Sequence
  Description of Artificial Sequence: Synthetic oligonucleotide
caaaacagguuugggagca

SEQ ID NO: 780091 - RNA, 19 nt, Artificial Sequence
  Description of Artificial Sequence: Synthetic oligonucleotide
aacuuguauucaaacccaa

SEQ ID NO: 780092 - RNA, 19 nt, Artificial Sequence
  Description of Artificial Sequence: Synthetic oligonucleotide
cuacauuguaagggugccg

SEQ ID NO: 780093 - RNA, 19 nt, Artificial Sequence
  Description of Artificial Sequence: Synthetic oligonucleotide
cuuuacgaccugaggaaga

SEQ ID NO: 780094 - RNA, 19 nt, Artificial Sequence
  Description of Artificial Sequence: Synthetic oligonucleotide
gaaagaucggcucccgggu

SEQ ID NO: 780095 - RNA, 19 nt, Artificial Sequence
  Description of Artificial Sequence: Synthetic oligonucleotide
agcaacucuacagggauuu

SEQ ID NO: 780096 - RNA, 19 nt, Artificial Sequence
  Description of Artificial Sequence: Synthetic oligonucleotide
gacccaagauuaugaugug

SEQ ID NO: 780097 - RNA, 19 nt, Artificial Sequence
  Description of Artificial Sequence: Synthetic oligonucleotide
acaguuucacugaccaaug

SEQ ID NO: 780098 - RNA, 19 nt, Artificial Sequence
  Description of Artificial Sequence: Synthetic oligonucleotide
ucucuugacguuggguaac

SEQ ID NO: 780099 - RNA, 19 nt, Artificial Sequence
  Description of Artificial Sequence: Synthetic oligonucleotide
agcauuguccucugauuuu

SEQ ID NO: 780100 - RNA, 19 nt, Artificial Sequence
  Description of Artificial Sequence: Synthetic oligonucleotide
guuugggagcaguguacug

SEQ ID NO: 780101 - RNA, 19 nt, Artificial Sequence
  Description of Artificial Sequence: Synthetic oligonucleotide
auauugucaaagggcacau

SEQ ID NO: 780102 - RNA, 19 nt, Artificial Sequence
  Description of Artificial Sequence: Synthetic oligonucleotide
ccgucuuuugggacgaggg

SEQ ID NO: 780103 - RNA, 19 nt, Artificial Sequence
  Description of Artificial Sequence: Synthetic oligonucleotide
gacguuggguaacugcaaa

SEQ ID NO: 780104 - RNA, 19 nt, Artificial Sequence
  Description of Artificial Sequence: Synthetic oligonucleotide
uugggacgagggcaaagau

SEQ ID NO: 780105 - RNA, 19 nt, Artificial Sequence
  Description of Artificial Sequence: Synthetic oligonucleotide
auacaggagaugagacccg

SEQ ID NO: 780106 - RNA, 19 nt, Artificial Sequence
  Description of Artificial Sequence: Synthetic oligonucleotide
augagacccgagcaguaaa

SEQ ID NO: 780107 - RNA, 19 nt, Artificial Sequence
  Description of Artificial Sequence: Synthetic oligonucleotide
cuccuaaucgugaaugacu

SEQ ID NO: 780108 - RNA, 19 nt, Artificial Sequence
  Description of Artificial Sequence: Synthetic oligonucleotide
gaucacuacugcccugcuc

SEQ ID NO: 780109 - RNA, 19 nt, Artificial Sequence
  Description of Artificial Sequence: Synthetic oligonucleotide
ugucgugagcaggaagcca

SEQ ID NO: 780110 - RNA, 19 nt, Artificial Sequence
  Description of Artificial Sequence: Synthetic oligonucleotide
guguuguccgaucaaacau

SEQ ID NO: 780111 - RNA, 19 nt, Artificial Sequence
  Description of Artificial Sequence: Synthetic oligonucleotide
gaugugugaaaagagcauu

SEQ ID NO: 780112 - RNA, 19 nt, Artificial Sequence
  Description of Artificial Sequence: Synthetic oligonucleotide
uguaagggugccgucuuuu

SEQ ID NO: 780113 - RNA, 19 nt, Artificial Sequence
  Description of Artificial Sequence: Synthetic oligonucleotide
acacuacauuguaagggug

SEQ ID NO: 780114 - RNA, 19 nt, Artificial Sequence
  Description of Artificial Sequence: Synthetic oligonucleotide
accaaagaucaauguuuau

SEQ ID NO: 780115 - RNA, 19 nt, Artificial Sequence
  Description of Artificial Sequence: Synthetic oligonucleotide
augucugaguagaaggaaa

SEQ ID NO: 780116 - RNA, 19 nt, Artificial Sequence
  Description of Artificial Sequence: Synthetic oligonucleotide
gcgaaaucggugucgugag

SEQ ID NO: 780117 - RNA, 19 nt, Artificial Sequence
  Description of Artificial Sequence: Synthetic oligonucleotide
uuguacaaccuugguguuc

SEQ ID NO: 780118 - RNA, 19 nt, Artificial Sequence
  Description of Artificial Sequence: Synthetic oligonucleotide
gagcauuguccucugauuu

SEQ ID NO: 780119 - RNA, 19 nt, Artificial Sequence
  Description of Artificial Sequence: Synthetic oligonucleotide
acuggcuaaugaccuugcu

SEQ ID NO: 780120 - RNA, 19 nt, Artificial Sequence
  Description of Artificial Sequence: Synthetic oligonucleotide
ccgaacuaccucaauauga

SEQ ID NO: 780121 - RNA, 19 nt, Artificial Sequence
  Description of Artificial Sequence: Synthetic oligonucleotide
cagggacuuuguuuuagca

SEQ ID NO: 780122 - RNA, 19 nt, Artificial Sequence
  Description of Artificial Sequence: Synthetic oligonucleotide
ugaucacuacugcccugcu

SEQ ID NO: 780123 - RNA, 19 nt, Artificial Sequence
  Description of Artificial Sequence: Synthetic oligonucleotide
cuuauccaucacauggucu

SEQ ID NO: 780124 - RNA, 19 nt, Artificial Sequence
  Description of Artificial Sequence: Synthetic oligonucleotide
acuccaacaucuagguccu

SEQ ID NO: 780125 - RNA, 19 nt, Artificial Sequence
  Description of Artificial Sequence: Synthetic oligonucleotide
aucuagauacagaaauguu

SEQ ID NO: 780126 - RNA, 19 nt, Artificial Sequence
  Description of Artificial Sequence: Synthetic oligonucleotide
gacccgagcaguaaauucu

SEQ ID NO: 780127 - RNA, 19 nt, Artificial Sequence
  Description of Artificial Sequence: Synthetic oligonucleotide
uuacgaccugaggaagagc

SEQ ID NO: 780128 - RNA, 19 nt, Artificial Sequence
  Description of Artificial Sequence: Synthetic oligonucleotide
ucuagguccucuguuccuu

SEQ ID NO: 780129 - RNA, 19 nt, Artificial Sequence
  Description of Artificial Sequence: Synthetic oligonucleotide
ggcuuuacgaccugaggaa

SEQ ID NO: 780130 - RNA, 19 nt, Artificial Sequence
  Description of Artificial Sequence: Synthetic oligonucleotide
cugccaaacaagauucaua

SEQ ID NO: 780131 - RNA, 19 nt, Artificial Sequence
  Description of Artificial Sequence: Synthetic oligonucleotide
aguauccuucaugucacua

SEQ ID NO: 780132 - RNA, 19 nt, Artificial Sequence
  Description of Artificial Sequence: Synthetic oligonucleotide
aaccgaucugacaggucca

SEQ ID NO: 780133 - RNA, 19 nt, Artificial Sequence
  Description of Artificial Sequence: Synthetic oligonucleotide
ucggcacuuuccugugagc

SEQ ID NO: 780134 - RNA, 19 nt, Artificial Sequence
  Description of Artificial Sequence: Synthetic oligonucleotide
gacuggcuaaugaccuugc

SEQ ID NO: 780135 - RNA, 19 nt, Artificial Sequence
  Description of Artificial Sequence: Synthetic oligonucleotide
gguacuucugcccugguuu

SEQ ID NO: 780136 - RNA, 19 nt, Artificial Sequence
  Description of Artificial Sequence: Synthetic oligonucleotide
cucaucuacggauucacuu

SEQ ID NO: 780137 - RNA, 19 nt, Artificial Sequence
  Description of Artificial Sequence: Synthetic oligonucleotide
cuacagggauuuaacugaa

SEQ ID NO: 780138 - RNA, 19 nt, Artificial Sequence
  Description of Artificial Sequence: Synthetic oligonucleotide
ucgugagcaggaagccaac

SEQ ID NO: 780139 - RNA, 19 nt, Artificial Sequence
  Description of Artificial Sequence: Synthetic oligonucleotide
ggaagagccccugggaaug

SEQ ID NO: 780140 - RNA, 19 nt, Artificial Sequence
  Description of Artificial Sequence: Synthetic oligonucleotide
aggcuuugcuacaggacug

SEQ ID NO: 780141 - RNA, 19 nt, Artificial Sequence
  Description of Artificial Sequence: Synthetic oligonucleotide
ucucggcacuuuccuguga

SEQ ID NO: 780142 - RNA, 19 nt, Artificial Sequence
  Description of Artificial Sequence: Synthetic oligonucleotide
ggcuucaaaaccucauaaa

SEQ ID NO: 780143 - RNA, 19 nt, Artificial Sequence
  Description of Artificial Sequence: Synthetic oligonucleotide
ucuugacguuggguaacug

SEQ ID NO: 780144 - RNA, 19 nt, Artificial Sequence
  Description of Artificial Sequence: Synthetic oligonucleotide
caaaccgaucugacagguc

SEQ ID NO: 780145 - RNA, 19 nt, Artificial Sequence
  Description of Artificial Sequence: Synthetic oligonucleotide
gaugagacccgagcaguaa

SEQ ID NO: 780146 - RNA, 19 nt, Artificial Sequence
  Description of Artificial Sequence: Synthetic oligonucleotide
gucgugagcaggaagccaa

SEQ ID NO: 780147 - RNA, 19 nt, Artificial Sequence
  Description of Artificial Sequence: Synthetic oligonucleotide
cuaauaagcaggccccgcu

SEQ ID NO: 780148 - RNA, 19 nt, Artificial Sequence
  Description of Artificial Sequence: Synthetic oligonucleotide
agggugccgucuuuuggga

SEQ ID NO: 780149 - RNA, 19 nt, Artificial Sequence
  Description of Artificial Sequence: Synthetic oligonucleotide
ugacucuaucuuguuuauc

SEQ ID NO: 780150 - RNA, 19 nt, Artificial Sequence
  Description of Artificial Sequence: Synthetic oligonucleotide
accgaucugacagguccag

SEQ ID NO: 780151 - RNA, 19 nt, Artificial Sequence
  Description of Artificial Sequence: Synthetic oligonucleotide
gaacugaugcaagcucaca

SEQ ID NO: 780152 - RNA, 19 nt, Artificial Sequence
  Description of Artificial Sequence: Synthetic oligonucleotide
cuaaucgugaaugacuguu

SEQ ID NO: 780153 - RNA, 19 nt, Artificial Sequence
  Description of Artificial Sequence: Synthetic oligonucleotide
gugucgugagcaggaagcc

SEQ ID NO: 780154 - RNA, 19 nt, Artificial Sequence
  Description of Artificial Sequence: Synthetic oligonucleotide
cugucucggcacuuuccug

SEQ ID NO: 780155 - RNA, 19 nt, Artificial Sequence
  Description of Artificial Sequence: Synthetic oligonucleotide
ucggcucccgggucuacac

SEQ ID NO: 780156 - RNA, 19 nt, Artificial Sequence
  Description of Artificial Sequence: Synthetic oligonucleotide
gaagaaucuuuggcuaaua

SEQ ID NO: 780157 - RNA, 19 nt, Artificial Sequence
  Description of Artificial Sequence: Synthetic oligonucleotide
gcuuuacgaccugaggaag

SEQ ID NO: 780158 - RNA, 19 nt, Artificial Sequence
  Description of Artificial Sequence: Synthetic oligonucleotide
gcagggacuuuguuuuagc

SEQ ID NO: 780159 - RNA, 19 nt, Artificial Sequence
  Description of Artificial Sequence: Synthetic oligonucleotide
cuggcauaucugcauagua

SEQ ID NO: 780160 - RNA, 19 nt, Artificial Sequence
  Description of Artificial Sequence: Synthetic oligonucleotide
auaguagagguagcuccaa

SEQ ID NO: 780161 - RNA, 19 nt, Artificial Sequence
  Description of Artificial Sequence: Synthetic oligonucleotide
agguacuucugcccugguu

SEQ ID NO: 780162 - RNA, 19 nt, Artificial Sequence
  Description of Artificial Sequence: Synthetic oligonucleotide
gucacuuguuuaaacuugu

SEQ ID NO: 780163 - RNA, 19 nt, Artificial Sequence
  Description of Artificial Sequence: Synthetic oligonucleotide
ggcacuuuccugugagcac

SEQ ID NO: 780164 - RNA, 19 nt, Artificial Sequence
  Description of Artificial Sequence: Synthetic oligonucleotide
uagcgaaaucggugucgug

SEQ ID NO: 780165 - RNA, 19 nt, Artificial Sequence
  Description of Artificial Sequence: Synthetic oligonucleotide
ggcuaauaagcaggccccg

SEQ ID NO: 780166 - RNA, 19 nt, Artificial Sequence
  Description of Artificial Sequence: Synthetic oligonucleotide
caccauguauguuugguuu

SEQ ID NO: 780167 - RNA, 19 nt, Artificial Sequence
  Description of Artificial Sequence: Synthetic oligonucleotide
uuguaagggugccgucuuu

SEQ ID NO: 780168 - RNA, 19 nt, Artificial Sequence
  Description of Artificial Sequence: Synthetic oligonucleotide
cuaccucaauaugaggaaa

SEQ ID NO: 780169 - RNA, 19 nt, Artificial Sequence
  Description of Artificial Sequence: Synthetic oligonucleotide
cagaaauaaugucuuuaau

SEQ ID NO: 780170 - RNA, 19 nt, Artificial Sequence
  Description of Artificial Sequence: Synthetic oligonucleotide
ggcagggacuuuguuuuag

SEQ ID NO: 780171 - RNA, 19 nt, Artificial Sequence
  Description of Artificial Sequence: Synthetic oligonucleotide
cacuaaagagauccucugu

SEQ ID NO: 780172 - RNA, 19 nt, Artificial Sequence
  Description of Artificial Sequence: Synthetic oligonucleotide
ucccgggucuacacuccac

SEQ ID NO: 780173 - RNA, 19 nt, Artificial Sequence
  Description of Artificial Sequence: Synthetic oligonucleotide
cauuguaagggugccgucu

SEQ ID NO: 780174 - RNA, 19 nt, Artificial Sequence
  Description of Artificial Sequence: Synthetic oligonucleotide
gcuaauaagcaggccccgc

SEQ ID NO: 780175 - RNA, 19 nt, Artificial Sequence
  Description of Artificial Sequence: Synthetic oligonucleotide
ccgcucaaggcuuuacgac

SEQ ID NO: 780176 - RNA, 19 nt, Artificial Sequence
  Description of Artificial Sequence: Synthetic oligonucleotide
agccaacuucuuuucucuu

SEQ ID NO: 780177 - RNA, 19 nt, Artificial Sequence
  Description of Artificial Sequence: Synthetic oligonucleotide
cucugauuuugaccuagcu

SEQ ID NO: 780178 - RNA, 19 nt, Artificial Sequence
  Description of Artificial Sequence: Synthetic oligonucleotide
augugugcccaagcaauuu

SEQ ID NO: 780179 - RNA, 19 nt, Artificial Sequence
  Description of Artificial Sequence: Synthetic oligonucleotide
cauuuccguggcucuucuc

SEQ ID NO: 780180 - RNA, 19 nt, Artificial Sequence
  Description of Artificial Sequence: Synthetic oligonucleotide
gcacuuuccugugagcaca

SEQ ID NO: 780181 - RNA, 19 nt, Artificial Sequence
  Description of Artificial Sequence: Synthetic oligonucleotide
agcucacauccuccaugga

SEQ ID NO: 780182 - RNA, 19 nt, Artificial Sequence
  Description of Artificial Sequence: Synthetic oligonucleotide
caagaucuuccuugaugua

SEQ ID NO: 780183 - RNA, 19 nt, Artificial Sequence
  Description of Artificial Sequence: Synthetic oligonucleotide
aucuacggauucacuuaca

SEQ ID NO: 780184 - RNA, 19 nt, Artificial Sequence
  Description of Artificial Sequence: Synthetic oligonucleotide
ggcucccgggucuacacuc

SEQ ID NO: 780185 - RNA, 19 nt, Artificial Sequence
  Description of Artificial Sequence: Synthetic oligonucleotide
cuggcuaaugaccuugcuu

SEQ ID NO: 780186 - RNA, 19 nt, Artificial Sequence
  Description of Artificial Sequence: Synthetic oligonucleotide
acggauucacuuacauuuu

SEQ ID NO: 780187 - RNA, 19 nt, Artificial Sequence
  Description of Artificial Sequence: Synthetic oligonucleotide
ccuuacaugugugcccaag

SEQ ID NO: 780188 - RNA, 19 nt, Artificial Sequence
  Description of Artificial Sequence: Synthetic oligonucleotide
accuugguguucagacucu

SEQ ID NO: 780189 - RNA, 19 nt, Artificial Sequence
  Description of Artificial Sequence: Synthetic oligonucleotide
cuauuacaguaacauccau

SEQ ID NO: 780190 - RNA, 19 nt, Artificial Sequence
  Description of Artificial Sequence: Synthetic oligonucleotide
guuguccgaucaaacauuu

SEQ ID NO: 780191 - RNA, 19 nt, Artificial Sequence
  Description of Artificial Sequence: Synthetic oligonucleotide
cgaccugaggaagagcccc

SEQ ID NO: 780192 - RNA, 19 nt, Artificial Sequence
  Description of Artificial Sequence: Synthetic oligonucleotide
gcauaguaaauuucacauu

SEQ ID NO: 780193 - RNA, 19 nt, Artificial Sequence
  Description of Artificial Sequence: Synthetic oligonucleotide
cuacggauucacuuacauu

SEQ ID NO: 780194 - RNA, 19 nt, Artificial Sequence
  Description of Artificial Sequence: Synthetic oligonucleotide
gacaccucugaagaaucuu

SEQ ID NO: 780195 - RNA, 19 nt, Artificial Sequence
  Description of Artificial Sequence: Synthetic oligonucleotide
ccccgcucaaggcuuuacg

SEQ ID NO: 780196 - RNA, 19 nt, Artificial Sequence
  Description of Artificial Sequence: Synthetic oligonucleotide
gccuuuuggagaaaacacu

SEQ ID NO: 780197 - RNA, 19 nt, Artificial Sequence
  Description of Artificial Sequence: Synthetic oligonucleotide
cccgcucaaggcuuuacga

SEQ ID NO: 780198 - RNA, 19 nt, Artificial Sequence
  Description of Artificial Sequence: Synthetic oligonucleotide
acccgagcaguaaauucuu

SEQ ID NO: 780199 - RNA, 19 nt, Artificial Sequence
  Description of Artificial Sequence: Synthetic oligonucleotide
ggggaagcuaucugccaaa

SEQ ID NO: 780200 - RNA, 19 nt, Artificial Sequence
  Description of Artificial Sequence: Synthetic oligonucleotide
acuuuccugugagcacaga

SEQ ID NO: 780201 - RNA, 19 nt, Artificial Sequence
  Description of Artificial Sequence: Synthetic oligonucleotide
ucggugucgugagcaggaa

SEQ ID NO: 780202 - RNA, 19 nt, Artificial Sequence
  Description of Artificial Sequence: Synthetic oligonucleotide
ccugugagcacagaggggu

SEQ ID NO: 780203 - RNA, 19 nt, Artificial Sequence
  Description of Artificial Sequence: Synthetic oligonucleotide
cuuugccucccagugauuu

SEQ ID NO: 780204 - RNA, 19 nt, Artificial Sequence
  Description of Artificial Sequence: Synthetic oligonucleotide
caguuucacugaccaaugu

SEQ ID NO: 780205 - RNA, 19 nt, Artificial Sequence
  Description of Artificial Sequence: Synthetic oligonucleotide
ucacuacuucuugcagauu

SEQ ID NO: 780206 - RNA, 19 nt, Artificial Sequence
  Description of Artificial Sequence: Synthetic oligonucleotide
caggacaccucugaagaau

SEQ ID NO: 780207 - RNA, 19 nt, Artificial Sequence
  Description of Artificial Sequence: Synthetic oligonucleotide
ccaagagggcuuguacaac

SEQ ID NO: 780208 - RNA, 19 nt, Artificial Sequence
  Description of Artificial Sequence: Synthetic oligonucleotide
cuuguacaaccuugguguu

SEQ ID NO: 780209 - RNA, 19 nt, Artificial Sequence
  Description of Artificial Sequence: Synthetic oligonucleotide
ggcuuauccaucacauggu

SEQ ID NO: 780210 - RNA, 19 nt, Artificial Sequence
  Description of Artificial Sequence: Synthetic oligonucleotide
cgcuggcauaucugcauag

SEQ ID NO: 780211 - RNA, 19 nt, Artificial Sequence
  Description of Artificial Sequence: Synthetic oligonucleotide
gugccgucuuuugggacga

SEQ ID NO: 780212 - RNA, 19 nt, Artificial Sequence
  Description of Artificial Sequence: Synthetic oligonucleotide
gggugccgucuuuugggac

SEQ ID NO: 780213 - RNA, 19 nt, Artificial Sequence
  Description of Artificial Sequence: Synthetic oligonucleotide
gagacccgagcaguaaauu

SEQ ID NO: 780214 - RNA, 19 nt, Artificial Sequence
  Description of Artificial Sequence: Synthetic oligonucleotide
auccccaagagggcuugua

SEQ ID NO: 780215 - RNA, 19 nt, Artificial Sequence
  Description of Artificial Sequence: Synthetic oligonucleotide
gcaaaccgaucugacaggu

SEQ ID NO: 780216 - RNA, 19 nt, Artificial Sequence
  Description of Artificial Sequence: Synthetic oligonucleotide
cgaaaucggugucgugagc

SEQ ID NO: 780217 - RNA, 19 nt, Artificial Sequence
  Description of Artificial Sequence: Synthetic oligonucleotide
ugccgucuuuugggacgag

SEQ ID NO: 780218 - RNA, 19 nt, Artificial Sequence
  Description of Artificial Sequence: Synthetic oligonucleotide
guccucugauuuugaccua

SEQ ID NO: 780219 - RNA, 19 nt, Artificial Sequence
  Description of Artificial Sequence: Synthetic oligonucleotide
ccgaucugacagguccagg

SEQ ID NO: 780220 - RNA, 19 nt, Artificial Sequence
  Description of Artificial Sequence: Synthetic oligonucleotide
gaucggcucccgggucuac

SEQ ID NO: 780221 - RNA, 19 nt, Artificial Sequence
  Description of Artificial Sequence: Synthetic oligonucleotide
gcuaucugccaaacaagau

SEQ ID NO: 780222 - RNA, 19 nt, Artificial Sequence
  Description of Artificial Sequence: Synthetic oligonucleotide
agaucggcucccgggucua

SEQ ID NO: 780223 - RNA, 19 nt, Artificial Sequence
  Description of Artificial Sequence: Synthetic oligonucleotide
cggugucgugagcaggaag

SEQ ID NO: 780224 - RNA, 19 nt, Artificial Sequence
  Description of Artificial Sequence: Synthetic oligonucleotide
gagcaguguacugcauguu

SEQ ID NO: 780225 - RNA, 19 nt, Artificial Sequence
  Description of Artificial Sequence: Synthetic oligonucleotide
cuacugcccugcucaucua

SEQ ID NO: 780226 - RNA, 19 nt, Artificial Sequence
  Description of Artificial Sequence: Synthetic oligonucleotide
gggcuuguacaaccuuggu

SEQ ID NO: 780227 - RNA, 19 nt, Artificial Sequence
  Description of Artificial Sequence: Synthetic oligonucleotide
gccaaacaagauucauauu

SEQ ID NO: 780228 - RNA, 19 nt, Artificial Sequence
  Description of Artificial Sequence: Synthetic oligonucleotide
ccuaaucgugaaugacugu

SEQ ID NO: 780229 - RNA, 19 nt, Artificial Sequence
  Description of Artificial Sequence: Synthetic oligonucleotide
ggugugcuggguggaauau

SEQ ID NO: 780230 - RNA, 19 nt, Artificial Sequence
  Description of Artificial Sequence: Synthetic oligonucleotide
cuccaacaucuagguccuc

SEQ ID NO: 780231 - RNA, 19 nt, Artificial Sequence
  Description of Artificial Sequence: Synthetic oligonucleotide
gcucaucuacggauucacu

SEQ ID NO: 780232 - RNA, 19 nt, Artificial Sequence
  Description of Artificial Sequence: Synthetic oligonucleotide
cuggugugcuggguggaau

SEQ ID NO: 780233 - RNA, 19 nt, Artificial Sequence
  Description of Artificial Sequence: Synthetic oligonucleotide
agggcacaucuugguuguu

SEQ ID NO: 780234 - RNA, 19 nt, Artificial Sequence
  Description of Artificial Sequence: Synthetic oligonucleotide
gcaacucuacagggauuua

SEQ ID NO: 780235 - RNA, 19 nt, Artificial Sequence
  Description of Artificial Sequence: Synthetic oligonucleotide
gggcacaucuugguuguuu

SEQ ID NO: 780236 - RNA, 19 nt, Artificial Sequence
  Description of Artificial Sequence: Synthetic oligonucleotide
gccccgcucaaggcuuuac

SEQ ID NO: 780237 - RNA, 19 nt, Artificial Sequence
  Description of Artificial Sequence: Synthetic oligonucleotide
ccgcuggcauaucugcaua

SEQ ID NO: 780238 - RNA, 19 nt, Artificial Sequence
  Description of Artificial Sequence: Synthetic oligonucleotide
uaacacgucagucugaucc

SEQ ID NO: 780239 - RNA, 19 nt, Artificial Sequence
  Description of Artificial Sequence: Synthetic oligonucleotide
uuugagaggaugaugggag

SEQ ID NO: 780240 - RNA, 19 nt, Artificial Sequence
  Description of Artificial Sequence: Synthetic oligonucleotide
aaugaagaagucgaugccg

SEQ ID NO: 780241 - RNA, 19 nt, Artificial Sequence
  Description of Artificial Sequence: Synthetic oligonucleotide
gauaaggugguccaagaug

SEQ ID NO: 780242 - RNA, 19 nt, Artificial Sequence
  Description of Artificial Sequence: Synthetic oligonucleotide
ucuaggaagacgaugcgcu

SEQ ID NO: 780243 - RNA, 19 nt, Artificial Sequence
  Description of Artificial Sequence: Synthetic oligonucleotide
acgacaaucaccacguggc

SEQ ID NO: 780244 - RNA, 19 nt, Artificial Sequence
  Description of Artificial Sequence: Synthetic oligonucleotide
aguggaaccaguucuucuc

SEQ ID NO: 780245 - RNA, 19 nt, Artificial Sequence
  Description of Artificial Sequence: Synthetic oligonucleotide
agugacaugaccauggacu

SEQ ID NO: 780246 - RNA, 19 nt, Artificial Sequence
  Description of Artificial Sequence: Synthetic oligonucleotide
aaagucgggcggcagcccc

SEQ ID NO: 780247 - RNA, 19 nt, Artificial Sequence
  Description of Artificial Sequence: Synthetic oligonucleotide
aguguuugccgacagaagu

SEQ ID NO: 780248 - RNA, 19 nt, Artificial Sequence
  Description of Artificial Sequence: Synthetic oligonucleotide
uggucaaucaucaggugca

SEQ ID NO: 780249 - RNA, 19 nt, Artificial Sequence
  Description of Artificial Sequence: Synthetic oligonucleotide
aagugacaugaccauggac

SEQ ID NO: 780250 - RNA, 19 nt, Artificial Sequence
  Description of Artificial Sequence: Synthetic oligonucleotide
aagacgaugcgcuccuggg

SEQ ID NO: 780251 - RNA, 19 nt, Artificial Sequence
  Description of Artificial Sequence: Synthetic oligonucleotide
ucccauagagcccaggcug

SEQ ID NO: 780252 - RNA, 19 nt, Artificial Sequence
  Description of Artificial Sequence: Synthetic oligonucleotide
gaagacauacgcccucugg

SEQ ID NO: 780253 - RNA, 19 nt, Artificial Sequence
  Description of Artificial Sequence: Synthetic oligonucleotide
ugcgugucuaggaagacga

SEQ ID NO: 780254 - RNA, 19 nt, Artificial Sequence
  Description of Artificial Sequence: Synthetic oligonucleotide
gacaccgaccacuaacacg

SEQ ID NO: 780255 - RNA, 19 nt, Artificial Sequence
  Description of Artificial Sequence: Synthetic oligonucleotide
cucacaucucuucugggcg

SEQ ID NO: 780256 - RNA, 19 nt, Artificial Sequence
  Description of Artificial Sequence: Synthetic oligonucleotide
auaggugugagggagguug

SEQ ID NO: 780257 - RNA, 19 nt, Artificial Sequence
  Description of Artificial Sequence: Synthetic oligonucleotide
agugcccucaucugagccc

SEQ ID NO: 780258 - RNA, 19 nt, Artificial Sequence
  Description of Artificial Sequence: Synthetic oligonucleotide
ugugcccagacucugacau

SEQ ID NO: 780259 - RNA, 19 nt, Artificial Sequence
  Description of Artificial Sequence: Synthetic oligonucleotide
agcauaguggaaccaguuc

SEQ ID NO: 780260 - RNA, 19 nt, Artificial Sequence
  Description of Artificial Sequence: Synthetic oligonucleotide
aguccagaaagucgggcgg

SEQ ID NO: 780261 - RNA, 19 nt, Artificial Sequence
  Description of Artificial Sequence: Synthetic oligonucleotide
cuggucaaucaucaggugc

SEQ ID NO: 780262 - RNA, 19 nt, Artificial Sequence
  Description of Artificial Sequence: Synthetic oligonucleotide
ucggugaggauuguguggg

SEQ ID NO: 780263 - RNA, 19 nt, Artificial Sequence
  Description of Artificial Sequence: Synthetic oligonucleotide
gacaugaccauggacuugc

SEQ ID NO: 780264 - RNA, 19 nt, Artificial Sequence
  Description of Artificial Sequence: Synthetic oligonucleotide
agacauacgcccucugguc

SEQ ID NO: 780265 - RNA, 19 nt, Artificial Sequence
  Description of Artificial Sequence: Synthetic oligonucleotide
agaaagucgggcggcagcc

SEQ ID NO: 780266 - RNA, 19 nt, Artificial Sequence
  Description of Artificial Sequence: Synthetic oligonucleotide
uucucggugaggauugugu

SEQ ID NO: 780267 - RNA, 19 nt, Artificial Sequence
  Description of Artificial Sequence: Synthetic oligonucleotide
uuugccgacagaagugaca

SEQ ID NO: 780268 - RNA, 19 nt, Artificial Sequence
  Description of Artificial Sequence: Synthetic oligonucleotide
agcgucacuguccaugaag

SEQ ID NO: 780269 - RNA, 19 nt, Artificial Sequence
  Description of Artificial Sequence: Synthetic oligonucleotide
cacgacaaucaccacgugg

SEQ ID NO: 780270 - RNA, 19 nt, Artificial Sequence
  Description of Artificial Sequence: Synthetic oligonucleotide
gaugggaguuuucugcaug

SEQ ID NO: 780271 - RNA, 19 nt, Artificial Sequence
  Description of Artificial Sequence: Synthetic oligonucleotide
aaagcggccgaggaagcgg

SEQ ID NO: 780272 - RNA, 19 nt, Artificial Sequence
  Description of Artificial Sequence: Synthetic oligonucleotide
agguccgugaaccaguccu

SEQ ID NO: 780273 - RNA, 19 nt, Artificial Sequence
  Description of Artificial Sequence: Synthetic oligonucleotide
ugaggauugugugggacag

SEQ ID NO: 780274 - RNA, 19 nt, Artificial Sequence
  Description of Artificial Sequence: Synthetic oligonucleotide
ugguacaccggcugcgugg

SEQ ID NO: 780275 - RNA, 19 nt, Artificial Sequence
  Description of Artificial Sequence: Synthetic oligonucleotide
ucacaucucuucugggcgg

SEQ ID NO: 780276 - RNA, 19 nt, Artificial Sequence
  Description of Artificial Sequence: Synthetic oligonucleotide
ugagugacaggcguguagc

SEQ ID NO: 780277 - RNA, 19 nt, Artificial Sequence
  Description of Artificial Sequence: Synthetic oligonucleotide
aucugucguaacuuccggg

SEQ ID NO: 780278 - RNA, 19 nt, Artificial Sequence
  Description of Artificial Sequence: Synthetic oligonucleotide
aucccugauuccuuggcag

SEQ ID NO: 780279 - RNA, 19 nt, Artificial Sequence
  Description of Artificial Sequence: Synthetic oligonucleotide
acugugcccagacucugac

SEQ ID NO: 780280 - RNA, 19 nt, Artificial Sequence
  Description of Artificial Sequence: Synthetic oligonucleotide
agacaccucacaucucuuc

SEQ ID NO: 780281 - RNA, 19 nt, Artificial Sequence
  Description of Artificial Sequence: Synthetic oligonucleotide
aguuggggcagccgugccc

SEQ ID NO: 780282 - RNA, 19 nt, Artificial Sequence
  Description of Artificial Sequence: Synthetic oligonucleotide
ugccgggaggucacgagcg

SEQ ID NO: 780283 - RNA, 19 nt, Artificial Sequence
  Description of Artificial Sequence: Synthetic oligonucleotide
gaggucacgagcgugagga

SEQ ID NO: 780284 - RNA, 19 nt, Artificial Sequence
  Description of Artificial Sequence: Synthetic oligonucleotide
uguggguaguacucagugc

SEQ ID NO: 780285 - RNA, 19 nt, Artificial Sequence
  Description of Artificial Sequence: Synthetic oligonucleotide
agccauggacaucaccugg

SEQ ID NO: 780286 - RNA, 19 nt, Artificial Sequence
  Description of Artificial Sequence: Synthetic oligonucleotide
ugucguaacuuccggggac

SEQ ID NO: 780287 - RNA, 19 nt, Artificial Sequence
  Description of Artificial Sequence: Synthetic oligonucleotide
caauguagucucucucccg

SEQ ID NO: 780288 - RNA, 19 nt, Artificial Sequence
  Description of Artificial Sequence: Synthetic oligonucleotide
cugacaugguccccuacgg

SEQ ID NO: 780289 - RNA, 19 nt, Artificial Sequence
  Description of Artificial Sequence: Synthetic oligonucleotide
ugauaaggugguccaagau

SEQ ID NO: 780290 - RNA, 19 nt, Artificial Sequence
  Description of Artificial Sequence: Synthetic oligonucleotide
caagguguggguaguacuc

SEQ ID NO: 780291 - RNA, 19 nt, Artificial Sequence
  Description of Artificial Sequence: Synthetic oligonucleotide
uguuugccgacagaaguga

SEQ ID NO: 780292 - RNA, 19 nt, Artificial Sequence
  Description of Artificial Sequence: Synthetic oligonucleotide
uguuugcccuuucugucca

SEQ ID NO: 780293 - RNA, 19 nt, Artificial Sequence
  Description of Artificial Sequence: Synthetic oligonucleotide
acaagguguggguaguacu

SEQ ID NO: 780294 - RNA, 19 nt, Artificial Sequence
  Description of Artificial Sequence: Synthetic oligonucleotide
gagcacaauggguuucucc

SEQ ID NO: 780295 - RNA, 19 nt, Artificial Sequence
  Description of Artificial Sequence: Synthetic oligonucleotide
acucucagcgucacugucc

SEQ ID NO: 780296 - RNA, 19 nt, Artificial Sequence
  Description of Artificial Sequence: Synthetic oligonucleotide
ggagguuguacucgggagg

SEQ ID NO: 780297 - RNA, 19 nt, Artificial Sequence
  Description of Artificial Sequence: Synthetic oligonucleotide
acggcggucgcugauuggc

SEQ ID NO: 780298 - RNA, 19 nt, Artificial Sequence
  Description of Artificial Sequence: Synthetic oligonucleotide
aaauggugccgggagguca

SEQ ID NO: 780299 - RNA, 19 nt, Artificial Sequence
  Description of Artificial Sequence: Synthetic oligonucleotide
ucagcgucacuguccauga

SEQ ID NO: 780300 - RNA, 19 nt, Artificial Sequence
  Description of Artificial Sequence: Synthetic oligonucleotide
uugcggucauuguugauaa

SEQ ID NO: 780301 - RNA, 19 nt, Artificial Sequence
  Description of Artificial Sequence: Synthetic oligonucleotide
caugagcuggucaaucauc

SEQ ID NO: 780302 - RNA, 19 nt, Artificial Sequence
  Description of Artificial Sequence: Synthetic oligonucleotide
cuuccggggacagaagucc

SEQ ID NO: 780303 - RNA, 19 nt, Artificial Sequence
  Description of Artificial Sequence: Synthetic oligonucleotide
ucgagguggggucucacuc

SEQ ID NO: 780304 - RNA, 19 nt, Artificial Sequence
  Description of Artificial Sequence: Synthetic oligonucleotide
uacagacugagguccguga

SEQ ID NO: 780305 - RNA, 19 nt, Artificial Sequence
  Description of Artificial Sequence: Synthetic oligonucleotide
guacucgggaggcaguuug

SEQ ID NO: 780306 - RNA, 19 nt, Artificial Sequence
  Description of Artificial Sequence: Synthetic oligonucleotide
acgagcgugaggaaagcgg

SEQ ID NO: 780307 - RNA, 19 nt, Artificial Sequence
  Description of Artificial Sequence: Synthetic oligonucleotide
gcggucauuguugauaagg

SEQ ID NO: 780308 - RNA, 19 nt, Artificial Sequence
  Description of Artificial Sequence: Synthetic oligonucleotide
augaucccugauuccuugg

SEQ ID NO: 780309 - RNA, 19 nt, Artificial Sequence
  Description of Artificial Sequence: Synthetic oligonucleotide
caucugucguaacuuccgg

SEQ ID NO: 780310 - RNA, 19 nt, Artificial Sequence
  Description of Artificial Sequence: Synthetic oligonucleotide
uguagcgugggcggggaag

SEQ ID NO: 780311 - RNA, 19 nt, Artificial Sequence
  Description of Artificial Sequence: Synthetic oligonucleotide
guacccaggcagcagggag

SEQ ID NO: 780312 - RNA, 19 nt, Artificial Sequence
  Description of Artificial Sequence: Synthetic oligonucleotide
agcgugaggaaagcggccg

SEQ ID NO: 780313 - RNA, 19 nt, Artificial Sequence
  Description of Artificial Sequence: Synthetic oligonucleotide
ucgcugauuggcucccggg

SEQ ID NO: 780314 - RNA, 19 nt, Artificial Sequence
  Description of Artificial Sequence: Synthetic oligonucleotide
ugagcccggaagacauacg

SEQ ID NO: 780315 - RNA, 19 nt, Artificial Sequence
  Description of Artificial Sequence: Synthetic oligonucleotide
guaacuuccggggacagaa

SEQ ID NO: 780316 - RNA, 19 nt, Artificial Sequence
  Description of Artificial Sequence: Synthetic oligonucleotide
gugggagugugccaugagc

SEQ ID NO: 780317 - RNA, 19 nt, Artificial Sequence
  Description of Artificial Sequence: Synthetic oligonucleotide
uuucccagggugcaaugua

SEQ ID NO: 780318 - RNA, 19 nt, Artificial Sequence
  Description of Artificial Sequence: Synthetic oligonucleotide
uguuugcaggaaccuguac

SEQ ID NO: 780319 - RNA, 19 nt, Artificial Sequence
  Description of Artificial Sequence: Synthetic oligonucleotide
gucacgagcgugaggaaag

SEQ ID NO: 780320 - RNA, 19 nt, Artificial Sequence
  Description of Artificial Sequence: Synthetic oligonucleotide
caauggguuucuccagcgg

SEQ ID NO: 780321 - RNA, 19 nt, Artificial Sequence
  Description of Artificial Sequence: Synthetic oligonucleotide
ugggcgggaagccaugauc

SEQ ID NO: 780322 - RNA, 19 nt, Artificial Sequence
  Description of Artificial Sequence: Synthetic oligonucleotide
cucagcgucacuguccaug

SEQ ID NO: 780323 - RNA, 19 nt, Artificial Sequence
  Description of Artificial Sequence: Synthetic oligonucleotide
cauuugaggacgggacugg

SEQ ID NO: 780324 - RNA, 19 nt, Artificial Sequence
  Description of Artificial Sequence: Synthetic oligonucleotide
ucuccuuuggguggcgcag

SEQ ID NO: 780325 - RNA, 19 nt, Artificial Sequence
  Description of Artificial Sequence: Synthetic oligonucleotide
aggcguguagcgugggcgg

SEQ ID NO: 780326 - RNA, 19 nt, Artificial Sequence
  Description of Artificial Sequence: Synthetic oligonucleotide
ugaagaagucgaugccgcu

SEQ ID NO: 780327 - RNA, 19 nt, Artificial Sequence
  Description of Artificial Sequence: Synthetic oligonucleotide
gaaagcggccgaggaagcg

SEQ ID NO: 780328 - RNA, 19 nt, Artificial Sequence
  Description of Artificial Sequence: Synthetic oligonucleotide
guuccuucaucucagcacu

SEQ ID NO: 780329 - RNA, 19 nt, Artificial Sequence
  Description of Artificial Sequence: Synthetic oligonucleotide
gaucccugauuccuuggca

SEQ ID NO: 780330 - RNA, 19 nt, Artificial Sequence
  Description of Artificial Sequence: Synthetic oligonucleotide
cucgcguggcuucaugagc

SEQ ID NO: 780331 - RNA, 19 nt, Artificial Sequence
  Description of Artificial Sequence: Synthetic oligonucleotide
gucuaggaagacgaugcgc

SEQ ID NO: 780332 - RNA, 19 nt, Artificial Sequence
  Description of Artificial Sequence: Synthetic oligonucleotide
agggagguuguacucggga

SEQ ID NO: 780333 - RNA, 19 nt, Artificial Sequence
  Description of Artificial Sequence: Synthetic oligonucleotide
gaagugacaugaccaugga

SEQ ID NO: 780334 - RNA, 19 nt, Artificial Sequence
  Description of Artificial Sequence: Synthetic oligonucleotide
aaggugguccaagauggau

SEQ ID NO: 780335 - RNA, 19 nt, Artificial Sequence
  Description of Artificial Sequence: Synthetic oligonucleotide
ugacguuagugcugggguc

SEQ ID NO: 780336 - RNA, 19 nt, Artificial Sequence
  Description of Artificial Sequence: Synthetic oligonucleotide
acuaacacgucagucugau

SEQ ID NO: 780337 - RNA, 19 nt, Artificial Sequence
  Description of Artificial Sequence: Synthetic oligonucleotide
guguuugccgacagaagug

SEQ ID NO: 780338 - RNA, 19 nt, Artificial Sequence
  Description of Artificial Sequence: Synthetic oligonucleotide
uacucgggaggcaguuugc

SEQ ID NO: 780339 - RNA, 19 nt, Artificial Sequence
  Description of Artificial Sequence: Synthetic oligonucleotide
uccucgcguggcuucauga

SEQ ID NO: 780340 - RNA, 19 nt, Artificial Sequence
  Description of Artificial Sequence: Synthetic oligonucleotide
gacaagguguggguaguac

SEQ ID NO: 780341 - RNA, 19 nt, Artificial Sequence
  Description of Artificial Sequence: Synthetic oligonucleotide
guagcgugggcggggaagg

SEQ ID NO: 780342 - RNA, 19 nt, Artificial Sequence
  Description of Artificial Sequence: Synthetic oligonucleotide
gcccggaagacauacgccc

SEQ ID NO: 780343 - RNA, 19 nt, Artificial Sequence
  Description of Artificial Sequence: Synthetic oligonucleotide
uuugaccgcucugcugggg

SEQ ID NO: 780344 - RNA, 19 nt, Artificial Sequence
  Description of Artificial Sequence: Synthetic oligonucleotide
gggagguuguacucgggag

SEQ ID NO: 780345 - RNA, 19 nt, Artificial Sequence
  Description of Artificial Sequence: Synthetic oligonucleotide
gacgaugcgcuccugggua

SEQ ID NO: 780346 - RNA, 19 nt, Artificial Sequence
  Description of Artificial Sequence: Synthetic oligonucleotide
cagugcccucaucugagcc

SEQ ID NO: 780347 - RNA, 19 nt, Artificial Sequence
  Description of Artificial Sequence: Synthetic oligonucleotide
cagacugagguccgugaac

SEQ ID NO: 780348 - RNA, 19 nt, Artificial Sequence
  Description of Artificial Sequence: Synthetic oligonucleotide
ugagguccgugaaccaguc

SEQ ID NO: 780349 - RNA, 19 nt, Artificial Sequence
  Description of Artificial Sequence: Synthetic oligonucleotide
aagcggccgaggaagcggg

SEQ ID NO: 780350 - RNA, 19 nt, Artificial Sequence
  Description of Artificial Sequence: Synthetic oligonucleotide
gucgccgccgcucuauccc

SEQ ID NO: 780351 - RNA, 19 nt, Artificial Sequence
  Description of Artificial Sequence: Synthetic oligonucleotide
ucuaucccauagagcccag

SEQ ID NO: 780352 - RNA, 19 nt, Artificial Sequence
  Description of Artificial Sequence: Synthetic oligonucleotide
cugcgugucuaggaagacg

SEQ ID NO: 780353 - RNA, 19 nt, Artificial Sequence
  Description of Artificial Sequence: Synthetic oligonucleotide
acucgggaggcaguuugcg

SEQ ID NO: 780354 - RNA, 19 nt, Artificial Sequence
  Description of Artificial Sequence: Synthetic oligonucleotide
gacaccucacaucucuucu

SEQ ID NO: 780355 - RNA, 19 nt, Artificial Sequence
  Description of Artificial Sequence: Synthetic oligonucleotide
gcaucugucguaacuuccg

SEQ ID NO: 780356 - RNA, 19 nt, Artificial Sequence
  Description of Artificial Sequence: Synthetic oligonucleotide
agacgaugcgcuccugggu

SEQ ID NO: 780357 - RNA, 19 nt, Artificial Sequence
  Description of Artificial Sequence: Synthetic oligonucleotide
gucgaugccgcuggucugg

SEQ ID NO: 780358 - RNA, 19 nt, Artificial Sequence
  Description of Artificial Sequence: Synthetic oligonucleotide
ggcagcuaucugcagagac

SEQ ID NO: 780359 - RNA, 19 nt, Artificial Sequence
  Description of Artificial Sequence: Synthetic oligonucleotide
cuucaugagcacaaugggu

SEQ ID NO: 780360 - RNA, 19 nt, Artificial Sequence
  Description of Artificial Sequence: Synthetic oligonucleotide
cuaggaagacgaugcgcuc

SEQ ID NO: 780361 - RNA, 19 nt, Artificial Sequence
  Description of Artificial Sequence: Synthetic oligonucleotide
ugacaugaccauggacuug

SEQ ID NO: 780362 - RNA, 19 nt, Artificial Sequence
  Description of Artificial Sequence: Synthetic oligonucleotide
cucucugcgcgccuuguuc

SEQ ID NO: 780363 - RNA, 19 nt, Artificial Sequence
  Description of Artificial Sequence: Synthetic oligonucleotide
gggguagacggcuucacca

SEQ ID NO: 780364 - RNA, 19 nt, Artificial Sequence
  Description of Artificial Sequence: Synthetic oligonucleotide
cugagcccggaagacauac

SEQ ID NO: 780365 - RNA, 19 nt, Artificial Sequence
  Description of Artificial Sequence: Synthetic oligonucleotide
gucgcugauuggcucccgg

SEQ ID NO: 780366 - RNA, 19 nt, Artificial Sequence
  Description of Artificial Sequence: Synthetic oligonucleotide
uccccauuugaggacggga

SEQ ID NO: 780367 - RNA, 19 nt, Artificial Sequence
  Description of Artificial Sequence: Synthetic oligonucleotide
gacauacgcccucuggucu

SEQ ID NO: 780368 - RNA, 19 nt, Artificial Sequence
  Description of Artificial Sequence: Synthetic oligonucleotide
cacgucagucugauccagc

SEQ ID NO: 780369 - RNA, 19 nt, Artificial Sequence
  Description of Artificial Sequence: Synthetic oligonucleotide
gguccauggcaguuggggc

SEQ ID NO: 780370 - RNA, 19 nt, Artificial Sequence
  Description of Artificial Sequence: Synthetic oligonucleotide
cugccaucccgucucuccc

SEQ ID NO: 780371 - RNA, 19 nt, Artificial Sequence
  Description of Artificial Sequence: Synthetic oligonucleotide
agucgaugccgcuggucug

SEQ ID NO: 780372 - RNA, 19 nt, Artificial Sequence
  Description of Artificial Sequence: Synthetic oligonucleotide
ucgauggcacugucacacc

SEQ ID NO: 780373 - RNA, 19 nt, Artificial Sequence
  Description of Artificial Sequence: Synthetic oligonucleotide
gccgacagaagugacauga

SEQ ID NO: 780374 - RNA, 19 nt, Artificial Sequence
  Description of Artificial Sequence: Synthetic oligonucleotide
ccacuaacacgucagucug

SEQ ID NO: 780375 - RNA, 19 nt, Artificial Sequence
  Description of Artificial Sequence: Synthetic oligonucleotide
uccccuacggcggucgcug

SEQ ID NO: 780376 - RNA, 19 nt, Artificial Sequence
  Description of Artificial Sequence: Synthetic oligonucleotide
agcuaucugcagagacugc

SEQ ID NO: 780377 - RNA, 19 nt, Artificial Sequence
  Description of Artificial Sequence: Synthetic oligonucleotide
cucucagcgucacugucca

SEQ ID NO: 780378 - RNA, 19 nt, Artificial Sequence
  Description of Artificial Sequence: Synthetic oligonucleotide
caccaguuugaugcugugc

SEQ ID NO: 780379 - RNA, 19 nt, Artificial Sequence
  Description of Artificial Sequence: Synthetic oligonucleotide
gaggaaagcggccgaggaa

SEQ ID NO: 780380 - RNA, 19 nt, Artificial Sequence
  Description of Artificial Sequence: Synthetic oligonucleotide
ucugguacaccggcugcgu

SEQ ID NO: 780381 - RNA, 19 nt, Artificial Sequence
  Description of Artificial Sequence: Synthetic oligonucleotide
uucugggcgggaagccaug

SEQ ID NO: 780382 - RNA, 19 nt, Artificial Sequence
  Description of Artificial Sequence: Synthetic oligonucleotide
gugcaucugucguaacuuc

SEQ ID NO: 780383 - RNA, 19 nt, Artificial Sequence
  Description of Artificial Sequence: Synthetic oligonucleotide
uguacagacugagguccgu

SEQ ID NO: 780384 - RNA, 19 nt, Artificial Sequence
  Description of Artificial Sequence: Synthetic oligonucleotide
gggcgggaagccaugaucc

SEQ ID NO: 780385 - RNA, 19 nt, Artificial Sequence
  Description of Artificial Sequence: Synthetic oligonucleotide
ucguaacuuccggggacag

SEQ ID NO: 780386 - RNA, 19 nt, Artificial Sequence
  Description of Artificial Sequence: Synthetic oligonucleotide
uacggcggucgcugauugg

SEQ ID NO: 780387 - RNA, 19 nt, Artificial Sequence
  Description of Artificial Sequence: Synthetic oligonucleotide
agacggcuucaccaucucu

SEQ ID NO: 780388 - RNA, 19 nt, Artificial Sequence
  Description of Artificial Sequence: Synthetic oligonucleotide
ccacauaggugugagggag

SEQ ID NO: 780389 - RNA, 19 nt, Artificial Sequence
  Description of Artificial Sequence: Synthetic oligonucleotide
ugcucaccaaggacuggaa

SEQ ID NO: 780390 - RNA, 19 nt, Artificial Sequence
  Description of Artificial Sequence: Synthetic oligonucleotide
cacgagcgugaggaaagcg

SEQ ID NO: 780391 - RNA, 19 nt, Artificial Sequence
  Description of Artificial Sequence: Synthetic oligonucleotide
aggaacaaguugaccucag

SEQ ID NO: 780392 - RNA, 19 nt, Artificial Sequence
  Description of Artificial Sequence: Synthetic oligonucleotide
ugggcggggaaggucuucc

SEQ ID NO: 780393 - RNA, 19 nt, Artificial Sequence
  Description of Artificial Sequence: Synthetic oligonucleotide
caucaccuggcugcggagc

SEQ ID NO: 780394 - RNA, 19 nt, Artificial Sequence
  Description of Artificial Sequence: Synthetic oligonucleotide
ugguccccuacggcggucg

SEQ ID NO: 780395 - RNA, 19 nt, Artificial Sequence
  Description of Artificial Sequence: Synthetic oligonucleotide
cuacggcggucgcugauug

SEQ ID NO: 780396 - RNA, 19 nt, Artificial Sequence
  Description of Artificial Sequence: Synthetic oligonucleotide
ugcggucauuguugauaag

SEQ ID NO: 780397 - RNA, 19 nt, Artificial Sequence
  Description of Artificial Sequence: Synthetic oligonucleotide
ucacgagcgugaggaaagc

SEQ ID NO: 780398 - RNA, 19 nt, Artificial Sequence
  Description of Artificial Sequence: Synthetic oligonucleotide
cuugcucaccaaggacugg

SEQ ID NO: 780399 - RNA, 19 nt, Artificial Sequence
  Description of Artificial Sequence: Synthetic oligonucleotide
ggucuucgcugccaucccg

SEQ ID NO: 780400 - RNA, 19 nt, Artificial Sequence
  Description of Artificial Sequence: Synthetic oligonucleotide
guacagacugagguccgug

SEQ ID NO: 780401 - RNA, 19 nt, Artificial Sequence
  Description of Artificial Sequence: Synthetic oligonucleotide
aagucgggcggcagccccg

SEQ ID NO: 780402 - RNA, 19 nt, Artificial Sequence
  Description of Artificial Sequence: Synthetic oligonucleotide
guagucucucucccgaccu

SEQ ID NO: 780403 - RNA, 19 nt, Artificial Sequence
  Description of Artificial Sequence: Synthetic oligonucleotide
auggcaguuggggcagccg

SEQ ID NO: 780404 - RNA, 19 nt, Artificial Sequence
  Description of Artificial Sequence: Synthetic oligonucleotide
caucccgucucucccuuuc

SEQ ID NO: 780405 - RNA, 19 nt, Artificial Sequence
  Description of Artificial Sequence: Synthetic oligonucleotide
gcagacggugaagaggaag

SEQ ID NO: 780406 - RNA, 19 nt, Artificial Sequence
  Description of Artificial Sequence: Synthetic oligonucleotide
cucgggaguguuugccgac

SEQ ID NO: 780407 - RNA, 19 nt, Artificial Sequence
  Description of Artificial Sequence: Synthetic oligonucleotide
cuaucccauagagcccagg

SEQ ID NO: 780408 - RNA, 19 nt, Artificial Sequence
  Description of Artificial Sequence: Synthetic oligonucleotide
acucgauggcacugucaca

SEQ ID NO: 780409 - RNA, 19 nt, Artificial Sequence
  Description of Artificial Sequence: Synthetic oligonucleotide
uuggcucccggggcgggcg

SEQ ID NO: 780410 - RNA, 19 nt, Artificial Sequence
  Description of Artificial Sequence: Synthetic oligonucleotide
gagguccgugaaccagucc

SEQ ID NO: 780411 - RNA, 19 nt, Artificial Sequence
  Description of Artificial Sequence: Synthetic oligonucleotide
gaagggcaccaggaacaag

SEQ ID NO: 780412 - RNA, 19 nt, Artificial Sequence
  Description of Artificial Sequence: Synthetic oligonucleotide
gaaagucgggcggcagccc

SEQ ID NO: 780413 - RNA, 19 nt, Artificial Sequence
  Description of Artificial Sequence: Synthetic oligonucleotide
cgugaaccaguccugcacg

SEQ ID NO: 780414 - RNA, 19 nt, Artificial Sequence
  Description of Artificial Sequence: Synthetic oligonucleotide
ugggaguuuucugcaugac

SEQ ID NO: 780415 - RNA, 19 nt, Artificial Sequence
  Description of Artificial Sequence: Synthetic oligonucleotide
acguggcagacggugaaga

SEQ ID NO: 780416 - RNA, 19 nt, Artificial Sequence
  Description of Artificial Sequence: Synthetic oligonucleotide
gaagucgaugccgcugguc

SEQ ID NO: 780417 - RNA, 19 nt, Artificial Sequence
  Description of Artificial Sequence: Synthetic oligonucleotide
gacguuagugcuggggucu

SEQ ID NO: 780418 - RNA, 19 nt, Artificial Sequence
  Description of Artificial Sequence: Synthetic oligonucleotide
guccaagauggaugggcuc

SEQ ID NO: 780419 - RNA, 19 nt, Artificial Sequence
  Description of Artificial Sequence: Synthetic oligonucleotide
cgagcgugaggaaagcggc

SEQ ID NO: 780420 - RNA, 19 nt, Artificial Sequence
  Description of Artificial Sequence: Synthetic oligonucleotide
cauuguugauaaggugguc

SEQ ID NO: 780421 - RNA, 19 nt, Artificial Sequence
  Description of Artificial Sequence: Synthetic oligonucleotide
ucgggaguguuugccgaca

SEQ ID NO: 780422 - RNA, 19 nt, Artificial Sequence
  Description of Artificial Sequence: Synthetic oligonucleotide
ccccauuugaggacgggac

SEQ ID NO: 780423 - RNA, 19 nt, Artificial Sequence
  Description of Artificial Sequence: Synthetic oligonucleotide
gugugagggagguuguacu

SEQ ID NO: 780424 - RNA, 19 nt, Artificial Sequence
  Description of Artificial Sequence: Synthetic oligonucleotide
ugaggacgggacuggccuc

SEQ ID NO: 780425 - RNA, 19 nt, Artificial Sequence
  Description of Artificial Sequence: Synthetic oligonucleotide
cgacagaagugacaugacc

SEQ ID NO: 780426 - RNA, 19 nt, Artificial Sequence
  Description of Artificial Sequence: Synthetic oligonucleotide
ugccaucccgucucucccu

SEQ ID NO: 780427 - RNA, 19 nt, Artificial Sequence
  Description of Artificial Sequence: Synthetic oligonucleotide
gaugcgcuccuggguaaug

SEQ ID NO: 780428 - RNA, 19 nt, Artificial Sequence
  Description of Artificial Sequence: Synthetic oligonucleotide
cugucguaacuuccgggga

SEQ ID NO: 780429 - RNA, 19 nt, Artificial Sequence
  Description of Artificial Sequence: Synthetic oligonucleotide
ggugugagggagguuguac

SEQ ID NO: 780430 - RNA, 19 nt, Artificial Sequence
  Description of Artificial Sequence: Synthetic oligonucleotide
cuuccacagccccgcgcgg

SEQ ID NO: 780431 - RNA, 19 nt, Artificial Sequence
  Description of Artificial Sequence: Synthetic oligonucleotide
cugggguggccucgguacc

SEQ ID NO: 780432 - RNA, 19 nt, Artificial Sequence
  Description of Artificial Sequence: Synthetic oligonucleotide
gaggauugugugggacagc

SEQ ID NO: 780433 - RNA, 19 nt, Artificial Sequence
  Description of Artificial Sequence: Synthetic oligonucleotide
guccgugaaccaguccugc

SEQ ID NO: 780434 - RNA, 19 nt, Artificial Sequence
  Description of Artificial Sequence: Synthetic oligonucleotide
gacaggcguguagcguggg

SEQ ID NO: 780435 - RNA, 19 nt, Artificial Sequence
  Description of Artificial Sequence: Synthetic oligonucleotide
ugccgacagaagugacaug

SEQ ID NO: 780436 - RNA, 19 nt, Artificial Sequence
  Description of Artificial Sequence: Synthetic oligonucleotide
ucugagcccggaagacaua

SEQ ID NO: 780437 - RNA, 19 nt, Artificial Sequence
  Description of Artificial Sequence: Synthetic oligonucleotide
cuucucggugaggauugug

SEQ ID NO: 780438 - RNA, 19 nt, Artificial Sequence
  Description of Artificial Sequence: Synthetic oligonucleotide
gucguaacuuccggggaca

SEQ ID NO: 780439 - RNA, 19 nt, Artificial Sequence
  Description of Artificial Sequence: Synthetic oligonucleotide
guuugccgacagaagugac

SEQ ID NO: 780440 - RNA, 19 nt, Artificial Sequence
  Description of Artificial Sequence: Synthetic oligonucleotide
ggugccgggaggucacgag

SEQ ID NO: 780441 - RNA, 19 nt, Artificial Sequence
  Description of Artificial Sequence: Synthetic oligonucleotide
ugcgcgccuuguucugcag

SEQ ID NO: 780442 - RNA, 19 nt, Artificial Sequence
  Description of Artificial Sequence: Synthetic oligonucleotide
caucaggugcaucugucgu

SEQ ID NO: 780443 - RNA, 19 nt, Artificial Sequence
  Description of Artificial Sequence: Synthetic oligonucleotide
gugacaugaccauggacuu

SEQ ID NO: 780444 - RNA, 19 nt, Artificial Sequence
  Description of Artificial Sequence: Synthetic oligonucleotide
ggaggucacgagcgugagg

SEQ ID NO: 780445 - RNA, 19 nt, Artificial Sequence
  Description of Artificial Sequence: Synthetic oligonucleotide
cugguacaccggcugcgug

SEQ ID NO: 780446 - RNA, 19 nt, Artificial Sequence
  Description of Artificial Sequence: Synthetic oligonucleotide
caaucaccacguggcagac

SEQ ID NO: 780447 - RNA, 19 nt, Artificial Sequence
  Description of Artificial Sequence: Synthetic oligonucleotide
gguaguacucagugcccuc

SEQ ID NO: 780448 - RNA, 19 nt, Artificial Sequence
  Description of Artificial Sequence: Synthetic oligonucleotide
cucgguacccaggcagcag

SEQ ID NO: 780449 - RNA, 19 nt, Artificial Sequence
  Description of Artificial Sequence: Synthetic oligonucleotide
gcggagcuugcucaccaag

SEQ ID NO: 780450 - RNA, 19 nt, Artificial Sequence
  Description of Artificial Sequence: Synthetic oligonucleotide
cugcagcauggacagcguc

SEQ ID NO: 780451 - RNA, 19 nt, Artificial Sequence
  Description of Artificial Sequence: Synthetic oligonucleotide
augcgcuccuggguaauga

SEQ ID NO: 780452 - RNA, 19 nt, Artificial Sequence
  Description of Artificial Sequence: Synthetic oligonucleotide
ccgugaaccaguccugcac

SEQ ID NO: 780453 - RNA, 19 nt, Artificial Sequence
  Description of Artificial Sequence: Synthetic oligonucleotide
guagacggcuucaccaucu

SEQ ID NO: 780454 - RNA, 19 nt, Artificial Sequence
  Description of Artificial Sequence: Synthetic oligonucleotide
cgcgcucugagugacaggc

SEQ ID NO: 780455 - RNA, 19 nt, Artificial Sequence
  Description of Artificial Sequence: Synthetic oligonucleotide
ccgaccuccaggcccagag

SEQ ID NO: 780456 - RNA, 19 nt, Artificial Sequence
  Description of Artificial Sequence: Synthetic oligonucleotide
gugcccagacucugacaug

SEQ ID NO: 780457 - RNA, 19 nt, Artificial Sequence
  Description of Artificial Sequence: Synthetic oligonucleotide
cugugugcucccucccuca

SEQ ID NO: 780458 - RNA, 19 nt, Artificial Sequence
  Description of Artificial Sequence: Synthetic oligonucleotide
gggccgaggacuucuucac

SEQ ID NO: 780459 - RNA, 19 nt, Artificial Sequence
  Description of Artificial Sequence: Synthetic oligonucleotide
ggacaccgaccacuaacac

SEQ ID NO: 780460 - RNA, 19 nt, Artificial Sequence
  Description of Artificial Sequence: Synthetic oligonucleotide
cugagguccgugaaccagu

SEQ ID NO: 780461 - RNA, 19 nt, Artificial Sequence
  Description of Artificial Sequence: Synthetic oligonucleotide
caaauggugccgggagguc

SEQ ID NO: 780462 - RNA, 19 nt, Artificial Sequence
  Description of Artificial Sequence: Synthetic oligonucleotide
cugcggagcuugcucacca

SEQ ID NO: 780463 - RNA, 19 nt, Artificial Sequence
  Description of Artificial Sequence: Synthetic oligonucleotide
guccccauuugaggacggg

SEQ ID NO: 780464 - RNA, 19 nt, Artificial Sequence
  Description of Artificial Sequence: Synthetic oligonucleotide
caguuggggcagccgugcc

SEQ ID NO: 780465 - RNA, 19 nt, Artificial Sequence
  Description of Artificial Sequence: Synthetic oligonucleotide
ccccgcgcggagcaaaugg

SEQ ID NO: 780466 - RNA, 19 nt, Artificial Sequence
  Description of Artificial Sequence: Synthetic oligonucleotide
ccucgcguggcuucaugag

SEQ ID NO: 780467 - RNA, 19 nt, Artificial Sequence
  Description of Artificial Sequence: Synthetic oligonucleotide
ccgucucucccuuucccag

SEQ ID NO: 780468 - RNA, 19 nt, Artificial Sequence
  Description of Artificial Sequence: Synthetic oligonucleotide
ggcgggaagccaugauccc

SEQ ID NO: 780469 - RNA, 19 nt, Artificial Sequence
  Description of Artificial Sequence: Synthetic oligonucleotide
uacgcccucuggucuuccu

SEQ ID NO: 780470 - RNA, 19 nt, Artificial Sequence
  Description of Artificial Sequence: Synthetic oligonucleotide
gcggucgcugauuggcucc

SEQ ID NO: 780471 - RNA, 19 nt, Artificial Sequence
  Description of Artificial Sequence: Synthetic oligonucleotide
ggacagcguccccuuguag

SEQ ID NO: 780472 - RNA, 19 nt, Artificial Sequence
  Description of Artificial Sequence: Synthetic oligonucleotide
cgcugauuggcucccgggg

SEQ ID NO: 780473 - RNA, 19 nt, Artificial Sequence
  Description of Artificial Sequence: Synthetic oligonucleotide
agucgggcggcagccccgg

SEQ ID NO: 780474 - RNA, 19 nt, Artificial Sequence
  Description of Artificial Sequence: Synthetic oligonucleotide
gcucuaucccauagagccc

SEQ ID NO: 780475 - RNA, 19 nt, Artificial Sequence
  Description of Artificial Sequence: Synthetic oligonucleotide
ggccgaggacuucuucacc

SEQ ID NO: 780476 - RNA, 19 nt, Artificial Sequence
  Description of Artificial Sequence: Synthetic oligonucleotide
ggcggggaaggucuuccac

SEQ ID NO: 780477 - RNA, 19 nt, Artificial Sequence
  Description of Artificial Sequence: Synthetic oligonucleotide
ccgcucuaucccauagagc

SEQ ID NO: 780478 - RNA, 19 nt, Artificial Sequence
  Description of Artificial Sequence: Synthetic oligonucleotide
gguccgugaaccaguccug

SEQ ID NO: 780479 - RNA, 19 nt, Artificial Sequence
  Description of Artificial Sequence: Synthetic oligonucleotide
gcggagcaaauggugccgg

SEQ ID NO: 780480 - RNA, 19 nt, Artificial Sequence
  Description of Artificial Sequence: Synthetic oligonucleotide
cccucguuccuucaucuca

SEQ ID NO: 780481 - RNA, 19 nt, Artificial Sequence
  Description of Artificial Sequence: Synthetic oligonucleotide
uccucucugcgcgccuugu

SEQ ID NO: 780482 - RNA, 19 nt, Artificial Sequence
  Description of Artificial Sequence: Synthetic oligonucleotide
ccgacagaagugacaugac

SEQ ID NO: 780483 - RNA, 19 nt, Artificial Sequence
  Description of Artificial Sequence: Synthetic oligonucleotide
cugugcccagacucugaca

SEQ ID NO: 780484 - RNA, 19 nt, Artificial Sequence
  Description of Artificial Sequence: Synthetic oligonucleotide
gaccauggacuugccuguc

SEQ ID NO: 780485 - RNA, 19 nt, Artificial Sequence
  Description of Artificial Sequence: Synthetic oligonucleotide
caugaccauggacuugccu

SEQ ID NO: 780486 - RNA, 19 nt, Artificial Sequence
  Description of Artificial Sequence: Synthetic oligonucleotide
aggcggcuguacucugcca

SEQ ID NO: 780487 - RNA, 19 nt, Artificial Sequence
  Description of Artificial Sequence: Synthetic oligonucleotide
aggucacgagcgugaggaa

SEQ ID NO: 780488 - RNA, 19 nt, Artificial Sequence
  Description of Artificial Sequence: Synthetic oligonucleotide
ggucacgagcgugaggaaa

SEQ ID NO: 780489 - RNA, 19 nt, Artificial Sequence
  Description of Artificial Sequence: Synthetic oligonucleotide
auggugccgggaggucacg

SEQ ID NO: 780490 - RNA, 19 nt, Artificial Sequence
  Description of Artificial Sequence: Synthetic oligonucleotide
agguuguacucgggaggca

SEQ ID NO: 780491 - RNA, 19 nt, Artificial Sequence
  Description of Artificial Sequence: Synthetic oligonucleotide
uuccaucgucgccgccgcu

SEQ ID NO: 780492 - RNA, 19 nt, Artificial Sequence
  Description of Artificial Sequence: Synthetic oligonucleotide
cagggccgaggacuucuuc

SEQ ID NO: 780493 - RNA, 19 nt, Artificial Sequence
  Description of Artificial Sequence: Synthetic oligonucleotide
cucugagugacaggcgugu

SEQ ID NO: 780494 - RNA, 19 nt, Artificial Sequence
  Description of Artificial Sequence: Synthetic oligonucleotide
aggguccauggcaguuggg

SEQ ID NO: 780495 - RNA, 19 nt, Artificial Sequence
  Description of Artificial Sequence: Synthetic oligonucleotide
gcaaauggugccgggaggu

SEQ ID NO: 780496 - RNA, 19 nt, Artificial Sequence
  Description of Artificial Sequence: Synthetic oligonucleotide
gcucugagugacaggcgug

SEQ ID NO: 780497 - RNA, 19 nt, Artificial Sequence
  Description of Artificial Sequence: Synthetic oligonucleotide
cuucugggcgggaagccau

SEQ ID NO: 780498 - RNA, 19 nt, Artificial Sequence
  Description of Artificial Sequence: Synthetic oligonucleotide
ccgcuggucugguugcccc

SEQ ID NO: 780499 - RNA, 19 nt, Artificial Sequence
  Description of Artificial Sequence: Synthetic oligonucleotide
ugccgcuggucugguugcc

SEQ ID NO: 780500 - RNA, 19 nt, Artificial Sequence
  Description of Artificial Sequence: Synthetic oligonucleotide
cagccccgggaagauguug

SEQ ID NO: 780501 - RNA, 19 nt, Artificial Sequence
  Description of Artificial Sequence: Synthetic oligonucleotide
gggacuggccucagacacc

SEQ ID NO: 780502 - RNA, 19 nt, Artificial Sequence
  Description of Artificial Sequence: Synthetic oligonucleotide
ucgaugccgcuggucuggu

SEQ ID NO: 780503 - RNA, 19 nt, Artificial Sequence
  Description of Artificial Sequence: Synthetic oligonucleotide
gggaggucacgagcgugag

SEQ ID NO: 780504 - RNA, 19 nt, Artificial Sequence
  Description of Artificial Sequence: Synthetic oligonucleotide
ccgagccauggacaucacc

SEQ ID NO: 780505 - RNA, 19 nt, Artificial Sequence
  Description of Artificial Sequence: Synthetic oligonucleotide
cugcgcgccuuguucugca

SEQ ID NO: 780506 - RNA, 19 nt, Artificial Sequence
  Description of Artificial Sequence: Synthetic oligonucleotide
gggaguguuugccgacaga

SEQ ID NO: 780507 - RNA, 19 nt, Artificial Sequence
  Description of Artificial Sequence: Synthetic oligonucleotide
cuuucccagggugcaaugu

SEQ ID NO: 780508 - RNA, 19 nt, Artificial Sequence
  Description of Artificial Sequence: Synthetic oligonucleotide
ggcaguuugcggucauugu

SEQ ID NO: 780509 - RNA, 19 nt, Artificial Sequence
  Description of Artificial Sequence: Synthetic oligonucleotide
cgucagucugauccagcag

SEQ ID NO: 780510 - RNA, 19 nt, Artificial Sequence
  Description of Artificial Sequence: Synthetic oligonucleotide
gcagcuaucugcagagacu

SEQ ID NO: 780511 - RNA, 19 nt, Artificial Sequence
  Description of Artificial Sequence: Synthetic oligonucleotide
ucccuuucccagggugcaa

SEQ ID NO: 780512 - RNA, 19 nt, Artificial Sequence
  Description of Artificial Sequence: Synthetic oligonucleotide
ccgcagagcugcuggacuc

SEQ ID NO: 780513 - RNA, 19 nt, Artificial Sequence
  Description of Artificial Sequence: Synthetic oligonucleotide
ccggaagacauacgcccuc

SEQ ID NO: 780514 - RNA, 19 nt, Artificial Sequence
  Description of Artificial Sequence: Synthetic oligonucleotide
ccgcgcggagcaaauggug

SEQ ID NO: 780515 - RNA, 19 nt, Artificial Sequence
  Description of Artificial Sequence: Synthetic oligonucleotide
aggacgggacuggccucag

SEQ ID NO: 780516 - RNA, 19 nt, Artificial Sequence
  Description of Artificial Sequence: Synthetic oligonucleotide
cucugugugcucccucccu

SEQ ID NO: 780517 - RNA, 19 nt, Artificial Sequence
  Description of Artificial Sequence: Synthetic oligonucleotide
caccgaccacuaacacguc

SEQ ID NO: 780518 - RNA, 19 nt, Artificial Sequence
  Description of Artificial Sequence: Synthetic oligonucleotide
ccucgggaguguuugccga

SEQ ID NO: 780519 - RNA, 19 nt, Artificial Sequence
  Description of Artificial Sequence: Synthetic oligonucleotide
gccucgguacccaggcagc

SEQ ID NO: 780520 - RNA, 19 nt, Artificial Sequence
  Description of Artificial Sequence: Synthetic oligonucleotide
ggguagacggcuucaccau

SEQ ID NO: 780521 - RNA, 19 nt, Artificial Sequence
  Description of Artificial Sequence: Synthetic oligonucleotide
cacugucacaccaguucau

SEQ ID NO: 780522 - RNA, 19 nt, Artificial Sequence
  Description of Artificial Sequence: Synthetic oligonucleotide
gcugcggagcuugcucacc

SEQ ID NO: 780523 - RNA, 19 nt, Artificial Sequence
  Description of Artificial Sequence: Synthetic oligonucleotide
cggagcaaauggugccggg

SEQ ID NO: 780524 - RNA, 19 nt, Artificial Sequence
  Description of Artificial Sequence: Synthetic oligonucleotide
cgcggagcaaauggugccg

SEQ ID NO: 780525 - RNA, 19 nt, Artificial Sequence
  Description of Artificial Sequence: Synthetic oligonucleotide
gcugcgugucuaggaagac

SEQ ID NO: 780526 - RNA, 19 nt, Artificial Sequence
  Description of Artificial Sequence: Synthetic oligonucleotide
gcacgacaaucaccacgug

SEQ ID NO: 780527 - RNA, 19 nt, Artificial Sequence
  Description of Artificial Sequence: Synthetic oligonucleotide
acguuagugcuggggucuu

SEQ ID NO: 780528 - RNA, 19 nt, Artificial Sequence
  Description of Artificial Sequence: Synthetic oligonucleotide
ccgccgcucuaucccauag

SEQ ID NO: 780529 - RNA, 19 nt, Artificial Sequence
  Description of Artificial Sequence: Synthetic oligonucleotide
ggucgcugauuggcucccg

SEQ ID NO: 780530 - RNA, 19 nt, Artificial Sequence
  Description of Artificial Sequence: Synthetic oligonucleotide
cgggguagacggcuucacc

SEQ ID NO: 780531 - RNA, 19 nt, Artificial Sequence
  Description of Artificial Sequence: Synthetic oligonucleotide
gcgugaggaaagcggccga

SEQ ID NO: 780532 - RNA, 19 nt, Artificial Sequence
  Description of Artificial Sequence: Synthetic oligonucleotide
gcgcgcucugagugacagg

SEQ ID NO: 780533 - RNA, 19 nt, Artificial Sequence
  Description of Artificial Sequence: Synthetic oligonucleotide
gccgaggacaccgaccacu

SEQ ID NO: 780534 - RNA, 19 nt, Artificial Sequence
  Description of Artificial Sequence: Synthetic oligonucleotide
cgggcgcgcgcucugagug

SEQ ID NO: 780535 - RNA, 19 nt, Artificial Sequence
  Description of Artificial Sequence: Synthetic oligonucleotide
cgggaguguuugccgacag

SEQ ID NO: 780536 - RNA, 19 nt, Artificial Sequence
  Description of Artificial Sequence: Synthetic oligonucleotide
ccauagagcccaggcugac

SEQ ID NO: 780537 - RNA, 19 nt, Artificial Sequence
  Description of Artificial Sequence: Synthetic oligonucleotide
ggaagacgaugcgcuccug

SEQ ID NO: 780538 - RNA, 19 nt, Artificial Sequence
  Description of Artificial Sequence: Synthetic oligonucleotide
ggcgcgcgcucugagugac

SEQ ID NO: 780539 - RNA, 19 nt, Artificial Sequence
  Description of Artificial Sequence: Synthetic oligonucleotide
ggcgggcgcgcgcucugag

SEQ ID NO: 780540 - RNA, 19 nt, Artificial Sequence
  Description of Artificial Sequence: Synthetic oligonucleotide
cugcucgagguggggucuc

SEQ ID NO: 780541 - RNA, 19 nt, Artificial Sequence
  Description of Artificial Sequence: Synthetic oligonucleotide
gguccccuacggcggucgc

SEQ ID NO: 780542 - RNA, 19 nt, Artificial Sequence
  Description of Artificial Sequence: Synthetic oligonucleotide
ggaagcggguccccgcuau

SEQ ID NO: 780543 - RNA, 19 nt, Artificial Sequence
  Description of Artificial Sequence: Synthetic oligonucleotide
cgcgcgcucugagugacag

SEQ ID NO: 780544 - RNA, 19 nt, Artificial Sequence
  Description of Artificial Sequence: Synthetic oligonucleotide
gccccgggaagauguugca

SEQ ID NO: 780545 - RNA, 19 nt, Artificial Sequence
  Description of Artificial Sequence: Synthetic oligonucleotide
cgggaggucacgagcguga

SEQ ID NO: 780546 - RNA, 19 nt, Artificial Sequence
  Description of Artificial Sequence: Synthetic oligonucleotide
ccccgggaagauguugcac

SEQ ID NO: 780547 - RNA, 19 nt, Artificial Sequence
  Description of Artificial Sequence: Synthetic oligonucleotide
ccccucguuccuucaucuc

SEQ ID NO: 780548 - RNA, 19 nt, Artificial Sequence
  Description of Artificial Sequence: Synthetic oligonucleotide
ccgggaggucacgagcgug

SEQ ID NO: 780549 - RNA, 19 nt, Artificial Sequence
  Description of Artificial Sequence: Synthetic oligonucleotide
gcguggcuucaugagcaca

SEQ ID NO: 780550 - RNA, 19 nt, Artificial Sequence
  Description of Artificial Sequence: Synthetic oligonucleotide
ggggcuuugagaggaugau

SEQ ID NO: 780551 - RNA, 19 nt, Artificial Sequence
  Description of Artificial Sequence: Synthetic oligonucleotide
cgacaaucaccacguggca

SEQ ID NO: 780552 - RNA, 19 nt, Artificial Sequence
  Description of Artificial Sequence: Synthetic oligonucleotide
gggcggggaaggucuucca

SEQ ID NO: 780553 - RNA, 19 nt, Artificial Sequence
  Description of Artificial Sequence: Synthetic oligonucleotide
ccgaggacaccgaccacua

SEQ ID NO: 780554 - RNA, 19 nt, Artificial Sequence
  Description of Artificial Sequence: Synthetic oligonucleotide
cgugggucucugccccucc

SEQ ID NO: 780555 - RNA, 19 nt, Artificial Sequence
  Description of Artificial Sequence: Synthetic oligonucleotide
cagcgucacuguccaugaa

SEQ ID NO: 780556 - RNA, 19 nt, Artificial Sequence
  Description of Artificial Sequence: Synthetic oligonucleotide
gcgggaagccaugaucccu

SEQ ID NO: 780557 - RNA, 19 nt, Artificial Sequence
  Description of Artificial Sequence: Synthetic oligonucleotide
ggguuucuccagcggggcu

SEQ ID NO: 780558 - RNA, 19 nt, Artificial Sequence
  Description of Artificial Sequence: Synthetic oligonucleotide
cacaggguccauggcaguu

SEQ ID NO: 780559 - RNA, 19 nt, Artificial Sequence
  Description of Artificial Sequence: Synthetic oligonucleotide
gccgaggaagcgggucccc

SEQ ID NO: 780560 - RNA, 19 nt, Artificial Sequence
  Description of Artificial Sequence: Synthetic oligonucleotide
gcgugggcggggaaggucu

SEQ ID NO: 780561 - RNA, 19 nt, Artificial Sequence
  Description of Artificial Sequence: Synthetic oligonucleotide
gggcgcgcgcucugaguga

SEQ ID NO: 780562 - RNA, 19 nt, Artificial Sequence
  Description of Artificial Sequence: Synthetic oligonucleotide
ggucaaucaucaggugcau

SEQ ID NO: 780563 - RNA, 19 nt, Artificial Sequence
  Description of Artificial Sequence: Synthetic oligonucleotide
ggccgaggacaccgaccac

SEQ ID NO: 780564 - RNA, 19 nt, Artificial Sequence
  Description of Artificial Sequence: Synthetic oligonucleotide
agcggccgaggaagcgggu

SEQ ID NO: 780565 - RNA, 19 nt, Artificial Sequence
  Description of Artificial Sequence: Synthetic oligonucleotide
cccggaagacauacgcccu

SEQ ID NO: 780566 - RNA, 19 nt, Artificial Sequence
  Description of Artificial Sequence: Synthetic oligonucleotide
gcucgagguggggucucac

SEQ ID NO: 780567 - RNA, 19 nt, Artificial Sequence
  Description of Artificial Sequence: Synthetic oligonucleotide
ggacgggacuggccucaga

SEQ ID NO: 780568 - RNA, 19 nt, Artificial Sequence
  Description of Artificial Sequence: Synthetic oligonucleotide
ccaugaucccugauuccuu

SEQ ID NO: 780569 - RNA, 19 nt, Artificial Sequence
  Description of Artificial Sequence: Synthetic oligonucleotide
guccccuacggcggucgcu

SEQ ID NO: 780570 - RNA, 19 nt, Artificial Sequence
  Description of Artificial Sequence: Synthetic oligonucleotide
cauaggugugagggagguu

SEQ ID NO: 780571 - RNA, 19 nt, Artificial Sequence
  Description of Artificial Sequence: Synthetic oligonucleotide
cagccccgcgcggagcaaa

SEQ ID NO: 780572 - RNA, 19 nt, Artificial Sequence
  Description of Artificial Sequence: Synthetic oligonucleotide
gcgugggucucugccccuc

SEQ ID NO: 780573 - RNA, 19 nt, Artificial Sequence
  Description of Artificial Sequence: Synthetic oligonucleotide
guacaccggcugcgugggu

SEQ ID NO: 780574 - RNA, 19 nt, Artificial Sequence
  Description of Artificial Sequence: Synthetic oligonucleotide
cccgcgcggagcaaauggu

SEQ ID NO: 780575 - RNA, 19 nt, Artificial Sequence
  Description of Artificial Sequence: Synthetic oligonucleotide
cguaacuuccggggacaga

SEQ ID NO: 780576 - RNA, 19 nt, Artificial Sequence
  Description of Artificial Sequence: Synthetic oligonucleotide
ccggggacagaaguccucu

SEQ ID NO: 780577 - RNA, 19 nt, Artificial Sequence
  Description of Artificial Sequence: Synthetic oligonucleotide
gggccgagccauggacauc

SEQ ID NO: 780578 - RNA, 19 nt, Artificial Sequence
  Description of Artificial Sequence: Synthetic oligonucleotide
gccccgcgcggagcaaaug

SEQ ID NO: 780579 - RNA, 19 nt, Artificial Sequence
  Description of Artificial Sequence: Synthetic oligonucleotide
gccgccgcucuaucccaua

SEQ ID NO: 780580 - RNA, 19 nt, Artificial Sequence
  Description of Artificial Sequence: Synthetic oligonucleotide
gccaucccgucucucccuu

SEQ ID NO: 780581 - RNA, 19 nt, Artificial Sequence
  Description of Artificial Sequence: Synthetic oligonucleotide
cgccgcucuaucccauaga

SEQ ID NO: 780582 - RNA, 19 nt, Artificial Sequence
  Description of Artificial Sequence: Synthetic oligonucleotide
ccugcucgagguggggucu

SEQ ID NO: 780583 - RNA, 19 nt, Artificial Sequence
  Description of Artificial Sequence: Synthetic oligonucleotide
cgaccacuaacacgucagu

SEQ ID NO: 780584 - RNA, 19 nt, Artificial Sequence
  Description of Artificial Sequence: Synthetic oligonucleotide
gccgagccauggacaucac

SEQ ID NO: 780585 - RNA, 19 nt, Artificial Sequence
  Description of Artificial Sequence: Synthetic oligonucleotide
gcgggcgcgcgcucugagu

SEQ ID NO: 780586 - RNA, 19 nt, Artificial Sequence
  Description of Artificial Sequence: Synthetic oligonucleotide
gcccugcucgagguggggu

SEQ ID NO: 780587 - RNA, 19 nt, Artificial Sequence
  Description of Artificial Sequence: Synthetic oligonucleotide
ccggcuggggugggaucuc

SEQ ID NO: 780588 - RNA, 19 nt, Artificial Sequence
  Description of Artificial Sequence: Synthetic oligonucleotide
gcgugucuaggaagacgau

SEQ ID NO: 780589 - RNA, 19 nt, Artificial Sequence
  Description of Artificial Sequence: Synthetic oligonucleotide
ccccuacggcggucgcuga

SEQ ID NO: 780590 - RNA, 19 nt, Artificial Sequence
  Description of Artificial Sequence: Synthetic oligonucleotide
ccuacggcggucgcugauu

SEQ ID NO: 780591 - RNA, 19 nt, Artificial Sequence
  Description of Artificial Sequence: Synthetic oligonucleotide
ccccuuccccuccucgcgu

SEQ ID NO: 780592 - RNA, 19 nt, Artificial Sequence
  Description of Artificial Sequence: Synthetic oligonucleotide
ggcuggggugggaucucuu

SEQ ID NO: 780593 - RNA, 19 nt, Artificial Sequence
  Description of Artificial Sequence: Synthetic oligonucleotide
gcgcgcgcucugagugaca

SEQ ID NO: 780594 - RNA, 19 nt, Artificial Sequence
  Description of Artificial Sequence: Synthetic oligonucleotide
ccucucugcgcgccuuguu

SEQ ID NO: 780595 - RNA, 19 nt, Artificial Sequence
  Description of Artificial Sequence: Synthetic oligonucleotide
cccuacggcggucgcugau

SEQ ID NO: 780596 - RNA, 19 nt, Artificial Sequence
  Description of Artificial Sequence: Synthetic oligonucleotide
cggcggucgcugauuggcu

SEQ ID NO: 780597 - RNA, 19 nt, Artificial Sequence
  Description of Artificial Sequence: Synthetic oligonucleotide
gcagccccgggaagauguu

SEQ ID NO: 780598 - RNA, 19 nt, Artificial Sequence
  Description of Artificial Sequence: Synthetic oligonucleotide
cccgaccuccaggcccaga

SEQ ID NO: 780599 - RNA, 19 nt, Artificial Sequence
  Description of Artificial Sequence: Synthetic oligonucleotide
ccaucccgucucucccuuu

SEQ ID NO: 780600 - RNA, 19 nt, Artificial Sequence
  Description of Artificial Sequence: Synthetic oligonucleotide
cgaugcgcuccuggguaau

SEQ ID NO: 780601 - RNA, 19 nt, Artificial Sequence
  Description of Artificial Sequence: Synthetic oligonucleotide
ccuccucgcguggcuucau

SEQ ID NO: 780602 - RNA, 19 nt, Artificial Sequence
  Description of Artificial Sequence: Synthetic oligonucleotide
aacgacagaauuuauaggc

SEQ ID NO: 780603 - RNA, 19 nt, Artificial Sequence
  Description of Artificial Sequence: Synthetic oligonucleotide
uuuauuacgaucuugaugu

SEQ ID NO: 780604 - RNA, 19 nt, Artificial Sequence
  Description of Artificial Sequence: Synthetic oligonucleotide
uuuauaggcagaaauguag

SEQ ID NO: 780605 - RNA, 19 nt, Artificial Sequence
  Description of Artificial Sequence: Synthetic oligonucleotide
aaauccaaaaguuucggcu

SEQ ID NO: 780606 - RNA, 19 nt, Artificial Sequence
  Description of Artificial Sequence: Synthetic oligonucleotide
agaaauaccugucagcauc

SEQ ID NO: 780607 - RNA, 19 nt, Artificial Sequence
  Description of Artificial Sequence: Synthetic oligonucleotide
acaacgacagaauuuauag

SEQ ID NO: 780608 - RNA, 19 nt, Artificial Sequence
  Description of Artificial Sequence: Synthetic oligonucleotide
ucguugaaaagcaagagga

SEQ ID NO: 780609 - RNA, 19 nt, Artificial Sequence
  Description of Artificial Sequence: Synthetic oligonucleotide
acugugauaguuucgaauc

SEQ ID NO: 780610 - RNA, 19 nt, Artificial Sequence
  Description of Artificial Sequence: Synthetic oligonucleotide
aauauguguggcugcaugg

SEQ ID NO: 780611 - RNA, 19 nt, Artificial Sequence
  Description of Artificial Sequence: Synthetic oligonucleotide
ugugucaaaacccauguac

SEQ ID NO: 780612 - RNA, 19 nt, Artificial Sequence
  Description of Artificial Sequence: Synthetic oligonucleotide
ucuuuaaagagcuggcgcg

SEQ ID NO: 780613 - RNA, 19 nt, Artificial Sequence
  Description of Artificial Sequence: Synthetic oligonucleotide
aguguugauacuuuccagg

SEQ ID NO: 780614 - RNA, 19 nt, Artificial Sequence
  Description of Artificial Sequence: Synthetic oligonucleotide
guugauacuuuccaggcgg

SEQ ID NO: 780615 - RNA, 19 nt, Artificial Sequence
  Description of Artificial Sequence: Synthetic oligonucleotide
uuuuauguggaccagucuc

SEQ ID NO: 780616 - RNA, 19 nt, Artificial Sequence
  Description of Artificial Sequence: Synthetic oligonucleotide
auuuauuacgaucuugaug

SEQ ID NO: 780617 - RNA, 19 nt, Artificial Sequence
  Description of Artificial Sequence: Synthetic oligonucleotide
aaaaucguugaaaagcaag

SEQ ID NO: 780618 - RNA, 19 nt, Artificial Sequence
  Description of Artificial Sequence: Synthetic oligonucleotide
agaccuuauacuuucuacg

SEQ ID NO: 780619 - RNA, 19 nt, Artificial Sequence
  Description of Artificial Sequence: Synthetic oligonucleotide
aaguugugaacuuuugaug

SEQ ID NO: 780620 - RNA, 19 nt, Artificial Sequence
  Description of Artificial Sequence: Synthetic oligonucleotide
aaaguuucggcuauuuuag

SEQ ID NO: 780621 - RNA, 19 nt, Artificial Sequence
  Description of Artificial Sequence: Synthetic oligonucleotide
ucuacguaggacaaguacu

SEQ ID NO: 780622 - RNA, 19 nt, Artificial Sequence
  Description of Artificial Sequence: Synthetic oligonucleotide
aaauauguguggcugcaug

SEQ ID NO: 780623 - RNA, 19 nt, Artificial Sequence
  Description of Artificial Sequence: Synthetic oligonucleotide
ccuacuuggagcaaaaucg

SEQ ID NO: 780624 - RNA, 19 nt, Artificial Sequence
  Description of Artificial Sequence: Synthetic oligonucleotide
aguuucggcuauuuuagac

SEQ ID NO: 780625 - RNA, 19 nt, Artificial Sequence
  Description of Artificial Sequence: Synthetic oligonucleotide
ucgauuguggcaaucccgg

SEQ ID NO: 780626 - RNA, 19 nt, Artificial Sequence
  Description of Artificial Sequence: Synthetic oligonucleotide
auacuuucuacguaggaca

SEQ ID NO: 780627 - RNA, 19 nt, Artificial Sequence
  Description of Artificial Sequence: Synthetic oligonucleotide
accagugacauguaagcgg

SEQ ID NO: 780628 - RNA, 19 nt, Artificial Sequence
  Description of Artificial Sequence: Synthetic oligonucleotide
uccaaacacccuuagugcg

SEQ ID NO: 780629 - RNA, 19 nt, Artificial Sequence
  Description of Artificial Sequence: Synthetic oligonucleotide
ucccauagcuagcauaagg

SEQ ID NO: 780630 - RNA, 19 nt, Artificial Sequence
  Description of Artificial Sequence: Synthetic oligonucleotide
ucugcgguuggaaauaugu

SEQ ID NO: 780631 - RNA, 19 nt, Artificial Sequence
  Description of Artificial Sequence: Synthetic oligonucleotide
uccggauccaccaucuccg

SEQ ID NO: 780632 - RNA, 19 nt, Artificial Sequence
  Description of Artificial Sequence: Synthetic oligonucleotide
ucugaaucuuguaaccacc

SEQ ID NO: 780633 - RNA, 19 nt, Artificial Sequence
  Description of Artificial Sequence: Synthetic oligonucleotide
gauaguuucgaauccccug

SEQ ID NO: 780634 - RNA, 19 nt, Artificial Sequence
  Description of Artificial Sequence: Synthetic oligonucleotide
auguaauuuucuugaaauc

SEQ ID NO: 780635 - RNA, 19 nt, Artificial Sequence
  Description of Artificial Sequence: Synthetic oligonucleotide
uacguugugagucacuccu

SEQ ID NO: 780636 - RNA, 19 nt, Artificial Sequence
  Description of Artificial Sequence: Synthetic oligonucleotide
cuaaguaaggcaucguuuc

SEQ ID NO: 780637 - RNA, 19 nt, Artificial Sequence
  Description of Artificial Sequence: Synthetic oligonucleotide
aaguaaggcaucguuuccg

SEQ ID NO: 780638 - RNA, 19 nt, Artificial Sequence
  Description of Artificial Sequence: Synthetic oligonucleotide
uuugauggaucgauguaca

SEQ ID NO: 780639 - RNA, 19 nt, Artificial Sequence
  Description of Artificial Sequence: Synthetic oligonucleotide
aauccaaaaguuucggcua

SEQ ID NO: 780640 - RNA, 19 nt, Artificial Sequence
  Description of Artificial Sequence: Synthetic oligonucleotide
uuuugauggaucgauguac

SEQ ID NO: 780641 - RNA, 19 nt, Artificial Sequence
  Description of Artificial Sequence: Synthetic oligonucleotide
uauacuuucuacguaggac

SEQ ID NO: 780642 - RNA, 19 nt, Artificial Sequence
  Description of Artificial Sequence: Synthetic oligonucleotide
uuuauguggaccagucucu

SEQ ID NO: 780643 - RNA, 19 nt, Artificial Sequence
  Description of Artificial Sequence: Synthetic oligonucleotide
uuguaaccaccacaugugg

SEQ ID NO: 780644 - RNA, 19 nt, Artificial Sequence
  Description of Artificial Sequence: Synthetic oligonucleotide
aaaucguugaaaagcaaga

SEQ ID NO: 780645 - RNA, 19 nt, Artificial Sequence
  Description of Artificial Sequence: Synthetic oligonucleotide
uucuacguaggacaaguac

SEQ ID NO: 780646 - RNA, 19 nt, Artificial Sequence
  Description of Artificial Sequence: Synthetic oligonucleotide
cuauuuuagaccucagguc

SEQ ID NO: 780647 - RNA, 19 nt, Artificial Sequence
  Description of Artificial Sequence: Synthetic oligonucleotide
caaguacucggcaauaaug

SEQ ID NO: 780648 - RNA, 19 nt, Artificial Sequence
  Description of Artificial Sequence: Synthetic oligonucleotide
aucgccuuuacguugugag

SEQ ID NO: 780649 - RNA, 19 nt, Artificial Sequence
  Description of Artificial Sequence: Synthetic oligonucleotide
agcaaguagagucuuaaaa

SEQ ID NO: 780650 - RNA, 19 nt, Artificial Sequence
  Description of Artificial Sequence: Synthetic oligonucleotide
aaggcaucguuuccggauc

SEQ ID NO: 780651 - RNA, 19 nt, Artificial Sequence
  Description of Artificial Sequence: Synthetic oligonucleotide
ggagcuuuuccucacaucc

SEQ ID NO: 780652 - RNA, 19 nt, Artificial Sequence
  Description of Artificial Sequence: Synthetic oligonucleotide
aguagcaccacacgauauc

SEQ ID NO: 780653 - RNA, 19 nt, Artificial Sequence
  Description of Artificial Sequence: Synthetic oligonucleotide
aguacucggcaauaaugac

SEQ ID NO: 780654 - RNA, 19 nt, Artificial Sequence
  Description of Artificial Sequence: Synthetic oligonucleotide
gaaauccaaaaguuucggc

SEQ ID NO: 780655 - RNA, 19 nt, Artificial Sequence
  Description of Artificial Sequence: Synthetic oligonucleotide
uuucggcuauuuuagaccu

SEQ ID NO: 780656 - RNA, 19 nt, Artificial Sequence
  Description of Artificial Sequence: Synthetic oligonucleotide
ucuaaguaaggcaucguuu

SEQ ID NO: 780657 - RNA, 19 nt, Artificial Sequence
  Description of Artificial Sequence: Synthetic oligonucleotide
gauggaucgauguacagcu

SEQ ID NO: 780658 - RNA, 19 nt, Artificial Sequence
  Description of Artificial Sequence: Synthetic oligonucleotide
cagaguacuucuuaacaag

SEQ ID NO: 780659 - RNA, 19 nt, Artificial Sequence
  Description of Artificial Sequence: Synthetic oligonucleotide
uguugagauacucccgagc

SEQ ID NO: 780660 - RNA, 19 nt, Artificial Sequence
  Description of Artificial Sequence: Synthetic oligonucleotide
auaguuucgaauccccuga

SEQ ID NO: 780661 - RNA, 19 nt, Artificial Sequence
  Description of Artificial Sequence: Synthetic oligonucleotide
aacugcagcaaguugugaa

SEQ ID NO: 780662 - RNA, 19 nt, Artificial Sequence
  Description of Artificial Sequence: Synthetic oligonucleotide
aguaaggcaucguuuccgg

SEQ ID NO: 780663 - RNA, 19 nt, Artificial Sequence
  Description of Artificial Sequence: Synthetic oligonucleotide
aagcgggucuccaauaaac

SEQ ID NO: 780664 - RNA, 19 nt, Artificial Sequence
  Description of Artificial Sequence: Synthetic oligonucleotide
uguuuggccgcaugugugg

SEQ ID NO: 780665 - RNA, 19 nt, Artificial Sequence
  Description of Artificial Sequence: Synthetic oligonucleotide
aaucgucagggcgucgucc

SEQ ID NO: 780666 - RNA, 19 nt, Artificial Sequence
  Description of Artificial Sequence: Synthetic oligonucleotide
uucacaacgacagaauuua

SEQ ID NO: 780667 - RNA, 19 nt, Artificial Sequence
  Description of Artificial Sequence: Synthetic oligonucleotide
cucgauuguggcaaucccg

SEQ ID NO: 780668 - RNA, 19 nt, Artificial Sequence
  Description of Artificial Sequence: Synthetic oligonucleotide
uagaccucaggucucuacc

SEQ ID NO: 780669 - RNA, 19 nt, Artificial Sequence
  Description of Artificial Sequence: Synthetic oligonucleotide
ugugauaguuucgaauccc

SEQ ID NO: 780670 - RNA, 19 nt, Artificial Sequence
  Description of Artificial Sequence: Synthetic oligonucleotide
cagaguggaguccagguag

SEQ ID NO: 780671 - RNA, 19 nt, Artificial Sequence
  Description of Artificial Sequence: Synthetic oligonucleotide
uggaucgauguacagcucu

SEQ ID NO: 780672 - RNA, 19 nt, Artificial Sequence
  Description of Artificial Sequence: Synthetic oligonucleotide
aauguagcacuuauuucug

SEQ ID NO: 780673 - RNA, 19 nt, Artificial Sequence
  Description of Artificial Sequence: Synthetic oligonucleotide
uuccggauccaccaucucc

SEQ ID NO: 780674 - RNA, 19 nt, Artificial Sequence
  Description of Artificial Sequence: Synthetic oligonucleotide
ucauucacggccucugucu

SEQ ID NO: 780675 - RNA, 19 nt, Artificial Sequence
  Description of Artificial Sequence: Synthetic oligonucleotide
ugauggaucgauguacagc

SEQ ID NO: 780676 - RNA, 19 nt, Artificial Sequence
  Description of Artificial Sequence: Synthetic oligonucleotide
aagcccgcaggccaagccg

SEQ ID NO: 780677 - RNA, 19 nt, Artificial Sequence
  Description of Artificial Sequence: Synthetic oligonucleotide
uuuucccuaguugaaguug

SEQ ID NO: 780678 - RNA, 19 nt, Artificial Sequence
  Description of Artificial Sequence: Synthetic oligonucleotide
uuuacguugugagucacuc

SEQ ID NO: 780679 - RNA, 19 nt, Artificial Sequence
  Description of Artificial Sequence: Synthetic oligonucleotide
gauguggauggaguggagg

SEQ ID NO: 780680 - RNA, 19 nt, Artificial Sequence
  Description of Artificial Sequence: Synthetic oligonucleotide
gaugcuuuccugggaaggg

SEQ ID NO: 780681 - RNA, 19 nt, Artificial Sequence
  Description of Artificial Sequence: Synthetic oligonucleotide
uaugccgggucccuguacc

SEQ ID NO: 780682 - RNA, 19 nt, Artificial Sequence
  Description of Artificial Sequence: Synthetic oligonucleotide
uccugacaacugcaggucg

SEQ ID NO: 780683 - RNA, 19 nt, Artificial Sequence
  Description of Artificial Sequence: Synthetic oligonucleotide
uacaccaguuggucgaugc

SEQ ID NO: 780684 - RNA, 19 nt, Artificial Sequence
  Description of Artificial Sequence: Synthetic oligonucleotide
augucuaaguaaggcaucg

SEQ ID NO: 780685 - RNA, 19 nt, Artificial Sequence
  Description of Artificial Sequence: Synthetic oligonucleotide
ugagauacucccgagcuuc

SEQ ID NO: 780686 - RNA, 19 nt, Artificial Sequence
  Description of Artificial Sequence: Synthetic oligonucleotide
ccuuauacuuucuacguag

SEQ ID NO: 780687 - RNA, 19 nt, Artificial Sequence
  Description of Artificial Sequence: Synthetic oligonucleotide
uggaaauauguguggcugc

SEQ ID NO: 780688 - RNA, 19 nt, Artificial Sequence
  Description of Artificial Sequence: Synthetic oligonucleotide
cagaccuuauacuuucuac

SEQ ID NO: 780689 - RNA, 19 nt, Artificial Sequence
  Description of Artificial Sequence: Synthetic oligonucleotide
ucggcaauaaugacuuccu

SEQ ID NO: 780690 - RNA, 19 nt, Artificial Sequence
  Description of Artificial Sequence: Synthetic oligonucleotide
uccacugugauaguuucga

SEQ ID NO: 780691 - RNA, 19 nt, Artificial Sequence
  Description of Artificial Sequence: Synthetic oligonucleotide
uggcaaucccgguugcucg

SEQ ID NO: 780692 - RNA, 19 nt, Artificial Sequence
  Description of Artificial Sequence: Synthetic oligonucleotide
auguacaccaguuggucga

SEQ ID NO: 780693 - RNA, 19 nt, Artificial Sequence
  Description of Artificial Sequence: Synthetic oligonucleotide
aucguuuccggauccacca

SEQ ID NO: 780694 - RNA, 19 nt, Artificial Sequence
  Description of Artificial Sequence: Synthetic oligonucleotide
ucucaugguaucccauagc

SEQ ID NO: 780695 - RNA, 19 nt, Artificial Sequence
  Description of Artificial Sequence: Synthetic oligonucleotide
gaaauaccugucagcaucc

SEQ ID NO: 780696 - RNA, 19 nt, Artificial Sequence
  Description of Artificial Sequence: Synthetic oligonucleotide
ugaaucuuguaaccaccac

SEQ ID NO: 780697 - RNA, 19 nt, Artificial Sequence
  Description of Artificial Sequence: Synthetic oligonucleotide
aaucccgguugcucgguag

SEQ ID NO: 780698 - RNA, 19 nt, Artificial Sequence
  Description of Artificial Sequence: Synthetic oligonucleotide
ucgaccguucacaacgaca

SEQ ID NO: 780699 - RNA, 19 nt, Artificial Sequence
  Description of Artificial Sequence: Synthetic oligonucleotide
ugagcggccaacuggacau

SEQ ID NO: 780700 - RNA, 19 nt, Artificial Sequence
  Description of Artificial Sequence: Synthetic oligonucleotide
cauaagggcuuuccuuucg

SEQ ID NO: 780701 - RNA, 19 nt, Artificial Sequence
  Description of Artificial Sequence: Synthetic oligonucleotide
cugugauaguuucgaaucc

SEQ ID NO: 780702 - RNA, 19 nt, Artificial Sequence
  Description of Artificial Sequence: Synthetic oligonucleotide
uugauggaucgauguacag

SEQ ID NO: 780703 - RNA, 19 nt, Artificial Sequence
  Description of Artificial Sequence: Synthetic oligonucleotide
ugggaauucccuguccucc

SEQ ID NO: 780704 - RNA, 19 nt, Artificial Sequence
  Description of Artificial Sequence: Synthetic oligonucleotide
guugaggcacuagaggucc

SEQ ID NO: 780705 - RNA, 19 nt, Artificial Sequence
  Description of Artificial Sequence: Synthetic oligonucleotide
aucaucgaggcauuccagu

SEQ ID NO: 780706 - RNA, 19 nt, Artificial Sequence
  Description of Artificial Sequence: Synthetic oligonucleotide
uccauggugcgcaagcguc

SEQ ID NO: 780707 - RNA, 19 nt, Artificial Sequence
  Description of Artificial Sequence: Synthetic oligonucleotide
ucggcuauuuuagaccuca

SEQ ID NO: 780708 - RNA, 19 nt, Artificial Sequence
  Description of Artificial Sequence: Synthetic oligonucleotide
gagucagacggggaugugg

SEQ ID NO: 780709 - RNA, 19 nt, Artificial Sequence
  Description of Artificial Sequence: Synthetic oligonucleotide
ccuccaaacacccuuagug

SEQ ID NO: 780710 - RNA, 19 nt, Artificial Sequence
  Description of Artificial Sequence: Synthetic oligonucleotide
uccacguucccaucacaag

SEQ ID NO: 780711 - RNA, 19 nt, Artificial Sequence
  Description of Artificial Sequence: Synthetic oligonucleotide
ugaacuuuugauggaucga

SEQ ID NO: 780712 - RNA, 19 nt, Artificial Sequence
  Description of Artificial Sequence: Synthetic oligonucleotide
aggcacuagaggucccugc

SEQ ID NO: 780713 - RNA, 19 nt, Artificial Sequence
  Description of Artificial Sequence: Synthetic oligonucleotide
aguuucgaauccccugaag

SEQ ID NO: 780714 - RNA, 19 nt, Artificial Sequence
  Description of Artificial Sequence: Synthetic oligonucleotide
acguucccaucacaagccc

SEQ ID NO: 780715 - RNA, 19 nt, Artificial Sequence
  Description of Artificial Sequence: Synthetic oligonucleotide
uacuuucuacguaggacaa

SEQ ID NO: 780716 - RNA, 19 nt, Artificial Sequence
  Description of Artificial Sequence: Synthetic oligonucleotide
uauuacgaucuugauguaa

SEQ ID NO: 780717 - RNA, 19 nt, Artificial Sequence
  Description of Artificial Sequence: Synthetic oligonucleotide
uuguugagauacucccgag

SEQ ID NO: 780718 - RNA, 19 nt, Artificial Sequence
  Description of Artificial Sequence: Synthetic oligonucleotide
caaggguuuucccuaguug

SEQ ID NO: 780719 - RNA, 19 nt, Artificial Sequence
  Description of Artificial Sequence: Synthetic oligonucleotide
uacguaggacaaguacucg

SEQ ID NO: 780720 - RNA, 19 nt, Artificial Sequence
  Description of Artificial Sequence: Synthetic oligonucleotide
agaaccgcguaguugucca

SEQ ID NO: 780721 - RNA, 19 nt, Artificial Sequence
  Description of Artificial Sequence: Synthetic oligonucleotide
guugagauacucccgagcu

SEQ ID NO: 780722 - RNA, 19 nt, Artificial Sequence
  Description of Artificial Sequence: Synthetic oligonucleotide
guagcacuuauuucuguuc

SEQ ID NO: 780723 - RNA, 19 nt, Artificial Sequence
  Description of Artificial Sequence: Synthetic oligonucleotide
ugauggaccugcccgucug

SEQ ID NO: 780724 - RNA, 19 nt, Artificial Sequence
  Description of Artificial Sequence: Synthetic oligonucleotide
aaagcaagaggaacgcaaa

SEQ ID NO: 780725 - RNA, 19 nt, Artificial Sequence
  Description of Artificial Sequence: Synthetic oligonucleotide
uaccugaggaagaagccua

SEQ ID NO: 780726 - RNA, 19 nt, Artificial Sequence
  Description of Artificial Sequence: Synthetic oligonucleotide
gcuauuuuagaccucaggu

SEQ ID NO: 780727 - RNA, 19 nt, Artificial Sequence
  Description of Artificial Sequence: Synthetic oligonucleotide
aaguuucggcuauuuuaga

SEQ ID NO: 780728 - RNA, 19 nt, Artificial Sequence
  Description of Artificial Sequence: Synthetic oligonucleotide
ugauacuuuccaggcggcg

SEQ ID NO: 780729 - RNA, 19 nt, Artificial Sequence
  Description of Artificial Sequence: Synthetic oligonucleotide
gaaugcguuucuccuucag

SEQ ID NO: 780730 - RNA, 19 nt, Artificial Sequence
  Description of Artificial Sequence: Synthetic oligonucleotide
aggcaucguuuccggaucc

SEQ ID NO: 780731 - RNA, 19 nt, Artificial Sequence
  Description of Artificial Sequence: Synthetic oligonucleotide
ucgguagugcucauucccu

SEQ ID NO: 780732 - RNA, 19 nt, Artificial Sequence
  Description of Artificial Sequence: Synthetic oligonucleotide
uuacguugugagucacucc

SEQ ID NO: 780733 - RNA, 19 nt, Artificial Sequence
  Description of Artificial Sequence: Synthetic oligonucleotide
cugaaugcguuucuccuuc

SEQ ID NO: 780734 - RNA, 19 nt, Artificial Sequence
  Description of Artificial Sequence: Synthetic oligonucleotide
cuuagugcggcuucagcca

SEQ ID NO: 780735 - RNA, 19 nt, Artificial Sequence
  Description of Artificial Sequence: Synthetic oligonucleotide
ugcggcagaccuuauacuu

SEQ ID NO: 780736 - RNA, 19 nt, Artificial Sequence
  Description of Artificial Sequence: Synthetic oligonucleotide
uaagggcuuuccuuucggc

SEQ ID NO: 780737 - RNA, 19 nt, Artificial Sequence
  Description of Artificial Sequence: Synthetic oligonucleotide
acucgaggcggucagagua

SEQ ID NO: 780738 - RNA, 19 nt, Artificial Sequence
  Description of Artificial Sequence: Synthetic oligonucleotide
ccuuagugcggcuucagcc

SEQ ID NO: 780739 - RNA, 19 nt, Artificial Sequence
  Description of Artificial Sequence: Synthetic oligonucleotide
aacgcaaagaagagcugca

SEQ ID NO: 780740 - RNA, 19 nt, Artificial Sequence
  Description of Artificial Sequence: Synthetic oligonucleotide
ugcaucaucgaggcauucc

SEQ ID NO: 780741 - RNA, 19 nt, Artificial Sequence
  Description of Artificial Sequence: Synthetic oligonucleotide
uuagugcggcuucagccac

SEQ ID NO: 780742 - RNA, 19 nt, Artificial Sequence
  Description of Artificial Sequence: Synthetic oligonucleotide
cacgauauccagcuggaga

SEQ ID NO: 780743 - RNA, 19 nt, Artificial Sequence
  Description of Artificial Sequence: Synthetic oligonucleotide
aagcaaguagagucuuaaa

SEQ ID NO: 780744 - RNA, 19 nt, Artificial Sequence
  Description of Artificial Sequence: Synthetic oligonucleotide
gaccucaggucucuaccag

SEQ ID NO: 780745 - RNA, 19 nt, Artificial Sequence
  Description of Artificial Sequence: Synthetic oligonucleotide
uuuuagaccucaggucucu

SEQ ID NO: 780746 - RNA, 19 nt, Artificial Sequence
  Description of Artificial Sequence: Synthetic oligonucleotide
ucaaggguuuucccuaguu

SEQ ID NO: 780747 - RNA, 19 nt, Artificial Sequence
  Description of Artificial Sequence: Synthetic oligonucleotide
uacgaucuugauguaauuu

SEQ ID NO: 780748 - RNA, 19 nt, Artificial Sequence
  Description of Artificial Sequence: Synthetic oligonucleotide
uguguggaguagcccauuc

SEQ ID NO: 780749 - RNA, 19 nt, Artificial Sequence
  Description of Artificial Sequence: Synthetic oligonucleotide
aaacccauguacaccaguu

SEQ ID NO: 780750 - RNA, 19 nt, Artificial Sequence
  Description of Artificial Sequence: Synthetic oligonucleotide
gugauaguuucgaaucccc

SEQ ID NO: 780751 - RNA, 19 nt, Artificial Sequence
  Description of Artificial Sequence: Synthetic oligonucleotide
ucugaaugcguuucuccuu

SEQ ID NO: 780752 - RNA, 19 nt, Artificial Sequence
  Description of Artificial Sequence: Synthetic oligonucleotide
uguggaccagucucuggug

SEQ ID NO: 780753 - RNA, 19 nt, Artificial Sequence
  Description of Artificial Sequence: Synthetic oligonucleotide
auauccagcuggagaaccg

SEQ ID NO: 780754 - RNA, 19 nt, Artificial Sequence
  Description of Artificial Sequence: Synthetic oligonucleotide
uuauguggaccagucucug

SEQ ID NO: 780755 - RNA, 19 nt, Artificial Sequence
  Description of Artificial Sequence: Synthetic oligonucleotide
ucguccacguugccucugg

SEQ ID NO: 780756 - RNA, 19 nt, Artificial Sequence
  Description of Artificial Sequence: Synthetic oligonucleotide
ugguaucccauagcuagca

SEQ ID NO: 780757 - RNA, 19 nt, Artificial Sequence
  Description of Artificial Sequence: Synthetic oligonucleotide
gauggaccugcccgucugg

SEQ ID NO: 780758 - RNA, 19 nt, Artificial Sequence
  Description of Artificial Sequence: Synthetic oligonucleotide
uaccugucagcauccagaa

SEQ ID NO: 780759 - RNA, 19 nt, Artificial Sequence
  Description of Artificial Sequence: Synthetic oligonucleotide
ucuagcaccaucgccuuua

SEQ ID NO: 780760 - RNA, 19 nt, Artificial Sequence
  Description of Artificial Sequence: Synthetic oligonucleotide
agaccucaggucucuacca

SEQ ID NO: 780761 - RNA, 19 nt, Artificial Sequence
  Description of Artificial Sequence: Synthetic oligonucleotide
uaaagcauuucugggccaa

SEQ ID NO: 780762 - RNA, 19 nt, Artificial Sequence
  Description of Artificial Sequence: Synthetic oligonucleotide
caucgaggcauuccaguug

SEQ ID NO: 780763 - RNA, 19 nt, Artificial Sequence
  Description of Artificial Sequence: Synthetic oligonucleotide
ucgaugcuuuccugggaag

SEQ ID NO: 780764 - RNA, 19 nt, Artificial Sequence
  Description of Artificial Sequence: Synthetic oligonucleotide
auagcuagcauaagggcuu

SEQ ID NO: 780765 - RNA, 19 nt, Artificial Sequence
  Description of Artificial Sequence: Synthetic oligonucleotide
uguaagcgggucuccaaua

SEQ ID NO: 780766 - RNA, 19 nt, Artificial Sequence
  Description of Artificial Sequence: Synthetic oligonucleotide
uuuggccgcauguguggag

SEQ ID NO: 780767 - RNA, 19 nt, Artificial Sequence
  Description of Artificial Sequence: Synthetic oligonucleotide
gcaaaaucguugaaaagca

SEQ ID NO: 780768 - RNA, 19 nt, Artificial Sequence
  Description of Artificial Sequence: Synthetic oligonucleotide
auguaagcgggucuccaau

SEQ ID NO: 780769 - RNA, 19 nt, Artificial Sequence
  Description of Artificial Sequence: Synthetic oligonucleotide
cucaugguaucccauagcu

SEQ ID NO: 780770 - RNA, 19 nt, Artificial Sequence
  Description of Artificial Sequence: Synthetic oligonucleotide
cugcgguuggaaauaugug

SEQ ID NO: 780771 - RNA, 19 nt, Artificial Sequence
  Description of Artificial Sequence: Synthetic oligonucleotide
caaacacccuuagugcggc

SEQ ID NO: 780772 - RNA, 19 nt, Artificial Sequence
  Description of Artificial Sequence: Synthetic oligonucleotide
accguucacaacgacagaa

SEQ ID NO: 780773 - RNA, 19 nt, Artificial Sequence
  Description of Artificial Sequence: Synthetic oligonucleotide
caucuguugaggcacuaga

SEQ ID NO: 780774 - RNA, 19 nt, Artificial Sequence
  Description of Artificial Sequence: Synthetic oligonucleotide
cuguugaggcacuagaggu

SEQ ID NO: 780775 - RNA, 19 nt, Artificial Sequence
  Description of Artificial Sequence: Synthetic oligonucleotide
ucgugcuccgggauguccu

SEQ ID NO: 780776 - RNA, 19 nt, Artificial Sequence
  Description of Artificial Sequence: Synthetic oligonucleotide
accgcguaguuguccacag

SEQ ID NO: 780777 - RNA, 19 nt, Artificial Sequence
  Description of Artificial Sequence: Synthetic oligonucleotide
augguccacguucccauca

SEQ ID NO: 780778 - RNA, 19 nt, Artificial Sequence
  Description of Artificial Sequence: Synthetic oligonucleotide
accuuauacuuucuacgua

SEQ ID NO: 780779 - RNA, 19 nt, Artificial Sequence
  Description of Artificial Sequence: Synthetic oligonucleotide
uuucuacguaggacaagua

SEQ ID NO: 780780 - RNA, 19 nt, Artificial Sequence
  Description of Artificial Sequence: Synthetic oligonucleotide
ccaaacacccuuagugcgg

SEQ ID NO: 780781 - RNA, 19 nt, Artificial Sequence
  Description of Artificial Sequence: Synthetic oligonucleotide
ugcagcggaucucuucuau

SEQ ID NO: 780782 - RNA, 19 nt, Artificial Sequence
  Description of Artificial Sequence: Synthetic oligonucleotide
aucgucagggcgucgucca

SEQ ID NO: 780783 - RNA, 19 nt, Artificial Sequence
  Description of Artificial Sequence: Synthetic oligonucleotide
uaguuucgaauccccugaa

SEQ ID NO: 780784 - RNA, 19 nt, Artificial Sequence
  Description of Artificial Sequence: Synthetic oligonucleotide
agaaucgucagggcgucgu

SEQ ID NO: 780785 - RNA, 19 nt, Artificial Sequence
  Description of Artificial Sequence: Synthetic oligonucleotide
cauggcaaggcuaugccgu

SEQ ID NO: 780786 - RNA, 19 nt, Artificial Sequence
  Description of Artificial Sequence: Synthetic oligonucleotide
uugcggcagaccuuauacu

SEQ ID NO: 780787 - RNA, 19 nt, Artificial Sequence
  Description of Artificial Sequence: Synthetic oligonucleotide
agggcgucguccacguugc

SEQ ID NO: 780788 - RNA, 19 nt, Artificial Sequence
  Description of Artificial Sequence: Synthetic oligonucleotide
guaggacaaguacucggca

SEQ ID NO: 780789 - RNA, 19 nt, Artificial Sequence
  Description of Artificial Sequence: Synthetic oligonucleotide
gauucucuccauaacaguu

SEQ ID NO: 780790 - RNA, 19 nt, Artificial Sequence
  Description of Artificial Sequence: Synthetic oligonucleotide
uugagauacucccgagcuu

SEQ ID NO: 780791 - RNA, 19 nt, Artificial Sequence
  Description of Artificial Sequence: Synthetic oligonucleotide
aaccgcguaguuguccaca

SEQ ID NO: 780792 - RNA, 19 nt, Artificial Sequence
  Description of Artificial Sequence: Synthetic oligonucleotide
cacaacgacagaauuuaua

SEQ ID NO: 780793 - RNA, 19 nt, Artificial Sequence
  Description of Artificial Sequence: Synthetic oligonucleotide
gcauggcaaggcuaugccg

SEQ ID NO: 780794 - RNA, 19 nt, Artificial Sequence
  Description of Artificial Sequence: Synthetic oligonucleotide
guuggucgaugcuuuccug

SEQ ID NO: 780795 - RNA, 19 nt, Artificial Sequence
  Description of Artificial Sequence: Synthetic oligonucleotide
ggucagaguacuucuuaac

SEQ ID NO: 780796 - RNA, 19 nt, Artificial Sequence
  Description of Artificial Sequence: Synthetic oligonucleotide
cgaccguucacaacgacag

SEQ ID NO: 780797 - RNA, 19 nt, Artificial Sequence
  Description of Artificial Sequence: Synthetic oligonucleotide
ucgccuuuacguugugagu

SEQ ID NO: 780798 - RNA, 19 nt, Artificial Sequence
  Description of Artificial Sequence: Synthetic oligonucleotide
aaauaccugucagcaucca

SEQ ID NO: 780799 - RNA, 19 nt, Artificial Sequence
  Description of Artificial Sequence: Synthetic oligonucleotide
ggcugcaugguccacguuc

SEQ ID NO: 780800 - RNA, 19 nt, Artificial Sequence
  Description of Artificial Sequence: Synthetic oligonucleotide
ccuuuuauguggaccaguc

SEQ ID NO: 780801 - RNA, 19 nt, Artificial Sequence
  Description of Artificial Sequence: Synthetic oligonucleotide
gccucucuucacuaugccg

SEQ ID NO: 780802 - RNA, 19 nt, Artificial Sequence
  Description of Artificial Sequence: Synthetic oligonucleotide
acuuucuacguaggacaag

SEQ ID NO: 780803 - RNA, 19 nt, Artificial Sequence
  Description of Artificial Sequence: Synthetic oligonucleotide
ugaaugcguuucuccuuca

SEQ ID NO: 780804 - RNA, 19 nt, Artificial Sequence
  Description of Artificial Sequence: Synthetic oligonucleotide
cuugcuuugcagcggaucu

SEQ ID NO: 780805 - RNA, 19 nt, Artificial Sequence
  Description of Artificial Sequence: Synthetic oligonucleotide
ugugccgcgcucacuugcu

SEQ ID NO: 780806 - RNA, 19 nt, Artificial Sequence
  Description of Artificial Sequence: Synthetic oligonucleotide
gccuacuuggagcaaaauc

SEQ ID NO: 780807 - RNA, 19 nt, Artificial Sequence
  Description of Artificial Sequence: Synthetic oligonucleotide
cuggagaaccgcguaguug

SEQ ID NO: 780808 - RNA, 19 nt, Artificial Sequence
  Description of Artificial Sequence: Synthetic oligonucleotide
guaagcgggucuccaauaa

SEQ ID NO: 780809 - RNA, 19 nt, Artificial Sequence
  Description of Artificial Sequence: Synthetic oligonucleotide
caaaaucguugaaaagcaa

SEQ ID NO: 780810 - RNA, 19 nt, Artificial Sequence
  Description of Artificial Sequence: Synthetic oligonucleotide
cuuucuacguaggacaagu

SEQ ID NO: 780811 - RNA, 19 nt, Artificial Sequence
  Description of Artificial Sequence: Synthetic oligonucleotide
gucgaugcuuuccugggaa

SEQ ID NO: 780812 - RNA, 19 nt, Artificial Sequence
  Description of Artificial Sequence: Synthetic oligonucleotide
uuuccaggcggcguuuccu

SEQ ID NO: 780813 - RNA, 19 nt, Artificial Sequence
  Description of Artificial Sequence: Synthetic oligonucleotide
agucagacggggaugugga

SEQ ID NO: 780814 - RNA, 19 nt, Artificial Sequence
  Description of Artificial Sequence: Synthetic oligonucleotide
uuguggcaaucccgguugc

SEQ ID NO: 780815 - RNA, 19 nt, Artificial Sequence
  Description of Artificial Sequence: Synthetic oligonucleotide
cucgaggcggucagaguac

SEQ ID NO: 780816 - RNA, 19 nt, Artificial Sequence
  Description of Artificial Sequence: Synthetic oligonucleotide
cuucacuaugccggguccc

SEQ ID NO: 780817 - RNA, 19 nt, Artificial Sequence
  Description of Artificial Sequence: Synthetic oligonucleotide
agcauccagaaggcauggc

SEQ ID NO: 780818 - RNA, 19 nt, Artificial Sequence
  Description of Artificial Sequence: Synthetic oligonucleotide
uucgaccguucacaacgac

SEQ ID NO: 780819 - RNA, 19 nt, Artificial Sequence
  Description of Artificial Sequence: Synthetic oligonucleotide
ugucuaaguaaggcaucgu

SEQ ID NO: 780820 - RNA, 19 nt, Artificial Sequence
  Description of Artificial Sequence: Synthetic oligonucleotide
ccugacaacugcaggucgg

SEQ ID NO: 780821 - RNA, 19 nt, Artificial Sequence
  Description of Artificial Sequence: Synthetic oligonucleotide
gcgguuggaaauaugugug

SEQ ID NO: 780822 - RNA, 19 nt, Artificial Sequence
  Description of Artificial Sequence: Synthetic oligonucleotide
cuuuugauggaucgaugua

SEQ ID NO: 780823 - RNA, 19 nt, Artificial Sequence
  Description of Artificial Sequence: Synthetic oligonucleotide
cuuuccaggcggcguuucc

SEQ ID NO: 780824 - RNA, 19 nt, Artificial Sequence
  Description of Artificial Sequence: Synthetic oligonucleotide
gaauucugauggaccugcc

SEQ ID NO: 780825 - RNA, 19 nt, Artificial Sequence
  Description of Artificial Sequence: Synthetic oligonucleotide
gcuagcauaagggcuuucc

SEQ ID NO: 780826 - RNA, 19 nt, Artificial Sequence
  Description of Artificial Sequence: Synthetic oligonucleotide
ugcccgucugguuugcaau

SEQ ID NO: 780827 - RNA, 19 nt, Artificial Sequence
  Description of Artificial Sequence: Synthetic oligonucleotide
uuauuacgaucuugaugua

SEQ ID NO: 780828 - RNA, 19 nt, Artificial Sequence
  Description of Artificial Sequence: Synthetic oligonucleotide
uccucucaaaguguugaua

SEQ ID NO: 780829 - RNA, 19 nt, Artificial Sequence
  Description of Artificial Sequence: Synthetic oligonucleotide
caagcccgcaggccaagcc

SEQ ID NO: 780830 - RNA, 19 nt, Artificial Sequence
  Description of Artificial Sequence: Synthetic oligonucleotide
acaccaguuggucgaugcu

SEQ ID NO: 780831 - RNA, 19 nt, Artificial Sequence
  Description of Artificial Sequence: Synthetic oligonucleotide
uuggccgcauguguggagu

SEQ ID NO: 780832 - RNA, 19 nt, Artificial Sequence
  Description of Artificial Sequence: Synthetic oligonucleotide
cugugccgcgcucacuugc

SEQ ID NO: 780833 - RNA, 19 nt, Artificial Sequence
  Description of Artificial Sequence: Synthetic oligonucleotide
uuccucucaaaguguugau

SEQ ID NO: 780834 - RNA, 19 nt, Artificial Sequence
  Description of Artificial Sequence: Synthetic oligonucleotide
cugggaauucccuguccuc

SEQ ID NO: 780835 - RNA, 19 nt, Artificial Sequence
  Description of Artificial Sequence: Synthetic oligonucleotide
ugccguacucuuuucucuu

SEQ ID NO: 780836 - RNA, 19 nt, Artificial Sequence
  Description of Artificial Sequence: Synthetic oligonucleotide
caauuccucucugcgguug

SEQ ID NO: 780837 - RNA, 19 nt, Artificial Sequence
  Description of Artificial Sequence: Synthetic oligonucleotide
gaguacuucuuaacaaggu

SEQ ID NO: 780838 - RNA, 19 nt, Artificial Sequence
  Description of Artificial Sequence: Synthetic oligonucleotide
gugagucacuccuuguucu

SEQ ID NO: 780839 - RNA, 19 nt, Artificial Sequence
  Description of Artificial Sequence: Synthetic oligonucleotide
cuuuccugggaagggcuug

SEQ ID NO: 780840 - RNA, 19 nt, Artificial Sequence
  Description of Artificial Sequence: Synthetic oligonucleotide
cagcuggagaaccgcguag

SEQ ID NO: 780841 - RNA, 19 nt, Artificial Sequence
  Description of Artificial Sequence: Synthetic oligonucleotide
gauuguggcaaucccgguu

SEQ ID NO: 780842 - RNA, 19 nt, Artificial Sequence
  Description of Artificial Sequence: Synthetic oligonucleotide
uggcgcgccuuguugagau

SEQ ID NO: 780843 - RNA, 19 nt, Artificial Sequence
  Description of Artificial Sequence: Synthetic oligonucleotide
caccacacgauauccagcu

SEQ ID NO: 780844 - RNA, 19 nt, Artificial Sequence
  Description of Artificial Sequence: Synthetic oligonucleotide
ggaaauauguguggcugca

SEQ ID NO: 780845 - RNA, 19 nt, Artificial Sequence
  Description of Artificial Sequence: Synthetic oligonucleotide
aaacacccuuagugcggcu

SEQ ID NO: 780846 - RNA, 19 nt, Artificial Sequence
  Description of Artificial Sequence: Synthetic oligonucleotide
agcuggagaaccgcguagu

SEQ ID NO: 780847 - RNA, 19 nt, Artificial Sequence
  Description of Artificial Sequence: Synthetic oligonucleotide
uuccaggcggcguuuccuc

SEQ ID NO: 780848 - RNA, 19 nt, Artificial Sequence
  Description of Artificial Sequence: Synthetic oligonucleotide
acaagcccgcaggccaagc

SEQ ID NO: 780849 - RNA, 19 nt, Artificial Sequence
  Description of Artificial Sequence: Synthetic oligonucleotide
uucggcuauuuuagaccuc

SEQ ID NO: 780850 - RNA, 19 nt, Artificial Sequence
  Description of Artificial Sequence: Synthetic oligonucleotide
agcgggucuccaauaaacu

SEQ ID NO: 780851 - RNA, 19 nt, Artificial Sequence
  Description of Artificial Sequence: Synthetic oligonucleotide
gaaucgucagggcgucguc

SEQ ID NO: 780852 - RNA, 19 nt, Artificial Sequence
  Description of Artificial Sequence: Synthetic oligonucleotide
gucuaaguaaggcaucguu

SEQ ID NO: 780853 - RNA, 19 nt, Artificial Sequence
  Description of Artificial Sequence: Synthetic oligonucleotide
cugcccuucucaugguauc

SEQ ID NO: 780854 - RNA, 19 nt, Artificial Sequence
  Description of Artificial Sequence: Synthetic oligonucleotide
aucccgguugcucgguagu

SEQ ID NO: 780855 - RNA, 19 nt, Artificial Sequence
  Description of Artificial Sequence: Synthetic oligonucleotide
ggguuuucccuaguugaag

SEQ ID NO: 780856 - RNA, 19 nt, Artificial Sequence
  Description of Artificial Sequence: Synthetic oligonucleotide
accacacgauauccagcug

SEQ ID NO: 780857 - RNA, 19 nt, Artificial Sequence
  Description of Artificial Sequence: Synthetic oligonucleotide
ucccuaguugaaguuguuu

SEQ ID NO: 780858 - RNA, 19 nt, Artificial Sequence
  Description of Artificial Sequence: Synthetic oligonucleotide
acucuagcaccaucgccuu

SEQ ID NO: 780859 - RNA, 19 nt, Artificial Sequence
  Description of Artificial Sequence: Synthetic oligonucleotide
uuuccggauccaccaucuc

SEQ ID NO: 780860 - RNA, 19 nt, Artificial Sequence
  Description of Artificial Sequence: Synthetic oligonucleotide
agagcugcauucgaccguu

SEQ ID NO: 780861 - RNA, 19 nt, Artificial Sequence
  Description of Artificial Sequence: Synthetic oligonucleotide
ugacaacugcaggucggga

SEQ ID NO: 780862 - RNA, 19 nt, Artificial Sequence
  Description of Artificial Sequence: Synthetic oligonucleotide
cauguaagcgggucuccaa

SEQ ID NO: 780863 - RNA, 19 nt, Artificial Sequence
  Description of Artificial Sequence: Synthetic oligonucleotide
aagccuacuuggagcaaaa

SEQ ID NO: 780864 - RNA, 19 nt, Artificial Sequence
  Description of Artificial Sequence: Synthetic oligonucleotide
cacugugauaguuucgaau

SEQ ID NO: 780865 - RNA, 19 nt, Artificial Sequence
  Description of Artificial Sequence: Synthetic oligonucleotide
ggucugaaucuuguaacca

SEQ ID NO: 780866 - RNA, 19 nt, Artificial Sequence
  Description of Artificial Sequence: Synthetic oligonucleotide
cgcguaguuguccacagug

SEQ ID NO: 780867 - RNA, 19 nt, Artificial Sequence
  Description of Artificial Sequence: Synthetic oligonucleotide
uguggcaaucccgguugcu

SEQ ID NO: 780868 - RNA, 19 nt, Artificial Sequence
  Description of Artificial Sequence: Synthetic oligonucleotide
acagcacucgaggcgguca

SEQ ID NO: 780869 - RNA, 19 nt, Artificial Sequence
  Description of Artificial Sequence: Synthetic oligonucleotide
guggcaaucccgguugcuc

SEQ ID NO: 780870 - RNA, 19 nt, Artificial Sequence
  Description of Artificial Sequence: Synthetic oligonucleotide
cuagcauaagggcuuuccu

SEQ ID NO: 780871 - RNA, 19 nt, Artificial Sequence
  Description of Artificial Sequence: Synthetic oligonucleotide
cugagcggccaacuggaca

SEQ ID NO: 780872 - RNA, 19 nt, Artificial Sequence
  Description of Artificial Sequence: Synthetic oligonucleotide
acacgauauccagcuggag

SEQ ID NO: 780873 - RNA, 19 nt, Artificial Sequence
  Description of Artificial Sequence: Synthetic oligonucleotide
gagaaucgucagggcgucg

SEQ ID NO: 780874 - RNA, 19 nt, Artificial Sequence
  Description of Artificial Sequence: Synthetic oligonucleotide
ucguuuccggauccaccau

SEQ ID NO: 780875 - RNA, 19 nt, Artificial Sequence
  Description of Artificial Sequence: Synthetic oligonucleotide
cuuuuauguggaccagucu

SEQ ID NO: 780876 - RNA, 19 nt, Artificial Sequence
  Description of Artificial Sequence: Synthetic oligonucleotide
cagcacucgaggcggucag

SEQ ID NO: 780877 - RNA, 19 nt, Artificial Sequence
  Description of Artificial Sequence: Synthetic oligonucleotide
gcugcaugguccacguucc

SEQ ID NO: 780878 - RNA, 19 nt, Artificial Sequence
  Description of Artificial Sequence: Synthetic oligonucleotide
agcccgcaggccaagccgg

SEQ ID NO: 780879 - RNA, 19 nt, Artificial Sequence
  Description of Artificial Sequence: Synthetic oligonucleotide
gaggcacuagaggucccug

SEQ ID NO: 780880 - RNA, 19 nt, Artificial Sequence
  Description of Artificial Sequence: Synthetic oligonucleotide
cuaugccgggucccuguac

SEQ ID NO: 780881 - RNA, 19 nt, Artificial Sequence
  Description of Artificial Sequence: Synthetic oligonucleotide
cgguuggaaauaugugugg

SEQ ID NO: 780882 - RNA, 19 nt, Artificial Sequence
  Description of Artificial Sequence: Synthetic oligonucleotide
gaaccgcguaguuguccac

SEQ ID NO: 780883 - RNA, 19 nt, Artificial Sequence
  Description of Artificial Sequence: Synthetic oligonucleotide
caugguccacguucccauc

SEQ ID NO: 780884 - RNA, 19 nt, Artificial Sequence
  Description of Artificial Sequence: Synthetic oligonucleotide
uucccuaguugaaguuguu

SEQ ID NO: 780885 - RNA, 19 nt, Artificial Sequence
  Description of Artificial Sequence: Synthetic oligonucleotide
aucccauagcuagcauaag

SEQ ID NO: 780886 - RNA, 19 nt, Artificial Sequence
  Description of Artificial Sequence: Synthetic oligonucleotide
gaauucccuguccuccacu

SEQ ID NO: 780887 - RNA, 19 nt, Artificial Sequence
  Description of Artificial Sequence: Synthetic oligonucleotide
uugcuuugcagcggaucuc

SEQ ID NO: 780888 - RNA, 19 nt, Artificial Sequence
  Description of Artificial Sequence: Synthetic oligonucleotide
agugcggcuucagccacca

SEQ ID NO: 780889 - RNA, 19 nt, Artificial Sequence
  Description of Artificial Sequence: Synthetic oligonucleotide
ucccgguugcucgguagug

SEQ ID NO: 780890 - RNA, 19 nt, Artificial Sequence
  Description of Artificial Sequence: Synthetic oligonucleotide
auggcaaggcuaugccgua

SEQ ID NO: 780891 - RNA, 19 nt, Artificial Sequence
  Description of Artificial Sequence: Synthetic oligonucleotide
ucgaggcggucagaguacu

SEQ ID NO: 780892 - RNA, 19 nt, Artificial Sequence
  Description of Artificial Sequence: Synthetic oligonucleotide
gaccguucacaacgacaga

SEQ ID NO: 780893 - RNA, 19 nt, Artificial Sequence
  Description of Artificial Sequence: Synthetic oligonucleotide
auucgaccguucacaacga

SEQ ID NO: 780894 - RNA, 19 nt, Artificial Sequence
  Description of Artificial Sequence: Synthetic oligonucleotide
acgcaaagaagagcugcau

SEQ ID NO: 780895 - RNA, 19 nt, Artificial Sequence
  Description of Artificial Sequence: Synthetic oligonucleotide
augccgggucccuguaccu

SEQ ID NO: 780896 - RNA, 19 nt, Artificial Sequence
  Description of Artificial Sequence: Synthetic oligonucleotide
cugcaugguccacguuccc

SEQ ID NO: 780897 - RNA, 19 nt, Artificial Sequence
  Description of Artificial Sequence: Synthetic oligonucleotide
acuaugccgggucccugua

SEQ ID NO: 780898 - RNA, 19 nt, Artificial Sequence
  Description of Artificial Sequence: Synthetic oligonucleotide
uggcaaggcuaugccguac

SEQ ID NO: 780899 - RNA, 19 nt, Artificial Sequence
  Description of Artificial Sequence: Synthetic oligonucleotide
agcuagcauaagggcuuuc

SEQ ID NO: 780900 - RNA, 19 nt, Artificial Sequence
  Description of Artificial Sequence: Synthetic oligonucleotide
gcucgguagugcucauucc

SEQ ID NO: 780901 - RNA, 19 nt, Artificial Sequence
  Description of Artificial Sequence: Synthetic oligonucleotide
gccuuuacguugugaguca

SEQ ID NO: 780902 - RNA, 19 nt, Artificial Sequence
  Description of Artificial Sequence: Synthetic oligonucleotide
gcacucgaggcggucagag

SEQ ID NO: 780903 - RNA, 19 nt, Artificial Sequence
  Description of Artificial Sequence: Synthetic oligonucleotide
ucuuugcggcagaccuuau

SEQ ID NO: 780904 - RNA, 19 nt, Artificial Sequence
  Description of Artificial Sequence: Synthetic oligonucleotide
cuuuacguugugagucacu

SEQ ID NO: 780905 - RNA, 19 nt, Artificial Sequence
  Description of Artificial Sequence: Synthetic oligonucleotide
cguugugagucacuccuug

SEQ ID NO: 780906 - RNA, 19 nt, Artificial Sequence
  Description of Artificial Sequence: Synthetic oligonucleotide
uggaccugcccgucugguu

SEQ ID NO: 780907 - RNA, 19 nt, Artificial Sequence
  Description of Artificial Sequence: Synthetic oligonucleotide
guuuggccgcaugugugga

SEQ ID NO: 780908 - RNA, 19 nt, Artificial Sequence
  Description of Artificial Sequence: Synthetic oligonucleotide
aacugcaggucgggaggaa

SEQ ID NO: 780909 - RNA, 19 nt, Artificial Sequence
  Description of Artificial Sequence: Synthetic oligonucleotide
gccgcgcucacuugcuuug

SEQ ID NO: 780910 - RNA, 19 nt, Artificial Sequence
  Description of Artificial Sequence: Synthetic oligonucleotide
cuuugcggcagaccuuaua

SEQ ID NO: 780911 - RNA, 19 nt, Artificial Sequence
  Description of Artificial Sequence: Synthetic oligonucleotide
accugcccgucugguuugc

SEQ ID NO: 780912 - RNA, 19 nt, Artificial Sequence
  Description of Artificial Sequence: Synthetic oligonucleotide
cgccuuuacguugugaguc

SEQ ID NO: 780913 - RNA, 19 nt, Artificial Sequence
  Description of Artificial Sequence: Synthetic oligonucleotide
gaaauauguguggcugcau

SEQ ID NO: 780914 - RNA, 19 nt, Artificial Sequence
  Description of Artificial Sequence: Synthetic oligonucleotide
cagaaauguagcacuuauu

SEQ ID NO: 780915 - RNA, 19 nt, Artificial Sequence
  Description of Artificial Sequence: Synthetic oligonucleotide
cgauguacagcucuuuaaa

SEQ ID NO: 780916 - RNA, 19 nt, Artificial Sequence
  Description of Artificial Sequence: Synthetic oligonucleotide
cauucccugugccgcgcuc

SEQ ID NO: 780917 - RNA, 19 nt, Artificial Sequence
  Description of Artificial Sequence: Synthetic oligonucleotide
ggucucuaccagugacaug

SEQ ID NO: 780918 - RNA, 19 nt, Artificial Sequence
  Description of Artificial Sequence: Synthetic oligonucleotide
guacaccaguuggucgaug

SEQ ID NO: 780919 - RNA, 19 nt, Artificial Sequence
  Description of Artificial Sequence: Synthetic oligonucleotide
caggcggcguuuccucuuc

SEQ ID NO: 780920 - RNA, 19 nt, Artificial Sequence
  Description of Artificial Sequence: Synthetic oligonucleotide
uagcuagcauaagggcuuu

SEQ ID NO: 780921 - RNA, 19 nt, Artificial Sequence
  Description of Artificial Sequence: Synthetic oligonucleotide
gcgcaagcgucugagcggc

SEQ ID NO: 780922 - RNA, 19 nt, Artificial Sequence
  Description of Artificial Sequence: Synthetic oligonucleotide
cggccaacuggacauugcc

SEQ ID NO: 780923 - RNA, 19 nt, Artificial Sequence
  Description of Artificial Sequence: Synthetic oligonucleotide
gcaaggcuaugccguacuc

SEQ ID NO: 780924 - RNA, 19 nt, Artificial Sequence
  Description of Artificial Sequence: Synthetic oligonucleotide
gcgcgccuuguugagauac

SEQ ID NO: 780925 - RNA, 19 nt, Artificial Sequence
  Description of Artificial Sequence: Synthetic oligonucleotide
cugcccgucugguuugcaa

SEQ ID NO: 780926 - RNA, 19 nt, Artificial Sequence
  Description of Artificial Sequence: Synthetic oligonucleotide
gucagggcgucguccacgu

SEQ ID NO: 780927 - RNA, 19 nt, Artificial Sequence
  Description of Artificial Sequence: Synthetic oligonucleotide
agccuacuuggagcaaaau

SEQ ID NO: 780928 - RNA, 19 nt, Artificial Sequence
  Description of Artificial Sequence: Synthetic oligonucleotide
gaucgauguacagcucuuu

SEQ ID NO: 780929 - RNA, 19 nt, Artificial Sequence
  Description of Artificial Sequence: Synthetic oligonucleotide
gccguacucuuuucucuuc

SEQ ID NO: 780930 - RNA, 19 nt, Artificial Sequence
  Description of Artificial Sequence: Synthetic oligonucleotide
cacuaugccgggucccugu

SEQ ID NO: 780931 - RNA, 19 nt, Artificial Sequence
  Description of Artificial Sequence: Synthetic oligonucleotide
caucgccuuuacguuguga

SEQ ID NO: 780932 - RNA, 19 nt, Artificial Sequence
  Description of Artificial Sequence: Synthetic oligonucleotide
caagcgucugagcggccaa

SEQ ID NO: 780933 - RNA, 19 nt, Artificial Sequence
  Description of Artificial Sequence: Synthetic oligonucleotide
ggcuaugccguacucuuuu

SEQ ID NO: 780934 - RNA, 19 nt, Artificial Sequence
  Description of Artificial Sequence: Synthetic oligonucleotide
ccuuuacguugugagucac

SEQ ID NO: 780935 - RNA, 19 nt, Artificial Sequence
  Description of Artificial Sequence: Synthetic oligonucleotide
ggccgcauguguggaguag

SEQ ID NO: 780936 - RNA, 19 nt, Artificial Sequence
  Description of Artificial Sequence: Synthetic oligonucleotide
cauuuccacugugauaguu

SEQ ID NO: 780937 - RNA, 19 nt, Artificial Sequence
  Description of Artificial Sequence: Synthetic oligonucleotide
ggcaaggcuaugccguacu

SEQ ID NO: 780938 - RNA, 19 nt, Artificial Sequence
  Description of Artificial Sequence: Synthetic oligonucleotide
cacagcacucgaggcgguc

SEQ ID NO: 780939 - RNA, 19 nt, Artificial Sequence
  Description of Artificial Sequence: Synthetic oligonucleotide
ccccaacugcagcaaguug

SEQ ID NO: 780940 - RNA, 19 nt, Artificial Sequence
  Description of Artificial Sequence: Synthetic oligonucleotide
caccucgauuguggcaauc

SEQ ID NO: 780941 - RNA, 19 nt, Artificial Sequence
  Description of Artificial Sequence: Synthetic oligonucleotide
uugcucgguagugcucauu

SEQ ID NO: 780942 - RNA, 19 nt, Artificial Sequence
  Description of Artificial Sequence: Synthetic oligonucleotide
ggacaaguacucggcaaua

SEQ ID NO: 780943 - RNA, 19 nt, Artificial Sequence
  Description of Artificial Sequence: Synthetic oligonucleotide
cccgguugcucgguagugc

SEQ ID NO: 780944 - RNA, 19 nt, Artificial Sequence
  Description of Artificial Sequence: Synthetic oligonucleotide
ggucgggaggaaggcuucc

SEQ ID NO: 780945 - RNA, 19 nt, Artificial Sequence
  Description of Artificial Sequence: Synthetic oligonucleotide
cauugccuccaaacacccu

SEQ ID NO: 780946 - RNA, 19 nt, Artificial Sequence
  Description of Artificial Sequence: Synthetic oligonucleotide
gcgccuuguugagauacuc

SEQ ID NO: 780947 - RNA, 19 nt, Artificial Sequence
  Description of Artificial Sequence: Synthetic oligonucleotide
acguugugagucacuccuu

SEQ ID NO: 780948 - RNA, 19 nt, Artificial Sequence
  Description of Artificial Sequence: Synthetic oligonucleotide
ccucuccauuuccacugug

SEQ ID NO: 780949 - RNA, 19 nt, Artificial Sequence
  Description of Artificial Sequence: Synthetic oligonucleotide
gcgggucuccaauaaacuu

SEQ ID NO: 780950 - RNA, 19 nt, Artificial Sequence
  Description of Artificial Sequence: Synthetic oligonucleotide
ggccuguuuggccgcaugu

SEQ ID NO: 780951 - RNA, 19 nt, Artificial Sequence
  Description of Artificial Sequence: Synthetic oligonucleotide
caccaguuggucgaugcuu

SEQ ID NO: 780952 - RNA, 19 nt, Artificial Sequence
  Description of Artificial Sequence: Synthetic oligonucleotide
gguaucccauagcuagcau

SEQ ID NO: 780953 - RNA, 19 nt, Artificial Sequence
  Description of Artificial Sequence: Synthetic oligonucleotide
caaucccgguugcucggua

SEQ ID NO: 780954 - RNA, 19 nt, Artificial Sequence
  Description of Artificial Sequence: Synthetic oligonucleotide
ccugugccgcgcucacuug

SEQ ID NO: 780955 - RNA, 19 nt, Artificial Sequence
  Description of Artificial Sequence: Synthetic oligonucleotide
gagcugcauucgaccguuc

SEQ ID NO: 780956 - RNA, 19 nt, Artificial Sequence
  Description of Artificial Sequence: Synthetic oligonucleotide
ggccaacuggacauugccu

SEQ ID NO: 780957 - RNA, 19 nt, Artificial Sequence
  Description of Artificial Sequence: Synthetic oligonucleotide
ggagaaccgcguaguuguc

SEQ ID NO: 780958 - RNA, 19 nt, Artificial Sequence
  Description of Artificial Sequence: Synthetic oligonucleotide
gucagacggggauguggau

SEQ ID NO: 780959 - RNA, 19 nt, Artificial Sequence
  Description of Artificial Sequence: Synthetic oligonucleotide
cgauauccagcuggagaac

SEQ ID NO: 780960 - RNA, 19 nt, Artificial Sequence
  Description of Artificial Sequence: Synthetic oligonucleotide
cggucagaguacuucuuaa

SEQ ID NO: 780961 - RNA, 19 nt, Artificial Sequence
  Description of Artificial Sequence: Synthetic oligonucleotide
cacucgaggcggucagagu

SEQ ID NO: 780962 - RNA, 19 nt, Artificial Sequence
  Description of Artificial Sequence: Synthetic oligonucleotide
gcguaguuguccacagugu

SEQ ID NO: 780963 - RNA, 19 nt, Artificial Sequence
  Description of Artificial Sequence: Synthetic oligonucleotide
ccacugugauaguuucgaa

SEQ ID NO: 780964 - RNA, 19 nt, Artificial Sequence
  Description of Artificial Sequence: Synthetic oligonucleotide
ccagcuggagaaccgcgua

SEQ ID NO: 780965 - RNA, 19 nt, Artificial Sequence
  Description of Artificial Sequence: Synthetic oligonucleotide
guugcucgguagugcucau

SEQ ID NO: 780966 - RNA, 19 nt, Artificial Sequence
  Description of Artificial Sequence: Synthetic oligonucleotide
ggaucgauguacagcucuu

SEQ ID NO: 780967 - RNA, 19 nt, Artificial Sequence
  Description of Artificial Sequence: Synthetic oligonucleotide
ccgagcuuccucuccauuu

SEQ ID NO: 780968 - RNA, 19 nt, Artificial Sequence
  Description of Artificial Sequence: Synthetic oligonucleotide
ccguucacaacgacagaau

SEQ ID NO: 780969 - RNA, 19 nt, Artificial Sequence
  Description of Artificial Sequence: Synthetic oligonucleotide
gcuugucggcuguuguuuu

SEQ ID NO: 780970 - RNA, 19 nt, Artificial Sequence
  Description of Artificial Sequence: Synthetic oligonucleotide
gcagcggaucucuucuauu

SEQ ID NO: 780971 - RNA, 19 nt, Artificial Sequence
  Description of Artificial Sequence: Synthetic oligonucleotide
ccauggugcgcaagcgucu

SEQ ID NO: 780972 - RNA, 19 nt, Artificial Sequence
  Description of Artificial Sequence: Synthetic oligonucleotide
ccgguugcucgguagugcu

SEQ ID NO: 780973 - RNA, 19 nt, Artificial Sequence
  Description of Artificial Sequence: Synthetic oligonucleotide
cgugcuccgggauguccuc

SEQ ID NO: 780974 - RNA, 19 nt, Artificial Sequence
  Description of Artificial Sequence: Synthetic oligonucleotide
gcuggagaaccgcguaguu

SEQ ID NO: 780975 - RNA, 19 nt, Artificial Sequence
  Description of Artificial Sequence: Synthetic oligonucleotide
gcccgcaggccaagccggg

SEQ ID NO: 780976 - RNA, 19 nt, Artificial Sequence
  Description of Artificial Sequence: Synthetic oligonucleotide
ccgcgcucacuugcuuugc

SEQ ID NO: 780977 - RNA, 19 nt, Artificial Sequence
  Description of Artificial Sequence: Synthetic oligonucleotide
gcggcagaccuuauacuuu

SEQ ID NO: 780978 - RNA, 19 nt, Artificial Sequence
  Description of Artificial Sequence: Synthetic oligonucleotide
cucuagcaccaucgccuuu

SEQ ID NO: 780979 - RNA, 19 nt, Artificial Sequence
  Description of Artificial Sequence: Synthetic oligonucleotide
ggaccagucucuggugauu

SEQ ID NO: 780980 - RNA, 19 nt, Artificial Sequence
  Description of Artificial Sequence: Synthetic oligonucleotide
cccugugccgcgcucacuu

SEQ ID NO: 780981 - RNA, 19 nt, Artificial Sequence
  Description of Artificial Sequence: Synthetic oligonucleotide
gugccgcgcucacuugcuu

SEQ ID NO: 780982 - RNA, 19 nt, Artificial Sequence
  Description of Artificial Sequence: Synthetic oligonucleotide
cccgucugguuugcaaugu

SEQ ID NO: 780983 - RNA, 19 nt, Artificial Sequence
  Description of Artificial Sequence: Synthetic oligonucleotide
cgauuguggcaaucccggu

SEQ ID NO: 780984 - RNA, 19 nt, Artificial Sequence
  Description of Artificial Sequence: Synthetic oligonucleotide
cggauccaccaucuccgcu

SEQ ID NO: 780985 - RNA, 19 nt, Artificial Sequence
  Description of Artificial Sequence: Synthetic oligonucleotide
ccugcccgucugguuugca

SEQ ID NO: 780986 - RNA, 19 nt, Artificial Sequence
  Description of Artificial Sequence: Synthetic oligonucleotide
ccgcguaguuguccacagu

SEQ ID NO: 780987 - RNA, 19 nt, Artificial Sequence
  Description of Artificial Sequence: Synthetic oligonucleotide
cgcgccuuguugagauacu

SEQ ID NO: 780988 - RNA, 19 nt, Artificial Sequence
  Description of Artificial Sequence: Synthetic oligonucleotide
gccgggcuuccugggcggu

SEQ ID NO: 780989 - RNA, 19 nt, Artificial Sequence
  Description of Artificial Sequence: Synthetic oligonucleotide
cgaggcggucagaguacuu

SEQ ID NO: 780990 - RNA, 19 nt, Artificial Sequence
  Description of Artificial Sequence: Synthetic oligonucleotide
aguaauacaaaacacagcc

SEQ ID NO: 780991 - RNA, 19 nt, Artificial Sequence
  Description of Artificial Sequence: Synthetic oligonucleotide
aaaaggaauaugcaguacg

SEQ ID NO: 780992 - RNA, 19 nt, Artificial Sequence
  Description of Artificial Sequence: Synthetic oligonucleotide
uuuaaucuaacacuucugg

SEQ ID NO: 780993 - RNA, 19 nt, Artificial Sequence
  Description of Artificial Sequence: Synthetic oligonucleotide
uuaaauaccaaaugcacug

SEQ ID NO: 780994 - RNA, 19 nt, Artificial Sequence
  Description of Artificial Sequence: Synthetic oligonucleotide
auacuuauccaacaauucc

SEQ ID NO: 780995 - RNA, 19 nt, Artificial Sequence
  Description of Artificial Sequence: Synthetic oligonucleotide
gaauaugugacauaggaga

SEQ ID NO: 780996 - RNA, 19 nt, Artificial Sequence
  Description of Artificial Sequence: Synthetic oligonucleotide
aaaaguuaagagccagccc

SEQ ID NO: 780997 - RNA, 19 nt, Artificial Sequence
  Description of Artificial Sequence: Synthetic oligonucleotide
guucagauuacuuaaauac

SEQ ID NO: 780998 - RNA, 19 nt, Artificial Sequence
  Description of Artificial Sequence: Synthetic oligonucleotide
gacuauaaacaguugaucc

SEQ ID NO: 780999 - RNA, 19 nt, Artificial Sequence
  Description of Artificial Sequence: Synthetic oligonucleotide
uaaauuguaauguacuaca

SEQ ID NO: 781000 - RNA, 19 nt, Artificial Sequence
  Description of Artificial Sequence: Synthetic oligonucleotide
ucaaugauuagcaaacaca

SEQ ID NO: 781001 - RNA, 19 nt, Artificial Sequence
  Description of Artificial Sequence: Synthetic oligonucleotide
acaccuuuaguuuucggcc

SEQ ID NO: 781002 - RNA, 19 nt, Artificial Sequence
  Description of Artificial Sequence: Synthetic oligonucleotide
agagcuuucccauuuaauc

SEQ ID NO: 781003 - RNA, 19 nt, Artificial Sequence
  Description of Artificial Sequence: Synthetic oligonucleotide
cuugcuuauaucaaaugcc

SEQ ID NO: 781004 - RNA, 19 nt, Artificial Sequence
  Description of Artificial Sequence: Synthetic oligonucleotide
uuauaugaaaugaagcuau

SEQ ID NO: 781005 - RNA, 19 nt, Artificial Sequence
  Description of Artificial Sequence: Synthetic oligonucleotide
aauaccagagcuacaaagg

SEQ ID NO: 781006 - RNA, 19 nt, Artificial Sequence
  Description of Artificial Sequence: Synthetic oligonucleotide
acgaguauggaaaaguugc

SEQ ID NO: 781007 - RNA, 19 nt, Artificial Sequence
  Description of Artificial Sequence: Synthetic oligonucleotide
ugaucugugacccaagacu

SEQ ID NO: 781008 - RNA, 19 nt, Artificial Sequence
  Description of Artificial Sequence: Synthetic oligonucleotide
aauauagugggucccucuc

SEQ ID NO: 781009 - RNA, 19 nt, Artificial Sequence
  Description of Artificial Sequence: Synthetic oligonucleotide
aagugaauaccagagcuac

SEQ ID NO: 781010 - RNA, 19 nt, Artificial Sequence
  Description of Artificial Sequence: Synthetic oligonucleotide
gaauaccagagcuacaaag

SEQ ID NO: 781011 - RNA, 19 nt, Artificial Sequence
  Description of Artificial Sequence: Synthetic oligonucleotide
aauacuuauccaacaauuc

SEQ ID NO: 781012 - RNA, 19 nt, Artificial Sequence
  Description of Artificial Sequence: Synthetic oligonucleotide
ucucuaaagaacaaucacu

SEQ ID NO: 781013 - RNA, 19 nt, Artificial Sequence
  Description of Artificial Sequence: Synthetic oligonucleotide
auaccagagcuacaaaggc

SEQ ID NO: 781014 - RNA, 19 nt, Artificial Sequence
  Description of Artificial Sequence: Synthetic oligonucleotide
aagcacgucagacaaugcg

SEQ ID NO: 781015 - RNA, 19 nt, Artificial Sequence
  Description of Artificial Sequence: Synthetic oligonucleotide
gacauuuugaucugugacc

SEQ ID NO: 781016 - RNA, 19 nt, Artificial Sequence
  Description of Artificial Sequence: Synthetic oligonucleotide
uccagaauaugugacauag

SEQ ID NO: 781017 - RNA, 19 nt, Artificial Sequence
  Description of Artificial Sequence: Synthetic oligonucleotide
ugcaguacgaguauggaaa

SEQ ID NO: 781018 - RNA, 19 nt, Artificial Sequence
  Description of Artificial Sequence: Synthetic oligonucleotide
cauaauguuaaguugucuc

SEQ ID NO: 781019 - RNA, 19 nt, Artificial Sequence
  Description of Artificial Sequence: Synthetic oligonucleotide
aagcuauugauacuuuucu

SEQ ID NO: 781020 - RNA, 19 nt, Artificial Sequence
  Description of Artificial Sequence: Synthetic oligonucleotide
ugucaacucaaacagcagc

SEQ ID NO: 781021 - RNA, 19 nt, Artificial Sequence
  Description of Artificial Sequence: Synthetic oligonucleotide
augauuagcaaacacaaua

SEQ ID NO: 781022 - RNA, 19 nt, Artificial Sequence
  Description of Artificial Sequence: Synthetic oligonucleotide
gaaaaguuaagagccagcc

SEQ ID NO: 781023 - RNA, 19 nt, Artificial Sequence
  Description of Artificial Sequence: Synthetic oligonucleotide
gauaccggaaauaaucucc

SEQ ID NO: 781024 - RNA, 19 nt, Artificial Sequence
  Description of Artificial Sequence: Synthetic oligonucleotide
aaucaagggauggaguuuc

SEQ ID NO: 781025 - RNA, 19 nt, Artificial Sequence
  Description of Artificial Sequence: Synthetic oligonucleotide
ggcuauuaaauacuuaucc

SEQ ID NO: 781026 - RNA, 19 nt, Artificial Sequence
  Description of Artificial Sequence: Synthetic oligonucleotide
auaagauuuucacaaggcu

SEQ ID NO: 781027 - RNA, 19 nt, Artificial Sequence
  Description of Artificial Sequence: Synthetic oligonucleotide
ucccauuuaaucuaacacu

SEQ ID NO: 781028 - RNA, 19 nt, Artificial Sequence
  Description of Artificial Sequence: Synthetic oligonucleotide
auaauguuaaguugucucu

SEQ ID NO: 781029 - RNA, 19 nt, Artificial Sequence
  Description of Artificial Sequence: Synthetic oligonucleotide
uuuaaauuguaauguacua

SEQ ID NO: 781030 - RNA, 19 nt, Artificial Sequence
  Description of Artificial Sequence: Synthetic oligonucleotide
uugcuuauaucaaaugccu

SEQ ID NO: 781031 - RNA, 19 nt, Artificial Sequence
  Description of Artificial Sequence: Synthetic oligonucleotide
uacuucagcaagauaccgg

SEQ ID NO: 781032 - RNA, 19 nt, Artificial Sequence
  Description of Artificial Sequence: Synthetic oligonucleotide
uggaauaaggaauggagau

SEQ ID NO: 781033 - RNA, 19 nt, Artificial Sequence
  Description of Artificial Sequence: Synthetic oligonucleotide
ugcauaaaggaaauucccu

SEQ ID NO: 781034 - RNA, 19 nt, Artificial Sequence
  Description of Artificial Sequence: Synthetic oligonucleotide
aaaguugcuucugaaagga

SEQ ID NO: 781035 - RNA, 19 nt, Artificial Sequence
  Description of Artificial Sequence: Synthetic oligonucleotide
uuuauaugaaaugaagcua

SEQ ID NO: 781036 - RNA, 19 nt, Artificial Sequence
  Description of Artificial Sequence: Synthetic oligonucleotide
ugugcacgaaucugcaugg

SEQ ID NO: 781037 - RNA, 19 nt, Artificial Sequence
  Description of Artificial Sequence: Synthetic oligonucleotide
uacaagguaaagugaauac

SEQ ID NO: 781038 - RNA, 19 nt, Artificial Sequence
  Description of Artificial Sequence: Synthetic oligonucleotide
gacuggaugcauuaagagc

SEQ ID NO: 781039 - RNA, 19 nt, Artificial Sequence
  Description of Artificial Sequence: Synthetic oligonucleotide
cucgagaugacccuccagg

SEQ ID NO: 781040 - RNA, 19 nt, Artificial Sequence
  Description of Artificial Sequence: Synthetic oligonucleotide
aggacaugcauuuuaauuu

SEQ ID NO: 781041 - RNA, 19 nt, Artificial Sequence
  Description of Artificial Sequence: Synthetic oligonucleotide
guugaucccauacacauga

SEQ ID NO: 781042 - RNA, 19 nt, Artificial Sequence
  Description of Artificial Sequence: Synthetic oligonucleotide
caguguaucaagcucugcg

SEQ ID NO: 781043 - RNA, 19 nt, Artificial Sequence
  Description of Artificial Sequence: Synthetic oligonucleotide
uuaucuauuguuugcuuuc

SEQ ID NO: 781044 - RNA, 19 nt, Artificial Sequence
  Description of Artificial Sequence: Synthetic oligonucleotide
uacgaguauggaaaaguug

SEQ ID NO: 781045 - RNA, 19 nt, Artificial Sequence
  Description of Artificial Sequence: Synthetic oligonucleotide
aggaauaugcaguacgagu

SEQ ID NO: 781046 - RNA, 19 nt, Artificial Sequence
  Description of Artificial Sequence: Synthetic oligonucleotide
gguaaagugaauaccagag

SEQ ID NO: 781047 - RNA, 19 nt, Artificial Sequence
  Description of Artificial Sequence: Synthetic oligonucleotide
ugauacuuuucuacagcag

SEQ ID NO: 781048 - RNA, 19 nt, Artificial Sequence
  Description of Artificial Sequence: Synthetic oligonucleotide
aagcucgggauuauuaagg

SEQ ID NO: 781049 - RNA, 19 nt, Artificial Sequence
  Description of Artificial Sequence: Synthetic oligonucleotide
guaucaagcucugcgaugg

SEQ ID NO: 781050 - RNA, 19 nt, Artificial Sequence
  Description of Artificial Sequence: Synthetic oligonucleotide
aaguuacucguguuuauau

SEQ ID NO: 781051 - RNA, 19 nt, Artificial Sequence
  Description of Artificial Sequence: Synthetic oligonucleotide
ucguguuuauaugaaauga

SEQ ID NO: 781052 - RNA, 19 nt, Artificial Sequence
  Description of Artificial Sequence: Synthetic oligonucleotide
aaaugaagcuauugauacu

SEQ ID NO: 781053 - RNA, 19 nt, Artificial Sequence
  Description of Artificial Sequence: Synthetic oligonucleotide
uugcccaaagcaaugcuug

SEQ ID NO: 781054 - RNA, 19 nt, Artificial Sequence
  Description of Artificial Sequence: Synthetic oligonucleotide
uugggaauuaucuauuguu

SEQ ID NO: 781055 - RNA, 19 nt, Artificial Sequence
  Description of Artificial Sequence: Synthetic oligonucleotide
ucccgauaguccuugauca

SEQ ID NO: 781056 - RNA, 19 nt, Artificial Sequence
  Description of Artificial Sequence: Synthetic oligonucleotide
uuaaguugucucuaagcaa

SEQ ID NO: 781057 - RNA, 19 nt, Artificial Sequence
  Description of Artificial Sequence: Synthetic oligonucleotide
gaugcauuaagagcuuucc

SEQ ID NO: 781058 - RNA, 19 nt, Artificial Sequence
  Description of Artificial Sequence: Synthetic oligonucleotide
agacuggaugcauuaagag

SEQ ID NO: 781059 - RNA, 19 nt, Artificial Sequence
  Description of Artificial Sequence: Synthetic oligonucleotide
uagggcauaagauuuucac

SEQ ID NO: 781060 - RNA, 19 nt, Artificial Sequence
  Description of Artificial Sequence: Synthetic oligonucleotide
agcugcaacuucuugucgg

SEQ ID NO: 781061 - RNA, 19 nt, Artificial Sequence
  Description of Artificial Sequence: Synthetic oligonucleotide
caaugauuagcaaacacaa

SEQ ID NO: 781062 - RNA, 19 nt, Artificial Sequence
  Description of Artificial Sequence: Synthetic oligonucleotide
ucgaugcucgagaugaccc

SEQ ID NO: 781063 - RNA, 19 nt, Artificial Sequence
  Description of Artificial Sequence: Synthetic oligonucleotide
acugguucagauuacuuaa

SEQ ID NO: 781064 - RNA, 19 nt, Artificial Sequence
  Description of Artificial Sequence: Synthetic oligonucleotide
cuauuguuugcuuucgauc

SEQ ID NO: 781065 - RNA, 19 nt, Artificial Sequence
  Description of Artificial Sequence: Synthetic oligonucleotide
agacuauaaacaguugauc

SEQ ID NO: 781066 - RNA, 19 nt, Artificial Sequence
  Description of Artificial Sequence: Synthetic oligonucleotide
aauccaaguggaauaagga

SEQ ID NO: 781067 - RNA, 19 nt, Artificial Sequence
  Description of Artificial Sequence: Synthetic oligonucleotide
auacacaugaaugggcuuc

SEQ ID NO: 781068 - RNA, 19 nt, Artificial Sequence
  Description of Artificial Sequence: Synthetic oligonucleotide
uguuugcuuucgaucgucg

SEQ ID NO: 781069 - RNA, 19 nt, Artificial Sequence
  Description of Artificial Sequence: Synthetic oligonucleotide
gaaugggcuuccuugcuag

SEQ ID NO: 781070 - RNA, 19 nt, Artificial Sequence
  Description of Artificial Sequence: Synthetic oligonucleotide
ucucacaugugcacgaauc

SEQ ID NO: 781071 - RNA, 19 nt, Artificial Sequence
  Description of Artificial Sequence: Synthetic oligonucleotide
aguacugauuuagaccugg

SEQ ID NO: 781072 - RNA, 19 nt, Artificial Sequence
  Description of Artificial Sequence: Synthetic oligonucleotide
ucgggauuauuaaggaucu

SEQ ID NO: 781073 - RNA, 19 nt, Artificial Sequence
  Description of Artificial Sequence: Synthetic oligonucleotide
uguagguugcaucucuuuc

SEQ ID NO: 781074 - RNA, 19 nt, Artificial Sequence
  Description of Artificial Sequence: Synthetic oligonucleotide
acagacguaaccuccagaa

SEQ ID NO: 781075 - RNA, 19 nt, Artificial Sequence
  Description of Artificial Sequence: Synthetic oligonucleotide
agugugaaaagacuauaaa

SEQ ID NO: 781076 - RNA, 19 nt, Artificial Sequence
  Description of Artificial Sequence: Synthetic oligonucleotide
aagauaccggaaauaaucu

SEQ ID NO: 781077 - RNA, 19 nt, Artificial Sequence
  Description of Artificial Sequence: Synthetic oligonucleotide
auaccggaaauaaucuccc

SEQ ID NO: 781078 - RNA, 19 nt, Artificial Sequence
  Description of Artificial Sequence: Synthetic oligonucleotide
agacguaaccuccagaaua

SEQ ID NO: 781079 - RNA, 19 nt, Artificial Sequence
  Description of Artificial Sequence: Synthetic oligonucleotide
gaucugugacccaagacug

SEQ ID NO: 781080 - RNA, 19 nt, Artificial Sequence
  Description of Artificial Sequence: Synthetic oligonucleotide
ucuauuguuugcuuucgau

SEQ ID NO: 781081 - RNA, 19 nt, Artificial Sequence
  Description of Artificial Sequence: Synthetic oligonucleotide
aauaugcaguacgaguaug

SEQ ID NO: 781082 - RNA, 19 nt, Artificial Sequence
  Description of Artificial Sequence: Synthetic oligonucleotide
gcuauugauacuuuucuac

SEQ ID NO: 781083 - RNA, 19 nt, Artificial Sequence
  Description of Artificial Sequence: Synthetic oligonucleotide
aaggaauaugcaguacgag

SEQ ID NO: 781084 - RNA, 19 nt, Artificial Sequence
  Description of Artificial Sequence: Synthetic oligonucleotide
aguacgaguauggaaaagu

SEQ ID NO: 781085 - RNA, 19 nt, Artificial Sequence
  Description of Artificial Sequence: Synthetic oligonucleotide
ugggaauuaucuauuguuu

SEQ ID NO: 781086 - RNA, 19 nt, Artificial Sequence
  Description of Artificial Sequence: Synthetic oligonucleotide
aaugcggccggacgcccgc

SEQ ID NO: 781087 - RNA, 19 nt, Artificial Sequence
  Description of Artificial Sequence: Synthetic oligonucleotide
aguugcauuggcuauuaaa

SEQ ID NO: 781088 - RNA, 19 nt, Artificial Sequence
  Description of Artificial Sequence: Synthetic oligonucleotide
accuuuaguuuucggcccc

SEQ ID NO: 781089 - RNA, 19 nt, Artificial Sequence
  Description of Artificial Sequence: Synthetic oligonucleotide
agaauaugugacauaggag

SEQ ID NO: 781090 - RNA, 19 nt, Artificial Sequence
  Description of Artificial Sequence: Synthetic oligonucleotide
cucguguuuauaugaaaug

SEQ ID NO: 781091 - RNA, 19 nt, Artificial Sequence
  Description of Artificial Sequence: Synthetic oligonucleotide
agaagcacgucagacaaug

SEQ ID NO: 781092 - RNA, 19 nt, Artificial Sequence
  Description of Artificial Sequence: Synthetic oligonucleotide
ucggucuucuccauggcga

SEQ ID NO: 781093 - RNA, 19 nt, Artificial Sequence
  Description of Artificial Sequence: Synthetic oligonucleotide
gaauaaggaauggagaugu

SEQ ID NO: 781094 - RNA, 19 nt, Artificial Sequence
  Description of Artificial Sequence: Synthetic oligonucleotide
uguaucaagaaaggacaug

SEQ ID NO: 781095 - RNA, 19 nt, Artificial Sequence
  Description of Artificial Sequence: Synthetic oligonucleotide
auaugcaguacgaguaugg

SEQ ID NO: 781096 - RNA, 19 nt, Artificial Sequence
  Description of Artificial Sequence: Synthetic oligonucleotide
uucgaucgucgccacaugc

SEQ ID NO: 781097 - RNA, 19 nt, Artificial Sequence
  Description of Artificial Sequence: Synthetic oligonucleotide
agguaaagugaauaccaga

SEQ ID NO: 781098 - RNA, 19 nt, Artificial Sequence
  Description of Artificial Sequence: Synthetic oligonucleotide
agggcauaagauuuucaca

SEQ ID NO: 781099 - RNA, 19 nt, Artificial Sequence
  Description of Artificial Sequence: Synthetic oligonucleotide
gacacccucucacaugugc

SEQ ID NO: 781100 - RNA, 19 nt, Artificial Sequence
  Description of Artificial Sequence: Synthetic oligonucleotide
uucaguguaucaagcucug

SEQ ID NO: 781101 - RNA, 19 nt, Artificial Sequence
  Description of Artificial Sequence: Synthetic oligonucleotide
caagcucgggauuauuaag

SEQ ID NO: 781102 - RNA, 19 nt, Artificial Sequence
  Description of Artificial Sequence: Synthetic oligonucleotide
auccaaguggaauaaggaa

SEQ ID NO: 781103 - RNA, 19 nt, Artificial Sequence
  Description of Artificial Sequence: Synthetic oligonucleotide
aguugucaacucaaacagc

SEQ ID NO: 781104 - RNA, 19 nt, Artificial Sequence
  Description of Artificial Sequence: Synthetic oligonucleotide
agcacgucagacaaugcgg

SEQ ID NO: 781105 - RNA, 19 nt, Artificial Sequence
  Description of Artificial Sequence: Synthetic oligonucleotide
uggcuauuaaauacuuauc

SEQ ID NO: 781106 - RNA, 19 nt, Artificial Sequence
  Description of Artificial Sequence: Synthetic oligonucleotide
uuacucguguuuauaugaa

SEQ ID NO: 781107 - RNA, 19 nt, Artificial Sequence
  Description of Artificial Sequence: Synthetic oligonucleotide
ucaguccucuacacaagug

SEQ ID NO: 781108 - RNA, 19 nt, Artificial Sequence
  Description of Artificial Sequence: Synthetic oligonucleotide
ugguucagauuacuuaaau

SEQ ID NO: 781109 - RNA, 19 nt, Artificial Sequence
  Description of Artificial Sequence: Synthetic oligonucleotide
ucgagaugacccuccaggc

SEQ ID NO: 781110 - RNA, 19 nt, Artificial Sequence
  Description of Artificial Sequence: Synthetic oligonucleotide
uguuacucugcuguuacau

SEQ ID NO: 781111 - RNA, 19 nt, Artificial Sequence
  Description of Artificial Sequence: Synthetic oligonucleotide
ugucaguccucuacacaag

SEQ ID NO: 781112 - RNA, 19 nt, Artificial Sequence
  Description of Artificial Sequence: Synthetic oligonucleotide
gcuauuaaauacuuaucca

SEQ ID NO: 781113 - RNA, 19 nt, Artificial Sequence
  Description of Artificial Sequence: Synthetic oligonucleotide
ugcuuauaucaaaugccuc

SEQ ID NO: 781114 - RNA, 19 nt, Artificial Sequence
  Description of Artificial Sequence: Synthetic oligonucleotide
aaauuguaauguacuacau

SEQ ID NO: 781115 - RNA, 19 nt, Artificial Sequence
  Description of Artificial Sequence: Synthetic oligonucleotide
guagaaaucaggaaguuau

SEQ ID NO: 781116 - RNA, 19 nt, Artificial Sequence
  Description of Artificial Sequence: Synthetic oligonucleotide
gccgagacaacacaaauca

SEQ ID NO: 781117 - RNA, 19 nt, Artificial Sequence
  Description of Artificial Sequence: Synthetic oligonucleotide
ucguuggacagcucggcgc

SEQ ID NO: 781118 - RNA, 19 nt, Artificial Sequence
  Description of Artificial Sequence: Synthetic oligonucleotide
uggaaaaguugcuucugaa

SEQ ID NO: 781119 - RNA, 19 nt, Artificial Sequence
  Description of Artificial Sequence: Synthetic oligonucleotide
caccuuuaguuuucggccc

SEQ ID NO: 781120 - RNA, 19 nt, Artificial Sequence
  Description of Artificial Sequence: Synthetic oligonucleotide
cuacuucagcaagauaccg

SEQ ID NO: 781121 - RNA, 19 nt, Artificial Sequence
  Description of Artificial Sequence: Synthetic oligonucleotide
uucuugucggaggugucgg

SEQ ID NO: 781122 - RNA, 19 nt, Artificial Sequence
  Description of Artificial Sequence: Synthetic oligonucleotide
ggacaugcauuuuaauuug

SEQ ID NO: 781123 - RNA, 19 nt, Artificial Sequence
  Description of Artificial Sequence: Synthetic oligonucleotide
aaaaggagcgaggggagaa

SEQ ID NO: 781124 - RNA, 19 nt, Artificial Sequence
  Description of Artificial Sequence: Synthetic oligonucleotide
gggcauaagauuuucacaa

SEQ ID NO: 781125 - RNA, 19 nt, Artificial Sequence
  Description of Artificial Sequence: Synthetic oligonucleotide
uugcuuucgaucgucgcca

SEQ ID NO: 781126 - RNA, 19 nt, Artificial Sequence
  Description of Artificial Sequence: Synthetic oligonucleotide
acgucagacaaugcggccg

SEQ ID NO: 781127 - RNA, 19 nt, Artificial Sequence
  Description of Artificial Sequence: Synthetic oligonucleotide
uuuauguuacucugcuguu

SEQ ID NO: 781128 - RNA, 19 nt, Artificial Sequence
  Description of Artificial Sequence: Synthetic oligonucleotide
uccuugcuagaggaaaucc

SEQ ID NO: 781129 - RNA, 19 nt, Artificial Sequence
  Description of Artificial Sequence: Synthetic oligonucleotide
uguagaaaucaggaaguua

SEQ ID NO: 781130 - RNA, 19 nt, Artificial Sequence
  Description of Artificial Sequence: Synthetic oligonucleotide
cacaugcuacuucagcaag

SEQ ID NO: 781131 - RNA, 19 nt, Artificial Sequence
  Description of Artificial Sequence: Synthetic oligonucleotide
uaugcaguacgaguaugga

SEQ ID NO: 781132 - RNA, 19 nt, Artificial Sequence
  Description of Artificial Sequence: Synthetic oligonucleotide
uucccuguugucacagaca

SEQ ID NO: 781133 - RNA, 19 nt, Artificial Sequence
  Description of Artificial Sequence: Synthetic oligonucleotide
aguccucuacacaaguguc

SEQ ID NO: 781134 - RNA, 19 nt, Artificial Sequence
  Description of Artificial Sequence: Synthetic oligonucleotide
agaaaucaggaaguuauua

SEQ ID NO: 781135 - RNA, 19 nt, Artificial Sequence
  Description of Artificial Sequence: Synthetic oligonucleotide
auauagugggucccucucu

SEQ ID NO: 781136 - RNA, 19 nt, Artificial Sequence
  Description of Artificial Sequence: Synthetic oligonucleotide
aaagugaauaccagagcua

SEQ ID NO: 781137 - RNA, 19 nt, Artificial Sequence
  Description of Artificial Sequence: Synthetic oligonucleotide
ugcacgaaucugcauggaa

SEQ ID NO: 781138 - RNA, 19 nt, Artificial Sequence
  Description of Artificial Sequence: Synthetic oligonucleotide
ucgaucgucgccacaugcu

SEQ ID NO: 781139 - RNA, 19 nt, Artificial Sequence
  Description of Artificial Sequence: Synthetic oligonucleotide
aaaggagcgaggggagaag

SEQ ID NO: 781140 - RNA, 19 nt, Artificial Sequence
  Description of Artificial Sequence: Synthetic oligonucleotide
auuguuugcuuucgaucgu

SEQ ID NO: 781141 - RNA, 19 nt, Artificial Sequence
  Description of Artificial Sequence: Synthetic oligonucleotide
agcucgggauuauuaagga

SEQ ID NO: 781142 - RNA, 19 nt, Artificial Sequence
  Description of Artificial Sequence: Synthetic oligonucleotide
cugucaguccucuacacaa

SEQ ID NO: 781143 - RNA, 19 nt, Artificial Sequence
  Description of Artificial Sequence: Synthetic oligonucleotide
acucguguuuauaugaaau

SEQ ID NO: 781144 - RNA, 19 nt, Artificial Sequence
  Description of Artificial Sequence: Synthetic oligonucleotide
uacucguguuuauaugaaa

SEQ ID NO: 781145 - RNA, 19 nt, Artificial Sequence
  Description of Artificial Sequence: Synthetic oligonucleotide
uuaagagcuuucccauuua

SEQ ID NO: 781146 - RNA, 19 nt, Artificial Sequence
  Description of Artificial Sequence: Synthetic oligonucleotide
accguggugcagauggacc

SEQ ID NO: 781147 - RNA, 19 nt, Artificial Sequence
  Description of Artificial Sequence: Synthetic oligonucleotide
auaugugacauaggagaca

SEQ ID NO: 781148 - RNA, 19 nt, Artificial Sequence
  Description of Artificial Sequence: Synthetic oligonucleotide
uggacuuguguacuuuauu

SEQ ID NO: 781149 - RNA, 19 nt, Artificial Sequence
  Description of Artificial Sequence: Synthetic oligonucleotide
guuacauagggcauaagau

SEQ ID NO: 781150 - RNA, 19 nt, Artificial Sequence
  Description of Artificial Sequence: Synthetic oligonucleotide
accggaaauaaucucccuu

SEQ ID NO: 781151 - RNA, 19 nt, Artificial Sequence
  Description of Artificial Sequence: Synthetic oligonucleotide
gaggggagaagcacgucag

SEQ ID NO: 781152 - RNA, 19 nt, Artificial Sequence
  Description of Artificial Sequence: Synthetic oligonucleotide
aacaaucacuggacaaacu

SEQ ID NO: 781153 - RNA, 19 nt, Artificial Sequence
  Description of Artificial Sequence: Synthetic oligonucleotide
uuauguuacucugcuguua

SEQ ID NO: 781154 - RNA, 19 nt, Artificial Sequence
  Description of Artificial Sequence: Synthetic oligonucleotide
gucgccacaugcuacuuca

SEQ ID NO: 781155 - RNA, 19 nt, Artificial Sequence
  Description of Artificial Sequence: Synthetic oligonucleotide
agacagacguaaccuccag

SEQ ID NO: 781156 - RNA, 19 nt, Artificial Sequence
  Description of Artificial Sequence: Synthetic oligonucleotide
gaccuuacucucuggauua

SEQ ID NO: 781157 - RNA, 19 nt, Artificial Sequence
  Description of Artificial Sequence: Synthetic oligonucleotide
agcuauugauacuuuucua

SEQ ID NO: 781158 - RNA, 19 nt, Artificial Sequence
  Description of Artificial Sequence: Synthetic oligonucleotide
gucacggcuuucaugcagg

SEQ ID NO: 781159 - RNA, 19 nt, Artificial Sequence
  Description of Artificial Sequence: Synthetic oligonucleotide
ucuacacaagugucuggaa

SEQ ID NO: 781160 - RNA, 19 nt, Artificial Sequence
  Description of Artificial Sequence: Synthetic oligonucleotide
gauccggaguccuccugag

SEQ ID NO: 781161 - RNA, 19 nt, Artificial Sequence
  Description of Artificial Sequence: Synthetic oligonucleotide
ggaauaaggaauggagaug

SEQ ID NO: 781162 - RNA, 19 nt, Artificial Sequence
  Description of Artificial Sequence: Synthetic oligonucleotide
augcaguacgaguauggaa

SEQ ID NO: 781163 - RNA, 19 nt, Artificial Sequence
  Description of Artificial Sequence: Synthetic oligonucleotide
ggcggauuggauguguagg

SEQ ID NO: 781164 - RNA, 19 nt, Artificial Sequence
  Description of Artificial Sequence: Synthetic oligonucleotide
gauuaguugcauuggcuau

SEQ ID NO: 781165 - RNA, 19 nt, Artificial Sequence
  Description of Artificial Sequence: Synthetic oligonucleotide
gcuuauaucaaaugccucu

SEQ ID NO: 781166 - RNA, 19 nt, Artificial Sequence
  Description of Artificial Sequence: Synthetic oligonucleotide
aucuauuguuugcuuucga

SEQ ID NO: 781167 - RNA, 19 nt, Artificial Sequence
  Description of Artificial Sequence: Synthetic oligonucleotide
uggaggacggcacccugga

SEQ ID NO: 781168 - RNA, 19 nt, Artificial Sequence
  Description of Artificial Sequence: Synthetic oligonucleotide
agggcgagcgccgagccgg

SEQ ID NO: 781169 - RNA, 19 nt, Artificial Sequence
  Description of Artificial Sequence: Synthetic oligonucleotide
uuucgaucgucgccacaug

SEQ ID NO: 781170 - RNA, 19 nt, Artificial Sequence
  Description of Artificial Sequence: Synthetic oligonucleotide
aucgucgccacaugcuacu

SEQ ID NO: 781171 - RNA, 19 nt, Artificial Sequence
  Description of Artificial Sequence: Synthetic oligonucleotide
cagauuacuuaaauaccaa

SEQ ID NO: 781172 - RNA, 19 nt, Artificial Sequence
  Description of Artificial Sequence: Synthetic oligonucleotide
aggcggauuggauguguag

SEQ ID NO: 781173 - RNA, 19 nt, Artificial Sequence
  Description of Artificial Sequence: Synthetic oligonucleotide
uuaguugcauuggcuauua

SEQ ID NO: 781174 - RNA, 19 nt, Artificial Sequence
  Description of Artificial Sequence: Synthetic oligonucleotide
ccgaccacguucuuguagg

SEQ ID NO: 781175 - RNA, 19 nt, Artificial Sequence
  Description of Artificial Sequence: Synthetic oligonucleotide
cagugugaaaagacuauaa

SEQ ID NO: 781176 - RNA, 19 nt, Artificial Sequence
  Description of Artificial Sequence: Synthetic oligonucleotide
cacgaaucugcauggaaaa

SEQ ID NO: 781177 - RNA, 19 nt, Artificial Sequence
  Description of Artificial Sequence: Synthetic oligonucleotide
ggaauaugcaguacgagua

SEQ ID NO: 781178 - RNA, 19 nt, Artificial Sequence
  Description of Artificial Sequence: Synthetic oligonucleotide
cauagggcauaagauuuuc

SEQ ID NO: 781179 - RNA, 19 nt, Artificial Sequence
  Description of Artificial Sequence: Synthetic oligonucleotide
acgaaucugcauggaaaag

SEQ ID NO: 781180 - RNA, 19 nt, Artificial Sequence
  Description of Artificial Sequence: Synthetic oligonucleotide
aggccgagacaacacaaau

SEQ ID NO: 781181 - RNA, 19 nt, Artificial Sequence
  Description of Artificial Sequence: Synthetic oligonucleotide
caacaauuccaggaccgug

SEQ ID NO: 781182 - RNA, 19 nt, Artificial Sequence
  Description of Artificial Sequence: Synthetic oligonucleotide
cacgucagacaaugcggcc

SEQ ID NO: 781183 - RNA, 19 nt, Artificial Sequence
  Description of Artificial Sequence: Synthetic oligonucleotide
cccauacacaugaaugggc

SEQ ID NO: 781184 - RNA, 19 nt, Artificial Sequence
  Description of Artificial Sequence: Synthetic oligonucleotide
auuaguugcauuggcuauu

SEQ ID NO: 781185 - RNA, 19 nt, Artificial Sequence
  Description of Artificial Sequence: Synthetic oligonucleotide
cagauggaccucagcuccg

SEQ ID NO: 781186 - RNA, 19 nt, Artificial Sequence
  Description of Artificial Sequence: Synthetic oligonucleotide
ccggaaauaaucucccuuc

SEQ ID NO: 781187 - RNA, 19 nt, Artificial Sequence
  Description of Artificial Sequence: Synthetic oligonucleotide
gaauaugcaguacgaguau

SEQ ID NO: 781188 - RNA, 19 nt, Artificial Sequence
  Description of Artificial Sequence: Synthetic oligonucleotide
acguucuuguaggccaccg

SEQ ID NO: 781189 - RNA, 19 nt, Artificial Sequence
  Description of Artificial Sequence: Synthetic oligonucleotide
acaguugaucccauacaca

SEQ ID NO: 781190 - RNA, 19 nt, Artificial Sequence
  Description of Artificial Sequence: Synthetic oligonucleotide
acccucucacaugugcacg

SEQ ID NO: 781191 - RNA, 19 nt, Artificial Sequence
  Description of Artificial Sequence: Synthetic oligonucleotide
aucaagggauggaguuucc

SEQ ID NO: 781192 - RNA, 19 nt, Artificial Sequence
  Description of Artificial Sequence: Synthetic oligonucleotide
acaaugcggccggacgccc

SEQ ID NO: 781193 - RNA, 19 nt, Artificial Sequence
  Description of Artificial Sequence: Synthetic oligonucleotide
gacuuguguacuuuauuuu

SEQ ID NO: 781194 - RNA, 19 nt, Artificial Sequence
  Description of Artificial Sequence: Synthetic oligonucleotide
ugagaaccgccaggggcgg

SEQ ID NO: 781195 - RNA, 19 nt, Artificial Sequence
  Description of Artificial Sequence: Synthetic oligonucleotide
aggagguguaagugaauuu

SEQ ID NO: 781196 - RNA, 19 nt, Artificial Sequence
  Description of Artificial Sequence: Synthetic oligonucleotide
gaaguuacucguguuuaua

SEQ ID NO: 781197 - RNA, 19 nt, Artificial Sequence
  Description of Artificial Sequence: Synthetic oligonucleotide
gaugcucgagaugacccuc

SEQ ID NO: 781198 - RNA, 19 nt, Artificial Sequence
  Description of Artificial Sequence: Synthetic oligonucleotide
ucaguguaucaagcucugc

SEQ ID NO: 781199 - RNA, 19 nt, Artificial Sequence
  Description of Artificial Sequence: Synthetic oligonucleotide
aucugugacccaagacugg

SEQ ID NO: 781200 - RNA, 19 nt, Artificial Sequence
  Description of Artificial Sequence: Synthetic oligonucleotide
uaccggaaauaaucucccu

SEQ ID NO: 781201 - RNA, 19 nt, Artificial Sequence
  Description of Artificial Sequence: Synthetic oligonucleotide
gaggaaauccaaguggaau

SEQ ID NO: 781202 - RNA, 19 nt, Artificial Sequence
  Description of Artificial Sequence: Synthetic oligonucleotide
cacccucucacaugugcac

SEQ ID NO: 781203 - RNA, 19 nt, Artificial Sequence
  Description of Artificial Sequence: Synthetic oligonucleotide
gcuacuucagcaagauacc

SEQ ID NO: 781204 - RNA, 19 nt, Artificial Sequence
  Description of Artificial Sequence: Synthetic oligonucleotide
agaaccgccaggggcgggg

SEQ ID NO: 781205 - RNA, 19 nt, Artificial Sequence
  Description of Artificial Sequence: Synthetic oligonucleotide
aagccguuuuggccagugu

SEQ ID NO: 781206 - RNA, 19 nt, Artificial Sequence
  Description of Artificial Sequence: Synthetic oligonucleotide
ugcuguuacauagggcaua

SEQ ID NO: 781207 - RNA, 19 nt, Artificial Sequence
  Description of Artificial Sequence: Synthetic oligonucleotide
gaucgucgccacaugcuac

SEQ ID NO: 781208 - RNA, 19 nt, Artificial Sequence
  Description of Artificial Sequence: Synthetic oligonucleotide
ggcgaagcgagggcgagcg

SEQ ID NO: 781209 - RNA, 19 nt, Artificial Sequence
  Description of Artificial Sequence: Synthetic oligonucleotide
gaaggccgagacaacacaa

SEQ ID NO: 781210 - RNA, 19 nt, Artificial Sequence
  Description of Artificial Sequence: Synthetic oligonucleotide
gaagcacgucagacaaugc

SEQ ID NO: 781211 - RNA, 19 nt, Artificial Sequence
  Description of Artificial Sequence: Synthetic oligonucleotide
agaccuggacuuguguacu

SEQ ID NO: 781212 - RNA, 19 nt, Artificial Sequence
  Description of Artificial Sequence: Synthetic oligonucleotide
ggagacauuuugaucugug

SEQ ID NO: 781213 - RNA, 19 nt, Artificial Sequence
  Description of Artificial Sequence: Synthetic oligonucleotide
gcgauggccucaucaaaag

SEQ ID NO: 781214 - RNA, 19 nt, Artificial Sequence
  Description of Artificial Sequence: Synthetic oligonucleotide
guguacuuuauuuucccuu

SEQ ID NO: 781215 - RNA, 19 nt, Artificial Sequence
  Description of Artificial Sequence: Synthetic oligonucleotide
auagggcauaagauuuuca

SEQ ID NO: 781216 - RNA, 19 nt, Artificial Sequence
  Description of Artificial Sequence: Synthetic oligonucleotide
acaugcuacuucagcaaga

SEQ ID NO: 781217 - RNA, 19 nt, Artificial Sequence
  Description of Artificial Sequence: Synthetic oligonucleotide
ucgccacaugcuacuucag

SEQ ID NO: 781218 - RNA, 19 nt, Artificial Sequence
  Description of Artificial Sequence: Synthetic oligonucleotide
caguacgaguauggaaaag

SEQ ID NO: 781219 - RNA, 19 nt, Artificial Sequence
  Description of Artificial Sequence: Synthetic oligonucleotide
agcagguugcgcuccucgu

SEQ ID NO: 781220 - RNA, 19 nt, Artificial Sequence
  Description of Artificial Sequence: Synthetic oligonucleotide
gauuuagaccuggacuugu

SEQ ID NO: 781221 - RNA, 19 nt, Artificial Sequence
  Description of Artificial Sequence: Synthetic oligonucleotide
cagacagacguaaccucca

SEQ ID NO: 781222 - RNA, 19 nt, Artificial Sequence
  Description of Artificial Sequence: Synthetic oligonucleotide
cuugggaauuaucuauugu

SEQ ID NO: 781223 - RNA, 19 nt, Artificial Sequence
  Description of Artificial Sequence: Synthetic oligonucleotide
cuccgucacggcuuucaug

SEQ ID NO: 781224 - RNA, 19 nt, Artificial Sequence
  Description of Artificial Sequence: Synthetic oligonucleotide
cuacuucuauuacaaggua

SEQ ID NO: 781225 - RNA, 19 nt, Artificial Sequence
  Description of Artificial Sequence: Synthetic oligonucleotide
gacguaaccuccagaauau

SEQ ID NO: 781226 - RNA, 19 nt, Artificial Sequence
  Description of Artificial Sequence: Synthetic oligonucleotide
caaugcggccggacgcccg

SEQ ID NO: 781227 - RNA, 19 nt, Artificial Sequence
  Description of Artificial Sequence: Synthetic oligonucleotide
gaccguggugcagauggac

SEQ ID NO: 781228 - RNA, 19 nt, Artificial Sequence
  Description of Artificial Sequence: Synthetic oligonucleotide
gauggaccucagcuccgac

SEQ ID NO: 781229 - RNA, 19 nt, Artificial Sequence
  Description of Artificial Sequence: Synthetic oligonucleotide
ggacuuguguacuuuauuu

SEQ ID NO: 781230 - RNA, 19 nt, Artificial Sequence
  Description of Artificial Sequence: Synthetic oligonucleotide
ggacaccuuuaguuuucgg

SEQ ID NO: 781231 - RNA, 19 nt, Artificial Sequence
  Description of Artificial Sequence: Synthetic oligonucleotide
gcaagcucgggauuauuaa

SEQ ID NO: 781232 - RNA, 19 nt, Artificial Sequence
  Description of Artificial Sequence: Synthetic oligonucleotide
cugguucagauuacuuaaa

SEQ ID NO: 781233 - RNA, 19 nt, Artificial Sequence
  Description of Artificial Sequence: Synthetic oligonucleotide
cucacaugugcacgaaucu

SEQ ID NO: 781234 - RNA, 19 nt, Artificial Sequence
  Description of Artificial Sequence: Synthetic oligonucleotide
caauauagugggucccucu

SEQ ID NO: 781235 - RNA, 19 nt, Artificial Sequence
  Description of Artificial Sequence: Synthetic oligonucleotide
ugcuuucgaucgucgccac

SEQ ID NO: 781236 - RNA, 19 nt, Artificial Sequence
  Description of Artificial Sequence: Synthetic oligonucleotide
gcacgucagacaaugcggc

SEQ ID NO: 781237 - RNA, 19 nt, Artificial Sequence
  Description of Artificial Sequence: Synthetic oligonucleotide
gucaguccucuacacaagu

SEQ ID NO: 781238 - RNA, 19 nt, Artificial Sequence
  Description of Artificial Sequence: Synthetic oligonucleotide
guguaucaagcucugcgau

SEQ ID NO: 781239 - RNA, 19 nt, Artificial Sequence
  Description of Artificial Sequence: Synthetic oligonucleotide
aggaaguugucaacucaaa

SEQ ID NO: 781240 - RNA, 19 nt, Artificial Sequence
  Description of Artificial Sequence: Synthetic oligonucleotide
cauuggcuauuaaauacuu

SEQ ID NO: 781241 - RNA, 19 nt, Artificial Sequence
  Description of Artificial Sequence: Synthetic oligonucleotide
uggaugcauuaagagcuuu

SEQ ID NO: 781242 - RNA, 19 nt, Artificial Sequence
  Description of Artificial Sequence: Synthetic oligonucleotide
gcauuaagagcuuucccau

SEQ ID NO: 781243 - RNA, 19 nt, Artificial Sequence
  Description of Artificial Sequence: Synthetic oligonucleotide
acgcccgcuuugucucggc

SEQ ID NO: 781244 - RNA, 19 nt, Artificial Sequence
  Description of Artificial Sequence: Synthetic oligonucleotide
gacgcccgcuuugucucgg

SEQ ID NO: 781245 - RNA, 19 nt, Artificial Sequence
  Description of Artificial Sequence: Synthetic oligonucleotide
ggagcgaggggagaagcac

SEQ ID NO: 781246 - RNA, 19 nt, Artificial Sequence
  Description of Artificial Sequence: Synthetic oligonucleotide
cuacaaaggcaggaggugu

SEQ ID NO: 781247 - RNA, 19 nt, Artificial Sequence
  Description of Artificial Sequence: Synthetic oligonucleotide
agcgccgagccggauccgg

SEQ ID NO: 781248 - RNA, 19 nt, Artificial Sequence
  Description of Artificial Sequence: Synthetic oligonucleotide
cuuucgaucgucgccacau

SEQ ID NO: 781249 - RNA, 19 nt, Artificial Sequence
  Description of Artificial Sequence: Synthetic oligonucleotide
guugucacagacagacgua

SEQ ID NO: 781250 - RNA, 19 nt, Artificial Sequence
  Description of Artificial Sequence: Synthetic oligonucleotide
acguaaccuccagaauaug

SEQ ID NO: 781251 - RNA, 19 nt, Artificial Sequence
  Description of Artificial Sequence: Synthetic oligonucleotide
gggucccucucucuaaaga

SEQ ID NO: 781252 - RNA, 19 nt, Artificial Sequence
  Description of Artificial Sequence: Synthetic oligonucleotide
gcacgaaucugcauggaaa

SEQ ID NO: 781253 - RNA, 19 nt, Artificial Sequence
  Description of Artificial Sequence: Synthetic oligonucleotide
gccguuuuggccaguguac

SEQ ID NO: 781254 - RNA, 19 nt, Artificial Sequence
  Description of Artificial Sequence: Synthetic oligonucleotide
gccccaggcggauuggaug

SEQ ID NO: 781255 - RNA, 19 nt, Artificial Sequence
  Description of Artificial Sequence: Synthetic oligonucleotide
augcuacuucagcaagaua

SEQ ID NO: 781256 - RNA, 19 nt, Artificial Sequence
  Description of Artificial Sequence: Synthetic oligonucleotide
gugucggucuucugcucga

SEQ ID NO: 781257 - RNA, 19 nt, Artificial Sequence
  Description of Artificial Sequence: Synthetic oligonucleotide
cgucagacaaugcggccgg

SEQ ID NO: 781258 - RNA, 19 nt, Artificial Sequence
  Description of Artificial Sequence: Synthetic oligonucleotide
ggacuacagucaaugauua

SEQ ID NO: 781259 - RNA, 19 nt, Artificial Sequence
  Description of Artificial Sequence: Synthetic oligonucleotide
cccgauaguccuugaucag

SEQ ID NO: 781260 - RNA, 19 nt, Artificial Sequence
  Description of Artificial Sequence: Synthetic oligonucleotide
ggccgagacaacacaaauc

SEQ ID NO: 781261 - RNA, 19 nt, Artificial Sequence
  Description of Artificial Sequence: Synthetic oligonucleotide
gcaguacgaguauggaaaa

SEQ ID NO: 781262 - RNA, 19 nt, Artificial Sequence
  Description of Artificial Sequence: Synthetic oligonucleotide
guacgaguauggaaaaguu

SEQ ID NO: 781263 - RNA, 19 nt, Artificial Sequence
  Description of Artificial Sequence: Synthetic oligonucleotide
cuggaaguuacucguguuu

SEQ ID NO: 781264 - RNA, 19 nt, Artificial Sequence
  Description of Artificial Sequence: Synthetic oligonucleotide
gcccgcuuugucucggcgc

SEQ ID NO: 781265 - RNA, 19 nt, Artificial Sequence
  Description of Artificial Sequence: Synthetic oligonucleotide
gcucgagaugacccuccag

SEQ ID NO: 781266 - RNA, 19 nt, Artificial Sequence
  Description of Artificial Sequence: Synthetic oligonucleotide
acacaugaaugggcuuccu

SEQ ID NO: 781267 - RNA, 19 nt, Artificial Sequence
  Description of Artificial Sequence: Synthetic oligonucleotide
gaacugguucagauuacuu

SEQ ID NO: 781268 - RNA, 19 nt, Artificial Sequence
  Description of Artificial Sequence: Synthetic oligonucleotide
agaugacccuccaggcgga

SEQ ID NO: 781269 - RNA, 19 nt, Artificial Sequence
  Description of Artificial Sequence: Synthetic oligonucleotide
uggcgaagcgagggcgagc

SEQ ID NO: 781270 - RNA, 19 nt, Artificial Sequence
  Description of Artificial Sequence: Synthetic oligonucleotide
gcuguuacauagggcauaa

SEQ ID NO: 781271 - RNA, 19 nt, Artificial Sequence
  Description of Artificial Sequence: Synthetic oligonucleotide
cauuaagagcuuucccauu

SEQ ID NO: 781272 - RNA, 19 nt, Artificial Sequence
  Description of Artificial Sequence: Synthetic oligonucleotide
cagcucggucuucuccaug

SEQ ID NO: 781273 - RNA, 19 nt, Artificial Sequence
  Description of Artificial Sequence: Synthetic oligonucleotide
ggccaguguacaggcaagc

SEQ ID NO: 781274 - RNA, 19 nt, Artificial Sequence
  Description of Artificial Sequence: Synthetic oligonucleotide
gcggauuggauguguaggu

SEQ ID NO: 781275 - RNA, 19 nt, Artificial Sequence
  Description of Artificial Sequence: Synthetic oligonucleotide
ggaaguuacucguguuuau

SEQ ID NO: 781276 - RNA, 19 nt, Artificial Sequence
  Description of Artificial Sequence: Synthetic oligonucleotide
ggcaagcucgggauuauua

SEQ ID NO: 781277 - RNA, 19 nt, Artificial Sequence
  Description of Artificial Sequence: Synthetic oligonucleotide
ggacgcccgcuuugucucg

SEQ ID NO: 781278 - RNA, 19 nt, Artificial Sequence
  Description of Artificial Sequence: Synthetic oligonucleotide
cagcuccgacuccacuuuc

SEQ ID NO: 781279 - RNA, 19 nt, Artificial Sequence
  Description of Artificial Sequence: Synthetic oligonucleotide
ccucaugcggggccgccgc

SEQ ID NO: 781280 - RNA, 19 nt, Artificial Sequence
  Description of Artificial Sequence: Synthetic oligonucleotide
ccgacagcagguugcgcuc

SEQ ID NO: 781281 - RNA, 19 nt, Artificial Sequence
  Description of Artificial Sequence: Synthetic oligonucleotide
cguaaccuccagaauaugu

SEQ ID NO: 781282 - RNA, 19 nt, Artificial Sequence
  Description of Artificial Sequence: Synthetic oligonucleotide
gacccaagacuggaugcau

SEQ ID NO: 781283 - RNA, 19 nt, Artificial Sequence
  Description of Artificial Sequence: Synthetic oligonucleotide
cagacguaaccuccagaau

SEQ ID NO: 781284 - RNA, 19 nt, Artificial Sequence
  Description of Artificial Sequence: Synthetic oligonucleotide
ggcgcccugcuccgucacg

SEQ ID NO: 781285 - RNA, 19 nt, Artificial Sequence
  Description of Artificial Sequence: Synthetic oligonucleotide
cucggcgcacgaggccgcg

SEQ ID NO: 781286 - RNA, 19 nt, Artificial Sequence
  Description of Artificial Sequence: Synthetic oligonucleotide
ucgucgccacaugcuacuu

SEQ ID NO: 781287 - RNA, 19 nt, Artificial Sequence
  Description of Artificial Sequence: Synthetic oligonucleotide
gagcgccgagccggauccg

SEQ ID NO: 781288 - RNA, 19 nt, Artificial Sequence
  Description of Artificial Sequence: Synthetic oligonucleotide
ccuggacuuguguacuuua

SEQ ID NO: 781289 - RNA, 19 nt, Artificial Sequence
  Description of Artificial Sequence: Synthetic oligonucleotide
ccgagccggauccggaguc

SEQ ID NO: 781290 - RNA, 19 nt, Artificial Sequence
  Description of Artificial Sequence: Synthetic oligonucleotide
ggaggacggcacccuggac

SEQ ID NO: 781291 - RNA, 19 nt, Artificial Sequence
  Description of Artificial Sequence: Synthetic oligonucleotide
cgaccacguucuuguaggc

SEQ ID NO: 781292 - RNA, 19 nt, Artificial Sequence
  Description of Artificial Sequence: Synthetic oligonucleotide
gcuuucgaucgucgccaca

SEQ ID NO: 781293 - RNA, 19 nt, Artificial Sequence
  Description of Artificial Sequence: Synthetic oligonucleotide
agccccaggcggauuggau

SEQ ID NO: 781294 - RNA, 19 nt, Artificial Sequence
  Description of Artificial Sequence: Synthetic oligonucleotide
gagaagcacgucagacaau

SEQ ID NO: 781295 - RNA, 19 nt, Artificial Sequence
  Description of Artificial Sequence: Synthetic oligonucleotide
aggcaagcucgggauuauu

SEQ ID NO: 781296 - RNA, 19 nt, Artificial Sequence
  Description of Artificial Sequence: Synthetic oligonucleotide
ccguuuuggccaguguaca

SEQ ID NO: 781297 - RNA, 19 nt, Artificial Sequence
  Description of Artificial Sequence: Synthetic oligonucleotide
ccgagacaacacaaaucaa

SEQ ID NO: 781298 - RNA, 19 nt, Artificial Sequence
  Description of Artificial Sequence: Synthetic oligonucleotide
ggcgccggcgaggacaaaa

SEQ ID NO: 781299 - RNA, 19 nt, Artificial Sequence
  Description of Artificial Sequence: Synthetic oligonucleotide
gucagacaaugcggccgga

SEQ ID NO: 781300 - RNA, 19 nt, Artificial Sequence
  Description of Artificial Sequence: Synthetic oligonucleotide
augugacauaggagacauu

SEQ ID NO: 781301 - RNA, 19 nt, Artificial Sequence
  Description of Artificial Sequence: Synthetic oligonucleotide
ucggcgcacgaggccgcgu

SEQ ID NO: 781302 - RNA, 19 nt, Artificial Sequence
  Description of Artificial Sequence: Synthetic oligonucleotide
ccccaggcggauuggaugu

SEQ ID NO: 781303 - RNA, 19 nt, Artificial Sequence
  Description of Artificial Sequence: Synthetic oligonucleotide
ccaagacuggaugcauuaa

SEQ ID NO: 781304 - RNA, 19 nt, Artificial Sequence
  Description of Artificial Sequence: Synthetic oligonucleotide
cgucgccacaugcuacuuc

SEQ ID NO: 781305 - RNA, 19 nt, Artificial Sequence
  Description of Artificial Sequence: Synthetic oligonucleotide
gcucgaugcucgagaugac

SEQ ID NO: 781306 - RNA, 19 nt, Artificial Sequence
  Description of Artificial Sequence: Synthetic oligonucleotide
gcagguugcgcuccucguu

SEQ ID NO: 781307 - RNA, 19 nt, Artificial Sequence
  Description of Artificial Sequence: Synthetic oligonucleotide
cgaucgucgccacaugcua

SEQ ID NO: 781308 - RNA, 19 nt, Artificial Sequence
  Description of Artificial Sequence: Synthetic oligonucleotide
cgccgagccggauccggag

SEQ ID NO: 781309 - RNA, 19 nt, Artificial Sequence
  Description of Artificial Sequence: Synthetic oligonucleotide
gcgaagcgagggcgagcgc

SEQ ID NO: 781310 - RNA, 19 nt, Artificial Sequence
  Description of Artificial Sequence: Synthetic oligonucleotide
cgcccgcuuugucucggcg

SEQ ID NO: 781311 - RNA, 19 nt, Artificial Sequence
  Description of Artificial Sequence: Synthetic oligonucleotide
augcggccggacgcccgcu

SEQ ID NO: 781312 - RNA, 19 nt, Artificial Sequence
  Description of Artificial Sequence: Synthetic oligonucleotide
ccgcugcaucgcauucuuc

SEQ ID NO: 781313 - RNA, 19 nt, Artificial Sequence
  Description of Artificial Sequence: Synthetic oligonucleotide
ggacggcacccuggacacc

SEQ ID NO: 781314 - RNA, 19 nt, Artificial Sequence
  Description of Artificial Sequence: Synthetic oligonucleotide
gccgagccggauccggagu

SEQ ID NO: 781315 - RNA, 19 nt, Artificial Sequence
  Description of Artificial Sequence: Synthetic oligonucleotide
cgaugcucgagaugacccu

SEQ ID NO: 781316 - RNA, 19 nt, Artificial Sequence
  Description of Artificial Sequence: Synthetic oligonucleotide
ccuuacucucuggauuagu

SEQ ID NO: 781317 - RNA, 19 nt, Artificial Sequence
  Description of Artificial Sequence: Synthetic oligonucleotide
cggcgcacgaggccgcguc

SEQ ID NO: 781318 - RNA, 19 nt, Artificial Sequence
  Description of Artificial Sequence: Synthetic oligonucleotide
acggcacccuggacaccuu

SEQ ID NO: 781319 - RNA, 19 nt, Artificial Sequence
  Description of Artificial Sequence: Synthetic oligonucleotide
cggccggacgcccgcuuug

SEQ ID NO: 781320 - RNA, 19 nt, Artificial Sequence
  Description of Artificial Sequence: Synthetic oligonucleotide
ccgcuuugucucggcgcac

SEQ ID NO: 781321 - RNA, 19 nt, Artificial Sequence
  Description of Artificial Sequence: Synthetic oligonucleotide
gcgccgagccggauccgga

SEQ ID NO: 781322 - RNA, 19 nt, Artificial Sequence
  Description of Artificial Sequence: Synthetic oligonucleotide
gcucugcgauggccucauc

SEQ ID NO: 781323 - RNA, 19 nt, Artificial Sequence
  Description of Artificial Sequence: Synthetic oligonucleotide
ggccggacgcccgcuuugu

SEQ ID NO: 781324 - RNA, 19 nt, Artificial Sequence
  Description of Artificial Sequence: Synthetic oligonucleotide
gcgcacgaggccgcguccu

SEQ ID NO: 781325 - RNA, 19 nt, Artificial Sequence
  Description of Artificial Sequence: Synthetic oligonucleotide
cccuccgcugcaucgcauu

SEQ ID NO: 781326 - RNA, 19 nt, Artificial Sequence
  Description of Artificial Sequence: Synthetic oligonucleotide
ccaggaccguggugcagau

SEQ ID NO: 781327 - RNA, 19 nt, Artificial Sequence
  Description of Artificial Sequence: Synthetic oligonucleotide
gggcgagcgccgagccgga

SEQ ID NO: 781328 - RNA, 19 nt, Artificial Sequence
  Description of Artificial Sequence: Synthetic oligonucleotide
gcggccggacgcccgcuuu

SEQ ID NO: 781329 - RNA, 19 nt, Artificial Sequence
  Description of Artificial Sequence: Synthetic oligonucleotide
ccccuccgcugcaucgcau

SEQ ID NO: 781330 - RNA, 19 nt, Artificial Sequence
  Description of Artificial Sequence: Synthetic oligonucleotide
cggcacccuggacaccuuu

SEQ ID NO: 781331 - RNA, 19 nt, Artificial Sequence
  Description of Artificial Sequence: Synthetic oligonucleotide
cggcgccggcgaggacaaa

SEQ ID NO: 781332 - RNA, 19 nt, Artificial Sequence
  Description of Artificial Sequence: Synthetic oligonucleotide
uauacgguaaaacaaaagg

SEQ ID NO: 781333 - RNA, 19 nt, Artificial Sequence
  Description of Artificial Sequence: Synthetic oligonucleotide
auauuuaaaaccucagucc

SEQ ID NO: 781334 - RNA, 19 nt, Artificial Sequence
  Description of Artificial Sequence: Synthetic oligonucleotide
aauaagccaguauacaucg

SEQ ID NO: 781335 - RNA, 19 nt, Artificial Sequence
  Description of Artificial Sequence: Synthetic oligonucleotide
uaauaaauccaaaaccucg

SEQ ID NO: 781336 - RNA, 19 nt, Artificial Sequence
  Description of Artificial Sequence: Synthetic oligonucleotide
aaauuugacaaacccaaag

SEQ ID NO: 781337 - RNA, 19 nt, Artificial Sequence
  Description of Artificial Sequence: Synthetic oligonucleotide
ugaauuaaagcugaaggcg

SEQ ID NO: 781338 - RNA, 19 nt, Artificial Sequence
  Description of Artificial Sequence: Synthetic oligonucleotide
uuuaaauuugacaaaccca

SEQ ID NO: 781339 - RNA, 19 nt, Artificial Sequence
  Description of Artificial Sequence: Synthetic oligonucleotide
uacaauauacgguaaaaca

SEQ ID NO: 781340 - RNA, 19 nt, Artificial Sequence
  Description of Artificial Sequence: Synthetic oligonucleotide
aaaaccucgaggccgcugc

SEQ ID NO: 781341 - RNA, 19 nt, Artificial Sequence
  Description of Artificial Sequence: Synthetic oligonucleotide
aaaaugcauguugacagcc

SEQ ID NO: 781342 - RNA, 19 nt, Artificial Sequence
  Description of Artificial Sequence: Synthetic oligonucleotide
aauccaaaaccucgaggcc

SEQ ID NO: 781343 - RNA, 19 nt, Artificial Sequence
  Description of Artificial Sequence: Synthetic oligonucleotide
aaguuuacaauauacggua

SEQ ID NO: 781344 - RNA, 19 nt, Artificial Sequence
  Description of Artificial Sequence: Synthetic oligonucleotide
aaaugcacgcaguagucuc

SEQ ID NO: 781345 - RNA, 19 nt, Artificial Sequence
  Description of Artificial Sequence: Synthetic oligonucleotide
aaauaagccaguauacauc

SEQ ID NO: 781346 - RNA, 19 nt, Artificial Sequence
  Description of Artificial Sequence: Synthetic oligonucleotide
gacacaauccacaacuucg

SEQ ID NO: 781347 - RNA, 19 nt, Artificial Sequence
  Description of Artificial Sequence: Synthetic oligonucleotide
gauuguucguccucgaaag

SEQ ID NO: 781348 - RNA, 19 nt, Artificial Sequence
  Description of Artificial Sequence: Synthetic oligonucleotide
cauguugacagccuggucc

SEQ ID NO: 781349 - RNA, 19 nt, Artificial Sequence
  Description of Artificial Sequence: Synthetic oligonucleotide
uuccuugugggccauaucc

SEQ ID NO: 781350 - RNA, 19 nt, Artificial Sequence
  Description of Artificial Sequence: Synthetic oligonucleotide
aacugaauugugguggggc

SEQ ID NO: 781351 - RNA, 19 nt, Artificial Sequence
  Description of Artificial Sequence: Synthetic oligonucleotide
cugaaauucugaauuaaag

SEQ ID NO: 781352 - RNA, 19 nt, Artificial Sequence
  Description of Artificial Sequence: Synthetic oligonucleotide
aauguaggaugugaagggc

SEQ ID NO: 781353 - RNA, 19 nt, Artificial Sequence
  Description of Artificial Sequence: Synthetic oligonucleotide
uuuauugugcugauggguc

SEQ ID NO: 781354 - RNA, 19 nt, Artificial Sequence
  Description of Artificial Sequence: Synthetic oligonucleotide
ucgaaaguaauaaauccaa

SEQ ID NO: 781355 - RNA, 19 nt, Artificial Sequence
  Description of Artificial Sequence: Synthetic oligonucleotide
uacaucguagaaaauuucu

SEQ ID NO: 781356 - RNA, 19 nt, Artificial Sequence
  Description of Artificial Sequence: Synthetic oligonucleotide
caauguaggaugugaaggg

SEQ ID NO: 781357 - RNA, 19 nt, Artificial Sequence
  Description of Artificial Sequence: Synthetic oligonucleotide
uggucguuuauuuuguccc

SEQ ID NO: 781358 - RNA, 19 nt, Artificial Sequence
  Description of Artificial Sequence: Synthetic oligonucleotide
auagaucaugaccaccucg

SEQ ID NO: 781359 - RNA, 19 nt, Artificial Sequence
  Description of Artificial Sequence: Synthetic oligonucleotide
aauauuccggccauccagg

SEQ ID NO: 781360 - RNA, 19 nt, Artificial Sequence
  Description of Artificial Sequence: Synthetic oligonucleotide
ucaaaccgggucaaacugg

SEQ ID NO: 781361 - RNA, 19 nt, Artificial Sequence
  Description of Artificial Sequence: Synthetic oligonucleotide
aauaaauccaaaaccucga

SEQ ID NO: 781362 - RNA, 19 nt, Artificial Sequence
  Description of Artificial Sequence: Synthetic oligonucleotide
agguucagcccguuuaacc

SEQ ID NO: 781363 - RNA, 19 nt, Artificial Sequence
  Description of Artificial Sequence: Synthetic oligonucleotide
gaugucgugaaaaugcaug

SEQ ID NO: 781364 - RNA, 19 nt, Artificial Sequence
  Description of Artificial Sequence: Synthetic oligonucleotide
ucugauccaaacacgcugc

SEQ ID NO: 781365 - RNA, 19 nt, Artificial Sequence
  Description of Artificial Sequence: Synthetic oligonucleotide
uguugaaccagugacgugu

SEQ ID NO: 781366 - RNA, 19 nt, Artificial Sequence
  Description of Artificial Sequence: Synthetic oligonucleotide
uacaauguaggaugugaag

SEQ ID NO: 781367 - RNA, 19 nt, Artificial Sequence
  Description of Artificial Sequence: Synthetic oligonucleotide
aaccgggucaaacugguca

SEQ ID NO: 781368 - RNA, 19 nt, Artificial Sequence
  Description of Artificial Sequence: Synthetic oligonucleotide
auugucacgaguucaccag

SEQ ID NO: 781369 - RNA, 19 nt, Artificial Sequence
  Description of Artificial Sequence: Synthetic oligonucleotide
ugaccauaggggaaauccg

SEQ ID NO: 781370 - RNA, 19 nt, Artificial Sequence
  Description of Artificial Sequence: Synthetic oligonucleotide
aaacacgcugcuuuauuca

SEQ ID NO: 781371 - RNA, 19 nt, Artificial Sequence
  Description of Artificial Sequence: Synthetic oligonucleotide
ucggugaccacuccgaacu

SEQ ID NO: 781372 - RNA, 19 nt, Artificial Sequence
  Description of Artificial Sequence: Synthetic oligonucleotide
uuuaaaaccucaguccaga

SEQ ID NO: 781373 - RNA, 19 nt, Artificial Sequence
  Description of Artificial Sequence: Synthetic oligonucleotide
acaauuggggucuuuaaau

SEQ ID NO: 781374 - RNA, 19 nt, Artificial Sequence
  Description of Artificial Sequence: Synthetic oligonucleotide
cuucgggucaauauuccgg

SEQ ID NO: 781375 - RNA, 19 nt, Artificial Sequence
  Description of Artificial Sequence: Synthetic oligonucleotide
acuccgaacuucuugaagu

SEQ ID NO: 781376 - RNA, 19 nt, Artificial Sequence
  Description of Artificial Sequence: Synthetic oligonucleotide
acacaagccgcucaaagca

SEQ ID NO: 781377 - RNA, 19 nt, Artificial Sequence
  Description of Artificial Sequence: Synthetic oligonucleotide
uuuuauugugcugaugggu

SEQ ID NO: 781378 - RNA, 19 nt, Artificial Sequence
  Description of Artificial Sequence: Synthetic oligonucleotide
caauauuccggccauccag

SEQ ID NO: 781379 - RNA, 19 nt, Artificial Sequence
  Description of Artificial Sequence: Synthetic oligonucleotide
uggaggggcgaauugauca

SEQ ID NO: 781380 - RNA, 19 nt, Artificial Sequence
  Description of Artificial Sequence: Synthetic oligonucleotide
auuccggccauccagggug

SEQ ID NO: 781381 - RNA, 19 nt, Artificial Sequence
  Description of Artificial Sequence: Synthetic oligonucleotide
cugaccauaggggaaaucc

SEQ ID NO: 781382 - RNA, 19 nt, Artificial Sequence
  Description of Artificial Sequence: Synthetic oligonucleotide
aaaaggcucaggaaaauaa

SEQ ID NO: 781383 - RNA, 19 nt, Artificial Sequence
  Description of Artificial Sequence: Synthetic oligonucleotide
aauccggcugggcuguugg

SEQ ID NO: 781384 - RNA, 19 nt, Artificial Sequence
  Description of Artificial Sequence: Synthetic oligonucleotide
accaaaugcacgcaguagu

SEQ ID NO: 781385 - RNA, 19 nt, Artificial Sequence
  Description of Artificial Sequence: Synthetic oligonucleotide
gaaaaugcauguugacagc

SEQ ID NO: 781386 - RNA, 19 nt, Artificial Sequence
  Description of Artificial Sequence: Synthetic oligonucleotide
ugauuguucguccucgaaa

SEQ ID NO: 781387 - RNA, 19 nt, Artificial Sequence
  Description of Artificial Sequence: Synthetic oligonucleotide
cuuuauucaaaccggguca

SEQ ID NO: 781388 - RNA, 19 nt, Artificial Sequence
  Description of Artificial Sequence: Synthetic oligonucleotide
aaugcacgcaguagucucc

SEQ ID NO: 781389 - RNA, 19 nt, Artificial Sequence
  Description of Artificial Sequence: Synthetic oligonucleotide
ugaguggugcuccagucca

SEQ ID NO: 781390 - RNA, 19 nt, Artificial Sequence
  Description of Artificial Sequence: Synthetic oligonucleotide
acaaagaucuuguuggauu

SEQ ID NO: 781391 - RNA, 19 nt, Artificial Sequence
  Description of Artificial Sequence: Synthetic oligonucleotide
auucaaaccgggucaaacu

SEQ ID NO: 781392 - RNA, 19 nt, Artificial Sequence
  Description of Artificial Sequence: Synthetic oligonucleotide
uucgggucaauauuccggc

SEQ ID NO: 781393 - RNA, 19 nt, Artificial Sequence
  Description of Artificial Sequence: Synthetic oligonucleotide
uggucaaugggaaccugag

SEQ ID NO: 781394 - RNA, 19 nt, Artificial Sequence
  Description of Artificial Sequence: Synthetic oligonucleotide
ugugauugucacgaguuca

SEQ ID NO: 781395 - RNA, 19 nt, Artificial Sequence
  Description of Artificial Sequence: Synthetic oligonucleotide
ggcaccauagcccuguggg

SEQ ID NO: 781396 - RNA, 19 nt, Artificial Sequence
  Description of Artificial Sequence: Synthetic oligonucleotide
guaaccauacugaccauag

SEQ ID NO: 781397 - RNA, 19 nt, Artificial Sequence
  Description of Artificial Sequence: Synthetic oligonucleotide
aauauacgguaaaacaaaa

SEQ ID NO: 781398 - RNA, 19 nt, Artificial Sequence
  Description of Artificial Sequence: Synthetic oligonucleotide
acaauccacaacuucgcca

SEQ ID NO: 781399 - RNA, 19 nt, Artificial Sequence
  Description of Artificial Sequence: Synthetic oligonucleotide
ugggaaaaguagcugcgca

SEQ ID NO: 781400 - RNA, 19 nt, Artificial Sequence
  Description of Artificial Sequence: Synthetic oligonucleotide
uaaccauacugaccauagg

SEQ ID NO: 781401 - RNA, 19 nt, Artificial Sequence
  Description of Artificial Sequence: Synthetic oligonucleotide
agagucucuugaguggugc

SEQ ID NO: 781402 - RNA, 19 nt, Artificial Sequence
  Description of Artificial Sequence: Synthetic oligonucleotide
caauauacgguaaaacaaa

SEQ ID NO: 781403 - RNA, 19 nt, Artificial Sequence
  Description of Artificial Sequence: Synthetic oligonucleotide
uauucaaaccgggucaaac

SEQ ID NO: 781404 - RNA, 19 nt, Artificial Sequence
  Description of Artificial Sequence: Synthetic oligonucleotide
gaccauaggggaaauccgg

SEQ ID NO: 781405 - RNA, 19 nt, Artificial Sequence
  Description of Artificial Sequence: Synthetic oligonucleotide
accauacugaccauagggg

SEQ ID NO: 781406 - RNA, 19 nt, Artificial Sequence
  Description of Artificial Sequence: Synthetic oligonucleotide
acacaauccacaacuucgc

SEQ ID NO: 781407 - RNA, 19 nt, Artificial Sequence
  Description of Artificial Sequence: Synthetic oligonucleotide
gauugucacgaguucacca

SEQ ID NO: 781408 - RNA, 19 nt, Artificial Sequence
  Description of Artificial Sequence: Synthetic oligonucleotide
uguucguccucgaaaguaa

SEQ ID NO: 781409 - RNA, 19 nt, Artificial Sequence
  Description of Artificial Sequence: Synthetic oligonucleotide
cacacaagccgcucaaagc

SEQ ID NO: 781410 - RNA, 19 nt, Artificial Sequence
  Description of Artificial Sequence: Synthetic oligonucleotide
cacgaguucaccagucccg

SEQ ID NO: 781411 - RNA, 19 nt, Artificial Sequence
  Description of Artificial Sequence: Synthetic oligonucleotide
ugugguucugcccgcgucc

SEQ ID NO: 781412 - RNA, 19 nt, Artificial Sequence
  Description of Artificial Sequence: Synthetic oligonucleotide
aauugaucaggagguggag

SEQ ID NO: 781413 - RNA, 19 nt, Artificial Sequence
  Description of Artificial Sequence: Synthetic oligonucleotide
uaaauuugacaaacccaaa

SEQ ID NO: 781414 - RNA, 19 nt, Artificial Sequence
  Description of Artificial Sequence: Synthetic oligonucleotide
guagucuccaccugugccc

SEQ ID NO: 781415 - RNA, 19 nt, Artificial Sequence
  Description of Artificial Sequence: Synthetic oligonucleotide
aaccaaaugcacgcaguag

SEQ ID NO: 781416 - RNA, 19 nt, Artificial Sequence
  Description of Artificial Sequence: Synthetic oligonucleotide
aacccuguuguugaaccag

SEQ ID NO: 781417 - RNA, 19 nt, Artificial Sequence
  Description of Artificial Sequence: Synthetic oligonucleotide
aagcccugcacguuguggu

SEQ ID NO: 781418 - RNA, 19 nt, Artificial Sequence
  Description of Artificial Sequence: Synthetic oligonucleotide
auauacgguaaaacaaaag

SEQ ID NO: 781419 - RNA, 19 nt, Artificial Sequence
  Description of Artificial Sequence: Synthetic oligonucleotide
augucgugaaaaugcaugu

SEQ ID NO: 781420 - RNA, 19 nt, Artificial Sequence
  Description of Artificial Sequence: Synthetic oligonucleotide
gggcgaauugaucaggagg

SEQ ID NO: 781421 - RNA, 19 nt, Artificial Sequence
  Description of Artificial Sequence: Synthetic oligonucleotide
ugacacaauccacaacuuc

SEQ ID NO: 781422 - RNA, 19 nt, Artificial Sequence
  Description of Artificial Sequence: Synthetic oligonucleotide
ugugcauggcuucggguca

SEQ ID NO: 781423 - RNA, 19 nt, Artificial Sequence
  Description of Artificial Sequence: Synthetic oligonucleotide
ucaauauuccggccaucca

SEQ ID NO: 781424 - RNA, 19 nt, Artificial Sequence
  Description of Artificial Sequence: Synthetic oligonucleotide
ucguagaaaauuucucuua

SEQ ID NO: 781425 - RNA, 19 nt, Artificial Sequence
  Description of Artificial Sequence: Synthetic oligonucleotide
aucguagaaaauuucucuu

SEQ ID NO: 781426 - RNA, 19 nt, Artificial Sequence
  Description of Artificial Sequence: Synthetic oligonucleotide
guggucguuuauuuugucc

SEQ ID NO: 781427 - RNA, 19 nt, Artificial Sequence
  Description of Artificial Sequence: Synthetic oligonucleotide
agcauugccacccgggcca

SEQ ID NO: 781428 - RNA, 19 nt, Artificial Sequence
  Description of Artificial Sequence: Synthetic oligonucleotide
aaccucaguccagacgugg

SEQ ID NO: 781429 - RNA, 19 nt, Artificial Sequence
  Description of Artificial Sequence: Synthetic oligonucleotide
aacacgcugcuuuauucaa

SEQ ID NO: 781430 - RNA, 19 nt, Artificial Sequence
  Description of Artificial Sequence: Synthetic oligonucleotide
agccaaaacugaauugugg

SEQ ID NO: 781431 - RNA, 19 nt, Artificial Sequence
  Description of Artificial Sequence: Synthetic oligonucleotide
accacuccgaacuucuuga

SEQ ID NO: 781432 - RNA, 19 nt, Artificial Sequence
  Description of Artificial Sequence: Synthetic oligonucleotide
gaagccgcugccaccagcg

SEQ ID NO: 781433 - RNA, 19 nt, Artificial Sequence
  Description of Artificial Sequence: Synthetic oligonucleotide
ugggccguagccaccaaug

SEQ ID NO: 781434 - RNA, 19 nt, Artificial Sequence
  Description of Artificial Sequence: Synthetic oligonucleotide
gacgucagcauugccaccc

SEQ ID NO: 781435 - RNA, 19 nt, Artificial Sequence
  Description of Artificial Sequence: Synthetic oligonucleotide
acugaauugugguggggca

SEQ ID NO: 781436 - RNA, 19 nt, Artificial Sequence
  Description of Artificial Sequence: Synthetic oligonucleotide
aaacccuguuguugaacca

SEQ ID NO: 781437 - RNA, 19 nt, Artificial Sequence
  Description of Artificial Sequence: Synthetic oligonucleotide
ugcacguugugguucugcc

SEQ ID NO: 781438 - RNA, 19 nt, Artificial Sequence
  Description of Artificial Sequence: Synthetic oligonucleotide
auacaucguagaaaauuuc

SEQ ID NO: 781439 - RNA, 19 nt, Artificial Sequence
  Description of Artificial Sequence: Synthetic oligonucleotide
uuuauucaaaccgggucaa

SEQ ID NO: 781440 - RNA, 19 nt, Artificial Sequence
  Description of Artificial Sequence: Synthetic oligonucleotide
ugaauugugguggggcacc

SEQ ID NO: 781441 - RNA, 19 nt, Artificial Sequence
  Description of Artificial Sequence: Synthetic oligonucleotide
aaacugaauuguggugggg

SEQ ID NO: 781442 - RNA, 19 nt, Artificial Sequence
  Description of Artificial Sequence: Synthetic oligonucleotide
auuuaaaaccucaguccag

SEQ ID NO: 781443 - RNA, 19 nt, Artificial Sequence
  Description of Artificial Sequence: Synthetic oligonucleotide
auauuccggccauccaggg

SEQ ID NO: 781444 - RNA, 19 nt, Artificial Sequence
  Description of Artificial Sequence: Synthetic oligonucleotide
ucguccucgaaaguaauaa

SEQ ID NO: 781445 - RNA, 19 nt, Artificial Sequence
  Description of Artificial Sequence: Synthetic oligonucleotide
gcugcuuuauucaaaccgg

SEQ ID NO: 781446 - RNA, 19 nt, Artificial Sequence
  Description of Artificial Sequence: Synthetic oligonucleotide
cacaauuuguaaauguaua

SEQ ID NO: 781447 - RNA, 19 nt, Artificial Sequence
  Description of Artificial Sequence: Synthetic oligonucleotide
auccacaacuucgccauac

SEQ ID NO: 781448 - RNA, 19 nt, Artificial Sequence
  Description of Artificial Sequence: Synthetic oligonucleotide
aaaggcucaggaaaauaau

SEQ ID NO: 781449 - RNA, 19 nt, Artificial Sequence
  Description of Artificial Sequence: Synthetic oligonucleotide
gcuuuauucaaaccggguc

SEQ ID NO: 781450 - RNA, 19 nt, Artificial Sequence
  Description of Artificial Sequence: Synthetic oligonucleotide
acgcugcuuuauucaaacc

SEQ ID NO: 781451 - RNA, 19 nt, Artificial Sequence
  Description of Artificial Sequence: Synthetic oligonucleotide
uggcuucgggucaauauuc

SEQ ID NO: 781452 - RNA, 19 nt, Artificial Sequence
  Description of Artificial Sequence: Synthetic oligonucleotide
gaauuaaagcugaaggcgu

SEQ ID NO: 781453 - RNA, 19 nt, Artificial Sequence
  Description of Artificial Sequence: Synthetic oligonucleotide
uccacugauuguucguccu

SEQ ID NO: 781454 - RNA, 19 nt, Artificial Sequence
  Description of Artificial Sequence: Synthetic oligonucleotide
ccauacugggaaaaguagc

SEQ ID NO: 781455 - RNA, 19 nt, Artificial Sequence
  Description of Artificial Sequence: Synthetic oligonucleotide
gauccaaacacgcugcuuu

SEQ ID NO: 781456 - RNA, 19 nt, Artificial Sequence
  Description of Artificial Sequence: Synthetic oligonucleotide
uucccgaucucgucggcgc

SEQ ID NO: 781457 - RNA, 19 nt, Artificial Sequence
  Description of Artificial Sequence: Synthetic oligonucleotide
caucguagaaaauuucucu

SEQ ID NO: 781458 - RNA, 19 nt, Artificial Sequence
  Description of Artificial Sequence: Synthetic oligonucleotide
ugucacgaguucaccaguc

SEQ ID NO: 781459 - RNA, 19 nt, Artificial Sequence
  Description of Artificial Sequence: Synthetic oligonucleotide
caagccgcucaaagcaagg

SEQ ID NO: 781460 - RNA, 19 nt, Artificial Sequence
  Description of Artificial Sequence: Synthetic oligonucleotide
aauuaaagcugaaggcguu

SEQ ID NO: 781461 - RNA, 19 nt, Artificial Sequence
  Description of Artificial Sequence: Synthetic oligonucleotide
gugugcauggcuucggguc

SEQ ID NO: 781462 - RNA, 19 nt, Artificial Sequence
  Description of Artificial Sequence: Synthetic oligonucleotide
uccgucucgccgcaguugu

SEQ ID NO: 781463 - RNA, 19 nt, Artificial Sequence
  Description of Artificial Sequence: Synthetic oligonucleotide
uugucacgaguucaccagu

SEQ ID NO: 781464 - RNA, 19 nt, Artificial Sequence
  Description of Artificial Sequence: Synthetic oligonucleotide
cugagcuccgucucgccgc

SEQ ID NO: 781465 - RNA, 19 nt, Artificial Sequence
  Description of Artificial Sequence: Synthetic oligonucleotide
agccaguauacaucguaga

SEQ ID NO: 781466 - RNA, 19 nt, Artificial Sequence
  Description of Artificial Sequence: Synthetic oligonucleotide
cgcugcuuuauucaaaccg

SEQ ID NO: 781467 - RNA, 19 nt, Artificial Sequence
  Description of Artificial Sequence: Synthetic oligonucleotide
aagggccccgcuuccagca

SEQ ID NO: 781468 - RNA, 19 nt, Artificial Sequence
  Description of Artificial Sequence: Synthetic oligonucleotide
ugauugucacgaguucacc

SEQ ID NO: 781469 - RNA, 19 nt, Artificial Sequence
  Description of Artificial Sequence: Synthetic oligonucleotide
gcuuccagcacacgaaccc

SEQ ID NO: 781470 - RNA, 19 nt, Artificial Sequence
  Description of Artificial Sequence: Synthetic oligonucleotide
uuguucguccucgaaagua

SEQ ID NO: 781471 - RNA, 19 nt, Artificial Sequence
  Description of Artificial Sequence: Synthetic oligonucleotide
gguuugcucaugucagggg

SEQ ID NO: 781472 - RNA, 19 nt, Artificial Sequence
  Description of Artificial Sequence: Synthetic oligonucleotide
cauacugaccauaggggaa

SEQ ID NO: 781473 - RNA, 19 nt, Artificial Sequence
  Description of Artificial Sequence: Synthetic oligonucleotide
agugugugauugucacgag

SEQ ID NO: 781474 - RNA, 19 nt, Artificial Sequence
  Description of Artificial Sequence: Synthetic oligonucleotide
ccaagugugugauugucac

SEQ ID NO: 781475 - RNA, 19 nt, Artificial Sequence
  Description of Artificial Sequence: Synthetic oligonucleotide
ggggucuuuaaauuugaca

SEQ ID NO: 781476 - RNA, 19 nt, Artificial Sequence
  Description of Artificial Sequence: Synthetic oligonucleotide
ugcccguaaccauacugac

SEQ ID NO: 781477 - RNA, 19 nt, Artificial Sequence
  Description of Artificial Sequence: Synthetic oligonucleotide
cacuccgaacuucuugaag

SEQ ID NO: 781478 - RNA, 19 nt, Artificial Sequence
  Description of Artificial Sequence: Synthetic oligonucleotide
gucacgaguucaccagucc

SEQ ID NO: 781479 - RNA, 19 nt, Artificial Sequence
  Description of Artificial Sequence: Synthetic oligonucleotide
auugccacccgggccaggg

SEQ ID NO: 781480 - RNA, 19 nt, Artificial Sequence
  Description of Artificial Sequence: Synthetic oligonucleotide
cccguaaccauacugacca

SEQ ID NO: 781481 - RNA, 19 nt, Artificial Sequence
  Description of Artificial Sequence: Synthetic oligonucleotide
uuguugaaccagugacgug

SEQ ID NO: 781482 - RNA, 19 nt, Artificial Sequence
  Description of Artificial Sequence: Synthetic oligonucleotide
uggccgaagccgcucaagu

SEQ ID NO: 781483 - RNA, 19 nt, Artificial Sequence
  Description of Artificial Sequence: Synthetic oligonucleotide
uucaccagucccgaauccu

SEQ ID NO: 781484 - RNA, 19 nt, Artificial Sequence
  Description of Artificial Sequence: Synthetic oligonucleotide
auugugguggggcaccaua

SEQ ID NO: 781485 - RNA, 19 nt, Artificial Sequence
  Description of Artificial Sequence: Synthetic oligonucleotide
acgaacccugcuuuaaauu

SEQ ID NO: 781486 - RNA, 19 nt, Artificial Sequence
  Description of Artificial Sequence: Synthetic oligonucleotide
acguugugguucugcccgc

SEQ ID NO: 781487 - RNA, 19 nt, Artificial Sequence
  Description of Artificial Sequence: Synthetic oligonucleotide
uccgaagccgcugccacca

SEQ ID NO: 781488 - RNA, 19 nt, Artificial Sequence
  Description of Artificial Sequence: Synthetic oligonucleotide
ucucgccgcaguugugggg

SEQ ID NO: 781489 - RNA, 19 nt, Artificial Sequence
  Description of Artificial Sequence: Synthetic oligonucleotide
cugcccguaaccauacuga

SEQ ID NO: 781490 - RNA, 19 nt, Artificial Sequence
  Description of Artificial Sequence: Synthetic oligonucleotide
uucguccucgaaaguaaua

SEQ ID NO: 781491 - RNA, 19 nt, Artificial Sequence
  Description of Artificial Sequence: Synthetic oligonucleotide
ugguuuuaucuuucaugau

SEQ ID NO: 781492 - RNA, 19 nt, Artificial Sequence
  Description of Artificial Sequence: Synthetic oligonucleotide
uucugcccgcguccgaagc

SEQ ID NO: 781493 - RNA, 19 nt, Artificial Sequence
  Description of Artificial Sequence: Synthetic oligonucleotide
gugauugucacgaguucac

SEQ ID NO: 781494 - RNA, 19 nt, Artificial Sequence
  Description of Artificial Sequence: Synthetic oligonucleotide
guagggauggaagcccugc

SEQ ID NO: 781495 - RNA, 19 nt, Artificial Sequence
  Description of Artificial Sequence: Synthetic oligonucleotide
agaucaugaccaccucggu

SEQ ID NO: 781496 - RNA, 19 nt, Artificial Sequence
  Description of Artificial Sequence: Synthetic oligonucleotide
guucaccagucccgaaucc

SEQ ID NO: 781497 - RNA, 19 nt, Artificial Sequence
  Description of Artificial Sequence: Synthetic oligonucleotide
ugcgccggcgggagcaagg

SEQ ID NO: 781498 - RNA, 19 nt, Artificial Sequence
  Description of Artificial Sequence: Synthetic oligonucleotide
cauagaucaugaccaccuc

SEQ ID NO: 781499 - RNA, 19 nt, Artificial Sequence
  Description of Artificial Sequence: Synthetic oligonucleotide
agccguuggcugcacuggg

SEQ ID NO: 781500 - RNA, 19 nt, Artificial Sequence
  Description of Artificial Sequence: Synthetic oligonucleotide
gggaaauccggcugggcug

SEQ ID NO: 781501 - RNA, 19 nt, Artificial Sequence
  Description of Artificial Sequence: Synthetic oligonucleotide
caccagucccgaauccugc

SEQ ID NO: 781502 - RNA, 19 nt, Artificial Sequence
  Description of Artificial Sequence: Synthetic oligonucleotide
cuagcgccgguagggaugg

SEQ ID NO: 781503 - RNA, 19 nt, Artificial Sequence
  Description of Artificial Sequence: Synthetic oligonucleotide
auacugaccauaggggaaa

SEQ ID NO: 781504 - RNA, 19 nt, Artificial Sequence
  Description of Artificial Sequence: Synthetic oligonucleotide
ugguccacugauuguucgu

SEQ ID NO: 781505 - RNA, 19 nt, Artificial Sequence
  Description of Artificial Sequence: Synthetic oligonucleotide
cacaauuggggucuuuaaa

SEQ ID NO: 781506 - RNA, 19 nt, Artificial Sequence
  Description of Artificial Sequence: Synthetic oligonucleotide
ucgggucaauauuccggcc

SEQ ID NO: 781507 - RNA, 19 nt, Artificial Sequence
  Description of Artificial Sequence: Synthetic oligonucleotide
cugggaaaaguagcugcgc

SEQ ID NO: 781508 - RNA, 19 nt, Artificial Sequence
  Description of Artificial Sequence: Synthetic oligonucleotide
guaggaugugaagggcggg

SEQ ID NO: 781509 - RNA, 19 nt, Artificial Sequence
  Description of Artificial Sequence: Synthetic oligonucleotide
aagccgcucaaagcaagga

SEQ ID NO: 781510 - RNA, 19 nt, Artificial Sequence
  Description of Artificial Sequence: Synthetic oligonucleotide
acaagccgcucaaagcaag

SEQ ID NO: 781511 - RNA, 19 nt, Artificial Sequence
  Description of Artificial Sequence: Synthetic oligonucleotide
gccgaguucucucuggcug

SEQ ID NO: 781512 - RNA, 19 nt, Artificial Sequence
  Description of Artificial Sequence: Synthetic oligonucleotide
cagcauugccacccgggcc

SEQ ID NO: 781513 - RNA, 19 nt, Artificial Sequence
  Description of Artificial Sequence: Synthetic oligonucleotide
gcugucccgagguucagcc

SEQ ID NO: 781514 - RNA, 19 nt, Artificial Sequence
  Description of Artificial Sequence: Synthetic oligonucleotide
cgaguggucguuuauuuug

SEQ ID NO: 781515 - RNA, 19 nt, Artificial Sequence
  Description of Artificial Sequence: Synthetic oligonucleotide
caauccacaacuucgccau

SEQ ID NO: 781516 - RNA, 19 nt, Artificial Sequence
  Description of Artificial Sequence: Synthetic oligonucleotide
ucgccauacugggaaaagu

SEQ ID NO: 781517 - RNA, 19 nt, Artificial Sequence
  Description of Artificial Sequence: Synthetic oligonucleotide
agccgcucaaagcaaggaa

SEQ ID NO: 781518 - RNA, 19 nt, Artificial Sequence
  Description of Artificial Sequence: Synthetic oligonucleotide
cugaauugugguggggcac

SEQ ID NO: 781519 - RNA, 19 nt, Artificial Sequence
  Description of Artificial Sequence: Synthetic oligonucleotide
aaaccucgaggccgcugcu

SEQ ID NO: 781520 - RNA, 19 nt, Artificial Sequence
  Description of Artificial Sequence: Synthetic oligonucleotide
ucgaguggucguuuauuuu

SEQ ID NO: 781521 - RNA, 19 nt, Artificial Sequence
  Description of Artificial Sequence: Synthetic oligonucleotide
gggaaccugagccuugcug

SEQ ID NO: 781522 - RNA, 19 nt, Artificial Sequence
  Description of Artificial Sequence: Synthetic oligonucleotide
gaggugugcauggcuucgg

SEQ ID NO: 781523 - RNA, 19 nt, Artificial Sequence
  Description of Artificial Sequence: Synthetic oligonucleotide
uugggccgaguucucucug

SEQ ID NO: 781524 - RNA, 19 nt, Artificial Sequence
  Description of Artificial Sequence: Synthetic oligonucleotide
aaaccgggucaaacugguc

SEQ ID NO: 781525 - RNA, 19 nt, Artificial Sequence
  Description of Artificial Sequence: Synthetic oligonucleotide
ucgaggugugcauggcuuc

SEQ ID NO: 781526 - RNA, 19 nt, Artificial Sequence
  Description of Artificial Sequence: Synthetic oligonucleotide
caccucggugaccacuccg

SEQ ID NO: 781527 - RNA, 19 nt, Artificial Sequence
  Description of Artificial Sequence: Synthetic oligonucleotide
gugugauugucacgaguuc

SEQ ID NO: 781528 - RNA, 19 nt, Artificial Sequence
  Description of Artificial Sequence: Synthetic oligonucleotide
gguccccacacaauugggg

SEQ ID NO: 781529 - RNA, 19 nt, Artificial Sequence
  Description of Artificial Sequence: Synthetic oligonucleotide
gucucgccgcaguuguggg

SEQ ID NO: 781530 - RNA, 19 nt, Artificial Sequence
  Description of Artificial Sequence: Synthetic oligonucleotide
acgucagcauugccacccg

SEQ ID NO: 781531 - RNA, 19 nt, Artificial Sequence
  Description of Artificial Sequence: Synthetic oligonucleotide
acacgaacccugcuuuaaa

SEQ ID NO: 781532 - RNA, 19 nt, Artificial Sequence
  Description of Artificial Sequence: Synthetic oligonucleotide
cuggccugccaccugugug

SEQ ID NO: 781533 - RNA, 19 nt, Artificial Sequence
  Description of Artificial Sequence: Synthetic oligonucleotide
ugucgugaaaaugcauguu

SEQ ID NO: 781534 - RNA, 19 nt, Artificial Sequence
  Description of Artificial Sequence: Synthetic oligonucleotide
aaauccggcugggcuguug

SEQ ID NO: 781535 - RNA, 19 nt, Artificial Sequence
  Description of Artificial Sequence: Synthetic oligonucleotide
gcgcagagucucuugagug

SEQ ID NO: 781536 - RNA, 19 nt, Artificial Sequence
  Description of Artificial Sequence: Synthetic oligonucleotide
ucggcgcccgcgcuguuca

SEQ ID NO: 781537 - RNA, 19 nt, Artificial Sequence
  Description of Artificial Sequence: Synthetic oligonucleotide
gguucagcccguuuaaccu

SEQ ID NO: 781538 - RNA, 19 nt, Artificial Sequence
  Description of Artificial Sequence: Synthetic oligonucleotide
ccaaaugcacgcaguaguc

SEQ ID NO: 781539 - RNA, 19 nt, Artificial Sequence
  Description of Artificial Sequence: Synthetic oligonucleotide
ggagcaagggccccgcuuc

SEQ ID NO: 781540 - RNA, 19 nt, Artificial Sequence
  Description of Artificial Sequence: Synthetic oligonucleotide
gccgcucaaguccugcccg

SEQ ID NO: 781541 - RNA, 19 nt, Artificial Sequence
  Description of Artificial Sequence: Synthetic oligonucleotide
uccuugcugccaugugggc

SEQ ID NO: 781542 - RNA, 19 nt, Artificial Sequence
  Description of Artificial Sequence: Synthetic oligonucleotide
uuauucaaaccgggucaaa

SEQ ID NO: 781543 - RNA, 19 nt, Artificial Sequence
  Description of Artificial Sequence: Synthetic oligonucleotide
agucccgaauccugcccug

SEQ ID NO: 781544 - RNA, 19 nt, Artificial Sequence
  Description of Artificial Sequence: Synthetic oligonucleotide
ucccgaucucgucggcgcc

SEQ ID NO: 781545 - RNA, 19 nt, Artificial Sequence
  Description of Artificial Sequence: Synthetic oligonucleotide
ggcgaauugaucaggaggu

SEQ ID NO: 781546 - RNA, 19 nt, Artificial Sequence
  Description of Artificial Sequence: Synthetic oligonucleotide
gcacgcaguagucuccacc

SEQ ID NO: 781547 - RNA, 19 nt, Artificial Sequence
  Description of Artificial Sequence: Synthetic oligonucleotide
cuggaggggcgaauugauc

SEQ ID NO: 781548 - RNA, 19 nt, Artificial Sequence
  Description of Artificial Sequence: Synthetic oligonucleotide
cacgcaguagucuccaccu

SEQ ID NO: 781549 - RNA, 19 nt, Artificial Sequence
  Description of Artificial Sequence: Synthetic oligonucleotide
aauccacaacuucgccaua

SEQ ID NO: 781550 - RNA, 19 nt, Artificial Sequence
  Description of Artificial Sequence: Synthetic oligonucleotide
cugcugucgcuccuggguc

SEQ ID NO: 781551 - RNA, 19 nt, Artificial Sequence
  Description of Artificial Sequence: Synthetic oligonucleotide
gacguggccuccacugccc

SEQ ID NO: 781552 - RNA, 19 nt, Artificial Sequence
  Description of Artificial Sequence: Synthetic oligonucleotide
ggugguguagauacaaugu

SEQ ID NO: 781553 - RNA, 19 nt, Artificial Sequence
  Description of Artificial Sequence: Synthetic oligonucleotide
uccaaacacgcugcuuuau

SEQ ID NO: 781554 - RNA, 19 nt, Artificial Sequence
  Description of Artificial Sequence: Synthetic oligonucleotide
cacgcggcugccccacugg

SEQ ID NO: 781555 - RNA, 19 nt, Artificial Sequence
  Description of Artificial Sequence: Synthetic oligonucleotide
ggucguuuauuuuguccca

SEQ ID NO: 781556 - RNA, 19 nt, Artificial Sequence
  Description of Artificial Sequence: Synthetic oligonucleotide
gugguucugcccgcguccg

SEQ ID NO: 781557 - RNA, 19 nt, Artificial Sequence
  Description of Artificial Sequence: Synthetic oligonucleotide
ucccugagcuccgucucgc

SEQ ID NO: 781558 - RNA, 19 nt, Artificial Sequence
  Description of Artificial Sequence: Synthetic oligonucleotide
aaguagcugcgcagagucu

SEQ ID NO: 781559 - RNA, 19 nt, Artificial Sequence
  Description of Artificial Sequence: Synthetic oligonucleotide
ccugcccguaaccauacug

SEQ ID NO: 781560 - RNA, 19 nt, Artificial Sequence
  Description of Artificial Sequence: Synthetic oligonucleotide
uccaggguguguggucugc

SEQ ID NO: 781561 - RNA, 19 nt, Artificial Sequence
  Description of Artificial Sequence: Synthetic oligonucleotide
caaaccgggucaaacuggu

SEQ ID NO: 781562 - RNA, 19 nt, Artificial Sequence
  Description of Artificial Sequence: Synthetic oligonucleotide
acgcaguagucuccaccug

SEQ ID NO: 781563 - RNA, 19 nt, Artificial Sequence
  Description of Artificial Sequence: Synthetic oligonucleotide
guccccacacaauuggggu

SEQ ID NO: 781564 - RNA, 19 nt, Artificial Sequence
  Description of Artificial Sequence: Synthetic oligonucleotide
caauuggggucuuuaaauu

SEQ ID NO: 781565 - RNA, 19 nt, Artificial Sequence
  Description of Artificial Sequence: Synthetic oligonucleotide
ccgaauccugcccuggcgc

SEQ ID NO: 781566 - RNA, 19 nt, Artificial Sequence
  Description of Artificial Sequence: Synthetic oligonucleotide
ggauuugcugcugucgcuc

SEQ ID NO: 781567 - RNA, 19 nt, Artificial Sequence
  Description of Artificial Sequence: Synthetic oligonucleotide
ggggcgaauugaucaggag

SEQ ID NO: 781568 - RNA, 19 nt, Artificial Sequence
  Description of Artificial Sequence: Synthetic oligonucleotide
uugaaccagugacguguuu

SEQ ID NO: 781569 - RNA, 19 nt, Artificial Sequence
  Description of Artificial Sequence: Synthetic oligonucleotide
caaaaggcucaggaaaaua

SEQ ID NO: 781570 - RNA, 19 nt, Artificial Sequence
  Description of Artificial Sequence: Synthetic oligonucleotide
cugcccuggcgccaucccc

SEQ ID NO: 781571 - RNA, 19 nt, Artificial Sequence
  Description of Artificial Sequence: Synthetic oligonucleotide
aauugugguggggcaccau

SEQ ID NO: 781572 - RNA, 19 nt, Artificial Sequence
  Description of Artificial Sequence: Synthetic oligonucleotide
ugcugucccgagguucagc

SEQ ID NO: 781573 - RNA, 19 nt, Artificial Sequence
  Description of Artificial Sequence: Synthetic oligonucleotide
accucggugaccacuccga

SEQ ID NO: 781574 - RNA, 19 nt, Artificial Sequence
  Description of Artificial Sequence: Synthetic oligonucleotide
aggggcgaauugaucagga

SEQ ID NO: 781575 - RNA, 19 nt, Artificial Sequence
  Description of Artificial Sequence: Synthetic oligonucleotide
uuccggccauccagggugu

SEQ ID NO: 781576 - RNA, 19 nt, Artificial Sequence
  Description of Artificial Sequence: Synthetic oligonucleotide
cugcacugggugccacgcg

SEQ ID NO: 781577 - RNA, 19 nt, Artificial Sequence
  Description of Artificial Sequence: Synthetic oligonucleotide
gaauugugguggggcacca

SEQ ID NO: 781578 - RNA, 19 nt, Artificial Sequence
  Description of Artificial Sequence: Synthetic oligonucleotide
agggccccgcuuccagcac

SEQ ID NO: 781579 - RNA, 19 nt, Artificial Sequence
  Description of Artificial Sequence: Synthetic oligonucleotide
ccgaguucucucuggcugc

SEQ ID NO: 781580 - RNA, 19 nt, Artificial Sequence
  Description of Artificial Sequence: Synthetic oligonucleotide
cacaagccgcucaaagcaa

SEQ ID NO: 781581 - RNA, 19 nt, Artificial Sequence
  Description of Artificial Sequence: Synthetic oligonucleotide
aucccucgaggugugcaug

SEQ ID NO: 781582 - RNA, 19 nt, Artificial Sequence
  Description of Artificial Sequence: Synthetic oligonucleotide
gucccgaauccugcccugg

SEQ ID NO: 781583 - RNA, 19 nt, Artificial Sequence
  Description of Artificial Sequence: Synthetic oligonucleotide
gcccgcgcuguucauggcg

SEQ ID NO: 781584 - RNA, 19 nt, Artificial Sequence
  Description of Artificial Sequence: Synthetic oligonucleotide
gaguggucguuuauuuugu

SEQ ID NO: 781585 - RNA, 19 nt, Artificial Sequence
  Description of Artificial Sequence: Synthetic oligonucleotide
cucgccgcaguugugggga

SEQ ID NO: 781586 - RNA, 19 nt, Artificial Sequence
  Description of Artificial Sequence: Synthetic oligonucleotide
cugauuguucguccucgaa

SEQ ID NO: 781587 - RNA, 19 nt, Artificial Sequence
  Description of Artificial Sequence: Synthetic oligonucleotide
augcacgcaguagucucca

SEQ ID NO: 781588 - RNA, 19 nt, Artificial Sequence
  Description of Artificial Sequence: Synthetic oligonucleotide
auaagccaguauacaucgu

SEQ ID NO: 781589 - RNA, 19 nt, Artificial Sequence
  Description of Artificial Sequence: Synthetic oligonucleotide
gcgcccgcgcuguucaugg

SEQ ID NO: 781590 - RNA, 19 nt, Artificial Sequence
  Description of Artificial Sequence: Synthetic oligonucleotide
gucgaguggucguuuauuu

SEQ ID NO: 781591 - RNA, 19 nt, Artificial Sequence
  Description of Artificial Sequence: Synthetic oligonucleotide
guagccaccaauggccugu

SEQ ID NO: 781592 - RNA, 19 nt, Artificial Sequence
  Description of Artificial Sequence: Synthetic oligonucleotide
gcaguagucuccaccugug

SEQ ID NO: 781593 - RNA, 19 nt, Artificial Sequence
  Description of Artificial Sequence: Synthetic oligonucleotide
ggcuucgggucaauauucc

SEQ ID NO: 781594 - RNA, 19 nt, Artificial Sequence
  Description of Artificial Sequence: Synthetic oligonucleotide
ggggaaauccggcugggcu

SEQ ID NO: 781595 - RNA, 19 nt, Artificial Sequence
  Description of Artificial Sequence: Synthetic oligonucleotide
ugaccacuccgaacuucuu

SEQ ID NO: 781596 - RNA, 19 nt, Artificial Sequence
  Description of Artificial Sequence: Synthetic oligonucleotide
ccagccguuggcugcacug

SEQ ID NO: 781597 - RNA, 19 nt, Artificial Sequence
  Description of Artificial Sequence: Synthetic oligonucleotide
ucucgucggcgcccgcgcu

SEQ ID NO: 781598 - RNA, 19 nt, Artificial Sequence
  Description of Artificial Sequence: Synthetic oligonucleotide
ugcacgcaguagucuccac

SEQ ID NO: 781599 - RNA, 19 nt, Artificial Sequence
  Description of Artificial Sequence: Synthetic oligonucleotide
gcaagggccccgcuuccag

SEQ ID NO: 781600 - RNA, 19 nt, Artificial Sequence
  Description of Artificial Sequence: Synthetic oligonucleotide
aguacucccugagcuccgu

SEQ ID NO: 781601 - RNA, 19 nt, Artificial Sequence
  Description of Artificial Sequence: Synthetic oligonucleotide
gcuagcgccgguagggaug

SEQ ID NO: 781602 - RNA, 19 nt, Artificial Sequence
  Description of Artificial Sequence: Synthetic oligonucleotide
uggcuagcgccgguaggga

SEQ ID NO: 781603 - RNA, 19 nt, Artificial Sequence
  Description of Artificial Sequence: Synthetic oligonucleotide
gugaccacuccgaacuucu

SEQ ID NO: 781604 - RNA, 19 nt, Artificial Sequence
  Description of Artificial Sequence: Synthetic oligonucleotide
caguccagacguggccucc

SEQ ID NO: 781605 - RNA, 19 nt, Artificial Sequence
  Description of Artificial Sequence: Synthetic oligonucleotide
ccagucccgaauccugccc

SEQ ID NO: 781606 - RNA, 19 nt, Artificial Sequence
  Description of Artificial Sequence: Synthetic oligonucleotide
ggauggaagcccugcacgu

SEQ ID NO: 781607 - RNA, 19 nt, Artificial Sequence
  Description of Artificial Sequence: Synthetic oligonucleotide
cacgaacccugcuuuaaau

SEQ ID NO: 781608 - RNA, 19 nt, Artificial Sequence
  Description of Artificial Sequence: Synthetic oligonucleotide
cucgucggcgcccgcgcug

SEQ ID NO: 781609 - RNA, 19 nt, Artificial Sequence
  Description of Artificial Sequence: Synthetic oligonucleotide
gggccauauccuugcugcc

SEQ ID NO: 781610 - RNA, 19 nt, Artificial Sequence
  Description of Artificial Sequence: Synthetic oligonucleotide
guccugcccguaaccauac

SEQ ID NO: 781611 - RNA, 19 nt, Artificial Sequence
  Description of Artificial Sequence: Synthetic oligonucleotide
aaccucgaggccgcugcuu

SEQ ID NO: 781612 - RNA, 19 nt, Artificial Sequence
  Description of Artificial Sequence: Synthetic oligonucleotide
cuccgucucgccgcaguug

SEQ ID NO: 781613 - RNA, 19 nt, Artificial Sequence
  Description of Artificial Sequence: Synthetic oligonucleotide
cacacgaacccugcuuuaa

SEQ ID NO: 781614 - RNA, 19 nt, Artificial Sequence
  Description of Artificial Sequence: Synthetic oligonucleotide
gcccguaaccauacugacc

SEQ ID NO: 781615 - RNA, 19 nt, Artificial Sequence
  Description of Artificial Sequence: Synthetic oligonucleotide
ggccgaagccgcucaaguc

SEQ ID NO: 781616 - RNA, 19 nt, Artificial Sequence
  Description of Artificial Sequence: Synthetic oligonucleotide
ccguuggcugcacugggug

SEQ ID NO: 781617 - RNA, 19 nt, Artificial Sequence
  Description of Artificial Sequence: Synthetic oligonucleotide
ccgguagggauggaagccc

SEQ ID NO: 781618 - RNA, 19 nt, Artificial Sequence
  Description of Artificial Sequence: Synthetic oligonucleotide
cccaagugugugauuguca

SEQ ID NO: 781619 - RNA, 19 nt, Artificial Sequence
  Description of Artificial Sequence: Synthetic oligonucleotide
cgaaaguaauaaauccaaa

SEQ ID NO: 781620 - RNA, 19 nt, Artificial Sequence
  Description of Artificial Sequence: Synthetic oligonucleotide
ggugaccacuccgaacuuc

SEQ ID NO: 781621 - RNA, 19 nt, Artificial Sequence
  Description of Artificial Sequence: Synthetic oligonucleotide
gguuggugguuuuaucuuu

SEQ ID NO: 781622 - RNA, 19 nt, Artificial Sequence
  Description of Artificial Sequence: Synthetic oligonucleotide
aaccccuggaggggcgaau

SEQ ID NO: 781623 - RNA, 19 nt, Artificial Sequence
  Description of Artificial Sequence: Synthetic oligonucleotide
cgaauccugcccuggcgcc

SEQ ID NO: 781624 - RNA, 19 nt, Artificial Sequence
  Description of Artificial Sequence: Synthetic oligonucleotide
agcaagggccccgcuucca

SEQ ID NO: 781625 - RNA, 19 nt, Artificial Sequence
  Description of Artificial Sequence: Synthetic oligonucleotide
gccgcaguuguggggaaug

SEQ ID NO: 781626 - RNA, 19 nt, Artificial Sequence
  Description of Artificial Sequence: Synthetic oligonucleotide
gcgccgguagggauggaag

SEQ ID NO: 781627 - RNA, 19 nt, Artificial Sequence
  Description of Artificial Sequence: Synthetic oligonucleotide
gcccguuuaaccuccacuu

SEQ ID NO: 781628 - RNA, 19 nt, Artificial Sequence
  Description of Artificial Sequence: Synthetic oligonucleotide
ugucgcuccuggguccuuu

SEQ ID NO: 781629 - RNA, 19 nt, Artificial Sequence
  Description of Artificial Sequence: Synthetic oligonucleotide
cgucucgccgcaguugugg

SEQ ID NO: 781630 - RNA, 19 nt, Artificial Sequence
  Description of Artificial Sequence: Synthetic oligonucleotide
ccccguaggagggaggcug

SEQ ID NO: 781631 - RNA, 19 nt, Artificial Sequence
  Description of Artificial Sequence: Synthetic oligonucleotide
cacaaagaucuuguuggau

SEQ ID NO: 781632 - RNA, 19 nt, Artificial Sequence
  Description of Artificial Sequence: Synthetic oligonucleotide
ugccacgcggcugccccac

SEQ ID NO: 781633 - RNA, 19 nt, Artificial Sequence
  Description of Artificial Sequence: Synthetic oligonucleotide
gccugagacggagguggcg

SEQ ID NO: 781634 - RNA, 19 nt, Artificial Sequence
  Description of Artificial Sequence: Synthetic oligonucleotide
gauggaagcccugcacguu

SEQ ID NO: 781635 - RNA, 19 nt, Artificial Sequence
  Description of Artificial Sequence: Synthetic oligonucleotide
cagucccgaauccugcccu

SEQ ID NO: 781636 - RNA, 19 nt, Artificial Sequence
  Description of Artificial Sequence: Synthetic oligonucleotide
cgaggugugcauggcuucg

SEQ ID NO: 781637 - RNA, 19 nt, Artificial Sequence
  Description of Artificial Sequence: Synthetic oligonucleotide
gggucaauauuccggccau

SEQ ID NO: 781638 - RNA, 19 nt, Artificial Sequence
  Description of Artificial Sequence: Synthetic oligonucleotide
cgggucaauauuccggcca

SEQ ID NO: 781639 - RNA, 19 nt, Artificial Sequence
  Description of Artificial Sequence: Synthetic oligonucleotide
cauuccuugugggccauau

SEQ ID NO: 781640 - RNA, 19 nt, Artificial Sequence
  Description of Artificial Sequence: Synthetic oligonucleotide
gcucaaguccugcccguaa

SEQ ID NO: 781641 - RNA, 19 nt, Artificial Sequence
  Description of Artificial Sequence: Synthetic oligonucleotide
ucgggacugguuggugguu

SEQ ID NO: 781642 - RNA, 19 nt, Artificial Sequence
  Description of Artificial Sequence: Synthetic oligonucleotide
caggucgaguggucguuua

SEQ ID NO: 781643 - RNA, 19 nt, Artificial Sequence
  Description of Artificial Sequence: Synthetic oligonucleotide
ccgagguucagcccguuua

SEQ ID NO: 781644 - RNA, 19 nt, Artificial Sequence
  Description of Artificial Sequence: Synthetic oligonucleotide
accccuggaggggcgaauu

SEQ ID NO: 781645 - RNA, 19 nt, Artificial Sequence
  Description of Artificial Sequence: Synthetic oligonucleotide
caucccucgaggugugcau

SEQ ID NO: 781646 - RNA, 19 nt, Artificial Sequence
  Description of Artificial Sequence: Synthetic oligonucleotide
guucguccucgaaaguaau

SEQ ID NO: 781647 - RNA, 19 nt, Artificial Sequence
  Description of Artificial Sequence: Synthetic oligonucleotide
uccggccauccagggugug

SEQ ID NO: 781648 - RNA, 19 nt, Artificial Sequence
  Description of Artificial Sequence: Synthetic oligonucleotide
ccauaggggaaauccggcu

SEQ ID NO: 781649 - RNA, 19 nt, Artificial Sequence
  Description of Artificial Sequence: Synthetic oligonucleotide
cccauagccaaaacugaau

SEQ ID NO: 781650 - RNA, 19 nt, Artificial Sequence
  Description of Artificial Sequence: Synthetic oligonucleotide
gcacugggugccacgcggc

SEQ ID NO: 781651 - RNA, 19 nt, Artificial Sequence
  Description of Artificial Sequence: Synthetic oligonucleotide
guugaaccagugacguguu

SEQ ID NO: 781652 - RNA, 19 nt, Artificial Sequence
  Description of Artificial Sequence: Synthetic oligonucleotide
ccgaucucgucggcgcccg

SEQ ID NO: 781653 - RNA, 19 nt, Artificial Sequence
  Description of Artificial Sequence: Synthetic oligonucleotide
gaaccccuggaggggcgaa

SEQ ID NO: 781654 - RNA, 19 nt, Artificial Sequence
  Description of Artificial Sequence: Synthetic oligonucleotide
cguccucgaaaguaauaaa

SEQ ID NO: 781655 - RNA, 19 nt, Artificial Sequence
  Description of Artificial Sequence: Synthetic oligonucleotide
cguugugguucugcccgcg

SEQ ID NO: 781656 - RNA, 19 nt, Artificial Sequence
  Description of Artificial Sequence: Synthetic oligonucleotide
caccugugacgucagcauu

SEQ ID NO: 781657 - RNA, 19 nt, Artificial Sequence
  Description of Artificial Sequence: Synthetic oligonucleotide
gcacacgaacccugcuuua

SEQ ID NO: 781658 - RNA, 19 nt, Artificial Sequence
  Description of Artificial Sequence: Synthetic oligonucleotide
gagcuccgucucgccgcag

SEQ ID NO: 781659 - RNA, 19 nt, Artificial Sequence
  Description of Artificial Sequence: Synthetic oligonucleotide
gugggccguagccaccaau

SEQ ID NO: 781660 - RNA, 19 nt, Artificial Sequence
  Description of Artificial Sequence: Synthetic oligonucleotide
ggcgcccgcgcuguucaug

SEQ ID NO: 781661 - RNA, 19 nt, Artificial Sequence
  Description of Artificial Sequence: Synthetic oligonucleotide
ggggcaccauagcccugug

SEQ ID NO: 781662 - RNA, 19 nt, Artificial Sequence
  Description of Artificial Sequence: Synthetic oligonucleotide
cgagguucagcccguuuaa

SEQ ID NO: 781663 - RNA, 19 nt, Artificial Sequence
  Description of Artificial Sequence: Synthetic oligonucleotide
cccuggaggggcgaauuga

SEQ ID NO: 781664 - RNA, 19 nt, Artificial Sequence
  Description of Artificial Sequence: Synthetic oligonucleotide
cgcugcgccccgcaccucc

SEQ ID NO: 781665 - RNA, 19 nt, Artificial Sequence
  Description of Artificial Sequence: Synthetic oligonucleotide
ggucgaguggucguuuauu

SEQ ID NO: 781666 - RNA, 19 nt, Artificial Sequence
  Description of Artificial Sequence: Synthetic oligonucleotide
cugcgccggcgggagcaag

SEQ ID NO: 781667 - RNA, 19 nt, Artificial Sequence
  Description of Artificial Sequence: Synthetic oligonucleotide
ggccgaguucucucuggcu

SEQ ID NO: 781668 - RNA, 19 nt, Artificial Sequence
  Description of Artificial Sequence: Synthetic oligonucleotide
ccacuccgaacuucuugaa

SEQ ID NO: 781669 - RNA, 19 nt, Artificial Sequence
  Description of Artificial Sequence: Synthetic oligonucleotide
ccuggaggggcgaauugau

SEQ ID NO: 781670 - RNA, 19 nt, Artificial Sequence
  Description of Artificial Sequence: Synthetic oligonucleotide
ggccccgcuuccagcacac

SEQ ID NO: 781671 - RNA, 19 nt, Artificial Sequence
  Description of Artificial Sequence: Synthetic oligonucleotide
gccucgggacugguuggug

SEQ ID NO: 781672 - RNA, 19 nt, Artificial Sequence
  Description of Artificial Sequence: Synthetic oligonucleotide
ccaaacacgcugcuuuauu

SEQ ID NO: 781673 - RNA, 19 nt, Artificial Sequence
  Description of Artificial Sequence: Synthetic oligonucleotide
cgcaguagucuccaccugu

SEQ ID NO: 781674 - RNA, 19 nt, Artificial Sequence
  Description of Artificial Sequence: Synthetic oligonucleotide
ccccacacaauuggggucu

SEQ ID NO: 781675 - RNA, 19 nt, Artificial Sequence
  Description of Artificial Sequence: Synthetic oligonucleotide
gggagcaagggccccgcuu

SEQ ID NO: 781676 - RNA, 19 nt, Artificial Sequence
  Description of Artificial Sequence: Synthetic oligonucleotide
gcguccgaagccgcugcca

SEQ ID NO: 781677 - RNA, 19 nt, Artificial Sequence
  Description of Artificial Sequence: Synthetic oligonucleotide
ggcuagcgccgguagggau

SEQ ID NO: 781678 - RNA, 19 nt, Artificial Sequence
  Description of Artificial Sequence: Synthetic oligonucleotide
gccauccaggguguguggu

SEQ ID NO: 781679 - RNA, 19 nt, Artificial Sequence
  Description of Artificial Sequence: Synthetic oligonucleotide
ccgucucgccgcaguugug

SEQ ID NO: 781680 - RNA, 19 nt, Artificial Sequence
  Description of Artificial Sequence: Synthetic oligonucleotide
ccucgaggugugcauggcu

SEQ ID NO: 781681 - RNA, 19 nt, Artificial Sequence
  Description of Artificial Sequence: Synthetic oligonucleotide
ccguccuggcccgcugcgc

SEQ ID NO: 781682 - RNA, 19 nt, Artificial Sequence
  Description of Artificial Sequence: Synthetic oligonucleotide
cgcguccgaagccgcugcc

SEQ ID NO: 781683 - RNA, 19 nt, Artificial Sequence
  Description of Artificial Sequence: Synthetic oligonucleotide
ccgaagccgcugccaccag

SEQ ID NO: 781684 - RNA, 19 nt, Artificial Sequence
  Description of Artificial Sequence: Synthetic oligonucleotide
gucccgagguucagcccgu

SEQ ID NO: 781685 - RNA, 19 nt, Artificial Sequence
  Description of Artificial Sequence: Synthetic oligonucleotide
cccugcacguugugguucu

SEQ ID NO: 781686 - RNA, 19 nt, Artificial Sequence
  Description of Artificial Sequence: Synthetic oligonucleotide
gccccgcuuccagcacacg

SEQ ID NO: 781687 - RNA, 19 nt, Artificial Sequence
  Description of Artificial Sequence: Synthetic oligonucleotide
gccuggccugccaccugug

SEQ ID NO: 781688 - RNA, 19 nt, Artificial Sequence
  Description of Artificial Sequence: Synthetic oligonucleotide
ggugggccguagccaccaa

SEQ ID NO: 781689 - RNA, 19 nt, Artificial Sequence
  Description of Artificial Sequence: Synthetic oligonucleotide
ccagccugcgccggcggga

SEQ ID NO: 781690 - RNA, 19 nt, Artificial Sequence
  Description of Artificial Sequence: Synthetic oligonucleotide
gccguuggcugcacugggu

SEQ ID NO: 781691 - RNA, 19 nt, Artificial Sequence
  Description of Artificial Sequence: Synthetic oligonucleotide
gcuccgucucgccgcaguu

SEQ ID NO: 781692 - RNA, 19 nt, Artificial Sequence
  Description of Artificial Sequence: Synthetic oligonucleotide
ccccaggucgaguggucgu

SEQ ID NO: 781693 - RNA, 19 nt, Artificial Sequence
  Description of Artificial Sequence: Synthetic oligonucleotide
ccuggccgaagccgcucaa

SEQ ID NO: 781694 - RNA, 19 nt, Artificial Sequence
  Description of Artificial Sequence: Synthetic oligonucleotide
ccgcucaaguccugcccgu

SEQ ID NO: 781695 - RNA, 19 nt, Artificial Sequence
  Description of Artificial Sequence: Synthetic oligonucleotide
ccguaaccauacugaccau

SEQ ID NO: 781696 - RNA, 19 nt, Artificial Sequence
  Description of Artificial Sequence: Synthetic oligonucleotide
ccaaagccucgggacuggu

SEQ ID NO: 781697 - RNA, 19 nt, Artificial Sequence
  Description of Artificial Sequence: Synthetic oligonucleotide
ccggccauccagggugugu

SEQ ID NO: 781698 - RNA, 19 nt, Artificial Sequence
  Description of Artificial Sequence: Synthetic oligonucleotide
gcccagccguuggcugcac

SEQ ID NO: 781699 - RNA, 19 nt, Artificial Sequence
  Description of Artificial Sequence: Synthetic oligonucleotide
ccaggucgaguggucguuu

SEQ ID NO: 781700 - RNA, 19 nt, Artificial Sequence
  Description of Artificial Sequence: Synthetic oligonucleotide
ccgggucaaacuggucaau

SEQ ID NO: 781701 - RNA, 19 nt, Artificial Sequence
  Description of Artificial Sequence: Synthetic oligonucleotide
ccccuggcuagcgccggua

SEQ ID NO: 781702 - RNA, 19 nt, Artificial Sequence
  Description of Artificial Sequence: Synthetic oligonucleotide
cccgagguucagcccguuu

SEQ ID NO: 781703 - RNA, 19 nt, Artificial Sequence
  Description of Artificial Sequence: Synthetic oligonucleotide
cgggagcaagggccccgcu

SEQ ID NO: 781704 - RNA, 19 nt, Artificial Sequence
  Description of Artificial Sequence: Synthetic oligonucleotide
cgccccguccuggcccgcu

SEQ ID NO: 781705 - RNA, 19 nt, Artificial Sequence
  Description of Artificial Sequence: Synthetic oligonucleotide
cggcgcccgcgcuguucau

SEQ ID NO: 781706 - RNA, 19 nt, Artificial Sequence
  Description of Artificial Sequence: Synthetic oligonucleotide
aaggagacgagaaagaucc

SEQ ID NO: 781707 - RNA, 19 nt, Artificial Sequence
  Description of Artificial Sequence: Synthetic oligonucleotide
aacuauaaugacuucacag

SEQ ID NO: 781708 - RNA, 19 nt, Artificial Sequence
  Description of Artificial Sequence: Synthetic oligonucleotide
acgagaaagauccaagugc

SEQ ID NO: 781709 - RNA, 19 nt, Artificial Sequence
  Description of Artificial Sequence: Synthetic oligonucleotide
aagcuuggaaucuuguccc

SEQ ID NO: 781710 - RNA, 19 nt, Artificial Sequence
  Description of Artificial Sequence: Synthetic oligonucleotide
aauccuaggagauucgcuc

SEQ ID NO: 781711 - RNA, 19 nt, Artificial Sequence
  Description of Artificial Sequence: Synthetic oligonucleotide
aaaacuauaaugacuucac

SEQ ID NO: 781712 - RNA, 19 nt, Artificial Sequence
  Description of Artificial Sequence: Synthetic oligonucleotide
agaacguugagcugggugc

SEQ ID NO: 781713 - RNA, 19 nt, Artificial Sequence
  Description of Artificial Sequence: Synthetic oligonucleotide
uauggaagcuacuaugagg

SEQ ID NO: 781714 - RNA, 19 nt, Artificial Sequence
  Description of Artificial Sequence: Synthetic oligonucleotide
aauaucagaacaggcgccc

SEQ ID NO: 781715 - RNA, 19 nt, Artificial Sequence
  Description of Artificial Sequence: Synthetic oligonucleotide
aaagcaugcucuuccugcc

SEQ ID NO: 781716 - RNA, 19 nt, Artificial Sequence
  Description of Artificial Sequence: Synthetic oligonucleotide
gacugaaauagccaugggg

SEQ ID NO: 781717 - RNA, 19 nt, Artificial Sequence
  Description of Artificial Sequence: Synthetic oligonucleotide
aguaaauaucagaacaggc

SEQ ID NO: 781718 - RNA, 19 nt, Artificial Sequence
  Description of Artificial Sequence: Synthetic oligonucleotide
augaaugugccacaaauca

SEQ ID NO: 781719 - RNA, 19 nt, Artificial Sequence
  Description of Artificial Sequence: Synthetic oligonucleotide
ugguccuuaaguuuaaaga

SEQ ID NO: 781720 - RNA, 19 nt, Artificial Sequence
  Description of Artificial Sequence: Synthetic oligonucleotide
ugagauuggugucuacugg

SEQ ID NO: 781721 - RNA, 19 nt, Artificial Sequence
  Description of Artificial Sequence: Synthetic oligonucleotide
ugagcaaguucaaucaccc

SEQ ID NO: 781722 - RNA, 19 nt, Artificial Sequence
  Description of Artificial Sequence: Synthetic oligonucleotide
uauacuuagaagaggcaac

SEQ ID NO: 781723 - RNA, 19 nt, Artificial Sequence
  Description of Artificial Sequence: Synthetic oligonucleotide
guaauagaucuccuuaucc

SEQ ID NO: 781724 - RNA, 19 nt, Artificial Sequence
  Description of Artificial Sequence: Synthetic oligonucleotide
uaaagacugaaauagccau

SEQ ID NO: 781725 - RNA, 19 nt, Artificial Sequence
  Description of Artificial Sequence: Synthetic oligonucleotide
agaggcuuaucaccgagac

SEQ ID NO: 781726 - RNA, 19 nt, Artificial Sequence
  Description of Artificial Sequence: Synthetic oligonucleotide
gaguaaauaucagaacagg

SEQ ID NO: 781727 - RNA, 19 nt, Artificial Sequence
  Description of Artificial Sequence: Synthetic oligonucleotide
ugacuucacagaacaaggg

SEQ ID NO: 781728 - RNA, 19 nt, Artificial Sequence
  Description of Artificial Sequence: Synthetic oligonucleotide
aguguguagaccuugcaga

SEQ ID NO: 781729 - RNA, 19 nt, Artificial Sequence
  Description of Artificial Sequence: Synthetic oligonucleotide
aaccucagaggcuuaucac

SEQ ID NO: 781730 - RNA, 19 nt, Artificial Sequence
  Description of Artificial Sequence: Synthetic oligonucleotide
uugguuuacuggaaagucc

SEQ ID NO: 781731 - RNA, 19 nt, Artificial Sequence
  Description of Artificial Sequence: Synthetic oligonucleotide
caaagcaugcucuuccugc

SEQ ID NO: 781732 - RNA, 19 nt, Artificial Sequence
  Description of Artificial Sequence: Synthetic oligonucleotide
ucuccuuauccagagaugc

SEQ ID NO: 781733 - RNA, 19 nt, Artificial Sequence
  Description of Artificial Sequence: Synthetic oligonucleotide
uuauacuuagaagaggcaa

SEQ ID NO: 781734 - RNA, 19 nt, Artificial Sequence
  Description of Artificial Sequence: Synthetic oligonucleotide
aaccaaccucuuuggauac

SEQ ID NO: 781735 - RNA, 19 nt, Artificial Sequence
  Description of Artificial Sequence: Synthetic oligonucleotide
agagcaagagggcugaaca

SEQ ID NO: 781736 - RNA, 19 nt, Artificial Sequence
  Description of Artificial Sequence: Synthetic oligonucleotide
uccuuaaguuuaaagagua

SEQ ID NO: 781737 - RNA, 19 nt, Artificial Sequence
  Description of Artificial Sequence: Synthetic oligonucleotide
aaacuauaaugacuucaca

SEQ ID NO: 781738 - RNA, 19 nt, Artificial Sequence
  Description of Artificial Sequence: Synthetic oligonucleotide
ugucugguagucucggccg

SEQ ID NO: 781739 - RNA, 19 nt, Artificial Sequence
  Description of Artificial Sequence: Synthetic oligonucleotide
cuuuggauacaaaagccuc

SEQ ID NO: 781740 - RNA, 19 nt, Artificial Sequence
  Description of Artificial Sequence: Synthetic oligonucleotide
aucaccgagacuuggaaga

SEQ ID NO: 781741 - RNA, 19 nt, Artificial Sequence
  Description of Artificial Sequence: Synthetic oligonucleotide
gacgagaaagauccaagug

SEQ ID NO: 781742 - RNA, 19 nt, Artificial Sequence
  Description of Artificial Sequence: Synthetic oligonucleotide
cuaugaggggaucagcuag

SEQ ID NO: 781743 - RNA, 19 nt, Artificial Sequence
  Description of Artificial Sequence: Synthetic oligonucleotide
gcucuaaagacugaaauag

SEQ ID NO: 781744 - RNA, 19 nt, Artificial Sequence
  Description of Artificial Sequence: Synthetic oligonucleotide
ucugcauacuggcguaccg

SEQ ID NO: 781745 - RNA, 19 nt, Artificial Sequence
  Description of Artificial Sequence: Synthetic oligonucleotide
ccuuauacuuagaagaggc

SEQ ID NO: 781746 - RNA, 19 nt, Artificial Sequence
  Description of Artificial Sequence: Synthetic oligonucleotide
uuguccgacauaaggaacu

SEQ ID NO: 781747 - RNA, 19 nt, Artificial Sequence
  Description of Artificial Sequence: Synthetic oligonucleotide
agugcaaaggugaaccugg

SEQ ID NO: 781748 - RNA, 19 nt, Artificial Sequence
  Description of Artificial Sequence: Synthetic oligonucleotide
cugaacauccccaaagguc

SEQ ID NO: 781749 - RNA, 19 nt, Artificial Sequence
  Description of Artificial Sequence: Synthetic oligonucleotide
ugacuagccgcacagaauu

SEQ ID NO: 781750 - RNA, 19 nt, Artificial Sequence
  Description of Artificial Sequence: Synthetic oligonucleotide
uguuggaguugaauaaaac

SEQ ID NO: 781751 - RNA, 19 nt, Artificial Sequence
  Description of Artificial Sequence: Synthetic oligonucleotide
caaaucaucacuucacaga

SEQ ID NO: 781752 - RNA, 19 nt, Artificial Sequence
  Description of Artificial Sequence: Synthetic oligonucleotide
ucaugagcuuuuaccaaag

SEQ ID NO: 781753 - RNA, 19 nt, Artificial Sequence
  Description of Artificial Sequence: Synthetic oligonucleotide
cuuagaagaggcaacaucu

SEQ ID NO: 781754 - RNA, 19 nt, Artificial Sequence
  Description of Artificial Sequence: Synthetic oligonucleotide
agguacgacagguugaccu

SEQ ID NO: 781755 - RNA, 19 nt, Artificial Sequence
  Description of Artificial Sequence: Synthetic oligonucleotide
auauggaagcuacuaugag

SEQ ID NO: 781756 - RNA, 19 nt, Artificial Sequence
  Description of Artificial Sequence: Synthetic oligonucleotide
cugagcaaguucaaucacc

SEQ ID NO: 781757 - RNA, 19 nt, Artificial Sequence
  Description of Artificial Sequence: Synthetic oligonucleotide
uuugguuuacuggaaaguc

SEQ ID NO: 781758 - RNA, 19 nt, Artificial Sequence
  Description of Artificial Sequence: Synthetic oligonucleotide
ugcccuuugguuuacugga

SEQ ID NO: 781759 - RNA, 19 nt, Artificial Sequence
  Description of Artificial Sequence: Synthetic oligonucleotide
uaggagauucgcucgagga

SEQ ID NO: 781760 - RNA, 19 nt, Artificial Sequence
  Description of Artificial Sequence: Synthetic oligonucleotide
aagaggcaacaucuauuuc

SEQ ID NO: 781761 - RNA, 19 nt, Artificial Sequence
  Description of Artificial Sequence: Synthetic oligonucleotide
cuaaagacugaaauagcca

SEQ ID NO: 781762 - RNA, 19 nt, Artificial Sequence
  Description of Artificial Sequence: Synthetic oligonucleotide
agagccggugccaucaucc

SEQ ID NO: 781763 - RNA, 19 nt, Artificial Sequence
  Description of Artificial Sequence: Synthetic oligonucleotide
gaaugugccacaaaucauc

SEQ ID NO: 781764 - RNA, 19 nt, Artificial Sequence
  Description of Artificial Sequence: Synthetic oligonucleotide
aagccaauaccacuggaua

SEQ ID NO: 781765 - RNA, 19 nt, Artificial Sequence
  Description of Artificial Sequence: Synthetic oligonucleotide
acuagccgcacagaauucc

SEQ ID NO: 781766 - RNA, 19 nt, Artificial Sequence
  Description of Artificial Sequence: Synthetic oligonucleotide
accacuggauaguaccugg

SEQ ID NO: 781767 - RNA, 19 nt, Artificial Sequence
  Description of Artificial Sequence: Synthetic oligonucleotide
cuaggaggugaguucagcc

SEQ ID NO: 781768 - RNA, 19 nt, Artificial Sequence
  Description of Artificial Sequence: Synthetic oligonucleotide
uucaugagcuuuuaccaaa

SEQ ID NO: 781769 - RNA, 19 nt, Artificial Sequence
  Description of Artificial Sequence: Synthetic oligonucleotide
uaucaccgagacuuggaag

SEQ ID NO: 781770 - RNA, 19 nt, Artificial Sequence
  Description of Artificial Sequence: Synthetic oligonucleotide
caugcuuaaaaugucucug

SEQ ID NO: 781771 - RNA, 19 nt, Artificial Sequence
  Description of Artificial Sequence: Synthetic oligonucleotide
ucccaugacaguacagacc

SEQ ID NO: 781772 - RNA, 19 nt, Artificial Sequence
  Description of Artificial Sequence: Synthetic oligonucleotide
ggaaguggaauccuaggag

SEQ ID NO: 781773 - RNA, 19 nt, Artificial Sequence
  Description of Artificial Sequence: Synthetic oligonucleotide
aaccuuccggaugacuagc

SEQ ID NO: 781774 - RNA, 19 nt, Artificial Sequence
  Description of Artificial Sequence: Synthetic oligonucleotide
auccuaggagauucgcucg

SEQ ID NO: 781775 - RNA, 19 nt, Artificial Sequence
  Description of Artificial Sequence: Synthetic oligonucleotide
uuaucaccgagacuuggaa

SEQ ID NO: 781776 - RNA, 19 nt, Artificial Sequence
  Description of Artificial Sequence: Synthetic oligonucleotide
uaaggaacugucugguagu

SEQ ID NO: 781777 - RNA, 19 nt, Artificial Sequence
  Description of Artificial Sequence: Synthetic oligonucleotide
gauaguaccuggaaccuca

SEQ ID NO: 781778 - RNA, 19 nt, Artificial Sequence
  Description of Artificial Sequence: Synthetic oligonucleotide
gagcuuuuaccaaagcaug

SEQ ID NO: 781779 - RNA, 19 nt, Artificial Sequence
  Description of Artificial Sequence: Synthetic oligonucleotide
ugcauuacccgcuuuucuc

SEQ ID NO: 781780 - RNA, 19 nt, Artificial Sequence
  Description of Artificial Sequence: Synthetic oligonucleotide
ugaaugugccacaaaucau

SEQ ID NO: 781781 - RNA, 19 nt, Artificial Sequence
  Description of Artificial Sequence: Synthetic oligonucleotide
gaaccuuccggaugacuag

SEQ ID NO: 781782 - RNA, 19 nt, Artificial Sequence
  Description of Artificial Sequence: Synthetic oligonucleotide
agacgagaaagauccaagu

SEQ ID NO: 781783 - RNA, 19 nt, Artificial Sequence
  Description of Artificial Sequence: Synthetic oligonucleotide
aguuaauucccaugacagu

SEQ ID NO: 781784 - RNA, 19 nt, Artificial Sequence
  Description of Artificial Sequence: Synthetic oligonucleotide
cuauaaugacuucacagaa

SEQ ID NO: 781785 - RNA, 19 nt, Artificial Sequence
  Description of Artificial Sequence: Synthetic oligonucleotide
uugacuucguaguccacac

SEQ ID NO: 781786 - RNA, 19 nt, Artificial Sequence
  Description of Artificial Sequence: Synthetic oligonucleotide
gaugacuagccgcacagaa

SEQ ID NO: 781787 - RNA, 19 nt, Artificial Sequence
  Description of Artificial Sequence: Synthetic oligonucleotide
ugguaauagaucuccuuau

SEQ ID NO: 781788 - RNA, 19 nt, Artificial Sequence
  Description of Artificial Sequence: Synthetic oligonucleotide
ugaccuguggucagagccc

SEQ ID NO: 781789 - RNA, 19 nt, Artificial Sequence
  Description of Artificial Sequence: Synthetic oligonucleotide
acagguacgacagguugac

SEQ ID NO: 781790 - RNA, 19 nt, Artificial Sequence
  Description of Artificial Sequence: Synthetic oligonucleotide
aaagccaauaccacuggau

SEQ ID NO: 781791 - RNA, 19 nt, Artificial Sequence
  Description of Artificial Sequence: Synthetic oligonucleotide
agucccuaagcacaggaaa

SEQ ID NO: 781792 - RNA, 19 nt, Artificial Sequence
  Description of Artificial Sequence: Synthetic oligonucleotide
uggugucaagcucuaugag

SEQ ID NO: 781793 - RNA, 19 nt, Artificial Sequence
  Description of Artificial Sequence: Synthetic oligonucleotide
aacugucugguagucucgg

SEQ ID NO: 781794 - RNA, 19 nt, Artificial Sequence
  Description of Artificial Sequence: Synthetic oligonucleotide
aagggcuuguccgacauaa

SEQ ID NO: 781795 - RNA, 19 nt, Artificial Sequence
  Description of Artificial Sequence: Synthetic oligonucleotide
uguugauccuggagggacc

SEQ ID NO: 781796 - RNA, 19 nt, Artificial Sequence
  Description of Artificial Sequence: Synthetic oligonucleotide
agaacaggcgcccacccgu

SEQ ID NO: 781797 - RNA, 19 nt, Artificial Sequence
  Description of Artificial Sequence: Synthetic oligonucleotide
caguguguagaccuugcag

SEQ ID NO: 781798 - RNA, 19 nt, Artificial Sequence
  Description of Artificial Sequence: Synthetic oligonucleotide
ugccucaaggugcaagggc

SEQ ID NO: 781799 - RNA, 19 nt, Artificial Sequence
  Description of Artificial Sequence: Synthetic oligonucleotide
cugucugguagucucggcc

SEQ ID NO: 781800 - RNA, 19 nt, Artificial Sequence
  Description of Artificial Sequence: Synthetic oligonucleotide
uuccggaugacuagccgca

SEQ ID NO: 781801 - RNA, 19 nt, Artificial Sequence
  Description of Artificial Sequence: Synthetic oligonucleotide
guggauucaguucucugac

SEQ ID NO: 781802 - RNA, 19 nt, Artificial Sequence
  Description of Artificial Sequence: Synthetic oligonucleotide
uuggauacaaaagccuccu

SEQ ID NO: 781803 - RNA, 19 nt, Artificial Sequence
  Description of Artificial Sequence: Synthetic oligonucleotide
uccugcaaguuaauuccca

SEQ ID NO: 781804 - RNA, 19 nt, Artificial Sequence
  Description of Artificial Sequence: Synthetic oligonucleotide
auacuuagaagaggcaaca

SEQ ID NO: 781805 - RNA, 19 nt, Artificial Sequence
  Description of Artificial Sequence: Synthetic oligonucleotide
uugagguguggagagccgg

SEQ ID NO: 781806 - RNA, 19 nt, Artificial Sequence
  Description of Artificial Sequence: Synthetic oligonucleotide
cuuguccgacauaaggaac

SEQ ID NO: 781807 - RNA, 19 nt, Artificial Sequence
  Description of Artificial Sequence: Synthetic oligonucleotide
ugguggaugggagacacac

SEQ ID NO: 781808 - RNA, 19 nt, Artificial Sequence
  Description of Artificial Sequence: Synthetic oligonucleotide
acaagucccagucccuaag

SEQ ID NO: 781809 - RNA, 19 nt, Artificial Sequence
  Description of Artificial Sequence: Synthetic oligonucleotide
uggcguaccgagauuuuga

SEQ ID NO: 781810 - RNA, 19 nt, Artificial Sequence
  Description of Artificial Sequence: Synthetic oligonucleotide
ucgaggaagacaugcuuaa

SEQ ID NO: 781811 - RNA, 19 nt, Artificial Sequence
  Description of Artificial Sequence: Synthetic oligonucleotide
gaguugaauaaaacuauaa

SEQ ID NO: 781812 - RNA, 19 nt, Artificial Sequence
  Description of Artificial Sequence: Synthetic oligonucleotide
acugucugguagucucggc

SEQ ID NO: 781813 - RNA, 19 nt, Artificial Sequence
  Description of Artificial Sequence: Synthetic oligonucleotide
cauuacccgcuuuucucgg

SEQ ID NO: 781814 - RNA, 19 nt, Artificial Sequence
  Description of Artificial Sequence: Synthetic oligonucleotide
aauucccaugacaguacag

SEQ ID NO: 781815 - RNA, 19 nt, Artificial Sequence
  Description of Artificial Sequence: Synthetic oligonucleotide
gggaccuuauacuuagaag

SEQ ID NO: 781816 - RNA, 19 nt, Artificial Sequence
  Description of Artificial Sequence: Synthetic oligonucleotide
ucucguucaagguucuuuu

SEQ ID NO: 781817 - RNA, 19 nt, Artificial Sequence
  Description of Artificial Sequence: Synthetic oligonucleotide
gacucuaggaggugaguuc

SEQ ID NO: 781818 - RNA, 19 nt, Artificial Sequence
  Description of Artificial Sequence: Synthetic oligonucleotide
auagguguggaaguggaau

SEQ ID NO: 781819 - RNA, 19 nt, Artificial Sequence
  Description of Artificial Sequence: Synthetic oligonucleotide
cuaggagauucgcucgagg

SEQ ID NO: 781820 - RNA, 19 nt, Artificial Sequence
  Description of Artificial Sequence: Synthetic oligonucleotide
cuguuguugagguguggag

SEQ ID NO: 781821 - RNA, 19 nt, Artificial Sequence
  Description of Artificial Sequence: Synthetic oligonucleotide
aggggaucagcuagggccc

SEQ ID NO: 781822 - RNA, 19 nt, Artificial Sequence
  Description of Artificial Sequence: Synthetic oligonucleotide
cuuauacuuagaagaggca

SEQ ID NO: 781823 - RNA, 19 nt, Artificial Sequence
  Description of Artificial Sequence: Synthetic oligonucleotide
cagaacguugagcugggug

SEQ ID NO: 781824 - RNA, 19 nt, Artificial Sequence
  Description of Artificial Sequence: Synthetic oligonucleotide
cagaccagcauggagggac

SEQ ID NO: 781825 - RNA, 19 nt, Artificial Sequence
  Description of Artificial Sequence: Synthetic oligonucleotide
ugggauauggaagcuacua

SEQ ID NO: 781826 - RNA, 19 nt, Artificial Sequence
  Description of Artificial Sequence: Synthetic oligonucleotide
agggaccuuauacuuagaa

SEQ ID NO: 781827 - RNA, 19 nt, Artificial Sequence
  Description of Artificial Sequence: Synthetic oligonucleotide
aaaugcccucccugguuug

SEQ ID NO: 781828 - RNA, 19 nt, Artificial Sequence
  Description of Artificial Sequence: Synthetic oligonucleotide
ugauggguucuccauggua

SEQ ID NO: 781829 - RNA, 19 nt, Artificial Sequence
  Description of Artificial Sequence: Synthetic oligonucleotide
auucgcucgaggaagacau

SEQ ID NO: 781830 - RNA, 19 nt, Artificial Sequence
  Description of Artificial Sequence: Synthetic oligonucleotide
ucgcucgaggaagacaugc

SEQ ID NO: 781831 - RNA, 19 nt, Artificial Sequence
  Description of Artificial Sequence: Synthetic oligonucleotide
uuaauggccucucguucaa

SEQ ID NO: 781832 - RNA, 19 nt, Artificial Sequence
  Description of Artificial Sequence: Synthetic oligonucleotide
aaaggcuagccuccacaau

SEQ ID NO: 781833 - RNA, 19 nt, Artificial Sequence
  Description of Artificial Sequence: Synthetic oligonucleotide
gguggauucaguucucuga

SEQ ID NO: 781834 - RNA, 19 nt, Artificial Sequence
  Description of Artificial Sequence: Synthetic oligonucleotide
uccuaggagauucgcucga

SEQ ID NO: 781835 - RNA, 19 nt, Artificial Sequence
  Description of Artificial Sequence: Synthetic oligonucleotide
gaacugucugguagucucg

SEQ ID NO: 781836 - RNA, 19 nt, Artificial Sequence
  Description of Artificial Sequence: Synthetic oligonucleotide
uggauaguaccuggaaccu

SEQ ID NO: 781837 - RNA, 19 nt, Artificial Sequence
  Description of Artificial Sequence: Synthetic oligonucleotide
agacaugcuuaaaaugucu

SEQ ID NO: 781838 - RNA, 19 nt, Artificial Sequence
  Description of Artificial Sequence: Synthetic oligonucleotide
ggugucaagcucuaugaga

SEQ ID NO: 781839 - RNA, 19 nt, Artificial Sequence
  Description of Artificial Sequence: Synthetic oligonucleotide
cauugguaggagagagagc

SEQ ID NO: 781840 - RNA, 19 nt, Artificial Sequence
  Description of Artificial Sequence: Synthetic oligonucleotide
ugguggauucaguucucug

SEQ ID NO: 781841 - RNA, 19 nt, Artificial Sequence
  Description of Artificial Sequence: Synthetic oligonucleotide
gaaccagaaugggaaggag

SEQ ID NO: 781842 - RNA, 19 nt, Artificial Sequence
  Description of Artificial Sequence: Synthetic oligonucleotide
cuuaucaccgagacuugga

SEQ ID NO: 781843 - RNA, 19 nt, Artificial Sequence
  Description of Artificial Sequence: Synthetic oligonucleotide
uggggcacugagcaaguuc

SEQ ID NO: 781844 - RNA, 19 nt, Artificial Sequence
  Description of Artificial Sequence: Synthetic oligonucleotide
gguaauagaucuccuuauc

SEQ ID NO: 781845 - RNA, 19 nt, Artificial Sequence
  Description of Artificial Sequence: Synthetic oligonucleotide
ugacuucguaguccacacc

SEQ ID NO: 781846 - RNA, 19 nt, Artificial Sequence
  Description of Artificial Sequence: Synthetic oligonucleotide
aggagauucgcucgaggaa

SEQ ID NO: 781847 - RNA, 19 nt, Artificial Sequence
  Description of Artificial Sequence: Synthetic oligonucleotide
ccacaaaucaucacuucac

SEQ ID NO: 781848 - RNA, 19 nt, Artificial Sequence
  Description of Artificial Sequence: Synthetic oligonucleotide
ccauugguaggagagagag

SEQ ID NO: 781849 - RNA, 19 nt, Artificial Sequence
  Description of Artificial Sequence: Synthetic oligonucleotide
uggagagccggugccauca

SEQ ID NO: 781850 - RNA, 19 nt, Artificial Sequence
  Description of Artificial Sequence: Synthetic oligonucleotide
ugagguguggagagccggu

SEQ ID NO: 781851 - RNA, 19 nt, Artificial Sequence
  Description of Artificial Sequence: Synthetic oligonucleotide
agucucgcucucuggaacu

SEQ ID NO: 781852 - RNA, 19 nt, Artificial Sequence
  Description of Artificial Sequence: Synthetic oligonucleotide
caauaccacuggauaguac

SEQ ID NO: 781853 - RNA, 19 nt, Artificial Sequence
  Description of Artificial Sequence: Synthetic oligonucleotide
cuguuugguggcacaaguc

SEQ ID NO: 781854 - RNA, 19 nt, Artificial Sequence
  Description of Artificial Sequence: Synthetic oligonucleotide
uguccgacauaaggaacug

SEQ ID NO: 781855 - RNA, 19 nt, Artificial Sequence
  Description of Artificial Sequence: Synthetic oligonucleotide
guacgacagguugaccugg

SEQ ID NO: 781856 - RNA, 19 nt, Artificial Sequence
  Description of Artificial Sequence: Synthetic oligonucleotide
accaaagcaugcucuuccu

SEQ ID NO: 781857 - RNA, 19 nt, Artificial Sequence
  Description of Artificial Sequence: Synthetic oligonucleotide
ugguagucucggccguggg

SEQ ID NO: 781858 - RNA, 19 nt, Artificial Sequence
  Description of Artificial Sequence: Synthetic oligonucleotide
gguacgacagguugaccug

SEQ ID NO: 781859 - RNA, 19 nt, Artificial Sequence
  Description of Artificial Sequence: Synthetic oligonucleotide
uguggugcuucuguugauc

SEQ ID NO: 781860 - RNA, 19 nt, Artificial Sequence
  Description of Artificial Sequence: Synthetic oligonucleotide
gcauacugaaccuuccgga

SEQ ID NO: 781861 - RNA, 19 nt, Artificial Sequence
  Description of Artificial Sequence: Synthetic oligonucleotide
cuuauccagagaugccuca

SEQ ID NO: 781862 - RNA, 19 nt, Artificial Sequence
  Description of Artificial Sequence: Synthetic oligonucleotide
uucggcuuggggugcauua

SEQ ID NO: 781863 - RNA, 19 nt, Artificial Sequence
  Description of Artificial Sequence: Synthetic oligonucleotide
acaugugcccuuugguuua

SEQ ID NO: 781864 - RNA, 19 nt, Artificial Sequence
  Description of Artificial Sequence: Synthetic oligonucleotide
uacgacagguugaccugga

SEQ ID NO: 781865 - RNA, 19 nt, Artificial Sequence
  Description of Artificial Sequence: Synthetic oligonucleotide
uacuggcguaccgagauuu

SEQ ID NO: 781866 - RNA, 19 nt, Artificial Sequence
  Description of Artificial Sequence: Synthetic oligonucleotide
accuuccggaugacuagcc

SEQ ID NO: 781867 - RNA, 19 nt, Artificial Sequence
  Description of Artificial Sequence: Synthetic oligonucleotide
auugacgcugauggguucu

SEQ ID NO: 781868 - RNA, 19 nt, Artificial Sequence
  Description of Artificial Sequence: Synthetic oligonucleotide
gcuacuaugaggggaucag

SEQ ID NO: 781869 - RNA, 19 nt, Artificial Sequence
  Description of Artificial Sequence: Synthetic oligonucleotide
aagcuacuaugaggggauc

SEQ ID NO: 781870 - RNA, 19 nt, Artificial Sequence
  Description of Artificial Sequence: Synthetic oligonucleotide
gccacaaaucaucacuuca

SEQ ID NO: 781871 - RNA, 19 nt, Artificial Sequence
  Description of Artificial Sequence: Synthetic oligonucleotide
gcaagagggcugaacaucc

SEQ ID NO: 781872 - RNA, 19 nt, Artificial Sequence
  Description of Artificial Sequence: Synthetic oligonucleotide
aucacuucacagaggguca

SEQ ID NO: 781873 - RNA, 19 nt, Artificial Sequence
  Description of Artificial Sequence: Synthetic oligonucleotide
cuucguaguccacaccaca

SEQ ID NO: 781874 - RNA, 19 nt, Artificial Sequence
  Description of Artificial Sequence: Synthetic oligonucleotide
cuauuuccucucacccuug

SEQ ID NO: 781875 - RNA, 19 nt, Artificial Sequence
  Description of Artificial Sequence: Synthetic oligonucleotide
auuacccgcuuuucucggu

SEQ ID NO: 781876 - RNA, 19 nt, Artificial Sequence
  Description of Artificial Sequence: Synthetic oligonucleotide
ggauucaguucucugaccu

SEQ ID NO: 781877 - RNA, 19 nt, Artificial Sequence
  Description of Artificial Sequence: Synthetic oligonucleotide
uuacccgcuuuucucgguu

SEQ ID NO: 781878 - RNA, 19 nt, Artificial Sequence
  Description of Artificial Sequence: Synthetic oligonucleotide
cacagguacgacagguuga

SEQ ID NO: 781879 - RNA, 19 nt, Artificial Sequence
  Description of Artificial Sequence: Synthetic oligonucleotide
gauuggugucuacuggagu

SEQ ID NO: 781880 - RNA, 19 nt, Artificial Sequence
  Description of Artificial Sequence: Synthetic oligonucleotide
cuuucagccucuggcgggc

SEQ ID NO: 781881 - RNA, 19 nt, Artificial Sequence
  Description of Artificial Sequence: Synthetic oligonucleotide
caaaggcuagccuccacaa

SEQ ID NO: 781882 - RNA, 19 nt, Artificial Sequence
  Description of Artificial Sequence: Synthetic oligonucleotide
agcuacuaugaggggauca

SEQ ID NO: 781883 - RNA, 19 nt, Artificial Sequence
  Description of Artificial Sequence: Synthetic oligonucleotide
uacuuagaagaggcaacau

SEQ ID NO: 781884 - RNA, 19 nt, Artificial Sequence
  Description of Artificial Sequence: Synthetic oligonucleotide
gcuuggggugcauuacccg

SEQ ID NO: 781885 - RNA, 19 nt, Artificial Sequence
  Description of Artificial Sequence: Synthetic oligonucleotide
cuaugagauuggugucuac

SEQ ID NO: 781886 - RNA, 19 nt, Artificial Sequence
  Description of Artificial Sequence: Synthetic oligonucleotide
cguaccgagauuuugaucu

SEQ ID NO: 781887 - RNA, 19 nt, Artificial Sequence
  Description of Artificial Sequence: Synthetic oligonucleotide
ugcaagggcuuguccgaca

SEQ ID NO: 781888 - RNA, 19 nt, Artificial Sequence
  Description of Artificial Sequence: Synthetic oligonucleotide
gugucaagcucuaugagau

SEQ ID NO: 781889 - RNA, 19 nt, Artificial Sequence
  Description of Artificial Sequence: Synthetic oligonucleotide
uacccgcuuuucucgguug

SEQ ID NO: 781890 - RNA, 19 nt, Artificial Sequence
  Description of Artificial Sequence: Synthetic oligonucleotide
ugggcccuugguagaaagu

SEQ ID NO: 781891 - RNA, 19 nt, Artificial Sequence
  Description of Artificial Sequence: Synthetic oligonucleotide
ggcaacucagcccuuuauc

SEQ ID NO: 781892 - RNA, 19 nt, Artificial Sequence
  Description of Artificial Sequence: Synthetic oligonucleotide
gccaucugggcucuaaaga

SEQ ID NO: 781893 - RNA, 19 nt, Artificial Sequence
  Description of Artificial Sequence: Synthetic oligonucleotide
uucgcucgaggaagacaug

SEQ ID NO: 781894 - RNA, 19 nt, Artificial Sequence
  Description of Artificial Sequence: Synthetic oligonucleotide
cauacuggcguaccgagau

SEQ ID NO: 781895 - RNA, 19 nt, Artificial Sequence
  Description of Artificial Sequence: Synthetic oligonucleotide
ccucuggcgggcaaagucc

SEQ ID NO: 781896 - RNA, 19 nt, Artificial Sequence
  Description of Artificial Sequence: Synthetic oligonucleotide
ucaccgagacuuggaagac

SEQ ID NO: 781897 - RNA, 19 nt, Artificial Sequence
  Description of Artificial Sequence: Synthetic oligonucleotide
agcuuggaaucuugucccu

SEQ ID NO: 781898 - RNA, 19 nt, Artificial Sequence
  Description of Artificial Sequence: Synthetic oligonucleotide
gcuuaucaccgagacuugg

SEQ ID NO: 781899 - RNA, 19 nt, Artificial Sequence
  Description of Artificial Sequence: Synthetic oligonucleotide
uuguugagguguggagagc

SEQ ID NO: 781900 - RNA, 19 nt, Artificial Sequence
  Description of Artificial Sequence: Synthetic oligonucleotide
cugguagucucggccgugg

SEQ ID NO: 781901 - RNA, 19 nt, Artificial Sequence
  Description of Artificial Sequence: Synthetic oligonucleotide
ggaauccuaggagauucgc

SEQ ID NO: 781902 - RNA, 19 nt, Artificial Sequence
  Description of Artificial Sequence: Synthetic oligonucleotide
cauugacgcugauggguuc

SEQ ID NO: 781903 - RNA, 19 nt, Artificial Sequence
  Description of Artificial Sequence: Synthetic oligonucleotide
ccucuuucggcuuggggug

SEQ ID NO: 781904 - RNA, 19 nt, Artificial Sequence
  Description of Artificial Sequence: Synthetic oligonucleotide
uuugguccuuaaguuuaaa

SEQ ID NO: 781905 - RNA, 19 nt, Artificial Sequence
  Description of Artificial Sequence: Synthetic oligonucleotide
cucggccgugggcugaggg

SEQ ID NO: 781906 - RNA, 19 nt, Artificial Sequence
  Description of Artificial Sequence: Synthetic oligonucleotide
gaauccuaggagauucgcu

SEQ ID NO: 781907 - RNA, 19 nt, Artificial Sequence
  Description of Artificial Sequence: Synthetic oligonucleotide
cauggacauccauaggugu

SEQ ID NO: 781908 - RNA, 19 nt, Artificial Sequence
  Description of Artificial Sequence: Synthetic oligonucleotide
cucaaggugcaagggcuug

SEQ ID NO: 781909 - RNA, 19 nt, Artificial Sequence
  Description of Artificial Sequence: Synthetic oligonucleotide
gguuugguccuuaaguuua

SEQ ID NO: 781910 - RNA, 19 nt, Artificial Sequence
  Description of Artificial Sequence: Synthetic oligonucleotide
acauugacgcugauggguu

SEQ ID NO: 781911 - RNA, 19 nt, Artificial Sequence
  Description of Artificial Sequence: Synthetic oligonucleotide
cuggcguaccgagauuuug

SEQ ID NO: 781912 - RNA, 19 nt, Artificial Sequence
  Description of Artificial Sequence: Synthetic oligonucleotide
guccugcaaguuaauuccc

SEQ ID NO: 781913 - RNA, 19 nt, Artificial Sequence
  Description of Artificial Sequence: Synthetic oligonucleotide
agauuggcaucaacaugug

SEQ ID NO: 781914 - RNA, 19 nt, Artificial Sequence
  Description of Artificial Sequence: Synthetic oligonucleotide
ggcuuguccgacauaagga

SEQ ID NO: 781915 - RNA, 19 nt, Artificial Sequence
  Description of Artificial Sequence: Synthetic oligonucleotide
ggcccuugguagaaagugg

SEQ ID NO: 781916 - RNA, 19 nt, Artificial Sequence
  Description of Artificial Sequence: Synthetic oligonucleotide
caaaagccuccugcugugc

SEQ ID NO: 781917 - RNA, 19 nt, Artificial Sequence
  Description of Artificial Sequence: Synthetic oligonucleotide
ggggcacugagcaaguuca

SEQ ID NO: 781918 - RNA, 19 nt, Artificial Sequence
  Description of Artificial Sequence: Synthetic oligonucleotide
cauacugaaccuuccggau

SEQ ID NO: 781919 - RNA, 19 nt, Artificial Sequence
  Description of Artificial Sequence: Synthetic oligonucleotide
gucugcauacuggcguacc

SEQ ID NO: 781920 - RNA, 19 nt, Artificial Sequence
  Description of Artificial Sequence: Synthetic oligonucleotide
ucucggcacagaaggcuuu

SEQ ID NO: 781921 - RNA, 19 nt, Artificial Sequence
  Description of Artificial Sequence: Synthetic oligonucleotide
ucggcuuggggugcauuac

SEQ ID NO: 781922 - RNA, 19 nt, Artificial Sequence
  Description of Artificial Sequence: Synthetic oligonucleotide
guagucucggccgugggcu

SEQ ID NO: 781923 - RNA, 19 nt, Artificial Sequence
  Description of Artificial Sequence: Synthetic oligonucleotide
gcuagccuccacaaugagc

SEQ ID NO: 781924 - RNA, 19 nt, Artificial Sequence
  Description of Artificial Sequence: Synthetic oligonucleotide
ggccuuuaauggccucucg

SEQ ID NO: 781925 - RNA, 19 nt, Artificial Sequence
  Description of Artificial Sequence: Synthetic oligonucleotide
caugguaauagaucuccuu

SEQ ID NO: 781926 - RNA, 19 nt, Artificial Sequence
  Description of Artificial Sequence: Synthetic oligonucleotide
uagucucggccgugggcug

SEQ ID NO: 781927 - RNA, 19 nt, Artificial Sequence
  Description of Artificial Sequence: Synthetic oligonucleotide
aggcuagccuccacaauga

SEQ ID NO: 781928 - RNA, 19 nt, Artificial Sequence
  Description of Artificial Sequence: Synthetic oligonucleotide
ggugucuacuggagucucg

SEQ ID NO: 781929 - RNA, 19 nt, Artificial Sequence
  Description of Artificial Sequence: Synthetic oligonucleotide
gacauccauagguguggaa

SEQ ID NO: 781930 - RNA, 19 nt, Artificial Sequence
  Description of Artificial Sequence: Synthetic oligonucleotide
guucucggcacagaaggcu

SEQ ID NO: 781931 - RNA, 19 nt, Artificial Sequence
  Description of Artificial Sequence: Synthetic oligonucleotide
uggaaccucagaggcuuau

SEQ ID NO: 781932 - RNA, 19 nt, Artificial Sequence
  Description of Artificial Sequence: Synthetic oligonucleotide
ucuuucggcuuggggugca

SEQ ID NO: 781933 - RNA, 19 nt, Artificial Sequence
  Description of Artificial Sequence: Synthetic oligonucleotide
ggcuuggggugcauuaccc

SEQ ID NO: 781934 - RNA, 19 nt, Artificial Sequence
  Description of Artificial Sequence: Synthetic oligonucleotide
cugacuuuuguggacucua

SEQ ID NO: 781935 - RNA, 19 nt, Artificial Sequence
  Description of Artificial Sequence: Synthetic oligonucleotide
ggaguugaauaaaacuaua

SEQ ID NO: 781936 - RNA, 19 nt, Artificial Sequence
  Description of Artificial Sequence: Synthetic oligonucleotide
ugucaucggccuccuccau

SEQ ID NO: 781937 - RNA, 19 nt, Artificial Sequence
  Description of Artificial Sequence: Synthetic oligonucleotide
gacuagccgcacagaauuc

SEQ ID NO: 781938 - RNA, 19 nt, Artificial Sequence
  Description of Artificial Sequence: Synthetic oligonucleotide
gagagccggugccaucauc

SEQ ID NO: 781939 - RNA, 19 nt, Artificial Sequence
  Description of Artificial Sequence: Synthetic oligonucleotide
gugcauuacccgcuuuucu

SEQ ID NO: 781940 - RNA, 19 nt, Artificial Sequence
  Description of Artificial Sequence: Synthetic oligonucleotide
ggagagagagcugccucug

SEQ ID NO: 781941 - RNA, 19 nt, Artificial Sequence
  Description of Artificial Sequence: Synthetic oligonucleotide
gaggcuuaucaccgagacu

SEQ ID NO: 781942 - RNA, 19 nt, Artificial Sequence
  Description of Artificial Sequence: Synthetic oligonucleotide
ggugcauuacccgcuuuuc

SEQ ID NO: 781943 - RNA, 19 nt, Artificial Sequence
  Description of Artificial Sequence: Synthetic oligonucleotide
ggaacugaauucuucucuu

SEQ ID NO: 781944 - RNA, 19 nt, Artificial Sequence
  Description of Artificial Sequence: Synthetic oligonucleotide
cuuggaaucuugucccuuu

SEQ ID NO: 781945 - RNA, 19 nt, Artificial Sequence
  Description of Artificial Sequence: Synthetic oligonucleotide
ggcuagccuccacaaugag

SEQ ID NO: 781946 - RNA, 19 nt, Artificial Sequence
  Description of Artificial Sequence: Synthetic oligonucleotide
auacuggcguaccgagauu

SEQ ID NO: 781947 - RNA, 19 nt, Artificial Sequence
  Description of Artificial Sequence: Synthetic oligonucleotide
cgacagguugaccuggaug

SEQ ID NO: 781948 - RNA, 19 nt, Artificial Sequence
  Description of Artificial Sequence: Synthetic oligonucleotide
uugacgcugauggguucuc

SEQ ID NO: 781949 - RNA, 19 nt, Artificial Sequence
  Description of Artificial Sequence: Synthetic oligonucleotide
cuccacaaugagcuguccu

SEQ ID NO: 781950 - RNA, 19 nt, Artificial Sequence
  Description of Artificial Sequence: Synthetic oligonucleotide
ggauaguaccuggaaccuc

SEQ ID NO: 781951 - RNA, 19 nt, Artificial Sequence
  Description of Artificial Sequence: Synthetic oligonucleotide
cagguacgacagguugacc

SEQ ID NO: 781952 - RNA, 19 nt, Artificial Sequence
  Description of Artificial Sequence: Synthetic oligonucleotide
guugauccuggagggaccu

SEQ ID NO: 781953 - RNA, 19 nt, Artificial Sequence
  Description of Artificial Sequence: Synthetic oligonucleotide
agggcuuguccgacauaag

SEQ ID NO: 781954 - RNA, 19 nt, Artificial Sequence
  Description of Artificial Sequence: Synthetic oligonucleotide
ccuuaaguuuaaagaguaa

SEQ ID NO: 781955 - RNA, 19 nt, Artificial Sequence
  Description of Artificial Sequence: Synthetic oligonucleotide
gcccuugguagaaagugga

SEQ ID NO: 781956 - RNA, 19 nt, Artificial Sequence
  Description of Artificial Sequence: Synthetic oligonucleotide
caugugcccuuugguuuac

SEQ ID NO: 781957 - RNA, 19 nt, Artificial Sequence
  Description of Artificial Sequence: Synthetic oligonucleotide
ggagucucgcucucuggaa

SEQ ID NO: 781958 - RNA, 19 nt, Artificial Sequence
  Description of Artificial Sequence: Synthetic oligonucleotide
gccuuuaauggccucucgu

SEQ ID NO: 781959 - RNA, 19 nt, Artificial Sequence
  Description of Artificial Sequence: Synthetic oligonucleotide
gcguaccgagauuuugauc

SEQ ID NO: 781960 - RNA, 19 nt, Artificial Sequence
  Description of Artificial Sequence: Synthetic oligonucleotide
gccaauaccacuggauagu

SEQ ID NO: 781961 - RNA, 19 nt, Artificial Sequence
  Description of Artificial Sequence: Synthetic oligonucleotide
gcgcccacccguuuuccug

SEQ ID NO: 781962 - RNA, 19 nt, Artificial Sequence
  Description of Artificial Sequence: Synthetic oligonucleotide
ggcuuaucaccgagacuug

SEQ ID NO: 781963 - RNA, 19 nt, Artificial Sequence
  Description of Artificial Sequence: Synthetic oligonucleotide
cucuggcgggcaaaguccu

SEQ ID NO: 781964 - RNA, 19 nt, Artificial Sequence
  Description of Artificial Sequence: Synthetic oligonucleotide
agcuagggcccagcucuca

SEQ ID NO: 781965 - RNA, 19 nt, Artificial Sequence
  Description of Artificial Sequence: Synthetic oligonucleotide
cucugggauauggaagcua

SEQ ID NO: 781966 - RNA, 19 nt, Artificial Sequence
  Description of Artificial Sequence: Synthetic oligonucleotide
aggagacgagaaagaucca

SEQ ID NO: 781967 - RNA, 19 nt, Artificial Sequence
  Description of Artificial Sequence: Synthetic oligonucleotide
gccccagucuaucuguugu

SEQ ID NO: 781968 - RNA, 19 nt, Artificial Sequence
  Description of Artificial Sequence: Synthetic oligonucleotide
cagcuagggcccagcucuc

SEQ ID NO: 781969 - RNA, 19 nt, Artificial Sequence
  Description of Artificial Sequence: Synthetic oligonucleotide
cgcccacccguuuuccugg

SEQ ID NO: 781970 - RNA, 19 nt, Artificial Sequence
  Description of Artificial Sequence: Synthetic oligonucleotide
ccuuuaauggccucucguu

SEQ ID NO: 781971 - RNA, 19 nt, Artificial Sequence
  Description of Artificial Sequence: Synthetic oligonucleotide
gagcuguguugaagagaca

SEQ ID NO: 781972 - RNA, 19 nt, Artificial Sequence
  Description of Artificial Sequence: Synthetic oligonucleotide
ccccaaaggucuccaagga

SEQ ID NO: 781973 - RNA, 19 nt, Artificial Sequence
  Description of Artificial Sequence: Synthetic oligonucleotide
acuggcguaccgagauuuu

SEQ ID NO: 781974 - RNA, 19 nt, Artificial Sequence
  Description of Artificial Sequence: Synthetic oligonucleotide
ggcguaccgagauuuugau

SEQ ID NO: 781975 - RNA, 19 nt, Artificial Sequence
  Description of Artificial Sequence: Synthetic oligonucleotide
gccggugccaucauccucu

SEQ ID NO: 781976 - RNA, 19 nt, Artificial Sequence
  Description of Artificial Sequence: Synthetic oligonucleotide
guaccgagauuuugaucuu

SEQ ID NO: 781977 - RNA, 19 nt, Artificial Sequence
  Description of Artificial Sequence: Synthetic oligonucleotide
ccgacauaaggaacugucu

SEQ ID NO: 781978 - RNA, 19 nt, Artificial Sequence
  Description of Artificial Sequence: Synthetic oligonucleotide
ccacuggauaguaccugga

SEQ ID NO: 781979 - RNA, 19 nt, Artificial Sequence
  Description of Artificial Sequence: Synthetic oligonucleotide
cacugccaaaggcuagccu

SEQ ID NO: 781980 - RNA, 19 nt, Artificial Sequence
  Description of Artificial Sequence: Synthetic oligonucleotide
ccagggcgagggcuggccc

SEQ ID NO: 781981 - RNA, 19 nt, Artificial Sequence
  Description of Artificial Sequence: Synthetic oligonucleotide
gcauacuggcguaccgaga

SEQ ID NO: 781982 - RNA, 19 nt, Artificial Sequence
  Description of Artificial Sequence: Synthetic oligonucleotide
ggacucuaggaggugaguu

SEQ ID NO: 781983 - RNA, 19 nt, Artificial Sequence
  Description of Artificial Sequence: Synthetic oligonucleotide
accuguggucagagcccag

SEQ ID NO: 781984 - RNA, 19 nt, Artificial Sequence
  Description of Artificial Sequence: Synthetic oligonucleotide
gcaagggcuuguccgacau

SEQ ID NO: 781985 - RNA, 19 nt, Artificial Sequence
  Description of Artificial Sequence: Synthetic oligonucleotide
guccgacauaaggaacugu

SEQ ID NO: 781986 - RNA, 19 nt, Artificial Sequence
  Description of Artificial Sequence: Synthetic oligonucleotide
ccaauaccacuggauagua

SEQ ID NO: 781987 - RNA, 19 nt, Artificial Sequence
  Description of Artificial Sequence: Synthetic oligonucleotide
caagggcuuguccgacaua

SEQ ID NO: 781988 - RNA, 19 nt, Artificial Sequence
  Description of Artificial Sequence: Synthetic oligonucleotide
ccaugguaauagaucuccu

SEQ ID NO: 781989 - RNA, 19 nt, Artificial Sequence
  Description of Artificial Sequence: Synthetic oligonucleotide
cugggagcucaagcuugga

SEQ ID NO: 781990 - RNA, 19 nt, Artificial Sequence
  Description of Artificial Sequence: Synthetic oligonucleotide
ccggaugacuagccgcaca

SEQ ID NO: 781991 - RNA, 19 nt, Artificial Sequence
  Description of Artificial Sequence: Synthetic oligonucleotide
gaacaggcgcccacccguu

SEQ ID NO: 781992 - RNA, 19 nt, Artificial Sequence
  Description of Artificial Sequence: Synthetic oligonucleotide
cauggacauugacgcugau

SEQ ID NO: 781993 - RNA, 19 nt, Artificial Sequence
  Description of Artificial Sequence: Synthetic oligonucleotide
gcuuggaaucuugucccuu

SEQ ID NO: 781994 - RNA, 19 nt, Artificial Sequence
  Description of Artificial Sequence: Synthetic oligonucleotide
ccgagauuuugaucuucuu

SEQ ID NO: 781995 - RNA, 19 nt, Artificial Sequence
  Description of Artificial Sequence: Synthetic oligonucleotide
cgaggaagacaugcuuaaa

SEQ ID NO: 781996 - RNA, 19 nt, Artificial Sequence
  Description of Artificial Sequence: Synthetic oligonucleotide
cgcucgaggaagacaugcu

SEQ ID NO: 781997 - RNA, 19 nt, Artificial Sequence
  Description of Artificial Sequence: Synthetic oligonucleotide
ggagagccggugccaucau

SEQ ID NO: 781998 - RNA, 19 nt, Artificial Sequence
  Description of Artificial Sequence: Synthetic oligonucleotide
cuuucggcuuggggugcau

SEQ ID NO: 781999 - RNA, 19 nt, Artificial Sequence
  Description of Artificial Sequence: Synthetic oligonucleotide
cccgcuuuucucgguuguu

SEQ ID NO: 782000 - RNA, 19 nt, Artificial Sequence
  Description of Artificial Sequence: Synthetic oligonucleotide
ccggugccaucauccucuu

SEQ ID NO: 782001 - RNA, 19 nt, Artificial Sequence
  Description of Artificial Sequence: Synthetic oligonucleotide
aauaucguuuauuaguuuc

SEQ ID NO: 782002 - RNA, 19 nt, Artificial Sequence
  Description of Artificial Sequence: Synthetic oligonucleotide
aacuuuagcauuuugguug

SEQ ID NO: 782003 - RNA, 19 nt, Artificial Sequence
  Description of Artificial Sequence: Synthetic oligonucleotide
ucgacuuuuaaaauaaugc

SEQ ID NO: 782004 - RNA, 19 nt, Artificial Sequence
  Description of Artificial Sequence: Synthetic oligonucleotide
aaaacuuuagcauuuuggu

SEQ ID NO: 782005 - RNA, 19 nt, Artificial Sequence
  Description of Artificial Sequence: Synthetic oligonucleotide
aauauaagugguguauucc

SEQ ID NO: 782006 - RNA, 19 nt, Artificial Sequence
  Description of Artificial Sequence: Synthetic oligonucleotide
ugcagcauaagcuauuucg

SEQ ID NO: 782007 - RNA, 19 nt, Artificial Sequence
  Description of Artificial Sequence: Synthetic oligonucleotide
uacaugagaaauuacaaug

SEQ ID NO: 782008 - RNA, 19 nt, Artificial Sequence
  Description of Artificial Sequence: Synthetic oligonucleotide
aauguaugcaccaugguuc

SEQ ID NO: 782009 - RNA, 19 nt, Artificial Sequence
  Description of Artificial Sequence: Synthetic oligonucleotide
aaacauuaauaugugggcc

SEQ ID NO: 782010 - RNA, 19 nt, Artificial Sequence
  Description of Artificial Sequence: Synthetic oligonucleotide
uagagauuaauguugaucu

SEQ ID NO: 782011 - RNA, 19 nt, Artificial Sequence
  Description of Artificial Sequence: Synthetic oligonucleotide
aauuucaccaauugcagca

SEQ ID NO: 782012 - RNA, 19 nt, Artificial Sequence
  Description of Artificial Sequence: Synthetic oligonucleotide
aggguuuuccaguugaugc

SEQ ID NO: 782013 - RNA, 19 nt, Artificial Sequence
  Description of Artificial Sequence: Synthetic oligonucleotide
gagaaauuacaauggaggg

SEQ ID NO: 782014 - RNA, 19 nt, Artificial Sequence
  Description of Artificial Sequence: Synthetic oligonucleotide
aaucguuucacugagguga

SEQ ID NO: 782015 - RNA, 19 nt, Artificial Sequence
  Description of Artificial Sequence: Synthetic oligonucleotide
aaugacucugucucggaac

SEQ ID NO: 782016 - RNA, 19 nt, Artificial Sequence
  Description of Artificial Sequence: Synthetic oligonucleotide
uaaacauuaauaugugggc

SEQ ID NO: 782017 - RNA, 19 nt, Artificial Sequence
  Description of Artificial Sequence: Synthetic oligonucleotide
aaggauauugcaugaauca

SEQ ID NO: 782018 - RNA, 19 nt, Artificial Sequence
  Description of Artificial Sequence: Synthetic oligonucleotide
uuugcuccuuaacaaaucg

SEQ ID NO: 782019 - RNA, 19 nt, Artificial Sequence
  Description of Artificial Sequence: Synthetic oligonucleotide
ugugcauucaaaauaucug

SEQ ID NO: 782020 - RNA, 19 nt, Artificial Sequence
  Description of Artificial Sequence: Synthetic oligonucleotide
acuaucccaaaccuuauac

SEQ ID NO: 782021 - RNA, 19 nt, Artificial Sequence
  Description of Artificial Sequence: Synthetic oligonucleotide
uccaacaaaacucacuaug

SEQ ID NO: 782022 - RNA, 19 nt, Artificial Sequence
  Description of Artificial Sequence: Synthetic oligonucleotide
agagguuuuaaugaugagc

SEQ ID NO: 782023 - RNA, 19 nt, Artificial Sequence
  Description of Artificial Sequence: Synthetic oligonucleotide
uuucguacaauguuuucgg

SEQ ID NO: 782024 - RNA, 19 nt, Artificial Sequence
  Description of Artificial Sequence: Synthetic oligonucleotide
aaaugauccaacagcaaac

SEQ ID NO: 782025 - RNA, 19 nt, Artificial Sequence
  Description of Artificial Sequence: Synthetic oligonucleotide
ucgaacuuuaucaauuuca

SEQ ID NO: 782026 - RNA, 19 nt, Artificial Sequence
  Description of Artificial Sequence: Synthetic oligonucleotide
acaacucuccaucuggagc

SEQ ID NO: 782027 - RNA, 19 nt, Artificial Sequence
  Description of Artificial Sequence: Synthetic oligonucleotide
cuuaugagaaagaaguuuc

SEQ ID NO: 782028 - RNA, 19 nt, Artificial Sequence
  Description of Artificial Sequence: Synthetic oligonucleotide
auagcugcuaggcaagccc

SEQ ID NO: 782029 - RNA, 19 nt, Artificial Sequence
  Description of Artificial Sequence: Synthetic oligonucleotide
aaaggauauugcaugaauc

SEQ ID NO: 782030 - RNA, 19 nt, Artificial Sequence
  Description of Artificial Sequence: Synthetic oligonucleotide
uucggagaagaaaugaagc

SEQ ID NO: 782031 - RNA, 19 nt, Artificial Sequence
  Description of Artificial Sequence: Synthetic oligonucleotide
cacgugauauuaaauaugc

SEQ ID NO: 782032 - RNA, 19 nt, Artificial Sequence
  Description of Artificial Sequence: Synthetic oligonucleotide
ucggagaagaaaugaagcg

SEQ ID NO: 782033 - RNA, 19 nt, Artificial Sequence
  Description of Artificial Sequence: Synthetic oligonucleotide
gugauauuaaauaugcugc

SEQ ID NO: 782034 - RNA, 19 nt, Artificial Sequence
  Description of Artificial Sequence: Synthetic oligonucleotide
auaaucugcucuucuuucc

SEQ ID NO: 782035 - RNA, 19 nt, Artificial Sequence
  Description of Artificial Sequence: Synthetic oligonucleotide
cauaggguguucaugaggc

SEQ ID NO: 782036 - RNA, 19 nt, Artificial Sequence
  Description of Artificial Sequence: Synthetic oligonucleotide
aaucauaucucgauuagca

SEQ ID NO: 782037 - RNA, 19 nt, Artificial Sequence
  Description of Artificial Sequence: Synthetic oligonucleotide
uuaauuuccuaucucaauu

SEQ ID NO: 782038 - RNA, 19 nt, Artificial Sequence
  Description of Artificial Sequence: Synthetic oligonucleotide
ugauauuaaauaugcugcc

SEQ ID NO: 782039 - RNA, 19 nt, Artificial Sequence
  Description of Artificial Sequence: Synthetic oligonucleotide
uaaugcaucgacuggaaga

SEQ ID NO: 782040 - RNA, 19 nt, Artificial Sequence
  Description of Artificial Sequence: Synthetic oligonucleotide
uuuaaugacucugucucgg

SEQ ID NO: 782041 - RNA, 19 nt, Artificial Sequence
  Description of Artificial Sequence: Synthetic oligonucleotide
gaaauuacaauggagggga

SEQ ID NO: 782042 - RNA, 19 nt, Artificial Sequence
  Description of Artificial Sequence: Synthetic oligonucleotide
ugauccaacagcaaacaac

SEQ ID NO: 782043 - RNA, 19 nt, Artificial Sequence
  Description of Artificial Sequence: Synthetic oligonucleotide
aauaaugccuucaugggcu

SEQ ID NO: 782044 - RNA, 19 nt, Artificial Sequence
  Description of Artificial Sequence: Synthetic oligonucleotide
ucguuuauuaguuuccugu

SEQ ID NO: 782045 - RNA, 19 nt, Artificial Sequence
  Description of Artificial Sequence: Synthetic oligonucleotide
ucauaucucgauuagcaac

SEQ ID NO: 782046 - RNA, 19 nt, Artificial Sequence
  Description of Artificial Sequence: Synthetic oligonucleotide
gaagacguagcacugaaga

SEQ ID NO: 782047 - RNA, 19 nt, Artificial Sequence
  Description of Artificial Sequence: Synthetic oligonucleotide
uuccaaucgacuuuuaaaa

SEQ ID NO: 782048 - RNA, 19 nt, Artificial Sequence
  Description of Artificial Sequence: Synthetic oligonucleotide
gauaaaugaggccacccug

SEQ ID NO: 782049 - RNA, 19 nt, Artificial Sequence
  Description of Artificial Sequence: Synthetic oligonucleotide
aaucggguaucuugaaguc

SEQ ID NO: 782050 - RNA, 19 nt, Artificial Sequence
  Description of Artificial Sequence: Synthetic oligonucleotide
uauaagugguguauuccag

SEQ ID NO: 782051 - RNA, 19 nt, Artificial Sequence
  Description of Artificial Sequence: Synthetic oligonucleotide
agaaauuacaauggagggg

SEQ ID NO: 782052 - RNA, 19 nt, Artificial Sequence
  Description of Artificial Sequence: Synthetic oligonucleotide
agcauuuugguugaagagg

SEQ ID NO: 782053 - RNA, 19 nt, Artificial Sequence
  Description of Artificial Sequence: Synthetic oligonucleotide
ugugaaucggguaucuuga

SEQ ID NO: 782054 - RNA, 19 nt, Artificial Sequence
  Description of Artificial Sequence: Synthetic oligonucleotide
aucucgauuagcaacugcc

SEQ ID NO: 782055 - RNA, 19 nt, Artificial Sequence
  Description of Artificial Sequence: Synthetic oligonucleotide
aaugaagcgcccuucaaua

SEQ ID NO: 782056 - RNA, 19 nt, Artificial Sequence
  Description of Artificial Sequence: Synthetic oligonucleotide
uuaucacacaagcguaagg

SEQ ID NO: 782057 - RNA, 19 nt, Artificial Sequence
  Description of Artificial Sequence: Synthetic oligonucleotide
uuaugagaaagaaguuucc

SEQ ID NO: 782058 - RNA, 19 nt, Artificial Sequence
  Description of Artificial Sequence: Synthetic oligonucleotide
aauaugcugccaguguugg

SEQ ID NO: 782059 - RNA, 19 nt, Artificial Sequence
  Description of Artificial Sequence: Synthetic oligonucleotide
uggauugcuugauaaauga

SEQ ID NO: 782060 - RNA, 19 nt, Artificial Sequence
  Description of Artificial Sequence: Synthetic oligonucleotide
uccaguugaugcuucaaag

SEQ ID NO: 782061 - RNA, 19 nt, Artificial Sequence
  Description of Artificial Sequence: Synthetic oligonucleotide
aagacguagcacugaagag

SEQ ID NO: 782062 - RNA, 19 nt, Artificial Sequence
  Description of Artificial Sequence: Synthetic oligonucleotide
aaucggcagagccuuacag

SEQ ID NO: 782063 - RNA, 19 nt, Artificial Sequence
  Description of Artificial Sequence: Synthetic oligonucleotide
auauaagugguguauucca

SEQ ID NO: 782064 - RNA, 19 nt, Artificial Sequence
  Description of Artificial Sequence: Synthetic oligonucleotide
auaucguuuauuaguuucc

SEQ ID NO: 782065 - RNA, 19 nt, Artificial Sequence
  Description of Artificial Sequence: Synthetic oligonucleotide
auuccgaaccugcauaguc

SEQ ID NO: 782066 - RNA, 19 nt, Artificial Sequence
  Description of Artificial Sequence: Synthetic oligonucleotide
ucuauuuggagaccuucug

SEQ ID NO: 782067 - RNA, 19 nt, Artificial Sequence
  Description of Artificial Sequence: Synthetic oligonucleotide
aagcguaagguaugaaaug

SEQ ID NO: 782068 - RNA, 19 nt, Artificial Sequence
  Description of Artificial Sequence: Synthetic oligonucleotide
ugcgugagcuccauaaugc

SEQ ID NO: 782069 - RNA, 19 nt, Artificial Sequence
  Description of Artificial Sequence: Synthetic oligonucleotide
aguaaucauaucucgauua

SEQ ID NO: 782070 - RNA, 19 nt, Artificial Sequence
  Description of Artificial Sequence: Synthetic oligonucleotide
uuuauagcauugauguauc

SEQ ID NO: 782071 - RNA, 19 nt, Artificial Sequence
  Description of Artificial Sequence: Synthetic oligonucleotide
ugaccacccaguuuuauca

SEQ ID NO: 782072 - RNA, 19 nt, Artificial Sequence
  Description of Artificial Sequence: Synthetic oligonucleotide
cuccuuaacaaaucggcag

SEQ ID NO: 782073 - RNA, 19 nt, Artificial Sequence
  Description of Artificial Sequence: Synthetic oligonucleotide
uucuuugagaucaaauaua

SEQ ID NO: 782074 - RNA, 19 nt, Artificial Sequence
  Description of Artificial Sequence: Synthetic oligonucleotide
ucuucguuaguguuacuug

SEQ ID NO: 782075 - RNA, 19 nt, Artificial Sequence
  Description of Artificial Sequence: Synthetic oligonucleotide
ugcaucgacuggaagaaca

SEQ ID NO: 782076 - RNA, 19 nt, Artificial Sequence
  Description of Artificial Sequence: Synthetic oligonucleotide
ugauaaaugaggccacccu

SEQ ID NO: 782077 - RNA, 19 nt, Artificial Sequence
  Description of Artificial Sequence: Synthetic oligonucleotide
aucuacaagaagaaaaugu

SEQ ID NO: 782078 - RNA, 19 nt, Artificial Sequence
  Description of Artificial Sequence: Synthetic oligonucleotide
ugaaucggguaucuugaag

SEQ ID NO: 782079 - RNA, 19 nt, Artificial Sequence
  Description of Artificial Sequence: Synthetic oligonucleotide
uccuuaacaaaucggcaga

SEQ ID NO: 782080 - RNA, 19 nt, Artificial Sequence
  Description of Artificial Sequence: Synthetic oligonucleotide
auuaaauaugcugccagug

SEQ ID NO: 782081 - RNA, 19 nt, Artificial Sequence
  Description of Artificial Sequence: Synthetic oligonucleotide
aaugauccaacagcaaaca

SEQ ID NO: 782082 - RNA, 19 nt, Artificial Sequence
  Description of Artificial Sequence: Synthetic oligonucleotide
ucuaaagcauaugaccacc

SEQ ID NO: 782083 - RNA, 19 nt, Artificial Sequence
  Description of Artificial Sequence: Synthetic oligonucleotide
aauuacaauggaggggaag

SEQ ID NO: 782084 - RNA, 19 nt, Artificial Sequence
  Description of Artificial Sequence: Synthetic oligonucleotide
aagagacguugaaacaacc

SEQ ID NO: 782085 - RNA, 19 nt, Artificial Sequence
  Description of Artificial Sequence: Synthetic oligonucleotide
ucggguaucuugaagucca

SEQ ID NO: 782086 - RNA, 19 nt, Artificial Sequence
  Description of Artificial Sequence: Synthetic oligonucleotide
uugggguaauaccacacug

SEQ ID NO: 782087 - RNA, 19 nt, Artificial Sequence
  Description of Artificial Sequence: Synthetic oligonucleotide
caucauugaggacauuccg

SEQ ID NO: 782088 - RNA, 19 nt, Artificial Sequence
  Description of Artificial Sequence: Synthetic oligonucleotide
ugaagcgcccuucaauaag

SEQ ID NO: 782089 - RNA, 19 nt, Artificial Sequence
  Description of Artificial Sequence: Synthetic oligonucleotide
aaauaagaucauugacuga

SEQ ID NO: 782090 - RNA, 19 nt, Artificial Sequence
  Description of Artificial Sequence: Synthetic oligonucleotide
aggaagauuaucuuuucau

SEQ ID NO: 782091 - RNA, 19 nt, Artificial Sequence
  Description of Artificial Sequence: Synthetic oligonucleotide
uaucccaaaccuuauacuu

SEQ ID NO: 782092 - RNA, 19 nt, Artificial Sequence
  Description of Artificial Sequence: Synthetic oligonucleotide
uuuuaucacacaagcguaa

SEQ ID NO: 782093 - RNA, 19 nt, Artificial Sequence
  Description of Artificial Sequence: Synthetic oligonucleotide
ucacacaagcguaagguau

SEQ ID NO: 782094 - RNA, 19 nt, Artificial Sequence
  Description of Artificial Sequence: Synthetic oligonucleotide
aaaucguuucacugaggug

SEQ ID NO: 782095 - RNA, 19 nt, Artificial Sequence
  Description of Artificial Sequence: Synthetic oligonucleotide
uuauagcauugauguaucg

SEQ ID NO: 782096 - RNA, 19 nt, Artificial Sequence
  Description of Artificial Sequence: Synthetic oligonucleotide
ugguugaucggucacguuc

SEQ ID NO: 782097 - RNA, 19 nt, Artificial Sequence
  Description of Artificial Sequence: Synthetic oligonucleotide
uaacaaaucggcagagccu

SEQ ID NO: 782098 - RNA, 19 nt, Artificial Sequence
  Description of Artificial Sequence: Synthetic oligonucleotide
uccuaucucaauuuugguc

SEQ ID NO: 782099 - RNA, 19 nt, Artificial Sequence
  Description of Artificial Sequence: Synthetic oligonucleotide
uauagcauugauguaucga

SEQ ID NO: 782100 - RNA, 19 nt, Artificial Sequence
  Description of Artificial Sequence: Synthetic oligonucleotide
ugcauauugcaaauaucgu

SEQ ID NO: 782101 - RNA, 19 nt, Artificial Sequence
  Description of Artificial Sequence: Synthetic oligonucleotide
auaaaugaggccacccugg

SEQ ID NO: 782102 - RNA, 19 nt, Artificial Sequence
  Description of Artificial Sequence: Synthetic oligonucleotide
agagcaauuucugagauuu

SEQ ID NO: 782103 - RNA, 19 nt, Artificial Sequence
  Description of Artificial Sequence: Synthetic oligonucleotide
auugcuauaguaucauuua

SEQ ID NO: 782104 - RNA, 19 nt, Artificial Sequence
  Description of Artificial Sequence: Synthetic oligonucleotide
ucguacaauguuuucggca

SEQ ID NO: 782105 - RNA, 19 nt, Artificial Sequence
  Description of Artificial Sequence: Synthetic oligonucleotide
uuguauguucccacuaaac

SEQ ID NO: 782106 - RNA, 19 nt, Artificial Sequence
  Description of Artificial Sequence: Synthetic oligonucleotide
auuacaauggaggggaaga

SEQ ID NO: 782107 - RNA, 19 nt, Artificial Sequence
  Description of Artificial Sequence: Synthetic oligonucleotide
ugaaacaaccaagugucca

SEQ ID NO: 782108 - RNA, 19 nt, Artificial Sequence
  Description of Artificial Sequence: Synthetic oligonucleotide
caguuuuaucacacaagcg

SEQ ID NO: 782109 - RNA, 19 nt, Artificial Sequence
  Description of Artificial Sequence: Synthetic oligonucleotide
aaugucuuucugccuggag

SEQ ID NO: 782110 - RNA, 19 nt, Artificial Sequence
  Description of Artificial Sequence: Synthetic oligonucleotide
agagccuuacagcaucuuc

SEQ ID NO: 782111 - RNA, 19 nt, Artificial Sequence
  Description of Artificial Sequence: Synthetic oligonucleotide
aggauauugcaugaaucac

SEQ ID NO: 782112 - RNA, 19 nt, Artificial Sequence
  Description of Artificial Sequence: Synthetic oligonucleotide
uucguagagaagacguagc

SEQ ID NO: 782113 - RNA, 19 nt, Artificial Sequence
  Description of Artificial Sequence: Synthetic oligonucleotide
uuccgaaccugcauagucc

SEQ ID NO: 782114 - RNA, 19 nt, Artificial Sequence
  Description of Artificial Sequence: Synthetic oligonucleotide
aucgaacuuuaucaauuuc

SEQ ID NO: 782115 - RNA, 19 nt, Artificial Sequence
  Description of Artificial Sequence: Synthetic oligonucleotide
uugcuauaguaucauuuac

SEQ ID NO: 782116 - RNA, 19 nt, Artificial Sequence
  Description of Artificial Sequence: Synthetic oligonucleotide
uucuaaagcauaugaccac

SEQ ID NO: 782117 - RNA, 19 nt, Artificial Sequence
  Description of Artificial Sequence: Synthetic oligonucleotide
uccccuaaggguuuuccag

SEQ ID NO: 782118 - RNA, 19 nt, Artificial Sequence
  Description of Artificial Sequence: Synthetic oligonucleotide
augucuuucugccuggaga

SEQ ID NO: 782119 - RNA, 19 nt, Artificial Sequence
  Description of Artificial Sequence: Synthetic oligonucleotide
gagguuuuaaugaugagcu

SEQ ID NO: 782120 - RNA, 19 nt, Artificial Sequence
  Description of Artificial Sequence: Synthetic oligonucleotide
acaagcguaagguaugaaa

SEQ ID NO: 782121 - RNA, 19 nt, Artificial Sequence
  Description of Artificial Sequence: Synthetic oligonucleotide
aacuucggagaagaaauga

SEQ ID NO: 782122 - RNA, 19 nt, Artificial Sequence
  Description of Artificial Sequence: Synthetic oligonucleotide
uguaucgaacuuuaucaau

SEQ ID NO: 782123 - RNA, 19 nt, Artificial Sequence
  Description of Artificial Sequence: Synthetic oligonucleotide
cuaaagcauaugaccaccc

SEQ ID NO: 782124 - RNA, 19 nt, Artificial Sequence
  Description of Artificial Sequence: Synthetic oligonucleotide
uucccaguuauagagauua

SEQ ID NO: 782125 - RNA, 19 nt, Artificial Sequence
  Description of Artificial Sequence: Synthetic oligonucleotide
ugaggcugagaacuguaca

SEQ ID NO: 782126 - RNA, 19 nt, Artificial Sequence
  Description of Artificial Sequence: Synthetic oligonucleotide
gauaagcaagaacuguauc

SEQ ID NO: 782127 - RNA, 19 nt, Artificial Sequence
  Description of Artificial Sequence: Synthetic oligonucleotide
ucggcaguaaucauaucuc

SEQ ID NO: 782128 - RNA, 19 nt, Artificial Sequence
  Description of Artificial Sequence: Synthetic oligonucleotide
uagagaagacguagcacug

SEQ ID NO: 782129 - RNA, 19 nt, Artificial Sequence
  Description of Artificial Sequence: Synthetic oligonucleotide
auauugcaugaaucacacc

SEQ ID NO: 782130 - RNA, 19 nt, Artificial Sequence
  Description of Artificial Sequence: Synthetic oligonucleotide
uucccacuaaacauuaaua

SEQ ID NO: 782131 - RNA, 19 nt, Artificial Sequence
  Description of Artificial Sequence: Synthetic oligonucleotide
ucucgauuagcaacugcca

SEQ ID NO: 782132 - RNA, 19 nt, Artificial Sequence
  Description of Artificial Sequence: Synthetic oligonucleotide
auaacuaucccaaaccuua

SEQ ID NO: 782133 - RNA, 19 nt, Artificial Sequence
  Description of Artificial Sequence: Synthetic oligonucleotide
uuauuaguuuccuguuuac

SEQ ID NO: 782134 - RNA, 19 nt, Artificial Sequence
  Description of Artificial Sequence: Synthetic oligonucleotide
gaaucggguaucuugaagu

SEQ ID NO: 782135 - RNA, 19 nt, Artificial Sequence
  Description of Artificial Sequence: Synthetic oligonucleotide
gauaugcugacguguacca

SEQ ID NO: 782136 - RNA, 19 nt, Artificial Sequence
  Description of Artificial Sequence: Synthetic oligonucleotide
ugaggugauguagaggucu

SEQ ID NO: 782137 - RNA, 19 nt, Artificial Sequence
  Description of Artificial Sequence: Synthetic oligonucleotide
uaaucauaucucgauuagc

SEQ ID NO: 782138 - RNA, 19 nt, Artificial Sequence
  Description of Artificial Sequence: Synthetic oligonucleotide
augaccacccaguuuuauc

SEQ ID NO: 782139 - RNA, 19 nt, Artificial Sequence
  Description of Artificial Sequence: Synthetic oligonucleotide
agagggauguccgugucac

SEQ ID NO: 782140 - RNA, 19 nt, Artificial Sequence
  Description of Artificial Sequence: Synthetic oligonucleotide
ugggguaauaccacacugu

SEQ ID NO: 782141 - RNA, 19 nt, Artificial Sequence
  Description of Artificial Sequence: Synthetic oligonucleotide
aacaaaucggcagagccuu

SEQ ID NO: 782142 - RNA, 19 nt, Artificial Sequence
  Description of Artificial Sequence: Synthetic oligonucleotide
caccaauugcagcauaagc

SEQ ID NO: 782143 - RNA, 19 nt, Artificial Sequence
  Description of Artificial Sequence: Synthetic oligonucleotide
acauuccgaaccugcauag

SEQ ID NO: 782144 - RNA, 19 nt, Artificial Sequence
  Description of Artificial Sequence: Synthetic oligonucleotide
uguuuucggcaaaauuucu

SEQ ID NO: 782145 - RNA, 19 nt, Artificial Sequence
  Description of Artificial Sequence: Synthetic oligonucleotide
aaauaucguuuauuaguuu

SEQ ID NO: 782146 - RNA, 19 nt, Artificial Sequence
  Description of Artificial Sequence: Synthetic oligonucleotide
caauaagaaugcaaguaga

SEQ ID NO: 782147 - RNA, 19 nt, Artificial Sequence
  Description of Artificial Sequence: Synthetic oligonucleotide
cauugacugaguuccaauc

SEQ ID NO: 782148 - RNA, 19 nt, Artificial Sequence
  Description of Artificial Sequence: Synthetic oligonucleotide
cuucguagagaagacguag

SEQ ID NO: 782149 - RNA, 19 nt, Artificial Sequence
  Description of Artificial Sequence: Synthetic oligonucleotide
agcuauuucggcaguaauc

SEQ ID NO: 782150 - RNA, 19 nt, Artificial Sequence
  Description of Artificial Sequence: Synthetic oligonucleotide
guguucaugaggcugagaa

SEQ ID NO: 782151 - RNA, 19 nt, Artificial Sequence
  Description of Artificial Sequence: Synthetic oligonucleotide
agagauuaauguugaucug

SEQ ID NO: 782152 - RNA, 19 nt, Artificial Sequence
  Description of Artificial Sequence: Synthetic oligonucleotide
ugaucggucacguucuuua

SEQ ID NO: 782153 - RNA, 19 nt, Artificial Sequence
  Description of Artificial Sequence: Synthetic oligonucleotide
cuggauugcuugauaaaug

SEQ ID NO: 782154 - RNA, 19 nt, Artificial Sequence
  Description of Artificial Sequence: Synthetic oligonucleotide
auaaugcaucgacuggaag

SEQ ID NO: 782155 - RNA, 19 nt, Artificial Sequence
  Description of Artificial Sequence: Synthetic oligonucleotide
ucccagucuauuuggagac

SEQ ID NO: 782156 - RNA, 19 nt, Artificial Sequence
  Description of Artificial Sequence: Synthetic oligonucleotide
aaccuuauacuuacagucu

SEQ ID NO: 782157 - RNA, 19 nt, Artificial Sequence
  Description of Artificial Sequence: Synthetic oligonucleotide
uucaccaauugcagcauaa

SEQ ID NO: 782158 - RNA, 19 nt, Artificial Sequence
  Description of Artificial Sequence: Synthetic oligonucleotide
aucggguaucuugaagucc

SEQ ID NO: 782159 - RNA, 19 nt, Artificial Sequence
  Description of Artificial Sequence: Synthetic oligonucleotide
cagcauaagcuauuucggc

SEQ ID NO: 782160 - RNA, 19 nt, Artificial Sequence
  Description of Artificial Sequence: Synthetic oligonucleotide
ucugucucggaacuccagu

SEQ ID NO: 782161 - RNA, 19 nt, Artificial Sequence
  Description of Artificial Sequence: Synthetic oligonucleotide
caugguuccaaguuuaaua

SEQ ID NO: 782162 - RNA, 19 nt, Artificial Sequence
  Description of Artificial Sequence: Synthetic oligonucleotide
accuacaugagaaauuaca

SEQ ID NO: 782163 - RNA, 19 nt, Artificial Sequence
  Description of Artificial Sequence: Synthetic oligonucleotide
gaccacgugauauuaaaua

SEQ ID NO: 782164 - RNA, 19 nt, Artificial Sequence
  Description of Artificial Sequence: Synthetic oligonucleotide
acuuuagcauuuugguuga

SEQ ID NO: 782165 - RNA, 19 nt, Artificial Sequence
  Description of Artificial Sequence: Synthetic oligonucleotide
ggagaagaaaugaagcgcc

SEQ ID NO: 782166 - RNA, 19 nt, Artificial Sequence
  Description of Artificial Sequence: Synthetic oligonucleotide
auuucauucuuaugagaaa

SEQ ID NO: 782167 - RNA, 19 nt, Artificial Sequence
  Description of Artificial Sequence: Synthetic oligonucleotide
ugaaguccacaaaggauau

SEQ ID NO: 782168 - RNA, 19 nt, Artificial Sequence
  Description of Artificial Sequence: Synthetic oligonucleotide
uaaaugaggccacccugga

SEQ ID NO: 782169 - RNA, 19 nt, Artificial Sequence
  Description of Artificial Sequence: Synthetic oligonucleotide
agcguaagguaugaaauga

SEQ ID NO: 782170 - RNA, 19 nt, Artificial Sequence
  Description of Artificial Sequence: Synthetic oligonucleotide
uuauacuuacagucuucac

SEQ ID NO: 782171 - RNA, 19 nt, Artificial Sequence
  Description of Artificial Sequence: Synthetic oligonucleotide
auugggguaauaccacacu

SEQ ID NO: 782172 - RNA, 19 nt, Artificial Sequence
  Description of Artificial Sequence: Synthetic oligonucleotide
uucaaagaggaagauuauc

SEQ ID NO: 782173 - RNA, 19 nt, Artificial Sequence
  Description of Artificial Sequence: Synthetic oligonucleotide
gagaauuaagcuaacaguu

SEQ ID NO: 782174 - RNA, 19 nt, Artificial Sequence
  Description of Artificial Sequence: Synthetic oligonucleotide
ucacugaggugauguagag

SEQ ID NO: 782175 - RNA, 19 nt, Artificial Sequence
  Description of Artificial Sequence: Synthetic oligonucleotide
ucggcaaaauuucucuguc

SEQ ID NO: 782176 - RNA, 19 nt, Artificial Sequence
  Description of Artificial Sequence: Synthetic oligonucleotide
uccaaucgacuuuuaaaau

SEQ ID NO: 782177 - RNA, 19 nt, Artificial Sequence
  Description of Artificial Sequence: Synthetic oligonucleotide
ugacugaguuccaaucgac

SEQ ID NO: 782178 - RNA, 19 nt, Artificial Sequence
  Description of Artificial Sequence: Synthetic oligonucleotide
auuaauaugugggccauuu

SEQ ID NO: 782179 - RNA, 19 nt, Artificial Sequence
  Description of Artificial Sequence: Synthetic oligonucleotide
gcauaagcuauuucggcag

SEQ ID NO: 782180 - RNA, 19 nt, Artificial Sequence
  Description of Artificial Sequence: Synthetic oligonucleotide
guauuccaguucuucguag

SEQ ID NO: 782181 - RNA, 19 nt, Artificial Sequence
  Description of Artificial Sequence: Synthetic oligonucleotide
caguaaauccacagcauca

SEQ ID NO: 782182 - RNA, 19 nt, Artificial Sequence
  Description of Artificial Sequence: Synthetic oligonucleotide
auaaaugguauugggguaa

SEQ ID NO: 782183 - RNA, 19 nt, Artificial Sequence
  Description of Artificial Sequence: Synthetic oligonucleotide
uucucuucguuaguguuac

SEQ ID NO: 782184 - RNA, 19 nt, Artificial Sequence
  Description of Artificial Sequence: Synthetic oligonucleotide
uucguuaguguuacuugaa

SEQ ID NO: 782185 - RNA, 19 nt, Artificial Sequence
  Description of Artificial Sequence: Synthetic oligonucleotide
uaagugguguauuccaguu

SEQ ID NO: 782186 - RNA, 19 nt, Artificial Sequence
  Description of Artificial Sequence: Synthetic oligonucleotide
cugcgugccaucaauugac

SEQ ID NO: 782187 - RNA, 19 nt, Artificial Sequence
  Description of Artificial Sequence: Synthetic oligonucleotide
cuauaguaucauuuacuca

SEQ ID NO: 782188 - RNA, 19 nt, Artificial Sequence
  Description of Artificial Sequence: Synthetic oligonucleotide
aucguuuauuaguuuccug

SEQ ID NO: 782189 - RNA, 19 nt, Artificial Sequence
  Description of Artificial Sequence: Synthetic oligonucleotide
uuaaugacucugucucgga

SEQ ID NO: 782190 - RNA, 19 nt, Artificial Sequence
  Description of Artificial Sequence: Synthetic oligonucleotide
uaaugacucugucucggaa

SEQ ID NO: 782191 - RNA, 19 nt, Artificial Sequence
  Description of Artificial Sequence: Synthetic oligonucleotide
uucguacaauguuuucggc

SEQ ID NO: 782192 - RNA, 19 nt, Artificial Sequence
  Description of Artificial Sequence: Synthetic oligonucleotide
gcaugaaucacaccaugcc

SEQ ID NO: 782193 - RNA, 19 nt, Artificial Sequence
  Description of Artificial Sequence: Synthetic oligonucleotide
ucgauuagcaacugccaua

SEQ ID NO: 782194 - RNA, 19 nt, Artificial Sequence
  Description of Artificial Sequence: Synthetic oligonucleotide
cacacaagcguaagguaug

SEQ ID NO: 782195 - RNA, 19 nt, Artificial Sequence
  Description of Artificial Sequence: Synthetic oligonucleotide
uaucguuuauuaguuuccu

SEQ ID NO: 782196 - RNA, 19 nt, Artificial Sequence
  Description of Artificial Sequence: Synthetic oligonucleotide
auguaucgaacuuuaucaa

SEQ ID NO: 782197 - RNA, 19 nt, Artificial Sequence
  Description of Artificial Sequence: Synthetic oligonucleotide
uuuugacucuuuagaugga

SEQ ID NO: 782198 - RNA, 19 nt, Artificial Sequence
  Description of Artificial Sequence: Synthetic oligonucleotide
cauauugcaaauaucguuu

SEQ ID NO: 782199 - RNA, 19 nt, Artificial Sequence
  Description of Artificial Sequence: Synthetic oligonucleotide
cuucguuaguguuacuuga

SEQ ID NO: 782200 - RNA, 19 nt, Artificial Sequence
  Description of Artificial Sequence: Synthetic oligonucleotide
cucuuuagauggaagaucu

SEQ ID NO: 782201 - RNA, 19 nt, Artificial Sequence
  Description of Artificial Sequence: Synthetic oligonucleotide
acguugaaacaaccaagug

SEQ ID NO: 782202 - RNA, 19 nt, Artificial Sequence
  Description of Artificial Sequence: Synthetic oligonucleotide
cauaugaccacccaguuuu

SEQ ID NO: 782203 - RNA, 19 nt, Artificial Sequence
  Description of Artificial Sequence: Synthetic oligonucleotide
aaaucggcagagccuuaca

SEQ ID NO: 782204 - RNA, 19 nt, Artificial Sequence
  Description of Artificial Sequence: Synthetic oligonucleotide
aaacuucggagaagaaaug

SEQ ID NO: 782205 - RNA, 19 nt, Artificial Sequence
  Description of Artificial Sequence: Synthetic oligonucleotide
uccgaaccugcauaguccu

SEQ ID NO: 782206 - RNA, 19 nt, Artificial Sequence
  Description of Artificial Sequence: Synthetic oligonucleotide
aucauaucucgauuagcaa

SEQ ID NO: 782207 - RNA, 19 nt, Artificial Sequence
  Description of Artificial Sequence: Synthetic oligonucleotide
gcugacguguaccagggag

SEQ ID NO: 782208 - RNA, 19 nt, Artificial Sequence
  Description of Artificial Sequence: Synthetic oligonucleotide
aucgacuggaagaacaggu

SEQ ID NO: 782209 - RNA, 19 nt, Artificial Sequence
  Description of Artificial Sequence: Synthetic oligonucleotide
ucggucacguucuuuaguu

SEQ ID NO: 782210 - RNA, 19 nt, Artificial Sequence
  Description of Artificial Sequence: Synthetic oligonucleotide
ugucucggaacuccaguaa

SEQ ID NO: 782211 - RNA, 19 nt, Artificial Sequence
  Description of Artificial Sequence: Synthetic oligonucleotide
agauuaauguugaucugga

SEQ ID NO: 782212 - RNA, 19 nt, Artificial Sequence
  Description of Artificial Sequence: Synthetic oligonucleotide
cauaucucgauuagcaacu

SEQ ID NO: 782213 - RNA, 19 nt, Artificial Sequence
  Description of Artificial Sequence: Synthetic oligonucleotide
ccaaaccuuauacuuacag

SEQ ID NO: 782214 - RNA, 19 nt, Artificial Sequence
  Description of Artificial Sequence: Synthetic oligonucleotide
cuugauaaaugaggccacc

SEQ ID NO: 782215 - RNA, 19 nt, Artificial Sequence
  Description of Artificial Sequence: Synthetic oligonucleotide
aguaaauccacagcaucau

SEQ ID NO: 782216 - RNA, 19 nt, Artificial Sequence
  Description of Artificial Sequence: Synthetic oligonucleotide
aaacaacucuccaucugga

SEQ ID NO: 782217 - RNA, 19 nt, Artificial Sequence
  Description of Artificial Sequence: Synthetic oligonucleotide
gcuauuucggcaguaauca

SEQ ID NO: 782218 - RNA, 19 nt, Artificial Sequence
  Description of Artificial Sequence: Synthetic oligonucleotide
gcagcauaagcuauuucgg

SEQ ID NO: 782219 - RNA, 19 nt, Artificial Sequence
  Description of Artificial Sequence: Synthetic oligonucleotide
caggcaacugaggucauag

SEQ ID NO: 782220 - RNA, 19 nt, Artificial Sequence
  Description of Artificial Sequence: Synthetic oligonucleotide
accuuauacuuacagucuu

SEQ ID NO: 782221 - RNA, 19 nt, Artificial Sequence
  Description of Artificial Sequence: Synthetic oligonucleotide
ucuuucguacaauguuuuc

SEQ ID NO: 782222 - RNA, 19 nt, Artificial Sequence
  Description of Artificial Sequence: Synthetic oligonucleotide
aguacacggccauaacuau

SEQ ID NO: 782223 - RNA, 19 nt, Artificial Sequence
  Description of Artificial Sequence: Synthetic oligonucleotide
agaagaaaugaagcgcccu

SEQ ID NO: 782224 - RNA, 19 nt, Artificial Sequence
  Description of Artificial Sequence: Synthetic oligonucleotide
uuccuaucucaauuuuggu

SEQ ID NO: 782225 - RNA, 19 nt, Artificial Sequence
  Description of Artificial Sequence: Synthetic oligonucleotide
cagggauacagucugugca

SEQ ID NO: 782226 - RNA, 19 nt, Artificial Sequence
  Description of Artificial Sequence: Synthetic oligonucleotide
ucuucguagagaagacgua

SEQ ID NO: 782227 - RNA, 19 nt, Artificial Sequence
  Description of Artificial Sequence: Synthetic oligonucleotide
ugaaucacaccaugccaau

SEQ ID NO: 782228 - RNA, 19 nt, Artificial Sequence
  Description of Artificial Sequence: Synthetic oligonucleotide
agggauguccgugucacug

SEQ ID NO: 782229 - RNA, 19 nt, Artificial Sequence
  Description of Artificial Sequence: Synthetic oligonucleotide
gggguaauaccacacugug

SEQ ID NO: 782230 - RNA, 19 nt, Artificial Sequence
  Description of Artificial Sequence: Synthetic oligonucleotide
gccaauguaugcaccaugg

SEQ ID NO: 782231 - RNA, 19 nt, Artificial Sequence
  Description of Artificial Sequence: Synthetic oligonucleotide
uggggauaugcugacgugu

SEQ ID NO: 782232 - RNA, 19 nt, Artificial Sequence
  Description of Artificial Sequence: Synthetic oligonucleotide
uaacuaucccaaaccuuau

SEQ ID NO: 782233 - RNA, 19 nt, Artificial Sequence
  Description of Artificial Sequence: Synthetic oligonucleotide
caaaucguuucacugaggu

SEQ ID NO: 782234 - RNA, 19 nt, Artificial Sequence
  Description of Artificial Sequence: Synthetic oligonucleotide
uuaauaugugggccauuuu

SEQ ID NO: 782235 - RNA, 19 nt, Artificial Sequence
  Description of Artificial Sequence: Synthetic oligonucleotide
uacuuacagucuucaccag

SEQ ID NO: 782236 - RNA, 19 nt, Artificial Sequence
  Description of Artificial Sequence: Synthetic oligonucleotide
gaaugcaaguagauaccac

SEQ ID NO: 782237 - RNA, 19 nt, Artificial Sequence
  Description of Artificial Sequence: Synthetic oligonucleotide
ugaggucauaggguguuca

SEQ ID NO: 782238 - RNA, 19 nt, Artificial Sequence
  Description of Artificial Sequence: Synthetic oligonucleotide
ugcgugccaucaauugacc

SEQ ID NO: 782239 - RNA, 19 nt, Artificial Sequence
  Description of Artificial Sequence: Synthetic oligonucleotide
uagagggauguccguguca

SEQ ID NO: 782240 - RNA, 19 nt, Artificial Sequence
  Description of Artificial Sequence: Synthetic oligonucleotide
gucauaggguguucaugag

SEQ ID NO: 782241 - RNA, 19 nt, Artificial Sequence
  Description of Artificial Sequence: Synthetic oligonucleotide
acuuuagagggauguccgu

SEQ ID NO: 782242 - RNA, 19 nt, Artificial Sequence
  Description of Artificial Sequence: Synthetic oligonucleotide
caagcguaagguaugaaau

SEQ ID NO: 782243 - RNA, 19 nt, Artificial Sequence
  Description of Artificial Sequence: Synthetic oligonucleotide
caguacacggccauaacua

SEQ ID NO: 782244 - RNA, 19 nt, Artificial Sequence
  Description of Artificial Sequence: Synthetic oligonucleotide
cauaaaugguauuggggua

SEQ ID NO: 782245 - RNA, 19 nt, Artificial Sequence
  Description of Artificial Sequence: Synthetic oligonucleotide
ggauaugcugacguguacc

SEQ ID NO: 782246 - RNA, 19 nt, Artificial Sequence
  Description of Artificial Sequence: Synthetic oligonucleotide
ggauauugcaugaaucaca

SEQ ID NO: 782247 - RNA, 19 nt, Artificial Sequence
  Description of Artificial Sequence: Synthetic oligonucleotide
gacguugaaacaaccaagu

SEQ ID NO: 782248 - RNA, 19 nt, Artificial Sequence
  Description of Artificial Sequence: Synthetic oligonucleotide
gaagcgcccuucaauaaga

SEQ ID NO: 782249 - RNA, 19 nt, Artificial Sequence
  Description of Artificial Sequence: Synthetic oligonucleotide
cccguuuccacgaucugcg

SEQ ID NO: 782250 - RNA, 19 nt, Artificial Sequence
  Description of Artificial Sequence: Synthetic oligonucleotide
ugugcgugagcuccauaau

SEQ ID NO: 782251 - RNA, 19 nt, Artificial Sequence
  Description of Artificial Sequence: Synthetic oligonucleotide
gaaucacaccaugccaaug

SEQ ID NO: 782252 - RNA, 19 nt, Artificial Sequence
  Description of Artificial Sequence: Synthetic oligonucleotide
caucgacuggaagaacagg

SEQ ID NO: 782253 - RNA, 19 nt, Artificial Sequence
  Description of Artificial Sequence: Synthetic oligonucleotide
cgaacuuuaucaauuucac

SEQ ID NO: 782254 - RNA, 19 nt, Artificial Sequence
  Description of Artificial Sequence: Synthetic oligonucleotide
auggggauaugcugacgug

SEQ ID NO: 782255 - RNA, 19 nt, Artificial Sequence
  Description of Artificial Sequence: Synthetic oligonucleotide
accacccaguuuuaucaca

SEQ ID NO: 782256 - RNA, 19 nt, Artificial Sequence
  Description of Artificial Sequence: Synthetic oligonucleotide
guccgugucacuguuaaaa

SEQ ID NO: 782257 - RNA, 19 nt, Artificial Sequence
  Description of Artificial Sequence: Synthetic oligonucleotide
augcugacguguaccaggg

SEQ ID NO: 782258 - RNA, 19 nt, Artificial Sequence
  Description of Artificial Sequence: Synthetic oligonucleotide
acggccauaacuaucccaa

SEQ ID NO: 782259 - RNA, 19 nt, Artificial Sequence
  Description of Artificial Sequence: Synthetic oligonucleotide
acgauaagcaagaacugua

SEQ ID NO: 782260 - RNA, 19 nt, Artificial Sequence
  Description of Artificial Sequence: Synthetic oligonucleotide
ccacgugauauuaaauaug

SEQ ID NO: 782261 - RNA, 19 nt, Artificial Sequence
  Description of Artificial Sequence: Synthetic oligonucleotide
caucaauugaccacgugau

SEQ ID NO: 782262 - RNA, 19 nt, Artificial Sequence
  Description of Artificial Sequence: Synthetic oligonucleotide
cauagcugcuaggcaagcc

SEQ ID NO: 782263 - RNA, 19 nt, Artificial Sequence
  Description of Artificial Sequence: Synthetic oligonucleotide
gacgauaagcaagaacugu

SEQ ID NO: 782264 - RNA, 19 nt, Artificial Sequence
  Description of Artificial Sequence: Synthetic oligonucleotide
ggagaccuucugcauauug

SEQ ID NO: 782265 - RNA, 19 nt, Artificial Sequence
  Description of Artificial Sequence: Synthetic oligonucleotide
cuacaugagaaauuacaau

SEQ ID NO: 782266 - RNA, 19 nt, Artificial Sequence
  Description of Artificial Sequence: Synthetic oligonucleotide
uccaugguucaaagacgcu

SEQ ID NO: 782267 - RNA, 19 nt, Artificial Sequence
  Description of Artificial Sequence: Synthetic oligonucleotide
aggucauaggguguucaug

SEQ ID NO: 782268 - RNA, 19 nt, Artificial Sequence
  Description of Artificial Sequence: Synthetic oligonucleotide
cauaaugcaucgacuggaa

SEQ ID NO: 782269 - RNA, 19 nt, Artificial Sequence
  Description of Artificial Sequence: Synthetic oligonucleotide
auaugcugacguguaccag

SEQ ID NO: 782270 - RNA, 19 nt, Artificial Sequence
  Description of Artificial Sequence: Synthetic oligonucleotide
cccaaaucguuucacugag

SEQ ID NO: 782271 - RNA, 19 nt, Artificial Sequence
  Description of Artificial Sequence: Synthetic oligonucleotide
ccuacaugagaaauuacaa

SEQ ID NO: 782272 - RNA, 19 nt, Artificial Sequence
  Description of Artificial Sequence: Synthetic oligonucleotide
aucaauugaccacgugaua

SEQ ID NO: 782273 - RNA, 19 nt, Artificial Sequence
  Description of Artificial Sequence: Synthetic oligonucleotide
auaagaucauugacugagu

SEQ ID NO: 782274 - RNA, 19 nt, Artificial Sequence
  Description of Artificial Sequence: Synthetic oligonucleotide
ggauugcuugauaaaugag

SEQ ID NO: 782275 - RNA, 19 nt, Artificial Sequence
  Description of Artificial Sequence: Synthetic oligonucleotide
auaggguguucaugaggcu

SEQ ID NO: 782276 - RNA, 19 nt, Artificial Sequence
  Description of Artificial Sequence: Synthetic oligonucleotide
acguguaccagggagccau

SEQ ID NO: 782277 - RNA, 19 nt, Artificial Sequence
  Description of Artificial Sequence: Synthetic oligonucleotide
ugcuucaaagaggaagauu

SEQ ID NO: 782278 - RNA, 19 nt, Artificial Sequence
  Description of Artificial Sequence: Synthetic oligonucleotide
caaaucggcagagccuuac

SEQ ID NO: 782279 - RNA, 19 nt, Artificial Sequence
  Description of Artificial Sequence: Synthetic oligonucleotide
ucacguucuuuaguuaauu

SEQ ID NO: 782280 - RNA, 19 nt, Artificial Sequence
  Description of Artificial Sequence: Synthetic oligonucleotide
ggucacguucuuuaguuaa

SEQ ID NO: 782281 - RNA, 19 nt, Artificial Sequence
  Description of Artificial Sequence: Synthetic oligonucleotide
aacugaggucauagggugu

SEQ ID NO: 782282 - RNA, 19 nt, Artificial Sequence
  Description of Artificial Sequence: Synthetic oligonucleotide
guucccacuaaacauuaau

SEQ ID NO: 782283 - RNA, 19 nt, Artificial Sequence
  Description of Artificial Sequence: Synthetic oligonucleotide
auaucucgauuagcaacug

SEQ ID NO: 782284 - RNA, 19 nt, Artificial Sequence
  Description of Artificial Sequence: Synthetic oligonucleotide
uuucccaguuauagagauu

SEQ ID NO: 782285 - RNA, 19 nt, Artificial Sequence
  Description of Artificial Sequence: Synthetic oligonucleotide
cauccccuaaggguuuucc

SEQ ID NO: 782286 - RNA, 19 nt, Artificial Sequence
  Description of Artificial Sequence: Synthetic oligonucleotide
uaaaugguauugggguaau

SEQ ID NO: 782287 - RNA, 19 nt, Artificial Sequence
  Description of Artificial Sequence: Synthetic oligonucleotide
cuaucccaaaccuuauacu

SEQ ID NO: 782288 - RNA, 19 nt, Artificial Sequence
  Description of Artificial Sequence: Synthetic oligonucleotide
gacgcuuuaaugacucugu

SEQ ID NO: 782289 - RNA, 19 nt, Artificial Sequence
  Description of Artificial Sequence: Synthetic oligonucleotide
ugccaucaauugaccacgu

SEQ ID NO: 782290 - RNA, 19 nt, Artificial Sequence
  Description of Artificial Sequence: Synthetic oligonucleotide
uuuugacgauaagcaagaa

SEQ ID NO: 782291 - RNA, 19 nt, Artificial Sequence
  Description of Artificial Sequence: Synthetic oligonucleotide
aaauuacaauggaggggaa

SEQ ID NO: 782292 - RNA, 19 nt, Artificial Sequence
  Description of Artificial Sequence: Synthetic oligonucleotide
caaaggauauugcaugaau

SEQ ID NO: 782293 - RNA, 19 nt, Artificial Sequence
  Description of Artificial Sequence: Synthetic oligonucleotide
uaugaccacccaguuuuau

SEQ ID NO: 782294 - RNA, 19 nt, Artificial Sequence
  Description of Artificial Sequence: Synthetic oligonucleotide
uuuccacgaucugcgugcc

SEQ ID NO: 782295 - RNA, 19 nt, Artificial Sequence
  Description of Artificial Sequence: Synthetic oligonucleotide
gacucuuuagauggaagau

SEQ ID NO: 782296 - RNA, 19 nt, Artificial Sequence
  Description of Artificial Sequence: Synthetic oligonucleotide
aggguguucaugaggcuga

SEQ ID NO: 782297 - RNA, 19 nt, Artificial Sequence
  Description of Artificial Sequence: Synthetic oligonucleotide
guacaguacacggccauaa

SEQ ID NO: 782298 - RNA, 19 nt, Artificial Sequence
  Description of Artificial Sequence: Synthetic oligonucleotide
acacaagcguaagguauga

SEQ ID NO: 782299 - RNA, 19 nt, Artificial Sequence
  Description of Artificial Sequence: Synthetic oligonucleotide
uguacaguacacggccaua

SEQ ID NO: 782300 - RNA, 19 nt, Artificial Sequence
  Description of Artificial Sequence: Synthetic oligonucleotide
ccaaucgacuuuuaaaaua

SEQ ID NO: 782301 - RNA, 19 nt, Artificial Sequence
  Description of Artificial Sequence: Synthetic oligonucleotide
cgauuagcaacugccauag

SEQ ID NO: 782302 - RNA, 19 nt, Artificial Sequence
  Description of Artificial Sequence: Synthetic oligonucleotide
gcauauugcaaauaucguu

SEQ ID NO: 782303 - RNA, 19 nt, Artificial Sequence
  Description of Artificial Sequence: Synthetic oligonucleotide
cggagaagaaaugaagcgc

SEQ ID NO: 782304 - RNA, 19 nt, Artificial Sequence
  Description of Artificial Sequence: Synthetic oligonucleotide
cuguccacauaaaugguau

SEQ ID NO: 782305 - RNA, 19 nt, Artificial Sequence
  Description of Artificial Sequence: Synthetic oligonucleotide
augcccguuuccacgaucu

SEQ ID NO: 782306 - RNA, 19 nt, Artificial Sequence
  Description of Artificial Sequence: Synthetic oligonucleotide
ccuuauacuuacagucuuc

SEQ ID NO: 782307 - RNA, 19 nt, Artificial Sequence
  Description of Artificial Sequence: Synthetic oligonucleotide
acgugauauuaaauaugcu

SEQ ID NO: 782308 - RNA, 19 nt, Artificial Sequence
  Description of Artificial Sequence: Synthetic oligonucleotide
guaugcaccaugguuccaa

SEQ ID NO: 782309 - RNA, 19 nt, Artificial Sequence
  Description of Artificial Sequence: Synthetic oligonucleotide
augcaucgacuggaagaac

SEQ ID NO: 782310 - RNA, 19 nt, Artificial Sequence
  Description of Artificial Sequence: Synthetic oligonucleotide
guugagugugcgugagcuc

SEQ ID NO: 782311 - RNA, 19 nt, Artificial Sequence
  Description of Artificial Sequence: Synthetic oligonucleotide
cauaacuaucccaaaccuu

SEQ ID NO: 782312 - RNA, 19 nt, Artificial Sequence
  Description of Artificial Sequence: Synthetic oligonucleotide
aguacugucucagccucuu

SEQ ID NO: 782313 - RNA, 19 nt, Artificial Sequence
  Description of Artificial Sequence: Synthetic oligonucleotide
gcaggguauggggauaugc

SEQ ID NO: 782314 - RNA, 19 nt, Artificial Sequence
  Description of Artificial Sequence: Synthetic oligonucleotide
aaaugguauugggguaaua

SEQ ID NO: 782315 - RNA, 19 nt, Artificial Sequence
  Description of Artificial Sequence: Synthetic oligonucleotide
gcaguaaucauaucucgau

SEQ ID NO: 782316 - RNA, 19 nt, Artificial Sequence
  Description of Artificial Sequence: Synthetic oligonucleotide
gcaucgacuggaagaacag

SEQ ID NO: 782317 - RNA, 19 nt, Artificial Sequence
  Description of Artificial Sequence: Synthetic oligonucleotide
auugaccacgugauauuaa

SEQ ID NO: 782318 - RNA, 19 nt, Artificial Sequence
  Description of Artificial Sequence: Synthetic oligonucleotide
caccaugguuccaaguuua

SEQ ID NO: 782319 - RNA, 19 nt, Artificial Sequence
  Description of Artificial Sequence: Synthetic oligonucleotide
ccaaaucguuucacugagg

SEQ ID NO: 782320 - RNA, 19 nt, Artificial Sequence
  Description of Artificial Sequence: Synthetic oligonucleotide
acuguacaguacacggcca

SEQ ID NO: 782321 - RNA, 19 nt, Artificial Sequence
  Description of Artificial Sequence: Synthetic oligonucleotide
uagauaccaccaccaucua

SEQ ID NO: 782322 - RNA, 19 nt, Artificial Sequence
  Description of Artificial Sequence: Synthetic oligonucleotide
ugcccguuuccacgaucug

SEQ ID NO: 782323 - RNA, 19 nt, Artificial Sequence
  Description of Artificial Sequence: Synthetic oligonucleotide
guacacggccauaacuauc

SEQ ID NO: 782324 - RNA, 19 nt, Artificial Sequence
  Description of Artificial Sequence: Synthetic oligonucleotide
gccuggagaauuaagcuaa

SEQ ID NO: 782325 - RNA, 19 nt, Artificial Sequence
  Description of Artificial Sequence: Synthetic oligonucleotide
gcugagaacuguacaguac

SEQ ID NO: 782326 - RNA, 19 nt, Artificial Sequence
  Description of Artificial Sequence: Synthetic oligonucleotide
cuggagaauuaagcuaaca

SEQ ID NO: 782327 - RNA, 19 nt, Artificial Sequence
  Description of Artificial Sequence: Synthetic oligonucleotide
ggcaguaaucauaucucga

SEQ ID NO: 782328 - RNA, 19 nt, Artificial Sequence
  Description of Artificial Sequence: Synthetic oligonucleotide
agccucuuguauguuccca

SEQ ID NO: 782329 - RNA, 19 nt, Artificial Sequence
  Description of Artificial Sequence: Synthetic oligonucleotide
gcaaagacaacaugcccgu

SEQ ID NO: 782330 - RNA, 19 nt, Artificial Sequence
  Description of Artificial Sequence: Synthetic oligonucleotide
guuucacugaggugaugua

SEQ ID NO: 782331 - RNA, 19 nt, Artificial Sequence
  Description of Artificial Sequence: Synthetic oligonucleotide
cugucucggaacuccagua

SEQ ID NO: 782332 - RNA, 19 nt, Artificial Sequence
  Description of Artificial Sequence: Synthetic oligonucleotide
gcauuuugguugaagaggu

SEQ ID NO: 782333 - RNA, 19 nt, Artificial Sequence
  Description of Artificial Sequence: Synthetic oligonucleotide
caugcccguuuccacgauc

SEQ ID NO: 782334 - RNA, 19 nt, Artificial Sequence
  Description of Artificial Sequence: Synthetic oligonucleotide
ccaugccaauguaugcacc

SEQ ID NO: 782335 - RNA, 19 nt, Artificial Sequence
  Description of Artificial Sequence: Synthetic oligonucleotide
ggcaauguuuccagguuga

SEQ ID NO: 782336 - RNA, 19 nt, Artificial Sequence
  Description of Artificial Sequence: Synthetic oligonucleotide
gguugagugugcgugagcu

SEQ ID NO: 782337 - RNA, 19 nt, Artificial Sequence
  Description of Artificial Sequence: Synthetic oligonucleotide
ccauaaugcaucgacugga

SEQ ID NO: 782338 - RNA, 19 nt, Artificial Sequence
  Description of Artificial Sequence: Synthetic oligonucleotide
gugaaucggguaucuugaa

SEQ ID NO: 782339 - RNA, 19 nt, Artificial Sequence
  Description of Artificial Sequence: Synthetic oligonucleotide
cucgauuagcaacugccau

SEQ ID NO: 782340 - RNA, 19 nt, Artificial Sequence
  Description of Artificial Sequence: Synthetic oligonucleotide
gggauaugcugacguguac

SEQ ID NO: 782341 - RNA, 19 nt, Artificial Sequence
  Description of Artificial Sequence: Synthetic oligonucleotide
gcuccuuaacaaaucggca

SEQ ID NO: 782342 - RNA, 19 nt, Artificial Sequence
  Description of Artificial Sequence: Synthetic oligonucleotide
uugaucggucacguucuuu

SEQ ID NO: 782343 - RNA, 19 nt, Artificial Sequence
  Description of Artificial Sequence: Synthetic oligonucleotide
ucucuucguuaguguuacu

SEQ ID NO: 782344 - RNA, 19 nt, Artificial Sequence
  Description of Artificial Sequence: Synthetic oligonucleotide
acgaucugcgugccaucaa

SEQ ID NO: 782345 - RNA, 19 nt, Artificial Sequence
  Description of Artificial Sequence: Synthetic oligonucleotide
cuaggcaagcccacaugcu

SEQ ID NO: 782346 - RNA, 19 nt, Artificial Sequence
  Description of Artificial Sequence: Synthetic oligonucleotide
gcaacugaggucauagggu

SEQ ID NO: 782347 - RNA, 19 nt, Artificial Sequence
  Description of Artificial Sequence: Synthetic oligonucleotide
ucguuucacugaggugaug

SEQ ID NO: 782348 - RNA, 19 nt, Artificial Sequence
  Description of Artificial Sequence: Synthetic oligonucleotide
ccuaaggguuuuccaguug

SEQ ID NO: 782349 - RNA, 19 nt, Artificial Sequence
  Description of Artificial Sequence: Synthetic oligonucleotide
aucguuucacugaggugau

SEQ ID NO: 782350 - RNA, 19 nt, Artificial Sequence
  Description of Artificial Sequence: Synthetic oligonucleotide
cauaagcuauuucggcagu

SEQ ID NO: 782351 - RNA, 19 nt, Artificial Sequence
  Description of Artificial Sequence: Synthetic oligonucleotide
gcccguuuccacgaucugc

SEQ ID NO: 782352 - RNA, 19 nt, Artificial Sequence
  Description of Artificial Sequence: Synthetic oligonucleotide
ccauaacuaucccaaaccu

SEQ ID NO: 782353 - RNA, 19 nt, Artificial Sequence
  Description of Artificial Sequence: Synthetic oligonucleotide
gccaucaauugaccacgug

SEQ ID NO: 782354 - RNA, 19 nt, Artificial Sequence
  Description of Artificial Sequence: Synthetic oligonucleotide
ggguaauaccacacuguga

SEQ ID NO: 782355 - RNA, 19 nt, Artificial Sequence
  Description of Artificial Sequence: Synthetic oligonucleotide
gucauugguaaguccuuuu

SEQ ID NO: 782356 - RNA, 19 nt, Artificial Sequence
  Description of Artificial Sequence: Synthetic oligonucleotide
caguaaucauaucucgauu

SEQ ID NO: 782357 - RNA, 19 nt, Artificial Sequence
  Description of Artificial Sequence: Synthetic oligonucleotide
gguugaucggucacguucu

SEQ ID NO: 782358 - RNA, 19 nt, Artificial Sequence
  Description of Artificial Sequence: Synthetic oligonucleotide
cacguucuuuaguuaauuu

SEQ ID NO: 782359 - RNA, 19 nt, Artificial Sequence
  Description of Artificial Sequence: Synthetic oligonucleotide
gcgugagcuccauaaugca

SEQ ID NO: 782360 - RNA, 19 nt, Artificial Sequence
  Description of Artificial Sequence: Synthetic oligonucleotide
cguuuccacgaucugcgug

SEQ ID NO: 782361 - RNA, 19 nt, Artificial Sequence
  Description of Artificial Sequence: Synthetic oligonucleotide
ccuuacagcaucuucccau

SEQ ID NO: 782362 - RNA, 19 nt, Artificial Sequence
  Description of Artificial Sequence: Synthetic oligonucleotide
gcgugccaucaauugacca

SEQ ID NO: 782363 - RNA, 19 nt, Artificial Sequence
  Description of Artificial Sequence: Synthetic oligonucleotide
aggaaacuucggagaagaa

SEQ ID NO: 782364 - RNA, 19 nt, Artificial Sequence
  Description of Artificial Sequence: Synthetic oligonucleotide
acaugcccguuuccacgau

SEQ ID NO: 782365 - RNA, 19 nt, Artificial Sequence
  Description of Artificial Sequence: Synthetic oligonucleotide
cuauuucggcaguaaucau

SEQ ID NO: 782366 - RNA, 19 nt, Artificial Sequence
  Description of Artificial Sequence: Synthetic oligonucleotide
gcaacugccauagcugcua

SEQ ID NO: 782367 - RNA, 19 nt, Artificial Sequence
  Description of Artificial Sequence: Synthetic oligonucleotide
gacguguaccagggagcca

SEQ ID NO: 782368 - RNA, 19 nt, Artificial Sequence
  Description of Artificial Sequence: Synthetic oligonucleotide
auaugaccacccaguuuua

SEQ ID NO: 782369 - RNA, 19 nt, Artificial Sequence
  Description of Artificial Sequence: Synthetic oligonucleotide
gaucugcgugccaucaauu

SEQ ID NO: 782370 - RNA, 19 nt, Artificial Sequence
  Description of Artificial Sequence: Synthetic oligonucleotide
gucacguucuuuaguuaau

SEQ ID NO: 782371 - RNA, 19 nt, Artificial Sequence
  Description of Artificial Sequence: Synthetic oligonucleotide
ggggauaugcugacgugua

SEQ ID NO: 782372 - RNA, 19 nt, Artificial Sequence
  Description of Artificial Sequence: Synthetic oligonucleotide
cccagucuauuuggagacc

SEQ ID NO: 782373 - RNA, 19 nt, Artificial Sequence
  Description of Artificial Sequence: Synthetic oligonucleotide
cacaagcguaagguaugaa

SEQ ID NO: 782374 - RNA, 19 nt, Artificial Sequence
  Description of Artificial Sequence: Synthetic oligonucleotide
acaaaucggcagagccuua

SEQ ID NO: 782375 - RNA, 19 nt, Artificial Sequence
  Description of Artificial Sequence: Synthetic oligonucleotide
gcauaugaccacccaguuu

SEQ ID NO: 782376 - RNA, 19 nt, Artificial Sequence
  Description of Artificial Sequence: Synthetic oligonucleotide
gcugguugaucggucacgu

SEQ ID NO: 782377 - RNA, 19 nt, Artificial Sequence
  Description of Artificial Sequence: Synthetic oligonucleotide
cguuucacugaggugaugu

SEQ ID NO: 782378 - RNA, 19 nt, Artificial Sequence
  Description of Artificial Sequence: Synthetic oligonucleotide
cgauaagcaagaacuguau

SEQ ID NO: 782379 - RNA, 19 nt, Artificial Sequence
  Description of Artificial Sequence: Synthetic oligonucleotide
ccagucuauuuggagaccu

SEQ ID NO: 782380 - RNA, 19 nt, Artificial Sequence
  Description of Artificial Sequence: Synthetic oligonucleotide
gaguuccaaucgacuuuua

SEQ ID NO: 782381 - RNA, 19 nt, Artificial Sequence
  Description of Artificial Sequence: Synthetic oligonucleotide
guagcacugaagagacguu

SEQ ID NO: 782382 - RNA, 19 nt, Artificial Sequence
  Description of Artificial Sequence: Synthetic oligonucleotide
cccaaaccuuauacuuaca

SEQ ID NO: 782383 - RNA, 19 nt, Artificial Sequence
  Description of Artificial Sequence: Synthetic oligonucleotide
cagucuauuuggagaccuu

SEQ ID NO: 782384 - RNA, 19 nt, Artificial Sequence
  Description of Artificial Sequence: Synthetic oligonucleotide
ccccuaaggguuuuccagu

SEQ ID NO: 782385 - RNA, 19 nt, Artificial Sequence
  Description of Artificial Sequence: Synthetic oligonucleotide
guugaucggucacguucuu

SEQ ID NO: 782386 - RNA, 19 nt, Artificial Sequence
  Description of Artificial Sequence: Synthetic oligonucleotide
gcguaagguaugaaaugau

SEQ ID NO: 782387 - RNA, 19 nt, Artificial Sequence
  Description of Artificial Sequence: Synthetic oligonucleotide
cccaguuauagagauuaau

SEQ ID NO: 782388 - RNA, 19 nt, Artificial Sequence
  Description of Artificial Sequence: Synthetic oligonucleotide
cauuaauaugugggccauu

SEQ ID NO: 782389 - RNA, 19 nt, Artificial Sequence
  Description of Artificial Sequence: Synthetic oligonucleotide
cggguaucuugaaguccac

SEQ ID NO: 782390 - RNA, 19 nt, Artificial Sequence
  Description of Artificial Sequence: Synthetic oligonucleotide
gagugugcgugagcuccau

SEQ ID NO: 782391 - RNA, 19 nt, Artificial Sequence
  Description of Artificial Sequence: Synthetic oligonucleotide
cccuaaggguuuuccaguu

SEQ ID NO: 782392 - RNA, 19 nt, Artificial Sequence
  Description of Artificial Sequence: Synthetic oligonucleotide
caaagacaacaugcccguu

SEQ ID NO: 782393 - RNA, 19 nt, Artificial Sequence
  Description of Artificial Sequence: Synthetic oligonucleotide
gugguguauuccaguucuu

SEQ ID NO: 782394 - RNA, 19 nt, Artificial Sequence
  Description of Artificial Sequence: Synthetic oligonucleotide
cgaucugcgugccaucaau

SEQ ID NO: 782395 - RNA, 19 nt, Artificial Sequence
  Description of Artificial Sequence: Synthetic oligonucleotide
ccaugguuccaaguuuaau

SEQ ID NO: 782396 - RNA, 19 nt, Artificial Sequence
  Description of Artificial Sequence: Synthetic oligonucleotide
cggucacguucuuuaguua

SEQ ID NO: 782397 - RNA, 19 nt, Artificial Sequence
  Description of Artificial Sequence: Synthetic oligonucleotide
ccaggcaacugaggucaua

SEQ ID NO: 782398 - RNA, 19 nt, Artificial Sequence
  Description of Artificial Sequence: Synthetic oligonucleotide
ccgaaccugcauaguccuu

SEQ ID NO: 782399 - RNA, 19 nt, Artificial Sequence
  Description of Artificial Sequence: Synthetic oligonucleotide
cggcagagccuuacagcau

SEQ ID NO: 782400 - RNA, 19 nt, Artificial Sequence
  Description of Artificial Sequence: Synthetic oligonucleotide
agguaugucaacuugaggg

SEQ ID NO: 782401 - RNA, 19 nt, Artificial Sequence
  Description of Artificial Sequence: Synthetic oligonucleotide
agaucuuucaaggacaacc

SEQ ID NO: 782402 - RNA, 19 nt, Artificial Sequence
  Description of Artificial Sequence: Synthetic oligonucleotide
aaucccauagguuuguaag

SEQ ID NO: 782403 - RNA, 19 nt, Artificial Sequence
  Description of Artificial Sequence: Synthetic oligonucleotide
uuauaaugaauccuaaggu

SEQ ID NO: 782404 - RNA, 19 nt, Artificial Sequence
  Description of Artificial Sequence: Synthetic oligonucleotide
uuaagagucgcucauuugc

SEQ ID NO: 782405 - RNA, 19 nt, Artificial Sequence
  Description of Artificial Sequence: Synthetic oligonucleotide
aaguacuacuuucuguccc

SEQ ID NO: 782406 - RNA, 19 nt, Artificial Sequence
  Description of Artificial Sequence: Synthetic oligonucleotide
uauaaugaauccuaaggug

SEQ ID NO: 782407 - RNA, 19 nt, Artificial Sequence
  Description of Artificial Sequence: Synthetic oligonucleotide
uuugguaccguacuuaaca

SEQ ID NO: 782408 - RNA, 19 nt, Artificial Sequence
  Description of Artificial Sequence: Synthetic oligonucleotide
uuuguaaugccucacgaug

SEQ ID NO: 782409 - RNA, 19 nt, Artificial Sequence
  Description of Artificial Sequence: Synthetic oligonucleotide
uaaugcuuuguccaguacg

SEQ ID NO: 782410 - RNA, 19 nt, Artificial Sequence
  Description of Artificial Sequence: Synthetic oligonucleotide
acuuagaucuuucaaggac

SEQ ID NO: 782411 - RNA, 19 nt, Artificial Sequence
  Description of Artificial Sequence: Synthetic oligonucleotide
uuuugauccuugauaaagg

SEQ ID NO: 782412 - RNA, 19 nt, Artificial Sequence
  Description of Artificial Sequence: Synthetic oligonucleotide
uguaaaugaccuuuggcag

SEQ ID NO: 782413 - RNA, 19 nt, Artificial Sequence
  Description of Artificial Sequence: Synthetic oligonucleotide
acaaauucguauuugcauc

SEQ ID NO: 782414 - RNA, 19 nt, Artificial Sequence
  Description of Artificial Sequence: Synthetic oligonucleotide
acuuggcauauuuucaucc

SEQ ID NO: 782415 - RNA, 19 nt, Artificial Sequence
  Description of Artificial Sequence: Synthetic oligonucleotide
ugggcgaagauaaugaagc

SEQ ID NO: 782416 - RNA, 19 nt, Artificial Sequence
  Description of Artificial Sequence: Synthetic oligonucleotide
augguaagugcucugaagg

SEQ ID NO: 782417 - RNA, 19 nt, Artificial Sequence
  Description of Artificial Sequence: Synthetic oligonucleotide
uguguacugacucacagcu

SEQ ID NO: 782418 - RNA, 19 nt, Artificial Sequence
  Description of Artificial Sequence: Synthetic oligonucleotide
uccugaauaaauuucagaa

SEQ ID NO: 782419 - RNA, 19 nt, Artificial Sequence
  Description of Artificial Sequence: Synthetic oligonucleotide
gaucaaaugaucugggcug

SEQ ID NO: 782420 - RNA, 19 nt, Artificial Sequence
  Description of Artificial Sequence: Synthetic oligonucleotide
uucagaucaaaugaucugg

SEQ ID NO: 782421 - RNA, 19 nt, Artificial Sequence
  Description of Artificial Sequence: Synthetic oligonucleotide
ucagcgacuacuaauggug

SEQ ID NO: 782422 - RNA, 19 nt, Artificial Sequence
  Description of Artificial Sequence: Synthetic oligonucleotide
aagguaaugcauuaguaaa

SEQ ID NO: 782423 - RNA, 19 nt, Artificial Sequence
  Description of Artificial Sequence: Synthetic oligonucleotide
ucaacgcacauuuaaagcu

SEQ ID NO: 782424 - RNA, 19 nt, Artificial Sequence
  Description of Artificial Sequence: Synthetic oligonucleotide
ucuaaaauugguguggaga

SEQ ID NO: 782425 - RNA, 19 nt, Artificial Sequence
  Description of Artificial Sequence: Synthetic oligonucleotide
ucuacccuaagcaagugug

SEQ ID NO: 782426 - RNA, 19 nt, Artificial Sequence
  Description of Artificial Sequence: Synthetic oligonucleotide
aaaguuccccuguagagca

SEQ ID NO: 782427 - RNA, 19 nt, Artificial Sequence
  Description of Artificial Sequence: Synthetic oligonucleotide
uaugguugcauuucaaagu

SEQ ID NO: 782428 - RNA, 19 nt, Artificial Sequence
  Description of Artificial Sequence: Synthetic oligonucleotide
aaaauugguguggagaacu

SEQ ID NO: 782429 - RNA, 19 nt, Artificial Sequence
  Description of Artificial Sequence: Synthetic oligonucleotide
aagauucaaaucccauagg

SEQ ID NO: 782430 - RNA, 19 nt, Artificial Sequence
  Description of Artificial Sequence: Synthetic oligonucleotide
uacgguauuugccacaaca

SEQ ID NO: 782431 - RNA, 19 nt, Artificial Sequence
  Description of Artificial Sequence: Synthetic oligonucleotide
auugcguguguucagaaug

SEQ ID NO: 782432 - RNA, 19 nt, Artificial Sequence
  Description of Artificial Sequence: Synthetic oligonucleotide
uccgaauggaccaagcucu

SEQ ID NO: 782433 - RNA, 19 nt, Artificial Sequence
  Description of Artificial Sequence: Synthetic oligonucleotide
auauuguacauucauguaa

SEQ ID NO: 782434 - RNA, 19 nt, Artificial Sequence
  Description of Artificial Sequence: Synthetic oligonucleotide
uauuguacauucauguaaa

SEQ ID NO: 782435 - RNA, 19 nt, Artificial Sequence
  Description of Artificial Sequence: Synthetic oligonucleotide
agauucaaaucccauaggu

SEQ ID NO: 782436 - RNA, 19 nt, Artificial Sequence
  Description of Artificial Sequence: Synthetic oligonucleotide
ugggcaaguggaaucagcg

SEQ ID NO: 782437 - RNA, 19 nt, Artificial Sequence
  Description of Artificial Sequence: Synthetic oligonucleotide
ugugacaccggaaugggga

SEQ ID NO: 782438 - RNA, 19 nt, Artificial Sequence
  Description of Artificial Sequence: Synthetic oligonucleotide
agaucaaaugaucugggcu

SEQ ID NO: 782439 - RNA, 19 nt, Artificial Sequence
  Description of Artificial Sequence: Synthetic oligonucleotide
uaagguaaugcauuaguaa

SEQ ID NO: 782440 - RNA, 19 nt, Artificial Sequence
  Description of Artificial Sequence: Synthetic oligonucleotide
uaaauacacagccuauucu

SEQ ID NO: 782441 - RNA, 19 nt, Artificial Sequence
  Description of Artificial Sequence: Synthetic oligonucleotide
uggguugcacuuuugacag

SEQ ID NO: 782442 - RNA, 19 nt, Artificial Sequence
  Description of Artificial Sequence: Synthetic oligonucleotide
ucagccuuuguucacguug

SEQ ID NO: 782443 - RNA, 19 nt, Artificial Sequence
  Description of Artificial Sequence: Synthetic oligonucleotide
uguguguacugacucacag

SEQ ID NO: 782444 - RNA, 19 nt, Artificial Sequence
  Description of Artificial Sequence: Synthetic oligonucleotide
auggguacguuuguaaugc

SEQ ID NO: 782445 - RNA, 19 nt, Artificial Sequence
  Description of Artificial Sequence: Synthetic oligonucleotide
ucaaucugucuacugagca

SEQ ID NO: 782446 - RNA, 19 nt, Artificial Sequence
  Description of Artificial Sequence: Synthetic oligonucleotide
guaugguugcauuucaaag

SEQ ID NO: 782447 - RNA, 19 nt, Artificial Sequence
  Description of Artificial Sequence: Synthetic oligonucleotide
uuuggcagaugugacaccg

SEQ ID NO: 782448 - RNA, 19 nt, Artificial Sequence
  Description of Artificial Sequence: Synthetic oligonucleotide
uuguaaugccucacgaugc

SEQ ID NO: 782449 - RNA, 19 nt, Artificial Sequence
  Description of Artificial Sequence: Synthetic oligonucleotide
uguugaaacaugguuaacu

SEQ ID NO: 782450 - RNA, 19 nt, Artificial Sequence
  Description of Artificial Sequence: Synthetic oligonucleotide
ugucuacugagcauggccc

SEQ ID NO: 782451 - RNA, 19 nt, Artificial Sequence
  Description of Artificial Sequence: Synthetic oligonucleotide
uucuauuuuacagggagga

SEQ ID NO: 782452 - RNA, 19 nt, Artificial Sequence
  Description of Artificial Sequence: Synthetic oligonucleotide
gagaggaguuauucaaugg

SEQ ID NO: 782453 - RNA, 19 nt, Artificial Sequence
  Description of Artificial Sequence: Synthetic oligonucleotide
acuacuuucugucccacug

SEQ ID NO: 782454 - RNA, 19 nt, Artificial Sequence
  Description of Artificial Sequence: Synthetic oligonucleotide
uauucuacccuaagcaagu

SEQ ID NO: 782455 - RNA, 19 nt, Artificial Sequence
  Description of Artificial Sequence: Synthetic oligonucleotide
cucaacgcacauuuaaagc

SEQ ID NO: 782456 - RNA, 19 nt, Artificial Sequence
  Description of Artificial Sequence: Synthetic oligonucleotide
ugagaggaguuauucaaug

SEQ ID NO: 782457 - RNA, 19 nt, Artificial Sequence
  Description of Artificial Sequence: Synthetic oligonucleotide
uccccuguagagcagagug

SEQ ID NO: 782458 - RNA, 19 nt, Artificial Sequence
  Description of Artificial Sequence: Synthetic oligonucleotide
uuaagguaaugcauuagua

SEQ ID NO: 782459 - RNA, 19 nt, Artificial Sequence
  Description of Artificial Sequence: Synthetic oligonucleotide
auccgaauggaccaagcuc

SEQ ID NO: 782460 - RNA, 19 nt, Artificial Sequence
  Description of Artificial Sequence: Synthetic oligonucleotide
agccuauucuacccuaagc

SEQ ID NO: 782461 - RNA, 19 nt, Artificial Sequence
  Description of Artificial Sequence: Synthetic oligonucleotide
uccucauauugucuuuugg

SEQ ID NO: 782462 - RNA, 19 nt, Artificial Sequence
  Description of Artificial Sequence: Synthetic oligonucleotide
gauggguacguuuguaaug

SEQ ID NO: 782463 - RNA, 19 nt, Artificial Sequence
  Description of Artificial Sequence: Synthetic oligonucleotide
uucacguuggcaagugucc

SEQ ID NO: 782464 - RNA, 19 nt, Artificial Sequence
  Description of Artificial Sequence: Synthetic oligonucleotide
uuaugucgguaguagacug

SEQ ID NO: 782465 - RNA, 19 nt, Artificial Sequence
  Description of Artificial Sequence: Synthetic oligonucleotide
uccuacacaaagcucgucu

SEQ ID NO: 782466 - RNA, 19 nt, Artificial Sequence
  Description of Artificial Sequence: Synthetic oligonucleotide
aauccgaauggaccaagcu

SEQ ID NO: 782467 - RNA, 19 nt, Artificial Sequence
  Description of Artificial Sequence: Synthetic oligonucleotide
aacugaguuucuuuccaca

SEQ ID NO: 782468 - RNA, 19 nt, Artificial Sequence
  Description of Artificial Sequence: Synthetic oligonucleotide
gucacaaauucguauuugc

SEQ ID NO: 782469 - RNA, 19 nt, Artificial Sequence
  Description of Artificial Sequence: Synthetic oligonucleotide
aucgccauccuguugagcu

SEQ ID NO: 782470 - RNA, 19 nt, Artificial Sequence
  Description of Artificial Sequence: Synthetic oligonucleotide
aacagucugugaguugccc

SEQ ID NO: 782471 - RNA, 19 nt, Artificial Sequence
  Description of Artificial Sequence: Synthetic oligonucleotide
aguaauuacuucgauggcu

SEQ ID NO: 782472 - RNA, 19 nt, Artificial Sequence
  Description of Artificial Sequence: Synthetic oligonucleotide
ugucuucuuaguuggaaac

SEQ ID NO: 782473 - RNA, 19 nt, Artificial Sequence
  Description of Artificial Sequence: Synthetic oligonucleotide
cuuagaucuuucaaggaca

SEQ ID NO: 782474 - RNA, 19 nt, Artificial Sequence
  Description of Artificial Sequence: Synthetic oligonucleotide
uaccguacuuaacacaaac

SEQ ID NO: 782475 - RNA, 19 nt, Artificial Sequence
  Description of Artificial Sequence: Synthetic oligonucleotide
cuauucaucugauggguac

SEQ ID NO: 782476 - RNA, 19 nt, Artificial Sequence
  Description of Artificial Sequence: Synthetic oligonucleotide
ugcugcucuaaauaggcac

SEQ ID NO: 782477 - RNA, 19 nt, Artificial Sequence
  Description of Artificial Sequence: Synthetic oligonucleotide
guagacuggaaguaauuac

SEQ ID NO: 782478 - RNA, 19 nt, Artificial Sequence
  Description of Artificial Sequence: Synthetic oligonucleotide
cauuaguaaagccucucug

SEQ ID NO: 782479 - RNA, 19 nt, Artificial Sequence
  Description of Artificial Sequence: Synthetic oligonucleotide
uaaguacuacuuucugucc

SEQ ID NO: 782480 - RNA, 19 nt, Artificial Sequence
  Description of Artificial Sequence: Synthetic oligonucleotide
aauaccgguguugaaacau

SEQ ID NO: 782481 - RNA, 19 nt, Artificial Sequence
  Description of Artificial Sequence: Synthetic oligonucleotide
cuucagaucaaaugaucug

SEQ ID NO: 782482 - RNA, 19 nt, Artificial Sequence
  Description of Artificial Sequence: Synthetic oligonucleotide
guaauuacuucgauggcug

SEQ ID NO: 782483 - RNA, 19 nt, Artificial Sequence
  Description of Artificial Sequence: Synthetic oligonucleotide
guuaauggaagaaugaggu

SEQ ID NO: 782484 - RNA, 19 nt, Artificial Sequence
  Description of Artificial Sequence: Synthetic oligonucleotide
acuacuaauggugggacug

SEQ ID NO: 782485 - RNA, 19 nt, Artificial Sequence
  Description of Artificial Sequence: Synthetic oligonucleotide
accggaauggggaauaccg

SEQ ID NO: 782486 - RNA, 19 nt, Artificial Sequence
  Description of Artificial Sequence: Synthetic oligonucleotide
gguuaauggaagaaugagg

SEQ ID NO: 782487 - RNA, 19 nt, Artificial Sequence
  Description of Artificial Sequence: Synthetic oligonucleotide
guaaugcauuaguaaagcc

SEQ ID NO: 782488 - RNA, 19 nt, Artificial Sequence
  Description of Artificial Sequence: Synthetic oligonucleotide
gcaacuggaggguuaaugg

SEQ ID NO: 782489 - RNA, 19 nt, Artificial Sequence
  Description of Artificial Sequence: Synthetic oligonucleotide
ucccugucaagucauuagc

SEQ ID NO: 782490 - RNA, 19 nt, Artificial Sequence
  Description of Artificial Sequence: Synthetic oligonucleotide
uaagagucgcucauuugcu

SEQ ID NO: 782491 - RNA, 19 nt, Artificial Sequence
  Description of Artificial Sequence: Synthetic oligonucleotide
uuagguauggggcuuucua

SEQ ID NO: 782492 - RNA, 19 nt, Artificial Sequence
  Description of Artificial Sequence: Synthetic oligonucleotide
acguuuguaaugccucacg

SEQ ID NO: 782493 - RNA, 19 nt, Artificial Sequence
  Description of Artificial Sequence: Synthetic oligonucleotide
ucagaaugcucaacgcaca

SEQ ID NO: 782494 - RNA, 19 nt, Artificial Sequence
  Description of Artificial Sequence: Synthetic oligonucleotide
ggaaguaauuacuucgaug

SEQ ID NO: 782495 - RNA, 19 nt, Artificial Sequence
  Description of Artificial Sequence: Synthetic oligonucleotide
guauuugccacaacauucc

SEQ ID NO: 782496 - RNA, 19 nt, Artificial Sequence
  Description of Artificial Sequence: Synthetic oligonucleotide
gagguaugucaacuugagg

SEQ ID NO: 782497 - RNA, 19 nt, Artificial Sequence
  Description of Artificial Sequence: Synthetic oligonucleotide
ugguaagugcucugaaggc

SEQ ID NO: 782498 - RNA, 19 nt, Artificial Sequence
  Description of Artificial Sequence: Synthetic oligonucleotide
aauuuugguaccguacuua

SEQ ID NO: 782499 - RNA, 19 nt, Artificial Sequence
  Description of Artificial Sequence: Synthetic oligonucleotide
aauacugcugacauagaua

SEQ ID NO: 782500 - RNA, 19 nt, Artificial Sequence
  Description of Artificial Sequence: Synthetic oligonucleotide
uguaaugccucacgaugcu

SEQ ID NO: 782501 - RNA, 19 nt, Artificial Sequence
  Description of Artificial Sequence: Synthetic oligonucleotide
accguacuuaacacaaacc

SEQ ID NO: 782502 - RNA, 19 nt, Artificial Sequence
  Description of Artificial Sequence: Synthetic oligonucleotide
ucaacuugagggucgcugu

SEQ ID NO: 782503 - RNA, 19 nt, Artificial Sequence
  Description of Artificial Sequence: Synthetic oligonucleotide
ugacauagauauuguacau

SEQ ID NO: 782504 - RNA, 19 nt, Artificial Sequence
  Description of Artificial Sequence: Synthetic oligonucleotide
uugagaguacaauggauuu

SEQ ID NO: 782505 - RNA, 19 nt, Artificial Sequence
  Description of Artificial Sequence: Synthetic oligonucleotide
uucuuaucuuugaguaagc

SEQ ID NO: 782506 - RNA, 19 nt, Artificial Sequence
  Description of Artificial Sequence: Synthetic oligonucleotide
ucuucuuaguuggaaacaa

SEQ ID NO: 782507 - RNA, 19 nt, Artificial Sequence
  Description of Artificial Sequence: Synthetic oligonucleotide
ucaagaacugaguuucuuu

SEQ ID NO: 782508 - RNA, 19 nt, Artificial Sequence
  Description of Artificial Sequence: Synthetic oligonucleotide
ucuauuuuacagggaggag

SEQ ID NO: 782509 - RNA, 19 nt, Artificial Sequence
  Description of Artificial Sequence: Synthetic oligonucleotide
aguacuacuuucuguccca

SEQ ID NO: 782510 - RNA, 19 nt, Artificial Sequence
  Description of Artificial Sequence: Synthetic oligonucleotide
cuucuuaguuggaaacaag

SEQ ID NO: 782511 - RNA, 19 nt, Artificial Sequence
  Description of Artificial Sequence: Synthetic oligonucleotide
uucagcgacuacuaauggu

SEQ ID NO: 782512 - RNA, 19 nt, Artificial Sequence
  Description of Artificial Sequence: Synthetic oligonucleotide
gauauuguacauucaugua

SEQ ID NO: 782513 - RNA, 19 nt, Artificial Sequence
  Description of Artificial Sequence: Synthetic oligonucleotide
agguaaugcauuaguaaag

SEQ ID NO: 782514 - RNA, 19 nt, Artificial Sequence
  Description of Artificial Sequence: Synthetic oligonucleotide
cuacccuaagcaagugugg

SEQ ID NO: 782515 - RNA, 19 nt, Artificial Sequence
  Description of Artificial Sequence: Synthetic oligonucleotide
augguugcauuucaaaguu

SEQ ID NO: 782516 - RNA, 19 nt, Artificial Sequence
  Description of Artificial Sequence: Synthetic oligonucleotide
auuucauaauccgaaugga

SEQ ID NO: 782517 - RNA, 19 nt, Artificial Sequence
  Description of Artificial Sequence: Synthetic oligonucleotide
gcgaagauaaugaagcugc

SEQ ID NO: 782518 - RNA, 19 nt, Artificial Sequence
  Description of Artificial Sequence: Synthetic oligonucleotide
aacuuccuacacaaagcuc

SEQ ID NO: 782519 - RNA, 19 nt, Artificial Sequence
  Description of Artificial Sequence: Synthetic oligonucleotide
uugagggucgcugucauuc

SEQ ID NO: 782520 - RNA, 19 nt, Artificial Sequence
  Description of Artificial Sequence: Synthetic oligonucleotide
uaucuuugaguaagccaca

SEQ ID NO: 782521 - RNA, 19 nt, Artificial Sequence
  Description of Artificial Sequence: Synthetic oligonucleotide
ucauaacuguccuuauguc

SEQ ID NO: 782522 - RNA, 19 nt, Artificial Sequence
  Description of Artificial Sequence: Synthetic oligonucleotide
agcgacuacuaaugguggg

SEQ ID NO: 782523 - RNA, 19 nt, Artificial Sequence
  Description of Artificial Sequence: Synthetic oligonucleotide
ggaguuauucaaugguaag

SEQ ID NO: 782524 - RNA, 19 nt, Artificial Sequence
  Description of Artificial Sequence: Synthetic oligonucleotide
aaagcuaaucggagcuuuc

SEQ ID NO: 782525 - RNA, 19 nt, Artificial Sequence
  Description of Artificial Sequence: Synthetic oligonucleotide
caaggacaaccacugggcg

SEQ ID NO: 782526 - RNA, 19 nt, Artificial Sequence
  Description of Artificial Sequence: Synthetic oligonucleotide
gguauuugccacaacauuc

SEQ ID NO: 782527 - RNA, 19 nt, Artificial Sequence
  Description of Artificial Sequence: Synthetic oligonucleotide
cuuaagagucgcucauuug

SEQ ID NO: 782528 - RNA, 19 nt, Artificial Sequence
  Description of Artificial Sequence: Synthetic oligonucleotide
cuacuuucugucccacugg

SEQ ID NO: 782529 - RNA, 19 nt, Artificial Sequence
  Description of Artificial Sequence: Synthetic oligonucleotide
aucagcguucuggaggggc

SEQ ID NO: 782530 - RNA, 19 nt, Artificial Sequence
  Description of Artificial Sequence: Synthetic oligonucleotide
uugguaccguacuuaacac

SEQ ID NO: 782531 - RNA, 19 nt, Artificial Sequence
  Description of Artificial Sequence: Synthetic oligonucleotide
ugcucaacgcacauuuaaa

SEQ ID NO: 782532 - RNA, 19 nt, Artificial Sequence
  Description of Artificial Sequence: Synthetic oligonucleotide
caagucauuagcaggcuga

SEQ ID NO: 782533 - RNA, 19 nt, Artificial Sequence
  Description of Artificial Sequence: Synthetic oligonucleotide
uaauuuugguaccguacuu

SEQ ID NO: 782534 - RNA, 19 nt, Artificial Sequence
  Description of Artificial Sequence: Synthetic oligonucleotide
uucuacccuaagcaagugu

SEQ ID NO: 782535 - RNA, 19 nt, Artificial Sequence
  Description of Artificial Sequence: Synthetic oligonucleotide
uuaauggaagaaugaggua

SEQ ID NO: 782536 - RNA, 19 nt, Artificial Sequence
  Description of Artificial Sequence: Synthetic oligonucleotide
uuaguauuaaauggccuuu

SEQ ID NO: 782537 - RNA, 19 nt, Artificial Sequence
  Description of Artificial Sequence: Synthetic oligonucleotide
uucuggaggggcacgcugc

SEQ ID NO: 782538 - RNA, 19 nt, Artificial Sequence
  Description of Artificial Sequence: Synthetic oligonucleotide
uguaaauacacagccuauu

SEQ ID NO: 782539 - RNA, 19 nt, Artificial Sequence
  Description of Artificial Sequence: Synthetic oligonucleotide
uuuugguaccguacuuaac

SEQ ID NO: 782540 - RNA, 19 nt, Artificial Sequence
  Description of Artificial Sequence: Synthetic oligonucleotide
ugcuucagcgacuacuaau

SEQ ID NO: 782541 - RNA, 19 nt, Artificial Sequence
  Description of Artificial Sequence: Synthetic oligonucleotide
aucccauagguuuguaagu

SEQ ID NO: 782542 - RNA, 19 nt, Artificial Sequence
  Description of Artificial Sequence: Synthetic oligonucleotide
uggguauugcguguguuca

SEQ ID NO: 782543 - RNA, 19 nt, Artificial Sequence
  Description of Artificial Sequence: Synthetic oligonucleotide
aauuacuucgauggcugaa

SEQ ID NO: 782544 - RNA, 19 nt, Artificial Sequence
  Description of Artificial Sequence: Synthetic oligonucleotide
cacguugcagugcuggagc

SEQ ID NO: 782545 - RNA, 19 nt, Artificial Sequence
  Description of Artificial Sequence: Synthetic oligonucleotide
auucguauuugcauccuug

SEQ ID NO: 782546 - RNA, 19 nt, Artificial Sequence
  Description of Artificial Sequence: Synthetic oligonucleotide
cuugauaaaggcagcugga

SEQ ID NO: 782547 - RNA, 19 nt, Artificial Sequence
  Description of Artificial Sequence: Synthetic oligonucleotide
ggaauaccgguguugaaac

SEQ ID NO: 782548 - RNA, 19 nt, Artificial Sequence
  Description of Artificial Sequence: Synthetic oligonucleotide
auggccuuuuggcaguuug

SEQ ID NO: 782549 - RNA, 19 nt, Artificial Sequence
  Description of Artificial Sequence: Synthetic oligonucleotide
ugaaggcucccagucauca

SEQ ID NO: 782550 - RNA, 19 nt, Artificial Sequence
  Description of Artificial Sequence: Synthetic oligonucleotide
uacccuaagcaaguguggc

SEQ ID NO: 782551 - RNA, 19 nt, Artificial Sequence
  Description of Artificial Sequence: Synthetic oligonucleotide
ugguaccguacuuaacaca

SEQ ID NO: 782552 - RNA, 19 nt, Artificial Sequence
  Description of Artificial Sequence: Synthetic oligonucleotide
gaacugaguuucuuuccac

SEQ ID NO: 782553 - RNA, 19 nt, Artificial Sequence
  Description of Artificial Sequence: Synthetic oligonucleotide
uuacuucgauggcugaaaa

SEQ ID NO: 782554 - RNA, 19 nt, Artificial Sequence
  Description of Artificial Sequence: Synthetic oligonucleotide
uguuaaugcuuuguccagu

SEQ ID NO: 782555 - RNA, 19 nt, Artificial Sequence
  Description of Artificial Sequence: Synthetic oligonucleotide
augcucaacgcacauuuaa

SEQ ID NO: 782556 - RNA, 19 nt, Artificial Sequence
  Description of Artificial Sequence: Synthetic oligonucleotide
uuguccaguacgacccuca

SEQ ID NO: 782557 - RNA, 19 nt, Artificial Sequence
  Description of Artificial Sequence: Synthetic oligonucleotide
aaauucguauuugcauccu

SEQ ID NO: 782558 - RNA, 19 nt, Artificial Sequence
  Description of Artificial Sequence: Synthetic oligonucleotide
uguaagucuucagaucaaa

SEQ ID NO: 782559 - RNA, 19 nt, Artificial Sequence
  Description of Artificial Sequence: Synthetic oligonucleotide
uaauuacuucgauggcuga

SEQ ID NO: 782560 - RNA, 19 nt, Artificial Sequence
  Description of Artificial Sequence: Synthetic oligonucleotide
cagcgacuacuaauggugg

SEQ ID NO: 782561 - RNA, 19 nt, Artificial Sequence
  Description of Artificial Sequence: Synthetic oligonucleotide
uaaaauugguguggagaac

SEQ ID NO: 782562 - RNA, 19 nt, Artificial Sequence
  Description of Artificial Sequence: Synthetic oligonucleotide
aagcuaaucggagcuuucu

SEQ ID NO: 782563 - RNA, 19 nt, Artificial Sequence
  Description of Artificial Sequence: Synthetic oligonucleotide
aguacgacccucaaguuuu

SEQ ID NO: 782564 - RNA, 19 nt, Artificial Sequence
  Description of Artificial Sequence: Synthetic oligonucleotide
agugauuuaggaacuuccu

SEQ ID NO: 782565 - RNA, 19 nt, Artificial Sequence
  Description of Artificial Sequence: Synthetic oligonucleotide
accaugcauggguauugcg

SEQ ID NO: 782566 - RNA, 19 nt, Artificial Sequence
  Description of Artificial Sequence: Synthetic oligonucleotide
uggauuucauaauccgaau

SEQ ID NO: 782567 - RNA, 19 nt, Artificial Sequence
  Description of Artificial Sequence: Synthetic oligonucleotide
uauggggcuuucuauuuua

SEQ ID NO: 782568 - RNA, 19 nt, Artificial Sequence
  Description of Artificial Sequence: Synthetic oligonucleotide
gcaucaagaacugaguuuc

SEQ ID NO: 782569 - RNA, 19 nt, Artificial Sequence
  Description of Artificial Sequence: Synthetic oligonucleotide
ggaacuuccuacacaaagc

SEQ ID NO: 782570 - RNA, 19 nt, Artificial Sequence
  Description of Artificial Sequence: Synthetic oligonucleotide
cguauuugcauccuugaag

SEQ ID NO: 782571 - RNA, 19 nt, Artificial Sequence
  Description of Artificial Sequence: Synthetic oligonucleotide
ucagcguucuggaggggca

SEQ ID NO: 782572 - RNA, 19 nt, Artificial Sequence
  Description of Artificial Sequence: Synthetic oligonucleotide
caaaugaucugggcugagg

SEQ ID NO: 782573 - RNA, 19 nt, Artificial Sequence
  Description of Artificial Sequence: Synthetic oligonucleotide
augguuaacugaaggaccu

SEQ ID NO: 782574 - RNA, 19 nt, Artificial Sequence
  Description of Artificial Sequence: Synthetic oligonucleotide
guguguacugacucacagc

SEQ ID NO: 782575 - RNA, 19 nt, Artificial Sequence
  Description of Artificial Sequence: Synthetic oligonucleotide
ugccacaacauucccuguc

SEQ ID NO: 782576 - RNA, 19 nt, Artificial Sequence
  Description of Artificial Sequence: Synthetic oligonucleotide
agguugucauaacuguccu

SEQ ID NO: 782577 - RNA, 19 nt, Artificial Sequence
  Description of Artificial Sequence: Synthetic oligonucleotide
cuccuuaauuuugguaccg

SEQ ID NO: 782578 - RNA, 19 nt, Artificial Sequence
  Description of Artificial Sequence: Synthetic oligonucleotide
ugagaguacaauggauuuc

SEQ ID NO: 782579 - RNA, 19 nt, Artificial Sequence
  Description of Artificial Sequence: Synthetic oligonucleotide
uggccuuuuggcaguuugc

SEQ ID NO: 782580 - RNA, 19 nt, Artificial Sequence
  Description of Artificial Sequence: Synthetic oligonucleotide
acagucugugaguugcccu

SEQ ID NO: 782581 - RNA, 19 nt, Artificial Sequence
  Description of Artificial Sequence: Synthetic oligonucleotide
auaauccgaauggaccaag

SEQ ID NO: 782582 - RNA, 19 nt, Artificial Sequence
  Description of Artificial Sequence: Synthetic oligonucleotide
uggggaauaccgguguuga

SEQ ID NO: 782583 - RNA, 19 nt, Artificial Sequence
  Description of Artificial Sequence: Synthetic oligonucleotide
aguagacuggaaguaauua

SEQ ID NO: 782584 - RNA, 19 nt, Artificial Sequence
  Description of Artificial Sequence: Synthetic oligonucleotide
ucccauagguuuguaaguc

SEQ ID NO: 782585 - RNA, 19 nt, Artificial Sequence
  Description of Artificial Sequence: Synthetic oligonucleotide
gucaacuugagggucgcug

SEQ ID NO: 782586 - RNA, 19 nt, Artificial Sequence
  Description of Artificial Sequence: Synthetic oligonucleotide
uaguagacuggaaguaauu

SEQ ID NO: 782587 - RNA, 19 nt, Artificial Sequence
  Description of Artificial Sequence: Synthetic oligonucleotide
uggucacaaauucguauuu

SEQ ID NO: 782588 - RNA, 19 nt, Artificial Sequence
  Description of Artificial Sequence: Synthetic oligonucleotide
guccuuaugucgguaguag

SEQ ID NO: 782589 - RNA, 19 nt, Artificial Sequence
  Description of Artificial Sequence: Synthetic oligonucleotide
auuacuucgauggcugaaa

SEQ ID NO: 782590 - RNA, 19 nt, Artificial Sequence
  Description of Artificial Sequence: Synthetic oligonucleotide
uauugcguguguucagaau

SEQ ID NO: 782591 - RNA, 19 nt, Artificial Sequence
  Description of Artificial Sequence: Synthetic oligonucleotide
aggcuuagcugccaacugu

SEQ ID NO: 782592 - RNA, 19 nt, Artificial Sequence
  Description of Artificial Sequence: Synthetic oligonucleotide
cugggcaaguggaaucagc

SEQ ID NO: 782593 - RNA, 19 nt, Artificial Sequence
  Description of Artificial Sequence: Synthetic oligonucleotide
gugaguugcccugucacug

SEQ ID NO: 782594 - RNA, 19 nt, Artificial Sequence
  Description of Artificial Sequence: Synthetic oligonucleotide
gaguuauucaaugguaagu

SEQ ID NO: 782595 - RNA, 19 nt, Artificial Sequence
  Description of Artificial Sequence: Synthetic oligonucleotide
cacugggcgaagauaauga

SEQ ID NO: 782596 - RNA, 19 nt, Artificial Sequence
  Description of Artificial Sequence: Synthetic oligonucleotide
gagucgcucauuugcuuac

SEQ ID NO: 782597 - RNA, 19 nt, Artificial Sequence
  Description of Artificial Sequence: Synthetic oligonucleotide
cuuuaguauuaaauggccu

SEQ ID NO: 782598 - RNA, 19 nt, Artificial Sequence
  Description of Artificial Sequence: Synthetic oligonucleotide
auggaccaagcucugcaga

SEQ ID NO: 782599 - RNA, 19 nt, Artificial Sequence
  Description of Artificial Sequence: Synthetic oligonucleotide
gaguacaauggauuucaua

SEQ ID NO: 782600 - RNA, 19 nt, Artificial Sequence
  Description of Artificial Sequence: Synthetic oligonucleotide
ucacuacgguauuugccac

SEQ ID NO: 782601 - RNA, 19 nt, Artificial Sequence
  Description of Artificial Sequence: Synthetic oligonucleotide
ugcauuaguaaagccucuc

SEQ ID NO: 782602 - RNA, 19 nt, Artificial Sequence
  Description of Artificial Sequence: Synthetic oligonucleotide
gcuucagcgacuacuaaug

SEQ ID NO: 782603 - RNA, 19 nt, Artificial Sequence
  Description of Artificial Sequence: Synthetic oligonucleotide
uaaucggagcuuucuuauc

SEQ ID NO: 782604 - RNA, 19 nt, Artificial Sequence
  Description of Artificial Sequence: Synthetic oligonucleotide
cugucauucacuacgguau

SEQ ID NO: 782605 - RNA, 19 nt, Artificial Sequence
  Description of Artificial Sequence: Synthetic oligonucleotide
ugucauucacuacgguauu

SEQ ID NO: 782606 - RNA, 19 nt, Artificial Sequence
  Description of Artificial Sequence: Synthetic oligonucleotide
agguauggggcuuucuauu

SEQ ID NO: 782607 - RNA, 19 nt, Artificial Sequence
  Description of Artificial Sequence: Synthetic oligonucleotide
ccguacuuaacacaaacca

SEQ ID NO: 782608 - RNA, 19 nt, Artificial Sequence
  Description of Artificial Sequence: Synthetic oligonucleotide
cuacuaauggugggacugc

SEQ ID NO: 782609 - RNA, 19 nt, Artificial Sequence
  Description of Artificial Sequence: Synthetic oligonucleotide
gugauuuaggaacuuccua

SEQ ID NO: 782610 - RNA, 19 nt, Artificial Sequence
  Description of Artificial Sequence: Synthetic oligonucleotide
cacguuggcaagugucccc

SEQ ID NO: 782611 - RNA, 19 nt, Artificial Sequence
  Description of Artificial Sequence: Synthetic oligonucleotide
uacuucgauggcugaaaau

SEQ ID NO: 782612 - RNA, 19 nt, Artificial Sequence
  Description of Artificial Sequence: Synthetic oligonucleotide
uacguuuguaaugccucac

SEQ ID NO: 782613 - RNA, 19 nt, Artificial Sequence
  Description of Artificial Sequence: Synthetic oligonucleotide
ugcauggguauugcgugug

SEQ ID NO: 782614 - RNA, 19 nt, Artificial Sequence
  Description of Artificial Sequence: Synthetic oligonucleotide
acccuaagcaaguguggcu

SEQ ID NO: 782615 - RNA, 19 nt, Artificial Sequence
  Description of Artificial Sequence: Synthetic oligonucleotide
cugaacuaugcugcccagg

SEQ ID NO: 782616 - RNA, 19 nt, Artificial Sequence
  Description of Artificial Sequence: Synthetic oligonucleotide
auuugccacaacauucccu

SEQ ID NO: 782617 - RNA, 19 nt, Artificial Sequence
  Description of Artificial Sequence: Synthetic oligonucleotide
acugggcgaagauaaugaa

SEQ ID NO: 782618 - RNA, 19 nt, Artificial Sequence
  Description of Artificial Sequence: Synthetic oligonucleotide
cguacuuaacacaaaccac

SEQ ID NO: 782619 - RNA, 19 nt, Artificial Sequence
  Description of Artificial Sequence: Synthetic oligonucleotide
guacguuuguaaugccuca

SEQ ID NO: 782620 - RNA, 19 nt, Artificial Sequence
  Description of Artificial Sequence: Synthetic oligonucleotide
uccuuaauuuugguaccgu

SEQ ID NO: 782621 - RNA, 19 nt, Artificial Sequence
  Description of Artificial Sequence: Synthetic oligonucleotide
gguaccguacuuaacacaa

SEQ ID NO: 782622 - RNA, 19 nt, Artificial Sequence
  Description of Artificial Sequence: Synthetic oligonucleotide
auucaucugauggguacgu

SEQ ID NO: 782623 - RNA, 19 nt, Artificial Sequence
  Description of Artificial Sequence: Synthetic oligonucleotide
gguacguuuguaaugccuc

SEQ ID NO: 782624 - RNA, 19 nt, Artificial Sequence
  Description of Artificial Sequence: Synthetic oligonucleotide
uacuaauggugggacugca

SEQ ID NO: 782625 - RNA, 19 nt, Artificial Sequence
  Description of Artificial Sequence: Synthetic oligonucleotide
cacuccuuaagagucgcuc

SEQ ID NO: 782626 - RNA, 19 nt, Artificial Sequence
  Description of Artificial Sequence: Synthetic oligonucleotide
uacuacuuucugucccacu

SEQ ID NO: 782627 - RNA, 19 nt, Artificial Sequence
  Description of Artificial Sequence: Synthetic oligonucleotide
acuaauggugggacugcag

SEQ ID NO: 782628 - RNA, 19 nt, Artificial Sequence
  Description of Artificial Sequence: Synthetic oligonucleotide
acuacgguauuugccacaa

SEQ ID NO: 782629 - RNA, 19 nt, Artificial Sequence
  Description of Artificial Sequence: Synthetic oligonucleotide
ugagggucgcugucauuca

SEQ ID NO: 782630 - RNA, 19 nt, Artificial Sequence
  Description of Artificial Sequence: Synthetic oligonucleotide
aucugucuacugagcaugg

SEQ ID NO: 782631 - RNA, 19 nt, Artificial Sequence
  Description of Artificial Sequence: Synthetic oligonucleotide
augcuuuguccaguacgac

SEQ ID NO: 782632 - RNA, 19 nt, Artificial Sequence
  Description of Artificial Sequence: Synthetic oligonucleotide
uggguacguuuguaaugcc

SEQ ID NO: 782633 - RNA, 19 nt, Artificial Sequence
  Description of Artificial Sequence: Synthetic oligonucleotide
agcuaaucggagcuuucuu

SEQ ID NO: 782634 - RNA, 19 nt, Artificial Sequence
  Description of Artificial Sequence: Synthetic oligonucleotide
cuuuugggaccuggguugc

SEQ ID NO: 782635 - RNA, 19 nt, Artificial Sequence
  Description of Artificial Sequence: Synthetic oligonucleotide
acacacccuuucugaucgc

SEQ ID NO: 782636 - RNA, 19 nt, Artificial Sequence
  Description of Artificial Sequence: Synthetic oligonucleotide
ggcaaguguccccacguug

SEQ ID NO: 782637 - RNA, 19 nt, Artificial Sequence
  Description of Artificial Sequence: Synthetic oligonucleotide
uggagcuagcugcuucaaa

SEQ ID NO: 782638 - RNA, 19 nt, Artificial Sequence
  Description of Artificial Sequence: Synthetic oligonucleotide
ggagacugaacuguaucac

SEQ ID NO: 782639 - RNA, 19 nt, Artificial Sequence
  Description of Artificial Sequence: Synthetic oligonucleotide
ugcccugaacuaugcugcc

SEQ ID NO: 782640 - RNA, 19 nt, Artificial Sequence
  Description of Artificial Sequence: Synthetic oligonucleotide
auggaagaaugagguaugu

SEQ ID NO: 782641 - RNA, 19 nt, Artificial Sequence
  Description of Artificial Sequence: Synthetic oligonucleotide
cuucgauggcugaaaaucu

SEQ ID NO: 782642 - RNA, 19 nt, Artificial Sequence
  Description of Artificial Sequence: Synthetic oligonucleotide
cagccuauucuacccuaag

SEQ ID NO: 782643 - RNA, 19 nt, Artificial Sequence
  Description of Artificial Sequence: Synthetic oligonucleotide
uuacagggaggagacugaa

SEQ ID NO: 782644 - RNA, 19 nt, Artificial Sequence
  Description of Artificial Sequence: Synthetic oligonucleotide
ucggagcuuucuuaucuuu

SEQ ID NO: 782645 - RNA, 19 nt, Artificial Sequence
  Description of Artificial Sequence: Synthetic oligonucleotide
gcaaguguccccacguugc

SEQ ID NO: 782646 - RNA, 19 nt, Artificial Sequence
  Description of Artificial Sequence: Synthetic oligonucleotide
ggucacaaauucguauuug

SEQ ID NO: 782647 - RNA, 19 nt, Artificial Sequence
  Description of Artificial Sequence: Synthetic oligonucleotide
ugcgucugucccucugucu

SEQ ID NO: 782648 - RNA, 19 nt, Artificial Sequence
  Description of Artificial Sequence: Synthetic oligonucleotide
acgguauuugccacaacau

SEQ ID NO: 782649 - RNA, 19 nt, Artificial Sequence
  Description of Artificial Sequence: Synthetic oligonucleotide
auaccgguguugaaacaug

SEQ ID NO: 782650 - RNA, 19 nt, Artificial Sequence
  Description of Artificial Sequence: Synthetic oligonucleotide
aaucagcguucuggagggg

SEQ ID NO: 782651 - RNA, 19 nt, Artificial Sequence
  Description of Artificial Sequence: Synthetic oligonucleotide
cacacccuuucugaucgcc

SEQ ID NO: 782652 - RNA, 19 nt, Artificial Sequence
  Description of Artificial Sequence: Synthetic oligonucleotide
ucacuccuuaagagucgcu

SEQ ID NO: 782653 - RNA, 19 nt, Artificial Sequence
  Description of Artificial Sequence: Synthetic oligonucleotide
gagggucgcugucauucac

SEQ ID NO: 782654 - RNA, 19 nt, Artificial Sequence
  Description of Artificial Sequence: Synthetic oligonucleotide
auucuacccuaagcaagug

SEQ ID NO: 782655 - RNA, 19 nt, Artificial Sequence
  Description of Artificial Sequence: Synthetic oligonucleotide
cugucacugccaauuuuga

SEQ ID NO: 782656 - RNA, 19 nt, Artificial Sequence
  Description of Artificial Sequence: Synthetic oligonucleotide
ugucgguaguagacuggaa

SEQ ID NO: 782657 - RNA, 19 nt, Artificial Sequence
  Description of Artificial Sequence: Synthetic oligonucleotide
cacuuuugacaguguuuuc

SEQ ID NO: 782658 - RNA, 19 nt, Artificial Sequence
  Description of Artificial Sequence: Synthetic oligonucleotide
gcugucauucacuacggua

SEQ ID NO: 782659 - RNA, 19 nt, Artificial Sequence
  Description of Artificial Sequence: Synthetic oligonucleotide
ugcguguguucagaaugcu

SEQ ID NO: 782660 - RNA, 19 nt, Artificial Sequence
  Description of Artificial Sequence: Synthetic oligonucleotide
guauugcguguguucagaa

SEQ ID NO: 782661 - RNA, 19 nt, Artificial Sequence
  Description of Artificial Sequence: Synthetic oligonucleotide
acaccggaauggggaauac

SEQ ID NO: 782662 - RNA, 19 nt, Artificial Sequence
  Description of Artificial Sequence: Synthetic oligonucleotide
aguuccccuguagagcaga

SEQ ID NO: 782663 - RNA, 19 nt, Artificial Sequence
  Description of Artificial Sequence: Synthetic oligonucleotide
gcuaaucggagcuuucuua

SEQ ID NO: 782664 - RNA, 19 nt, Artificial Sequence
  Description of Artificial Sequence: Synthetic oligonucleotide
cuuaugucgguaguagacu

SEQ ID NO: 782665 - RNA, 19 nt, Artificial Sequence
  Description of Artificial Sequence: Synthetic oligonucleotide
ccggaauggggaauaccgg

SEQ ID NO: 782666 - RNA, 19 nt, Artificial Sequence
  Description of Artificial Sequence: Synthetic oligonucleotide
acguuggcaagugucccca

SEQ ID NO: 782667 - RNA, 19 nt, Artificial Sequence
  Description of Artificial Sequence: Synthetic oligonucleotide
uacgacccucaaguuuucc

SEQ ID NO: 782668 - RNA, 19 nt, Artificial Sequence
  Description of Artificial Sequence: Synthetic oligonucleotide
gacauagauauuguacauu

SEQ ID NO: 782669 - RNA, 19 nt, Artificial Sequence
  Description of Artificial Sequence: Synthetic oligonucleotide
auuuuacagggaggagacu

SEQ ID NO: 782670 - RNA, 19 nt, Artificial Sequence
  Description of Artificial Sequence: Synthetic oligonucleotide
ccuauucuacccuaagcaa

SEQ ID NO: 782671 - RNA, 19 nt, Artificial Sequence
  Description of Artificial Sequence: Synthetic oligonucleotide
gacuacuaauggugggacu

SEQ ID NO: 782672 - RNA, 19 nt, Artificial Sequence
  Description of Artificial Sequence: Synthetic oligonucleotide
acuauucaucugaugggua

SEQ ID NO: 782673 - RNA, 19 nt, Artificial Sequence
  Description of Artificial Sequence: Synthetic oligonucleotide
cccuaagcaaguguggcug

SEQ ID NO: 782674 - RNA, 19 nt, Artificial Sequence
  Description of Artificial Sequence: Synthetic oligonucleotide
cacuuuccugaauaaauuu

SEQ ID NO: 782675 - RNA, 19 nt, Artificial Sequence
  Description of Artificial Sequence: Synthetic oligonucleotide
agucauuagcaggcugaga

SEQ ID NO: 782676 - RNA, 19 nt, Artificial Sequence
  Description of Artificial Sequence: Synthetic oligonucleotide
cccuuucugaucgccaucc

SEQ ID NO: 782677 - RNA, 19 nt, Artificial Sequence
  Description of Artificial Sequence: Synthetic oligonucleotide
gaucgccauccuguugagc

SEQ ID NO: 782678 - RNA, 19 nt, Artificial Sequence
  Description of Artificial Sequence: Synthetic oligonucleotide
gguauugcguguguucaga

SEQ ID NO: 782679 - RNA, 19 nt, Artificial Sequence
  Description of Artificial Sequence: Synthetic oligonucleotide
cacuacgguauuugccaca

SEQ ID NO: 782680 - RNA, 19 nt, Artificial Sequence
  Description of Artificial Sequence: Synthetic oligonucleotide
agaaugcucaacgcacauu

SEQ ID NO: 782681 - RNA, 19 nt, Artificial Sequence
  Description of Artificial Sequence: Synthetic oligonucleotide
gacaccggaauggggaaua

SEQ ID NO: 782682 - RNA, 19 nt, Artificial Sequence
  Description of Artificial Sequence: Synthetic oligonucleotide
caccggaauggggaauacc

SEQ ID NO: 782683 - RNA, 19 nt, Artificial Sequence
  Description of Artificial Sequence: Synthetic oligonucleotide
guacugacuuggcauauuu

SEQ ID NO: 782684 - RNA, 19 nt, Artificial Sequence
  Description of Artificial Sequence: Synthetic oligonucleotide
gugacaccggaauggggaa

SEQ ID NO: 782685 - RNA, 19 nt, Artificial Sequence
  Description of Artificial Sequence: Synthetic oligonucleotide
ggcaaguggaaucagcguu

SEQ ID NO: 782686 - RNA, 19 nt, Artificial Sequence
  Description of Artificial Sequence: Synthetic oligonucleotide
guacuacuuucugucccac

SEQ ID NO: 782687 - RNA, 19 nt, Artificial Sequence
  Description of Artificial Sequence: Synthetic oligonucleotide
cauaauccgaauggaccaa

SEQ ID NO: 782688 - RNA, 19 nt, Artificial Sequence
  Description of Artificial Sequence: Synthetic oligonucleotide
caacugugcaagguacuga

SEQ ID NO: 782689 - RNA, 19 nt, Artificial Sequence
  Description of Artificial Sequence: Synthetic oligonucleotide
gcugaacagguugucauaa

SEQ ID NO: 782690 - RNA, 19 nt, Artificial Sequence
  Description of Artificial Sequence: Synthetic oligonucleotide
cacugggauuagguauggg

SEQ ID NO: 782691 - RNA, 19 nt, Artificial Sequence
  Description of Artificial Sequence: Synthetic oligonucleotide
agggucgcugucauucacu

SEQ ID NO: 782692 - RNA, 19 nt, Artificial Sequence
  Description of Artificial Sequence: Synthetic oligonucleotide
ccaacugugcaagguacug

SEQ ID NO: 782693 - RNA, 19 nt, Artificial Sequence
  Description of Artificial Sequence: Synthetic oligonucleotide
gguaagugcucugaaggcu

SEQ ID NO: 782694 - RNA, 19 nt, Artificial Sequence
  Description of Artificial Sequence: Synthetic oligonucleotide
agguacugacuuggcauau

SEQ ID NO: 782695 - RNA, 19 nt, Artificial Sequence
  Description of Artificial Sequence: Synthetic oligonucleotide
cugagaggaguuauucaau

SEQ ID NO: 782696 - RNA, 19 nt, Artificial Sequence
  Description of Artificial Sequence: Synthetic oligonucleotide
uuccccuguagagcagagu

SEQ ID NO: 782697 - RNA, 19 nt, Artificial Sequence
  Description of Artificial Sequence: Synthetic oligonucleotide
gcauuaguaaagccucucu

SEQ ID NO: 782698 - RNA, 19 nt, Artificial Sequence
  Description of Artificial Sequence: Synthetic oligonucleotide
ugacaccggaauggggaau

SEQ ID NO: 782699 - RNA, 19 nt, Artificial Sequence
  Description of Artificial Sequence: Synthetic oligonucleotide
acagccuauucuacccuaa

SEQ ID NO: 782700 - RNA, 19 nt, Artificial Sequence
  Description of Artificial Sequence: Synthetic oligonucleotide
caaguguggcuggugcuca

SEQ ID NO: 782701 - RNA, 19 nt, Artificial Sequence
  Description of Artificial Sequence: Synthetic oligonucleotide
cuacgguauuugccacaac

SEQ ID NO: 782702 - RNA, 19 nt, Artificial Sequence
  Description of Artificial Sequence: Synthetic oligonucleotide
cgcacauuuaaagcuaauc

SEQ ID NO: 782703 - RNA, 19 nt, Artificial Sequence
  Description of Artificial Sequence: Synthetic oligonucleotide
ggaccaagcucugcagagc

SEQ ID NO: 782704 - RNA, 19 nt, Artificial Sequence
  Description of Artificial Sequence: Synthetic oligonucleotide
gcgacuacuaaugguggga

SEQ ID NO: 782705 - RNA, 19 nt, Artificial Sequence
  Description of Artificial Sequence: Synthetic oligonucleotide
cugcaucaagaacugaguu

SEQ ID NO: 782706 - RNA, 19 nt, Artificial Sequence
  Description of Artificial Sequence: Synthetic oligonucleotide
ugucaacuugagggucgcu

SEQ ID NO: 782707 - RNA, 19 nt, Artificial Sequence
  Description of Artificial Sequence: Synthetic oligonucleotide
ccuuaauuuugguaccgua

SEQ ID NO: 782708 - RNA, 19 nt, Artificial Sequence
  Description of Artificial Sequence: Synthetic oligonucleotide
ccacugggcgaagauaaug

SEQ ID NO: 782709 - RNA, 19 nt, Artificial Sequence
  Description of Artificial Sequence: Synthetic oligonucleotide
ccugaacuaugcugcccag

SEQ ID NO: 782710 - RNA, 19 nt, Artificial Sequence
  Description of Artificial Sequence: Synthetic oligonucleotide
agcucuccacagucuguua

SEQ ID NO: 782711 - RNA, 19 nt, Artificial Sequence
  Description of Artificial Sequence: Synthetic oligonucleotide
cgguguugaaacaugguua

SEQ ID NO: 782712 - RNA, 19 nt, Artificial Sequence
  Description of Artificial Sequence: Synthetic oligonucleotide
gguauggggcuuucuauuu

SEQ ID NO: 782713 - RNA, 19 nt, Artificial Sequence
  Description of Artificial Sequence: Synthetic oligonucleotide
gaggaugcuuccucauauu

SEQ ID NO: 782714 - RNA, 19 nt, Artificial Sequence
  Description of Artificial Sequence: Synthetic oligonucleotide
gaccuggguugcacuuuug

SEQ ID NO: 782715 - RNA, 19 nt, Artificial Sequence
  Description of Artificial Sequence: Synthetic oligonucleotide
caguacgacccucaaguuu

SEQ ID NO: 782716 - RNA, 19 nt, Artificial Sequence
  Description of Artificial Sequence: Synthetic oligonucleotide
ggcauauuuucauccugau

SEQ ID NO: 782717 - RNA, 19 nt, Artificial Sequence
  Description of Artificial Sequence: Synthetic oligonucleotide
cucuccacagucuguuaau

SEQ ID NO: 782718 - RNA, 19 nt, Artificial Sequence
  Description of Artificial Sequence: Synthetic oligonucleotide
gagcauggcccuucaugau

SEQ ID NO: 782719 - RNA, 19 nt, Artificial Sequence
  Description of Artificial Sequence: Synthetic oligonucleotide
guaccguacuuaacacaaa

SEQ ID NO: 782720 - RNA, 19 nt, Artificial Sequence
  Description of Artificial Sequence: Synthetic oligonucleotide
cacaaagcucgucugucuu

SEQ ID NO: 782721 - RNA, 19 nt, Artificial Sequence
  Description of Artificial Sequence: Synthetic oligonucleotide
ccgaauggaccaagcucug

SEQ ID NO: 782722 - RNA, 19 nt, Artificial Sequence
  Description of Artificial Sequence: Synthetic oligonucleotide
cagaaugcucaacgcacau

SEQ ID NO: 782723 - RNA, 19 nt, Artificial Sequence
  Description of Artificial Sequence: Synthetic oligonucleotide
cgacuacuaauggugggac

SEQ ID NO: 782724 - RNA, 19 nt, Artificial Sequence
  Description of Artificial Sequence: Synthetic oligonucleotide
acgcacauuuaaagcuaau

SEQ ID NO: 782725 - RNA, 19 nt, Artificial Sequence
  Description of Artificial Sequence: Synthetic oligonucleotide
cacccuuucugaucgccau

SEQ ID NO: 782726 - RNA, 19 nt, Artificial Sequence
  Description of Artificial Sequence: Synthetic oligonucleotide
gcguguguucagaaugcuc

SEQ ID NO: 782727 - RNA, 19 nt, Artificial Sequence
  Description of Artificial Sequence: Synthetic oligonucleotide
ggguacguuuguaaugccu

SEQ ID NO: 782728 - RNA, 19 nt, Artificial Sequence
  Description of Artificial Sequence: Synthetic oligonucleotide
ccucacgaugcugcucucc

SEQ ID NO: 782729 - RNA, 19 nt, Artificial Sequence
  Description of Artificial Sequence: Synthetic oligonucleotide
cuaagcaaguguggcuggu

SEQ ID NO: 782730 - RNA, 19 nt, Artificial Sequence
  Description of Artificial Sequence: Synthetic oligonucleotide
guacgacccucaaguuuuc

SEQ ID NO: 782731 - RNA, 19 nt, Artificial Sequence
  Description of Artificial Sequence: Synthetic oligonucleotide
ggccuuuuggcaguuugcu

SEQ ID NO: 782732 - RNA, 19 nt, Artificial Sequence
  Description of Artificial Sequence: Synthetic oligonucleotide
cuggaggggcacgcugcug

SEQ ID NO: 782733 - RNA, 19 nt, Artificial Sequence
  Description of Artificial Sequence: Synthetic oligonucleotide
gucgcucauuugcuuacuu

SEQ ID NO: 782734 - RNA, 19 nt, Artificial Sequence
  Description of Artificial Sequence: Synthetic oligonucleotide
ccuuaagagucgcucauuu

SEQ ID NO: 782735 - RNA, 19 nt, Artificial Sequence
  Description of Artificial Sequence: Synthetic oligonucleotide
cuggugcucagccuuuguu

SEQ ID NO: 782736 - RNA, 19 nt, Artificial Sequence
  Description of Artificial Sequence: Synthetic oligonucleotide
gggaggagacugaacugua

SEQ ID NO: 782737 - RNA, 19 nt, Artificial Sequence
  Description of Artificial Sequence: Synthetic oligonucleotide
gacucacagcugguguuuu

SEQ ID NO: 782738 - RNA, 19 nt, Artificial Sequence
  Description of Artificial Sequence: Synthetic oligonucleotide
ggggcacgcugcugucccc

SEQ ID NO: 782739 - RNA, 19 nt, Artificial Sequence
  Description of Artificial Sequence: Synthetic oligonucleotide
ggacaaccacugggcgaag

SEQ ID NO: 782740 - RNA, 19 nt, Artificial Sequence
  Description of Artificial Sequence: Synthetic oligonucleotide
ggauuagguauggggcuuu

SEQ ID NO: 782741 - RNA, 19 nt, Artificial Sequence
  Description of Artificial Sequence: Synthetic oligonucleotide
cucagccuuuguucacguu

SEQ ID NO: 782742 - RNA, 19 nt, Artificial Sequence
  Description of Artificial Sequence: Synthetic oligonucleotide
cgguauuugccacaacauu

SEQ ID NO: 782743 - RNA, 19 nt, Artificial Sequence
  Description of Artificial Sequence: Synthetic oligonucleotide
ggguugcacuuuugacagu

SEQ ID NO: 782744 - RNA, 19 nt, Artificial Sequence
  Description of Artificial Sequence: Synthetic oligonucleotide
ggcccuucaugaucacauu

SEQ ID NO: 782745 - RNA, 19 nt, Artificial Sequence
  Description of Artificial Sequence: Synthetic oligonucleotide
auuggaaucacaucaagcc

SEQ ID NO: 782746 - RNA, 19 nt, Artificial Sequence
  Description of Artificial Sequence: Synthetic oligonucleotide
ucagauauucagaacaugg

SEQ ID NO: 782747 - RNA, 19 nt, Artificial Sequence
  Description of Artificial Sequence: Synthetic oligonucleotide
ucuuaaggcacuuagaaca

SEQ ID NO: 782748 - RNA, 19 nt, Artificial Sequence
  Description of Artificial Sequence: Synthetic oligonucleotide
acuauauucgaucugcaac

SEQ ID NO: 782749 - RNA, 19 nt, Artificial Sequence
  Description of Artificial Sequence: Synthetic oligonucleotide
auagcaaccauuugcaggg

SEQ ID NO: 782750 - RNA, 19 nt, Artificial Sequence
  Description of Artificial Sequence: Synthetic oligonucleotide
aacuacaauucacagacug

SEQ ID NO: 782751 - RNA, 19 nt, Artificial Sequence
  Description of Artificial Sequence: Synthetic oligonucleotide
agauauucagaacauggac

SEQ ID NO: 782752 - RNA, 19 nt, Artificial Sequence
  Description of Artificial Sequence: Synthetic oligonucleotide
uguaccaagcuguagagcc

SEQ ID NO: 782753 - RNA, 19 nt, Artificial Sequence
  Description of Artificial Sequence: Synthetic oligonucleotide
uagaauugcugcaugauug

SEQ ID NO: 782754 - RNA, 19 nt, Artificial Sequence
  Description of Artificial Sequence: Synthetic oligonucleotide
uguuuaugaaaauagcaac

SEQ ID NO: 782755 - RNA, 19 nt, Artificial Sequence
  Description of Artificial Sequence: Synthetic oligonucleotide
uggacuauggcuuaugugu

SEQ ID NO: 782756 - RNA, 19 nt, Artificial Sequence
  Description of Artificial Sequence: Synthetic oligonucleotide
ucuaagaacugccacccgg

SEQ ID NO: 782757 - RNA, 19 nt, Artificial Sequence
  Description of Artificial Sequence: Synthetic oligonucleotide
aucauaacaguagaauugc

SEQ ID NO: 782758 - RNA, 19 nt, Artificial Sequence
  Description of Artificial Sequence: Synthetic oligonucleotide
gugacuaacaggcaguggg

SEQ ID NO: 782759 - RNA, 19 nt, Artificial Sequence
  Description of Artificial Sequence: Synthetic oligonucleotide
ugcccagugacuaacaggc

SEQ ID NO: 782760 - RNA, 19 nt, Artificial Sequence
  Description of Artificial Sequence: Synthetic oligonucleotide
uuaagcagcaaccgaauga

SEQ ID NO: 782761 - RNA, 19 nt, Artificial Sequence
  Description of Artificial Sequence: Synthetic oligonucleotide
caucauaacaguagaauug

SEQ ID NO: 782762 - RNA, 19 nt, Artificial Sequence
  Description of Artificial Sequence: Synthetic oligonucleotide
uugagaauugaccucagau

SEQ ID NO: 782763 - RNA, 19 nt, Artificial Sequence
  Description of Artificial Sequence: Synthetic oligonucleotide
uguuaggacaaugaaccgg

SEQ ID NO: 782764 - RNA, 19 nt, Artificial Sequence
  Description of Artificial Sequence: Synthetic oligonucleotide
agaacugccacccggacug

SEQ ID NO: 782765 - RNA, 19 nt, Artificial Sequence
  Description of Artificial Sequence: Synthetic oligonucleotide
uuauuggagaguucuaaga

SEQ ID NO: 782766 - RNA, 19 nt, Artificial Sequence
  Description of Artificial Sequence: Synthetic oligonucleotide
uauuggagaguucuaagaa

SEQ ID NO: 782767 - RNA, 19 nt, Artificial Sequence
  Description of Artificial Sequence: Synthetic oligonucleotide
aacucaccaccacaggaac

SEQ ID NO: 782768 - RNA, 19 nt, Artificial Sequence
  Description of Artificial Sequence: Synthetic oligonucleotide
aacuacacugcuucucuag

SEQ ID NO: 782769 - RNA, 19 nt, Artificial Sequence
  Description of Artificial Sequence: Synthetic oligonucleotide
ucuauaugcaaagaucuga

SEQ ID NO: 782770 - RNA, 19 nt, Artificial Sequence
  Description of Artificial Sequence: Synthetic oligonucleotide
aggaucacaguucugaggu

SEQ ID NO: 782771 - RNA, 19 nt, Artificial Sequence
  Description of Artificial Sequence: Synthetic oligonucleotide
auuauuggagaguucuaag

SEQ ID NO: 782772 - RNA, 19 nt, Artificial Sequence
  Description of Artificial Sequence: Synthetic oligonucleotide
ugaugcauggcuagcaaug

SEQ ID NO: 782773 - RNA, 19 nt, Artificial Sequence
  Description of Artificial Sequence: Synthetic oligonucleotide
uacauggaaacaaaucccu

SEQ ID NO: 782774 - RNA, 19 nt, Artificial Sequence
  Description of Artificial Sequence: Synthetic oligonucleotide
uguucggccacaaaagacu

SEQ ID NO: 782775 - RNA, 19 nt, Artificial Sequence
  Description of Artificial Sequence: Synthetic oligonucleotide
uggaaucacaucaagcccu

SEQ ID NO: 782776 - RNA, 19 nt, Artificial Sequence
  Description of Artificial Sequence: Synthetic oligonucleotide
uuggaaucacaucaagccc

SEQ ID NO: 782777 - RNA, 19 nt, Artificial Sequence
  Description of Artificial Sequence: Synthetic oligonucleotide
uguagcgugcaaacaaucc

SEQ ID NO: 782778 - RNA, 19 nt, Artificial Sequence
  Description of Artificial Sequence: Synthetic oligonucleotide
ugacccucugaccaagucg

SEQ ID NO: 782779 - RNA, 19 nt, Artificial Sequence
  Description of Artificial Sequence: Synthetic oligonucleotide
auuugguaaugaugcaugg

SEQ ID NO: 782780 - RNA, 19 nt, Artificial Sequence
  Description of Artificial Sequence: Synthetic oligonucleotide
guuaggacaaugaaccggg

SEQ ID NO: 782781 - RNA, 19 nt, Artificial Sequence
  Description of Artificial Sequence: Synthetic oligonucleotide
cuggacaugaggcuuaagc

SEQ ID NO: 782782 - RNA, 19 nt, Artificial Sequence
  Description of Artificial Sequence: Synthetic oligonucleotide
uggacaugaggcuuaagca

SEQ ID NO: 782783 - RNA, 19 nt, Artificial Sequence
  Description of Artificial Sequence: Synthetic oligonucleotide
cauuggaaucacaucaagc

SEQ ID NO: 782784 - RNA, 19 nt, Artificial Sequence
  Description of Artificial Sequence: Synthetic oligonucleotide
augauugagaauugaccuc

SEQ ID NO: 782785 - RNA, 19 nt, Artificial Sequence
  Description of Artificial Sequence: Synthetic oligonucleotide
ucuccuaccaugcccagug

SEQ ID NO: 782786 - RNA, 19 nt, Artificial Sequence
  Description of Artificial Sequence: Synthetic oligonucleotide
ugugcuuaguggacggacg

SEQ ID NO: 782787 - RNA, 19 nt, Artificial Sequence
  Description of Artificial Sequence: Synthetic oligonucleotide
guaguggugauguguaggg

SEQ ID NO: 782788 - RNA, 19 nt, Artificial Sequence
  Description of Artificial Sequence: Synthetic oligonucleotide
uagcaugggaacuuguacc

SEQ ID NO: 782789 - RNA, 19 nt, Artificial Sequence
  Description of Artificial Sequence: Synthetic oligonucleotide
ucaacuacacugcuucucu

SEQ ID NO: 782790 - RNA, 19 nt, Artificial Sequence
  Description of Artificial Sequence: Synthetic oligonucleotide
ugauugagaauugaccuca

SEQ ID NO: 782791 - RNA, 19 nt, Artificial Sequence
  Description of Artificial Sequence: Synthetic oligonucleotide
augcgguccauauauuugg

SEQ ID NO: 782792 - RNA, 19 nt, Artificial Sequence
  Description of Artificial Sequence: Synthetic oligonucleotide
ucaucauaacaguagaauu

SEQ ID NO: 782793 - RNA, 19 nt, Artificial Sequence
  Description of Artificial Sequence: Synthetic oligonucleotide
uagcgugcaaacaauccag

SEQ ID NO: 782794 - RNA, 19 nt, Artificial Sequence
  Description of Artificial Sequence: Synthetic oligonucleotide
acauucacucgcucgcugc

SEQ ID NO: 782795 - RNA, 19 nt, Artificial Sequence
  Description of Artificial Sequence: Synthetic oligonucleotide
aaccacaacuacaauucac

SEQ ID NO: 782796 - RNA, 19 nt, Artificial Sequence
  Description of Artificial Sequence: Synthetic oligonucleotide
cacgugacaaccaaggcuc

SEQ ID NO: 782797 - RNA, 19 nt, Artificial Sequence
  Description of Artificial Sequence: Synthetic oligonucleotide
auucauucgaaagagucca

SEQ ID NO: 782798 - RNA, 19 nt, Artificial Sequence
  Description of Artificial Sequence: Synthetic oligonucleotide
cuuccccugacacugaggc

SEQ ID NO: 782799 - RNA, 19 nt, Artificial Sequence
  Description of Artificial Sequence: Synthetic oligonucleotide
aaaggggugauggcuugcc

SEQ ID NO: 782800 - RNA, 19 nt, Artificial Sequence
  Description of Artificial Sequence: Synthetic oligonucleotide
acuacacugcuucucuagg

SEQ ID NO: 782801 - RNA, 19 nt, Artificial Sequence
  Description of Artificial Sequence: Synthetic oligonucleotide
uugugaaacauuugcucca

SEQ ID NO: 782802 - RNA, 19 nt, Artificial Sequence
  Description of Artificial Sequence: Synthetic oligonucleotide
aacuguucggccacaaaag

SEQ ID NO: 782803 - RNA, 19 nt, Artificial Sequence
  Description of Artificial Sequence: Synthetic oligonucleotide
ugggaaagcguguggauug

SEQ ID NO: 782804 - RNA, 19 nt, Artificial Sequence
  Description of Artificial Sequence: Synthetic oligonucleotide
aacuauauucgaucugcaa

SEQ ID NO: 782805 - RNA, 19 nt, Artificial Sequence
  Description of Artificial Sequence: Synthetic oligonucleotide
aaauuucccauccgaccug

SEQ ID NO: 782806 - RNA, 19 nt, Artificial Sequence
  Description of Artificial Sequence: Synthetic oligonucleotide
uacaauucacagacugcag

SEQ ID NO: 782807 - RNA, 19 nt, Artificial Sequence
  Description of Artificial Sequence: Synthetic oligonucleotide
uucuguacguagcauggga

SEQ ID NO: 782808 - RNA, 19 nt, Artificial Sequence
  Description of Artificial Sequence: Synthetic oligonucleotide
cuguagagccauucaaagg

SEQ ID NO: 782809 - RNA, 19 nt, Artificial Sequence
  Description of Artificial Sequence: Synthetic oligonucleotide
uaucucaaguuguuccaag

SEQ ID NO: 782810 - RNA, 19 nt, Artificial Sequence
  Description of Artificial Sequence: Synthetic oligonucleotide
aaugaugcauggcuagcaa

SEQ ID NO: 782811 - RNA, 19 nt, Artificial Sequence
  Description of Artificial Sequence: Synthetic oligonucleotide
cauucgaaagaguccagug

SEQ ID NO: 782812 - RNA, 19 nt, Artificial Sequence
  Description of Artificial Sequence: Synthetic oligonucleotide
gaaauuucccauccgaccu

SEQ ID NO: 782813 - RNA, 19 nt, Artificial Sequence
  Description of Artificial Sequence: Synthetic oligonucleotide
caugauugagaauugaccu

SEQ ID NO: 782814 - RNA, 19 nt, Artificial Sequence
  Description of Artificial Sequence: Synthetic oligonucleotide
gaggcuuaagcagcaaccg

SEQ ID NO: 782815 - RNA, 19 nt, Artificial Sequence
  Description of Artificial Sequence: Synthetic oligonucleotide
guaaaccaaggccacauuc

SEQ ID NO: 782816 - RNA, 19 nt, Artificial Sequence
  Description of Artificial Sequence: Synthetic oligonucleotide
aaacguaaagggaaaacua

SEQ ID NO: 782817 - RNA, 19 nt, Artificial Sequence
  Description of Artificial Sequence: Synthetic oligonucleotide
aacguaaagggaaaacuau

SEQ ID NO: 782818 - RNA, 19 nt, Artificial Sequence
  Description of Artificial Sequence: Synthetic oligonucleotide
aaaccacaacuacaauuca

SEQ ID NO: 782819 - RNA, 19 nt, Artificial Sequence
  Description of Artificial Sequence: Synthetic oligonucleotide
uccucuuuauucauucgaa

SEQ ID NO: 782820 - RNA, 19 nt, Artificial Sequence
  Description of Artificial Sequence: Synthetic oligonucleotide
uggggaguaagcccaaagu

SEQ ID NO: 782821 - RNA, 19 nt, Artificial Sequence
  Description of Artificial Sequence: Synthetic oligonucleotide
gguaaugaugcauggcuag

SEQ ID NO: 782822 - RNA, 19 nt, Artificial Sequence
  Description of Artificial Sequence: Synthetic oligonucleotide
ggacaugaggcuuaagcag

SEQ ID NO: 782823 - RNA, 19 nt, Artificial Sequence
  Description of Artificial Sequence: Synthetic oligonucleotide
caaugaaccgggaaaccac

SEQ ID NO: 782824 - RNA, 19 nt, Artificial Sequence
  Description of Artificial Sequence: Synthetic oligonucleotide
gaaagcguguggauugggg

SEQ ID NO: 782825 - RNA, 19 nt, Artificial Sequence
  Description of Artificial Sequence: Synthetic oligonucleotide
ucuguacguagcaugggaa

SEQ ID NO: 782826 - RNA, 19 nt, Artificial Sequence
  Description of Artificial Sequence: Synthetic oligonucleotide
ugugcuuuucaccaacguu

SEQ ID NO: 782827 - RNA, 19 nt, Artificial Sequence
  Description of Artificial Sequence: Synthetic oligonucleotide
caugggaacuuguaccaag

SEQ ID NO: 782828 - RNA, 19 nt, Artificial Sequence
  Description of Artificial Sequence: Synthetic oligonucleotide
gaguucuaagaacugccac

SEQ ID NO: 782829 - RNA, 19 nt, Artificial Sequence
  Description of Artificial Sequence: Synthetic oligonucleotide
aagaacugccacccggacu

SEQ ID NO: 782830 - RNA, 19 nt, Artificial Sequence
  Description of Artificial Sequence: Synthetic oligonucleotide
uccaaccuuccccugacac

SEQ ID NO: 782831 - RNA, 19 nt, Artificial Sequence
  Description of Artificial Sequence: Synthetic oligonucleotide
cucuuaaggcacuuagaac

SEQ ID NO: 782832 - RNA, 19 nt, Artificial Sequence
  Description of Artificial Sequence: Synthetic oligonucleotide
guagcaugggaacuuguac

SEQ ID NO: 782833 - RNA, 19 nt, Artificial Sequence
  Description of Artificial Sequence: Synthetic oligonucleotide
cauggcuagcaauggacag

SEQ ID NO: 782834 - RNA, 19 nt, Artificial Sequence
  Description of Artificial Sequence: Synthetic oligonucleotide
agaauugcugcaugauuga

SEQ ID NO: 782835 - RNA, 19 nt, Artificial Sequence
  Description of Artificial Sequence: Synthetic oligonucleotide
guaacucaccaccacagga

SEQ ID NO: 782836 - RNA, 19 nt, Artificial Sequence
  Description of Artificial Sequence: Synthetic oligonucleotide
uccucuaccaaagggguga

SEQ ID NO: 782837 - RNA, 19 nt, Artificial Sequence
  Description of Artificial Sequence: Synthetic oligonucleotide
uccauauauuugguaauga

SEQ ID NO: 782838 - RNA, 19 nt, Artificial Sequence
  Description of Artificial Sequence: Synthetic oligonucleotide
gaaacguaaagggaaaacu

SEQ ID NO: 782839 - RNA, 19 nt, Artificial Sequence
  Description of Artificial Sequence: Synthetic oligonucleotide
agugcacuccucuugugcu

SEQ ID NO: 782840 - RNA, 19 nt, Artificial Sequence
  Description of Artificial Sequence: Synthetic oligonucleotide
acaguagaauugcugcaug

SEQ ID NO: 782841 - RNA, 19 nt, Artificial Sequence
  Description of Artificial Sequence: Synthetic oligonucleotide
ugcaaagaucugaaauuuc

SEQ ID NO: 782842 - RNA, 19 nt, Artificial Sequence
  Description of Artificial Sequence: Synthetic oligonucleotide
cuauauucgaucugcaacu

SEQ ID NO: 782843 - RNA, 19 nt, Artificial Sequence
  Description of Artificial Sequence: Synthetic oligonucleotide
gcaaagaucugaaauuucc

SEQ ID NO: 782844 - RNA, 19 nt, Artificial Sequence
  Description of Artificial Sequence: Synthetic oligonucleotide
gcuguagagccauucaaag

SEQ ID NO: 782845 - RNA, 19 nt, Artificial Sequence
  Description of Artificial Sequence: Synthetic oligonucleotide
aaugaaccgggaaaccaca

SEQ ID NO: 782846 - RNA, 19 nt, Artificial Sequence
  Description of Artificial Sequence: Synthetic oligonucleotide
uuaguggacggacggcccc

SEQ ID NO: 782847 - RNA, 19 nt, Artificial Sequence
  Description of Artificial Sequence: Synthetic oligonucleotide
uauauucgaucugcaacug

SEQ ID NO: 782848 - RNA, 19 nt, Artificial Sequence
  Description of Artificial Sequence: Synthetic oligonucleotide
ugaccucagauuaucucaa

SEQ ID NO: 782849 - RNA, 19 nt, Artificial Sequence
  Description of Artificial Sequence: Synthetic oligonucleotide
cuaggguucagaugacaac

SEQ ID NO: 782850 - RNA, 19 nt, Artificial Sequence
  Description of Artificial Sequence: Synthetic oligonucleotide
auggcuugccaugcggucc

SEQ ID NO: 782851 - RNA, 19 nt, Artificial Sequence
  Description of Artificial Sequence: Synthetic oligonucleotide
acaaugaaccgggaaacca

SEQ ID NO: 782852 - RNA, 19 nt, Artificial Sequence
  Description of Artificial Sequence: Synthetic oligonucleotide
guagcgugcaaacaaucca

SEQ ID NO: 782853 - RNA, 19 nt, Artificial Sequence
  Description of Artificial Sequence: Synthetic oligonucleotide
acuaacaggcaguggggug

SEQ ID NO: 782854 - RNA, 19 nt, Artificial Sequence
  Description of Artificial Sequence: Synthetic oligonucleotide
uucauucgaaagaguccag

SEQ ID NO: 782855 - RNA, 19 nt, Artificial Sequence
  Description of Artificial Sequence: Synthetic oligonucleotide
uuuggggcagaugaucucu

SEQ ID NO: 782856 - RNA, 19 nt, Artificial Sequence
  Description of Artificial Sequence: Synthetic oligonucleotide
uauggcuuauguguacaug

SEQ ID NO: 782857 - RNA, 19 nt, Artificial Sequence
  Description of Artificial Sequence: Synthetic oligonucleotide
gugcuuaguggacggacgg

SEQ ID NO: 782858 - RNA, 19 nt, Artificial Sequence
  Description of Artificial Sequence: Synthetic oligonucleotide
ugaaccgggaaaccacaac

SEQ ID NO: 782859 - RNA, 19 nt, Artificial Sequence
  Description of Artificial Sequence: Synthetic oligonucleotide
cuuaagcagcaaccgaaug

SEQ ID NO: 782860 - RNA, 19 nt, Artificial Sequence
  Description of Artificial Sequence: Synthetic oligonucleotide
ugguaaugaugcauggcua

SEQ ID NO: 782861 - RNA, 19 nt, Artificial Sequence
  Description of Artificial Sequence: Synthetic oligonucleotide
uagaacagaggaugugcac

SEQ ID NO: 782862 - RNA, 19 nt, Artificial Sequence
  Description of Artificial Sequence: Synthetic oligonucleotide
cagauauucagaacaugga

SEQ ID NO: 782863 - RNA, 19 nt, Artificial Sequence
  Description of Artificial Sequence: Synthetic oligonucleotide
cuguacguagcaugggaac

SEQ ID NO: 782864 - RNA, 19 nt, Artificial Sequence
  Description of Artificial Sequence: Synthetic oligonucleotide
ugagguucagguugugaaa

SEQ ID NO: 782865 - RNA, 19 nt, Artificial Sequence
  Description of Artificial Sequence: Synthetic oligonucleotide
cuuaguggacggacggccc

SEQ ID NO: 782866 - RNA, 19 nt, Artificial Sequence
  Description of Artificial Sequence: Synthetic oligonucleotide
gcaugauugagaauugacc

SEQ ID NO: 782867 - RNA, 19 nt, Artificial Sequence
  Description of Artificial Sequence: Synthetic oligonucleotide
cauuuggccccuagaaaug

SEQ ID NO: 782868 - RNA, 19 nt, Artificial Sequence
  Description of Artificial Sequence: Synthetic oligonucleotide
aacuuguaccaagcuguag

SEQ ID NO: 782869 - RNA, 19 nt, Artificial Sequence
  Description of Artificial Sequence: Synthetic oligonucleotide
agcccaugcagcagaaagc

SEQ ID NO: 782870 - RNA, 19 nt, Artificial Sequence
  Description of Artificial Sequence: Synthetic oligonucleotide
caaccuuccccugacacug

SEQ ID NO: 782871 - RNA, 19 nt, Artificial Sequence
  Description of Artificial Sequence: Synthetic oligonucleotide
uccccugacacugaggcaa

SEQ ID NO: 782872 - RNA, 19 nt, Artificial Sequence
  Description of Artificial Sequence: Synthetic oligonucleotide
uuggccccuagaaaugacu

SEQ ID NO: 782873 - RNA, 19 nt, Artificial Sequence
  Description of Artificial Sequence: Synthetic oligonucleotide
ccaacguucuucuuggaac

SEQ ID NO: 782874 - RNA, 19 nt, Artificial Sequence
  Description of Artificial Sequence: Synthetic oligonucleotide
cugaccaagucgacccugg

SEQ ID NO: 782875 - RNA, 19 nt, Artificial Sequence
  Description of Artificial Sequence: Synthetic oligonucleotide
gacuauggcuuauguguac

SEQ ID NO: 782876 - RNA, 19 nt, Artificial Sequence
  Description of Artificial Sequence: Synthetic oligonucleotide
gacaaugaaccgggaaacc

SEQ ID NO: 782877 - RNA, 19 nt, Artificial Sequence
  Description of Artificial Sequence: Synthetic oligonucleotide
auauucgaucugcaacugu

SEQ ID NO: 782878 - RNA, 19 nt, Artificial Sequence
  Description of Artificial Sequence: Synthetic oligonucleotide
ugauuauuggagaguucua

SEQ ID NO: 782879 - RNA, 19 nt, Artificial Sequence
  Description of Artificial Sequence: Synthetic oligonucleotide
uaagaacugccacccggac

SEQ ID NO: 782880 - RNA, 19 nt, Artificial Sequence
  Description of Artificial Sequence: Synthetic oligonucleotide
uccuaccaugcccagugac

SEQ ID NO: 782881 - RNA, 19 nt, Artificial Sequence
  Description of Artificial Sequence: Synthetic oligonucleotide
auugagaauugaccucaga

SEQ ID NO: 782882 - RNA, 19 nt, Artificial Sequence
  Description of Artificial Sequence: Synthetic oligonucleotide
gugauuauuggagaguucu

SEQ ID NO: 782883 - RNA, 19 nt, Artificial Sequence
  Description of Artificial Sequence: Synthetic oligonucleotide
aacguucuucuuggaacag

SEQ ID NO: 782884 - RNA, 19 nt, Artificial Sequence
  Description of Artificial Sequence: Synthetic oligonucleotide
cuggucaccgagucuuucc

SEQ ID NO: 782885 - RNA, 19 nt, Artificial Sequence
  Description of Artificial Sequence: Synthetic oligonucleotide
gggucgguaacucaccacc

SEQ ID NO: 782886 - RNA, 19 nt, Artificial Sequence
  Description of Artificial Sequence: Synthetic oligonucleotide
agcaacuccccugggaaag

SEQ ID NO: 782887 - RNA, 19 nt, Artificial Sequence
  Description of Artificial Sequence: Synthetic oligonucleotide
uggugauuauuggagaguu

SEQ ID NO: 782888 - RNA, 19 nt, Artificial Sequence
  Description of Artificial Sequence: Synthetic oligonucleotide
uggccccuagaaaugacuc

SEQ ID NO: 782889 - RNA, 19 nt, Artificial Sequence
  Description of Artificial Sequence: Synthetic oligonucleotide
ggagagcagagauucauuc

SEQ ID NO: 782890 - RNA, 19 nt, Artificial Sequence
  Description of Artificial Sequence: Synthetic oligonucleotide
uccucuugaucggaguggc

SEQ ID NO: 782891 - RNA, 19 nt, Artificial Sequence
  Description of Artificial Sequence: Synthetic oligonucleotide
ucgacccuggccacaacac

SEQ ID NO: 782892 - RNA, 19 nt, Artificial Sequence
  Description of Artificial Sequence: Synthetic oligonucleotide
uuccucuaccaaaggggug

SEQ ID NO: 782893 - RNA, 19 nt, Artificial Sequence
  Description of Artificial Sequence: Synthetic oligonucleotide
cuaagaacugccacccgga

SEQ ID NO: 782894 - RNA, 19 nt, Artificial Sequence
  Description of Artificial Sequence: Synthetic oligonucleotide
aguaacagagucccaucuu

SEQ ID NO: 782895 - RNA, 19 nt, Artificial Sequence
  Description of Artificial Sequence: Synthetic oligonucleotide
guaaugaugcauggcuagc

SEQ ID NO: 782896 - RNA, 19 nt, Artificial Sequence
  Description of Artificial Sequence: Synthetic oligonucleotide
gacccucugaccaagucga

SEQ ID NO: 782897 - RNA, 19 nt, Artificial Sequence
  Description of Artificial Sequence: Synthetic oligonucleotide
caacguucuucuuggaaca

SEQ ID NO: 782898 - RNA, 19 nt, Artificial Sequence
  Description of Artificial Sequence: Synthetic oligonucleotide
cacacgugacaaccaaggc

SEQ ID NO: 782899 - RNA, 19 nt, Artificial Sequence
  Description of Artificial Sequence: Synthetic oligonucleotide
uuaucucaaguuguuccaa

SEQ ID NO: 782900 - RNA, 19 nt, Artificial Sequence
  Description of Artificial Sequence: Synthetic oligonucleotide
auucuguacguagcauggg

SEQ ID NO: 782901 - RNA, 19 nt, Artificial Sequence
  Description of Artificial Sequence: Synthetic oligonucleotide
cuaguaguggugaugugua

SEQ ID NO: 782902 - RNA, 19 nt, Artificial Sequence
  Description of Artificial Sequence: Synthetic oligonucleotide
uuaggacaaugaaccggga

SEQ ID NO: 782903 - RNA, 19 nt, Artificial Sequence
  Description of Artificial Sequence: Synthetic oligonucleotide
uugugcuuaguggacggac

SEQ ID NO: 782904 - RNA, 19 nt, Artificial Sequence
  Description of Artificial Sequence: Synthetic oligonucleotide
gagccauucaaaggcuugc

SEQ ID NO: 782905 - RNA, 19 nt, Artificial Sequence
  Description of Artificial Sequence: Synthetic oligonucleotide
gggcaccucauucuguacg

SEQ ID NO: 782906 - RNA, 19 nt, Artificial Sequence
  Description of Artificial Sequence: Synthetic oligonucleotide
gaacaggggcugaucacag

SEQ ID NO: 782907 - RNA, 19 nt, Artificial Sequence
  Description of Artificial Sequence: Synthetic oligonucleotide
accaacguucuucuuggaa

SEQ ID NO: 782908 - RNA, 19 nt, Artificial Sequence
  Description of Artificial Sequence: Synthetic oligonucleotide
aauguuccuggugauuauu

SEQ ID NO: 782909 - RNA, 19 nt, Artificial Sequence
  Description of Artificial Sequence: Synthetic oligonucleotide
ucugccccuaguaguggug

SEQ ID NO: 782910 - RNA, 19 nt, Artificial Sequence
  Description of Artificial Sequence: Synthetic oligonucleotide
ucggaguggcuucuguauc

SEQ ID NO: 782911 - RNA, 19 nt, Artificial Sequence
  Description of Artificial Sequence: Synthetic oligonucleotide
ggagaguucuaagaacugc

SEQ ID NO: 782912 - RNA, 19 nt, Artificial Sequence
  Description of Artificial Sequence: Synthetic oligonucleotide
ucccucugccccuaguagu

SEQ ID NO: 782913 - RNA, 19 nt, Artificial Sequence
  Description of Artificial Sequence: Synthetic oligonucleotide
cuguagcgugcaaacaauc

SEQ ID NO: 782914 - RNA, 19 nt, Artificial Sequence
  Description of Artificial Sequence: Synthetic oligonucleotide
acguucuucuuggaacagg

SEQ ID NO: 782915 - RNA, 19 nt, Artificial Sequence
  Description of Artificial Sequence: Synthetic oligonucleotide
ucugaccaagucgacccug

SEQ ID NO: 782916 - RNA, 19 nt, Artificial Sequence
  Description of Artificial Sequence: Synthetic oligonucleotide
uggcgggucgguaacucac

SEQ ID NO: 782917 - RNA, 19 nt, Artificial Sequence
  Description of Artificial Sequence: Synthetic oligonucleotide
ggccacauucacucgcucg

SEQ ID NO: 782918 - RNA, 19 nt, Artificial Sequence
  Description of Artificial Sequence: Synthetic oligonucleotide
ugcgguccauauauuuggu

SEQ ID NO: 782919 - RNA, 19 nt, Artificial Sequence
  Description of Artificial Sequence: Synthetic oligonucleotide
agcgugcaaacaauccagg

SEQ ID NO: 782920 - RNA, 19 nt, Artificial Sequence
  Description of Artificial Sequence: Synthetic oligonucleotide
gguguagguggguaaacca

SEQ ID NO: 782921 - RNA, 19 nt, Artificial Sequence
  Description of Artificial Sequence: Synthetic oligonucleotide
aggcuuaagcagcaaccga

SEQ ID NO: 782922 - RNA, 19 nt, Artificial Sequence
  Description of Artificial Sequence: Synthetic oligonucleotide
acauggaaacaaaucccug

SEQ ID NO: 782923 - RNA, 19 nt, Artificial Sequence
  Description of Artificial Sequence: Synthetic oligonucleotide
auuuggccccuagaaauga

SEQ ID NO: 782924 - RNA, 19 nt, Artificial Sequence
  Description of Artificial Sequence: Synthetic oligonucleotide
uucaggcacaugacccucu

SEQ ID NO: 782925 - RNA, 19 nt, Artificial Sequence
  Description of Artificial Sequence: Synthetic oligonucleotide
gaccugugcaccacguggc

SEQ ID NO: 782926 - RNA, 19 nt, Artificial Sequence
  Description of Artificial Sequence: Synthetic oligonucleotide
acaauccagguggaaacgu

SEQ ID NO: 782927 - RNA, 19 nt, Artificial Sequence
  Description of Artificial Sequence: Synthetic oligonucleotide
uacguagcaugggaacuug

SEQ ID NO: 782928 - RNA, 19 nt, Artificial Sequence
  Description of Artificial Sequence: Synthetic oligonucleotide
ugaccaagucgacccuggc

SEQ ID NO: 782929 - RNA, 19 nt, Artificial Sequence
  Description of Artificial Sequence: Synthetic oligonucleotide
gccacauucacucgcucgc

SEQ ID NO: 782930 - RNA, 19 nt, Artificial Sequence
  Description of Artificial Sequence: Synthetic oligonucleotide
ggaaacguaaagggaaaac

SEQ ID NO: 782931 - RNA, 19 nt, Artificial Sequence
  Description of Artificial Sequence: Synthetic oligonucleotide
ccuuuggguuuauugagac

SEQ ID NO: 782932 - RNA, 19 nt, Artificial Sequence
  Description of Artificial Sequence: Synthetic oligonucleotide
uagagccauucaaaggcuu

SEQ ID NO: 782933 - RNA, 19 nt, Artificial Sequence
  Description of Artificial Sequence: Synthetic oligonucleotide
uggaaacguaaagggaaaa

SEQ ID NO: 782934 - RNA, 19 nt, Artificial Sequence
  Description of Artificial Sequence: Synthetic oligonucleotide
gaggcaaauucucaggcuu

SEQ ID NO: 782935 - RNA, 19 nt, Artificial Sequence
  Description of Artificial Sequence: Synthetic oligonucleotide
aggggugauggcuugccau

SEQ ID NO: 782936 - RNA, 19 nt, Artificial Sequence
  Description of Artificial Sequence: Synthetic oligonucleotide
ggucccauugauccaggcc

SEQ ID NO: 782937 - RNA, 19 nt, Artificial Sequence
  Description of Artificial Sequence: Synthetic oligonucleotide
gucaucauaacaguagaau

SEQ ID NO: 782938 - RNA, 19 nt, Artificial Sequence
  Description of Artificial Sequence: Synthetic oligonucleotide
ggagugaauccugaccucc

SEQ ID NO: 782939 - RNA, 19 nt, Artificial Sequence
  Description of Artificial Sequence: Synthetic oligonucleotide
ggacaaugaaccgggaaac

SEQ ID NO: 782940 - RNA, 19 nt, Artificial Sequence
  Description of Artificial Sequence: Synthetic oligonucleotide
uggguggccggagugaauc

SEQ ID NO: 782941 - RNA, 19 nt, Artificial Sequence
  Description of Artificial Sequence: Synthetic oligonucleotide
cucucuuaaggcacuuaga

SEQ ID NO: 782942 - RNA, 19 nt, Artificial Sequence
  Description of Artificial Sequence: Synthetic oligonucleotide
caagcuguagagccauuca

SEQ ID NO: 782943 - RNA, 19 nt, Artificial Sequence
  Description of Artificial Sequence: Synthetic oligonucleotide
aaggccacauucacucgcu

SEQ ID NO: 782944 - RNA, 19 nt, Artificial Sequence
  Description of Artificial Sequence: Synthetic oligonucleotide
uucacucgcucgcugccau

SEQ ID NO: 782945 - RNA, 19 nt, Artificial Sequence
  Description of Artificial Sequence: Synthetic oligonucleotide
ccuccaaccccuccaaggg

SEQ ID NO: 782946 - RNA, 19 nt, Artificial Sequence
  Description of Artificial Sequence: Synthetic oligonucleotide
caaccgaaugacaugggcu

SEQ ID NO: 782947 - RNA, 19 nt, Artificial Sequence
  Description of Artificial Sequence: Synthetic oligonucleotide
gucgguaacucaccaccac

SEQ ID NO: 782948 - RNA, 19 nt, Artificial Sequence
  Description of Artificial Sequence: Synthetic oligonucleotide
ugcuuaguggacggacggc

SEQ ID NO: 782949 - RNA, 19 nt, Artificial Sequence
  Description of Artificial Sequence: Synthetic oligonucleotide
ccucuauaugcaaagaucu

SEQ ID NO: 782950 - RNA, 19 nt, Artificial Sequence
  Description of Artificial Sequence: Synthetic oligonucleotide
auccgaccugugcaccacg

SEQ ID NO: 782951 - RNA, 19 nt, Artificial Sequence
  Description of Artificial Sequence: Synthetic oligonucleotide
uccgaccugugcaccacgu

SEQ ID NO: 782952 - RNA, 19 nt, Artificial Sequence
  Description of Artificial Sequence: Synthetic oligonucleotide
aaccgggaaaccacaacua

SEQ ID NO: 782953 - RNA, 19 nt, Artificial Sequence
  Description of Artificial Sequence: Synthetic oligonucleotide
cacauucacucgcucgcug

SEQ ID NO: 782954 - RNA, 19 nt, Artificial Sequence
  Description of Artificial Sequence: Synthetic oligonucleotide
ugcuucucuaggguucaga

SEQ ID NO: 782955 - RNA, 19 nt, Artificial Sequence
  Description of Artificial Sequence: Synthetic oligonucleotide
gcuuauguguacauggaaa

SEQ ID NO: 782956 - RNA, 19 nt, Artificial Sequence
  Description of Artificial Sequence: Synthetic oligonucleotide
uuggcgggucgguaacuca

SEQ ID NO: 782957 - RNA, 19 nt, Artificial Sequence
  Description of Artificial Sequence: Synthetic oligonucleotide
acguaaagggaaaacuaua

SEQ ID NO: 782958 - RNA, 19 nt, Artificial Sequence
  Description of Artificial Sequence: Synthetic oligonucleotide
aucccauuuggccccuaga

SEQ ID NO: 782959 - RNA, 19 nt, Artificial Sequence
  Description of Artificial Sequence: Synthetic oligonucleotide
aaccccuccaaggguccuc

SEQ ID NO: 782960 - RNA, 19 nt, Artificial Sequence
  Description of Artificial Sequence: Synthetic oligonucleotide
gcuuaguggacggacggcc

SEQ ID NO: 782961 - RNA, 19 nt, Artificial Sequence
  Description of Artificial Sequence: Synthetic oligonucleotide
uggccggagugaauccuga

SEQ ID NO: 782962 - RNA, 19 nt, Artificial Sequence
  Description of Artificial Sequence: Synthetic oligonucleotide
gaucggaguggcuucugua

SEQ ID NO: 782963 - RNA, 19 nt, Artificial Sequence
  Description of Artificial Sequence: Synthetic oligonucleotide
caucccauuuggccccuag

SEQ ID NO: 782964 - RNA, 19 nt, Artificial Sequence
  Description of Artificial Sequence: Synthetic oligonucleotide
cagugacuaacaggcagug

SEQ ID NO: 782965 - RNA, 19 nt, Artificial Sequence
  Description of Artificial Sequence: Synthetic oligonucleotide
acuguagcgugcaaacaau

SEQ ID NO: 782966 - RNA, 19 nt, Artificial Sequence
  Description of Artificial Sequence: Synthetic oligonucleotide
gcccaugcagcagaaagcc

SEQ ID NO: 782967 - RNA, 19 nt, Artificial Sequence
  Description of Artificial Sequence: Synthetic oligonucleotide
ucugcguggggcaccucau

SEQ ID NO: 782968 - RNA, 19 nt, Artificial Sequence
  Description of Artificial Sequence: Synthetic oligonucleotide
gcccaaagucaucauaaca

SEQ ID NO: 782969 - RNA, 19 nt, Artificial Sequence
  Description of Artificial Sequence: Synthetic oligonucleotide
acgugacaaccaaggcucc

SEQ ID NO: 782970 - RNA, 19 nt, Artificial Sequence
  Description of Artificial Sequence: Synthetic oligonucleotide
agucgguguagguggguaa

SEQ ID NO: 782971 - RNA, 19 nt, Artificial Sequence
  Description of Artificial Sequence: Synthetic oligonucleotide
acacugaggcaaauucuca

SEQ ID NO: 782972 - RNA, 19 nt, Artificial Sequence
  Description of Artificial Sequence: Synthetic oligonucleotide
gccccuagaaaugacuccc

SEQ ID NO: 782973 - RNA, 19 nt, Artificial Sequence
  Description of Artificial Sequence: Synthetic oligonucleotide
gggcugaucacagucggug

SEQ ID NO: 782974 - RNA, 19 nt, Artificial Sequence
  Description of Artificial Sequence: Synthetic oligonucleotide
ggggugauggcuugccaug

SEQ ID NO: 782975 - RNA, 19 nt, Artificial Sequence
  Description of Artificial Sequence: Synthetic oligonucleotide
uggguaaaccaaggccaca

SEQ ID NO: 782976 - RNA, 19 nt, Artificial Sequence
  Description of Artificial Sequence: Synthetic oligonucleotide
guggguaaaccaaggccac

SEQ ID NO: 782977 - RNA, 19 nt, Artificial Sequence
  Description of Artificial Sequence: Synthetic oligonucleotide
agcaaccgaaugacauggg

SEQ ID NO: 782978 - RNA, 19 nt, Artificial Sequence
  Description of Artificial Sequence: Synthetic oligonucleotide
guguagguggguaaaccaa

SEQ ID NO: 782979 - RNA, 19 nt, Artificial Sequence
  Description of Artificial Sequence: Synthetic oligonucleotide
agcaaccauuugcagggua

SEQ ID NO: 782980 - RNA, 19 nt, Artificial Sequence
  Description of Artificial Sequence: Synthetic oligonucleotide
cgaccugugcaccacgugg

SEQ ID NO: 782981 - RNA, 19 nt, Artificial Sequence
  Description of Artificial Sequence: Synthetic oligonucleotide
ucccucaacuacacugcuu

SEQ ID NO: 782982 - RNA, 19 nt, Artificial Sequence
  Description of Artificial Sequence: Synthetic oligonucleotide
ggccccuagaaaugacucc

SEQ ID NO: 782983 - RNA, 19 nt, Artificial Sequence
  Description of Artificial Sequence: Synthetic oligonucleotide
uugccaugcgguccauaua

SEQ ID NO: 782984 - RNA, 19 nt, Artificial Sequence
  Description of Artificial Sequence: Synthetic oligonucleotide
ggcuuaagcagcaaccgaa

SEQ ID NO: 782985 - RNA, 19 nt, Artificial Sequence
  Description of Artificial Sequence: Synthetic oligonucleotide
ucgguguagguggguaaac

SEQ ID NO: 782986 - RNA, 19 nt, Artificial Sequence
  Description of Artificial Sequence: Synthetic oligonucleotide
guuccucuaccaaaggggu

SEQ ID NO: 782987 - RNA, 19 nt, Artificial Sequence
  Description of Artificial Sequence: Synthetic oligonucleotide
accugugcaccacguggcu

SEQ ID NO: 782988 - RNA, 19 nt, Artificial Sequence
  Description of Artificial Sequence: Synthetic oligonucleotide
guggaaacguaaagggaaa

SEQ ID NO: 782989 - RNA, 19 nt, Artificial Sequence
  Description of Artificial Sequence: Synthetic oligonucleotide
uaccaugcccagugacuaa

SEQ ID NO: 782990 - RNA, 19 nt, Artificial Sequence
  Description of Artificial Sequence: Synthetic oligonucleotide
ggcuuauguguacauggaa

SEQ ID NO: 782991 - RNA, 19 nt, Artificial Sequence
  Description of Artificial Sequence: Synthetic oligonucleotide
uggccacaacacacgugac

SEQ ID NO: 782992 - RNA, 19 nt, Artificial Sequence
  Description of Artificial Sequence: Synthetic oligonucleotide
aacuccccugggaaagcgu

SEQ ID NO: 782993 - RNA, 19 nt, Artificial Sequence
  Description of Artificial Sequence: Synthetic oligonucleotide
caguaacagagucccaucu

SEQ ID NO: 782994 - RNA, 19 nt, Artificial Sequence
  Description of Artificial Sequence: Synthetic oligonucleotide
cuaacaggcaguggggugu

SEQ ID NO: 782995 - RNA, 19 nt, Artificial Sequence
  Description of Artificial Sequence: Synthetic oligonucleotide
caguggggugugaugaaaa

SEQ ID NO: 782996 - RNA, 19 nt, Artificial Sequence
  Description of Artificial Sequence: Synthetic oligonucleotide
cuaccaugcccagugacua

SEQ ID NO: 782997 - RNA, 19 nt, Artificial Sequence
  Description of Artificial Sequence: Synthetic oligonucleotide
cucugcguggggcaccuca

SEQ ID NO: 782998 - RNA, 19 nt, Artificial Sequence
  Description of Artificial Sequence: Synthetic oligonucleotide
gugcggugguuucacccug

SEQ ID NO: 782999 - RNA, 19 nt, Artificial Sequence
  Description of Artificial Sequence: Synthetic oligonucleotide
cuuggcgggucgguaacuc

SEQ ID NO: 783000 - RNA, 19 nt, Artificial Sequence
  Description of Artificial Sequence: Synthetic oligonucleotide
ugguuucacccugggcccc

SEQ ID NO: 783001 - RNA, 19 nt, Artificial Sequence
  Description of Artificial Sequence: Synthetic oligonucleotide
agucgacccuggccacaac

SEQ ID NO: 783002 - RNA, 19 nt, Artificial Sequence
  Description of Artificial Sequence: Synthetic oligonucleotide
cacaaaagacugcccagcu

SEQ ID NO: 783003 - RNA, 19 nt, Artificial Sequence
  Description of Artificial Sequence: Synthetic oligonucleotide
auucacucgcucgcugcca

SEQ ID NO: 783004 - RNA, 19 nt, Artificial Sequence
  Description of Artificial Sequence: Synthetic oligonucleotide
ugaccuccugccgggaaau

SEQ ID NO: 783005 - RNA, 19 nt, Artificial Sequence
  Description of Artificial Sequence: Synthetic oligonucleotide
ggccacaacacacgugaca

SEQ ID NO: 783006 - RNA, 19 nt, Artificial Sequence
  Description of Artificial Sequence: Synthetic oligonucleotide
gcugcaugauugagaauug

SEQ ID NO: 783007 - RNA, 19 nt, Artificial Sequence
  Description of Artificial Sequence: Synthetic oligonucleotide
ugcaacuguucggccacaa

SEQ ID NO: 783008 - RNA, 19 nt, Artificial Sequence
  Description of Artificial Sequence: Synthetic oligonucleotide
guaccaagcuguagagcca

SEQ ID NO: 783009 - RNA, 19 nt, Artificial Sequence
  Description of Artificial Sequence: Synthetic oligonucleotide
guggccggagugaauccug

SEQ ID NO: 783010 - RNA, 19 nt, Artificial Sequence
  Description of Artificial Sequence: Synthetic oligonucleotide
uaguggacggacggccccu

SEQ ID NO: 783011 - RNA, 19 nt, Artificial Sequence
  Description of Artificial Sequence: Synthetic oligonucleotide
uucugagguucagguugug

SEQ ID NO: 783012 - RNA, 19 nt, Artificial Sequence
  Description of Artificial Sequence: Synthetic oligonucleotide
gcuuugcuggagcuuguuc

SEQ ID NO: 783013 - RNA, 19 nt, Artificial Sequence
  Description of Artificial Sequence: Synthetic oligonucleotide
ggacggacggccccucagc

SEQ ID NO: 783014 - RNA, 19 nt, Artificial Sequence
  Description of Artificial Sequence: Synthetic oligonucleotide
gcauggcuagcaauggaca

SEQ ID NO: 783015 - RNA, 19 nt, Artificial Sequence
  Description of Artificial Sequence: Synthetic oligonucleotide
ggaguaagcccaaagucau

SEQ ID NO: 783016 - RNA, 19 nt, Artificial Sequence
  Description of Artificial Sequence: Synthetic oligonucleotide
cauccgaccugugcaccac

SEQ ID NO: 783017 - RNA, 19 nt, Artificial Sequence
  Description of Artificial Sequence: Synthetic oligonucleotide
gguuggucccauugaucca

SEQ ID NO: 783018 - RNA, 19 nt, Artificial Sequence
  Description of Artificial Sequence: Synthetic oligonucleotide
ugccccuaguaguggugau

SEQ ID NO: 783019 - RNA, 19 nt, Artificial Sequence
  Description of Artificial Sequence: Synthetic oligonucleotide
ggugauuauuggagaguuc

SEQ ID NO: 783020 - RNA, 19 nt, Artificial Sequence
  Description of Artificial Sequence: Synthetic oligonucleotide
gacggacggccccucagcu

SEQ ID NO: 783021 - RNA, 19 nt, Artificial Sequence
  Description of Artificial Sequence: Synthetic oligonucleotide
gcuucucuaggguucagau

SEQ ID NO: 783022 - RNA, 19 nt, Artificial Sequence
  Description of Artificial Sequence: Synthetic oligonucleotide
gugacaaccaaggcucccu

SEQ ID NO: 783023 - RNA, 19 nt, Artificial Sequence
  Description of Artificial Sequence: Synthetic oligonucleotide
uagcaaccauuugcagggu

SEQ ID NO: 783024 - RNA, 19 nt, Artificial Sequence
  Description of Artificial Sequence: Synthetic oligonucleotide
gucgguguagguggguaaa

SEQ ID NO: 783025 - RNA, 19 nt, Artificial Sequence
  Description of Artificial Sequence: Synthetic oligonucleotide
gagugaauccugaccuccu

SEQ ID NO: 783026 - RNA, 19 nt, Artificial Sequence
  Description of Artificial Sequence: Synthetic oligonucleotide
caacuacacugcuucucua

SEQ ID NO: 783027 - RNA, 19 nt, Artificial Sequence
  Description of Artificial Sequence: Synthetic oligonucleotide
cuguguagaugaugaaauu

SEQ ID NO: 783028 - RNA, 19 nt, Artificial Sequence
  Description of Artificial Sequence: Synthetic oligonucleotide
aaccuuccccugacacuga

SEQ ID NO: 783029 - RNA, 19 nt, Artificial Sequence
  Description of Artificial Sequence: Synthetic oligonucleotide
gcggugguuucacccuggg

SEQ ID NO: 783030 - RNA, 19 nt, Artificial Sequence
  Description of Artificial Sequence: Synthetic oligonucleotide
cccuagaaaugacucccuc

SEQ ID NO: 783031 - RNA, 19 nt, Artificial Sequence
  Description of Artificial Sequence: Synthetic oligonucleotide
cuugugcuuaguggacgga

SEQ ID NO: 783032 - RNA, 19 nt, Artificial Sequence
  Description of Artificial Sequence: Synthetic oligonucleotide
acguagcaugggaacuugu

SEQ ID NO: 783033 - RNA, 19 nt, Artificial Sequence
  Description of Artificial Sequence: Synthetic oligonucleotide
cucuaccaaaggggugaug

SEQ ID NO: 783034 - RNA, 19 nt, Artificial Sequence
  Description of Artificial Sequence: Synthetic oligonucleotide
cugccccuaguagugguga

SEQ ID NO: 783035 - RNA, 19 nt, Artificial Sequence
  Description of Artificial Sequence: Synthetic oligonucleotide
ccucagauuaucucaaguu

SEQ ID NO: 783036 - RNA, 19 nt, Artificial Sequence
  Description of Artificial Sequence: Synthetic oligonucleotide
caaagacccuugggagaug

SEQ ID NO: 783037 - RNA, 19 nt, Artificial Sequence
  Description of Artificial Sequence: Synthetic oligonucleotide
ggugcggugguuucacccu

SEQ ID NO: 783038 - RNA, 19 nt, Artificial Sequence
  Description of Artificial Sequence: Synthetic oligonucleotide
ggucgguaacucaccacca

SEQ ID NO: 783039 - RNA, 19 nt, Artificial Sequence
  Description of Artificial Sequence: Synthetic oligonucleotide
cagcaacuccccugggaaa

SEQ ID NO: 783040 - RNA, 19 nt, Artificial Sequence
  Description of Artificial Sequence: Synthetic oligonucleotide
cugcccagcuagguugguc

SEQ ID NO: 783041 - RNA, 19 nt, Artificial Sequence
  Description of Artificial Sequence: Synthetic oligonucleotide
gaccuccugccgggaaaug

SEQ ID NO: 783042 - RNA, 19 nt, Artificial Sequence
  Description of Artificial Sequence: Synthetic oligonucleotide
gcccagcuagguugguccc

SEQ ID NO: 783043 - RNA, 19 nt, Artificial Sequence
  Description of Artificial Sequence: Synthetic oligonucleotide
guacguagcaugggaacuu

SEQ ID NO: 783044 - RNA, 19 nt, Artificial Sequence
  Description of Artificial Sequence: Synthetic oligonucleotide
caaugggcugaauguuccu

SEQ ID NO: 783045 - RNA, 19 nt, Artificial Sequence
  Description of Artificial Sequence: Synthetic oligonucleotide
ggggcaccucauucuguac

SEQ ID NO: 783046 - RNA, 19 nt, Artificial Sequence
  Description of Artificial Sequence: Synthetic oligonucleotide
cguggggcaccucauucug

SEQ ID NO: 783047 - RNA, 19 nt, Artificial Sequence
  Description of Artificial Sequence: Synthetic oligonucleotide
cgguguagguggguaaacc

SEQ ID NO: 783048 - RNA, 19 nt, Artificial Sequence
  Description of Artificial Sequence: Synthetic oligonucleotide
ggcgggucgguaacucacc

SEQ ID NO: 783049 - RNA, 19 nt, Artificial Sequence
  Description of Artificial Sequence: Synthetic oligonucleotide
aggcuugccuuuggguuua

SEQ ID NO: 783050 - RNA, 19 nt, Artificial Sequence
  Description of Artificial Sequence: Synthetic oligonucleotide
ccagugacuaacaggcagu

SEQ ID NO: 783051 - RNA, 19 nt, Artificial Sequence
  Description of Artificial Sequence: Synthetic oligonucleotide
ggguaaaccaaggccacau

SEQ ID NO: 783052 - RNA, 19 nt, Artificial Sequence
  Description of Artificial Sequence: Synthetic oligonucleotide
gcgugcaaacaauccaggu

SEQ ID NO: 783053 - RNA, 19 nt, Artificial Sequence
  Description of Artificial Sequence: Synthetic oligonucleotide
gccccuaguaguggugaug

SEQ ID NO: 783054 - RNA, 19 nt, Artificial Sequence
  Description of Artificial Sequence: Synthetic oligonucleotide
ggccggagugaauccugac

SEQ ID NO: 783055 - RNA, 19 nt, Artificial Sequence
  Description of Artificial Sequence: Synthetic oligonucleotide
caccaacguucuucuugga

SEQ ID NO: 783056 - RNA, 19 nt, Artificial Sequence
  Description of Artificial Sequence: Synthetic oligonucleotide
gcgggucgguaacucacca

SEQ ID NO: 783057 - RNA, 19 nt, Artificial Sequence
  Description of Artificial Sequence: Synthetic oligonucleotide
gcaacuguucggccacaaa

SEQ ID NO: 783058 - RNA, 19 nt, Artificial Sequence
  Description of Artificial Sequence: Synthetic oligonucleotide
cuccaaccuuccccugaca

SEQ ID NO: 783059 - RNA, 19 nt, Artificial Sequence
  Description of Artificial Sequence: Synthetic oligonucleotide
cucccucaacuacacugcu

SEQ ID NO: 783060 - RNA, 19 nt, Artificial Sequence
  Description of Artificial Sequence: Synthetic oligonucleotide
gacccucucuuaaggcacu

SEQ ID NO: 783061 - RNA, 19 nt, Artificial Sequence
  Description of Artificial Sequence: Synthetic oligonucleotide
cagucgguguaggugggua

SEQ ID NO: 783062 - RNA, 19 nt, Artificial Sequence
  Description of Artificial Sequence: Synthetic oligonucleotide
cagauuccucaucccauuu

SEQ ID NO: 783063 - RNA, 19 nt, Artificial Sequence
  Description of Artificial Sequence: Synthetic oligonucleotide
gacucccucugccccuagu

SEQ ID NO: 783064 - RNA, 19 nt, Artificial Sequence
  Description of Artificial Sequence: Synthetic oligonucleotide
guggacggacggccccuca

SEQ ID NO: 783065 - RNA, 19 nt, Artificial Sequence
  Description of Artificial Sequence: Synthetic oligonucleotide
ccauccgaccugugcacca

SEQ ID NO: 783066 - RNA, 19 nt, Artificial Sequence
  Description of Artificial Sequence: Synthetic oligonucleotide
gcuuaagcagcaaccgaau

SEQ ID NO: 783067 - RNA, 19 nt, Artificial Sequence
  Description of Artificial Sequence: Synthetic oligonucleotide
gguaaaccaaggccacauu

SEQ ID NO: 783068 - RNA, 19 nt, Artificial Sequence
  Description of Artificial Sequence: Synthetic oligonucleotide
ccgaccugugcaccacgug

SEQ ID NO: 783069 - RNA, 19 nt, Artificial Sequence
  Description of Artificial Sequence: Synthetic oligonucleotide
ccaaccuuccccugacacu

SEQ ID NO: 783070 - RNA, 19 nt, Artificial Sequence
  Description of Artificial Sequence: Synthetic oligonucleotide
ccaaagacccuugggagau

SEQ ID NO: 783071 - RNA, 19 nt, Artificial Sequence
  Description of Artificial Sequence: Synthetic oligonucleotide
cgagucuuuccagguguug

SEQ ID NO: 783072 - RNA, 19 nt, Artificial Sequence
  Description of Artificial Sequence: Synthetic oligonucleotide
cugcaacuguucggccaca

SEQ ID NO: 783073 - RNA, 19 nt, Artificial Sequence
  Description of Artificial Sequence: Synthetic oligonucleotide
guuucacccugggccccaa

SEQ ID NO: 783074 - RNA, 19 nt, Artificial Sequence
  Description of Artificial Sequence: Synthetic oligonucleotide
ccuggacaugaggcuuaag

SEQ ID NO: 783075 - RNA, 19 nt, Artificial Sequence
  Description of Artificial Sequence: Synthetic oligonucleotide
ccucaacuacacugcuucu

SEQ ID NO: 783076 - RNA, 19 nt, Artificial Sequence
  Description of Artificial Sequence: Synthetic oligonucleotide
ccacccggacuggacuaug

SEQ ID NO: 783077 - RNA, 19 nt, Artificial Sequence
  Description of Artificial Sequence: Synthetic oligonucleotide
ccccuagaaaugacucccu

SEQ ID NO: 783078 - RNA, 19 nt, Artificial Sequence
  Description of Artificial Sequence: Synthetic oligonucleotide
cuggguggccggagugaau

SEQ ID NO: 783079 - RNA, 19 nt, Artificial Sequence
  Description of Artificial Sequence: Synthetic oligonucleotide
caaccccuccaaggguccu

SEQ ID NO: 783080 - RNA, 19 nt, Artificial Sequence
  Description of Artificial Sequence: Synthetic oligonucleotide
cugcguggggcaccucauu

SEQ ID NO: 783081 - RNA, 19 nt, Artificial Sequence
  Description of Artificial Sequence: Synthetic oligonucleotide
ccgagucuuuccagguguu

SEQ ID NO: 783082 - RNA, 19 nt, Artificial Sequence
  Description of Artificial Sequence: Synthetic oligonucleotide
ccuuggcgggucgguaacu

SEQ ID NO: 783083 - RNA, 19 nt, Artificial Sequence
  Description of Artificial Sequence: Synthetic oligonucleotide
aaaagagggacccagauaa

SEQ ID NO: 783084 - RNA, 19 nt, Artificial Sequence
  Description of Artificial Sequence: Synthetic oligonucleotide
aaacauucguccuuucgcc

SEQ ID NO: 783085 - RNA, 19 nt, Artificial Sequence
  Description of Artificial Sequence: Synthetic oligonucleotide
aaucaagaggccuaguucu

SEQ ID NO: 783086 - RNA, 19 nt, Artificial Sequence
  Description of Artificial Sequence: Synthetic oligonucleotide
gacauuaucagguucaaca

SEQ ID NO: 783087 - RNA, 19 nt, Artificial Sequence
  Description of Artificial Sequence: Synthetic oligonucleotide
gauaauggcacggagaagc

SEQ ID NO: 783088 - RNA, 19 nt, Artificial Sequence
  Description of Artificial Sequence: Synthetic oligonucleotide
uaucuuaagacacaagauc

SEQ ID NO: 783089 - RNA, 19 nt, Artificial Sequence
  Description of Artificial Sequence: Synthetic oligonucleotide
aauucuuaguaguguuccc

SEQ ID NO: 783090 - RNA, 19 nt, Artificial Sequence
  Description of Artificial Sequence: Synthetic oligonucleotide
uucacauucagaccuagug

SEQ ID NO: 783091 - RNA, 19 nt, Artificial Sequence
  Description of Artificial Sequence: Synthetic oligonucleotide
uuaagacacaagaucaccc

SEQ ID NO: 783092 - RNA, 19 nt, Artificial Sequence
  Description of Artificial Sequence: Synthetic oligonucleotide
ucagguucaacacucaggu

SEQ ID NO: 783093 - RNA, 19 nt, Artificial Sequence
  Description of Artificial Sequence: Synthetic oligonucleotide
cacaagaucacccuugggg

SEQ ID NO: 783094 - RNA, 19 nt, Artificial Sequence
  Description of Artificial Sequence: Synthetic oligonucleotide
acauuaucagguucaacac

SEQ ID NO: 783095 - RNA, 19 nt, Artificial Sequence
  Description of Artificial Sequence: Synthetic oligonucleotide
agagucaagcuguacaggg

SEQ ID NO: 783096 - RNA, 19 nt, Artificial Sequence
  Description of Artificial Sequence: Synthetic oligonucleotide
uucgcucacacccucauag

SEQ ID NO: 783097 - RNA, 19 nt, Artificial Sequence
  Description of Artificial Sequence: Synthetic oligonucleotide
uggacuccuagccaggugg

SEQ ID NO: 783098 - RNA, 19 nt, Artificial Sequence
  Description of Artificial Sequence: Synthetic oligonucleotide
uacacacacacauacacac

SEQ ID NO: 783099 - RNA, 19 nt, Artificial Sequence
  Description of Artificial Sequence: Synthetic oligonucleotide
agacaaagcagugugagag

SEQ ID NO: 783100 - RNA, 19 nt, Artificial Sequence
  Description of Artificial Sequence: Synthetic oligonucleotide
aauggcacggagaagcagg

SEQ ID NO: 783101 - RNA, 19 nt, Artificial Sequence
  Description of Artificial Sequence: Synthetic oligonucleotide
uuuggcucugcccacagga

SEQ ID NO: 783102 - RNA, 19 nt, Artificial Sequence
  Description of Artificial Sequence: Synthetic oligonucleotide
aaacucauggaaugauuug

SEQ ID NO: 783103 - RNA, 19 nt, Artificial Sequence
  Description of Artificial Sequence: Synthetic oligonucleotide
ugucuuaggagccacccug

SEQ ID NO: 783104 - RNA, 19 nt, Artificial Sequence
  Description of Artificial Sequence: Synthetic oligonucleotide
ugcacacacacacauacac

SEQ ID NO: 783105 - RNA, 19 nt, Artificial Sequence
  Description of Artificial Sequence: Synthetic oligonucleotide
caaaggaugccucaccacg

SEQ ID NO: 783106 - RNA, 19 nt, Artificial Sequence
  Description of Artificial Sequence: Synthetic oligonucleotide
aacgugguuaguccugggg

SEQ ID NO: 783107 - RNA, 19 nt, Artificial Sequence
  Description of Artificial Sequence: Synthetic oligonucleotide
aacuaagggcaaucaagag

SEQ ID NO: 783108 - RNA, 19 nt, Artificial Sequence
  Description of Artificial Sequence: Synthetic oligonucleotide
caugcacacacacacauac

SEQ ID NO: 783109 - RNA, 19 nt, Artificial Sequence
  Description of Artificial Sequence: Synthetic oligonucleotide
caucuuacuggaacuaagg

SEQ ID NO: 783110 - RNA, 19 nt, Artificial Sequence
  Description of Artificial Sequence: Synthetic oligonucleotide
cacacacacacauacacac

SEQ ID NO: 783111 - RNA, 19 nt, Artificial Sequence
  Description of Artificial Sequence: Synthetic oligonucleotide
ucacauucagaccuagugu

SEQ ID NO: 783112 - RNA, 19 nt, Artificial Sequence
  Description of Artificial Sequence: Synthetic oligonucleotide
aaggaugccucaccacggc

SEQ ID NO: 783113 - RNA, 19 nt, Artificial Sequence
  Description of Artificial Sequence: Synthetic oligonucleotide
cucucaccugaaaagaggg

SEQ ID NO: 783114 - RNA, 19 nt, Artificial Sequence
  Description of Artificial Sequence: Synthetic oligonucleotide
cuuaguagucuccccaggg

SEQ ID NO: 783115 - RNA, 19 nt, Artificial Sequence
  Description of Artificial Sequence: Synthetic oligonucleotide
aucuuaagacacaagauca

SEQ ID NO: 783116 - RNA, 19 nt, Artificial Sequence
  Description of Artificial Sequence: Synthetic oligonucleotide
aaggggucaacugcuuucc

SEQ ID NO: 783117 - RNA, 19 nt, Artificial Sequence
  Description of Artificial Sequence: Synthetic oligonucleotide
agcugauaucuuaagacac

SEQ ID NO: 783118 - RNA, 19 nt, Artificial Sequence
  Description of Artificial Sequence: Synthetic oligonucleotide
ucuuaagacacaagaucac

SEQ ID NO: 783119 - RNA, 19 nt, Artificial Sequence
  Description of Artificial Sequence: Synthetic oligonucleotide
gacagagugagucugaagu

SEQ ID NO: 783120 - RNA, 19 nt, Artificial Sequence
  Description of Artificial Sequence: Synthetic oligonucleotide
uuaguagucuccccagggc

SEQ ID NO: 783121 - RNA, 19 nt, Artificial Sequence
  Description of Artificial Sequence: Synthetic oligonucleotide
ucccguuuggagcugcugg

SEQ ID NO: 783122 - RNA, 19 nt, Artificial Sequence
  Description of Artificial Sequence: Synthetic oligonucleotide
uguaaacgugguuaguccu

SEQ ID NO: 783123 - RNA, 19 nt, Artificial Sequence
  Description of Artificial Sequence: Synthetic oligonucleotide
uguggcuacugugaggagg

SEQ ID NO: 783124 - RNA, 19 nt, Artificial Sequence
  Description of Artificial Sequence: Synthetic oligonucleotide
uucggucucagucuuccag

SEQ ID NO: 783125 - RNA, 19 nt, Artificial Sequence
  Description of Artificial Sequence: Synthetic oligonucleotide
ugauaucuuaagacacaag

SEQ ID NO: 783126 - RNA, 19 nt, Artificial Sequence
  Description of Artificial Sequence: Synthetic oligonucleotide
agugcuuggugcaagggac

SEQ ID NO: 783127 - RNA, 19 nt, Artificial Sequence
  Description of Artificial Sequence: Synthetic oligonucleotide
cauacagacauuaucaggu

SEQ ID NO: 783128 - RNA, 19 nt, Artificial Sequence
  Description of Artificial Sequence: Synthetic oligonucleotide
cuguaaacgugguuagucc

SEQ ID NO: 783129 - RNA, 19 nt, Artificial Sequence
  Description of Artificial Sequence: Synthetic oligonucleotide
uccgaucauaacaucagaa

SEQ ID NO: 783130 - RNA, 19 nt, Artificial Sequence
  Description of Artificial Sequence: Synthetic oligonucleotide
cuaguguugagaacacaag

SEQ ID NO: 783131 - RNA, 19 nt, Artificial Sequence
  Description of Artificial Sequence: Synthetic oligonucleotide
cacacacacauacacacac

SEQ ID NO: 783132 - RNA, 19 nt, Artificial Sequence
  Description of Artificial Sequence: Synthetic oligonucleotide
ucuagugcuuggugcaagg

SEQ ID NO: 783133 - RNA, 19 nt, Artificial Sequence
  Description of Artificial Sequence: Synthetic oligonucleotide
uugcaaagugagcugauau

SEQ ID NO: 783134 - RNA, 19 nt, Artificial Sequence
  Description of Artificial Sequence: Synthetic oligonucleotide
gacuccuggacuccuagcc

SEQ ID NO: 783135 - RNA, 19 nt, Artificial Sequence
  Description of Artificial Sequence: Synthetic oligonucleotide
ugcacguccgcucaccagc

SEQ ID NO: 783136 - RNA, 19 nt, Artificial Sequence
  Description of Artificial Sequence: Synthetic oligonucleotide
agaccuaguguugagaaca

SEQ ID NO: 783137 - RNA, 19 nt, Artificial Sequence
  Description of Artificial Sequence: Synthetic oligonucleotide
ucagaccuaguguugagaa

SEQ ID NO: 783138 - RNA, 19 nt, Artificial Sequence
  Description of Artificial Sequence: Synthetic oligonucleotide
uauuccauguagccaguga

SEQ ID NO: 783139 - RNA, 19 nt, Artificial Sequence
  Description of Artificial Sequence: Synthetic oligonucleotide
aguggugcagccaagucuc

SEQ ID NO: 783140 - RNA, 19 nt, Artificial Sequence
  Description of Artificial Sequence: Synthetic oligonucleotide
gacaaccacauacaugcac

SEQ ID NO: 783141 - RNA, 19 nt, Artificial Sequence
  Description of Artificial Sequence: Synthetic oligonucleotide
ucggucucagucuuccagg

SEQ ID NO: 783142 - RNA, 19 nt, Artificial Sequence
  Description of Artificial Sequence: Synthetic oligonucleotide
cagcacaaauucuggaucc

SEQ ID NO: 783143 - RNA, 19 nt, Artificial Sequence
  Description of Artificial Sequence: Synthetic oligonucleotide
uacuuaguagucuccccag

SEQ ID NO: 783144 - RNA, 19 nt, Artificial Sequence
  Description of Artificial Sequence: Synthetic oligonucleotide
ucccuaugggcuuuggggc

SEQ ID NO: 783145 - RNA, 19 nt, Artificial Sequence
  Description of Artificial Sequence: Synthetic oligonucleotide
uaaacgugguuaguccugg

SEQ ID NO: 783146 - RNA, 19 nt, Artificial Sequence
  Description of Artificial Sequence: Synthetic oligonucleotide
cacacacauacacacacac

SEQ ID NO: 783147 - RNA, 19 nt, Artificial Sequence
  Description of Artificial Sequence: Synthetic oligonucleotide
uccucucaccugaaaagag

SEQ ID NO: 783148 - RNA, 19 nt, Artificial Sequence
  Description of Artificial Sequence: Synthetic oligonucleotide
agcguguguaaacucagug

SEQ ID NO: 783149 - RNA, 19 nt, Artificial Sequence
  Description of Artificial Sequence: Synthetic oligonucleotide
aacacuaggucagcucuuc

SEQ ID NO: 783150 - RNA, 19 nt, Artificial Sequence
  Description of Artificial Sequence: Synthetic oligonucleotide
gaacuaagggcaaucaaga

SEQ ID NO: 783151 - RNA, 19 nt, Artificial Sequence
  Description of Artificial Sequence: Synthetic oligonucleotide
cauacaugcacacacccca

SEQ ID NO: 783152 - RNA, 19 nt, Artificial Sequence
  Description of Artificial Sequence: Synthetic oligonucleotide
ggaacuaagggcaaucaag

SEQ ID NO: 783153 - RNA, 19 nt, Artificial Sequence
  Description of Artificial Sequence: Synthetic oligonucleotide
auuccauguagccagugaa

SEQ ID NO: 783154 - RNA, 19 nt, Artificial Sequence
  Description of Artificial Sequence: Synthetic oligonucleotide
agaauucgcucacacccuc

SEQ ID NO: 783155 - RNA, 19 nt, Artificial Sequence
  Description of Artificial Sequence: Synthetic oligonucleotide
agugagcugauaucuuaag

SEQ ID NO: 783156 - RNA, 19 nt, Artificial Sequence
  Description of Artificial Sequence: Synthetic oligonucleotide
gaagcugggugacacacca

SEQ ID NO: 783157 - RNA, 19 nt, Artificial Sequence
  Description of Artificial Sequence: Synthetic oligonucleotide
aacauucguccuuucgccu

SEQ ID NO: 783158 - RNA, 19 nt, Artificial Sequence
  Description of Artificial Sequence: Synthetic oligonucleotide
acuuaguagucuccccagg

SEQ ID NO: 783159 - RNA, 19 nt, Artificial Sequence
  Description of Artificial Sequence: Synthetic oligonucleotide
acagagugagucugaagug

SEQ ID NO: 783160 - RNA, 19 nt, Artificial Sequence
  Description of Artificial Sequence: Synthetic oligonucleotide
caggacuguggcaaugugg

SEQ ID NO: 783161 - RNA, 19 nt, Artificial Sequence
  Description of Artificial Sequence: Synthetic oligonucleotide
ugaucucaguaguuuauuc

SEQ ID NO: 783162 - RNA, 19 nt, Artificial Sequence
  Description of Artificial Sequence: Synthetic oligonucleotide
caggcggcauccuugaggc

SEQ ID NO: 783163 - RNA, 19 nt, Artificial Sequence
  Description of Artificial Sequence: Synthetic oligonucleotide
uagugcuuggugcaaggga

SEQ ID NO: 783164 - RNA, 19 nt, Artificial Sequence
  Description of Artificial Sequence: Synthetic oligonucleotide
gauaugggccuccucccag

SEQ ID NO: 783165 - RNA, 19 nt, Artificial Sequence
  Description of Artificial Sequence: Synthetic oligonucleotide
ucaccgggaauucuuagua

SEQ ID NO: 783166 - RNA, 19 nt, Artificial Sequence
  Description of Artificial Sequence: Synthetic oligonucleotide
ugggugacacaccaguggu

SEQ ID NO: 783167 - RNA, 19 nt, Artificial Sequence
  Description of Artificial Sequence: Synthetic oligonucleotide
cugggugacacaccagugg

SEQ ID NO: 783168 - RNA, 19 nt, Artificial Sequence
  Description of Artificial Sequence: Synthetic oligonucleotide
acucagguccuguaaacgu

SEQ ID NO: 783169 - RNA, 19 nt, Artificial Sequence
  Description of Artificial Sequence: Synthetic oligonucleotide
cagagugagucugaagugg

SEQ ID NO: 783170 - RNA, 19 nt, Artificial Sequence
  Description of Artificial Sequence: Synthetic oligonucleotide
aucagguucaacacucagg

SEQ ID NO: 783171 - RNA, 19 nt, Artificial Sequence
  Description of Artificial Sequence: Synthetic oligonucleotide
acccgcaguacagagcucc

SEQ ID NO: 783172 - RNA, 19 nt, Artificial Sequence
  Description of Artificial Sequence: Synthetic oligonucleotide
agaccuauuggcagccucc

SEQ ID NO: 783173 - RNA, 19 nt, Artificial Sequence
  Description of Artificial Sequence: Synthetic oligonucleotide
gagcuggccacacuucccg

SEQ ID NO: 783174 - RNA, 19 nt, Artificial Sequence
  Description of Artificial Sequence: Synthetic oligonucleotide
caaguguccuccaucuuac

SEQ ID NO: 783175 - RNA, 19 nt, Artificial Sequence
  Description of Artificial Sequence: Synthetic oligonucleotide
gacaaagcagugugagagc

SEQ ID NO: 783176 - RNA, 19 nt, Artificial Sequence
  Description of Artificial Sequence: Synthetic oligonucleotide
acagacauuaucagguuca

SEQ ID NO: 783177 - RNA, 19 nt, Artificial Sequence
  Description of Artificial Sequence: Synthetic oligonucleotide
cugguguauuccauguagc

SEQ ID NO: 783178 - RNA, 19 nt, Artificial Sequence
  Description of Artificial Sequence: Synthetic oligonucleotide
ugacaagacuccuggacuc

SEQ ID NO: 783179 - RNA, 19 nt, Artificial Sequence
  Description of Artificial Sequence: Synthetic oligonucleotide
uggauccugacaagacucc

SEQ ID NO: 783180 - RNA, 19 nt, Artificial Sequence
  Description of Artificial Sequence: Synthetic oligonucleotide
caagcguguguaaacucag

SEQ ID NO: 783181 - RNA, 19 nt, Artificial Sequence
  Description of Artificial Sequence: Synthetic oligonucleotide
ugggcuggaacacuagguc

SEQ ID NO: 783182 - RNA, 19 nt, Artificial Sequence
  Description of Artificial Sequence: Synthetic oligonucleotide
accgggaauucuuaguagu

SEQ ID NO: 783183 - RNA, 19 nt, Artificial Sequence
  Description of Artificial Sequence: Synthetic oligonucleotide
aauucgcucacacccucau

SEQ ID NO: 783184 - RNA, 19 nt, Artificial Sequence
  Description of Artificial Sequence: Synthetic oligonucleotide
aaacgugguuaguccuggg

SEQ ID NO: 783185 - RNA, 19 nt, Artificial Sequence
  Description of Artificial Sequence: Synthetic oligonucleotide
uggugcaagggacuugcca

SEQ ID NO: 783186 - RNA, 19 nt, Artificial Sequence
  Description of Artificial Sequence: Synthetic oligonucleotide
gcaaggguuagcuuuggag

SEQ ID NO: 783187 - RNA, 19 nt, Artificial Sequence
  Description of Artificial Sequence: Synthetic oligonucleotide
caagggacuugccaugagc

SEQ ID NO: 783188 - RNA, 19 nt, Artificial Sequence
  Description of Artificial Sequence: Synthetic oligonucleotide
ugcuggugcguccucaagu

SEQ ID NO: 783189 - RNA, 19 nt, Artificial Sequence
  Description of Artificial Sequence: Synthetic oligonucleotide
uggaacuaagggcaaucaa

SEQ ID NO: 783190 - RNA, 19 nt, Artificial Sequence
  Description of Artificial Sequence: Synthetic oligonucleotide
acgugguuaguccuggggu

SEQ ID NO: 783191 - RNA, 19 nt, Artificial Sequence
  Description of Artificial Sequence: Synthetic oligonucleotide
agggacuugccaugagcac

SEQ ID NO: 783192 - RNA, 19 nt, Artificial Sequence
  Description of Artificial Sequence: Synthetic oligonucleotide
cauggaaugauuuguucaa

SEQ ID NO: 783193 - RNA, 19 nt, Artificial Sequence
  Description of Artificial Sequence: Synthetic oligonucleotide
ggagcagaccuauuggcag

SEQ ID NO: 783194 - RNA, 19 nt, Artificial Sequence
  Description of Artificial Sequence: Synthetic oligonucleotide
ugagaacacaagcgugugu

SEQ ID NO: 783195 - RNA, 19 nt, Artificial Sequence
  Description of Artificial Sequence: Synthetic oligonucleotide
ucguccuuucgccugcuga

SEQ ID NO: 783196 - RNA, 19 nt, Artificial Sequence
  Description of Artificial Sequence: Synthetic oligonucleotide
agggaggcuacacaaugcu

SEQ ID NO: 783197 - RNA, 19 nt, Artificial Sequence
  Description of Artificial Sequence: Synthetic oligonucleotide
auaugggccuccucccagg

SEQ ID NO: 783198 - RNA, 19 nt, Artificial Sequence
  Description of Artificial Sequence: Synthetic oligonucleotide
cucagguccuguaaacgug

SEQ ID NO: 783199 - RNA, 19 nt, Artificial Sequence
  Description of Artificial Sequence: Synthetic oligonucleotide
ggaggcuacacaaugcugc

SEQ ID NO: 783200 - RNA, 19 nt, Artificial Sequence
  Description of Artificial Sequence: Synthetic oligonucleotide
gacccagauaauggcacgg

SEQ ID NO: 783201 - RNA, 19 nt, Artificial Sequence
  Description of Artificial Sequence: Synthetic oligonucleotide
caguaaagaauucgcucac

SEQ ID NO: 783202 - RNA, 19 nt, Artificial Sequence
  Description of Artificial Sequence: Synthetic oligonucleotide
ugacacaccaguggugcag

SEQ ID NO: 783203 - RNA, 19 nt, Artificial Sequence
  Description of Artificial Sequence: Synthetic oligonucleotide
uggagacaaagcaguguga

SEQ ID NO: 783204 - RNA, 19 nt, Artificial Sequence
  Description of Artificial Sequence: Synthetic oligonucleotide
ggagacaaagcagugugag

SEQ ID NO: 783205 - RNA, 19 nt, Artificial Sequence
  Description of Artificial Sequence: Synthetic oligonucleotide
ucucaccugaaaagaggga

SEQ ID NO: 783206 - RNA, 19 nt, Artificial Sequence
  Description of Artificial Sequence: Synthetic oligonucleotide
aggggcaaggguuagcuuu

SEQ ID NO: 783207 - RNA, 19 nt, Artificial Sequence
  Description of Artificial Sequence: Synthetic oligonucleotide
guccuguaaacgugguuag

SEQ ID NO: 783208 - RNA, 19 nt, Artificial Sequence
  Description of Artificial Sequence: Synthetic oligonucleotide
uugagaacacaagcgugug

SEQ ID NO: 783209 - RNA, 19 nt, Artificial Sequence
  Description of Artificial Sequence: Synthetic oligonucleotide
aucaccgggaauucuuagu

SEQ ID NO: 783210 - RNA, 19 nt, Artificial Sequence
  Description of Artificial Sequence: Synthetic oligonucleotide
cguguguaaacucagugag

SEQ ID NO: 783211 - RNA, 19 nt, Artificial Sequence
  Description of Artificial Sequence: Synthetic oligonucleotide
gagcagaccuauuggcagc

SEQ ID NO: 783212 - RNA, 19 nt, Artificial Sequence
  Description of Artificial Sequence: Synthetic oligonucleotide
cacacauacacacacacau

SEQ ID NO: 783213 - RNA, 19 nt, Artificial Sequence
  Description of Artificial Sequence: Synthetic oligonucleotide
gagaacacaagcgugugua

SEQ ID NO: 783214 - RNA, 19 nt, Artificial Sequence
  Description of Artificial Sequence: Synthetic oligonucleotide
ucaccacggcccuacuuag

SEQ ID NO: 783215 - RNA, 19 nt, Artificial Sequence
  Description of Artificial Sequence: Synthetic oligonucleotide
caccugaaaagagggaccc

SEQ ID NO: 783216 - RNA, 19 nt, Artificial Sequence
  Description of Artificial Sequence: Synthetic oligonucleotide
gaaaagagggacccagaua

SEQ ID NO: 783217 - RNA, 19 nt, Artificial Sequence
  Description of Artificial Sequence: Synthetic oligonucleotide
acaagcguguguaaacuca

SEQ ID NO: 783218 - RNA, 19 nt, Artificial Sequence
  Description of Artificial Sequence: Synthetic oligonucleotide
agacacaagaucacccuug

SEQ ID NO: 783219 - RNA, 19 nt, Artificial Sequence
  Description of Artificial Sequence: Synthetic oligonucleotide
acacaagaucacccuuggg

SEQ ID NO: 783220 - RNA, 19 nt, Artificial Sequence
  Description of Artificial Sequence: Synthetic oligonucleotide
cagggaggcuacacaaugc

SEQ ID NO: 783221 - RNA, 19 nt, Artificial Sequence
  Description of Artificial Sequence: Synthetic oligonucleotide
ccugguguauuccauguag

SEQ ID NO: 783222 - RNA, 19 nt, Artificial Sequence
  Description of Artificial Sequence: Synthetic oligonucleotide
cauccuugaggcuggacca

SEQ ID NO: 783223 - RNA, 19 nt, Artificial Sequence
  Description of Artificial Sequence: Synthetic oligonucleotide
cagugggugguccaucagc

SEQ ID NO: 783224 - RNA, 19 nt, Artificial Sequence
  Description of Artificial Sequence: Synthetic oligonucleotide
guaaacgugguuaguccug

SEQ ID NO: 783225 - RNA, 19 nt, Artificial Sequence
  Description of Artificial Sequence: Synthetic oligonucleotide
gauccugacaagacuccug

SEQ ID NO: 783226 - RNA, 19 nt, Artificial Sequence
  Description of Artificial Sequence: Synthetic oligonucleotide
ggugacacaccaguggugc

SEQ ID NO: 783227 - RNA, 19 nt, Artificial Sequence
  Description of Artificial Sequence: Synthetic oligonucleotide
guuugaucucaguaguuua

SEQ ID NO: 783228 - RNA, 19 nt, Artificial Sequence
  Description of Artificial Sequence: Synthetic oligonucleotide
cuugcccaaaggaugccuc

SEQ ID NO: 783229 - RNA, 19 nt, Artificial Sequence
  Description of Artificial Sequence: Synthetic oligonucleotide
caguggguguguuccacgc

SEQ ID NO: 783230 - RNA, 19 nt, Artificial Sequence
  Description of Artificial Sequence: Synthetic oligonucleotide
caaauucuggauccugaca

SEQ ID NO: 783231 - RNA, 19 nt, Artificial Sequence
  Description of Artificial Sequence: Synthetic oligonucleotide
aggccugaaaacucaugga

SEQ ID NO: 783232 - RNA, 19 nt, Artificial Sequence
  Description of Artificial Sequence: Synthetic oligonucleotide
aagugagcugauaucuuaa

SEQ ID NO: 783233 - RNA, 19 nt, Artificial Sequence
  Description of Artificial Sequence: Synthetic oligonucleotide
gagugagucugaagugggg

SEQ ID NO: 783234 - RNA, 19 nt, Artificial Sequence
  Description of Artificial Sequence: Synthetic oligonucleotide
uaagggcaaucaagaggcc

SEQ ID NO: 783235 - RNA, 19 nt, Artificial Sequence
  Description of Artificial Sequence: Synthetic oligonucleotide
uugugggcuggaacacuag

SEQ ID NO: 783236 - RNA, 19 nt, Artificial Sequence
  Description of Artificial Sequence: Synthetic oligonucleotide
ucgguguucugcuccgucu

SEQ ID NO: 783237 - RNA, 19 nt, Artificial Sequence
  Description of Artificial Sequence: Synthetic oligonucleotide
uuacuggaacuaagggcaa

SEQ ID NO: 783238 - RNA, 19 nt, Artificial Sequence
  Description of Artificial Sequence: Synthetic oligonucleotide
acacaagcguguguaaacu

SEQ ID NO: 783239 - RNA, 19 nt, Artificial Sequence
  Description of Artificial Sequence: Synthetic oligonucleotide
cacaccccacuucacauuc

SEQ ID NO: 783240 - RNA, 19 nt, Artificial Sequence
  Description of Artificial Sequence: Synthetic oligonucleotide
auacacacacacauacaca

SEQ ID NO: 783241 - RNA, 19 nt, Artificial Sequence
  Description of Artificial Sequence: Synthetic oligonucleotide
ccucucaccugaaaagagg

SEQ ID NO: 783242 - RNA, 19 nt, Artificial Sequence
  Description of Artificial Sequence: Synthetic oligonucleotide
uugcccaaaggaugccuca

SEQ ID NO: 783243 - RNA, 19 nt, Artificial Sequence
  Description of Artificial Sequence: Synthetic oligonucleotide
ucauuccgaucauaacauc

SEQ ID NO: 783244 - RNA, 19 nt, Artificial Sequence
  Description of Artificial Sequence: Synthetic oligonucleotide
ccucauuccgaucauaaca

SEQ ID NO: 783245 - RNA, 19 nt, Artificial Sequence
  Description of Artificial Sequence: Synthetic oligonucleotide
cacaagcguguguaaacuc

SEQ ID NO: 783246 - RNA, 19 nt, Artificial Sequence
  Description of Artificial Sequence: Synthetic oligonucleotide
aggccuaguucucuuugca

SEQ ID NO: 783247 - RNA, 19 nt, Artificial Sequence
  Description of Artificial Sequence: Synthetic oligonucleotide
gagucaggcggcauccuug

SEQ ID NO: 783248 - RNA, 19 nt, Artificial Sequence
  Description of Artificial Sequence: Synthetic oligonucleotide
uucaaugucccagcacaaa

SEQ ID NO: 783249 - RNA, 19 nt, Artificial Sequence
  Description of Artificial Sequence: Synthetic oligonucleotide
caugcacacaccccacuuc

SEQ ID NO: 783250 - RNA, 19 nt, Artificial Sequence
  Description of Artificial Sequence: Synthetic oligonucleotide
ugugagagcuggccacacu

SEQ ID NO: 783251 - RNA, 19 nt, Artificial Sequence
  Description of Artificial Sequence: Synthetic oligonucleotide
acguccgcucaccagccag

SEQ ID NO: 783252 - RNA, 19 nt, Artificial Sequence
  Description of Artificial Sequence: Synthetic oligonucleotide
gaucugcacagcaggaguc

SEQ ID NO: 783253 - RNA, 19 nt, Artificial Sequence
  Description of Artificial Sequence: Synthetic oligonucleotide
agaacacaagcguguguaa

SEQ ID NO: 783254 - RNA, 19 nt, Artificial Sequence
  Description of Artificial Sequence: Synthetic oligonucleotide
agucaggcggcauccuuga

SEQ ID NO: 783255 - RNA, 19 nt, Artificial Sequence
  Description of Artificial Sequence: Synthetic oligonucleotide
guggguguguuccacgcuc

SEQ ID NO: 783256 - RNA, 19 nt, Artificial Sequence
  Description of Artificial Sequence: Synthetic oligonucleotide
ugcacaggagcagaccuau

SEQ ID NO: 783257 - RNA, 19 nt, Artificial Sequence
  Description of Artificial Sequence: Synthetic oligonucleotide
cucauuccgaucauaacau

SEQ ID NO: 783258 - RNA, 19 nt, Artificial Sequence
  Description of Artificial Sequence: Synthetic oligonucleotide
ucccagugagcaacagaga

SEQ ID NO: 783259 - RNA, 19 nt, Artificial Sequence
  Description of Artificial Sequence: Synthetic oligonucleotide
cagaccuaguguugagaac

SEQ ID NO: 783260 - RNA, 19 nt, Artificial Sequence
  Description of Artificial Sequence: Synthetic oligonucleotide
cacucgguguucugcuccg

SEQ ID NO: 783261 - RNA, 19 nt, Artificial Sequence
  Description of Artificial Sequence: Synthetic oligonucleotide
guugagaacacaagcgugu

SEQ ID NO: 783262 - RNA, 19 nt, Artificial Sequence
  Description of Artificial Sequence: Synthetic oligonucleotide
ccaucuuacuggaacuaag

SEQ ID NO: 783263 - RNA, 19 nt, Artificial Sequence
  Description of Artificial Sequence: Synthetic oligonucleotide
uggguguguuccacgcucu

SEQ ID NO: 783264 - RNA, 19 nt, Artificial Sequence
  Description of Artificial Sequence: Synthetic oligonucleotide
gaacacaagcguguguaaa

SEQ ID NO: 783265 - RNA, 19 nt, Artificial Sequence
  Description of Artificial Sequence: Synthetic oligonucleotide
aagcaucagaucaccggga

SEQ ID NO: 783266 - RNA, 19 nt, Artificial Sequence
  Description of Artificial Sequence: Synthetic oligonucleotide
ucgcucacacccucauagc

SEQ ID NO: 783267 - RNA, 19 nt, Artificial Sequence
  Description of Artificial Sequence: Synthetic oligonucleotide
accacucgguguucugcuc

SEQ ID NO: 783268 - RNA, 19 nt, Artificial Sequence
  Description of Artificial Sequence: Synthetic oligonucleotide
uucccacaacccagacccg

SEQ ID NO: 783269 - RNA, 19 nt, Artificial Sequence
  Description of Artificial Sequence: Synthetic oligonucleotide
ggacccagauaauggcacg

SEQ ID NO: 783270 - RNA, 19 nt, Artificial Sequence
  Description of Artificial Sequence: Synthetic oligonucleotide
ucagaucaccgggaauucu

SEQ ID NO: 783271 - RNA, 19 nt, Artificial Sequence
  Description of Artificial Sequence: Synthetic oligonucleotide
ucgccugcugagcugcaac

SEQ ID NO: 783272 - RNA, 19 nt, Artificial Sequence
  Description of Artificial Sequence: Synthetic oligonucleotide
acagacaugcacgcacaug

SEQ ID NO: 783273 - RNA, 19 nt, Artificial Sequence
  Description of Artificial Sequence: Synthetic oligonucleotide
aguagucuccccagggcug

SEQ ID NO: 783274 - RNA, 19 nt, Artificial Sequence
  Description of Artificial Sequence: Synthetic oligonucleotide
gugcaagggacuugccaug

SEQ ID NO: 783275 - RNA, 19 nt, Artificial Sequence
  Description of Artificial Sequence: Synthetic oligonucleotide
gcuggugcguccucaagug

SEQ ID NO: 783276 - RNA, 19 nt, Artificial Sequence
  Description of Artificial Sequence: Synthetic oligonucleotide
uuaguccugggguucuguu

SEQ ID NO: 783277 - RNA, 19 nt, Artificial Sequence
  Description of Artificial Sequence: Synthetic oligonucleotide
ccuacuuaguagucucccc

SEQ ID NO: 783278 - RNA, 19 nt, Artificial Sequence
  Description of Artificial Sequence: Synthetic oligonucleotide
gguguauuccauguagcca

SEQ ID NO: 783279 - RNA, 19 nt, Artificial Sequence
  Description of Artificial Sequence: Synthetic oligonucleotide
cugacaagacuccuggacu

SEQ ID NO: 783280 - RNA, 19 nt, Artificial Sequence
  Description of Artificial Sequence: Synthetic oligonucleotide
auccuugaggcuggaccac

SEQ ID NO: 783281 - RNA, 19 nt, Artificial Sequence
  Description of Artificial Sequence: Synthetic oligonucleotide
cacugggccuugcuguacc

SEQ ID NO: 783282 - RNA, 19 nt, Artificial Sequence
  Description of Artificial Sequence: Synthetic oligonucleotide
cagaccuauuggcagccuc

SEQ ID NO: 783283 - RNA, 19 nt, Artificial Sequence
  Description of Artificial Sequence: Synthetic oligonucleotide
gcguguguaaacucaguga

SEQ ID NO: 783284 - RNA, 19 nt, Artificial Sequence
  Description of Artificial Sequence: Synthetic oligonucleotide
ggacuugccaugagcacag

SEQ ID NO: 783285 - RNA, 19 nt, Artificial Sequence
  Description of Artificial Sequence: Synthetic oligonucleotide
cucaccacggcccuacuua

SEQ ID NO: 783286 - RNA, 19 nt, Artificial Sequence
  Description of Artificial Sequence: Synthetic oligonucleotide
uccuugugggcuggaacac

SEQ ID NO: 783287 - RNA, 19 nt, Artificial Sequence
  Description of Artificial Sequence: Synthetic oligonucleotide
gcccauguugccugcuucg

SEQ ID NO: 783288 - RNA, 19 nt, Artificial Sequence
  Description of Artificial Sequence: Synthetic oligonucleotide
acacacauacacacacaca

SEQ ID NO: 783289 - RNA, 19 nt, Artificial Sequence
  Description of Artificial Sequence: Synthetic oligonucleotide
uuggugcaagggacuugcc

SEQ ID NO: 783290 - RNA, 19 nt, Artificial Sequence
  Description of Artificial Sequence: Synthetic oligonucleotide
uguucccguuuggagcugc

SEQ ID NO: 783291 - RNA, 19 nt, Artificial Sequence
  Description of Artificial Sequence: Synthetic oligonucleotide
ccuguauucaggggcaggc

SEQ ID NO: 783292 - RNA, 19 nt, Artificial Sequence
  Description of Artificial Sequence: Synthetic oligonucleotide
gaccuaguguugagaacac

SEQ ID NO: 783293 - RNA, 19 nt, Artificial Sequence
  Description of Artificial Sequence: Synthetic oligonucleotide
agcacaaauucuggauccu

SEQ ID NO: 783294 - RNA, 19 nt, Artificial Sequence
  Description of Artificial Sequence: Synthetic oligonucleotide
guagucuccccagggcugc

SEQ ID NO: 783295 - RNA, 19 nt, Artificial Sequence
  Description of Artificial Sequence: Synthetic oligonucleotide
cuugugggcuggaacacua

SEQ ID NO: 783296 - RNA, 19 nt, Artificial Sequence
  Description of Artificial Sequence: Synthetic oligonucleotide
uuggagagucaagcuguac

SEQ ID NO: 783297 - RNA, 19 nt, Artificial Sequence
  Description of Artificial Sequence: Synthetic oligonucleotide
ggacagagugagucugaag

SEQ ID NO: 783298 - RNA, 19 nt, Artificial Sequence
  Description of Artificial Sequence: Synthetic oligonucleotide
guauuccauguagccagug

SEQ ID NO: 783299 - RNA, 19 nt, Artificial Sequence
  Description of Artificial Sequence: Synthetic oligonucleotide
cuagccagguggccucccc

SEQ ID NO: 783300 - RNA, 19 nt, Artificial Sequence
  Description of Artificial Sequence: Synthetic oligonucleotide
aaagagggacccagauaau

SEQ ID NO: 783301 - RNA, 19 nt, Artificial Sequence
  Description of Artificial Sequence: Synthetic oligonucleotide
ugcccaaaggaugccucac

SEQ ID NO: 783302 - RNA, 19 nt, Artificial Sequence
  Description of Artificial Sequence: Synthetic oligonucleotide
cacaugcacacacacacau

SEQ ID NO: 783303 - RNA, 19 nt, Artificial Sequence
  Description of Artificial Sequence: Synthetic oligonucleotide
uucguccuuucgccugcug

SEQ ID NO: 783304 - RNA, 19 nt, Artificial Sequence
  Description of Artificial Sequence: Synthetic oligonucleotide
ugcacugggccuugcugua

SEQ ID NO: 783305 - RNA, 19 nt, Artificial Sequence
  Description of Artificial Sequence: Synthetic oligonucleotide
cacacacacauacacacuu

SEQ ID NO: 783306 - RNA, 19 nt, Artificial Sequence
  Description of Artificial Sequence: Synthetic oligonucleotide
gaauucgcucacacccuca

SEQ ID NO: 783307 - RNA, 19 nt, Artificial Sequence
  Description of Artificial Sequence: Synthetic oligonucleotide
ugguuaguccugggguucu

SEQ ID NO: 783308 - RNA, 19 nt, Artificial Sequence
  Description of Artificial Sequence: Synthetic oligonucleotide
cuggaacuaagggcaauca

SEQ ID NO: 783309 - RNA, 19 nt, Artificial Sequence
  Description of Artificial Sequence: Synthetic oligonucleotide
uacaggggcaaggguuagc

SEQ ID NO: 783310 - RNA, 19 nt, Artificial Sequence
  Description of Artificial Sequence: Synthetic oligonucleotide
ggugcaagggacuugccau

SEQ ID NO: 783311 - RNA, 19 nt, Artificial Sequence
  Description of Artificial Sequence: Synthetic oligonucleotide
acacacacacauacacaca

SEQ ID NO: 783312 - RNA, 19 nt, Artificial Sequence
  Description of Artificial Sequence: Synthetic oligonucleotide
acacacacacauacacacu

SEQ ID NO: 783313 - RNA, 19 nt, Artificial Sequence
  Description of Artificial Sequence: Synthetic oligonucleotide
ggcccuacuuaguagucuc

SEQ ID NO: 783314 - RNA, 19 nt, Artificial Sequence
  Description of Artificial Sequence: Synthetic oligonucleotide
acacacacauacacacaca

SEQ ID NO: 783315 - RNA, 19 nt, Artificial Sequence
  Description of Artificial Sequence: Synthetic oligonucleotide
gacuccuagccagguggcc

SEQ ID NO: 783316 - RNA, 19 nt, Artificial Sequence
  Description of Artificial Sequence: Synthetic oligonucleotide
guguccuucccuaugggcu

SEQ ID NO: 783317 - RNA, 19 nt, Artificial Sequence
  Description of Artificial Sequence: Synthetic oligonucleotide
ccgggaauucuuaguagug

SEQ ID NO: 783318 - RNA, 19 nt, Artificial Sequence
  Description of Artificial Sequence: Synthetic oligonucleotide
gcuucggucucagucuucc

SEQ ID NO: 783319 - RNA, 19 nt, Artificial Sequence
  Description of Artificial Sequence: Synthetic oligonucleotide
guggaggccugaaaacuca

SEQ ID NO: 783320 - RNA, 19 nt, Artificial Sequence
  Description of Artificial Sequence: Synthetic oligonucleotide
uucccguuuggagcugcug

SEQ ID NO: 783321 - RNA, 19 nt, Artificial Sequence
  Description of Artificial Sequence: Synthetic oligonucleotide
cuguuccgccagaagccug

SEQ ID NO: 783322 - RNA, 19 nt, Artificial Sequence
  Description of Artificial Sequence: Synthetic oligonucleotide
cucgguguucugcuccguc

SEQ ID NO: 783323 - RNA, 19 nt, Artificial Sequence
  Description of Artificial Sequence: Synthetic oligonucleotide
uacuggaacuaagggcaau

SEQ ID NO: 783324 - RNA, 19 nt, Artificial Sequence
  Description of Artificial Sequence: Synthetic oligonucleotide
guagccagugaaggcuggc

SEQ ID NO: 783325 - RNA, 19 nt, Artificial Sequence
  Description of Artificial Sequence: Synthetic oligonucleotide
gggacuugccaugagcaca

SEQ ID NO: 783326 - RNA, 19 nt, Artificial Sequence
  Description of Artificial Sequence: Synthetic oligonucleotide
cuggacuccuagccaggug

SEQ ID NO: 783327 - RNA, 19 nt, Artificial Sequence
  Description of Artificial Sequence: Synthetic oligonucleotide
ccaaaggaugccucaccac

SEQ ID NO: 783328 - RNA, 19 nt, Artificial Sequence
  Description of Artificial Sequence: Synthetic oligonucleotide
gaccacucgguguucugcu

SEQ ID NO: 783329 - RNA, 19 nt, Artificial Sequence
  Description of Artificial Sequence: Synthetic oligonucleotide
acggcccuacuuaguaguc

SEQ ID NO: 783330 - RNA, 19 nt, Artificial Sequence
  Description of Artificial Sequence: Synthetic oligonucleotide
acacccucauagccuggga

SEQ ID NO: 783331 - RNA, 19 nt, Artificial Sequence
  Description of Artificial Sequence: Synthetic oligonucleotide
accuaguguugagaacaca

SEQ ID NO: 783332 - RNA, 19 nt, Artificial Sequence
  Description of Artificial Sequence: Synthetic oligonucleotide
gguggaggccugaaaacuc

SEQ ID NO: 783333 - RNA, 19 nt, Artificial Sequence
  Description of Artificial Sequence: Synthetic oligonucleotide
uuucgccugcugagcugca

SEQ ID NO: 783334 - RNA, 19 nt, Artificial Sequence
  Description of Artificial Sequence: Synthetic oligonucleotide
cccuaugggcuuuggggcc

SEQ ID NO: 783335 - RNA, 19 nt, Artificial Sequence
  Description of Artificial Sequence: Synthetic oligonucleotide
cccuacuuaguagucuccc

SEQ ID NO: 783336 - RNA, 19 nt, Artificial Sequence
  Description of Artificial Sequence: Synthetic oligonucleotide
acacauacacacacacaua

SEQ ID NO: 783337 - RNA, 19 nt, Artificial Sequence
  Description of Artificial Sequence: Synthetic oligonucleotide
cccguuuggagcugcuggc

SEQ ID NO: 783338 - RNA, 19 nt, Artificial Sequence
  Description of Artificial Sequence: Synthetic oligonucleotide
accagcgcccauguugccu

SEQ ID NO: 783339 - RNA, 19 nt, Artificial Sequence
  Description of Artificial Sequence: Synthetic oligonucleotide
caacccagacccgcaguac

SEQ ID NO: 783340 - RNA, 19 nt, Artificial Sequence
  Description of Artificial Sequence: Synthetic oligonucleotide
gccugcugugcuucagcgg

SEQ ID NO: 783341 - RNA, 19 nt, Artificial Sequence
  Description of Artificial Sequence: Synthetic oligonucleotide
cugugcuucagcggggcca

SEQ ID NO: 783342 - RNA, 19 nt, Artificial Sequence
  Description of Artificial Sequence: Synthetic oligonucleotide
guacaggggcaaggguuag

SEQ ID NO: 783343 - RNA, 19 nt, Artificial Sequence
  Description of Artificial Sequence: Synthetic oligonucleotide
aggaagugucuuuccccuu

SEQ ID NO: 783344 - RNA, 19 nt, Artificial Sequence
  Description of Artificial Sequence: Synthetic oligonucleotide
ugcuucagcggggccauuu

SEQ ID NO: 783345 - RNA, 19 nt, Artificial Sequence
  Description of Artificial Sequence: Synthetic oligonucleotide
gucuuaggagccacccuga

SEQ ID NO: 783346 - RNA, 19 nt, Artificial Sequence
  Description of Artificial Sequence: Synthetic oligonucleotide
gucuuuccccuucccacaa

SEQ ID NO: 783347 - RNA, 19 nt, Artificial Sequence
  Description of Artificial Sequence: Synthetic oligonucleotide
augcacacacacacauaca

SEQ ID NO: 783348 - RNA, 19 nt, Artificial Sequence
  Description of Artificial Sequence: Synthetic oligonucleotide
cccuugagggcuugucuag

SEQ ID NO: 783349 - RNA, 19 nt, Artificial Sequence
  Description of Artificial Sequence: Synthetic oligonucleotide
cguccuuucgccugcugag

SEQ ID NO: 783350 - RNA, 19 nt, Artificial Sequence
  Description of Artificial Sequence: Synthetic oligonucleotide
agaucaccgggaauucuua

SEQ ID NO: 783351 - RNA, 19 nt, Artificial Sequence
  Description of Artificial Sequence: Synthetic oligonucleotide
cacccucauagccugggaa

SEQ ID NO: 783352 - RNA, 19 nt, Artificial Sequence
  Description of Artificial Sequence: Synthetic oligonucleotide
cugcuggugcguccucaag

SEQ ID NO: 783353 - RNA, 19 nt, Artificial Sequence
  Description of Artificial Sequence: Synthetic oligonucleotide
auucgcucacacccucaua

SEQ ID NO: 783354 - RNA, 19 nt, Artificial Sequence
  Description of Artificial Sequence: Synthetic oligonucleotide
ggguuagcuuuggagaaga

SEQ ID NO: 783355 - RNA, 19 nt, Artificial Sequence
  Description of Artificial Sequence: Synthetic oligonucleotide
gcccaaaggaugccucacc

SEQ ID NO: 783356 - RNA, 19 nt, Artificial Sequence
  Description of Artificial Sequence: Synthetic oligonucleotide
cacggcccuacuuaguagu

SEQ ID NO: 783357 - RNA, 19 nt, Artificial Sequence
  Description of Artificial Sequence: Synthetic oligonucleotide
ggaccacucgguguucugc

SEQ ID NO: 783358 - RNA, 19 nt, Artificial Sequence
  Description of Artificial Sequence: Synthetic oligonucleotide
cuaggucagcucuucaguu

SEQ ID NO: 783359 - RNA, 19 nt, Artificial Sequence
  Description of Artificial Sequence: Synthetic oligonucleotide
gggcucuguggcuacugug

SEQ ID NO: 783360 - RNA, 19 nt, Artificial Sequence
  Description of Artificial Sequence: Synthetic oligonucleotide
caaugucccagcacaaauu

SEQ ID NO: 783361 - RNA, 19 nt, Artificial Sequence
  Description of Artificial Sequence: Synthetic oligonucleotide
cuguggcuacugugaggag

SEQ ID NO: 783362 - RNA, 19 nt, Artificial Sequence
  Description of Artificial Sequence: Synthetic oligonucleotide
accugaaaagagggaccca

SEQ ID NO: 783363 - RNA, 19 nt, Artificial Sequence
  Description of Artificial Sequence: Synthetic oligonucleotide
cuuggagagucaagcugua

SEQ ID NO: 783364 - RNA, 19 nt, Artificial Sequence
  Description of Artificial Sequence: Synthetic oligonucleotide
caacagccuggccagauau

SEQ ID NO: 783365 - RNA, 19 nt, Artificial Sequence
  Description of Artificial Sequence: Synthetic oligonucleotide
caccaguggugcagccaag

SEQ ID NO: 783366 - RNA, 19 nt, Artificial Sequence
  Description of Artificial Sequence: Synthetic oligonucleotide
cuaguucucuuugcaaagu

SEQ ID NO: 783367 - RNA, 19 nt, Artificial Sequence
  Description of Artificial Sequence: Synthetic oligonucleotide
gggaggcuacacaaugcug

SEQ ID NO: 783368 - RNA, 19 nt, Artificial Sequence
  Description of Artificial Sequence: Synthetic oligonucleotide
ggggcaaggguuagcuuug

SEQ ID NO: 783369 - RNA, 19 nt, Artificial Sequence
  Description of Artificial Sequence: Synthetic oligonucleotide
caguggccugguguauucc

SEQ ID NO: 783370 - RNA, 19 nt, Artificial Sequence
  Description of Artificial Sequence: Synthetic oligonucleotide
guggccagggaggcuacac

SEQ ID NO: 783371 - RNA, 19 nt, Artificial Sequence
  Description of Artificial Sequence: Synthetic oligonucleotide
gggcaaucaagaggccuag

SEQ ID NO: 783372 - RNA, 19 nt, Artificial Sequence
  Description of Artificial Sequence: Synthetic oligonucleotide
ccuauuggcagccuccucu

SEQ ID NO: 783373 - RNA, 19 nt, Artificial Sequence
  Description of Artificial Sequence: Synthetic oligonucleotide
uccuagccagguggccucc

SEQ ID NO: 783374 - RNA, 19 nt, Artificial Sequence
  Description of Artificial Sequence: Synthetic oligonucleotide
cccaaaggaugccucacca

SEQ ID NO: 783375 - RNA, 19 nt, Artificial Sequence
  Description of Artificial Sequence: Synthetic oligonucleotide
cccucauuccgaucauaac

SEQ ID NO: 783376 - RNA, 19 nt, Artificial Sequence
  Description of Artificial Sequence: Synthetic oligonucleotide
gucaggcggcauccuugag

SEQ ID NO: 783377 - RNA, 19 nt, Artificial Sequence
  Description of Artificial Sequence: Synthetic oligonucleotide
cucagucuuccagggcgug

SEQ ID NO: 783378 - RNA, 19 nt, Artificial Sequence
  Description of Artificial Sequence: Synthetic oligonucleotide
cagaucaccgggaauucuu

SEQ ID NO: 783379 - RNA, 19 nt, Artificial Sequence
  Description of Artificial Sequence: Synthetic oligonucleotide
ggaagcugggugacacacc

SEQ ID NO: 783380 - RNA, 19 nt, Artificial Sequence
  Description of Artificial Sequence: Synthetic oligonucleotide
augggccuccucccagggu

SEQ ID NO: 783381 - RNA, 19 nt, Artificial Sequence
  Description of Artificial Sequence: Synthetic oligonucleotide
gcacacacacacauacaca

SEQ ID NO: 783382 - RNA, 19 nt, Artificial Sequence
  Description of Artificial Sequence: Synthetic oligonucleotide
cuucacauucagaccuagu

SEQ ID NO: 783383 - RNA, 19 nt, Artificial Sequence
  Description of Artificial Sequence: Synthetic oligonucleotide
gcugggugacacaccagug

SEQ ID NO: 783384 - RNA, 19 nt, Artificial Sequence
  Description of Artificial Sequence: Synthetic oligonucleotide
acaugcacacacacacaua

SEQ ID NO: 783385 - RNA, 19 nt, Artificial Sequence
  Description of Artificial Sequence: Synthetic oligonucleotide
gaccuauuggcagccuccu

SEQ ID NO: 783386 - RNA, 19 nt, Artificial Sequence
  Description of Artificial Sequence: Synthetic oligonucleotide
ccucaaguguccuccaucu

SEQ ID NO: 783387 - RNA, 19 nt, Artificial Sequence
  Description of Artificial Sequence: Synthetic oligonucleotide
ggacuccuagccagguggc

SEQ ID NO: 783388 - RNA, 19 nt, Artificial Sequence
  Description of Artificial Sequence: Synthetic oligonucleotide
cuucggucucagucuucca

SEQ ID NO: 783389 - RNA, 19 nt, Artificial Sequence
  Description of Artificial Sequence: Synthetic oligonucleotide
ccacggcccuacuuaguag

SEQ ID NO: 783390 - RNA, 19 nt, Artificial Sequence
  Description of Artificial Sequence: Synthetic oligonucleotide
gguucaacacucagguccu

SEQ ID NO: 783391 - RNA, 19 nt, Artificial Sequence
  Description of Artificial Sequence: Synthetic oligonucleotide
cagagcucccaagggguca

SEQ ID NO: 783392 - RNA, 19 nt, Artificial Sequence
  Description of Artificial Sequence: Synthetic oligonucleotide
gcuacacaaugcugcugga

SEQ ID NO: 783393 - RNA, 19 nt, Artificial Sequence
  Description of Artificial Sequence: Synthetic oligonucleotide
ccagggcguguccuggccc

SEQ ID NO: 783394 - RNA, 19 nt, Artificial Sequence
  Description of Artificial Sequence: Synthetic oligonucleotide
gcaaugugguucaggaggu

SEQ ID NO: 783395 - RNA, 19 nt, Artificial Sequence
  Description of Artificial Sequence: Synthetic oligonucleotide
auucguccuuucgccugcu

SEQ ID NO: 783396 - RNA, 19 nt, Artificial Sequence
  Description of Artificial Sequence: Synthetic oligonucleotide
ccccucauuccgaucauaa

SEQ ID NO: 783397 - RNA, 19 nt, Artificial Sequence
  Description of Artificial Sequence: Synthetic oligonucleotide
guuaguccugggguucugu

SEQ ID NO: 783398 - RNA, 19 nt, Artificial Sequence
  Description of Artificial Sequence: Synthetic oligonucleotide
cugucuuaggagccacccu

SEQ ID NO: 783399 - RNA, 19 nt, Artificial Sequence
  Description of Artificial Sequence: Synthetic oligonucleotide
ccguuuggagcugcuggcc

SEQ ID NO: 783400 - RNA, 19 nt, Artificial Sequence
  Description of Artificial Sequence: Synthetic oligonucleotide
gcuuggugcaagggacuug

SEQ ID NO: 783401 - RNA, 19 nt, Artificial Sequence
  Description of Artificial Sequence: Synthetic oligonucleotide
cccuguauucaggggcagg

SEQ ID NO: 783402 - RNA, 19 nt, Artificial Sequence
  Description of Artificial Sequence: Synthetic oligonucleotide
gcccuacuuaguagucucc

SEQ ID NO: 783403 - RNA, 19 nt, Artificial Sequence
  Description of Artificial Sequence: Synthetic oligonucleotide
caagaggccuaguucucuu

SEQ ID NO: 783404 - RNA, 19 nt, Artificial Sequence
  Description of Artificial Sequence: Synthetic oligonucleotide
cccgcaguacagagcuccc

SEQ ID NO: 783405 - RNA, 19 nt, Artificial Sequence
  Description of Artificial Sequence: Synthetic oligonucleotide
cugcccgccuguuccgcca

SEQ ID NO: 783406 - RNA, 19 nt, Artificial Sequence
  Description of Artificial Sequence: Synthetic oligonucleotide
cuugcaggacuguggcaau

SEQ ID NO: 783407 - RNA, 19 nt, Artificial Sequence
  Description of Artificial Sequence: Synthetic oligonucleotide
gguuaguccugggguucug

SEQ ID NO: 783408 - RNA, 19 nt, Artificial Sequence
  Description of Artificial Sequence: Synthetic oligonucleotide
caccugugcucuggccuug

SEQ ID NO: 783409 - RNA, 19 nt, Artificial Sequence
  Description of Artificial Sequence: Synthetic oligonucleotide
gcacguccgcucaccagcc

SEQ ID NO: 783410 - RNA, 19 nt, Artificial Sequence
  Description of Artificial Sequence: Synthetic oligonucleotide
cacaacccagacccgcagu

SEQ ID NO: 783411 - RNA, 19 nt, Artificial Sequence
  Description of Artificial Sequence: Synthetic oligonucleotide
gcacaugcacacacacaca

SEQ ID NO: 783412 - RNA, 19 nt, Artificial Sequence
  Description of Artificial Sequence: Synthetic oligonucleotide
cagguccuguaaacguggu

SEQ ID NO: 783413 - RNA, 19 nt, Artificial Sequence
  Description of Artificial Sequence: Synthetic oligonucleotide
ggauccugacaagacuccu

SEQ ID NO: 783414 - RNA, 19 nt, Artificial Sequence
  Description of Artificial Sequence: Synthetic oligonucleotide
cuggugcguccucaagugu

SEQ ID NO: 783415 - RNA, 19 nt, Artificial Sequence
  Description of Artificial Sequence: Synthetic oligonucleotide
agcucccuugagggcuugu

SEQ ID NO: 783416 - RNA, 19 nt, Artificial Sequence
  Description of Artificial Sequence: Synthetic oligonucleotide
ccuucccuaugggcuuugg

SEQ ID NO: 783417 - RNA, 19 nt, Artificial Sequence
  Description of Artificial Sequence: Synthetic oligonucleotide
cacguccgcucaccagcca

SEQ ID NO: 783418 - RNA, 19 nt, Artificial Sequence
  Description of Artificial Sequence: Synthetic oligonucleotide
gcaucagaucaccgggaau

SEQ ID NO: 783419 - RNA, 19 nt, Artificial Sequence
  Description of Artificial Sequence: Synthetic oligonucleotide
ggcauccuugaggcuggac

SEQ ID NO: 783420 - RNA, 19 nt, Artificial Sequence
  Description of Artificial Sequence: Synthetic oligonucleotide
cucaaguguccuccaucuu

SEQ ID NO: 783421 - RNA, 19 nt, Artificial Sequence
  Description of Artificial Sequence: Synthetic oligonucleotide
ccgccuguuccgccagaag

SEQ ID NO: 783422 - RNA, 19 nt, Artificial Sequence
  Description of Artificial Sequence: Synthetic oligonucleotide
cacgcucugugcugccccu

SEQ ID NO: 783423 - RNA, 19 nt, Artificial Sequence
  Description of Artificial Sequence: Synthetic oligonucleotide
ggagucaggcggcauccuu

SEQ ID NO: 783424 - RNA, 19 nt, Artificial Sequence
  Description of Artificial Sequence: Synthetic oligonucleotide
caccacggcccuacuuagu

SEQ ID NO: 783425 - RNA, 19 nt, Artificial Sequence
  Description of Artificial Sequence: Synthetic oligonucleotide
gcacugcacguccgcucac

SEQ ID NO: 783426 - RNA, 19 nt, Artificial Sequence
  Description of Artificial Sequence: Synthetic oligonucleotide
gcacugggccuugcuguac

SEQ ID NO: 783427 - RNA, 19 nt, Artificial Sequence
  Description of Artificial Sequence: Synthetic oligonucleotide
ggccagugggugguccauc

SEQ ID NO: 783428 - RNA, 19 nt, Artificial Sequence
  Description of Artificial Sequence: Synthetic oligonucleotide
guuccgccagaagccugcu

SEQ ID NO: 783429 - RNA, 19 nt, Artificial Sequence
  Description of Artificial Sequence: Synthetic oligonucleotide
ccuguuccgccagaagccu

SEQ ID NO: 783430 - RNA, 19 nt, Artificial Sequence
  Description of Artificial Sequence: Synthetic oligonucleotide
ccgcaguacagagcuccca

SEQ ID NO: 783431 - RNA, 19 nt, Artificial Sequence
  Description of Artificial Sequence: Synthetic oligonucleotide
gggcguguccuggcccuuc

SEQ ID NO: 783432 - RNA, 19 nt, Artificial Sequence
  Description of Artificial Sequence: Synthetic oligonucleotide
gcagaccuauuggcagccu

SEQ ID NO: 783433 - RNA, 19 nt, Artificial Sequence
  Description of Artificial Sequence: Synthetic oligonucleotide
cccgccuguuccgccagaa

SEQ ID NO: 783434 - RNA, 19 nt, Artificial Sequence
  Description of Artificial Sequence: Synthetic oligonucleotide
cccaaggggucaacugcuu

SEQ ID NO: 783435 - RNA, 19 nt, Artificial Sequence
  Description of Artificial Sequence: Synthetic oligonucleotide
gcccgccuguuccgccaga

SEQ ID NO: 783436 - RNA, 19 nt, Artificial Sequence
  Description of Artificial Sequence: Synthetic oligonucleotide
gggccagugggugguccau

SEQ ID NO: 783437 - RNA, 19 nt, Artificial Sequence
  Description of Artificial Sequence: Synthetic oligonucleotide
cggcccuacuuaguagucu

SEQ ID NO: 783438 - RNA, 19 nt, Artificial Sequence
  Description of Artificial Sequence: Synthetic oligonucleotide
aaaccuggcauuuaaaccc

SEQ ID NO: 783439 - RNA, 19 nt, Artificial Sequence
  Description of Artificial Sequence: Synthetic oligonucleotide
ucaauguuaauguacaagg

SEQ ID NO: 783440 - RNA, 19 nt, Artificial Sequence
  Description of Artificial Sequence: Synthetic oligonucleotide
aauagcuuagaaauguucc

SEQ ID NO: 783441 - RNA, 19 nt, Artificial Sequence
  Description of Artificial Sequence: Synthetic oligonucleotide
uguaucgacagucacuggg

SEQ ID NO: 783442 - RNA, 19 nt, Artificial Sequence
  Description of Artificial Sequence: Synthetic oligonucleotide
ucuucuaugucgcuugagg

SEQ ID NO: 783443 - RNA, 19 nt, Artificial Sequence
  Description of Artificial Sequence: Synthetic oligonucleotide
auacacuuccuccauacac

SEQ ID NO: 783444 - RNA, 19 nt, Artificial Sequence
  Description of Artificial Sequence: Synthetic oligonucleotide
acaugguccaccccgagcc

SEQ ID NO: 783445 - RNA, 19 nt, Artificial Sequence
  Description of Artificial Sequence: Synthetic oligonucleotide
guaguuguaaaucucagca

SEQ ID NO: 783446 - RNA, 19 nt, Artificial Sequence
  Description of Artificial Sequence: Synthetic oligonucleotide
ugggcuuagacaaaacugc

SEQ ID NO: 783447 - RNA, 19 nt, Artificial Sequence
  Description of Artificial Sequence: Synthetic oligonucleotide
ucaaacuccuucaugcaag

SEQ ID NO: 783448 - RNA, 19 nt, Artificial Sequence
  Description of Artificial Sequence: Synthetic oligonucleotide
aauuuggucaguccaggug

SEQ ID NO: 783449 - RNA, 19 nt, Artificial Sequence
  Description of Artificial Sequence: Synthetic oligonucleotide
aauacaaggacaucucuuu

SEQ ID NO: 783450 - RNA, 19 nt, Artificial Sequence
  Description of Artificial Sequence: Synthetic oligonucleotide
guaaaucucagcauuuucg

SEQ ID NO: 783451 - RNA, 19 nt, Artificial Sequence
  Description of Artificial Sequence: Synthetic oligonucleotide
gauguaucgacagucacug

SEQ ID NO: 783452 - RNA, 19 nt, Artificial Sequence
  Description of Artificial Sequence: Synthetic oligonucleotide
aacauagccaccccuccuc

SEQ ID NO: 783453 - RNA, 19 nt, Artificial Sequence
  Description of Artificial Sequence: Synthetic oligonucleotide
cuugggacaaaagaggagg

SEQ ID NO: 783454 - RNA, 19 nt, Artificial Sequence
  Description of Artificial Sequence: Synthetic oligonucleotide
uggcauuuaaacccaagug

SEQ ID NO: 783455 - RNA, 19 nt, Artificial Sequence
  Description of Artificial Sequence: Synthetic oligonucleotide
uauacaaguugucagccaa

SEQ ID NO: 783456 - RNA, 19 nt, Artificial Sequence
  Description of Artificial Sequence: Synthetic oligonucleotide
cuuauuucucucuggagac

SEQ ID NO: 783457 - RNA, 19 nt, Artificial Sequence
  Description of Artificial Sequence: Synthetic oligonucleotide
cuugguagcaugcucagac

SEQ ID NO: 783458 - RNA, 19 nt, Artificial Sequence
  Description of Artificial Sequence: Synthetic oligonucleotide
aggcaugugaagcuugggc

SEQ ID NO: 783459 - RNA, 19 nt, Artificial Sequence
  Description of Artificial Sequence: Synthetic oligonucleotide
aggugaugaggauucagac

SEQ ID NO: 783460 - RNA, 19 nt, Artificial Sequence
  Description of Artificial Sequence: Synthetic oligonucleotide
cauuuaaacccaagugugg

SEQ ID NO: 783461 - RNA, 19 nt, Artificial Sequence
  Description of Artificial Sequence: Synthetic oligonucleotide
uuuaucagccaucaggcuu

SEQ ID NO: 783462 - RNA, 19 nt, Artificial Sequence
  Description of Artificial Sequence: Synthetic oligonucleotide
agaaauguuccuaacagca

SEQ ID NO: 783463 - RNA, 19 nt, Artificial Sequence
  Description of Artificial Sequence: Synthetic oligonucleotide
cauuuagagaggagggugg

SEQ ID NO: 783464 - RNA, 19 nt, Artificial Sequence
  Description of Artificial Sequence: Synthetic oligonucleotide
cugggauugggcaauuugg

SEQ ID NO: 783465 - RNA, 19 nt, Artificial Sequence
  Description of Artificial Sequence: Synthetic oligonucleotide
guaaaccuggcauuuaaac

SEQ ID NO: 783466 - RNA, 19 nt, Artificial Sequence
  Description of Artificial Sequence: Synthetic oligonucleotide
cuucuaugucgcuugaggc

SEQ ID NO: 783467 - RNA, 19 nt, Artificial Sequence
  Description of Artificial Sequence: Synthetic oligonucleotide
auucgcaggcaugugaagc

SEQ ID NO: 783468 - RNA, 19 nt, Artificial Sequence
  Description of Artificial Sequence: Synthetic oligonucleotide
ccuauugccauccacaccc

SEQ ID NO: 783469 - RNA, 19 nt, Artificial Sequence
  Description of Artificial Sequence: Synthetic oligonucleotide
uguuaauguacaagggguc

SEQ ID NO: 783470 - RNA, 19 nt, Artificial Sequence
  Description of Artificial Sequence: Synthetic oligonucleotide
uuugaaacagcaacuuaau

SEQ ID NO: 783471 - RNA, 19 nt, Artificial Sequence
  Description of Artificial Sequence: Synthetic oligonucleotide
aacugccucuguuaguuug

SEQ ID NO: 783472 - RNA, 19 nt, Artificial Sequence
  Description of Artificial Sequence: Synthetic oligonucleotide
ucagucaggagaguagggg

SEQ ID NO: 783473 - RNA, 19 nt, Artificial Sequence
  Description of Artificial Sequence: Synthetic oligonucleotide
guaggagcagcucagucag

SEQ ID NO: 783474 - RNA, 19 nt, Artificial Sequence
  Description of Artificial Sequence: Synthetic oligonucleotide
uuugccugugggcuaacag

SEQ ID NO: 783475 - RNA, 19 nt, Artificial Sequence
  Description of Artificial Sequence: Synthetic oligonucleotide
cauggaaacauagccaccc

SEQ ID NO: 783476 - RNA, 19 nt, Artificial Sequence
  Description of Artificial Sequence: Synthetic oligonucleotide
uucuaugucgcuugaggca

SEQ ID NO: 783477 - RNA, 19 nt, Artificial Sequence
  Description of Artificial Sequence: Synthetic oligonucleotide
ucgaugccagcauauggcg

SEQ ID NO: 783478 - RNA, 19 nt, Artificial Sequence
  Description of Artificial Sequence: Synthetic oligonucleotide
gaagaacugggauugggca

SEQ ID NO: 783479 - RNA, 19 nt, Artificial Sequence
  Description of Artificial Sequence: Synthetic oligonucleotide
aguaggagcagcucaguca

SEQ ID NO: 783480 - RNA, 19 nt, Artificial Sequence
  Description of Artificial Sequence: Synthetic oligonucleotide
ugucaccuaaaagugaaca

SEQ ID NO: 783481 - RNA, 19 nt, Artificial Sequence
  Description of Artificial Sequence: Synthetic oligonucleotide
uguacaagggguccuggcu

SEQ ID NO: 783482 - RNA, 19 nt, Artificial Sequence
  Description of Artificial Sequence: Synthetic oligonucleotide
acagcaagagucuacccca

SEQ ID NO: 783483 - RNA, 19 nt, Artificial Sequence
  Description of Artificial Sequence: Synthetic oligonucleotide
gaaacauagccaccccucc

SEQ ID NO: 783484 - RNA, 19 nt, Artificial Sequence
  Description of Artificial Sequence: Synthetic oligonucleotide
uuagacaaaacugccucug

SEQ ID NO: 783485 - RNA, 19 nt, Artificial Sequence
  Description of Artificial Sequence: Synthetic oligonucleotide
gaugagguaguuguaaauc

SEQ ID NO: 783486 - RNA, 19 nt, Artificial Sequence
  Description of Artificial Sequence: Synthetic oligonucleotide
cuuccugucaccuaaaagu

SEQ ID NO: 783487 - RNA, 19 nt, Artificial Sequence
  Description of Artificial Sequence: Synthetic oligonucleotide
gugaugaggauucagaccu

SEQ ID NO: 783488 - RNA, 19 nt, Artificial Sequence
  Description of Artificial Sequence: Synthetic oligonucleotide
cuaacagcaagagucuacc

SEQ ID NO: 783489 - RNA, 19 nt, Artificial Sequence
  Description of Artificial Sequence: Synthetic oligonucleotide
caugaaccggaccagaguc

SEQ ID NO: 783490 - RNA, 19 nt, Artificial Sequence
  Description of Artificial Sequence: Synthetic oligonucleotide
cugagaauaucccaccuuc

SEQ ID NO: 783491 - RNA, 19 nt, Artificial Sequence
  Description of Artificial Sequence: Synthetic oligonucleotide
guuaauguacaaggggucc

SEQ ID NO: 783492 - RNA, 19 nt, Artificial Sequence
  Description of Artificial Sequence: Synthetic oligonucleotide
uccccuauugccauccaca

SEQ ID NO: 783493 - RNA, 19 nt, Artificial Sequence
  Description of Artificial Sequence: Synthetic oligonucleotide
uuucaggcgguucccgccg

SEQ ID NO: 783494 - RNA, 19 nt, Artificial Sequence
  Description of Artificial Sequence: Synthetic oligonucleotide
uguggauggucaaacuccu

SEQ ID NO: 783495 - RNA, 19 nt, Artificial Sequence
  Description of Artificial Sequence: Synthetic oligonucleotide
acagcaacuuaauagcuua

SEQ ID NO: 783496 - RNA, 19 nt, Artificial Sequence
  Description of Artificial Sequence: Synthetic oligonucleotide
accccgagcccacacaucg

SEQ ID NO: 783497 - RNA, 19 nt, Artificial Sequence
  Description of Artificial Sequence: Synthetic oligonucleotide
aagagucuaccccaugcau

SEQ ID NO: 783498 - RNA, 19 nt, Artificial Sequence
  Description of Artificial Sequence: Synthetic oligonucleotide
gaugccagcauauggcguc

SEQ ID NO: 783499 - RNA, 19 nt, Artificial Sequence
  Description of Artificial Sequence: Synthetic oligonucleotide
cagggcugaagauguaucg

SEQ ID NO: 783500 - RNA, 19 nt, Artificial Sequence
  Description of Artificial Sequence: Synthetic oligonucleotide
ugagaucauacacuuccuc

SEQ ID NO: 783501 - RNA, 19 nt, Artificial Sequence
  Description of Artificial Sequence: Synthetic oligonucleotide
uccauucgcaggcauguga

SEQ ID NO: 783502 - RNA, 19 nt, Artificial Sequence
  Description of Artificial Sequence: Synthetic oligonucleotide
uaucuggggacuugguagc

SEQ ID NO: 783503 - RNA, 19 nt, Artificial Sequence
  Description of Artificial Sequence: Synthetic oligonucleotide
uacaagggguccuggcugg

SEQ ID NO: 783504 - RNA, 19 nt, Artificial Sequence
  Description of Artificial Sequence: Synthetic oligonucleotide
guccauuuagagaggaggg

SEQ ID NO: 783505 - RNA, 19 nt, Artificial Sequence
  Description of Artificial Sequence: Synthetic oligonucleotide
ugggcuaacagcugcugug

SEQ ID NO: 783506 - RNA, 19 nt, Artificial Sequence
  Description of Artificial Sequence: Synthetic oligonucleotide
ugggauugggcaauuuggu

SEQ ID NO: 783507 - RNA, 19 nt, Artificial Sequence
  Description of Artificial Sequence: Synthetic oligonucleotide
uaaacccaagugugguggg

SEQ ID NO: 783508 - RNA, 19 nt, Artificial Sequence
  Description of Artificial Sequence: Synthetic oligonucleotide
ugagaauaucccaccuucu

SEQ ID NO: 783509 - RNA, 19 nt, Artificial Sequence
  Description of Artificial Sequence: Synthetic oligonucleotide
uuccuaacagcaagagucu

SEQ ID NO: 783510 - RNA, 19 nt, Artificial Sequence
  Description of Artificial Sequence: Synthetic oligonucleotide
uccugccuuuagaagacag

SEQ ID NO: 783511 - RNA, 19 nt, Artificial Sequence
  Description of Artificial Sequence: Synthetic oligonucleotide
gaacaauacaaggacaucu

SEQ ID NO: 783512 - RNA, 19 nt, Artificial Sequence
  Description of Artificial Sequence: Synthetic oligonucleotide
uacaaguugucagccaagc

SEQ ID NO: 783513 - RNA, 19 nt, Artificial Sequence
  Description of Artificial Sequence: Synthetic oligonucleotide
gagaauaucccaccuucuc

SEQ ID NO: 783514 - RNA, 19 nt, Artificial Sequence
  Description of Artificial Sequence: Synthetic oligonucleotide
gagucuaccccaugcauuc

SEQ ID NO: 783515 - RNA, 19 nt, Artificial Sequence
  Description of Artificial Sequence: Synthetic oligonucleotide
aucgcuguguacaguauac

SEQ ID NO: 783516 - RNA, 19 nt, Artificial Sequence
  Description of Artificial Sequence: Synthetic oligonucleotide
ugccucgcugcuaagcugc

SEQ ID NO: 783517 - RNA, 19 nt, Artificial Sequence
  Description of Artificial Sequence: Synthetic oligonucleotide
uguccuuugccugugggcu

SEQ ID NO: 783518 - RNA, 19 nt, Artificial Sequence
  Description of Artificial Sequence: Synthetic oligonucleotide
uccuccauacacuccggag

SEQ ID NO: 783519 - RNA, 19 nt, Artificial Sequence
  Description of Artificial Sequence: Synthetic oligonucleotide
auacaaggacaucucuuug

SEQ ID NO: 783520 - RNA, 19 nt, Artificial Sequence
  Description of Artificial Sequence: Synthetic oligonucleotide
ucuaugucgcuugaggcaa

SEQ ID NO: 783521 - RNA, 19 nt, Artificial Sequence
  Description of Artificial Sequence: Synthetic oligonucleotide
agaucuccagggcugaaga

SEQ ID NO: 783522 - RNA, 19 nt, Artificial Sequence
  Description of Artificial Sequence: Synthetic oligonucleotide
uagcucaccuccucuaagc

SEQ ID NO: 783523 - RNA, 19 nt, Artificial Sequence
  Description of Artificial Sequence: Synthetic oligonucleotide
acccgagugugccaauccc

SEQ ID NO: 783524 - RNA, 19 nt, Artificial Sequence
  Description of Artificial Sequence: Synthetic oligonucleotide
guaucgacagucacugggg

SEQ ID NO: 783525 - RNA, 19 nt, Artificial Sequence
  Description of Artificial Sequence: Synthetic oligonucleotide
aauucgggaggcgagcaga

SEQ ID NO: 783526 - RNA, 19 nt, Artificial Sequence
  Description of Artificial Sequence: Synthetic oligonucleotide
auaccuugcugccugggcu

SEQ ID NO: 783527 - RNA, 19 nt, Artificial Sequence
  Description of Artificial Sequence: Synthetic oligonucleotide
uccggaggcuguuucaggc

SEQ ID NO: 783528 - RNA, 19 nt, Artificial Sequence
  Description of Artificial Sequence: Synthetic oligonucleotide
uuagcccugcuccggaggc

SEQ ID NO: 783529 - RNA, 19 nt, Artificial Sequence
  Description of Artificial Sequence: Synthetic oligonucleotide
uuaauguacaagggguccu

SEQ ID NO: 783530 - RNA, 19 nt, Artificial Sequence
  Description of Artificial Sequence: Synthetic oligonucleotide
aaggcaugcaagucuccgu

SEQ ID NO: 783531 - RNA, 19 nt, Artificial Sequence
  Description of Artificial Sequence: Synthetic oligonucleotide
ggauugggcaauuugguca

SEQ ID NO: 783532 - RNA, 19 nt, Artificial Sequence
  Description of Artificial Sequence: Synthetic oligonucleotide
uuugggacccgagugugcc

SEQ ID NO: 783533 - RNA, 19 nt, Artificial Sequence
  Description of Artificial Sequence: Synthetic oligonucleotide
ucuaccccaugcauuccag

SEQ ID NO: 783534 - RNA, 19 nt, Artificial Sequence
  Description of Artificial Sequence: Synthetic oligonucleotide
ucaggcaaccagcucuagc

SEQ ID NO: 783535 - RNA, 19 nt, Artificial Sequence
  Description of Artificial Sequence: Synthetic oligonucleotide
ugcccacgagucaugaucu

SEQ ID NO: 783536 - RNA, 19 nt, Artificial Sequence
  Description of Artificial Sequence: Synthetic oligonucleotide
agcuuagaaauguuccuaa

SEQ ID NO: 783537 - RNA, 19 nt, Artificial Sequence
  Description of Artificial Sequence: Synthetic oligonucleotide
ggagacuugggacaaaaga

SEQ ID NO: 783538 - RNA, 19 nt, Artificial Sequence
  Description of Artificial Sequence: Synthetic oligonucleotide
gaccugagaauaucccacc

SEQ ID NO: 783539 - RNA, 19 nt, Artificial Sequence
  Description of Artificial Sequence: Synthetic oligonucleotide
ggugaugaggauucagacc

SEQ ID NO: 783540 - RNA, 19 nt, Artificial Sequence
  Description of Artificial Sequence: Synthetic oligonucleotide
ugcgcuccagcacugguac

SEQ ID NO: 783541 - RNA, 19 nt, Artificial Sequence
  Description of Artificial Sequence: Synthetic oligonucleotide
cugaacugaugccaggcug

SEQ ID NO: 783542 - RNA, 19 nt, Artificial Sequence
  Description of Artificial Sequence: Synthetic oligonucleotide
ggggaggcgaccuuuagcc

SEQ ID NO: 783543 - RNA, 19 nt, Artificial Sequence
  Description of Artificial Sequence: Synthetic oligonucleotide
uugggacaaaagaggaggu

SEQ ID NO: 783544 - RNA, 19 nt, Artificial Sequence
  Description of Artificial Sequence: Synthetic oligonucleotide
uaucgacagucacugggga

SEQ ID NO: 783545 - RNA, 19 nt, Artificial Sequence
  Description of Artificial Sequence: Synthetic oligonucleotide
aagcaugcacuggaaguag

SEQ ID NO: 783546 - RNA, 19 nt, Artificial Sequence
  Description of Artificial Sequence: Synthetic oligonucleotide
uucgcaggcaugugaagcu

SEQ ID NO: 783547 - RNA, 19 nt, Artificial Sequence
  Description of Artificial Sequence: Synthetic oligonucleotide
gguaguuguaaaucucagc

SEQ ID NO: 783548 - RNA, 19 nt, Artificial Sequence
  Description of Artificial Sequence: Synthetic oligonucleotide
ucgggaggcgagcagaaaa

SEQ ID NO: 783549 - RNA, 19 nt, Artificial Sequence
  Description of Artificial Sequence: Synthetic oligonucleotide
uccugucaccuaaaaguga

SEQ ID NO: 783550 - RNA, 19 nt, Artificial Sequence
  Description of Artificial Sequence: Synthetic oligonucleotide
gacuugguagcaugcucag

SEQ ID NO: 783551 - RNA, 19 nt, Artificial Sequence
  Description of Artificial Sequence: Synthetic oligonucleotide
cuguguacaguauacaagu

SEQ ID NO: 783552 - RNA, 19 nt, Artificial Sequence
  Description of Artificial Sequence: Synthetic oligonucleotide
aggcaugcaagucuccgug

SEQ ID NO: 783553 - RNA, 19 nt, Artificial Sequence
  Description of Artificial Sequence: Synthetic oligonucleotide
ggagccuagaccccggccg

SEQ ID NO: 783554 - RNA, 19 nt, Artificial Sequence
  Description of Artificial Sequence: Synthetic oligonucleotide
guagcaugcucagacagac

SEQ ID NO: 783555 - RNA, 19 nt, Artificial Sequence
  Description of Artificial Sequence: Synthetic oligonucleotide
agccaucaggcuuauuucu

SEQ ID NO: 783556 - RNA, 19 nt, Artificial Sequence
  Description of Artificial Sequence: Synthetic oligonucleotide
agugaacaauacaaggaca

SEQ ID NO: 783557 - RNA, 19 nt, Artificial Sequence
  Description of Artificial Sequence: Synthetic oligonucleotide
aggcuuauuucucucugga

SEQ ID NO: 783558 - RNA, 19 nt, Artificial Sequence
  Description of Artificial Sequence: Synthetic oligonucleotide
caggcuuauuucucucugg

SEQ ID NO: 783559 - RNA, 19 nt, Artificial Sequence
  Description of Artificial Sequence: Synthetic oligonucleotide
gaccuuuagcccugcuccg

SEQ ID NO: 783560 - RNA, 19 nt, Artificial Sequence
  Description of Artificial Sequence: Synthetic oligonucleotide
gcuuagacaaaacugccuc

SEQ ID NO: 783561 - RNA, 19 nt, Artificial Sequence
  Description of Artificial Sequence: Synthetic oligonucleotide
aagggucaccauguggaag

SEQ ID NO: 783562 - RNA, 19 nt, Artificial Sequence
  Description of Artificial Sequence: Synthetic oligonucleotide
ugcuucgcucacuuccggg

SEQ ID NO: 783563 - RNA, 19 nt, Artificial Sequence
  Description of Artificial Sequence: Synthetic oligonucleotide
gaggcucaccccaacaagc

SEQ ID NO: 783564 - RNA, 19 nt, Artificial Sequence
  Description of Artificial Sequence: Synthetic oligonucleotide
aguccugccuuuagaagac

SEQ ID NO: 783565 - RNA, 19 nt, Artificial Sequence
  Description of Artificial Sequence: Synthetic oligonucleotide
uaauguacaagggguccug

SEQ ID NO: 783566 - RNA, 19 nt, Artificial Sequence
  Description of Artificial Sequence: Synthetic oligonucleotide
ugaaccggaccagagucug

SEQ ID NO: 783567 - RNA, 19 nt, Artificial Sequence
  Description of Artificial Sequence: Synthetic oligonucleotide
cuaagcugcucuccacagg

SEQ ID NO: 783568 - RNA, 19 nt, Artificial Sequence
  Description of Artificial Sequence: Synthetic oligonucleotide
ucuaagccaaggccugaac

SEQ ID NO: 783569 - RNA, 19 nt, Artificial Sequence
  Description of Artificial Sequence: Synthetic oligonucleotide
cacacaucgcuguguacag

SEQ ID NO: 783570 - RNA, 19 nt, Artificial Sequence
  Description of Artificial Sequence: Synthetic oligonucleotide
acaaguugucagccaagcu

SEQ ID NO: 783571 - RNA, 19 nt, Artificial Sequence
  Description of Artificial Sequence: Synthetic oligonucleotide
uggggaggcgaccuuuagc

SEQ ID NO: 783572 - RNA, 19 nt, Artificial Sequence
  Description of Artificial Sequence: Synthetic oligonucleotide
uccauuuagagaggagggu

SEQ ID NO: 783573 - RNA, 19 nt, Artificial Sequence
  Description of Artificial Sequence: Synthetic oligonucleotide
gcaagagucuaccccaugc

SEQ ID NO: 783574 - RNA, 19 nt, Artificial Sequence
  Description of Artificial Sequence: Synthetic oligonucleotide
uguguacaguauacaaguu

SEQ ID NO: 783575 - RNA, 19 nt, Artificial Sequence
  Description of Artificial Sequence: Synthetic oligonucleotide
guuucaggcgguucccgcc

SEQ ID NO: 783576 - RNA, 19 nt, Artificial Sequence
  Description of Artificial Sequence: Synthetic oligonucleotide
cauaccuugcugccugggc

SEQ ID NO: 783577 - RNA, 19 nt, Artificial Sequence
  Description of Artificial Sequence: Synthetic oligonucleotide
agauguaucgacagucacu

SEQ ID NO: 783578 - RNA, 19 nt, Artificial Sequence
  Description of Artificial Sequence: Synthetic oligonucleotide
agggguccugaacugcuuc

SEQ ID NO: 783579 - RNA, 19 nt, Artificial Sequence
  Description of Artificial Sequence: Synthetic oligonucleotide
ugaacaauacaaggacauc

SEQ ID NO: 783580 - RNA, 19 nt, Artificial Sequence
  Description of Artificial Sequence: Synthetic oligonucleotide
accccaugcauuccaggag

SEQ ID NO: 783581 - RNA, 19 nt, Artificial Sequence
  Description of Artificial Sequence: Synthetic oligonucleotide
acaagcuuggccacgugug

SEQ ID NO: 783582 - RNA, 19 nt, Artificial Sequence
  Description of Artificial Sequence: Synthetic oligonucleotide
uugguagcaugcucagaca

SEQ ID NO: 783583 - RNA, 19 nt, Artificial Sequence
  Description of Artificial Sequence: Synthetic oligonucleotide
ugaugugccuccagccugu

SEQ ID NO: 783584 - RNA, 19 nt, Artificial Sequence
  Description of Artificial Sequence: Synthetic oligonucleotide
agcaacuuaauagcuuaga

SEQ ID NO: 783585 - RNA, 19 nt, Artificial Sequence
  Description of Artificial Sequence: Synthetic oligonucleotide
aggcaaccagcucuagcuc

SEQ ID NO: 783586 - RNA, 19 nt, Artificial Sequence
  Description of Artificial Sequence: Synthetic oligonucleotide
cucucaguaggcugcucag

SEQ ID NO: 783587 - RNA, 19 nt, Artificial Sequence
  Description of Artificial Sequence: Synthetic oligonucleotide
ugccucuguuaguuugggg

SEQ ID NO: 783588 - RNA, 19 nt, Artificial Sequence
  Description of Artificial Sequence: Synthetic oligonucleotide
uugcuacccuccccuauug

SEQ ID NO: 783589 - RNA, 19 nt, Artificial Sequence
  Description of Artificial Sequence: Synthetic oligonucleotide
uagcuuagaaauguuccua

SEQ ID NO: 783590 - RNA, 19 nt, Artificial Sequence
  Description of Artificial Sequence: Synthetic oligonucleotide
ugaugaggauucagaccug

SEQ ID NO: 783591 - RNA, 19 nt, Artificial Sequence
  Description of Artificial Sequence: Synthetic oligonucleotide
accugagaauaucccaccu

SEQ ID NO: 783592 - RNA, 19 nt, Artificial Sequence
  Description of Artificial Sequence: Synthetic oligonucleotide
aaccggaccagagucugga

SEQ ID NO: 783593 - RNA, 19 nt, Artificial Sequence
  Description of Artificial Sequence: Synthetic oligonucleotide
uggggaauggggaggcgac

SEQ ID NO: 783594 - RNA, 19 nt, Artificial Sequence
  Description of Artificial Sequence: Synthetic oligonucleotide
uggagggguaaaccuggca

SEQ ID NO: 783595 - RNA, 19 nt, Artificial Sequence
  Description of Artificial Sequence: Synthetic oligonucleotide
uuugugacuuggaggggua

SEQ ID NO: 783596 - RNA, 19 nt, Artificial Sequence
  Description of Artificial Sequence: Synthetic oligonucleotide
cagacagacugugggaagc

SEQ ID NO: 783597 - RNA, 19 nt, Artificial Sequence
  Description of Artificial Sequence: Synthetic oligonucleotide
cugcccaggugacucagcc

SEQ ID NO: 783598 - RNA, 19 nt, Artificial Sequence
  Description of Artificial Sequence: Synthetic oligonucleotide
uuauuucucucuggagacu

SEQ ID NO: 783599 - RNA, 19 nt, Artificial Sequence
  Description of Artificial Sequence: Synthetic oligonucleotide
uggggaugccaccuaccug

SEQ ID NO: 783600 - RNA, 19 nt, Artificial Sequence
  Description of Artificial Sequence: Synthetic oligonucleotide
gaugaggauucagaccuga

SEQ ID NO: 783601 - RNA, 19 nt, Artificial Sequence
  Description of Artificial Sequence: Synthetic oligonucleotide
cagcaacuuaauagcuuag

SEQ ID NO: 783602 - RNA, 19 nt, Artificial Sequence
  Description of Artificial Sequence: Synthetic oligonucleotide
agacucagaguccugccuu

SEQ ID NO: 783603 - RNA, 19 nt, Artificial Sequence
  Description of Artificial Sequence: Synthetic oligonucleotide
uguugcuacccuccccuau

SEQ ID NO: 783604 - RNA, 19 nt, Artificial Sequence
  Description of Artificial Sequence: Synthetic oligonucleotide
uccauaccuugcugccugg

SEQ ID NO: 783605 - RNA, 19 nt, Artificial Sequence
  Description of Artificial Sequence: Synthetic oligonucleotide
gacaucucuuugugacuug

SEQ ID NO: 783606 - RNA, 19 nt, Artificial Sequence
  Description of Artificial Sequence: Synthetic oligonucleotide
gcaugugaagcuugggcgc

SEQ ID NO: 783607 - RNA, 19 nt, Artificial Sequence
  Description of Artificial Sequence: Synthetic oligonucleotide
auguaucgacagucacugg

SEQ ID NO: 783608 - RNA, 19 nt, Artificial Sequence
  Description of Artificial Sequence: Synthetic oligonucleotide
uuuagagaggaggguggac

SEQ ID NO: 783609 - RNA, 19 nt, Artificial Sequence
  Description of Artificial Sequence: Synthetic oligonucleotide
gcaacuuaauagcuuagaa

SEQ ID NO: 783610 - RNA, 19 nt, Artificial Sequence
  Description of Artificial Sequence: Synthetic oligonucleotide
uaagggucaccauguggaa

SEQ ID NO: 783611 - RNA, 19 nt, Artificial Sequence
  Description of Artificial Sequence: Synthetic oligonucleotide
cuuugggacccgagugugc

SEQ ID NO: 783612 - RNA, 19 nt, Artificial Sequence
  Description of Artificial Sequence: Synthetic oligonucleotide
uggagccuagaccccggcc

SEQ ID NO: 783613 - RNA, 19 nt, Artificial Sequence
  Description of Artificial Sequence: Synthetic oligonucleotide
auacaaguugucagccaag

SEQ ID NO: 783614 - RNA, 19 nt, Artificial Sequence
  Description of Artificial Sequence: Synthetic oligonucleotide
cauucgcaggcaugugaag

SEQ ID NO: 783615 - RNA, 19 nt, Artificial Sequence
  Description of Artificial Sequence: Synthetic oligonucleotide
ugcuacccuccccuauugc

SEQ ID NO: 783616 - RNA, 19 nt, Artificial Sequence
  Description of Artificial Sequence: Synthetic oligonucleotide
cauauggcgucugcccacg

SEQ ID NO: 783617 - RNA, 19 nt, Artificial Sequence
  Description of Artificial Sequence: Synthetic oligonucleotide
auuuucgaugccagcauau

SEQ ID NO: 783618 - RNA, 19 nt, Artificial Sequence
  Description of Artificial Sequence: Synthetic oligonucleotide
caucaggcuuauuucucuc

SEQ ID NO: 783619 - RNA, 19 nt, Artificial Sequence
  Description of Artificial Sequence: Synthetic oligonucleotide
cgaccuuuagcccugcucc

SEQ ID NO: 783620 - RNA, 19 nt, Artificial Sequence
  Description of Artificial Sequence: Synthetic oligonucleotide
cacguguggauggucaaac

SEQ ID NO: 783621 - RNA, 19 nt, Artificial Sequence
  Description of Artificial Sequence: Synthetic oligonucleotide
ugcuuugggucugcgcucc

SEQ ID NO: 783622 - RNA, 19 nt, Artificial Sequence
  Description of Artificial Sequence: Synthetic oligonucleotide
ugugaggcaguagcccuug

SEQ ID NO: 783623 - RNA, 19 nt, Artificial Sequence
  Description of Artificial Sequence: Synthetic oligonucleotide
agucuaccccaugcauucc

SEQ ID NO: 783624 - RNA, 19 nt, Artificial Sequence
  Description of Artificial Sequence: Synthetic oligonucleotide
uaugucgcuugaggcaaug

SEQ ID NO: 783625 - RNA, 19 nt, Artificial Sequence
  Description of Artificial Sequence: Synthetic oligonucleotide
guacaugagaucauacacu

SEQ ID NO: 783626 - RNA, 19 nt, Artificial Sequence
  Description of Artificial Sequence: Synthetic oligonucleotide
ggcugccucucucaguagg

SEQ ID NO: 783627 - RNA, 19 nt, Artificial Sequence
  Description of Artificial Sequence: Synthetic oligonucleotide
uccccaauucgggaggcga

SEQ ID NO: 783628 - RNA, 19 nt, Artificial Sequence
  Description of Artificial Sequence: Synthetic oligonucleotide
cuacccuccccuauugcca

SEQ ID NO: 783629 - RNA, 19 nt, Artificial Sequence
  Description of Artificial Sequence: Synthetic oligonucleotide
ccuaacagcaagagucuac

SEQ ID NO: 783630 - RNA, 19 nt, Artificial Sequence
  Description of Artificial Sequence: Synthetic oligonucleotide
ugugacuuggagggguaaa

SEQ ID NO: 783631 - RNA, 19 nt, Artificial Sequence
  Description of Artificial Sequence: Synthetic oligonucleotide
gugaacaauacaaggacau

SEQ ID NO: 783632 - RNA, 19 nt, Artificial Sequence
  Description of Artificial Sequence: Synthetic oligonucleotide
gacguaagggucaccaugu

SEQ ID NO: 783633 - RNA, 19 nt, Artificial Sequence
  Description of Artificial Sequence: Synthetic oligonucleotide
uauugccauccacacccau

SEQ ID NO: 783634 - RNA, 19 nt, Artificial Sequence
  Description of Artificial Sequence: Synthetic oligonucleotide
gggcugaagauguaucgac

SEQ ID NO: 783635 - RNA, 19 nt, Artificial Sequence
  Description of Artificial Sequence: Synthetic oligonucleotide
ccauuuagagaggagggug

SEQ ID NO: 783636 - RNA, 19 nt, Artificial Sequence
  Description of Artificial Sequence: Synthetic oligonucleotide
cugucaccuaaaagugaac

SEQ ID NO: 783637 - RNA, 19 nt, Artificial Sequence
  Description of Artificial Sequence: Synthetic oligonucleotide
aucgacagucacuggggau

SEQ ID NO: 783638 - RNA, 19 nt, Artificial Sequence
  Description of Artificial Sequence: Synthetic oligonucleotide
ccacgagucaugaucuccc

SEQ ID NO: 783639 - RNA, 19 nt, Artificial Sequence
  Description of Artificial Sequence: Synthetic oligonucleotide
ggagggcuaccacaggagc

SEQ ID NO: 783640 - RNA, 19 nt, Artificial Sequence
  Description of Artificial Sequence: Synthetic oligonucleotide
acuccggaggcuguuucag

SEQ ID NO: 783641 - RNA, 19 nt, Artificial Sequence
  Description of Artificial Sequence: Synthetic oligonucleotide
cuccggaggcuguuucagg

SEQ ID NO: 783642 - RNA, 19 nt, Artificial Sequence
  Description of Artificial Sequence: Synthetic oligonucleotide
cacaucgcuguguacagua

SEQ ID NO: 783643 - RNA, 19 nt, Artificial Sequence
  Description of Artificial Sequence: Synthetic oligonucleotide
cuggcauuuaaacccaagu

SEQ ID NO: 783644 - RNA, 19 nt, Artificial Sequence
  Description of Artificial Sequence: Synthetic oligonucleotide
gcuugaggcaaugauguca

SEQ ID NO: 783645 - RNA, 19 nt, Artificial Sequence
  Description of Artificial Sequence: Synthetic oligonucleotide
gaagcuugggcgcugcuuu

SEQ ID NO: 783646 - RNA, 19 nt, Artificial Sequence
  Description of Artificial Sequence: Synthetic oligonucleotide
caauucgggaggcgagcag

SEQ ID NO: 783647 - RNA, 19 nt, Artificial Sequence
  Description of Artificial Sequence: Synthetic oligonucleotide
auggggaggcgaccuuuag

SEQ ID NO: 783648 - RNA, 19 nt, Artificial Sequence
  Description of Artificial Sequence: Synthetic oligonucleotide
gugccaaucccuuccuguc

SEQ ID NO: 783649 - RNA, 19 nt, Artificial Sequence
  Description of Artificial Sequence: Synthetic oligonucleotide
acguguggauggucaaacu

SEQ ID NO: 783650 - RNA, 19 nt, Artificial Sequence
  Description of Artificial Sequence: Synthetic oligonucleotide
uucgcucacuuccgggcaa

SEQ ID NO: 783651 - RNA, 19 nt, Artificial Sequence
  Description of Artificial Sequence: Synthetic oligonucleotide
cuuagacaaaacugccucu

SEQ ID NO: 783652 - RNA, 19 nt, Artificial Sequence
  Description of Artificial Sequence: Synthetic oligonucleotide
ucgcuguguacaguauaca

SEQ ID NO: 783653 - RNA, 19 nt, Artificial Sequence
  Description of Artificial Sequence: Synthetic oligonucleotide
cuucaugcaagcugcuucu

SEQ ID NO: 783654 - RNA, 19 nt, Artificial Sequence
  Description of Artificial Sequence: Synthetic oligonucleotide
acguaagggucaccaugug

SEQ ID NO: 783655 - RNA, 19 nt, Artificial Sequence
  Description of Artificial Sequence: Synthetic oligonucleotide
gcucucucaauguuaaugu

SEQ ID NO: 783656 - RNA, 19 nt, Artificial Sequence
  Description of Artificial Sequence: Synthetic oligonucleotide
acaaaagaggagguccauu

SEQ ID NO: 783657 - RNA, 19 nt, Artificial Sequence
  Description of Artificial Sequence: Synthetic oligonucleotide
ccuuccugucaccuaaaag

SEQ ID NO: 783658 - RNA, 19 nt, Artificial Sequence
  Description of Artificial Sequence: Synthetic oligonucleotide
uagcaugcucagacagacu

SEQ ID NO: 783659 - RNA, 19 nt, Artificial Sequence
  Description of Artificial Sequence: Synthetic oligonucleotide
agagucuaccccaugcauu

SEQ ID NO: 783660 - RNA, 19 nt, Artificial Sequence
  Description of Artificial Sequence: Synthetic oligonucleotide
ggaggcgagcagaaaaggc

SEQ ID NO: 783661 - RNA, 19 nt, Artificial Sequence
  Description of Artificial Sequence: Synthetic oligonucleotide
cugcuaagcugcucuccac

SEQ ID NO: 783662 - RNA, 19 nt, Artificial Sequence
  Description of Artificial Sequence: Synthetic oligonucleotide
ggacuugguagcaugcuca

SEQ ID NO: 783663 - RNA, 19 nt, Artificial Sequence
  Description of Artificial Sequence: Synthetic oligonucleotide
gggauugggcaauuugguc

SEQ ID NO: 783664 - RNA, 19 nt, Artificial Sequence
  Description of Artificial Sequence: Synthetic oligonucleotide
gcucaccccaacaagcuug

SEQ ID NO: 783665 - RNA, 19 nt, Artificial Sequence
  Description of Artificial Sequence: Synthetic oligonucleotide
gaaccggaccagagucugg

SEQ ID NO: 783666 - RNA, 19 nt, Artificial Sequence
  Description of Artificial Sequence: Synthetic oligonucleotide
ggcaaccagcucuagcuca

SEQ ID NO: 783667 - RNA, 19 nt, Artificial Sequence
  Description of Artificial Sequence: Synthetic oligonucleotide
ugaagcuugggcgcugcuu

SEQ ID NO: 783668 - RNA, 19 nt, Artificial Sequence
  Description of Artificial Sequence: Synthetic oligonucleotide
caugguccaccccgagccc

SEQ ID NO: 783669 - RNA, 19 nt, Artificial Sequence
  Description of Artificial Sequence: Synthetic oligonucleotide
cuuuagaagacaggacucu

SEQ ID NO: 783670 - RNA, 19 nt, Artificial Sequence
  Description of Artificial Sequence: Synthetic oligonucleotide
cugcuucgcucacuuccgg

SEQ ID NO: 783671 - RNA, 19 nt, Artificial Sequence
  Description of Artificial Sequence: Synthetic oligonucleotide
cugcuccggaggcucaccc

SEQ ID NO: 783672 - RNA, 19 nt, Artificial Sequence
  Description of Artificial Sequence: Synthetic oligonucleotide
agacagacugugggaagcu

SEQ ID NO: 783673 - RNA, 19 nt, Artificial Sequence
  Description of Artificial Sequence: Synthetic oligonucleotide
cacuggggaugccaccuac

SEQ ID NO: 783674 - RNA, 19 nt, Artificial Sequence
  Description of Artificial Sequence: Synthetic oligonucleotide
cugccucgcugcuaagcug

SEQ ID NO: 783675 - RNA, 19 nt, Artificial Sequence
  Description of Artificial Sequence: Synthetic oligonucleotide
ccugucaccuaaaagugaa

SEQ ID NO: 783676 - RNA, 19 nt, Artificial Sequence
  Description of Artificial Sequence: Synthetic oligonucleotide
agggguaaaccuggcauuu

SEQ ID NO: 783677 - RNA, 19 nt, Artificial Sequence
  Description of Artificial Sequence: Synthetic oligonucleotide
gaggcgaccuuuagcccug

SEQ ID NO: 783678 - RNA, 19 nt, Artificial Sequence
  Description of Artificial Sequence: Synthetic oligonucleotide
cauuuucgaugccagcaua

SEQ ID NO: 783679 - RNA, 19 nt, Artificial Sequence
  Description of Artificial Sequence: Synthetic oligonucleotide
augaaccggaccagagucu

SEQ ID NO: 783680 - RNA, 19 nt, Artificial Sequence
  Description of Artificial Sequence: Synthetic oligonucleotide
uucaggcaaccagcucuag

SEQ ID NO: 783681 - RNA, 19 nt, Artificial Sequence
  Description of Artificial Sequence: Synthetic oligonucleotide
aauggggaggcgaccuuua

SEQ ID NO: 783682 - RNA, 19 nt, Artificial Sequence
  Description of Artificial Sequence: Synthetic oligonucleotide
cucucucaauguuaaugua

SEQ ID NO: 783683 - RNA, 19 nt, Artificial Sequence
  Description of Artificial Sequence: Synthetic oligonucleotide
uagaccccggccguggcuc

SEQ ID NO: 783684 - RNA, 19 nt, Artificial Sequence
  Description of Artificial Sequence: Synthetic oligonucleotide
cuuugggucugcgcuccag

SEQ ID NO: 783685 - RNA, 19 nt, Artificial Sequence
  Description of Artificial Sequence: Synthetic oligonucleotide
agguccauuuagagaggag

SEQ ID NO: 783686 - RNA, 19 nt, Artificial Sequence
  Description of Artificial Sequence: Synthetic oligonucleotide
ggagggguaaaccuggcau

SEQ ID NO: 783687 - RNA, 19 nt, Artificial Sequence
  Description of Artificial Sequence: Synthetic oligonucleotide
gggacuugguagcaugcuc

SEQ ID NO: 783688 - RNA, 19 nt, Artificial Sequence
  Description of Artificial Sequence: Synthetic oligonucleotide
uucaggcgguucccgccga

SEQ ID NO: 783689 - RNA, 19 nt, Artificial Sequence
  Description of Artificial Sequence: Synthetic oligonucleotide
cuucgcucacuuccgggca

SEQ ID NO: 783690 - RNA, 19 nt, Artificial Sequence
  Description of Artificial Sequence: Synthetic oligonucleotide
aggguggacguaaggguca

SEQ ID NO: 783691 - RNA, 19 nt, Artificial Sequence
  Description of Artificial Sequence: Synthetic oligonucleotide
ggacaaaagaggaggucca

SEQ ID NO: 783692 - RNA, 19 nt, Artificial Sequence
  Description of Artificial Sequence: Synthetic oligonucleotide
uuccauucgcaggcaugug

SEQ ID NO: 783693 - RNA, 19 nt, Artificial Sequence
  Description of Artificial Sequence: Synthetic oligonucleotide
uccgggcaagccccucagc

SEQ ID NO: 783694 - RNA, 19 nt, Artificial Sequence
  Description of Artificial Sequence: Synthetic oligonucleotide
uccggaggcucaccccaac

SEQ ID NO: 783695 - RNA, 19 nt, Artificial Sequence
  Description of Artificial Sequence: Synthetic oligonucleotide
aggcucaccccaacaagcu

SEQ ID NO: 783696 - RNA, 19 nt, Artificial Sequence
  Description of Artificial Sequence: Synthetic oligonucleotide
ugguacccauggaaacaua

SEQ ID NO: 783697 - RNA, 19 nt, Artificial Sequence
  Description of Artificial Sequence: Synthetic oligonucleotide
ucgcucacuuccgggcaag

SEQ ID NO: 783698 - RNA, 19 nt, Artificial Sequence
  Description of Artificial Sequence: Synthetic oligonucleotide
gcauauggcgucugcccac

SEQ ID NO: 783699 - RNA, 19 nt, Artificial Sequence
  Description of Artificial Sequence: Synthetic oligonucleotide
caucgcuguguacaguaua

SEQ ID NO: 783700 - RNA, 19 nt, Artificial Sequence
  Description of Artificial Sequence: Synthetic oligonucleotide
gcuugggcgcugcuuuggg

SEQ ID NO: 783701 - RNA, 19 nt, Artificial Sequence
  Description of Artificial Sequence: Synthetic oligonucleotide
uccauacacuccggaggcu

SEQ ID NO: 783702 - RNA, 19 nt, Artificial Sequence
  Description of Artificial Sequence: Synthetic oligonucleotide
cgugcuucaugaagggcag

SEQ ID NO: 783703 - RNA, 19 nt, Artificial Sequence
  Description of Artificial Sequence: Synthetic oligonucleotide
cacacccaugguacccaug

SEQ ID NO: 783704 - RNA, 19 nt, Artificial Sequence
  Description of Artificial Sequence: Synthetic oligonucleotide
acuugguagcaugcucaga

SEQ ID NO: 783705 - RNA, 19 nt, Artificial Sequence
  Description of Artificial Sequence: Synthetic oligonucleotide
gcugggcuuagacaaaacu

SEQ ID NO: 783706 - RNA, 19 nt, Artificial Sequence
  Description of Artificial Sequence: Synthetic oligonucleotide
ccccuauugccauccacac

SEQ ID NO: 783707 - RNA, 19 nt, Artificial Sequence
  Description of Artificial Sequence: Synthetic oligonucleotide
ccaggccuugacagggugg

SEQ ID NO: 783708 - RNA, 19 nt, Artificial Sequence
  Description of Artificial Sequence: Synthetic oligonucleotide
cuggagccuagaccccggc

SEQ ID NO: 783709 - RNA, 19 nt, Artificial Sequence
  Description of Artificial Sequence: Synthetic oligonucleotide
gccagacucagaguccugc

SEQ ID NO: 783710 - RNA, 19 nt, Artificial Sequence
  Description of Artificial Sequence: Synthetic oligonucleotide
agaguggcgucaggaagaa

SEQ ID NO: 783711 - RNA, 19 nt, Artificial Sequence
  Description of Artificial Sequence: Synthetic oligonucleotide
gcuguugcuacccuccccu

SEQ ID NO: 783712 - RNA, 19 nt, Artificial Sequence
  Description of Artificial Sequence: Synthetic oligonucleotide
uuggccacguguggauggu

SEQ ID NO: 783713 - RNA, 19 nt, Artificial Sequence
  Description of Artificial Sequence: Synthetic oligonucleotide
aggagguuccuggagccua

SEQ ID NO: 783714 - RNA, 19 nt, Artificial Sequence
  Description of Artificial Sequence: Synthetic oligonucleotide
ggaggcgaccuuuagcccu

SEQ ID NO: 783715 - RNA, 19 nt, Artificial Sequence
  Description of Artificial Sequence: Synthetic oligonucleotide
ucgcugcuaagcugcucuc

SEQ ID NO: 783716 - RNA, 19 nt, Artificial Sequence
  Description of Artificial Sequence: Synthetic oligonucleotide
caggccuugacagggugga

SEQ ID NO: 783717 - RNA, 19 nt, Artificial Sequence
  Description of Artificial Sequence: Synthetic oligonucleotide
gcucaccuccucuaagcca

SEQ ID NO: 783718 - RNA, 19 nt, Artificial Sequence
  Description of Artificial Sequence: Synthetic oligonucleotide
gcgguucccgccgaugagg

SEQ ID NO: 783719 - RNA, 19 nt, Artificial Sequence
  Description of Artificial Sequence: Synthetic oligonucleotide
gguagcaugcucagacaga

SEQ ID NO: 783720 - RNA, 19 nt, Artificial Sequence
  Description of Artificial Sequence: Synthetic oligonucleotide
ccggaggcuguuucaggcg

SEQ ID NO: 783721 - RNA, 19 nt, Artificial Sequence
  Description of Artificial Sequence: Synthetic oligonucleotide
gugaucaggcugggcuuag

SEQ ID NO: 783722 - RNA, 19 nt, Artificial Sequence
  Description of Artificial Sequence: Synthetic oligonucleotide
gcgaccuuuagcccugcuc

SEQ ID NO: 783723 - RNA, 19 nt, Artificial Sequence
  Description of Artificial Sequence: Synthetic oligonucleotide
ccauacacuccggaggcug

SEQ ID NO: 783724 - RNA, 19 nt, Artificial Sequence
  Description of Artificial Sequence: Synthetic oligonucleotide
ccaagcaugcacuggaagu

SEQ ID NO: 783725 - RNA, 19 nt, Artificial Sequence
  Description of Artificial Sequence: Synthetic oligonucleotide
cccacgagucaugaucucc

SEQ ID NO: 783726 - RNA, 19 nt, Artificial Sequence
  Description of Artificial Sequence: Synthetic oligonucleotide
auauggcgucugcccacga

SEQ ID NO: 783727 - RNA, 19 nt, Artificial Sequence
  Description of Artificial Sequence: Synthetic oligonucleotide
cccacuuuaucagccauca

SEQ ID NO: 783728 - RNA, 19 nt, Artificial Sequence
  Description of Artificial Sequence: Synthetic oligonucleotide
guugcuacccuccccuauu

SEQ ID NO: 783729 - RNA, 19 nt, Artificial Sequence
  Description of Artificial Sequence: Synthetic oligonucleotide
cccgccacagggcuuuggg

SEQ ID NO: 783730 - RNA, 19 nt, Artificial Sequence
  Description of Artificial Sequence: Synthetic oligonucleotide
augugaagcuugggcgcug

SEQ ID NO: 783731 - RNA, 19 nt, Artificial Sequence
  Description of Artificial Sequence: Synthetic oligonucleotide
cuggggaugccaccuaccu

SEQ ID NO: 783732 - RNA, 19 nt, Artificial Sequence
  Description of Artificial Sequence: Synthetic oligonucleotide
cacuccggaggcuguuuca

SEQ ID NO: 783733 - RNA, 19 nt, Artificial Sequence
  Description of Artificial Sequence: Synthetic oligonucleotide
augccagcauauggcgucu

SEQ ID NO: 783734 - RNA, 19 nt, Artificial Sequence
  Description of Artificial Sequence: Synthetic oligonucleotide
gcuccggaggcucacccca

SEQ ID NO: 783735 - RNA, 19 nt, Artificial Sequence
  Description of Artificial Sequence: Synthetic oligonucleotide
auucgggaggcgagcagaa

SEQ ID NO: 783736 - RNA, 19 nt, Artificial Sequence
  Description of Artificial Sequence: Synthetic oligonucleotide
gguggacaacacagacagg

SEQ ID NO: 783737 - RNA, 19 nt, Artificial Sequence
  Description of Artificial Sequence: Synthetic oligonucleotide
ucccgccacagggcuuugg

SEQ ID NO: 783738 - RNA, 19 nt, Artificial Sequence
  Description of Artificial Sequence: Synthetic oligonucleotide
ggguccugaacugcuucgc

SEQ ID NO: 783739 - RNA, 19 nt, Artificial Sequence
  Description of Artificial Sequence: Synthetic oligonucleotide
ggggauaucuggggacuug

SEQ ID NO: 783740 - RNA, 19 nt, Artificial Sequence
  Description of Artificial Sequence: Synthetic oligonucleotide
ccccaauucgggaggcgag

SEQ ID NO: 783741 - RNA, 19 nt, Artificial Sequence
  Description of Artificial Sequence: Synthetic oligonucleotide
ucaggcgguucccgccgau

SEQ ID NO: 783742 - RNA, 19 nt, Artificial Sequence
  Description of Artificial Sequence: Synthetic oligonucleotide
ucgcaggcaugugaagcuu

SEQ ID NO: 783743 - RNA, 19 nt, Artificial Sequence
  Description of Artificial Sequence: Synthetic oligonucleotide
acaucgcuguguacaguau

SEQ ID NO: 783744 - RNA, 19 nt, Artificial Sequence
  Description of Artificial Sequence: Synthetic oligonucleotide
cagacucagaguccugccu

SEQ ID NO: 783745 - RNA, 19 nt, Artificial Sequence
  Description of Artificial Sequence: Synthetic oligonucleotide
cauacacuccggaggcugu

SEQ ID NO: 783746 - RNA, 19 nt, Artificial Sequence
  Description of Artificial Sequence: Synthetic oligonucleotide
uucgggaggcgagcagaaa

SEQ ID NO: 783747 - RNA, 19 nt, Artificial Sequence
  Description of Artificial Sequence: Synthetic oligonucleotide
ugccagcauauggcgucug

SEQ ID NO: 783748 - RNA, 19 nt, Artificial Sequence
  Description of Artificial Sequence: Synthetic oligonucleotide
ugccugcauucaggcaacc

SEQ ID NO: 783749 - RNA, 19 nt, Artificial Sequence
  Description of Artificial Sequence: Synthetic oligonucleotide
ggcgguucccgccgaugag

SEQ ID NO: 783750 - RNA, 19 nt, Artificial Sequence
  Description of Artificial Sequence: Synthetic oligonucleotide
gagccuagaccccggccgu

SEQ ID NO: 783751 - RNA, 19 nt, Artificial Sequence
  Description of Artificial Sequence: Synthetic oligonucleotide
uucucccgccacagggcuu

SEQ ID NO: 783752 - RNA, 19 nt, Artificial Sequence
  Description of Artificial Sequence: Synthetic oligonucleotide
gggucaccauguggaaggg

SEQ ID NO: 783753 - RNA, 19 nt, Artificial Sequence
  Description of Artificial Sequence: Synthetic oligonucleotide
cccaacaagcuuggccacg

SEQ ID NO: 783754 - RNA, 19 nt, Artificial Sequence
  Description of Artificial Sequence: Synthetic oligonucleotide
cccaauucgggaggcgagc

SEQ ID NO: 783755 - RNA, 19 nt, Artificial Sequence
  Description of Artificial Sequence: Synthetic oligonucleotide
aggcgaccuuuagcccugc

SEQ ID NO: 783756 - RNA, 19 nt, Artificial Sequence
  Description of Artificial Sequence: Synthetic oligonucleotide
gcaugcaagucuccgugcu

SEQ ID NO: 783757 - RNA, 19 nt, Artificial Sequence
  Description of Artificial Sequence: Synthetic oligonucleotide
gaauggggaggcgaccuuu

SEQ ID NO: 783758 - RNA, 19 nt, Artificial Sequence
  Description of Artificial Sequence: Synthetic oligonucleotide
ggcuuagacaaaacugccu

SEQ ID NO: 783759 - RNA, 19 nt, Artificial Sequence
  Description of Artificial Sequence: Synthetic oligonucleotide
auacacuccggaggcuguu

SEQ ID NO: 783760 - RNA, 19 nt, Artificial Sequence
  Description of Artificial Sequence: Synthetic oligonucleotide
cgcuguguacaguauacaa

SEQ ID NO: 783761 - RNA, 19 nt, Artificial Sequence
  Description of Artificial Sequence: Synthetic oligonucleotide
cuuugccugugggcuaaca

SEQ ID NO: 783762 - RNA, 19 nt, Artificial Sequence
  Description of Artificial Sequence: Synthetic oligonucleotide
ccgccgaugagguaguugu

SEQ ID NO: 783763 - RNA, 19 nt, Artificial Sequence
  Description of Artificial Sequence: Synthetic oligonucleotide
uggccccagcuguccuuug

SEQ ID NO: 783764 - RNA, 19 nt, Artificial Sequence
  Description of Artificial Sequence: Synthetic oligonucleotide
ccgaugagguaguuguaaa

SEQ ID NO: 783765 - RNA, 19 nt, Artificial Sequence
  Description of Artificial Sequence: Synthetic oligonucleotide
ccauaccuugcugccuggg

SEQ ID NO: 783766 - RNA, 19 nt, Artificial Sequence
  Description of Artificial Sequence: Synthetic oligonucleotide
ggacaucucuuugugacuu

SEQ ID NO: 783767 - RNA, 19 nt, Artificial Sequence
  Description of Artificial Sequence: Synthetic oligonucleotide
cuugggcgcugcuuugggu

SEQ ID NO: 783768 - RNA, 19 nt, Artificial Sequence
  Description of Artificial Sequence: Synthetic oligonucleotide
caggcgguucccgccgaug

SEQ ID NO: 783769 - RNA, 19 nt, Artificial Sequence
  Description of Artificial Sequence: Synthetic oligonucleotide
gaguggcgucaggaagaac

SEQ ID NO: 783770 - RNA, 19 nt, Artificial Sequence
  Description of Artificial Sequence: Synthetic oligonucleotide
agccuagaccccggccgug

SEQ ID NO: 783771 - RNA, 19 nt, Artificial Sequence
  Description of Artificial Sequence: Synthetic oligonucleotide
gguccugaacugcuucgcu

SEQ ID NO: 783772 - RNA, 19 nt, Artificial Sequence
  Description of Artificial Sequence: Synthetic oligonucleotide
ccccaacaagcuuggccac

SEQ ID NO: 783773 - RNA, 19 nt, Artificial Sequence
  Description of Artificial Sequence: Synthetic oligonucleotide
uggccacguguggaugguc

SEQ ID NO: 783774 - RNA, 19 nt, Artificial Sequence
  Description of Artificial Sequence: Synthetic oligonucleotide
ggcgucugcccacgaguca

SEQ ID NO: 783775 - RNA, 19 nt, Artificial Sequence
  Description of Artificial Sequence: Synthetic oligonucleotide
gggcuuagucagccagcac

SEQ ID NO: 783776 - RNA, 19 nt, Artificial Sequence
  Description of Artificial Sequence: Synthetic oligonucleotide
gggaauggggaggcgaccu

SEQ ID NO: 783777 - RNA, 19 nt, Artificial Sequence
  Description of Artificial Sequence: Synthetic oligonucleotide
cccacacaucgcuguguac

SEQ ID NO: 783778 - RNA, 19 nt, Artificial Sequence
  Description of Artificial Sequence: Synthetic oligonucleotide
gcucuagcucaccuccucu

SEQ ID NO: 783779 - RNA, 19 nt, Artificial Sequence
  Description of Artificial Sequence: Synthetic oligonucleotide
accuggcauuuaaacccaa

SEQ ID NO: 783780 - RNA, 19 nt, Artificial Sequence
  Description of Artificial Sequence: Synthetic oligonucleotide
cacccacuuuaucagccau

SEQ ID NO: 783781 - RNA, 19 nt, Artificial Sequence
  Description of Artificial Sequence: Synthetic oligonucleotide
cccugccucgcugcuaagc

SEQ ID NO: 783782 - RNA, 19 nt, Artificial Sequence
  Description of Artificial Sequence: Synthetic oligonucleotide
gcauuccaggagguuccug

SEQ ID NO: 783783 - RNA, 19 nt, Artificial Sequence
  Description of Artificial Sequence: Synthetic oligonucleotide
ccaauucgggaggcgagca

SEQ ID NO: 783784 - RNA, 19 nt, Artificial Sequence
  Description of Artificial Sequence: Synthetic oligonucleotide
ggacccgagugugccaauc

SEQ ID NO: 783785 - RNA, 19 nt, Artificial Sequence
  Description of Artificial Sequence: Synthetic oligonucleotide
caaguguggugggcacuga

SEQ ID NO: 783786 - RNA, 19 nt, Artificial Sequence
  Description of Artificial Sequence: Synthetic oligonucleotide
gcccacacaucgcugugua

SEQ ID NO: 783787 - RNA, 19 nt, Artificial Sequence
  Description of Artificial Sequence: Synthetic oligonucleotide
caugcaagucuccgugcuu

SEQ ID NO: 783788 - RNA, 19 nt, Artificial Sequence
  Description of Artificial Sequence: Synthetic oligonucleotide
gguggacguaagggucacc

SEQ ID NO: 783789 - RNA, 19 nt, Artificial Sequence
  Description of Artificial Sequence: Synthetic oligonucleotide
ggguggacguaagggucac

SEQ ID NO: 783790 - RNA, 19 nt, Artificial Sequence
  Description of Artificial Sequence: Synthetic oligonucleotide
cgagugugccaaucccuuc

SEQ ID NO: 783791 - RNA, 19 nt, Artificial Sequence
  Description of Artificial Sequence: Synthetic oligonucleotide
gccacguguggauggucaa

SEQ ID NO: 783792 - RNA, 19 nt, Artificial Sequence
  Description of Artificial Sequence: Synthetic oligonucleotide
cuagaccccggccguggcu

SEQ ID NO: 783793 - RNA, 19 nt, Artificial Sequence
  Description of Artificial Sequence: Synthetic oligonucleotide
gccugcauucaggcaacca

SEQ ID NO: 783794 - RNA, 19 nt, Artificial Sequence
  Description of Artificial Sequence: Synthetic oligonucleotide
cgcugcuaagcugcucucc

SEQ ID NO: 783795 - RNA, 19 nt, Artificial Sequence
  Description of Artificial Sequence: Synthetic oligonucleotide
ccaugaaccggaccagagu

SEQ ID NO: 783796 - RNA, 19 nt, Artificial Sequence
  Description of Artificial Sequence: Synthetic oligonucleotide
cagcaagagucuaccccau

SEQ ID NO: 783797 - RNA, 19 nt, Artificial Sequence
  Description of Artificial Sequence: Synthetic oligonucleotide
gggcugugaucaggcuggg

SEQ ID NO: 783798 - RNA, 19 nt, Artificial Sequence
  Description of Artificial Sequence: Synthetic oligonucleotide
ccccgagcccacacaucgc

SEQ ID NO: 783799 - RNA, 19 nt, Artificial Sequence
  Description of Artificial Sequence: Synthetic oligonucleotide
cuaugucgcuugaggcaau

SEQ ID NO: 783800 - RNA, 19 nt, Artificial Sequence
  Description of Artificial Sequence: Synthetic oligonucleotide
gugaagcuugggcgcugcu

SEQ ID NO: 783801 - RNA, 19 nt, Artificial Sequence
  Description of Artificial Sequence: Synthetic oligonucleotide
cccgccgaugagguaguug

SEQ ID NO: 783802 - RNA, 19 nt, Artificial Sequence
  Description of Artificial Sequence: Synthetic oligonucleotide
gcccacgagucaugaucuc

SEQ ID NO: 783803 - RNA, 19 nt, Artificial Sequence
  Description of Artificial Sequence: Synthetic oligonucleotide
gggguaaaccuggcauuua

SEQ ID NO: 783804 - RNA, 19 nt, Artificial Sequence
  Description of Artificial Sequence: Synthetic oligonucleotide
ccgccacagggcuuuggga

SEQ ID NO: 783805 - RNA, 19 nt, Artificial Sequence
  Description of Artificial Sequence: Synthetic oligonucleotide
ccaacaagcuuggccacgu

SEQ ID NO: 783806 - RNA, 19 nt, Artificial Sequence
  Description of Artificial Sequence: Synthetic oligonucleotide
ggcucaccccaacaagcuu

SEQ ID NO: 783807 - RNA, 19 nt, Artificial Sequence
  Description of Artificial Sequence: Synthetic oligonucleotide
cgucugcccacgagucaug

SEQ ID NO: 783808 - RNA, 19 nt, Artificial Sequence
  Description of Artificial Sequence: Synthetic oligonucleotide
cccgagcccacacaucgcu

SEQ ID NO: 783809 - RNA, 19 nt, Artificial Sequence
  Description of Artificial Sequence: Synthetic oligonucleotide
caggagguuccuggagccu

SEQ ID NO: 783810 - RNA, 19 nt, Artificial Sequence
  Description of Artificial Sequence: Synthetic oligonucleotide
gcgucugcccacgagucau

SEQ ID NO: 783811 - RNA, 19 nt, Artificial Sequence
  Description of Artificial Sequence: Synthetic oligonucleotide
gguucccgccgaugaggua

SEQ ID NO: 783812 - RNA, 19 nt, Artificial Sequence
  Description of Artificial Sequence: Synthetic oligonucleotide
ggaggcuguuucaggcggu

SEQ ID NO: 783813 - RNA, 19 nt, Artificial Sequence
  Description of Artificial Sequence: Synthetic oligonucleotide
ucccgccgaugagguaguu

SEQ ID NO: 783814 - RNA, 19 nt, Artificial Sequence
  Description of Artificial Sequence: Synthetic oligonucleotide
gcgcuccagcacugguaca

SEQ ID NO: 783815 - RNA, 19 nt, Artificial Sequence
  Description of Artificial Sequence: Synthetic oligonucleotide
ccacguguggauggucaaa

SEQ ID NO: 783816 - RNA, 19 nt, Artificial Sequence
  Description of Artificial Sequence: Synthetic oligonucleotide
cgcucacuuccgggcaagc

SEQ ID NO: 783817 - RNA, 19 nt, Artificial Sequence
  Description of Artificial Sequence: Synthetic oligonucleotide
ccaccccgagcccacacau

SEQ ID NO: 783818 - RNA, 19 nt, Artificial Sequence
  Description of Artificial Sequence: Synthetic oligonucleotide
ggcgaccuuuagcccugcu

SEQ ID NO: 783819 - RNA, 19 nt, Artificial Sequence
  Description of Artificial Sequence: Synthetic oligonucleotide
cugcuccgacugcccaggu

SEQ ID NO: 783820 - RNA, 19 nt, Artificial Sequence
  Description of Artificial Sequence: Synthetic oligonucleotide
ccuccccuauugccaucca

SEQ ID NO: 783821 - RNA, 19 nt, Artificial Sequence
  Description of Artificial Sequence: Synthetic oligonucleotide
cgguucccgccgaugaggu

SEQ ID NO: 783822 - RNA, 19 nt, Artificial Sequence
  Description of Artificial Sequence: Synthetic oligonucleotide
ccaugcauuccaggagguu

SEQ ID NO: 783823 - RNA, 19 nt, Artificial Sequence
  Description of Artificial Sequence: Synthetic oligonucleotide
ccccggccguggcuccaga

SEQ ID NO: 783824 - RNA, 19 nt, Artificial Sequence
  Description of Artificial Sequence: Synthetic oligonucleotide
aauauaaucccucaggaau

SEQ ID NO: 783825 - RNA, 19 nt, Artificial Sequence
  Description of Artificial Sequence: Synthetic oligonucleotide
ucuacguaacuuuucaugg

SEQ ID NO: 783826 - RNA, 19 nt, Artificial Sequence
  Description of Artificial Sequence: Synthetic oligonucleotide
gagaauauaaucccucagg

SEQ ID NO: 783827 - RNA, 19 nt, Artificial Sequence
  Description of Artificial Sequence: Synthetic oligonucleotide
acaccaacgguucaguucc

SEQ ID NO: 783828 - RNA, 19 nt, Artificial Sequence
  Description of Artificial Sequence: Synthetic oligonucleotide
ucuucagggaacaccaacg

SEQ ID NO: 783829 - RNA, 19 nt, Artificial Sequence
  Description of Artificial Sequence: Synthetic oligonucleotide
gaaucgacagggcaggucg

SEQ ID NO: 783830 - RNA, 19 nt, Artificial Sequence
  Description of Artificial Sequence: Synthetic oligonucleotide
aacaccaacgguucaguuc

SEQ ID NO: 783831 - RNA, 19 nt, Artificial Sequence
  Description of Artificial Sequence: Synthetic oligonucleotide
gguauuugaaucgacaggg

SEQ ID NO: 783832 - RNA, 19 nt, Artificial Sequence
  Description of Artificial Sequence: Synthetic oligonucleotide
uuauuuaugucgugucagg

SEQ ID NO: 783833 - RNA, 19 nt, Artificial Sequence
  Description of Artificial Sequence: Synthetic oligonucleotide
uucuacguaacuuuucaug

SEQ ID NO: 783834 - RNA, 19 nt, Artificial Sequence
  Description of Artificial Sequence: Synthetic oligonucleotide
ucuucuacguaacuuuuca

SEQ ID NO: 783835 - RNA, 19 nt, Artificial Sequence
  Description of Artificial Sequence: Synthetic oligonucleotide
ugggguugagaccaaaugc

SEQ ID NO: 783836 - RNA, 19 nt, Artificial Sequence
  Description of Artificial Sequence: Synthetic oligonucleotide
ugagcccgaagucacaggg

SEQ ID NO: 783837 - RNA, 19 nt, Artificial Sequence
  Description of Artificial Sequence: Synthetic oligonucleotide
ugagaauauaaucccucag

SEQ ID NO: 783838 - RNA, 19 nt, Artificial Sequence
  Description of Artificial Sequence: Synthetic oligonucleotide
uccacgaaagcucggaagc

SEQ ID NO: 783839 - RNA, 19 nt, Artificial Sequence
  Description of Artificial Sequence: Synthetic oligonucleotide
uuugaaucgacagggcagg

SEQ ID NO: 783840 - RNA, 19 nt, Artificial Sequence
  Description of Artificial Sequence: Synthetic oligonucleotide
augauauccucauagucca

SEQ ID NO: 783841 - RNA, 19 nt, Artificial Sequence
  Description of Artificial Sequence: Synthetic oligonucleotide
cuucauaucguuuguugag

SEQ ID NO: 783842 - RNA, 19 nt, Artificial Sequence
  Description of Artificial Sequence: Synthetic oligonucleotide
auagucuacuuccuccugg

SEQ ID NO: 783843 - RNA, 19 nt, Artificial Sequence
  Description of Artificial Sequence: Synthetic oligonucleotide
acaguacgguauuugaauc

SEQ ID NO: 783844 - RNA, 19 nt, Artificial Sequence
  Description of Artificial Sequence: Synthetic oligonucleotide
ucguuuguugagaauauaa

SEQ ID NO: 783845 - RNA, 19 nt, Artificial Sequence
  Description of Artificial Sequence: Synthetic oligonucleotide
uccuuuuagccauucaaga

SEQ ID NO: 783846 - RNA, 19 nt, Artificial Sequence
  Description of Artificial Sequence: Synthetic oligonucleotide
acgguauuugaaucgacag

SEQ ID NO: 783847 - RNA, 19 nt, Artificial Sequence
  Description of Artificial Sequence: Synthetic oligonucleotide
aacgguucaguuccuuguc

SEQ ID NO: 783848 - RNA, 19 nt, Artificial Sequence
  Description of Artificial Sequence: Synthetic oligonucleotide
aguucuuucaaggacucag

SEQ ID NO: 783849 - RNA, 19 nt, Artificial Sequence
  Description of Artificial Sequence: Synthetic oligonucleotide
uuggcgacccaacuggcgg

SEQ ID NO: 783850 - RNA, 19 nt, Artificial Sequence
  Description of Artificial Sequence: Synthetic oligonucleotide
ugucgugucagguauggga

SEQ ID NO: 783851 - RNA, 19 nt, Artificial Sequence
  Description of Artificial Sequence: Synthetic oligonucleotide
ucagggaacaccaacgguu

SEQ ID NO: 783852 - RNA, 19 nt, Artificial Sequence
  Description of Artificial Sequence: Synthetic oligonucleotide
uacgguauuugaaucgaca

SEQ ID NO: 783853 - RNA, 19 nt, Artificial Sequence
  Description of Artificial Sequence: Synthetic oligonucleotide
uccucgucaacguauuugc

SEQ ID NO: 783854 - RNA, 19 nt, Artificial Sequence
  Description of Artificial Sequence: Synthetic oligonucleotide
aaugcuacguggguauguc

SEQ ID NO: 783855 - RNA, 19 nt, Artificial Sequence
  Description of Artificial Sequence: Synthetic oligonucleotide
uugggguugagaccaaaug

SEQ ID NO: 783856 - RNA, 19 nt, Artificial Sequence
  Description of Artificial Sequence: Synthetic oligonucleotide
ugcguccauguuaaagucg

SEQ ID NO: 783857 - RNA, 19 nt, Artificial Sequence
  Description of Artificial Sequence: Synthetic oligonucleotide
augccugcaaucucugucg

SEQ ID NO: 783858 - RNA, 19 nt, Artificial Sequence
  Description of Artificial Sequence: Synthetic oligonucleotide
caguacgguauuugaaucg

SEQ ID NO: 783859 - RNA, 19 nt, Artificial Sequence
  Description of Artificial Sequence: Synthetic oligonucleotide
cauguuaaagucggggucc

SEQ ID NO: 783860 - RNA, 19 nt, Artificial Sequence
  Description of Artificial Sequence: Synthetic oligonucleotide
uaugucgugucagguaugg

SEQ ID NO: 783861 - RNA, 19 nt, Artificial Sequence
  Description of Artificial Sequence: Synthetic oligonucleotide
gaagugcagccuuuugggg

SEQ ID NO: 783862 - RNA, 19 nt, Artificial Sequence
  Description of Artificial Sequence: Synthetic oligonucleotide
aacuugugaccuccaagug

SEQ ID NO: 783863 - RNA, 19 nt, Artificial Sequence
  Description of Artificial Sequence: Synthetic oligonucleotide
uuuggcgacccaacuggcg

SEQ ID NO: 783864 - RNA, 19 nt, Artificial Sequence
  Description of Artificial Sequence: Synthetic oligonucleotide
aagucuccccaucagaguu

SEQ ID NO: 783865 - RNA, 19 nt, Artificial Sequence
  Description of Artificial Sequence: Synthetic oligonucleotide
ucaagauagucuacuuccu

SEQ ID NO: 783866 - RNA, 19 nt, Artificial Sequence
  Description of Artificial Sequence: Synthetic oligonucleotide
gaaguuguacuuguguuca

SEQ ID NO: 783867 - RNA, 19 nt, Artificial Sequence
  Description of Artificial Sequence: Synthetic oligonucleotide
aaagcucggaagcuuuccu

SEQ ID NO: 783868 - RNA, 19 nt, Artificial Sequence
  Description of Artificial Sequence: Synthetic oligonucleotide
caggucgucgaugauaucc

SEQ ID NO: 783869 - RNA, 19 nt, Artificial Sequence
  Description of Artificial Sequence: Synthetic oligonucleotide
ucagguaugggaucuggaa

SEQ ID NO: 783870 - RNA, 19 nt, Artificial Sequence
  Description of Artificial Sequence: Synthetic oligonucleotide
auaucguuuguugagaaua

SEQ ID NO: 783871 - RNA, 19 nt, Artificial Sequence
  Description of Artificial Sequence: Synthetic oligonucleotide
acagacgaugcaaugcuac

SEQ ID NO: 783872 - RNA, 19 nt, Artificial Sequence
  Description of Artificial Sequence: Synthetic oligonucleotide
ucauaguccagccgguagu

SEQ ID NO: 783873 - RNA, 19 nt, Artificial Sequence
  Description of Artificial Sequence: Synthetic oligonucleotide
uagucugcguccauguuaa

SEQ ID NO: 783874 - RNA, 19 nt, Artificial Sequence
  Description of Artificial Sequence: Synthetic oligonucleotide
agauagucuacuuccuccu

SEQ ID NO: 783875 - RNA, 19 nt, Artificial Sequence
  Description of Artificial Sequence: Synthetic oligonucleotide
gaauauaaucccucaggaa

SEQ ID NO: 783876 - RNA, 19 nt, Artificial Sequence
  Description of Artificial Sequence: Synthetic oligonucleotide
uguggagguagccuggcuc

SEQ ID NO: 783877 - RNA, 19 nt, Artificial Sequence
  Description of Artificial Sequence: Synthetic oligonucleotide
ucauagucugcguccaugu

SEQ ID NO: 783878 - RNA, 19 nt, Artificial Sequence
  Description of Artificial Sequence: Synthetic oligonucleotide
auccuuccggcgcacagac

SEQ ID NO: 783879 - RNA, 19 nt, Artificial Sequence
  Description of Artificial Sequence: Synthetic oligonucleotide
uauuuaugucgugucaggu

SEQ ID NO: 783880 - RNA, 19 nt, Artificial Sequence
  Description of Artificial Sequence: Synthetic oligonucleotide
uucauaucguuuguugaga

SEQ ID NO: 783881 - RNA, 19 nt, Artificial Sequence
  Description of Artificial Sequence: Synthetic oligonucleotide
uuagguccgcuccaugugu

SEQ ID NO: 783882 - RNA, 19 nt, Artificial Sequence
  Description of Artificial Sequence: Synthetic oligonucleotide
uguccucagggucaaacau

SEQ ID NO: 783883 - RNA, 19 nt, Artificial Sequence
  Description of Artificial Sequence: Synthetic oligonucleotide
ucauaucguuuguugagaa

SEQ ID NO: 783884 - RNA, 19 nt, Artificial Sequence
  Description of Artificial Sequence: Synthetic oligonucleotide
aagcggaaguuguacuugu

SEQ ID NO: 783885 - RNA, 19 nt, Artificial Sequence
  Description of Artificial Sequence: Synthetic oligonucleotide
ucgaugauauccucauagu

SEQ ID NO: 783886 - RNA, 19 nt, Artificial Sequence
  Description of Artificial Sequence: Synthetic oligonucleotide
ugugugugccaacucuucu

SEQ ID NO: 783887 - RNA, 19 nt, Artificial Sequence
  Description of Artificial Sequence: Synthetic oligonucleotide
ugugccaacucuucuuccu

SEQ ID NO: 783888 - RNA, 19 nt, Artificial Sequence
  Description of Artificial Sequence: Synthetic oligonucleotide
auagucugcguccauguua

SEQ ID NO: 783889 - RNA, 19 nt, Artificial Sequence
  Description of Artificial Sequence: Synthetic oligonucleotide
cacagggcaccacaguacg

SEQ ID NO: 783890 - RNA, 19 nt, Artificial Sequence
  Description of Artificial Sequence: Synthetic oligonucleotide
gggaaguuggcuucucugg

SEQ ID NO: 783891 - RNA, 19 nt, Artificial Sequence
  Description of Artificial Sequence: Synthetic oligonucleotide
ucauccuuccggcgcacag

SEQ ID NO: 783892 - RNA, 19 nt, Artificial Sequence
  Description of Artificial Sequence: Synthetic oligonucleotide
cagacgaugcaaugcuacg

SEQ ID NO: 783893 - RNA, 19 nt, Artificial Sequence
  Description of Artificial Sequence: Synthetic oligonucleotide
accacaguacgguauuuga

SEQ ID NO: 783894 - RNA, 19 nt, Artificial Sequence
  Description of Artificial Sequence: Synthetic oligonucleotide
uguguuuccgcagcagccc

SEQ ID NO: 783895 - RNA, 19 nt, Artificial Sequence
  Description of Artificial Sequence: Synthetic oligonucleotide
uucagggaacaccaacggu

SEQ ID NO: 783896 - RNA, 19 nt, Artificial Sequence
  Description of Artificial Sequence: Synthetic oligonucleotide
gaauagcuccccuucaucu

SEQ ID NO: 783897 - RNA, 19 nt, Artificial Sequence
  Description of Artificial Sequence: Synthetic oligonucleotide
ugaggagggcgccucacga

SEQ ID NO: 783898 - RNA, 19 nt, Artificial Sequence
  Description of Artificial Sequence: Synthetic oligonucleotide
ucuguucuucuacguaacu

SEQ ID NO: 783899 - RNA, 19 nt, Artificial Sequence
  Description of Artificial Sequence: Synthetic oligonucleotide
ggaaguuggcuucucuggg

SEQ ID NO: 783900 - RNA, 19 nt, Artificial Sequence
  Description of Artificial Sequence: Synthetic oligonucleotide
uuaaagucgggguccucac

SEQ ID NO: 783901 - RNA, 19 nt, Artificial Sequence
  Description of Artificial Sequence: Synthetic oligonucleotide
ucucugucggcugaacuug

SEQ ID NO: 783902 - RNA, 19 nt, Artificial Sequence
  Description of Artificial Sequence: Synthetic oligonucleotide
uucuucuacguaacuuuuc

SEQ ID NO: 783903 - RNA, 19 nt, Artificial Sequence
  Description of Artificial Sequence: Synthetic oligonucleotide
ucggcugaacuugugaccu

SEQ ID NO: 783904 - RNA, 19 nt, Artificial Sequence
  Description of Artificial Sequence: Synthetic oligonucleotide
ugcaaucucugucggcuga

SEQ ID NO: 783905 - RNA, 19 nt, Artificial Sequence
  Description of Artificial Sequence: Synthetic oligonucleotide
uuguccucagggucaaaca

SEQ ID NO: 783906 - RNA, 19 nt, Artificial Sequence
  Description of Artificial Sequence: Synthetic oligonucleotide
uugccaguaaccugccgca

SEQ ID NO: 783907 - RNA, 19 nt, Artificial Sequence
  Description of Artificial Sequence: Synthetic oligonucleotide
ucgucaacguauuugccuu

SEQ ID NO: 783908 - RNA, 19 nt, Artificial Sequence
  Description of Artificial Sequence: Synthetic oligonucleotide
ucggaagcuuuccuucagc

SEQ ID NO: 783909 - RNA, 19 nt, Artificial Sequence
  Description of Artificial Sequence: Synthetic oligonucleotide
aguacgguauuugaaucga

SEQ ID NO: 783910 - RNA, 19 nt, Artificial Sequence
  Description of Artificial Sequence: Synthetic oligonucleotide
ucuucccugaggagggcgc

SEQ ID NO: 783911 - RNA, 19 nt, Artificial Sequence
  Description of Artificial Sequence: Synthetic oligonucleotide
agcccgaagucacagggca

SEQ ID NO: 783912 - RNA, 19 nt, Artificial Sequence
  Description of Artificial Sequence: Synthetic oligonucleotide
uuaugucgugucagguaug

SEQ ID NO: 783913 - RNA, 19 nt, Artificial Sequence
  Description of Artificial Sequence: Synthetic oligonucleotide
caagauagucuacuuccuc

SEQ ID NO: 783914 - RNA, 19 nt, Artificial Sequence
  Description of Artificial Sequence: Synthetic oligonucleotide
ugccugcaaucucugucgg

SEQ ID NO: 783915 - RNA, 19 nt, Artificial Sequence
  Description of Artificial Sequence: Synthetic oligonucleotide
cuuagguccgcuccaugug

SEQ ID NO: 783916 - RNA, 19 nt, Artificial Sequence
  Description of Artificial Sequence: Synthetic oligonucleotide
ucgaagcggaaguuguacu

SEQ ID NO: 783917 - RNA, 19 nt, Artificial Sequence
  Description of Artificial Sequence: Synthetic oligonucleotide
ugauauccucauaguccag

SEQ ID NO: 783918 - RNA, 19 nt, Artificial Sequence
  Description of Artificial Sequence: Synthetic oligonucleotide
uccucucauaguccuucag

SEQ ID NO: 783919 - RNA, 19 nt, Artificial Sequence
  Description of Artificial Sequence: Synthetic oligonucleotide
ccuuuggcgacccaacugg

SEQ ID NO: 783920 - RNA, 19 nt, Artificial Sequence
  Description of Artificial Sequence: Synthetic oligonucleotide
aggagggcgccucacgaag

SEQ ID NO: 783921 - RNA, 19 nt, Artificial Sequence
  Description of Artificial Sequence: Synthetic oligonucleotide
agcuugguuguggagguag

SEQ ID NO: 783922 - RNA, 19 nt, Artificial Sequence
  Description of Artificial Sequence: Synthetic oligonucleotide
caagugucaccgugggacc

SEQ ID NO: 783923 - RNA, 19 nt, Artificial Sequence
  Description of Artificial Sequence: Synthetic oligonucleotide
uaaagucgggguccucaca

SEQ ID NO: 783924 - RNA, 19 nt, Artificial Sequence
  Description of Artificial Sequence: Synthetic oligonucleotide
ugcguucauccuuccggcg

SEQ ID NO: 783925 - RNA, 19 nt, Artificial Sequence
  Description of Artificial Sequence: Synthetic oligonucleotide
ugccaacucuucuuccuug

SEQ ID NO: 783926 - RNA, 19 nt, Artificial Sequence
  Description of Artificial Sequence: Synthetic oligonucleotide
ccugcguucauccuuccgg

SEQ ID NO: 783927 - RNA, 19 nt, Artificial Sequence
  Description of Artificial Sequence: Synthetic oligonucleotide
uccccaauacagccagacc

SEQ ID NO: 783928 - RNA, 19 nt, Artificial Sequence
  Description of Artificial Sequence: Synthetic oligonucleotide
gaucgugcugggcaggguc

SEQ ID NO: 783929 - RNA, 19 nt, Artificial Sequence
  Description of Artificial Sequence: Synthetic oligonucleotide
cugcguucauccuuccggc

SEQ ID NO: 783930 - RNA, 19 nt, Artificial Sequence
  Description of Artificial Sequence: Synthetic oligonucleotide
aucucugucggcugaacuu

SEQ ID NO: 783931 - RNA, 19 nt, Artificial Sequence
  Description of Artificial Sequence: Synthetic oligonucleotide
ggauguuuccuugagccug

SEQ ID NO: 783932 - RNA, 19 nt, Artificial Sequence
  Description of Artificial Sequence: Synthetic oligonucleotide
uccggcgcacagacgaugc

SEQ ID NO: 783933 - RNA, 19 nt, Artificial Sequence
  Description of Artificial Sequence: Synthetic oligonucleotide
ugcgcuucuucuucccuga

SEQ ID NO: 783934 - RNA, 19 nt, Artificial Sequence
  Description of Artificial Sequence: Synthetic oligonucleotide
agcugugaaucuccuuuug

SEQ ID NO: 783935 - RNA, 19 nt, Artificial Sequence
  Description of Artificial Sequence: Synthetic oligonucleotide
agcugaucgugcugggcag

SEQ ID NO: 783936 - RNA, 19 nt, Artificial Sequence
  Description of Artificial Sequence: Synthetic oligonucleotide
ugggcuguuccaguauucc

SEQ ID NO: 783937 - RNA, 19 nt, Artificial Sequence
  Description of Artificial Sequence: Synthetic oligonucleotide
ugcuggaucccuguccuca

SEQ ID NO: 783938 - RNA, 19 nt, Artificial Sequence
  Description of Artificial Sequence: Synthetic oligonucleotide
caauacagccagaccuggc

SEQ ID NO: 783939 - RNA, 19 nt, Artificial Sequence
  Description of Artificial Sequence: Synthetic oligonucleotide
acaugggucucagacugag

SEQ ID NO: 783940 - RNA, 19 nt, Artificial Sequence
  Description of Artificial Sequence: Synthetic oligonucleotide
aggagucauccacugccag

SEQ ID NO: 783941 - RNA, 19 nt, Artificial Sequence
  Description of Artificial Sequence: Synthetic oligonucleotide
uguuuccgcagcagcccag

SEQ ID NO: 783942 - RNA, 19 nt, Artificial Sequence
  Description of Artificial Sequence: Synthetic oligonucleotide
cuuuggcgacccaacuggc

SEQ ID NO: 783943 - RNA, 19 nt, Artificial Sequence
  Description of Artificial Sequence: Synthetic oligonucleotide
aucuugcuuagguccgcuc

SEQ ID NO: 783944 - RNA, 19 nt, Artificial Sequence
  Description of Artificial Sequence: Synthetic oligonucleotide
ucgacagggcaggucgucg

SEQ ID NO: 783945 - RNA, 19 nt, Artificial Sequence
  Description of Artificial Sequence: Synthetic oligonucleotide
cucgaagcggaaguuguac

SEQ ID NO: 783946 - RNA, 19 nt, Artificial Sequence
  Description of Artificial Sequence: Synthetic oligonucleotide
agacgaugcaaugcuacgu

SEQ ID NO: 783947 - RNA, 19 nt, Artificial Sequence
  Description of Artificial Sequence: Synthetic oligonucleotide
cuacguaacuuuucaugga

SEQ ID NO: 783948 - RNA, 19 nt, Artificial Sequence
  Description of Artificial Sequence: Synthetic oligonucleotide
gcguccauguuaaagucgg

SEQ ID NO: 783949 - RNA, 19 nt, Artificial Sequence
  Description of Artificial Sequence: Synthetic oligonucleotide
ccaguuccagucaucuucg

SEQ ID NO: 783950 - RNA, 19 nt, Artificial Sequence
  Description of Artificial Sequence: Synthetic oligonucleotide
cugcguccauguuaaaguc

SEQ ID NO: 783951 - RNA, 19 nt, Artificial Sequence
  Description of Artificial Sequence: Synthetic oligonucleotide
acugaggccucuucccaca

SEQ ID NO: 783952 - RNA, 19 nt, Artificial Sequence
  Description of Artificial Sequence: Synthetic oligonucleotide
cucugaccuguacaugcag

SEQ ID NO: 783953 - RNA, 19 nt, Artificial Sequence
  Description of Artificial Sequence: Synthetic oligonucleotide
acguggguaugucuugacu

SEQ ID NO: 783954 - RNA, 19 nt, Artificial Sequence
  Description of Artificial Sequence: Synthetic oligonucleotide
gacugaggccucuucccac

SEQ ID NO: 783955 - RNA, 19 nt, Artificial Sequence
  Description of Artificial Sequence: Synthetic oligonucleotide
gucauagucugcguccaug

SEQ ID NO: 783956 - RNA, 19 nt, Artificial Sequence
  Description of Artificial Sequence: Synthetic oligonucleotide
auaguccagccgguaguac

SEQ ID NO: 783957 - RNA, 19 nt, Artificial Sequence
  Description of Artificial Sequence: Synthetic oligonucleotide
uuuccgcagcagcccagag

SEQ ID NO: 783958 - RNA, 19 nt, Artificial Sequence
  Description of Artificial Sequence: Synthetic oligonucleotide
aagggagacuugcgcuucu

SEQ ID NO: 783959 - RNA, 19 nt, Artificial Sequence
  Description of Artificial Sequence: Synthetic oligonucleotide
aaaucacccuccagguccu

SEQ ID NO: 783960 - RNA, 19 nt, Artificial Sequence
  Description of Artificial Sequence: Synthetic oligonucleotide
gucaccgugggacccagca

SEQ ID NO: 783961 - RNA, 19 nt, Artificial Sequence
  Description of Artificial Sequence: Synthetic oligonucleotide
aagucgggguccucacagu

SEQ ID NO: 783962 - RNA, 19 nt, Artificial Sequence
  Description of Artificial Sequence: Synthetic oligonucleotide
cccaguuccagucaucuuc

SEQ ID NO: 783963 - RNA, 19 nt, Artificial Sequence
  Description of Artificial Sequence: Synthetic oligonucleotide
ggagucauccacugccagc

SEQ ID NO: 783964 - RNA, 19 nt, Artificial Sequence
  Description of Artificial Sequence: Synthetic oligonucleotide
acguaacuuuucauggaug

SEQ ID NO: 783965 - RNA, 19 nt, Artificial Sequence
  Description of Artificial Sequence: Synthetic oligonucleotide
uccagucaucuucgagccc

SEQ ID NO: 783966 - RNA, 19 nt, Artificial Sequence
  Description of Artificial Sequence: Synthetic oligonucleotide
ugaaucgacagggcagguc

SEQ ID NO: 783967 - RNA, 19 nt, Artificial Sequence
  Description of Artificial Sequence: Synthetic oligonucleotide
caacuggcggaagugcagc

SEQ ID NO: 783968 - RNA, 19 nt, Artificial Sequence
  Description of Artificial Sequence: Synthetic oligonucleotide
aggacucagagcugugaau

SEQ ID NO: 783969 - RNA, 19 nt, Artificial Sequence
  Description of Artificial Sequence: Synthetic oligonucleotide
ggacucagagcugugaauc

SEQ ID NO: 783970 - RNA, 19 nt, Artificial Sequence
  Description of Artificial Sequence: Synthetic oligonucleotide
cugaggagggcgccucacg

SEQ ID NO: 783971 - RNA, 19 nt, Artificial Sequence
  Description of Artificial Sequence: Synthetic oligonucleotide
ugccucuguucuucuacgu

SEQ ID NO: 783972 - RNA, 19 nt, Artificial Sequence
  Description of Artificial Sequence: Synthetic oligonucleotide
cucgucaacguauuugccu

SEQ ID NO: 783973 - RNA, 19 nt, Artificial Sequence
  Description of Artificial Sequence: Synthetic oligonucleotide
uuccucucauaguccuuca

SEQ ID NO: 783974 - RNA, 19 nt, Artificial Sequence
  Description of Artificial Sequence: Synthetic oligonucleotide
gugugccaacucuucuucc

SEQ ID NO: 783975 - RNA, 19 nt, Artificial Sequence
  Description of Artificial Sequence: Synthetic oligonucleotide
ccauguuaaagucgggguc

SEQ ID NO: 783976 - RNA, 19 nt, Artificial Sequence
  Description of Artificial Sequence: Synthetic oligonucleotide
caugggcuucugcuguccc

SEQ ID NO: 783977 - RNA, 19 nt, Artificial Sequence
  Description of Artificial Sequence: Synthetic oligonucleotide
gaggugugucaguucuuuc

SEQ ID NO: 783978 - RNA, 19 nt, Artificial Sequence
  Description of Artificial Sequence: Synthetic oligonucleotide
cugaucgugcugggcaggg

SEQ ID NO: 783979 - RNA, 19 nt, Artificial Sequence
  Description of Artificial Sequence: Synthetic oligonucleotide
ucgugucagguaugggauc

SEQ ID NO: 783980 - RNA, 19 nt, Artificial Sequence
  Description of Artificial Sequence: Synthetic oligonucleotide
ggaauagcuccccuucauc

SEQ ID NO: 783981 - RNA, 19 nt, Artificial Sequence
  Description of Artificial Sequence: Synthetic oligonucleotide
ugaccuguacaugcagguc

SEQ ID NO: 783982 - RNA, 19 nt, Artificial Sequence
  Description of Artificial Sequence: Synthetic oligonucleotide
ccgguaguacucauccagg

SEQ ID NO: 783983 - RNA, 19 nt, Artificial Sequence
  Description of Artificial Sequence: Synthetic oligonucleotide
uccuuccggcgcacagacg

SEQ ID NO: 783984 - RNA, 19 nt, Artificial Sequence
  Description of Artificial Sequence: Synthetic oligonucleotide
aucgacagggcaggucguc

SEQ ID NO: 783985 - RNA, 19 nt, Artificial Sequence
  Description of Artificial Sequence: Synthetic oligonucleotide
uccuccuuuggcgacccaa

SEQ ID NO: 783986 - RNA, 19 nt, Artificial Sequence
  Description of Artificial Sequence: Synthetic oligonucleotide
uggccuugcccugugacuu

SEQ ID NO: 783987 - RNA, 19 nt, Artificial Sequence
  Description of Artificial Sequence: Synthetic oligonucleotide
ucaacguauuugccuucuu

SEQ ID NO: 783988 - RNA, 19 nt, Artificial Sequence
  Description of Artificial Sequence: Synthetic oligonucleotide
aggucgucgaugauauccu

SEQ ID NO: 783989 - RNA, 19 nt, Artificial Sequence
  Description of Artificial Sequence: Synthetic oligonucleotide
ugcugagcccgaagucaca

SEQ ID NO: 783990 - RNA, 19 nt, Artificial Sequence
  Description of Artificial Sequence: Synthetic oligonucleotide
gcuacguggguaugucuug

SEQ ID NO: 783991 - RNA, 19 nt, Artificial Sequence
  Description of Artificial Sequence: Synthetic oligonucleotide
cucagacugaggccucuuc

SEQ ID NO: 783992 - RNA, 19 nt, Artificial Sequence
  Description of Artificial Sequence: Synthetic oligonucleotide
gcguucauccuuccggcgc

SEQ ID NO: 783993 - RNA, 19 nt, Artificial Sequence
  Description of Artificial Sequence: Synthetic oligonucleotide
agggaacaccaacgguuca

SEQ ID NO: 783994 - RNA, 19 nt, Artificial Sequence
  Description of Artificial Sequence: Synthetic oligonucleotide
aaucgacagggcaggucgu

SEQ ID NO: 783995 - RNA, 19 nt, Artificial Sequence
  Description of Artificial Sequence: Synthetic oligonucleotide
uggcgacccaacuggcgga

SEQ ID NO: 783996 - RNA, 19 nt, Artificial Sequence
  Description of Artificial Sequence: Synthetic oligonucleotide
ccgcacagagauuugaaga

SEQ ID NO: 783997 - RNA, 19 nt, Artificial Sequence
  Description of Artificial Sequence: Synthetic oligonucleotide
cugaccuguacaugcaggu

SEQ ID NO: 783998 - RNA, 19 nt, Artificial Sequence
  Description of Artificial Sequence: Synthetic oligonucleotide
ugccaguaaccugccgcag

SEQ ID NO: 783999 - RNA, 19 nt, Artificial Sequence
  Description of Artificial Sequence: Synthetic oligonucleotide
uuccggcgcacagacgaug

SEQ ID NO: 784000 - RNA, 19 nt, Artificial Sequence
  Description of Artificial Sequence: Synthetic oligonucleotide
cugucggcugaacuuguga

SEQ ID NO: 784001 - RNA, 19 nt, Artificial Sequence
  Description of Artificial Sequence: Synthetic oligonucleotide
cuucugcugucccacugca

SEQ ID NO: 784002 - RNA, 19 nt, Artificial Sequence
  Description of Artificial Sequence: Synthetic oligonucleotide
ggaugugugugccaacucu

SEQ ID NO: 784003 - RNA, 19 nt, Artificial Sequence
  Description of Artificial Sequence: Synthetic oligonucleotide
caacgguucaguuccuugu

SEQ ID NO: 784004 - RNA, 19 nt, Artificial Sequence
  Description of Artificial Sequence: Synthetic oligonucleotide
augucgugucagguauggg

SEQ ID NO: 784005 - RNA, 19 nt, Artificial Sequence
  Description of Artificial Sequence: Synthetic oligonucleotide
cccgcacagagauuugaag

SEQ ID NO: 784006 - RNA, 19 nt, Artificial Sequence
  Description of Artificial Sequence: Synthetic oligonucleotide
gagcccgaagucacagggc

SEQ ID NO: 784007 - RNA, 19 nt, Artificial Sequence
  Description of Artificial Sequence: Synthetic oligonucleotide
guacgguauuugaaucgac

SEQ ID NO: 784008 - RNA, 19 nt, Artificial Sequence
  Description of Artificial Sequence: Synthetic oligonucleotide
uuccccgcacagagauuug

SEQ ID NO: 784009 - RNA, 19 nt, Artificial Sequence
  Description of Artificial Sequence: Synthetic oligonucleotide
ccaacuggcggaagugcag

SEQ ID NO: 784010 - RNA, 19 nt, Artificial Sequence
  Description of Artificial Sequence: Synthetic oligonucleotide
gguaguacucauccaggua

SEQ ID NO: 784011 - RNA, 19 nt, Artificial Sequence
  Description of Artificial Sequence: Synthetic oligonucleotide
guguuuccgcagcagccca

SEQ ID NO: 784012 - RNA, 19 nt, Artificial Sequence
  Description of Artificial Sequence: Synthetic oligonucleotide
uugaaucgacagggcaggu

SEQ ID NO: 784013 - RNA, 19 nt, Artificial Sequence
  Description of Artificial Sequence: Synthetic oligonucleotide
ccaacgguucaguuccuug

SEQ ID NO: 784014 - RNA, 19 nt, Artificial Sequence
  Description of Artificial Sequence: Synthetic oligonucleotide
gccaguaaccugccgcagc

SEQ ID NO: 784015 - RNA, 19 nt, Artificial Sequence
  Description of Artificial Sequence: Synthetic oligonucleotide
cugaggccucuucccacag

SEQ ID NO: 784016 - RNA, 19 nt, Artificial Sequence
  Description of Artificial Sequence: Synthetic oligonucleotide
aguauuccuugaggugugu

SEQ ID NO: 784017 - RNA, 19 nt, Artificial Sequence
  Description of Artificial Sequence: Synthetic oligonucleotide
gucgggguccucacagugc

SEQ ID NO: 784018 - RNA, 19 nt, Artificial Sequence
  Description of Artificial Sequence: Synthetic oligonucleotide
aucguuuguugagaauaua

SEQ ID NO: 784019 - RNA, 19 nt, Artificial Sequence
  Description of Artificial Sequence: Synthetic oligonucleotide
guuguccucgucaacguau

SEQ ID NO: 784020 - RNA, 19 nt, Artificial Sequence
  Description of Artificial Sequence: Synthetic oligonucleotide
gugcugagcccgaagucac

SEQ ID NO: 784021 - RNA, 19 nt, Artificial Sequence
  Description of Artificial Sequence: Synthetic oligonucleotide
uuccugcguucauccuucc

SEQ ID NO: 784022 - RNA, 19 nt, Artificial Sequence
  Description of Artificial Sequence: Synthetic oligonucleotide
acgaaagcucggaagcuuu

SEQ ID NO: 784023 - RNA, 19 nt, Artificial Sequence
  Description of Artificial Sequence: Synthetic oligonucleotide
gaggagggcgccucacgaa

SEQ ID NO: 784024 - RNA, 19 nt, Artificial Sequence
  Description of Artificial Sequence: Synthetic oligonucleotide
caaucucugucggcugaac

SEQ ID NO: 784025 - RNA, 19 nt, Artificial Sequence
  Description of Artificial Sequence: Synthetic oligonucleotide
gggguccucacagugcggc

SEQ ID NO: 784026 - RNA, 19 nt, Artificial Sequence
  Description of Artificial Sequence: Synthetic oligonucleotide
cuggaucccuguccucaug

SEQ ID NO: 784027 - RNA, 19 nt, Artificial Sequence
  Description of Artificial Sequence: Synthetic oligonucleotide
uguuaaagucgggguccuc

SEQ ID NO: 784028 - RNA, 19 nt, Artificial Sequence
  Description of Artificial Sequence: Synthetic oligonucleotide
cucuuccccgcacagagau

SEQ ID NO: 784029 - RNA, 19 nt, Artificial Sequence
  Description of Artificial Sequence: Synthetic oligonucleotide
aucgugcugggcaggguca

SEQ ID NO: 784030 - RNA, 19 nt, Artificial Sequence
  Description of Artificial Sequence: Synthetic oligonucleotide
cagugcggcuccugcuggc

SEQ ID NO: 784031 - RNA, 19 nt, Artificial Sequence
  Description of Artificial Sequence: Synthetic oligonucleotide
gcacagacgaugcaaugcu

SEQ ID NO: 784032 - RNA, 19 nt, Artificial Sequence
  Description of Artificial Sequence: Synthetic oligonucleotide
cuacguggguaugucuuga

SEQ ID NO: 784033 - RNA, 19 nt, Artificial Sequence
  Description of Artificial Sequence: Synthetic oligonucleotide
cauaucguuuguugagaau

SEQ ID NO: 784034 - RNA, 19 nt, Artificial Sequence
  Description of Artificial Sequence: Synthetic oligonucleotide
ucgaggcccagugucucau

SEQ ID NO: 784035 - RNA, 19 nt, Artificial Sequence
  Description of Artificial Sequence: Synthetic oligonucleotide
gucgugucagguaugggau

SEQ ID NO: 784036 - RNA, 19 nt, Artificial Sequence
  Description of Artificial Sequence: Synthetic oligonucleotide
ucgagcccuuccucuuccu

SEQ ID NO: 784037 - RNA, 19 nt, Artificial Sequence
  Description of Artificial Sequence: Synthetic oligonucleotide
gcacagagauuugaagauc

SEQ ID NO: 784038 - RNA, 19 nt, Artificial Sequence
  Description of Artificial Sequence: Synthetic oligonucleotide
cuucuacguaacuuuucau

SEQ ID NO: 784039 - RNA, 19 nt, Artificial Sequence
  Description of Artificial Sequence: Synthetic oligonucleotide
uguggcccucaaggguugc

SEQ ID NO: 784040 - RNA, 19 nt, Artificial Sequence
  Description of Artificial Sequence: Synthetic oligonucleotide
cugcucugaccuguacaug

SEQ ID NO: 784041 - RNA, 19 nt, Artificial Sequence
  Description of Artificial Sequence: Synthetic oligonucleotide
ugaucgugcugggcagggu

SEQ ID NO: 784042 - RNA, 19 nt, Artificial Sequence
  Description of Artificial Sequence: Synthetic oligonucleotide
caacguauuugccuucuuu

SEQ ID NO: 784043 - RNA, 19 nt, Artificial Sequence
  Description of Artificial Sequence: Synthetic oligonucleotide
guuuccgcagcagcccaga

SEQ ID NO: 784044 - RNA, 19 nt, Artificial Sequence
  Description of Artificial Sequence: Synthetic oligonucleotide
cauaguccagccgguagua

SEQ ID NO: 784045 - RNA, 19 nt, Artificial Sequence
  Description of Artificial Sequence: Synthetic oligonucleotide
gcugaucgugcugggcagg

SEQ ID NO: 784046 - RNA, 19 nt, Artificial Sequence
  Description of Artificial Sequence: Synthetic oligonucleotide
ccuuuuagccauucaagau

SEQ ID NO: 784047 - RNA, 19 nt, Artificial Sequence
  Description of Artificial Sequence: Synthetic oligonucleotide
uggcggaagugcagccuuu

SEQ ID NO: 784048 - RNA, 19 nt, Artificial Sequence
  Description of Artificial Sequence: Synthetic oligonucleotide
gagggcgccucacgaagcu

SEQ ID NO: 784049 - RNA, 19 nt, Artificial Sequence
  Description of Artificial Sequence: Synthetic oligonucleotide
ggucgucgaugauauccuc

SEQ ID NO: 784050 - RNA, 19 nt, Artificial Sequence
  Description of Artificial Sequence: Synthetic oligonucleotide
cuuccccgcacagagauuu

SEQ ID NO: 784051 - RNA, 19 nt, Artificial Sequence
  Description of Artificial Sequence: Synthetic oligonucleotide
gguccgcuccauguguccc

SEQ ID NO: 784052 - RNA, 19 nt, Artificial Sequence
  Description of Artificial Sequence: Synthetic oligonucleotide
cacaugggucucagacuga

SEQ ID NO: 784053 - RNA, 19 nt, Artificial Sequence
  Description of Artificial Sequence: Synthetic oligonucleotide
cauccuuccggcgcacaga

SEQ ID NO: 784054 - RNA, 19 nt, Artificial Sequence
  Description of Artificial Sequence: Synthetic oligonucleotide
cugagucaggcuccucgaa

SEQ ID NO: 784055 - RNA, 19 nt, Artificial Sequence
  Description of Artificial Sequence: Synthetic oligonucleotide
cagugccauagaagccauc

SEQ ID NO: 784056 - RNA, 19 nt, Artificial Sequence
  Description of Artificial Sequence: Synthetic oligonucleotide
ggaucccuguccucauguc

SEQ ID NO: 784057 - RNA, 19 nt, Artificial Sequence
  Description of Artificial Sequence: Synthetic oligonucleotide
gcggaagugcagccuuuug

SEQ ID NO: 784058 - RNA, 19 nt, Artificial Sequence
  Description of Artificial Sequence: Synthetic oligonucleotide
cuguacaugcaggucuucu

SEQ ID NO: 784059 - RNA, 19 nt, Artificial Sequence
  Description of Artificial Sequence: Synthetic oligonucleotide
cucgaggcccagugucuca

SEQ ID NO: 784060 - RNA, 19 nt, Artificial Sequence
  Description of Artificial Sequence: Synthetic oligonucleotide
augggaucuggaacuccaa

SEQ ID NO: 784061 - RNA, 19 nt, Artificial Sequence
  Description of Artificial Sequence: Synthetic oligonucleotide
gugucaccgugggacccag

SEQ ID NO: 784062 - RNA, 19 nt, Artificial Sequence
  Description of Artificial Sequence: Synthetic oligonucleotide
augcccgcuucuccugcau

SEQ ID NO: 784063 - RNA, 19 nt, Artificial Sequence
  Description of Artificial Sequence: Synthetic oligonucleotide
cgugggacccagcagccug

SEQ ID NO: 784064 - RNA, 19 nt, Artificial Sequence
  Description of Artificial Sequence: Synthetic oligonucleotide
ggagggcgccucacgaagc

SEQ ID NO: 784065 - RNA, 19 nt, Artificial Sequence
  Description of Artificial Sequence: Synthetic oligonucleotide
caaugcuacguggguaugu

SEQ ID NO: 784066 - RNA, 19 nt, Artificial Sequence
  Description of Artificial Sequence: Synthetic oligonucleotide
cuggccuugcccugugacu

SEQ ID NO: 784067 - RNA, 19 nt, Artificial Sequence
  Description of Artificial Sequence: Synthetic oligonucleotide
cuuuugggguugagaccaa

SEQ ID NO: 784068 - RNA, 19 nt, Artificial Sequence
  Description of Artificial Sequence: Synthetic oligonucleotide
gggucauagucugcgucca

SEQ ID NO: 784069 - RNA, 19 nt, Artificial Sequence
  Description of Artificial Sequence: Synthetic oligonucleotide
accaacgguucaguuccuu

SEQ ID NO: 784070 - RNA, 19 nt, Artificial Sequence
  Description of Artificial Sequence: Synthetic oligonucleotide
guacaugggcugcuauuuu

SEQ ID NO: 784071 - RNA, 19 nt, Artificial Sequence
  Description of Artificial Sequence: Synthetic oligonucleotide
gccacaugggucucagacu

SEQ ID NO: 784072 - RNA, 19 nt, Artificial Sequence
  Description of Artificial Sequence: Synthetic oligonucleotide
gccucuguucuucuacgua

SEQ ID NO: 784073 - RNA, 19 nt, Artificial Sequence
  Description of Artificial Sequence: Synthetic oligonucleotide
ggguugagaccaaaugccu

SEQ ID NO: 784074 - RNA, 19 nt, Artificial Sequence
  Description of Artificial Sequence: Synthetic oligonucleotide
gcaaugcuacguggguaug

SEQ ID NO: 784075 - RNA, 19 nt, Artificial Sequence
  Description of Artificial Sequence: Synthetic oligonucleotide
uccccacucuugguguguu

SEQ ID NO: 784076 - RNA, 19 nt, Artificial Sequence
  Description of Artificial Sequence: Synthetic oligonucleotide
gggcgccucacgaagcuuc

SEQ ID NO: 784077 - RNA, 19 nt, Artificial Sequence
  Description of Artificial Sequence: Synthetic oligonucleotide
ccugcucugaccuguacau

SEQ ID NO: 784078 - RNA, 19 nt, Artificial Sequence
  Description of Artificial Sequence: Synthetic oligonucleotide
ggguaggaugugugugcca

SEQ ID NO: 784079 - RNA, 19 nt, Artificial Sequence
  Description of Artificial Sequence: Synthetic oligonucleotide
gcucugaccuguacaugca

SEQ ID NO: 784080 - RNA, 19 nt, Artificial Sequence
  Description of Artificial Sequence: Synthetic oligonucleotide
cucugucggcugaacuugu

SEQ ID NO: 784081 - RNA, 19 nt, Artificial Sequence
  Description of Artificial Sequence: Synthetic oligonucleotide
ccaguaaccugccgcagcu

SEQ ID NO: 784082 - RNA, 19 nt, Artificial Sequence
  Description of Artificial Sequence: Synthetic oligonucleotide
cauagucugcguccauguu

SEQ ID NO: 784083 - RNA, 19 nt, Artificial Sequence
  Description of Artificial Sequence: Synthetic oligonucleotide
cgcacagagauuugaagau

SEQ ID NO: 784084 - RNA, 19 nt, Artificial Sequence
  Description of Artificial Sequence: Synthetic oligonucleotide
gggcaggucgucgaugaua

SEQ ID NO: 784085 - RNA, 19 nt, Artificial Sequence
  Description of Artificial Sequence: Synthetic oligonucleotide
ggcccucaaggguugcucu

SEQ ID NO: 784086 - RNA, 19 nt, Artificial Sequence
  Description of Artificial Sequence: Synthetic oligonucleotide
gcugaacuugugaccucca

SEQ ID NO: 784087 - RNA, 19 nt, Artificial Sequence
  Description of Artificial Sequence: Synthetic oligonucleotide
cguucauccuuccggcgca

SEQ ID NO: 784088 - RNA, 19 nt, Artificial Sequence
  Description of Artificial Sequence: Synthetic oligonucleotide
cuggggucauagucugcgu

SEQ ID NO: 784089 - RNA, 19 nt, Artificial Sequence
  Description of Artificial Sequence: Synthetic oligonucleotide
caucuugcuuagguccgcu

SEQ ID NO: 784090 - RNA, 19 nt, Artificial Sequence
  Description of Artificial Sequence: Synthetic oligonucleotide
cauaguccuucagguacau

SEQ ID NO: 784091 - RNA, 19 nt, Artificial Sequence
  Description of Artificial Sequence: Synthetic oligonucleotide
cagguacaugggcugcuau

SEQ ID NO: 784092 - RNA, 19 nt, Artificial Sequence
  Description of Artificial Sequence: Synthetic oligonucleotide
ccucgaggcccagugucuc

SEQ ID NO: 784093 - RNA, 19 nt, Artificial Sequence
  Description of Artificial Sequence: Synthetic oligonucleotide
cggaaguuguacuuguguu

SEQ ID NO: 784094 - RNA, 19 nt, Artificial Sequence
  Description of Artificial Sequence: Synthetic oligonucleotide
ggcgcacagacgaugcaau

SEQ ID NO: 784095 - RNA, 19 nt, Artificial Sequence
  Description of Artificial Sequence: Synthetic oligonucleotide
gcccgaagucacagggcac

SEQ ID NO: 784096 - RNA, 19 nt, Artificial Sequence
  Description of Artificial Sequence: Synthetic oligonucleotide
ccccgcacagagauuugaa

SEQ ID NO: 784097 - RNA, 19 nt, Artificial Sequence
  Description of Artificial Sequence: Synthetic oligonucleotide
cuuccggcgcacagacgau

SEQ ID NO: 784098 - RNA, 19 nt, Artificial Sequence
  Description of Artificial Sequence: Synthetic oligonucleotide
gcgacccaacuggcggaag

SEQ ID NO: 784099 - RNA, 19 nt, Artificial Sequence
  Description of Artificial Sequence: Synthetic oligonucleotide
cgugucagguaugggaucu

SEQ ID NO: 784100 - RNA, 19 nt, Artificial Sequence
  Description of Artificial Sequence: Synthetic oligonucleotide
cgacagggcaggucgucga

SEQ ID NO: 784101 - RNA, 19 nt, Artificial Sequence
  Description of Artificial Sequence: Synthetic oligonucleotide
ggucauagucugcguccau

SEQ ID NO: 784102 - RNA, 19 nt, Artificial Sequence
  Description of Artificial Sequence: Synthetic oligonucleotide
ggcgacccaacuggcggaa

SEQ ID NO: 784103 - RNA, 19 nt, Artificial Sequence
  Description of Artificial Sequence: Synthetic oligonucleotide
ggguccucacagugcggcu

SEQ ID NO: 784104 - RNA, 19 nt, Artificial Sequence
  Description of Artificial Sequence: Synthetic oligonucleotide
caccaacgguucaguuccu

SEQ ID NO: 784105 - RNA, 19 nt, Artificial Sequence
  Description of Artificial Sequence: Synthetic oligonucleotide
ccacgaaagcucggaagcu

SEQ ID NO: 784106 - RNA, 19 nt, Artificial Sequence
  Description of Artificial Sequence: Synthetic oligonucleotide
cggcugaacuugugaccuc

SEQ ID NO: 784107 - RNA, 19 nt, Artificial Sequence
  Description of Artificial Sequence: Synthetic oligonucleotide
ggcgccucacgaagcuucu

SEQ ID NO: 784108 - RNA, 19 nt, Artificial Sequence
  Description of Artificial Sequence: Synthetic oligonucleotide
ccggcgcacagacgaugca

SEQ ID NO: 784109 - RNA, 19 nt, Artificial Sequence
  Description of Artificial Sequence: Synthetic oligonucleotide
ggcggaagugcagccuuuu

SEQ ID NO: 784110 - RNA, 19 nt, Artificial Sequence
  Description of Artificial Sequence: Synthetic oligonucleotide
cggcgcacagacgaugcaa

SEQ ID NO: 784111 - RNA, 19 nt, Artificial Sequence
  Description of Artificial Sequence: Synthetic oligonucleotide
caguaaccugccgcagcuu

SEQ ID NO: 784112 - RNA, 19 nt, Artificial Sequence
  Description of Artificial Sequence: Synthetic oligonucleotide
ccccacucuugguguguuu

SEQ ID NO: 784113 - RNA, 19 nt, Artificial Sequence
  Description of Artificial Sequence: Synthetic oligonucleotide
ccgugggacccagcagccu

SEQ ID NO: 784114 - RNA, 19 nt, Artificial Sequence
  Description of Artificial Sequence: Synthetic oligonucleotide
uauaucuacguccagauau

SEQ ID NO: 784115 - RNA, 19 nt, Artificial Sequence
  Description of Artificial Sequence: Synthetic oligonucleotide
ugggauuuuaguuuuagcc

SEQ ID NO: 784116 - RNA, 19 nt, Artificial Sequence
  Description of Artificial Sequence: Synthetic oligonucleotide
uguacauuggacaggcacg

SEQ ID NO: 784117 - RNA, 19 nt, Artificial Sequence
  Description of Artificial Sequence: Synthetic oligonucleotide
ucuacguccagauauacac

SEQ ID NO: 784118 - RNA, 19 nt, Artificial Sequence
  Description of Artificial Sequence: Synthetic oligonucleotide
auauucacugccaaaaggc

SEQ ID NO: 784119 - RNA, 19 nt, Artificial Sequence
  Description of Artificial Sequence: Synthetic oligonucleotide
ugugucuauaucuacgucc

SEQ ID NO: 784120 - RNA, 19 nt, Artificial Sequence
  Description of Artificial Sequence: Synthetic oligonucleotide
uucugacugacucaagugg

SEQ ID NO: 784121 - RNA, 19 nt, Artificial Sequence
  Description of Artificial Sequence: Synthetic oligonucleotide
aacagauugccaccgauug

SEQ ID NO: 784122 - RNA, 19 nt, Artificial Sequence
  Description of Artificial Sequence: Synthetic oligonucleotide
acagacacugugcacacgc

SEQ ID NO: 784123 - RNA, 19 nt, Artificial Sequence
  Description of Artificial Sequence: Synthetic oligonucleotide
auguacauuggacaggcac

SEQ ID NO: 784124 - RNA, 19 nt, Artificial Sequence
  Description of Artificial Sequence: Synthetic oligonucleotide
aaaauugaagcuaaacaca

SEQ ID NO: 784125 - RNA, 19 nt, Artificial Sequence
  Description of Artificial Sequence: Synthetic oligonucleotide
gauggcauguacaaaacag

SEQ ID NO: 784126 - RNA, 19 nt, Artificial Sequence
  Description of Artificial Sequence: Synthetic oligonucleotide
uuugguaaacccaggagcu

SEQ ID NO: 784127 - RNA, 19 nt, Artificial Sequence
  Description of Artificial Sequence: Synthetic oligonucleotide
uacauauuugguaaaccca

SEQ ID NO: 784128 - RNA, 19 nt, Artificial Sequence
  Description of Artificial Sequence: Synthetic oligonucleotide
ugucaucauuuaaaggugg

SEQ ID NO: 784129 - RNA, 19 nt, Artificial Sequence
  Description of Artificial Sequence: Synthetic oligonucleotide
ucuaugugggcaaaagcgc

SEQ ID NO: 784130 - RNA, 19 nt, Artificial Sequence
  Description of Artificial Sequence: Synthetic oligonucleotide
caaaagcgcagaaaggucc

SEQ ID NO: 784131 - RNA, 19 nt, Artificial Sequence
  Description of Artificial Sequence: Synthetic oligonucleotide
aaagguggcgguucuaugu

SEQ ID NO: 784132 - RNA, 19 nt, Artificial Sequence
  Description of Artificial Sequence: Synthetic oligonucleotide
uuaguuuuagccuggcacu

SEQ ID NO: 784133 - RNA, 19 nt, Artificial Sequence
  Description of Artificial Sequence: Synthetic oligonucleotide
ugcauaucguugcacuugg

SEQ ID NO: 784134 - RNA, 19 nt, Artificial Sequence
  Description of Artificial Sequence: Synthetic oligonucleotide
uauucacugccaaaaggcc

SEQ ID NO: 784135 - RNA, 19 nt, Artificial Sequence
  Description of Artificial Sequence: Synthetic oligonucleotide
auugccaccgauugugacg

SEQ ID NO: 784136 - RNA, 19 nt, Artificial Sequence
  Description of Artificial Sequence: Synthetic oligonucleotide
gguaagucuguuuaaagug

SEQ ID NO: 784137 - RNA, 19 nt, Artificial Sequence
  Description of Artificial Sequence: Synthetic oligonucleotide
gacuuuguauuugagcagg

SEQ ID NO: 784138 - RNA, 19 nt, Artificial Sequence
  Description of Artificial Sequence: Synthetic oligonucleotide
ugcaacacagaccccagcc

SEQ ID NO: 784139 - RNA, 19 nt, Artificial Sequence
  Description of Artificial Sequence: Synthetic oligonucleotide
acacaauguacauuggaca

SEQ ID NO: 784140 - RNA, 19 nt, Artificial Sequence
  Description of Artificial Sequence: Synthetic oligonucleotide
gaccuaaagauccauguga

SEQ ID NO: 784141 - RNA, 19 nt, Artificial Sequence
  Description of Artificial Sequence: Synthetic oligonucleotide
aaauugaagcuaaacacaa

SEQ ID NO: 784142 - RNA, 19 nt, Artificial Sequence
  Description of Artificial Sequence: Synthetic oligonucleotide
ucuauaucuacguccagau

SEQ ID NO: 784143 - RNA, 19 nt, Artificial Sequence
  Description of Artificial Sequence: Synthetic oligonucleotide
ugguaagucuguuuaaagu

SEQ ID NO: 784144 - RNA, 19 nt, Artificial Sequence
  Description of Artificial Sequence: Synthetic oligonucleotide
ucaucauuuaaagguggcg

SEQ ID NO: 784145 - RNA, 19 nt, Artificial Sequence
  Description of Artificial Sequence: Synthetic oligonucleotide
ucuguuuaaaguguguguc

SEQ ID NO: 784146 - RNA, 19 nt, Artificial Sequence
  Description of Artificial Sequence: Synthetic oligonucleotide
uauuugagcagggaggcug

SEQ ID NO: 784147 - RNA, 19 nt, Artificial Sequence
  Description of Artificial Sequence: Synthetic oligonucleotide
agaauggcaguacggcagc

SEQ ID NO: 784148 - RNA, 19 nt, Artificial Sequence
  Description of Artificial Sequence: Synthetic oligonucleotide
auauuugguaaacccagga

SEQ ID NO: 784149 - RNA, 19 nt, Artificial Sequence
  Description of Artificial Sequence: Synthetic oligonucleotide
guuccuacagaggagggcg

SEQ ID NO: 784150 - RNA, 19 nt, Artificial Sequence
  Description of Artificial Sequence: Synthetic oligonucleotide
cauauuugguaaacccagg

SEQ ID NO: 784151 - RNA, 19 nt, Artificial Sequence
  Description of Artificial Sequence: Synthetic oligonucleotide
uacguccagauauacacac

SEQ ID NO: 784152 - RNA, 19 nt, Artificial Sequence
  Description of Artificial Sequence: Synthetic oligonucleotide
uuuagccuggcacuugaga

SEQ ID NO: 784153 - RNA, 19 nt, Artificial Sequence
  Description of Artificial Sequence: Synthetic oligonucleotide
gauuuuaguuuuagccugg

SEQ ID NO: 784154 - RNA, 19 nt, Artificial Sequence
  Description of Artificial Sequence: Synthetic oligonucleotide
ggauuuuaguuuuagccug

SEQ ID NO: 784155 - RNA, 19 nt, Artificial Sequence
  Description of Artificial Sequence: Synthetic oligonucleotide
uuagccuggcacuugagau

SEQ ID NO: 784156 - RNA, 19 nt, Artificial Sequence
  Description of Artificial Sequence: Synthetic oligonucleotide
cucugcaacagauugccac

SEQ ID NO: 784157 - RNA, 19 nt, Artificial Sequence
  Description of Artificial Sequence: Synthetic oligonucleotide
uuucgugcugagcccaagg

SEQ ID NO: 784158 - RNA, 19 nt, Artificial Sequence
  Description of Artificial Sequence: Synthetic oligonucleotide
gauugugacguugcguggg

SEQ ID NO: 784159 - RNA, 19 nt, Artificial Sequence
  Description of Artificial Sequence: Synthetic oligonucleotide
gaaugcagggugaacgggg

SEQ ID NO: 784160 - RNA, 19 nt, Artificial Sequence
  Description of Artificial Sequence: Synthetic oligonucleotide
ucccguucagaccuaaaga

SEQ ID NO: 784161 - RNA, 19 nt, Artificial Sequence
  Description of Artificial Sequence: Synthetic oligonucleotide
ucagaccuaaagauccaug

SEQ ID NO: 784162 - RNA, 19 nt, Artificial Sequence
  Description of Artificial Sequence: Synthetic oligonucleotide
ugccuaaggagccaggaau

SEQ ID NO: 784163 - RNA, 19 nt, Artificial Sequence
  Description of Artificial Sequence: Synthetic oligonucleotide
aaugccggagcagggcugc

SEQ ID NO: 784164 - RNA, 19 nt, Artificial Sequence
  Description of Artificial Sequence: Synthetic oligonucleotide
accuaaagauccaugugac

SEQ ID NO: 784165 - RNA, 19 nt, Artificial Sequence
  Description of Artificial Sequence: Synthetic oligonucleotide
uguucaucccguucagacc

SEQ ID NO: 784166 - RNA, 19 nt, Artificial Sequence
  Description of Artificial Sequence: Synthetic oligonucleotide
aucccguucagaccuaaag

SEQ ID NO: 784167 - RNA, 19 nt, Artificial Sequence
  Description of Artificial Sequence: Synthetic oligonucleotide
uuaagagucucaaggccuc

SEQ ID NO: 784168 - RNA, 19 nt, Artificial Sequence
  Description of Artificial Sequence: Synthetic oligonucleotide
ucaguggacccgcagcugc

SEQ ID NO: 784169 - RNA, 19 nt, Artificial Sequence
  Description of Artificial Sequence: Synthetic oligonucleotide
uccacuguucaguggaccc

SEQ ID NO: 784170 - RNA, 19 nt, Artificial Sequence
  Description of Artificial Sequence: Synthetic oligonucleotide
cuagcgaaugggauuuuag

SEQ ID NO: 784171 - RNA, 19 nt, Artificial Sequence
  Description of Artificial Sequence: Synthetic oligonucleotide
guucuaugugggcaaaagc

SEQ ID NO: 784172 - RNA, 19 nt, Artificial Sequence
  Description of Artificial Sequence: Synthetic oligonucleotide
gggagaagcuuccagaggc

SEQ ID NO: 784173 - RNA, 19 nt, Artificial Sequence
  Description of Artificial Sequence: Synthetic oligonucleotide
acugcaucucuguacauaa

SEQ ID NO: 784174 - RNA, 19 nt, Artificial Sequence
  Description of Artificial Sequence: Synthetic oligonucleotide
ucuagcucuugccgaagcc

SEQ ID NO: 784175 - RNA, 19 nt, Artificial Sequence
  Description of Artificial Sequence: Synthetic oligonucleotide
uuaauucauugaaagccuu

SEQ ID NO: 784176 - RNA, 19 nt, Artificial Sequence
  Description of Artificial Sequence: Synthetic oligonucleotide
ucgagagcaccaaggaaug

SEQ ID NO: 784177 - RNA, 19 nt, Artificial Sequence
  Description of Artificial Sequence: Synthetic oligonucleotide
auuuuaguuuuagccuggc

SEQ ID NO: 784178 - RNA, 19 nt, Artificial Sequence
  Description of Artificial Sequence: Synthetic oligonucleotide
agaccuaaagauccaugug

SEQ ID NO: 784179 - RNA, 19 nt, Artificial Sequence
  Description of Artificial Sequence: Synthetic oligonucleotide
aaagagggacuuuguauuu

SEQ ID NO: 784180 - RNA, 19 nt, Artificial Sequence
  Description of Artificial Sequence: Synthetic oligonucleotide
uggauacagcugaggaagg

SEQ ID NO: 784181 - RNA, 19 nt, Artificial Sequence
  Description of Artificial Sequence: Synthetic oligonucleotide
cacgcuggcaccacgacug

SEQ ID NO: 784182 - RNA, 19 nt, Artificial Sequence
  Description of Artificial Sequence: Synthetic oligonucleotide
uagcgaaugggauuuuagu

SEQ ID NO: 784183 - RNA, 19 nt, Artificial Sequence
  Description of Artificial Sequence: Synthetic oligonucleotide
aagcgcagaaagguccucg

SEQ ID NO: 784184 - RNA, 19 nt, Artificial Sequence
  Description of Artificial Sequence: Synthetic oligonucleotide
gacucaaguggcccugggg

SEQ ID NO: 784185 - RNA, 19 nt, Artificial Sequence
  Description of Artificial Sequence: Synthetic oligonucleotide
ucuagggcccacuggacac

SEQ ID NO: 784186 - RNA, 19 nt, Artificial Sequence
  Description of Artificial Sequence: Synthetic oligonucleotide
gugugugucuauaucuacg

SEQ ID NO: 784187 - RNA, 19 nt, Artificial Sequence
  Description of Artificial Sequence: Synthetic oligonucleotide
agucuccggcagcagaugg

SEQ ID NO: 784188 - RNA, 19 nt, Artificial Sequence
  Description of Artificial Sequence: Synthetic oligonucleotide
uaauucauugaaagccuuu

SEQ ID NO: 784189 - RNA, 19 nt, Artificial Sequence
  Description of Artificial Sequence: Synthetic oligonucleotide
auuuaaagguggcgguucu

SEQ ID NO: 784190 - RNA, 19 nt, Artificial Sequence
  Description of Artificial Sequence: Synthetic oligonucleotide
ugugacguugcguggggug

SEQ ID NO: 784191 - RNA, 19 nt, Artificial Sequence
  Description of Artificial Sequence: Synthetic oligonucleotide
uguuuggguugaagcagag

SEQ ID NO: 784192 - RNA, 19 nt, Artificial Sequence
  Description of Artificial Sequence: Synthetic oligonucleotide
uucacaggugcagagcucu

SEQ ID NO: 784193 - RNA, 19 nt, Artificial Sequence
  Description of Artificial Sequence: Synthetic oligonucleotide
ugggcucuagcgaauggga

SEQ ID NO: 784194 - RNA, 19 nt, Artificial Sequence
  Description of Artificial Sequence: Synthetic oligonucleotide
agagggacuuuguauuuga

SEQ ID NO: 784195 - RNA, 19 nt, Artificial Sequence
  Description of Artificial Sequence: Synthetic oligonucleotide
aagagggacuuuguauuug

SEQ ID NO: 784196 - RNA, 19 nt, Artificial Sequence
  Description of Artificial Sequence: Synthetic oligonucleotide
agcuaaacacaauguacau

SEQ ID NO: 784197 - RNA, 19 nt, Artificial Sequence
  Description of Artificial Sequence: Synthetic oligonucleotide
agccuuucgugcugagccc

SEQ ID NO: 784198 - RNA, 19 nt, Artificial Sequence
  Description of Artificial Sequence: Synthetic oligonucleotide
ggagaggacugcaaaauag

SEQ ID NO: 784199 - RNA, 19 nt, Artificial Sequence
  Description of Artificial Sequence: Synthetic oligonucleotide
uuaaagguggcgguucuau

SEQ ID NO: 784200 - RNA, 19 nt, Artificial Sequence
  Description of Artificial Sequence: Synthetic oligonucleotide
gagugggcuagccugcagc

SEQ ID NO: 784201 - RNA, 19 nt, Artificial Sequence
  Description of Artificial Sequence: Synthetic oligonucleotide
aguacggcagcugcacucg

SEQ ID NO: 784202 - RNA, 19 nt, Artificial Sequence
  Description of Artificial Sequence: Synthetic oligonucleotide
agcgcagaaagguccucgg

SEQ ID NO: 784203 - RNA, 19 nt, Artificial Sequence
  Description of Artificial Sequence: Synthetic oligonucleotide
acccgacugcugcauaucg

SEQ ID NO: 784204 - RNA, 19 nt, Artificial Sequence
  Description of Artificial Sequence: Synthetic oligonucleotide
aaaagcgcagaaagguccu

SEQ ID NO: 784205 - RNA, 19 nt, Artificial Sequence
  Description of Artificial Sequence: Synthetic oligonucleotide
ugcuuuccaucccacugca

SEQ ID NO: 784206 - RNA, 19 nt, Artificial Sequence
  Description of Artificial Sequence: Synthetic oligonucleotide
guacauuggacaggcacgc

SEQ ID NO: 784207 - RNA, 19 nt, Artificial Sequence
  Description of Artificial Sequence: Synthetic oligonucleotide
guacucggcucccaccugg

SEQ ID NO: 784208 - RNA, 19 nt, Artificial Sequence
  Description of Artificial Sequence: Synthetic oligonucleotide
acagggaccgagucuccgg

SEQ ID NO: 784209 - RNA, 19 nt, Artificial Sequence
  Description of Artificial Sequence: Synthetic oligonucleotide
uuccaggcaucacaagccu

SEQ ID NO: 784210 - RNA, 19 nt, Artificial Sequence
  Description of Artificial Sequence: Synthetic oligonucleotide
uugcaggaaaugugaggag

SEQ ID NO: 784211 - RNA, 19 nt, Artificial Sequence
  Description of Artificial Sequence: Synthetic oligonucleotide
cuaugugggcaaaagcgca

SEQ ID NO: 784212 - RNA, 19 nt, Artificial Sequence
  Description of Artificial Sequence: Synthetic oligonucleotide
cucggcucccaccuggucc

SEQ ID NO: 784213 - RNA, 19 nt, Artificial Sequence
  Description of Artificial Sequence: Synthetic oligonucleotide
cucacagggaccgagucuc

SEQ ID NO: 784214 - RNA, 19 nt, Artificial Sequence
  Description of Artificial Sequence: Synthetic oligonucleotide
uugccaccgauugugacgu

SEQ ID NO: 784215 - RNA, 19 nt, Artificial Sequence
  Description of Artificial Sequence: Synthetic oligonucleotide
cugcaugucaucauuuaaa

SEQ ID NO: 784216 - RNA, 19 nt, Artificial Sequence
  Description of Artificial Sequence: Synthetic oligonucleotide
caugugacgcugagguccc

SEQ ID NO: 784217 - RNA, 19 nt, Artificial Sequence
  Description of Artificial Sequence: Synthetic oligonucleotide
ugcacacgcuggcaccacg

SEQ ID NO: 784218 - RNA, 19 nt, Artificial Sequence
  Description of Artificial Sequence: Synthetic oligonucleotide
aauugaagcuaaacacaau

SEQ ID NO: 784219 - RNA, 19 nt, Artificial Sequence
  Description of Artificial Sequence: Synthetic oligonucleotide
ccgauugugacguugcgug

SEQ ID NO: 784220 - RNA, 19 nt, Artificial Sequence
  Description of Artificial Sequence: Synthetic oligonucleotide
ggacuuuguauuugagcag

SEQ ID NO: 784221 - RNA, 19 nt, Artificial Sequence
  Description of Artificial Sequence: Synthetic oligonucleotide
aaagcgcagaaagguccuc

SEQ ID NO: 784222 - RNA, 19 nt, Artificial Sequence
  Description of Artificial Sequence: Synthetic oligonucleotide
agugggcuagccugcagcu

SEQ ID NO: 784223 - RNA, 19 nt, Artificial Sequence
  Description of Artificial Sequence: Synthetic oligonucleotide
uaucuacguccagauauac

SEQ ID NO: 784224 - RNA, 19 nt, Artificial Sequence
  Description of Artificial Sequence: Synthetic oligonucleotide
ucccucucgaagccaggag

SEQ ID NO: 784225 - RNA, 19 nt, Artificial Sequence
  Description of Artificial Sequence: Synthetic oligonucleotide
aaggagccaggaauguuca

SEQ ID NO: 784226 - RNA, 19 nt, Artificial Sequence
  Description of Artificial Sequence: Synthetic oligonucleotide
ucgcucaccggccuccucu

SEQ ID NO: 784227 - RNA, 19 nt, Artificial Sequence
  Description of Artificial Sequence: Synthetic oligonucleotide
cucgagagcaccaaggaau

SEQ ID NO: 784228 - RNA, 19 nt, Artificial Sequence
  Description of Artificial Sequence: Synthetic oligonucleotide
cugggcucuagcgaauggg

SEQ ID NO: 784229 - RNA, 19 nt, Artificial Sequence
  Description of Artificial Sequence: Synthetic oligonucleotide
aacuggggaccugagucca

SEQ ID NO: 784230 - RNA, 19 nt, Artificial Sequence
  Description of Artificial Sequence: Synthetic oligonucleotide
cacgacugcauguggaaca

SEQ ID NO: 784231 - RNA, 19 nt, Artificial Sequence
  Description of Artificial Sequence: Synthetic oligonucleotide
guuuggguugaagcagagg

SEQ ID NO: 784232 - RNA, 19 nt, Artificial Sequence
  Description of Artificial Sequence: Synthetic oligonucleotide
gguucuaugugggcaaaag

SEQ ID NO: 784233 - RNA, 19 nt, Artificial Sequence
  Description of Artificial Sequence: Synthetic oligonucleotide
acugcugcauaucguugca

SEQ ID NO: 784234 - RNA, 19 nt, Artificial Sequence
  Description of Artificial Sequence: Synthetic oligonucleotide
uacggcagcugcacucgag

SEQ ID NO: 784235 - RNA, 19 nt, Artificial Sequence
  Description of Artificial Sequence: Synthetic oligonucleotide
cugcauaucguugcacuug

SEQ ID NO: 784236 - RNA, 19 nt, Artificial Sequence
  Description of Artificial Sequence: Synthetic oligonucleotide
ucauuuaaagguggcgguu

SEQ ID NO: 784237 - RNA, 19 nt, Artificial Sequence
  Description of Artificial Sequence: Synthetic oligonucleotide
cugcaacagauugccaccg

SEQ ID NO: 784238 - RNA, 19 nt, Artificial Sequence
  Description of Artificial Sequence: Synthetic oligonucleotide
uuccuacagaggagggcgc

SEQ ID NO: 784239 - RNA, 19 nt, Artificial Sequence
  Description of Artificial Sequence: Synthetic oligonucleotide
ccuaaagauccaugugacg

SEQ ID NO: 784240 - RNA, 19 nt, Artificial Sequence
  Description of Artificial Sequence: Synthetic oligonucleotide
ugugggcaaaagcgcagaa

SEQ ID NO: 784241 - RNA, 19 nt, Artificial Sequence
  Description of Artificial Sequence: Synthetic oligonucleotide
ugcaacagauugccaccga

SEQ ID NO: 784242 - RNA, 19 nt, Artificial Sequence
  Description of Artificial Sequence: Synthetic oligonucleotide
uggacacccaaugccggag

SEQ ID NO: 784243 - RNA, 19 nt, Artificial Sequence
  Description of Artificial Sequence: Synthetic oligonucleotide
gacgcugagguccccagaa

SEQ ID NO: 784244 - RNA, 19 nt, Artificial Sequence
  Description of Artificial Sequence: Synthetic oligonucleotide
acucgagagcaccaaggaa

SEQ ID NO: 784245 - RNA, 19 nt, Artificial Sequence
  Description of Artificial Sequence: Synthetic oligonucleotide
cagaccuaaagauccaugu

SEQ ID NO: 784246 - RNA, 19 nt, Artificial Sequence
  Description of Artificial Sequence: Synthetic oligonucleotide
ugggguuguugcaggaaau

SEQ ID NO: 784247 - RNA, 19 nt, Artificial Sequence
  Description of Artificial Sequence: Synthetic oligonucleotide
gacuccccgggaaagacca

SEQ ID NO: 784248 - RNA, 19 nt, Artificial Sequence
  Description of Artificial Sequence: Synthetic oligonucleotide
ugugcacacgcuggcacca

SEQ ID NO: 784249 - RNA, 19 nt, Artificial Sequence
  Description of Artificial Sequence: Synthetic oligonucleotide
agagggagagugccuccag

SEQ ID NO: 784250 - RNA, 19 nt, Artificial Sequence
  Description of Artificial Sequence: Synthetic oligonucleotide
uguggaacacggccuuguc

SEQ ID NO: 784251 - RNA, 19 nt, Artificial Sequence
  Description of Artificial Sequence: Synthetic oligonucleotide
agacuccccgggaaagacc

SEQ ID NO: 784252 - RNA, 19 nt, Artificial Sequence
  Description of Artificial Sequence: Synthetic oligonucleotide
uggcgguucuaugugggca

SEQ ID NO: 784253 - RNA, 19 nt, Artificial Sequence
  Description of Artificial Sequence: Synthetic oligonucleotide
cacuggcucgcucaccggc

SEQ ID NO: 784254 - RNA, 19 nt, Artificial Sequence
  Description of Artificial Sequence: Synthetic oligonucleotide
uagacuccccgggaaagac

SEQ ID NO: 784255 - RNA, 19 nt, Artificial Sequence
  Description of Artificial Sequence: Synthetic oligonucleotide
aggagccaggaauguucac

SEQ ID NO: 784256 - RNA, 19 nt, Artificial Sequence
  Description of Artificial Sequence: Synthetic oligonucleotide
uucagaccuaaagauccau

SEQ ID NO: 784257 - RNA, 19 nt, Artificial Sequence
  Description of Artificial Sequence: Synthetic oligonucleotide
cugcaaaauagucuuuucu

SEQ ID NO: 784258 - RNA, 19 nt, Artificial Sequence
  Description of Artificial Sequence: Synthetic oligonucleotide
gagggacuuuguauuugag

SEQ ID NO: 784259 - RNA, 19 nt, Artificial Sequence
  Description of Artificial Sequence: Synthetic oligonucleotide
ugacguugcgugggguggg

SEQ ID NO: 784260 - RNA, 19 nt, Artificial Sequence
  Description of Artificial Sequence: Synthetic oligonucleotide
cacuguucaguggacccgc

SEQ ID NO: 784261 - RNA, 19 nt, Artificial Sequence
  Description of Artificial Sequence: Synthetic oligonucleotide
aacggggccugcccuuuca

SEQ ID NO: 784262 - RNA, 19 nt, Artificial Sequence
  Description of Artificial Sequence: Synthetic oligonucleotide
aguuuuagccuggcacuug

SEQ ID NO: 784263 - RNA, 19 nt, Artificial Sequence
  Description of Artificial Sequence: Synthetic oligonucleotide
acggcagcugcacucgaga

SEQ ID NO: 784264 - RNA, 19 nt, Artificial Sequence
  Description of Artificial Sequence: Synthetic oligonucleotide
ccacuggacacccaaugcc

SEQ ID NO: 784265 - RNA, 19 nt, Artificial Sequence
  Description of Artificial Sequence: Synthetic oligonucleotide
accacgacugcauguggaa

SEQ ID NO: 784266 - RNA, 19 nt, Artificial Sequence
  Description of Artificial Sequence: Synthetic oligonucleotide
aggagcuuucuuguagcug

SEQ ID NO: 784267 - RNA, 19 nt, Artificial Sequence
  Description of Artificial Sequence: Synthetic oligonucleotide
uggacgggaggggauggag

SEQ ID NO: 784268 - RNA, 19 nt, Artificial Sequence
  Description of Artificial Sequence: Synthetic oligonucleotide
acacgcuggcaccacgacu

SEQ ID NO: 784269 - RNA, 19 nt, Artificial Sequence
  Description of Artificial Sequence: Synthetic oligonucleotide
aggaauguucacaggugca

SEQ ID NO: 784270 - RNA, 19 nt, Artificial Sequence
  Description of Artificial Sequence: Synthetic oligonucleotide
cuacguccagauauacaca

SEQ ID NO: 784271 - RNA, 19 nt, Artificial Sequence
  Description of Artificial Sequence: Synthetic oligonucleotide
uccccagaaauguguuuuc

SEQ ID NO: 784272 - RNA, 19 nt, Artificial Sequence
  Description of Artificial Sequence: Synthetic oligonucleotide
agaccccagccuggaaugc

SEQ ID NO: 784273 - RNA, 19 nt, Artificial Sequence
  Description of Artificial Sequence: Synthetic oligonucleotide
cagggaccgagucuccggc

SEQ ID NO: 784274 - RNA, 19 nt, Artificial Sequence
  Description of Artificial Sequence: Synthetic oligonucleotide
gugagaugggcugcccagg

SEQ ID NO: 784275 - RNA, 19 nt, Artificial Sequence
  Description of Artificial Sequence: Synthetic oligonucleotide
cacugcaacacagacccca

SEQ ID NO: 784276 - RNA, 19 nt, Artificial Sequence
  Description of Artificial Sequence: Synthetic oligonucleotide
guaggacuggauacagcug

SEQ ID NO: 784277 - RNA, 19 nt, Artificial Sequence
  Description of Artificial Sequence: Synthetic oligonucleotide
ucuagcgaaugggauuuua

SEQ ID NO: 784278 - RNA, 19 nt, Artificial Sequence
  Description of Artificial Sequence: Synthetic oligonucleotide
gagaggacugcaaaauagu

SEQ ID NO: 784279 - RNA, 19 nt, Artificial Sequence
  Description of Artificial Sequence: Synthetic oligonucleotide
accgauugugacguugcgu

SEQ ID NO: 784280 - RNA, 19 nt, Artificial Sequence
  Description of Artificial Sequence: Synthetic oligonucleotide
acggccuuguccacuguuc

SEQ ID NO: 784281 - RNA, 19 nt, Artificial Sequence
  Description of Artificial Sequence: Synthetic oligonucleotide
ucaagggcccagggguggg

SEQ ID NO: 784282 - RNA, 19 nt, Artificial Sequence
  Description of Artificial Sequence: Synthetic oligonucleotide
ugagcugccuaaggagcca

SEQ ID NO: 784283 - RNA, 19 nt, Artificial Sequence
  Description of Artificial Sequence: Synthetic oligonucleotide
uucaguggacccgcagcug

SEQ ID NO: 784284 - RNA, 19 nt, Artificial Sequence
  Description of Artificial Sequence: Synthetic oligonucleotide
uaguuuuagccuggcacuu

SEQ ID NO: 784285 - RNA, 19 nt, Artificial Sequence
  Description of Artificial Sequence: Synthetic oligonucleotide
caccgauugugacguugcg

SEQ ID NO: 784286 - RNA, 19 nt, Artificial Sequence
  Description of Artificial Sequence: Synthetic oligonucleotide
ucacagggaccgagucucc

SEQ ID NO: 784287 - RNA, 19 nt, Artificial Sequence
  Description of Artificial Sequence: Synthetic oligonucleotide
aauguacauuggacaggca

SEQ ID NO: 784288 - RNA, 19 nt, Artificial Sequence
  Description of Artificial Sequence: Synthetic oligonucleotide
gguggcgguucuauguggg

SEQ ID NO: 784289 - RNA, 19 nt, Artificial Sequence
  Description of Artificial Sequence: Synthetic oligonucleotide
guucaguggacccgcagcu

SEQ ID NO: 784290 - RNA, 19 nt, Artificial Sequence
  Description of Artificial Sequence: Synthetic oligonucleotide
acgcuggcaccacgacugc

SEQ ID NO: 784291 - RNA, 19 nt, Artificial Sequence
  Description of Artificial Sequence: Synthetic oligonucleotide
gugacgcugagguccccag

SEQ ID NO: 784292 - RNA, 19 nt, Artificial Sequence
  Description of Artificial Sequence: Synthetic oligonucleotide
caaugccggagcagggcug

SEQ ID NO: 784293 - RNA, 19 nt, Artificial Sequence
  Description of Artificial Sequence: Synthetic oligonucleotide
uuuaaagguggcgguucua

SEQ ID NO: 784294 - RNA, 19 nt, Artificial Sequence
  Description of Artificial Sequence: Synthetic oligonucleotide
aucuacguccagauauaca

SEQ ID NO: 784295 - RNA, 19 nt, Artificial Sequence
  Description of Artificial Sequence: Synthetic oligonucleotide
auaucuacguccagauaua

SEQ ID NO: 784296 - RNA, 19 nt, Artificial Sequence
  Description of Artificial Sequence: Synthetic oligonucleotide
uccaugugacgcugagguc

SEQ ID NO: 784297 - RNA, 19 nt, Artificial Sequence
  Description of Artificial Sequence: Synthetic oligonucleotide
auguggaacacggccuugu

SEQ ID NO: 784298 - RNA, 19 nt, Artificial Sequence
  Description of Artificial Sequence: Synthetic oligonucleotide
cccucucgaagccaggagc

SEQ ID NO: 784299 - RNA, 19 nt, Artificial Sequence
  Description of Artificial Sequence: Synthetic oligonucleotide
gacagcuacccgacugcug

SEQ ID NO: 784300 - RNA, 19 nt, Artificial Sequence
  Description of Artificial Sequence: Synthetic oligonucleotide
cacagggaccgagucuccg

SEQ ID NO: 784301 - RNA, 19 nt, Artificial Sequence
  Description of Artificial Sequence: Synthetic oligonucleotide
cggguaaaauacauauuug

SEQ ID NO: 784302 - RNA, 19 nt, Artificial Sequence
  Description of Artificial Sequence: Synthetic oligonucleotide
acucggcucccaccugguc

SEQ ID NO: 784303 - RNA, 19 nt, Artificial Sequence
  Description of Artificial Sequence: Synthetic oligonucleotide
acacccaaugccggagcag

SEQ ID NO: 784304 - RNA, 19 nt, Artificial Sequence
  Description of Artificial Sequence: Synthetic oligonucleotide
ccaccgauugugacguugc

SEQ ID NO: 784305 - RNA, 19 nt, Artificial Sequence
  Description of Artificial Sequence: Synthetic oligonucleotide
uacucggcucccaccuggu

SEQ ID NO: 784306 - RNA, 19 nt, Artificial Sequence
  Description of Artificial Sequence: Synthetic oligonucleotide
ggagcuaggcugguuuaag

SEQ ID NO: 784307 - RNA, 19 nt, Artificial Sequence
  Description of Artificial Sequence: Synthetic oligonucleotide
augugggcaaaagcgcaga

SEQ ID NO: 784308 - RNA, 19 nt, Artificial Sequence
  Description of Artificial Sequence: Synthetic oligonucleotide
cugggguuguugcaggaaa

SEQ ID NO: 784309 - RNA, 19 nt, Artificial Sequence
  Description of Artificial Sequence: Synthetic oligonucleotide
gggaccgagucuccggcag

SEQ ID NO: 784310 - RNA, 19 nt, Artificial Sequence
  Description of Artificial Sequence: Synthetic oligonucleotide
guuuaaagugugugucuau

SEQ ID NO: 784311 - RNA, 19 nt, Artificial Sequence
  Description of Artificial Sequence: Synthetic oligonucleotide
gcuagacuccccgggaaag

SEQ ID NO: 784312 - RNA, 19 nt, Artificial Sequence
  Description of Artificial Sequence: Synthetic oligonucleotide
caccacgacugcaugugga

SEQ ID NO: 784313 - RNA, 19 nt, Artificial Sequence
  Description of Artificial Sequence: Synthetic oligonucleotide
gguccucggggacagcuac

SEQ ID NO: 784314 - RNA, 19 nt, Artificial Sequence
  Description of Artificial Sequence: Synthetic oligonucleotide
gccuaaggagccaggaaug

SEQ ID NO: 784315 - RNA, 19 nt, Artificial Sequence
  Description of Artificial Sequence: Synthetic oligonucleotide
gcugagguccccagaaaug

SEQ ID NO: 784316 - RNA, 19 nt, Artificial Sequence
  Description of Artificial Sequence: Synthetic oligonucleotide
ccguucagaccuaaagauc

SEQ ID NO: 784317 - RNA, 19 nt, Artificial Sequence
  Description of Artificial Sequence: Synthetic oligonucleotide
caucuagcucuugccgaag

SEQ ID NO: 784318 - RNA, 19 nt, Artificial Sequence
  Description of Artificial Sequence: Synthetic oligonucleotide
uuuggccugucagcucugu

SEQ ID NO: 784319 - RNA, 19 nt, Artificial Sequence
  Description of Artificial Sequence: Synthetic oligonucleotide
acguugcguggggugggcc

SEQ ID NO: 784320 - RNA, 19 nt, Artificial Sequence
  Description of Artificial Sequence: Synthetic oligonucleotide
guucagaccuaaagaucca

SEQ ID NO: 784321 - RNA, 19 nt, Artificial Sequence
  Description of Artificial Sequence: Synthetic oligonucleotide
cuagggcccacuggacacc

SEQ ID NO: 784322 - RNA, 19 nt, Artificial Sequence
  Description of Artificial Sequence: Synthetic oligonucleotide
cuuucgugcugagcccaag

SEQ ID NO: 784323 - RNA, 19 nt, Artificial Sequence
  Description of Artificial Sequence: Synthetic oligonucleotide
cuauaucuacguccagaua

SEQ ID NO: 784324 - RNA, 19 nt, Artificial Sequence
  Description of Artificial Sequence: Synthetic oligonucleotide
cuggguaggacuggauaca

SEQ ID NO: 784325 - RNA, 19 nt, Artificial Sequence
  Description of Artificial Sequence: Synthetic oligonucleotide
cacacgcuggcaccacgac

SEQ ID NO: 784326 - RNA, 19 nt, Artificial Sequence
  Description of Artificial Sequence: Synthetic oligonucleotide
gcgaaugggauuuuaguuu

SEQ ID NO: 784327 - RNA, 19 nt, Artificial Sequence
  Description of Artificial Sequence: Synthetic oligonucleotide
gcgcagaaagguccucggg

SEQ ID NO: 784328 - RNA, 19 nt, Artificial Sequence
  Description of Artificial Sequence: Synthetic oligonucleotide
gagcaccaaggaaugcauc

SEQ ID NO: 784329 - RNA, 19 nt, Artificial Sequence
  Description of Artificial Sequence: Synthetic oligonucleotide
acggggccugcccuuucag

SEQ ID NO: 784330 - RNA, 19 nt, Artificial Sequence
  Description of Artificial Sequence: Synthetic oligonucleotide
guccagauauacacacaga

SEQ ID NO: 784331 - RNA, 19 nt, Artificial Sequence
  Description of Artificial Sequence: Synthetic oligonucleotide
acccaaugccggagcaggg

SEQ ID NO: 784332 - RNA, 19 nt, Artificial Sequence
  Description of Artificial Sequence: Synthetic oligonucleotide
gaccgagucuccggcagca

SEQ ID NO: 784333 - RNA, 19 nt, Artificial Sequence
  Description of Artificial Sequence: Synthetic oligonucleotide
agcucacacucugcuccgg

SEQ ID NO: 784334 - RNA, 19 nt, Artificial Sequence
  Description of Artificial Sequence: Synthetic oligonucleotide
gucuccggcagcagauggc

SEQ ID NO: 784335 - RNA, 19 nt, Artificial Sequence
  Description of Artificial Sequence: Synthetic oligonucleotide
uugugacguugcguggggu

SEQ ID NO: 784336 - RNA, 19 nt, Artificial Sequence
  Description of Artificial Sequence: Synthetic oligonucleotide
gaggugagaugggcugccc

SEQ ID NO: 784337 - RNA, 19 nt, Artificial Sequence
  Description of Artificial Sequence: Synthetic oligonucleotide
agggaccgagucuccggca

SEQ ID NO: 784338 - RNA, 19 nt, Artificial Sequence
  Description of Artificial Sequence: Synthetic oligonucleotide
ccggguaaaauacauauuu

SEQ ID NO: 784339 - RNA, 19 nt, Artificial Sequence
  Description of Artificial Sequence: Synthetic oligonucleotide
gacccggcuggguaggacu

SEQ ID NO: 784340 - RNA, 19 nt, Artificial Sequence
  Description of Artificial Sequence: Synthetic oligonucleotide
ggggauggacaggagagga

SEQ ID NO: 784341 - RNA, 19 nt, Artificial Sequence
  Description of Artificial Sequence: Synthetic oligonucleotide
ccagaauggcaguacggca

SEQ ID NO: 784342 - RNA, 19 nt, Artificial Sequence
  Description of Artificial Sequence: Synthetic oligonucleotide
ggcaguacggcagcugcac

SEQ ID NO: 784343 - RNA, 19 nt, Artificial Sequence
  Description of Artificial Sequence: Synthetic oligonucleotide
ggccccacgaagaaguuaa

SEQ ID NO: 784344 - RNA, 19 nt, Artificial Sequence
  Description of Artificial Sequence: Synthetic oligonucleotide
cugcugcauaucguugcac

SEQ ID NO: 784345 - RNA, 19 nt, Artificial Sequence
  Description of Artificial Sequence: Synthetic oligonucleotide
acguccagauauacacaca

SEQ ID NO: 784346 - RNA, 19 nt, Artificial Sequence
  Description of Artificial Sequence: Synthetic oligonucleotide
uacccgacugcugcauauc

SEQ ID NO: 784347 - RNA, 19 nt, Artificial Sequence
  Description of Artificial Sequence: Synthetic oligonucleotide
gacguugcguggggugggc

SEQ ID NO: 784348 - RNA, 19 nt, Artificial Sequence
  Description of Artificial Sequence: Synthetic oligonucleotide
cuagacuccccgggaaaga

SEQ ID NO: 784349 - RNA, 19 nt, Artificial Sequence
  Description of Artificial Sequence: Synthetic oligonucleotide
uccggcggcacuggcucgc

SEQ ID NO: 784350 - RNA, 19 nt, Artificial Sequence
  Description of Artificial Sequence: Synthetic oligonucleotide
cacugccaaaaggccagug

SEQ ID NO: 784351 - RNA, 19 nt, Artificial Sequence
  Description of Artificial Sequence: Synthetic oligonucleotide
cgauugugacguugcgugg

SEQ ID NO: 784352 - RNA, 19 nt, Artificial Sequence
  Description of Artificial Sequence: Synthetic oligonucleotide
agcugccuaaggagccagg

SEQ ID NO: 784353 - RNA, 19 nt, Artificial Sequence
  Description of Artificial Sequence: Synthetic oligonucleotide
ccagguuugagguuuuccu

SEQ ID NO: 784354 - RNA, 19 nt, Artificial Sequence
  Description of Artificial Sequence: Synthetic oligonucleotide
gggagagugccuccagcuc

SEQ ID NO: 784355 - RNA, 19 nt, Artificial Sequence
  Description of Artificial Sequence: Synthetic oligonucleotide
caacagauugccaccgauu

SEQ ID NO: 784356 - RNA, 19 nt, Artificial Sequence
  Description of Artificial Sequence: Synthetic oligonucleotide
ggcgguucuaugugggcaa

SEQ ID NO: 784357 - RNA, 19 nt, Artificial Sequence
  Description of Artificial Sequence: Synthetic oligonucleotide
cugccuaaggagccaggaa

SEQ ID NO: 784358 - RNA, 19 nt, Artificial Sequence
  Description of Artificial Sequence: Synthetic oligonucleotide
ggcggcacuggcucgcuca

SEQ ID NO: 784359 - RNA, 19 nt, Artificial Sequence
  Description of Artificial Sequence: Synthetic oligonucleotide
acgcugagguccccagaaa

SEQ ID NO: 784360 - RNA, 19 nt, Artificial Sequence
  Description of Artificial Sequence: Synthetic oligonucleotide
cacugcaucucuguacaua

SEQ ID NO: 784361 - RNA, 19 nt, Artificial Sequence
  Description of Artificial Sequence: Synthetic oligonucleotide
gccaccgauugugacguug

SEQ ID NO: 784362 - RNA, 19 nt, Artificial Sequence
  Description of Artificial Sequence: Synthetic oligonucleotide
gcccucuagggcccacugg

SEQ ID NO: 784363 - RNA, 19 nt, Artificial Sequence
  Description of Artificial Sequence: Synthetic oligonucleotide
ugaacggggccugcccuuu

SEQ ID NO: 784364 - RNA, 19 nt, Artificial Sequence
  Description of Artificial Sequence: Synthetic oligonucleotide
guugcguggggugggccca

SEQ ID NO: 784365 - RNA, 19 nt, Artificial Sequence
  Description of Artificial Sequence: Synthetic oligonucleotide
cuccggcggcacuggcucg

SEQ ID NO: 784366 - RNA, 19 nt, Artificial Sequence
  Description of Artificial Sequence: Synthetic oligonucleotide
uggccccacgaagaaguua

SEQ ID NO: 784367 - RNA, 19 nt, Artificial Sequence
  Description of Artificial Sequence: Synthetic oligonucleotide
ggcugcaugucaucauuua

SEQ ID NO: 784368 - RNA, 19 nt, Artificial Sequence
  Description of Artificial Sequence: Synthetic oligonucleotide
ggaacacggccuuguccac

SEQ ID NO: 784369 - RNA, 19 nt, Artificial Sequence
  Description of Artificial Sequence: Synthetic oligonucleotide
accugaguccacacugcaa

SEQ ID NO: 784370 - RNA, 19 nt, Artificial Sequence
  Description of Artificial Sequence: Synthetic oligonucleotide
ggggcucacagggaccgag

SEQ ID NO: 784371 - RNA, 19 nt, Artificial Sequence
  Description of Artificial Sequence: Synthetic oligonucleotide
cccguucagaccuaaagau

SEQ ID NO: 784372 - RNA, 19 nt, Artificial Sequence
  Description of Artificial Sequence: Synthetic oligonucleotide
ggaccgagucuccggcagc

SEQ ID NO: 784373 - RNA, 19 nt, Artificial Sequence
  Description of Artificial Sequence: Synthetic oligonucleotide
agcuacccgacugcugcau

SEQ ID NO: 784374 - RNA, 19 nt, Artificial Sequence
  Description of Artificial Sequence: Synthetic oligonucleotide
gcugccuaaggagccagga

SEQ ID NO: 784375 - RNA, 19 nt, Artificial Sequence
  Description of Artificial Sequence: Synthetic oligonucleotide
aggcugcaugucaucauuu

SEQ ID NO: 784376 - RNA, 19 nt, Artificial Sequence
  Description of Artificial Sequence: Synthetic oligonucleotide
gaacggggccugcccuuuc

SEQ ID NO: 784377 - RNA, 19 nt, Artificial Sequence
  Description of Artificial Sequence: Synthetic oligonucleotide
caggagcuuucuuguagcu

SEQ ID NO: 784378 - RNA, 19 nt, Artificial Sequence
  Description of Artificial Sequence: Synthetic oligonucleotide
ccccggguaaaauacauau

SEQ ID NO: 784379 - RNA, 19 nt, Artificial Sequence
  Description of Artificial Sequence: Synthetic oligonucleotide
uagcccucuagggcccacu

SEQ ID NO: 784380 - RNA, 19 nt, Artificial Sequence
  Description of Artificial Sequence: Synthetic oligonucleotide
cuacccgacugcugcauau

SEQ ID NO: 784381 - RNA, 19 nt, Artificial Sequence
  Description of Artificial Sequence: Synthetic oligonucleotide
cguugcguggggugggccc

SEQ ID NO: 784382 - RNA, 19 nt, Artificial Sequence
  Description of Artificial Sequence: Synthetic oligonucleotide
uugcguggggugggcccag

SEQ ID NO: 784383 - RNA, 19 nt, Artificial Sequence
  Description of Artificial Sequence: Synthetic oligonucleotide
ggugaacggggccugcccu

SEQ ID NO: 784384 - RNA, 19 nt, Artificial Sequence
  Description of Artificial Sequence: Synthetic oligonucleotide
ggcucuagcgaaugggauu

SEQ ID NO: 784385 - RNA, 19 nt, Artificial Sequence
  Description of Artificial Sequence: Synthetic oligonucleotide
gcuaaacacaauguacauu

SEQ ID NO: 784386 - RNA, 19 nt, Artificial Sequence
  Description of Artificial Sequence: Synthetic oligonucleotide
guauuugagcagggaggcu

SEQ ID NO: 784387 - RNA, 19 nt, Artificial Sequence
  Description of Artificial Sequence: Synthetic oligonucleotide
cccaaggaggggccugggc

SEQ ID NO: 784388 - RNA, 19 nt, Artificial Sequence
  Description of Artificial Sequence: Synthetic oligonucleotide
caucccguucagaccuaaa

SEQ ID NO: 784389 - RNA, 19 nt, Artificial Sequence
  Description of Artificial Sequence: Synthetic oligonucleotide
ccuggaaugcagggugaac

SEQ ID NO: 784390 - RNA, 19 nt, Artificial Sequence
  Description of Artificial Sequence: Synthetic oligonucleotide
cagcuacccgacugcugca

SEQ ID NO: 784391 - RNA, 19 nt, Artificial Sequence
  Description of Artificial Sequence: Synthetic oligonucleotide
gugcuugguaagucuguuu

SEQ ID NO: 784392 - RNA, 19 nt, Artificial Sequence
  Description of Artificial Sequence: Synthetic oligonucleotide
ccacgacugcauguggaac

SEQ ID NO: 784393 - RNA, 19 nt, Artificial Sequence
  Description of Artificial Sequence: Synthetic oligonucleotide
gcucuagcgaaugggauuu

SEQ ID NO: 784394 - RNA, 19 nt, Artificial Sequence
  Description of Artificial Sequence: Synthetic oligonucleotide
gccggagcagggcugccuc

SEQ ID NO: 784395 - RNA, 19 nt, Artificial Sequence
  Description of Artificial Sequence: Synthetic oligonucleotide
acuccccgggaaagaccag

SEQ ID NO: 784396 - RNA, 19 nt, Artificial Sequence
  Description of Artificial Sequence: Synthetic oligonucleotide
ccagcacguccuguuuggg

SEQ ID NO: 784397 - RNA, 19 nt, Artificial Sequence
  Description of Artificial Sequence: Synthetic oligonucleotide
ccucggggacagcuacccg

SEQ ID NO: 784398 - RNA, 19 nt, Artificial Sequence
  Description of Artificial Sequence: Synthetic oligonucleotide
ccaggagcaaggcuagacu

SEQ ID NO: 784399 - RNA, 19 nt, Artificial Sequence
  Description of Artificial Sequence: Synthetic oligonucleotide
cacaugcacacaggcgucu

SEQ ID NO: 784400 - RNA, 19 nt, Artificial Sequence
  Description of Artificial Sequence: Synthetic oligonucleotide
caugcgggcuggaggggcu

SEQ ID NO: 784401 - RNA, 19 nt, Artificial Sequence
  Description of Artificial Sequence: Synthetic oligonucleotide
cugcacucgagagcaccaa

SEQ ID NO: 784402 - RNA, 19 nt, Artificial Sequence
  Description of Artificial Sequence: Synthetic oligonucleotide
gcacacgcuggcaccacga

SEQ ID NO: 784403 - RNA, 19 nt, Artificial Sequence
  Description of Artificial Sequence: Synthetic oligonucleotide
gcggcacuggcucgcucac

SEQ ID NO: 784404 - RNA, 19 nt, Artificial Sequence
  Description of Artificial Sequence: Synthetic oligonucleotide
guccucccucucgaagcca

SEQ ID NO: 784405 - RNA, 19 nt, Artificial Sequence
  Description of Artificial Sequence: Synthetic oligonucleotide
ccacugcuugauggugccg

SEQ ID NO: 784406 - RNA, 19 nt, Artificial Sequence
  Description of Artificial Sequence: Synthetic oligonucleotide
gugaacggggccugcccuu

SEQ ID NO: 784407 - RNA, 19 nt, Artificial Sequence
  Description of Artificial Sequence: Synthetic oligonucleotide
caguggacccgcagcugcu

SEQ ID NO: 784408 - RNA, 19 nt, Artificial Sequence
  Description of Artificial Sequence: Synthetic oligonucleotide
ccaaugccggagcagggcu

SEQ ID NO: 784409 - RNA, 19 nt, Artificial Sequence
  Description of Artificial Sequence: Synthetic oligonucleotide
cugcagcuuuggccuguca

SEQ ID NO: 784410 - RNA, 19 nt, Artificial Sequence
  Description of Artificial Sequence: Synthetic oligonucleotide
ccguuagcuucaucuagcu

SEQ ID NO: 784411 - RNA, 19 nt, Artificial Sequence
  Description of Artificial Sequence: Synthetic oligonucleotide
ccgacugcugcauaucguu

SEQ ID NO: 784412 - RNA, 19 nt, Artificial Sequence
  Description of Artificial Sequence: Synthetic oligonucleotide
gcuacccgacugcugcaua

SEQ ID NO: 784413 - RNA, 19 nt, Artificial Sequence
  Description of Artificial Sequence: Synthetic oligonucleotide
ggacccggcuggguaggac

SEQ ID NO: 784414 - RNA, 19 nt, Artificial Sequence
  Description of Artificial Sequence: Synthetic oligonucleotide
ggacagcuacccgacugcu

SEQ ID NO: 784415 - RNA, 19 nt, Artificial Sequence
  Description of Artificial Sequence: Synthetic oligonucleotide
ugccaccgauugugacguu

SEQ ID NO: 784416 - RNA, 19 nt, Artificial Sequence
  Description of Artificial Sequence: Synthetic oligonucleotide
cgacugcauguggaacacg

SEQ ID NO: 784417 - RNA, 19 nt, Artificial Sequence
  Description of Artificial Sequence: Synthetic oligonucleotide
gggagugggcuagccugca

SEQ ID NO: 784418 - RNA, 19 nt, Artificial Sequence
  Description of Artificial Sequence: Synthetic oligonucleotide
gggcucuagcgaaugggau

SEQ ID NO: 784419 - RNA, 19 nt, Artificial Sequence
  Description of Artificial Sequence: Synthetic oligonucleotide
ccuuucgugcugagcccaa

SEQ ID NO: 784420 - RNA, 19 nt, Artificial Sequence
  Description of Artificial Sequence: Synthetic oligonucleotide
cccgacugcugcauaucgu

SEQ ID NO: 784421 - RNA, 19 nt, Artificial Sequence
  Description of Artificial Sequence: Synthetic oligonucleotide
cccggguaaaauacauauu

SEQ ID NO: 784422 - RNA, 19 nt, Artificial Sequence
  Description of Artificial Sequence: Synthetic oligonucleotide
gcgguucuaugugggcaaa

SEQ ID NO: 784423 - RNA, 19 nt, Artificial Sequence
  Description of Artificial Sequence: Synthetic oligonucleotide
cuggccccacgaagaaguu

SEQ ID NO: 784424 - RNA, 19 nt, Artificial Sequence
  Description of Artificial Sequence: Synthetic oligonucleotide
gugggcuagccugcagcuu

SEQ ID NO: 784425 - RNA, 19 nt, Artificial Sequence
  Description of Artificial Sequence: Synthetic oligonucleotide
ccggcagcagauggcaugu

SEQ ID NO: 784426 - RNA, 19 nt, Artificial Sequence
  Description of Artificial Sequence: Synthetic oligonucleotide
gccccacgaagaaguuaaa

SEQ ID NO: 784427 - RNA, 19 nt, Artificial Sequence
  Description of Artificial Sequence: Synthetic oligonucleotide
cucuagcgaaugggauuuu

SEQ ID NO: 784428 - RNA, 19 nt, Artificial Sequence
  Description of Artificial Sequence: Synthetic oligonucleotide
ccuggcacuugagauucuu

SEQ ID NO: 784429 - RNA, 19 nt, Artificial Sequence
  Description of Artificial Sequence: Synthetic oligonucleotide
caggggcaugcgggcugga

SEQ ID NO: 784430 - RNA, 19 nt, Artificial Sequence
  Description of Artificial Sequence: Synthetic oligonucleotide
ggcccacuggacacccaau

SEQ ID NO: 784431 - RNA, 19 nt, Artificial Sequence
  Description of Artificial Sequence: Synthetic oligonucleotide
ccacugcaucucuguacau

SEQ ID NO: 784432 - RNA, 19 nt, Artificial Sequence
  Description of Artificial Sequence: Synthetic oligonucleotide
cgguucuaugugggcaaaa

SEQ ID NO: 784433 - RNA, 19 nt, Artificial Sequence
  Description of Artificial Sequence: Synthetic oligonucleotide
gcccuccagguuugagguu

SEQ ID NO: 784434 - RNA, 19 nt, Artificial Sequence
  Description of Artificial Sequence: Synthetic oligonucleotide
cccaggagcuaggcugguu

SEQ ID NO: 784435 - RNA, 19 nt, Artificial Sequence
  Description of Artificial Sequence: Synthetic oligonucleotide
gauaagaucuaauaaaucc

SEQ ID NO: 784436 - RNA, 19 nt, Artificial Sequence
  Description of Artificial Sequence: Synthetic oligonucleotide
uuuaguuguaaacagaaug

SEQ ID NO: 784437 - RNA, 19 nt, Artificial Sequence
  Description of Artificial Sequence: Synthetic oligonucleotide
aauucacuaaacuauaagu

SEQ ID NO: 784438 - RNA, 19 nt, Artificial Sequence
  Description of Artificial Sequence: Synthetic oligonucleotide
uuuaagauuaaccucucag

SEQ ID NO: 784439 - RNA, 19 nt, Artificial Sequence
  Description of Artificial Sequence: Synthetic oligonucleotide
aauccuggcaaauucauag

SEQ ID NO: 784440 - RNA, 19 nt, Artificial Sequence
  Description of Artificial Sequence: Synthetic oligonucleotide
aaauggauagaacauaacu

SEQ ID NO: 784441 - RNA, 19 nt, Artificial Sequence
  Description of Artificial Sequence: Synthetic oligonucleotide
ugugcaauagucaccaugg

SEQ ID NO: 784442 - RNA, 19 nt, Artificial Sequence
  Description of Artificial Sequence: Synthetic oligonucleotide
cuaaaccugaauuagaaag

SEQ ID NO: 784443 - RNA, 19 nt, Artificial Sequence
  Description of Artificial Sequence: Synthetic oligonucleotide
ugucuuagagaauacaggg

SEQ ID NO: 784444 - RNA, 19 nt, Artificial Sequence
  Description of Artificial Sequence: Synthetic oligonucleotide
gaauuuaagauguagcaug

SEQ ID NO: 784445 - RNA, 19 nt, Artificial Sequence
  Description of Artificial Sequence: Synthetic oligonucleotide
uaugugauaguuuauauuc

SEQ ID NO: 784446 - RNA, 19 nt, Artificial Sequence
  Description of Artificial Sequence: Synthetic oligonucleotide
uauauuaagcaaauggcug

SEQ ID NO: 784447 - RNA, 19 nt, Artificial Sequence
  Description of Artificial Sequence: Synthetic oligonucleotide
uguuagaucuccaacagug

SEQ ID NO: 784448 - RNA, 19 nt, Artificial Sequence
  Description of Artificial Sequence: Synthetic oligonucleotide
uuaguagaauuuaagaugu

SEQ ID NO: 784449 - RNA, 19 nt, Artificial Sequence
  Description of Artificial Sequence: Synthetic oligonucleotide
uauagguuauguaugaaug

SEQ ID NO: 784450 - RNA, 19 nt, Artificial Sequence
  Description of Artificial Sequence: Synthetic oligonucleotide
aauggauagaacauaacuc

SEQ ID NO: 784451 - RNA, 19 nt, Artificial Sequence
  Description of Artificial Sequence: Synthetic oligonucleotide
uaaugaauaagucaaccac

SEQ ID NO: 784452 - RNA, 19 nt, Artificial Sequence
  Description of Artificial Sequence: Synthetic oligonucleotide
uguuuagugagacucuccg

SEQ ID NO: 784453 - RNA, 19 nt, Artificial Sequence
  Description of Artificial Sequence: Synthetic oligonucleotide
auauuaagcaaauggcugg

SEQ ID NO: 784454 - RNA, 19 nt, Artificial Sequence
  Description of Artificial Sequence: Synthetic oligonucleotide
acaucaugcacuugaaggc

SEQ ID NO: 784455 - RNA, 19 nt, Artificial Sequence
  Description of Artificial Sequence: Synthetic oligonucleotide
agaauguuuagugagacuc

SEQ ID NO: 784456 - RNA, 19 nt, Artificial Sequence
  Description of Artificial Sequence: Synthetic oligonucleotide
agaucuaauaaauccuggc

SEQ ID NO: 784457 - RNA, 19 nt, Artificial Sequence
  Description of Artificial Sequence: Synthetic oligonucleotide
aaagcuaaacaauccaugu

SEQ ID NO: 784458 - RNA, 19 nt, Artificial Sequence
  Description of Artificial Sequence: Synthetic oligonucleotide
aagucuguaauaaugacug

SEQ ID NO: 784459 - RNA, 19 nt, Artificial Sequence
  Description of Artificial Sequence: Synthetic oligonucleotide
auaacuagcaaguuacaag

SEQ ID NO: 784460 - RNA, 19 nt, Artificial Sequence
  Description of Artificial Sequence: Synthetic oligonucleotide
uuacacugcgauaagaucu

SEQ ID NO: 784461 - RNA, 19 nt, Artificial Sequence
  Description of Artificial Sequence: Synthetic oligonucleotide
uacauauuuaggcagcuug

SEQ ID NO: 784462 - RNA, 19 nt, Artificial Sequence
  Description of Artificial Sequence: Synthetic oligonucleotide
uuaagauuaaccucucagc

SEQ ID NO: 784463 - RNA, 19 nt, Artificial Sequence
  Description of Artificial Sequence: Synthetic oligonucleotide
acuauaagugaaaauagac

SEQ ID NO: 784464 - RNA, 19 nt, Artificial Sequence
  Description of Artificial Sequence: Synthetic oligonucleotide
aaguugaucucugacuugc

SEQ ID NO: 784465 - RNA, 19 nt, Artificial Sequence
  Description of Artificial Sequence: Synthetic oligonucleotide
uaacuagcaaguuacaaga

SEQ ID NO: 784466 - RNA, 19 nt, Artificial Sequence
  Description of Artificial Sequence: Synthetic oligonucleotide
aaugcauaaauugaaggcu

SEQ ID NO: 784467 - RNA, 19 nt, Artificial Sequence
  Description of Artificial Sequence: Synthetic oligonucleotide
aauucaauaauuauguguu

SEQ ID NO: 784468 - RNA, 19 nt, Artificial Sequence
  Description of Artificial Sequence: Synthetic oligonucleotide
uucacuaaacuauaaguga

SEQ ID NO: 784469 - RNA, 19 nt, Artificial Sequence
  Description of Artificial Sequence: Synthetic oligonucleotide
aaaugcugagcgcuacucc

SEQ ID NO: 784470 - RNA, 19 nt, Artificial Sequence
  Description of Artificial Sequence: Synthetic oligonucleotide
aagauuaaccucucagcuc

SEQ ID NO: 784471 - RNA, 19 nt, Artificial Sequence
  Description of Artificial Sequence: Synthetic oligonucleotide
aauguuacgucuggaaacg

SEQ ID NO: 784472 - RNA, 19 nt, Artificial Sequence
  Description of Artificial Sequence: Synthetic oligonucleotide
auaacuauuuguuucacaa

SEQ ID NO: 784473 - RNA, 19 nt, Artificial Sequence
  Description of Artificial Sequence: Synthetic oligonucleotide
uguguuagaauucacuaaa

SEQ ID NO: 784474 - RNA, 19 nt, Artificial Sequence
  Description of Artificial Sequence: Synthetic oligonucleotide
uauagguagauguauauua

SEQ ID NO: 784475 - RNA, 19 nt, Artificial Sequence
  Description of Artificial Sequence: Synthetic oligonucleotide
aacguuugguagcuuacac

SEQ ID NO: 784476 - RNA, 19 nt, Artificial Sequence
  Description of Artificial Sequence: Synthetic oligonucleotide
aacauaacgcacuucauuu

SEQ ID NO: 784477 - RNA, 19 nt, Artificial Sequence
  Description of Artificial Sequence: Synthetic oligonucleotide
auggauagaacauaacuca

SEQ ID NO: 784478 - RNA, 19 nt, Artificial Sequence
  Description of Artificial Sequence: Synthetic oligonucleotide
uugaguaaccugcugugcg

SEQ ID NO: 784479 - RNA, 19 nt, Artificial Sequence
  Description of Artificial Sequence: Synthetic oligonucleotide
gaauucacuaaacuauaag

SEQ ID NO: 784480 - RNA, 19 nt, Artificial Sequence
  Description of Artificial Sequence: Synthetic oligonucleotide
aauugaacaguuaacauua

SEQ ID NO: 784481 - RNA, 19 nt, Artificial Sequence
  Description of Artificial Sequence: Synthetic oligonucleotide
aaacuguauucauaacuag

SEQ ID NO: 784482 - RNA, 19 nt, Artificial Sequence
  Description of Artificial Sequence: Synthetic oligonucleotide
caugguuaugcuaauuagg

SEQ ID NO: 784483 - RNA, 19 nt, Artificial Sequence
  Description of Artificial Sequence: Synthetic oligonucleotide
ugagaaaccaaaauaccaa

SEQ ID NO: 784484 - RNA, 19 nt, Artificial Sequence
  Description of Artificial Sequence: Synthetic oligonucleotide
agauuaaccucucagcucu

SEQ ID NO: 784485 - RNA, 19 nt, Artificial Sequence
  Description of Artificial Sequence: Synthetic oligonucleotide
uuauauucaacuuggguuu

SEQ ID NO: 784486 - RNA, 19 nt, Artificial Sequence
  Description of Artificial Sequence: Synthetic oligonucleotide
ugcgauaagaucuaauaaa

SEQ ID NO: 784487 - RNA, 19 nt, Artificial Sequence
  Description of Artificial Sequence: Synthetic oligonucleotide
agacuuaccaauaacacug

SEQ ID NO: 784488 - RNA, 19 nt, Artificial Sequence
  Description of Artificial Sequence: Synthetic oligonucleotide
agguagauguauauuaagc

SEQ ID NO: 784489 - RNA, 19 nt, Artificial Sequence
  Description of Artificial Sequence: Synthetic oligonucleotide
uagauguauauuaagcaaa

SEQ ID NO: 784490 - RNA, 19 nt, Artificial Sequence
  Description of Artificial Sequence: Synthetic oligonucleotide
uucgaauacuuuuauuuca

SEQ ID NO: 784491 - RNA, 19 nt, Artificial Sequence
  Description of Artificial Sequence: Synthetic oligonucleotide
uguacauaagugagugggg

SEQ ID NO: 784492 - RNA, 19 nt, Artificial Sequence
  Description of Artificial Sequence: Synthetic oligonucleotide
uauguguuagaauucacua

SEQ ID NO: 784493 - RNA, 19 nt, Artificial Sequence
  Description of Artificial Sequence: Synthetic oligonucleotide
agcgagaauguuuagugag

SEQ ID NO: 784494 - RNA, 19 nt, Artificial Sequence
  Description of Artificial Sequence: Synthetic oligonucleotide
ugacaauagcacuaaaccu

SEQ ID NO: 784495 - RNA, 19 nt, Artificial Sequence
  Description of Artificial Sequence: Synthetic oligonucleotide
uaacauuaccaugagaaac

SEQ ID NO: 784496 - RNA, 19 nt, Artificial Sequence
  Description of Artificial Sequence: Synthetic oligonucleotide
uacagcuuugccauggaug

SEQ ID NO: 784497 - RNA, 19 nt, Artificial Sequence
  Description of Artificial Sequence: Synthetic oligonucleotide
uaagucaaccacauuuuca

SEQ ID NO: 784498 - RNA, 19 nt, Artificial Sequence
  Description of Artificial Sequence: Synthetic oligonucleotide
auauuuaggcagcuugcac

SEQ ID NO: 784499 - RNA, 19 nt, Artificial Sequence
  Description of Artificial Sequence: Synthetic oligonucleotide
ucacuaaacuauaagugaa

SEQ ID NO: 784500 - RNA, 19 nt, Artificial Sequence
  Description of Artificial Sequence: Synthetic oligonucleotide
agauguagcaugugguuuc

SEQ ID NO: 784501 - RNA, 19 nt, Artificial Sequence
  Description of Artificial Sequence: Synthetic oligonucleotide
gguaugacuaaguggagcg

SEQ ID NO: 784502 - RNA, 19 nt, Artificial Sequence
  Description of Artificial Sequence: Synthetic oligonucleotide
auucacuaaacuauaagug

SEQ ID NO: 784503 - RNA, 19 nt, Artificial Sequence
  Description of Artificial Sequence: Synthetic oligonucleotide
aagaguaacacugugccaa

SEQ ID NO: 784504 - RNA, 19 nt, Artificial Sequence
  Description of Artificial Sequence: Synthetic oligonucleotide
cauggcauuaacagcagag

SEQ ID NO: 784505 - RNA, 19 nt, Artificial Sequence
  Description of Artificial Sequence: Synthetic oligonucleotide
ugcaaaaucugugaaguca

SEQ ID NO: 784506 - RNA, 19 nt, Artificial Sequence
  Description of Artificial Sequence: Synthetic oligonucleotide
ucuaauaaauccuggcaaa

SEQ ID NO: 784507 - RNA, 19 nt, Artificial Sequence
  Description of Artificial Sequence: Synthetic oligonucleotide
ugguaaaaggccaaugaaa

SEQ ID NO: 784508 - RNA, 19 nt, Artificial Sequence
  Description of Artificial Sequence: Synthetic oligonucleotide
uuuagugagacucuccguu

SEQ ID NO: 784509 - RNA, 19 nt, Artificial Sequence
  Description of Artificial Sequence: Synthetic oligonucleotide
acuguuagaucuccaacag

SEQ ID NO: 784510 - RNA, 19 nt, Artificial Sequence
  Description of Artificial Sequence: Synthetic oligonucleotide
ugaucucugacuugcauac

SEQ ID NO: 784511 - RNA, 19 nt, Artificial Sequence
  Description of Artificial Sequence: Synthetic oligonucleotide
agaaguccccuauagguag

SEQ ID NO: 784512 - RNA, 19 nt, Artificial Sequence
  Description of Artificial Sequence: Synthetic oligonucleotide
aauagcacuaaaccugaau

SEQ ID NO: 784513 - RNA, 19 nt, Artificial Sequence
  Description of Artificial Sequence: Synthetic oligonucleotide
gaauaagucaaccacauuu

SEQ ID NO: 784514 - RNA, 19 nt, Artificial Sequence
  Description of Artificial Sequence: Synthetic oligonucleotide
guagaauuuaagauguagc

SEQ ID NO: 784515 - RNA, 19 nt, Artificial Sequence
  Description of Artificial Sequence: Synthetic oligonucleotide
uuaagaaaauccuguugca

SEQ ID NO: 784516 - RNA, 19 nt, Artificial Sequence
  Description of Artificial Sequence: Synthetic oligonucleotide
auagcacuaaaccugaauu

SEQ ID NO: 784517 - RNA, 19 nt, Artificial Sequence
  Description of Artificial Sequence: Synthetic oligonucleotide
ucuuaugucuuagagaaua

SEQ ID NO: 784518 - RNA, 19 nt, Artificial Sequence
  Description of Artificial Sequence: Synthetic oligonucleotide
acgcacuucauuuaguugu

SEQ ID NO: 784519 - RNA, 19 nt, Artificial Sequence
  Description of Artificial Sequence: Synthetic oligonucleotide
ugucuaugacccuggauag

SEQ ID NO: 784520 - RNA, 19 nt, Artificial Sequence
  Description of Artificial Sequence: Synthetic oligonucleotide
gguaauuguacauaaguga

SEQ ID NO: 784521 - RNA, 19 nt, Artificial Sequence
  Description of Artificial Sequence: Synthetic oligonucleotide
agaccaaaauguuacgucu

SEQ ID NO: 784522 - RNA, 19 nt, Artificial Sequence
  Description of Artificial Sequence: Synthetic oligonucleotide
aacagugauacacuaucau

SEQ ID NO: 784523 - RNA, 19 nt, Artificial Sequence
  Description of Artificial Sequence: Synthetic oligonucleotide
agcuaaacaauccauguuu

SEQ ID NO: 784524 - RNA, 19 nt, Artificial Sequence
  Description of Artificial Sequence: Synthetic oligonucleotide
cauuaagaaaauccuguug

SEQ ID NO: 784525 - RNA, 19 nt, Artificial Sequence
  Description of Artificial Sequence: Synthetic oligonucleotide
aaaccugaauuagaaagcu

SEQ ID NO: 784526 - RNA, 19 nt, Artificial Sequence
  Description of Artificial Sequence: Synthetic oligonucleotide
aauuuaagauguagcaugu

SEQ ID NO: 784527 - RNA, 19 nt, Artificial Sequence
  Description of Artificial Sequence: Synthetic oligonucleotide
uuacaagaguaacacugug

SEQ ID NO: 784528 - RNA, 19 nt, Artificial Sequence
  Description of Artificial Sequence: Synthetic oligonucleotide
gagaauucaauaauuaugu

SEQ ID NO: 784529 - RNA, 19 nt, Artificial Sequence
  Description of Artificial Sequence: Synthetic oligonucleotide
acauauuuaggcagcuugc

SEQ ID NO: 784530 - RNA, 19 nt, Artificial Sequence
  Description of Artificial Sequence: Synthetic oligonucleotide
uguugaguaaccugcugug

SEQ ID NO: 784531 - RNA, 19 nt, Artificial Sequence
  Description of Artificial Sequence: Synthetic oligonucleotide
gacuguuagaucuccaaca

SEQ ID NO: 784532 - RNA, 19 nt, Artificial Sequence
  Description of Artificial Sequence: Synthetic oligonucleotide
auagguuauguaugaaugu

SEQ ID NO: 784533 - RNA, 19 nt, Artificial Sequence
  Description of Artificial Sequence: Synthetic oligonucleotide
auaagaucuaauaaauccu

SEQ ID NO: 784534 - RNA, 19 nt, Artificial Sequence
  Description of Artificial Sequence: Synthetic oligonucleotide
uugguaaaaggccaaugaa

SEQ ID NO: 784535 - RNA, 19 nt, Artificial Sequence
  Description of Artificial Sequence: Synthetic oligonucleotide
uaugacuaaguggagcgag

SEQ ID NO: 784536 - RNA, 19 nt, Artificial Sequence
  Description of Artificial Sequence: Synthetic oligonucleotide
cauaacgcacuucauuuag

SEQ ID NO: 784537 - RNA, 19 nt, Artificial Sequence
  Description of Artificial Sequence: Synthetic oligonucleotide
accaugagaaaccaaaaua

SEQ ID NO: 784538 - RNA, 19 nt, Artificial Sequence
  Description of Artificial Sequence: Synthetic oligonucleotide
caaacuguugaguaaccug

SEQ ID NO: 784539 - RNA, 19 nt, Artificial Sequence
  Description of Artificial Sequence: Synthetic oligonucleotide
agcaaguuacaagaguaac

SEQ ID NO: 784540 - RNA, 19 nt, Artificial Sequence
  Description of Artificial Sequence: Synthetic oligonucleotide
ugauauugauaaaugcaua

SEQ ID NO: 784541 - RNA, 19 nt, Artificial Sequence
  Description of Artificial Sequence: Synthetic oligonucleotide
uccuauuuaaccacaccaa

SEQ ID NO: 784542 - RNA, 19 nt, Artificial Sequence
  Description of Artificial Sequence: Synthetic oligonucleotide
uagguuauguaugaaugug

SEQ ID NO: 784543 - RNA, 19 nt, Artificial Sequence
  Description of Artificial Sequence: Synthetic oligonucleotide
aacgcacuucauuuaguug

SEQ ID NO: 784544 - RNA, 19 nt, Artificial Sequence
  Description of Artificial Sequence: Synthetic oligonucleotide
acugcauaaugaauaaguc

SEQ ID NO: 784545 - RNA, 19 nt, Artificial Sequence
  Description of Artificial Sequence: Synthetic oligonucleotide
aaaaguuacugcaauugaa

SEQ ID NO: 784546 - RNA, 19 nt, Artificial Sequence
  Description of Artificial Sequence: Synthetic oligonucleotide
gacaggucgagguuuccgg

SEQ ID NO: 784547 - RNA, 19 nt, Artificial Sequence
  Description of Artificial Sequence: Synthetic oligonucleotide
aauacauauuuaggcagcu

SEQ ID NO: 784548 - RNA, 19 nt, Artificial Sequence
  Description of Artificial Sequence: Synthetic oligonucleotide
aaccauuaagaaaauccug

SEQ ID NO: 784549 - RNA, 19 nt, Artificial Sequence
  Description of Artificial Sequence: Synthetic oligonucleotide
agguaugacuaaguggagc

SEQ ID NO: 784550 - RNA, 19 nt, Artificial Sequence
  Description of Artificial Sequence: Synthetic oligonucleotide
agaauucaauaauuaugug

SEQ ID NO: 784551 - RNA, 19 nt, Artificial Sequence
  Description of Artificial Sequence: Synthetic oligonucleotide
ugugcgaccagcugggaga

SEQ ID NO: 784552 - RNA, 19 nt, Artificial Sequence
  Description of Artificial Sequence: Synthetic oligonucleotide
gagaccaaaauguuacguc

SEQ ID NO: 784553 - RNA, 19 nt, Artificial Sequence
  Description of Artificial Sequence: Synthetic oligonucleotide
uagaauucacuaaacuaua

SEQ ID NO: 784554 - RNA, 19 nt, Artificial Sequence
  Description of Artificial Sequence: Synthetic oligonucleotide
cugagcgcuacuccgaucc

SEQ ID NO: 784555 - RNA, 19 nt, Artificial Sequence
  Description of Artificial Sequence: Synthetic oligonucleotide
uuaugugauaguuuauauu

SEQ ID NO: 784556 - RNA, 19 nt, Artificial Sequence
  Description of Artificial Sequence: Synthetic oligonucleotide
cugaauuagaaagcuaaac

SEQ ID NO: 784557 - RNA, 19 nt, Artificial Sequence
  Description of Artificial Sequence: Synthetic oligonucleotide
accauuaagaaaauccugu

SEQ ID NO: 784558 - RNA, 19 nt, Artificial Sequence
  Description of Artificial Sequence: Synthetic oligonucleotide
ugcuaauuagguucacaug

SEQ ID NO: 784559 - RNA, 19 nt, Artificial Sequence
  Description of Artificial Sequence: Synthetic oligonucleotide
ucgaauacuuuuauuucau

SEQ ID NO: 784560 - RNA, 19 nt, Artificial Sequence
  Description of Artificial Sequence: Synthetic oligonucleotide
cauuggcgaaguuucauac

SEQ ID NO: 784561 - RNA, 19 nt, Artificial Sequence
  Description of Artificial Sequence: Synthetic oligonucleotide
agguucacaugucuaugac

SEQ ID NO: 784562 - RNA, 19 nt, Artificial Sequence
  Description of Artificial Sequence: Synthetic oligonucleotide
ugacuguuagaucuccaac

SEQ ID NO: 784563 - RNA, 19 nt, Artificial Sequence
  Description of Artificial Sequence: Synthetic oligonucleotide
ucuaugacccuggauaggu

SEQ ID NO: 784564 - RNA, 19 nt, Artificial Sequence
  Description of Artificial Sequence: Synthetic oligonucleotide
uacauauaacuauuuguuu

SEQ ID NO: 784565 - RNA, 19 nt, Artificial Sequence
  Description of Artificial Sequence: Synthetic oligonucleotide
auucauaacuagcaaguua

SEQ ID NO: 784566 - RNA, 19 nt, Artificial Sequence
  Description of Artificial Sequence: Synthetic oligonucleotide
ugcuaguaaacauuacaau

SEQ ID NO: 784567 - RNA, 19 nt, Artificial Sequence
  Description of Artificial Sequence: Synthetic oligonucleotide
agcaauaguugauuaaguu

SEQ ID NO: 784568 - RNA, 19 nt, Artificial Sequence
  Description of Artificial Sequence: Synthetic oligonucleotide
augguuaugcuaauuaggu

SEQ ID NO: 784569 - RNA, 19 nt, Artificial Sequence
  Description of Artificial Sequence: Synthetic oligonucleotide
aguaacacugugccaauaa

SEQ ID NO: 784570 - RNA, 19 nt, Artificial Sequence
  Description of Artificial Sequence: Synthetic oligonucleotide
uaugaaugugucugucaug

SEQ ID NO: 784571 - RNA, 19 nt, Artificial Sequence
  Description of Artificial Sequence: Synthetic oligonucleotide
uuacgucuggaaacguuug

SEQ ID NO: 784572 - RNA, 19 nt, Artificial Sequence
  Description of Artificial Sequence: Synthetic oligonucleotide
cuuacacugcgauaagauc

SEQ ID NO: 784573 - RNA, 19 nt, Artificial Sequence
  Description of Artificial Sequence: Synthetic oligonucleotide
guagcuuacacugcgauaa

SEQ ID NO: 784574 - RNA, 19 nt, Artificial Sequence
  Description of Artificial Sequence: Synthetic oligonucleotide
ugcauaaauugaaggcugu

SEQ ID NO: 784575 - RNA, 19 nt, Artificial Sequence
  Description of Artificial Sequence: Synthetic oligonucleotide
aagcuaaacaauccauguu

SEQ ID NO: 784576 - RNA, 19 nt, Artificial Sequence
  Description of Artificial Sequence: Synthetic oligonucleotide
cuaauuagguucacauguc

SEQ ID NO: 784577 - RNA, 19 nt, Artificial Sequence
  Description of Artificial Sequence: Synthetic oligonucleotide
ugcaauagucaccaugguu

SEQ ID NO: 784578 - RNA, 19 nt, Artificial Sequence
  Description of Artificial Sequence: Synthetic oligonucleotide
agugauacacuaucauuaa

SEQ ID NO: 784579 - RNA, 19 nt, Artificial Sequence
  Description of Artificial Sequence: Synthetic oligonucleotide
auaguugauuaaguugauc

SEQ ID NO: 784580 - RNA, 19 nt, Artificial Sequence
  Description of Artificial Sequence: Synthetic oligonucleotide
gauguauauuaagcaaaug

SEQ ID NO: 784581 - RNA, 19 nt, Artificial Sequence
  Description of Artificial Sequence: Synthetic oligonucleotide
aguaaccugcugugcgacc

SEQ ID NO: 784582 - RNA, 19 nt, Artificial Sequence
  Description of Artificial Sequence: Synthetic oligonucleotide
guacauaagugaguggggc

SEQ ID NO: 784583 - RNA, 19 nt, Artificial Sequence
  Description of Artificial Sequence: Synthetic oligonucleotide
uauuaagcaaauggcugga

SEQ ID NO: 784584 - RNA, 19 nt, Artificial Sequence
  Description of Artificial Sequence: Synthetic oligonucleotide
gcuaauuagguucacaugu

SEQ ID NO: 784585 - RNA, 19 nt, Artificial Sequence
  Description of Artificial Sequence: Synthetic oligonucleotide
agaugcuuauccuucuuau

SEQ ID NO: 784586 - RNA, 19 nt, Artificial Sequence
  Description of Artificial Sequence: Synthetic oligonucleotide
augcaaaaucugugaaguc

SEQ ID NO: 784587 - RNA, 19 nt, Artificial Sequence
  Description of Artificial Sequence: Synthetic oligonucleotide
aacuagcaaguuacaagag

SEQ ID NO: 784588 - RNA, 19 nt, Artificial Sequence
  Description of Artificial Sequence: Synthetic oligonucleotide
uuccuucuauguuaucaug

SEQ ID NO: 784589 - RNA, 19 nt, Artificial Sequence
  Description of Artificial Sequence: Synthetic oligonucleotide
ugaguaaccugcugugcga

SEQ ID NO: 784590 - RNA, 19 nt, Artificial Sequence
  Description of Artificial Sequence: Synthetic oligonucleotide
aaacagugauacacuauca

SEQ ID NO: 784591 - RNA, 19 nt, Artificial Sequence
  Description of Artificial Sequence: Synthetic oligonucleotide
gauagguuuggaacaagga

SEQ ID NO: 784592 - RNA, 19 nt, Artificial Sequence
  Description of Artificial Sequence: Synthetic oligonucleotide
uguugcagcaauaguugau

SEQ ID NO: 784593 - RNA, 19 nt, Artificial Sequence
  Description of Artificial Sequence: Synthetic oligonucleotide
accugaauuagaaagcuaa

SEQ ID NO: 784594 - RNA, 19 nt, Artificial Sequence
  Description of Artificial Sequence: Synthetic oligonucleotide
cugcuaguaaacauuacaa

SEQ ID NO: 784595 - RNA, 19 nt, Artificial Sequence
  Description of Artificial Sequence: Synthetic oligonucleotide
gugcauuaagaggauaacc

SEQ ID NO: 784596 - RNA, 19 nt, Artificial Sequence
  Description of Artificial Sequence: Synthetic oligonucleotide
gugauacacuaucauuaag

SEQ ID NO: 784597 - RNA, 19 nt, Artificial Sequence
  Description of Artificial Sequence: Synthetic oligonucleotide
uagcaaguuacaagaguaa

SEQ ID NO: 784598 - RNA, 19 nt, Artificial Sequence
  Description of Artificial Sequence: Synthetic oligonucleotide
acuaaaccugaauuagaaa

SEQ ID NO: 784599 - RNA, 19 nt, Artificial Sequence
  Description of Artificial Sequence: Synthetic oligonucleotide
auacacuaucauuaaguua

SEQ ID NO: 784600 - RNA, 19 nt, Artificial Sequence
  Description of Artificial Sequence: Synthetic oligonucleotide
uaacgcacuucauuuaguu

SEQ ID NO: 784601 - RNA, 19 nt, Artificial Sequence
  Description of Artificial Sequence: Synthetic oligonucleotide
caucaugcacuugaaggcc

SEQ ID NO: 784602 - RNA, 19 nt, Artificial Sequence
  Description of Artificial Sequence: Synthetic oligonucleotide
agagaccaaaauguuacgu

SEQ ID NO: 784603 - RNA, 19 nt, Artificial Sequence
  Description of Artificial Sequence: Synthetic oligonucleotide
auuuaggcagcuugcacua

SEQ ID NO: 784604 - RNA, 19 nt, Artificial Sequence
  Description of Artificial Sequence: Synthetic oligonucleotide
uaugacccuggauagguuu

SEQ ID NO: 784605 - RNA, 19 nt, Artificial Sequence
  Description of Artificial Sequence: Synthetic oligonucleotide
cacuaaaccugaauuagaa

SEQ ID NO: 784606 - RNA, 19 nt, Artificial Sequence
  Description of Artificial Sequence: Synthetic oligonucleotide
gauacacuaucauuaaguu

SEQ ID NO: 784607 - RNA, 19 nt, Artificial Sequence
  Description of Artificial Sequence: Synthetic oligonucleotide
aaacguuugguagcuuaca

SEQ ID NO: 784608 - RNA, 19 nt, Artificial Sequence
  Description of Artificial Sequence: Synthetic oligonucleotide
uccauguuuuauuguuuac

SEQ ID NO: 784609 - RNA, 19 nt, Artificial Sequence
  Description of Artificial Sequence: Synthetic oligonucleotide
uauguuaucauggcaucuu

SEQ ID NO: 784610 - RNA, 19 nt, Artificial Sequence
  Description of Artificial Sequence: Synthetic oligonucleotide
cacugcauaaugaauaagu

SEQ ID NO: 784611 - RNA, 19 nt, Artificial Sequence
  Description of Artificial Sequence: Synthetic oligonucleotide
agaauacagggaaaaccag

SEQ ID NO: 784612 - RNA, 19 nt, Artificial Sequence
  Description of Artificial Sequence: Synthetic oligonucleotide
auuggcgaaguuucauaca

SEQ ID NO: 784613 - RNA, 19 nt, Artificial Sequence
  Description of Artificial Sequence: Synthetic oligonucleotide
guagcccucauccgaggcg

SEQ ID NO: 784614 - RNA, 19 nt, Artificial Sequence
  Description of Artificial Sequence: Synthetic oligonucleotide
cagagaccaaaauguuacg

SEQ ID NO: 784615 - RNA, 19 nt, Artificial Sequence
  Description of Artificial Sequence: Synthetic oligonucleotide
gaaacguuugguagcuuac

SEQ ID NO: 784616 - RNA, 19 nt, Artificial Sequence
  Description of Artificial Sequence: Synthetic oligonucleotide
gaccaaaauguuacgucug

SEQ ID NO: 784617 - RNA, 19 nt, Artificial Sequence
  Description of Artificial Sequence: Synthetic oligonucleotide
ggauagguuuggaacaagg

SEQ ID NO: 784618 - RNA, 19 nt, Artificial Sequence
  Description of Artificial Sequence: Synthetic oligonucleotide
agugaguggggcuucgaau

SEQ ID NO: 784619 - RNA, 19 nt, Artificial Sequence
  Description of Artificial Sequence: Synthetic oligonucleotide
gguucacaugucuaugacc

SEQ ID NO: 784620 - RNA, 19 nt, Artificial Sequence
  Description of Artificial Sequence: Synthetic oligonucleotide
gguauuugguaaaaggcca

SEQ ID NO: 784621 - RNA, 19 nt, Artificial Sequence
  Description of Artificial Sequence: Synthetic oligonucleotide
agauguauauuaagcaaau

SEQ ID NO: 784622 - RNA, 19 nt, Artificial Sequence
  Description of Artificial Sequence: Synthetic oligonucleotide
cuauuuaaccacaccaagu

SEQ ID NO: 784623 - RNA, 19 nt, Artificial Sequence
  Description of Artificial Sequence: Synthetic oligonucleotide
uggggcuucgaauacuuuu

SEQ ID NO: 784624 - RNA, 19 nt, Artificial Sequence
  Description of Artificial Sequence: Synthetic oligonucleotide
auuaagcaaauggcuggag

SEQ ID NO: 784625 - RNA, 19 nt, Artificial Sequence
  Description of Artificial Sequence: Synthetic oligonucleotide
caguuaacauuaccaugag

SEQ ID NO: 784626 - RNA, 19 nt, Artificial Sequence
  Description of Artificial Sequence: Synthetic oligonucleotide
auaagugaaaauagacuua

SEQ ID NO: 784627 - RNA, 19 nt, Artificial Sequence
  Description of Artificial Sequence: Synthetic oligonucleotide
auagguagauguauauuaa

SEQ ID NO: 784628 - RNA, 19 nt, Artificial Sequence
  Description of Artificial Sequence: Synthetic oligonucleotide
gacuuaccaauaacacugc

SEQ ID NO: 784629 - RNA, 19 nt, Artificial Sequence
  Description of Artificial Sequence: Synthetic oligonucleotide
uggaugcuggcgcugacuu

SEQ ID NO: 784630 - RNA, 19 nt, Artificial Sequence
  Description of Artificial Sequence: Synthetic oligonucleotide
agcuuugccauggauggca

SEQ ID NO: 784631 - RNA, 19 nt, Artificial Sequence
  Description of Artificial Sequence: Synthetic oligonucleotide
aaccaguguucaaugacaa

SEQ ID NO: 784632 - RNA, 19 nt, Artificial Sequence
  Description of Artificial Sequence: Synthetic oligonucleotide
ugcuaguugcuuccuuuuc

SEQ ID NO: 784633 - RNA, 19 nt, Artificial Sequence
  Description of Artificial Sequence: Synthetic oligonucleotide
ugccaauaguagagaauuc

SEQ ID NO: 784634 - RNA, 19 nt, Artificial Sequence
  Description of Artificial Sequence: Synthetic oligonucleotide
ccaugguuaugcuaauuag

SEQ ID NO: 784635 - RNA, 19 nt, Artificial Sequence
  Description of Artificial Sequence: Synthetic oligonucleotide
uagcuuacacugcgauaag

SEQ ID NO: 784636 - RNA, 19 nt, Artificial Sequence
  Description of Artificial Sequence: Synthetic oligonucleotide
ggacagguaugacuaagug

SEQ ID NO: 784637 - RNA, 19 nt, Artificial Sequence
  Description of Artificial Sequence: Synthetic oligonucleotide
ugacuaaguggagcgagaa

SEQ ID NO: 784638 - RNA, 19 nt, Artificial Sequence
  Description of Artificial Sequence: Synthetic oligonucleotide
ugguuaugcuaauuagguu

SEQ ID NO: 784639 - RNA, 19 nt, Artificial Sequence
  Description of Artificial Sequence: Synthetic oligonucleotide
guugaguaaccugcugugc

SEQ ID NO: 784640 - RNA, 19 nt, Artificial Sequence
  Description of Artificial Sequence: Synthetic oligonucleotide
acauuggcgaaguuucaua

SEQ ID NO: 784641 - RNA, 19 nt, Artificial Sequence
  Description of Artificial Sequence: Synthetic oligonucleotide
aggagauuuaguagaauuu

SEQ ID NO: 784642 - RNA, 19 nt, Artificial Sequence
  Description of Artificial Sequence: Synthetic oligonucleotide
acauaacgcacuucauuua

SEQ ID NO: 784643 - RNA, 19 nt, Artificial Sequence
  Description of Artificial Sequence: Synthetic oligonucleotide
aguggagcgagaauguuua

SEQ ID NO: 784644 - RNA, 19 nt, Artificial Sequence
  Description of Artificial Sequence: Synthetic oligonucleotide
guccccuauagguagaugu

SEQ ID NO: 784645 - RNA, 19 nt, Artificial Sequence
  Description of Artificial Sequence: Synthetic oligonucleotide
guaugaaugugucugucau

SEQ ID NO: 784646 - RNA, 19 nt, Artificial Sequence
  Description of Artificial Sequence: Synthetic oligonucleotide
uccccuauagguagaugua

SEQ ID NO: 784647 - RNA, 19 nt, Artificial Sequence
  Description of Artificial Sequence: Synthetic oligonucleotide
uccgaggcgggcuucggcu

SEQ ID NO: 784648 - RNA, 19 nt, Artificial Sequence
  Description of Artificial Sequence: Synthetic oligonucleotide
cauaacuagcaaguuacaa

SEQ ID NO: 784649 - RNA, 19 nt, Artificial Sequence
  Description of Artificial Sequence: Synthetic oligonucleotide
aucaaauuucaggguccac

SEQ ID NO: 784650 - RNA, 19 nt, Artificial Sequence
  Description of Artificial Sequence: Synthetic oligonucleotide
guaaaaggccaaugaaacu

SEQ ID NO: 784651 - RNA, 19 nt, Artificial Sequence
  Description of Artificial Sequence: Synthetic oligonucleotide
agaauucacuaaacuauaa

SEQ ID NO: 784652 - RNA, 19 nt, Artificial Sequence
  Description of Artificial Sequence: Synthetic oligonucleotide
auuauagguuauguaugaa

SEQ ID NO: 784653 - RNA, 19 nt, Artificial Sequence
  Description of Artificial Sequence: Synthetic oligonucleotide
cccuggauagguuuggaac

SEQ ID NO: 784654 - RNA, 19 nt, Artificial Sequence
  Description of Artificial Sequence: Synthetic oligonucleotide
aggucgagguuuccgggug

SEQ ID NO: 784655 - RNA, 19 nt, Artificial Sequence
  Description of Artificial Sequence: Synthetic oligonucleotide
aggugcauuaagaggauaa

SEQ ID NO: 784656 - RNA, 19 nt, Artificial Sequence
  Description of Artificial Sequence: Synthetic oligonucleotide
acacugcauaaugaauaag

SEQ ID NO: 784657 - RNA, 19 nt, Artificial Sequence
  Description of Artificial Sequence: Synthetic oligonucleotide
guuugguagcuuacacugc

SEQ ID NO: 784658 - RNA, 19 nt, Artificial Sequence
  Description of Artificial Sequence: Synthetic oligonucleotide
uaauaacaacuuuccuauu

SEQ ID NO: 784659 - RNA, 19 nt, Artificial Sequence
  Description of Artificial Sequence: Synthetic oligonucleotide
agcacuggaugcuggcgcu

SEQ ID NO: 784660 - RNA, 19 nt, Artificial Sequence
  Description of Artificial Sequence: Synthetic oligonucleotide
aaauccuggcaaauucaua

SEQ ID NO: 784661 - RNA, 19 nt, Artificial Sequence
  Description of Artificial Sequence: Synthetic oligonucleotide
guuagaucuccaacaguga

SEQ ID NO: 784662 - RNA, 19 nt, Artificial Sequence
  Description of Artificial Sequence: Synthetic oligonucleotide
caauaguagagaauucaau

SEQ ID NO: 784663 - RNA, 19 nt, Artificial Sequence
  Description of Artificial Sequence: Synthetic oligonucleotide
gccaauaguagagaauuca

SEQ ID NO: 784664 - RNA, 19 nt, Artificial Sequence
  Description of Artificial Sequence: Synthetic oligonucleotide
acgucuggaaacguuuggu

SEQ ID NO: 784665 - RNA, 19 nt, Artificial Sequence
  Description of Artificial Sequence: Synthetic oligonucleotide
uuccaaaugcugagcgcua

SEQ ID NO: 784666 - RNA, 19 nt, Artificial Sequence
  Description of Artificial Sequence: Synthetic oligonucleotide
gaguaaccugcugugcgac

SEQ ID NO: 784667 - RNA, 19 nt, Artificial Sequence
  Description of Artificial Sequence: Synthetic oligonucleotide
agcuuacacugcgauaaga

SEQ ID NO: 784668 - RNA, 19 nt, Artificial Sequence
  Description of Artificial Sequence: Synthetic oligonucleotide
uaaccacaccaaguaccag

SEQ ID NO: 784669 - RNA, 19 nt, Artificial Sequence
  Description of Artificial Sequence: Synthetic oligonucleotide
ggauagaacauaacucaga

SEQ ID NO: 784670 - RNA, 19 nt, Artificial Sequence
  Description of Artificial Sequence: Synthetic oligonucleotide
auuaaccucucagcucugu

SEQ ID NO: 784671 - RNA, 19 nt, Artificial Sequence
  Description of Artificial Sequence: Synthetic oligonucleotide
cuaaguggagcgagaaugu

SEQ ID NO: 784672 - RNA, 19 nt, Artificial Sequence
  Description of Artificial Sequence: Synthetic oligonucleotide
auaacgcacuucauuuagu

SEQ ID NO: 784673 - RNA, 19 nt, Artificial Sequence
  Description of Artificial Sequence: Synthetic oligonucleotide
gagaauguuuagugagacu

SEQ ID NO: 784674 - RNA, 19 nt, Artificial Sequence
  Description of Artificial Sequence: Synthetic oligonucleotide
ggaaacguuugguagcuua

SEQ ID NO: 784675 - RNA, 19 nt, Artificial Sequence
  Description of Artificial Sequence: Synthetic oligonucleotide
cuuccaaaugcugagcgcu

SEQ ID NO: 784676 - RNA, 19 nt, Artificial Sequence
  Description of Artificial Sequence: Synthetic oligonucleotide
accuggacacgccccgcuc

SEQ ID NO: 784677 - RNA, 19 nt, Artificial Sequence
  Description of Artificial Sequence: Synthetic oligonucleotide
cagaaguccccuauaggua

SEQ ID NO: 784678 - RNA, 19 nt, Artificial Sequence
  Description of Artificial Sequence: Synthetic oligonucleotide
guauuugguaaaaggccaa

SEQ ID NO: 784679 - RNA, 19 nt, Artificial Sequence
  Description of Artificial Sequence: Synthetic oligonucleotide
aaccugaauuagaaagcua

SEQ ID NO: 784680 - RNA, 19 nt, Artificial Sequence
  Description of Artificial Sequence: Synthetic oligonucleotide
ugcugagcgcuacuccgau

SEQ ID NO: 784681 - RNA, 19 nt, Artificial Sequence
  Description of Artificial Sequence: Synthetic oligonucleotide
acaugucuaugacccugga

SEQ ID NO: 784682 - RNA, 19 nt, Artificial Sequence
  Description of Artificial Sequence: Synthetic oligonucleotide
cgauaagaucuaauaaauc

SEQ ID NO: 784683 - RNA, 19 nt, Artificial Sequence
  Description of Artificial Sequence: Synthetic oligonucleotide
cugucaugaaaauguggua

SEQ ID NO: 784684 - RNA, 19 nt, Artificial Sequence
  Description of Artificial Sequence: Synthetic oligonucleotide
ccaauaguagagaauucaa

SEQ ID NO: 784685 - RNA, 19 nt, Artificial Sequence
  Description of Artificial Sequence: Synthetic oligonucleotide
guuacagcuuugccaugga

SEQ ID NO: 784686 - RNA, 19 nt, Artificial Sequence
  Description of Artificial Sequence: Synthetic oligonucleotide
gauuaaccucucagcucug

SEQ ID NO: 784687 - RNA, 19 nt, Artificial Sequence
  Description of Artificial Sequence: Synthetic oligonucleotide
gcuacuccgauccacauuu

SEQ ID NO: 784688 - RNA, 19 nt, Artificial Sequence
  Description of Artificial Sequence: Synthetic oligonucleotide
guuuagugagacucuccgu

SEQ ID NO: 784689 - RNA, 19 nt, Artificial Sequence
  Description of Artificial Sequence: Synthetic oligonucleotide
augacuaaguggagcgaga

SEQ ID NO: 784690 - RNA, 19 nt, Artificial Sequence
  Description of Artificial Sequence: Synthetic oligonucleotide
gacucuccguucagggaug

SEQ ID NO: 784691 - RNA, 19 nt, Artificial Sequence
  Description of Artificial Sequence: Synthetic oligonucleotide
aaguccccuauagguagau

SEQ ID NO: 784692 - RNA, 19 nt, Artificial Sequence
  Description of Artificial Sequence: Synthetic oligonucleotide
gcauaaugaauaagucaac

SEQ ID NO: 784693 - RNA, 19 nt, Artificial Sequence
  Description of Artificial Sequence: Synthetic oligonucleotide
agcuugcacuauguaauaa

SEQ ID NO: 784694 - RNA, 19 nt, Artificial Sequence
  Description of Artificial Sequence: Synthetic oligonucleotide
ggucgagguuuccgggugg

SEQ ID NO: 784695 - RNA, 19 nt, Artificial Sequence
  Description of Artificial Sequence: Synthetic oligonucleotide
gcgaccagcugggagacag

SEQ ID NO: 784696 - RNA, 19 nt, Artificial Sequence
  Description of Artificial Sequence: Synthetic oligonucleotide
guaugacuaaguggagcga

SEQ ID NO: 784697 - RNA, 19 nt, Artificial Sequence
  Description of Artificial Sequence: Synthetic oligonucleotide
cagcaauaguugauuaagu

SEQ ID NO: 784698 - RNA, 19 nt, Artificial Sequence
  Description of Artificial Sequence: Synthetic oligonucleotide
guuacgucuggaaacguuu

SEQ ID NO: 784699 - RNA, 19 nt, Artificial Sequence
  Description of Artificial Sequence: Synthetic oligonucleotide
agcgcuacuccgauccaca

SEQ ID NO: 784700 - RNA, 19 nt, Artificial Sequence
  Description of Artificial Sequence: Synthetic oligonucleotide
cauuucagaaguccccuau

SEQ ID NO: 784701 - RNA, 19 nt, Artificial Sequence
  Description of Artificial Sequence: Synthetic oligonucleotide
ccgcacaucgcacaucaug

SEQ ID NO: 784702 - RNA, 19 nt, Artificial Sequence
  Description of Artificial Sequence: Synthetic oligonucleotide
gggcacaaacuguugagua

SEQ ID NO: 784703 - RNA, 19 nt, Artificial Sequence
  Description of Artificial Sequence: Synthetic oligonucleotide
cacaugccaauaguagaga

SEQ ID NO: 784704 - RNA, 19 nt, Artificial Sequence
  Description of Artificial Sequence: Synthetic oligonucleotide
cgagaauguuuagugagac

SEQ ID NO: 784705 - RNA, 19 nt, Artificial Sequence
  Description of Artificial Sequence: Synthetic oligonucleotide
gaaguccccuauagguaga

SEQ ID NO: 784706 - RNA, 19 nt, Artificial Sequence
  Description of Artificial Sequence: Synthetic oligonucleotide
gcgauaagaucuaauaaau

SEQ ID NO: 784707 - RNA, 19 nt, Artificial Sequence
  Description of Artificial Sequence: Synthetic oligonucleotide
uuuaggcagcuugcacuau

SEQ ID NO: 784708 - RNA, 19 nt, Artificial Sequence
  Description of Artificial Sequence: Synthetic oligonucleotide
cuccucgaggcgaggagga

SEQ ID NO: 784709 - RNA, 19 nt, Artificial Sequence
  Description of Artificial Sequence: Synthetic oligonucleotide
auguuacgucuggaaacgu

SEQ ID NO: 784710 - RNA, 19 nt, Artificial Sequence
  Description of Artificial Sequence: Synthetic oligonucleotide
cuauguuaucauggcaucu

SEQ ID NO: 784711 - RNA, 19 nt, Artificial Sequence
  Description of Artificial Sequence: Synthetic oligonucleotide
caauagucaccaugguuau

SEQ ID NO: 784712 - RNA, 19 nt, Artificial Sequence
  Description of Artificial Sequence: Synthetic oligonucleotide
gaucucugacuugcauaca

SEQ ID NO: 784713 - RNA, 19 nt, Artificial Sequence
  Description of Artificial Sequence: Synthetic oligonucleotide
aguugaucucugacuugca

SEQ ID NO: 784714 - RNA, 19 nt, Artificial Sequence
  Description of Artificial Sequence: Synthetic oligonucleotide
gacuaaguggagcgagaau

SEQ ID NO: 784715 - RNA, 19 nt, Artificial Sequence
  Description of Artificial Sequence: Synthetic oligonucleotide
gauguagcaugugguuucu

SEQ ID NO: 784716 - RNA, 19 nt, Artificial Sequence
  Description of Artificial Sequence: Synthetic oligonucleotide
gguagcuuacacugcgaua

SEQ ID NO: 784717 - RNA, 19 nt, Artificial Sequence
  Description of Artificial Sequence: Synthetic oligonucleotide
aguccccuauagguagaug

SEQ ID NO: 784718 - RNA, 19 nt, Artificial Sequence
  Description of Artificial Sequence: Synthetic oligonucleotide
caaugacaauagcacuaaa

SEQ ID NO: 784719 - RNA, 19 nt, Artificial Sequence
  Description of Artificial Sequence: Synthetic oligonucleotide
cucgaggcgaggaggaccu

SEQ ID NO: 784720 - RNA, 19 nt, Artificial Sequence
  Description of Artificial Sequence: Synthetic oligonucleotide
ccaaaucaaauuucagggu

SEQ ID NO: 784721 - RNA, 19 nt, Artificial Sequence
  Description of Artificial Sequence: Synthetic oligonucleotide
cauggauggcaaauucuuu

SEQ ID NO: 784722 - RNA, 19 nt, Artificial Sequence
  Description of Artificial Sequence: Synthetic oligonucleotide
caauagcacuaaaccugaa

SEQ ID NO: 784723 - RNA, 19 nt, Artificial Sequence
  Description of Artificial Sequence: Synthetic oligonucleotide
gcgagaauguuuagugaga

SEQ ID NO: 784724 - RNA, 19 nt, Artificial Sequence
  Description of Artificial Sequence: Synthetic oligonucleotide
ggccaaugaaacugauuua

SEQ ID NO: 784725 - RNA, 19 nt, Artificial Sequence
  Description of Artificial Sequence: Synthetic oligonucleotide
gcuuacacugcgauaagau

SEQ ID NO: 784726 - RNA, 19 nt, Artificial Sequence
  Description of Artificial Sequence: Synthetic oligonucleotide
ccucgaggcgaggaggacc

SEQ ID NO: 784727 - RNA, 19 nt, Artificial Sequence
  Description of Artificial Sequence: Synthetic oligonucleotide
ggggcuucgaauacuuuua

SEQ ID NO: 784728 - RNA, 19 nt, Artificial Sequence
  Description of Artificial Sequence: Synthetic oligonucleotide
gugcgaccagcugggagac

SEQ ID NO: 784729 - RNA, 19 nt, Artificial Sequence
  Description of Artificial Sequence: Synthetic oligonucleotide
uccucgaggcgaggaggac

SEQ ID NO: 784730 - RNA, 19 nt, Artificial Sequence
  Description of Artificial Sequence: Synthetic oligonucleotide
gugcaauagucaccauggu

SEQ ID NO: 784731 - RNA, 19 nt, Artificial Sequence
  Description of Artificial Sequence: Synthetic oligonucleotide
ggacacgccccgcuccgug

SEQ ID NO: 784732 - RNA, 19 nt, Artificial Sequence
  Description of Artificial Sequence: Synthetic oligonucleotide
acacugcgauaagaucuaa

SEQ ID NO: 784733 - RNA, 19 nt, Artificial Sequence
  Description of Artificial Sequence: Synthetic oligonucleotide
caucgcacaucaugcacuu

SEQ ID NO: 784734 - RNA, 19 nt, Artificial Sequence
  Description of Artificial Sequence: Synthetic oligonucleotide
gaccuggacacgccccgcu

SEQ ID NO: 784735 - RNA, 19 nt, Artificial Sequence
  Description of Artificial Sequence: Synthetic oligonucleotide
cccuauagguagauguaua

SEQ ID NO: 784736 - RNA, 19 nt, Artificial Sequence
  Description of Artificial Sequence: Synthetic oligonucleotide
caggucgagguuuccgggu

SEQ ID NO: 784737 - RNA, 19 nt, Artificial Sequence
  Description of Artificial Sequence: Synthetic oligonucleotide
acacgccccgcuccguguu

SEQ ID NO: 784738 - RNA, 19 nt, Artificial Sequence
  Description of Artificial Sequence: Synthetic oligonucleotide
gcuaaacaauccauguuuu

SEQ ID NO: 784739 - RNA, 19 nt, Artificial Sequence
  Description of Artificial Sequence: Synthetic oligonucleotide
gacacgccccgcuccgugu

SEQ ID NO: 784740 - RNA, 19 nt, Artificial Sequence
  Description of Artificial Sequence: Synthetic oligonucleotide
cucauccgaggcgggcuuc

SEQ ID NO: 784741 - RNA, 19 nt, Artificial Sequence
  Description of Artificial Sequence: Synthetic oligonucleotide
cacgccccgcuccguguug

SEQ ID NO: 784742 - RNA, 19 nt, Artificial Sequence
  Description of Artificial Sequence: Synthetic oligonucleotide
uggacacgccccgcuccgu

SEQ ID NO: 784743 - RNA, 19 nt, Artificial Sequence
  Description of Artificial Sequence: Synthetic oligonucleotide
ugcgaccagcugggagaca

SEQ ID NO: 784744 - RNA, 19 nt, Artificial Sequence
  Description of Artificial Sequence: Synthetic oligonucleotide
cuaugacccuggauagguu

SEQ ID NO: 784745 - RNA, 19 nt, Artificial Sequence
  Description of Artificial Sequence: Synthetic oligonucleotide
acgccccgcuccguguugu

SEQ ID NO: 784746 - RNA, 19 nt, Artificial Sequence
  Description of Artificial Sequence: Synthetic oligonucleotide
cgcuccguguugucugagc

SEQ ID NO: 784747 - RNA, 19 nt, Artificial Sequence
  Description of Artificial Sequence: Synthetic oligonucleotide
ccgaggcgggcuucggcug

SEQ ID NO: 784748 - RNA, 19 nt, Artificial Sequence
  Description of Artificial Sequence: Synthetic oligonucleotide
gcgcugacuuugcuuucuc

SEQ ID NO: 784749 - RNA, 19 nt, Artificial Sequence
  Description of Artificial Sequence: Synthetic oligonucleotide
cccuuccgcacaucgcaca

SEQ ID NO: 784750 - RNA, 19 nt, Artificial Sequence
  Description of Artificial Sequence: Synthetic oligonucleotide
guucagggaugaggcuucu

SEQ ID NO: 784751 - RNA, 19 nt, Artificial Sequence
  Description of Artificial Sequence: Synthetic oligonucleotide
cuacuccgauccacauuuu

SEQ ID NO: 784752 - RNA, 19 nt, Artificial Sequence
  Description of Artificial Sequence: Synthetic oligonucleotide
ccccuauagguagauguau

SEQ ID NO: 784753 - RNA, 19 nt, Artificial Sequence
  Description of Artificial Sequence: Synthetic oligonucleotide
cccgcuccguguugucuga

SEQ ID NO: 784754 - RNA, 19 nt, Artificial Sequence
  Description of Artificial Sequence: Synthetic oligonucleotide
gcgcuacuccgauccacau

SEQ ID NO: 784755 - RNA, 19 nt, Artificial Sequence
  Description of Artificial Sequence: Synthetic oligonucleotide
guggggcuucgaauacuuu

SEQ ID NO: 784756 - RNA, 19 nt, Artificial Sequence
  Description of Artificial Sequence: Synthetic oligonucleotide
gccccgcuccguguugucu

SEQ ID NO: 784757 - RNA, 19 nt, Artificial Sequence
  Description of Artificial Sequence: Synthetic oligonucleotide
ccucauccgaggcgggcuu

SEQ ID NO: 784758 - RNA, 19 nt, Artificial Sequence
  Description of Artificial Sequence: Synthetic oligonucleotide
cgcuacuccgauccacauu

SEQ ID NO: 784759 - RNA, 19 nt, Artificial Sequence
  Description of Artificial Sequence: Synthetic oligonucleotide
  modified_base (2)..(2): a, c, u, g, unknown or other
gnuaaaaucacauaacucc

SEQ ID NO: 784760 - RNA, 19 nt, Artificial Sequence
  Description of Artificial Sequence: Synthetic oligonucleotide
  modified_base (6)..(6): a, c, u, g, unknown or other
aaaagnuaaaaucacauaa

SEQ ID NO: 784761 - RNA, 19 nt, Artificial Sequence
  Description of Artificial Sequence: Synthetic oligonucleotide
aauuuggacauucaaaagu

SEQ ID NO: 784762 - RNA, 19 nt, Artificial Sequence
  Description of Artificial Sequence: Synthetic oligonucleotide
  modified_base (4)..(4): a, c, u, g, unknown or other
aagnuaaaaucacauaacu

SEQ ID NO: 784763 - RNA, 19 nt, Artificial Sequence
  Description of Artificial Sequence: Synthetic oligonucleotide
acgauaaccaguuugacag

SEQ ID NO: 784764 - RNA, 19 nt, Artificial Sequence
  Description of Artificial Sequence: Synthetic oligonucleotide
uacauauugauguauaaca

SEQ ID NO: 784765 - RNA, 19 nt, Artificial Sequence
  Description of Artificial Sequence: Synthetic oligonucleotide
ucagcaauuaggcauauug

SEQ ID NO: 784766 - RNA, 19 nt, Artificial Sequence
  Description of Artificial Sequence: Synthetic oligonucleotide
auaucuucccaccuaaacc

SEQ ID NO: 784767 - RNA, 19 nt, Artificial Sequence
  Description of Artificial Sequence: Synthetic oligonucleotide
  modified_base (5)..(5): a, c, u, g, unknown or other
aaagnuaaaaucacauaac

SEQ ID NO: 784768 - RNA, 19 nt, Artificial Sequence
  Description of Artificial Sequence: Synthetic oligonucleotide
aacagggguauuuggaagc

SEQ ID NO: 784769 - RNA, 19 nt, Artificial Sequence
  Description of Artificial Sequence: Synthetic oligonucleotide
aauauaaagaaucuccauu

SEQ ID NO: 784770 - RNA, 19 nt, Artificial Sequence
  Description of Artificial Sequence: Synthetic oligonucleotide
uugcauugagauuauaccg

SEQ ID NO: 784771 - RNA, 19 nt, Artificial Sequence
  Description of Artificial Sequence: Synthetic oligonucleotide
ugaagugucauuauuacau

SEQ ID NO: 784772 - RNA, 19 nt, Artificial Sequence
  Description of Artificial Sequence: Synthetic oligonucleotide
aauaguugaccaaaucacc

SEQ ID NO: 784773 - RNA, 19 nt, Artificial Sequence
  Description of Artificial Sequence: Synthetic oligonucleotide
accggcuuaauccauaggc

SEQ ID NO: 784774 - RNA, 19 nt, Artificial Sequence
  Description of Artificial Sequence: Synthetic oligonucleotide
ugcauugagauuauaccgg

SEQ ID NO: 784775 - RNA, 19 nt, Artificial Sequence
  Description of Artificial Sequence: Synthetic oligonucleotide
augccaaugaacgauaacc

SEQ ID NO: 784776 - RNA, 19 nt, Artificial Sequence
  Description of Artificial Sequence: Synthetic oligonucleotide
auugagauuauaccgguag

SEQ ID NO: 784777 - RNA, 19 nt, Artificial Sequence
  Description of Artificial Sequence: Synthetic oligonucleotide
agugcaacaguuaaugugc

SEQ ID NO: 784778 - RNA, 19 nt, Artificial Sequence
  Description of Artificial Sequence: Synthetic oligonucleotide
  modified_base (8)..(8): a, c, u, g, unknown or other
ucaaaagnuaaaaucacau

SEQ ID NO: 784779 - RNA, 19 nt, Artificial Sequence
  Description of Artificial Sequence: Synthetic oligonucleotide
ucuucacaaauauaggacc

SEQ ID NO: 784780 - RNA, 19 nt, Artificial Sequence
  Description of Artificial Sequence: Synthetic oligonucleotide
uucuuaugcaaauaguuga

SEQ ID NO: 784781 - RNA, 19 nt, Artificial Sequence
  Description of Artificial Sequence: Synthetic oligonucleotide
acauaaauauauucguguc

SEQ ID NO: 784782 - RNA, 19 nt, Artificial Sequence
  Description of Artificial Sequence: Synthetic oligonucleotide
ucgauucuuaugcaaauag

SEQ ID NO: 784783 - RNA, 19 nt, Artificial Sequence
  Description of Artificial Sequence: Synthetic oligonucleotide
aauccaaagauguccagcu

SEQ ID NO: 784784 - RNA, 19 nt, Artificial Sequence
  Description of Artificial Sequence: Synthetic oligonucleotide
ugugaugauauuugagacg

SEQ ID NO: 784785 - RNA, 19 nt, Artificial Sequence
  Description of Artificial Sequence: Synthetic oligonucleotide
auaaaucggggauacacuc

SEQ ID NO: 784786 - RNA, 19 nt, Artificial Sequence
  Description of Artificial Sequence: Synthetic oligonucleotide
agaaacacgaauguguuuc

SEQ ID NO: 784787 - RNA, 19 nt, Artificial Sequence
  Description of Artificial Sequence: Synthetic oligonucleotide
gaaacgaugacaaucacca

SEQ ID NO: 784788 - RNA, 19 nt, Artificial Sequence
  Description of Artificial Sequence: Synthetic oligonucleotide
ucuaauuggcccuaaagaa

SEQ ID NO: 784789 - RNA, 19 nt, Artificial Sequence
  Description of Artificial Sequence: Synthetic oligonucleotide
auauaggaccauuuuguac

SEQ ID NO: 784790 - RNA, 19 nt, Artificial Sequence
  Description of Artificial Sequence: Synthetic oligonucleotide
uccagcgaauuucauagcg

SEQ ID NO: 784791 - RNA, 19 nt, Artificial Sequence
  Description of Artificial Sequence: Synthetic oligonucleotide
  modified_base (9)..(9): a, c, u, g, unknown or other
uucaaaagnuaaaaucaca

SEQ ID NO: 784792 - RNA, 19 nt, Artificial Sequence
  Description of Artificial Sequence: Synthetic oligonucleotide
ugaacgauaaccaguuuga

SEQ ID NO: 784793 - RNA, 19 nt, Artificial Sequence
  Description of Artificial Sequence: Synthetic oligonucleotide
uuaggcauauugcagagaa

SEQ ID NO: 784794 - RNA, 19 nt, Artificial Sequence
  Description of Artificial Sequence: Synthetic oligonucleotide
cugauagacucaaugaccc

SEQ ID NO: 784795 - RNA, 19 nt, Artificial Sequence
  Description of Artificial Sequence: Synthetic oligonucleotide
uaagauccgaccaagcacu

SEQ ID NO: 784796 - RNA, 19 nt, Artificial Sequence
  Description of Artificial Sequence: Synthetic oligonucleotide
ugggucauuaucuucagcu

SEQ ID NO: 784797 - RNA, 19 nt, Artificial Sequence
  Description of Artificial Sequence: Synthetic oligonucleotide
uauauucguguccaucggg

SEQ ID NO: 784798 - RNA, 19 nt, Artificial Sequence
  Description of Artificial Sequence: Synthetic oligonucleotide
aaugccaaugaacgauaac

SEQ ID NO: 784799 - RNA, 19 nt, Artificial Sequence
  Description of Artificial Sequence: Synthetic oligonucleotide
gucauauauguuuuggcag

SEQ ID NO: 784800 - RNA, 19 nt, Artificial Sequence
  Description of Artificial Sequence: Synthetic oligonucleotide
aacagaauguuugagcugu

SEQ ID NO: 784801 - RNA, 19 nt, Artificial Sequence
  Description of Artificial Sequence: Synthetic oligonucleotide
augaacgauaaccaguuug

SEQ ID NO: 784802 - RNA, 19 nt, Artificial Sequence
  Description of Artificial Sequence: Synthetic oligonucleotide
aacaaggcugugugaaugg

SEQ ID NO: 784803 - RNA, 19 nt, Artificial Sequence
  Description of Artificial Sequence: Synthetic oligonucleotide
auauugauguauaacauca

SEQ ID NO: 784804 - RNA, 19 nt, Artificial Sequence
  Description of Artificial Sequence: Synthetic oligonucleotide
aacgauaaccaguuugaca

SEQ ID NO: 784805 - RNA, 19 nt, Artificial Sequence
  Description of Artificial Sequence: Synthetic oligonucleotide
uuugggaacauguaaguau

SEQ ID NO: 784806 - RNA, 19 nt, Artificial Sequence
  Description of Artificial Sequence: Synthetic oligonucleotide
uaucuuacaucccucuuca

SEQ ID NO: 784807 - RNA, 19 nt, Artificial Sequence
  Description of Artificial Sequence: Synthetic oligonucleotide
uguauaacaucauuuuauc

SEQ ID NO: 784808 - RNA, 19 nt, Artificial Sequence
  Description of Artificial Sequence: Synthetic oligonucleotide
ucacauaacuccuuguacu

SEQ ID NO: 784809 - RNA, 19 nt, Artificial Sequence
  Description of Artificial Sequence: Synthetic oligonucleotide
agauuauaccgguagggag

SEQ ID NO: 784810 - RNA, 19 nt, Artificial Sequence
  Description of Artificial Sequence: Synthetic oligonucleotide
  modified_base (3)..(3): a, c, u, g, unknown or other
agnuaaaaucacauaacuc

SEQ ID NO: 784811 - RNA, 19 nt, Artificial Sequence
  Description of Artificial Sequence: Synthetic oligonucleotide
caugaagcuaucucgauuc

SEQ ID NO: 784812 - RNA, 19 nt, Artificial Sequence
  Description of Artificial Sequence: Synthetic oligonucleotide
uaauuggcccuaaagaauc

SEQ ID NO: 784813 - RNA, 19 nt, Artificial Sequence
  Description of Artificial Sequence: Synthetic oligonucleotide
auaagggcaucacugauca

SEQ ID NO: 784814 - RNA, 19 nt, Artificial Sequence
  Description of Artificial Sequence: Synthetic oligonucleotide
aagccacaaauuguguucc

SEQ ID NO: 784815 - RNA, 19 nt, Artificial Sequence
  Description of Artificial Sequence: Synthetic oligonucleotide
uuaagcaucuuuacugcca

SEQ ID NO: 784816 - RNA, 19 nt, Artificial Sequence
  Description of Artificial Sequence: Synthetic oligonucleotide
aacaguaccaacacugcag

SEQ ID NO: 784817 - RNA, 19 nt, Artificial Sequence
  Description of Artificial Sequence: Synthetic oligonucleotide
gaguuaguugcucucacgc

SEQ ID NO: 784818 - RNA, 19 nt, Artificial Sequence
  Description of Artificial Sequence: Synthetic oligonucleotide
ucauauauguuuuggcagu

SEQ ID NO: 784819 - RNA, 19 nt, Artificial Sequence
  Description of Artificial Sequence: Synthetic oligonucleotide
accugcuggaagcauauac

SEQ ID NO: 784820 - RNA, 19 nt, Artificial Sequence
  Description of Artificial Sequence: Synthetic oligonucleotide
uuaucuuacaucccucuuc

SEQ ID NO: 784821 - RNA, 19 nt, Artificial Sequence
  Description of Artificial Sequence: Synthetic oligonucleotide
ugauauuugagacguugcu

SEQ ID NO: 784822 - RNA, 19 nt, Artificial Sequence
  Description of Artificial Sequence: Synthetic oligonucleotide
uggcaaaggacacucgucc

SEQ ID NO: 784823 - RNA, 19 nt, Artificial Sequence
  Description of Artificial Sequence: Synthetic oligonucleotide
aaucacauaacuccuugua

SEQ ID NO: 784824 - RNA, 19 nt, Artificial Sequence
  Description of Artificial Sequence: Synthetic oligonucleotide
caguuugacaguuuggaug

SEQ ID NO: 784825 - RNA, 19 nt, Artificial Sequence
  Description of Artificial Sequence: Synthetic oligonucleotide
cuguaauucuagaaacacg

SEQ ID NO: 784826 - RNA, 19 nt, Artificial Sequence
  Description of Artificial Sequence: Synthetic oligonucleotide
ucuuaugcaaauaguugac

SEQ ID NO: 784827 - RNA, 19 nt, Artificial Sequence
  Description of Artificial Sequence: Synthetic oligonucleotide
agucuaauuggcccuaaag

SEQ ID NO: 784828 - RNA, 19 nt, Artificial Sequence
  Description of Artificial Sequence: Synthetic oligonucleotide
gcuaucucgauucuuaugc

SEQ ID NO: 784829 - RNA, 19 nt, Artificial Sequence
  Description of Artificial Sequence: Synthetic oligonucleotide
uuugagacguugcuggcca

SEQ ID NO: 784830 - RNA, 19 nt, Artificial Sequence
  Description of Artificial Sequence: Synthetic oligonucleotide
auuauaagggcaucacuga

SEQ ID NO: 784831 - RNA, 19 nt, Artificial Sequence
  Description of Artificial Sequence: Synthetic oligonucleotide
ugauguauaacaucauuuu

SEQ ID NO: 784832 - RNA, 19 nt, Artificial Sequence
  Description of Artificial Sequence: Synthetic oligonucleotide
aagaaucuccauuuacagu

SEQ ID NO: 784833 - RNA, 19 nt, Artificial Sequence
  Description of Artificial Sequence: Synthetic oligonucleotide
aaacagaauguuugagcug

SEQ ID NO: 784834 - RNA, 19 nt, Artificial Sequence
  Description of Artificial Sequence: Synthetic oligonucleotide
acgaauguguuucaagucu

SEQ ID NO: 784835 - RNA, 19 nt, Artificial Sequence
  Description of Artificial Sequence: Synthetic oligonucleotide
uggggaauaucacaguuaa

SEQ ID NO: 784836 - RNA, 19 nt, Artificial Sequence
  Description of Artificial Sequence: Synthetic oligonucleotide
ugccaaugaacgauaacca

SEQ ID NO: 784837 - RNA, 19 nt, Artificial Sequence
  Description of Artificial Sequence: Synthetic oligonucleotide
uuaauccauaggcugugcc

SEQ ID NO: 784838 - RNA, 19 nt, Artificial Sequence
  Description of Artificial Sequence: Synthetic oligonucleotide
uuuaagcaucuuuacugcc

SEQ ID NO: 784839 - RNA, 19 nt, Artificial Sequence
  Description of Artificial Sequence: Synthetic oligonucleotide
aauauaggaccauuuugua

SEQ ID NO: 784840 - RNA, 19 nt, Artificial Sequence
  Description of Artificial Sequence: Synthetic oligonucleotide
auauauucguguccaucgg

SEQ ID NO: 784841 - RNA, 19 nt, Artificial Sequence
  Description of Artificial Sequence: Synthetic oligonucleotide
ucaaccacuuucccaaaug

SEQ ID NO: 784842 - RNA, 19 nt, Artificial Sequence
  Description of Artificial Sequence: Synthetic oligonucleotide
caguuaaugugccuguggg

SEQ ID NO: 784843 - RNA, 19 nt, Artificial Sequence
  Description of Artificial Sequence: Synthetic oligonucleotide
aguuaaugugccugugggg

SEQ ID NO: 784844 - RNA, 19 nt, Artificial Sequence
  Description of Artificial Sequence: Synthetic oligonucleotide
aggcauauugcagagaaug

SEQ ID NO: 784845 - RNA, 19 nt, Artificial Sequence
  Description of Artificial Sequence: Synthetic oligonucleotide
ucacgcauucaccacacca

SEQ ID NO: 784846 - RNA, 19 nt, Artificial Sequence
  Description of Artificial Sequence: Synthetic oligonucleotide
aauaaaucggggauacacu

SEQ ID NO: 784847 - RNA, 19 nt, Artificial Sequence
  Description of Artificial Sequence: Synthetic oligonucleotide
guguuucaagucuaauugg

SEQ ID NO: 784848 - RNA, 19 nt, Artificial Sequence
  Description of Artificial Sequence: Synthetic oligonucleotide
uaaaugggaccugacuugg

SEQ ID NO: 784849 - RNA, 19 nt, Artificial Sequence
  Description of Artificial Sequence: Synthetic oligonucleotide
cagaccacauuauaagggc

SEQ ID NO: 784850 - RNA, 19 nt, Artificial Sequence
  Description of Artificial Sequence: Synthetic oligonucleotide
augauauuugagacguugc

SEQ ID NO: 784851 - RNA, 19 nt, Artificial Sequence
  Description of Artificial Sequence: Synthetic oligonucleotide
auuuugggaacauguaagu

SEQ ID NO: 784852 - RNA, 19 nt, Artificial Sequence
  Description of Artificial Sequence: Synthetic oligonucleotide
aaaucggggauacacucaa

SEQ ID NO: 784853 - RNA, 19 nt, Artificial Sequence
  Description of Artificial Sequence: Synthetic oligonucleotide
auauguuuuggcaguauuc

SEQ ID NO: 784854 - RNA, 19 nt, Artificial Sequence
  Description of Artificial Sequence: Synthetic oligonucleotide
uggaacucugugaugauau

SEQ ID NO: 784855 - RNA, 19 nt, Artificial Sequence
  Description of Artificial Sequence: Synthetic oligonucleotide
gucuaauuggcccuaaaga

SEQ ID NO: 784856 - RNA, 19 nt, Artificial Sequence
  Description of Artificial Sequence: Synthetic oligonucleotide
uauaagggcaucacugauc

SEQ ID NO: 784857 - RNA, 19 nt, Artificial Sequence
  Description of Artificial Sequence: Synthetic oligonucleotide
uugggguuugcauugagau

SEQ ID NO: 784858 - RNA, 19 nt, Artificial Sequence
  Description of Artificial Sequence: Synthetic oligonucleotide
uucccuacggaguuaguug

SEQ ID NO: 784859 - RNA, 19 nt, Artificial Sequence
  Description of Artificial Sequence: Synthetic oligonucleotide
ggcucaugaagcuaucucg

SEQ ID NO: 784860 - RNA, 19 nt, Artificial Sequence
  Description of Artificial Sequence: Synthetic oligonucleotide
uuacugugaaaagggaaag

SEQ ID NO: 784861 - RNA, 19 nt, Artificial Sequence
  Description of Artificial Sequence: Synthetic oligonucleotide
ucauaacaggcugggaccg

SEQ ID NO: 784862 - RNA, 19 nt, Artificial Sequence
  Description of Artificial Sequence: Synthetic oligonucleotide
cacaaauuguguuccucgg

SEQ ID NO: 784863 - RNA, 19 nt, Artificial Sequence
  Description of Artificial Sequence: Synthetic oligonucleotide
agagaaacgaugacaauca

SEQ ID NO: 784864 - RNA, 19 nt, Artificial Sequence
  Description of Artificial Sequence: Synthetic oligonucleotide
ugaacagggguauuuggaa

SEQ ID NO: 784865 - RNA, 19 nt, Artificial Sequence
  Description of Artificial Sequence: Synthetic oligonucleotide
uaaaucggggauacacuca

SEQ ID NO: 784866 - RNA, 19 nt, Artificial Sequence
  Description of Artificial Sequence: Synthetic oligonucleotide
aaagcaggaaugauuggca

SEQ ID NO: 784867 - RNA, 19 nt, Artificial Sequence
  Description of Artificial Sequence: Synthetic oligonucleotide
uuuggaagccaucuugcau

SEQ ID NO: 784868 - RNA, 19 nt, Artificial Sequence
  Description of Artificial Sequence: Synthetic oligonucleotide
cuuacugugaaaagggaaa

SEQ ID NO: 784869 - RNA, 19 nt, Artificial Sequence
  Description of Artificial Sequence: Synthetic oligonucleotide
uguuucauucauaccgagu

SEQ ID NO: 784870 - RNA, 19 nt, Artificial Sequence
  Description of Artificial Sequence: Synthetic oligonucleotide
acgauguucaagugugguc

SEQ ID NO: 784871 - RNA, 19 nt, Artificial Sequence
  Description of Artificial Sequence: Synthetic oligonucleotide
cauauugcagagaaugcca

SEQ ID NO: 784872 - RNA, 19 nt, Artificial Sequence
  Description of Artificial Sequence: Synthetic oligonucleotide
uuauaagggcaucacugau

SEQ ID NO: 784873 - RNA, 19 nt, Artificial Sequence
  Description of Artificial Sequence: Synthetic oligonucleotide
uguacugucgucggcagga

SEQ ID NO: 784874 - RNA, 19 nt, Artificial Sequence
  Description of Artificial Sequence: Synthetic oligonucleotide
aaauguauucuugcugagu

SEQ ID NO: 784875 - RNA, 19 nt, Artificial Sequence
  Description of Artificial Sequence: Synthetic oligonucleotide
cuuacaucccucuucacaa

SEQ ID NO: 784876 - RNA, 19 nt, Artificial Sequence
  Description of Artificial Sequence: Synthetic oligonucleotide
auauucguguccaucgggg

SEQ ID NO: 784877 - RNA, 19 nt, Artificial Sequence
  Description of Artificial Sequence: Synthetic oligonucleotide
cagaacgcaggguaggagc

SEQ ID NO: 784878 - RNA, 19 nt, Artificial Sequence
  Description of Artificial Sequence: Synthetic oligonucleotide
cuuaugcaaauaguugacc

SEQ ID NO: 784879 - RNA, 19 nt, Artificial Sequence
  Description of Artificial Sequence: Synthetic oligonucleotide
cccuaaagaaucuagucag

SEQ ID NO: 784880 - RNA, 19 nt, Artificial Sequence
  Description of Artificial Sequence: Synthetic oligonucleotide
auguaaaugggaccugacu

SEQ ID NO: 784881 - RNA, 19 nt, Artificial Sequence
  Description of Artificial Sequence: Synthetic oligonucleotide
auuauaccgguagggaguc

SEQ ID NO: 784882 - RNA, 19 nt, Artificial Sequence
  Description of Artificial Sequence: Synthetic oligonucleotide
uguuugagcuguaauucua

SEQ ID NO: 784883 - RNA, 19 nt, Artificial Sequence
  Description of Artificial Sequence: Synthetic oligonucleotide
ucccuacggaguuaguugc

SEQ ID NO: 784884 - RNA, 19 nt, Artificial Sequence
  Description of Artificial Sequence: Synthetic oligonucleotide
cauaacuccuuguacuguc

SEQ ID NO: 784885 - RNA, 19 nt, Artificial Sequence
  Description of Artificial Sequence: Synthetic oligonucleotide
auguguuucaagucuaauu

SEQ ID NO: 784886 - RNA, 19 nt, Artificial Sequence
  Description of Artificial Sequence: Synthetic oligonucleotide
auaguugaccaaaucacca

SEQ ID NO: 784887 - RNA, 19 nt, Artificial Sequence
  Description of Artificial Sequence: Synthetic oligonucleotide
  modified_base (7)..(7): a, c, u, g, unknown or other
caaaagnuaaaaucacaua

SEQ ID NO: 784888 - RNA, 19 nt, Artificial Sequence
  Description of Artificial Sequence: Synthetic oligonucleotide
agaacgcaggguaggagcc

SEQ ID NO: 784889 - RNA, 19 nt, Artificial Sequence
  Description of Artificial Sequence: Synthetic oligonucleotide
uucaaguguggucccaagu

SEQ ID NO: 784890 - RNA, 19 nt, Artificial Sequence
  Description of Artificial Sequence: Synthetic oligonucleotide
augauuggcaaauuuucuu

SEQ ID NO: 784891 - RNA, 19 nt, Artificial Sequence
  Description of Artificial Sequence: Synthetic oligonucleotide
acugucgucggcaggauuc

SEQ ID NO: 784892 - RNA, 19 nt, Artificial Sequence
  Description of Artificial Sequence: Synthetic oligonucleotide
uguuccucgggccagcuuu

SEQ ID NO: 784893 - RNA, 19 nt, Artificial Sequence
  Description of Artificial Sequence: Synthetic oligonucleotide
cuucacaaauauaggacca

SEQ ID NO: 784894 - RNA, 19 nt, Artificial Sequence
  Description of Artificial Sequence: Synthetic oligonucleotide
guugcucucacgcauucac

SEQ ID NO: 784895 - RNA, 19 nt, Artificial Sequence
  Description of Artificial Sequence: Synthetic oligonucleotide
cagcgaauuucauagcgug

SEQ ID NO: 784896 - RNA, 19 nt, Artificial Sequence
  Description of Artificial Sequence: Synthetic oligonucleotide
uauugauguauaacaucau

SEQ ID NO: 784897 - RNA, 19 nt, Artificial Sequence
  Description of Artificial Sequence: Synthetic oligonucleotide
ccuccagcgaauuucauag

SEQ ID NO: 784898 - RNA, 19 nt, Artificial Sequence
  Description of Artificial Sequence: Synthetic oligonucleotide
uauucguguccaucggggc

SEQ ID NO: 784899 - RNA, 19 nt, Artificial Sequence
  Description of Artificial Sequence: Synthetic oligonucleotide
aagcaguacucaguaauga

SEQ ID NO: 784900 - RNA, 19 nt, Artificial Sequence
  Description of Artificial Sequence: Synthetic oligonucleotide
cacauaaauauauucgugu

SEQ ID NO: 784901 - RNA, 19 nt, Artificial Sequence
  Description of Artificial Sequence: Synthetic oligonucleotide
ggagucguaaggcagcugc

SEQ ID NO: 784902 - RNA, 19 nt, Artificial Sequence
  Description of Artificial Sequence: Synthetic oligonucleotide
gggaauaucacaguuaaaa

SEQ ID NO: 784903 - RNA, 19 nt, Artificial Sequence
  Description of Artificial Sequence: Synthetic oligonucleotide
auaggaccauuuuguacag

SEQ ID NO: 784904 - RNA, 19 nt, Artificial Sequence
  Description of Artificial Sequence: Synthetic oligonucleotide
uuuaucuuacaucccucuu

SEQ ID NO: 784905 - RNA, 19 nt, Artificial Sequence
  Description of Artificial Sequence: Synthetic oligonucleotide
uaucucgauucuuaugcaa

SEQ ID NO: 784906 - RNA, 19 nt, Artificial Sequence
  Description of Artificial Sequence: Synthetic oligonucleotide
ugcaaauaguugaccaaau

SEQ ID NO: 784907 - RNA, 19 nt, Artificial Sequence
  Description of Artificial Sequence: Synthetic oligonucleotide
auagcaacacauauauaca

SEQ ID NO: 784908 - RNA, 19 nt, Artificial Sequence
  Description of Artificial Sequence: Synthetic oligonucleotide
cucgggccagcuuugauug

SEQ ID NO: 784909 - RNA, 19 nt, Artificial Sequence
  Description of Artificial Sequence: Synthetic oligonucleotide
uguggucccaaguggguca

SEQ ID NO: 784910 - RNA, 19 nt, Artificial Sequence
  Description of Artificial Sequence: Synthetic oligonucleotide
uccgaccaagcacuagucc

SEQ ID NO: 784911 - RNA, 19 nt, Artificial Sequence
  Description of Artificial Sequence: Synthetic oligonucleotide
ucggggauacacucaaaac

SEQ ID NO: 784912 - RNA, 19 nt, Artificial Sequence
  Description of Artificial Sequence: Synthetic oligonucleotide
caccauagaagcaguacuc

SEQ ID NO: 784913 - RNA, 19 nt, Artificial Sequence
  Description of Artificial Sequence: Synthetic oligonucleotide
aacgcaggguaggagccac

SEQ ID NO: 784914 - RNA, 19 nt, Artificial Sequence
  Description of Artificial Sequence: Synthetic oligonucleotide
aguuaguugcucucacgca

SEQ ID NO: 784915 - RNA, 19 nt, Artificial Sequence
  Description of Artificial Sequence: Synthetic oligonucleotide
cauuggauccacauaaaua

SEQ ID NO: 784916 - RNA, 19 nt, Artificial Sequence
  Description of Artificial Sequence: Synthetic oligonucleotide
ugcaucggcagacccuucc

SEQ ID NO: 784917 - RNA, 19 nt, Artificial Sequence
  Description of Artificial Sequence: Synthetic oligonucleotide
gaguucagaacgcagggua

SEQ ID NO: 784918 - RNA, 19 nt, Artificial Sequence
  Description of Artificial Sequence: Synthetic oligonucleotide
acgaugacaaucaccaaca

SEQ ID NO: 784919 - RNA, 19 nt, Artificial Sequence
  Description of Artificial Sequence: Synthetic oligonucleotide
uccaucggggcugauagac

SEQ ID NO: 784920 - RNA, 19 nt, Artificial Sequence
  Description of Artificial Sequence: Synthetic oligonucleotide
aucggggauacacucaaaa

SEQ ID NO: 784921 - RNA, 19 nt, Artificial Sequence
  Description of Artificial Sequence: Synthetic oligonucleotide
auaccgagucagcaauuag

SEQ ID NO: 784922 - RNA, 19 nt, Artificial Sequence
  Description of Artificial Sequence: Synthetic oligonucleotide
cauguuucauucauaccga

SEQ ID NO: 784923 - RNA, 19 nt, Artificial Sequence
  Description of Artificial Sequence: Synthetic oligonucleotide
ggaauucccaucuggaguc

SEQ ID NO: 784924 - RNA, 19 nt, Artificial Sequence
  Description of Artificial Sequence: Synthetic oligonucleotide
gagauuauaccgguaggga

SEQ ID NO: 784925 - RNA, 19 nt, Artificial Sequence
  Description of Artificial Sequence: Synthetic oligonucleotide
ucucgauucuuaugcaaau

SEQ ID NO: 784926 - RNA, 19 nt, Artificial Sequence
  Description of Artificial Sequence: Synthetic oligonucleotide
cagauccuaagauccgacc

SEQ ID NO: 784927 - RNA, 19 nt, Artificial Sequence
  Description of Artificial Sequence: Synthetic oligonucleotide
cacgaauguguuucaaguc

SEQ ID NO: 784928 - RNA, 19 nt, Artificial Sequence
  Description of Artificial Sequence: Synthetic oligonucleotide
ugacaguuuggauggcugu

SEQ ID NO: 784929 - RNA, 19 nt, Artificial Sequence
  Description of Artificial Sequence: Synthetic oligonucleotide
agcuaucucgauucuuaug

SEQ ID NO: 784930 - RNA, 19 nt, Artificial Sequence
  Description of Artificial Sequence: Synthetic oligonucleotide
ugaguguggcagugcaugc

SEQ ID NO: 784931 - RNA, 19 nt, Artificial Sequence
  Description of Artificial Sequence: Synthetic oligonucleotide
gauucaauccaaagauguc

SEQ ID NO: 784932 - RNA, 19 nt, Artificial Sequence
  Description of Artificial Sequence: Synthetic oligonucleotide
ucucacgcauucaccacac

SEQ ID NO: 784933 - RNA, 19 nt, Artificial Sequence
  Description of Artificial Sequence: Synthetic oligonucleotide
uuguacugucgucggcagg

SEQ ID NO: 784934 - RNA, 19 nt, Artificial Sequence
  Description of Artificial Sequence: Synthetic oligonucleotide
aagcuaucucgauucuuau

SEQ ID NO: 784935 - RNA, 19 nt, Artificial Sequence
  Description of Artificial Sequence: Synthetic oligonucleotide
auucguguccaucggggcu

SEQ ID NO: 784936 - RNA, 19 nt, Artificial Sequence
  Description of Artificial Sequence: Synthetic oligonucleotide
ccaccgugaguucagaacg

SEQ ID NO: 784937 - RNA, 19 nt, Artificial Sequence
  Description of Artificial Sequence: Synthetic oligonucleotide
gauuauaccgguagggagu

SEQ ID NO: 784938 - RNA, 19 nt, Artificial Sequence
  Description of Artificial Sequence: Synthetic oligonucleotide
cagugauugcaguaaucac

SEQ ID NO: 784939 - RNA, 19 nt, Artificial Sequence
  Description of Artificial Sequence: Synthetic oligonucleotide
gaagcuaucucgauucuua

SEQ ID NO: 784940 - RNA, 19 nt, Artificial Sequence
  Description of Artificial Sequence: Synthetic oligonucleotide
cacauuauaagggcaucac

SEQ ID NO: 784941 - RNA, 19 nt, Artificial Sequence
  Description of Artificial Sequence: Synthetic oligonucleotide
aucgaacugcaauggucuc

SEQ ID NO: 784942 - RNA, 19 nt, Artificial Sequence
  Description of Artificial Sequence: Synthetic oligonucleotide
gaugacaaucaccaacagu

SEQ ID NO: 784943 - RNA, 19 nt, Artificial Sequence
  Description of Artificial Sequence: Synthetic oligonucleotide
ucgucggcaggauucaauc

SEQ ID NO: 784944 - RNA, 19 nt, Artificial Sequence
  Description of Artificial Sequence: Synthetic oligonucleotide
gaaacacgaauguguuuca

SEQ ID NO: 784945 - RNA, 19 nt, Artificial Sequence
  Description of Artificial Sequence: Synthetic oligonucleotide
uauaccgguagggagucaa

SEQ ID NO: 784946 - RNA, 19 nt, Artificial Sequence
  Description of Artificial Sequence: Synthetic oligonucleotide
caucggggcugauagacuc

SEQ ID NO: 784947 - RNA, 19 nt, Artificial Sequence
  Description of Artificial Sequence: Synthetic oligonucleotide
guaaucacagcccauguuu

SEQ ID NO: 784948 - RNA, 19 nt, Artificial Sequence
  Description of Artificial Sequence: Synthetic oligonucleotide
ucccucuacaguacuccug

SEQ ID NO: 784949 - RNA, 19 nt, Artificial Sequence
  Description of Artificial Sequence: Synthetic oligonucleotide
gucggcaggauucaaucca

SEQ ID NO: 784950 - RNA, 19 nt, Artificial Sequence
  Description of Artificial Sequence: Synthetic oligonucleotide
ugauagacucaaugacccu

SEQ ID NO: 784951 - RNA, 19 nt, Artificial Sequence
  Description of Artificial Sequence: Synthetic oligonucleotide
gcauauugcagagaaugcc

SEQ ID NO: 784952 - RNA, 19 nt, Artificial Sequence
  Description of Artificial Sequence: Synthetic oligonucleotide
aaugaacgauaaccaguuu

SEQ ID NO: 784953 - RNA, 19 nt, Artificial Sequence
  Description of Artificial Sequence: Synthetic oligonucleotide
ggaguuaguugcucucacg

SEQ ID NO: 784954 - RNA, 19 nt, Artificial Sequence
  Description of Artificial Sequence: Synthetic oligonucleotide
gcuguaauucuagaaacac

SEQ ID NO: 784955 - RNA, 19 nt, Artificial Sequence
  Description of Artificial Sequence: Synthetic oligonucleotide
acuuacugugaaaagggaa

SEQ ID NO: 784956 - RNA, 19 nt, Artificial Sequence
  Description of Artificial Sequence: Synthetic oligonucleotide
uucccaaaugcaccagauc

SEQ ID NO: 784957 - RNA, 19 nt, Artificial Sequence
  Description of Artificial Sequence: Synthetic oligonucleotide
gauguaaaugggaccugac

SEQ ID NO: 784958 - RNA, 19 nt, Artificial Sequence
  Description of Artificial Sequence: Synthetic oligonucleotide
gcaccagauccuaagaucc

SEQ ID NO: 784959 - RNA, 19 nt, Artificial Sequence
  Description of Artificial Sequence: Synthetic oligonucleotide
gagaaacgaugacaaucac

SEQ ID NO: 784960 - RNA, 19 nt, Artificial Sequence
  Description of Artificial Sequence: Synthetic oligonucleotide
uuaguugcucucacgcauu

SEQ ID NO: 784961 - RNA, 19 nt, Artificial Sequence
  Description of Artificial Sequence: Synthetic oligonucleotide
caccagauccuaagauccg

SEQ ID NO: 784962 - RNA, 19 nt, Artificial Sequence
  Description of Artificial Sequence: Synthetic oligonucleotide
aagaaucuagucagguuuu

SEQ ID NO: 784963 - RNA, 19 nt, Artificial Sequence
  Description of Artificial Sequence: Synthetic oligonucleotide
aucuuacaucccucuucac

SEQ ID NO: 784964 - RNA, 19 nt, Artificial Sequence
  Description of Artificial Sequence: Synthetic oligonucleotide
augaacagggguauuugga

SEQ ID NO: 784965 - RNA, 19 nt, Artificial Sequence
  Description of Artificial Sequence: Synthetic oligonucleotide
aguauucuccaagucuaca

SEQ ID NO: 784966 - RNA, 19 nt, Artificial Sequence
  Description of Artificial Sequence: Synthetic oligonucleotide
cagacccuucccuacggag

SEQ ID NO: 784967 - RNA, 19 nt, Artificial Sequence
  Description of Artificial Sequence: Synthetic oligonucleotide
auccuaagauccgaccaag

SEQ ID NO: 784968 - RNA, 19 nt, Artificial Sequence
  Description of Artificial Sequence: Synthetic oligonucleotide
aggauucaauccaaagaug

SEQ ID NO: 784969 - RNA, 19 nt, Artificial Sequence
  Description of Artificial Sequence: Synthetic oligonucleotide
caucgaacugcaauggucu

SEQ ID NO: 784970 - RNA, 19 nt, Artificial Sequence
  Description of Artificial Sequence: Synthetic oligonucleotide
aagucuaauuggcccuaaa

SEQ ID NO: 784971 - RNA, 19 nt, Artificial Sequence
  Description of Artificial Sequence: Synthetic oligonucleotide
gcgaauuucauagcguggc

SEQ ID NO: 784972 - RNA, 19 nt, Artificial Sequence
  Description of Artificial Sequence: Synthetic oligonucleotide
uucagaacgcaggguagga

SEQ ID NO: 784973 - RNA, 19 nt, Artificial Sequence
  Description of Artificial Sequence: Synthetic oligonucleotide
gagacguugcuggccaaag

SEQ ID NO: 784974 - RNA, 19 nt, Artificial Sequence
  Description of Artificial Sequence: Synthetic oligonucleotide
gaacgauaaccaguuugac

SEQ ID NO: 784975 - RNA, 19 nt, Artificial Sequence
  Description of Artificial Sequence: Synthetic oligonucleotide
gaccggcuuaauccauagg

SEQ ID NO: 784976 - RNA, 19 nt, Artificial Sequence
  Description of Artificial Sequence: Synthetic oligonucleotide
ucgaacugcaauggucucu

SEQ ID NO: 784977 - RNA, 19 nt, Artificial Sequence
  Description of Artificial Sequence: Synthetic oligonucleotide
cuuaauccauaggcugugc

SEQ ID NO: 784978 - RNA, 19 nt, Artificial Sequence
  Description of Artificial Sequence: Synthetic oligonucleotide
cuaauuggcccuaaagaau

SEQ ID NO: 784979 - RNA, 19 nt, Artificial Sequence
  Description of Artificial Sequence: Synthetic oligonucleotide
cgauguucaaguguggucc

SEQ ID NO: 784980 - RNA, 19 nt, Artificial Sequence
  Description of Artificial Sequence: Synthetic oligonucleotide
gggguuugcauugagauua

SEQ ID NO: 784981 - RNA, 19 nt, Artificial Sequence
  Description of Artificial Sequence: Synthetic oligonucleotide
aaacacgaauguguuucaa

SEQ ID NO: 784982 - RNA, 19 nt, Artificial Sequence
  Description of Artificial Sequence: Synthetic oligonucleotide
uggcaguauucuccaaguc

SEQ ID NO: 784983 - RNA, 19 nt, Artificial Sequence
  Description of Artificial Sequence: Synthetic oligonucleotide
ugccggcucaugaagcuau

SEQ ID NO: 784984 - RNA, 19 nt, Artificial Sequence
  Description of Artificial Sequence: Synthetic oligonucleotide
ggauucaauccaaagaugu

SEQ ID NO: 784985 - RNA, 19 nt, Artificial Sequence
  Description of Artificial Sequence: Synthetic oligonucleotide
cacuuucccaaaugcacca

SEQ ID NO: 784986 - RNA, 19 nt, Artificial Sequence
  Description of Artificial Sequence: Synthetic oligonucleotide
augaagcuaucucgauucu

SEQ ID NO: 784987 - RNA, 19 nt, Artificial Sequence
  Description of Artificial Sequence: Synthetic oligonucleotide
gcaaauaguugaccaaauc

SEQ ID NO: 784988 - RNA, 19 nt, Artificial Sequence
  Description of Artificial Sequence: Synthetic oligonucleotide
uaguugcucucacgcauuc

SEQ ID NO: 784989 - RNA, 19 nt, Artificial Sequence
  Description of Artificial Sequence: Synthetic oligonucleotide
accucauggugucaugcaa

SEQ ID NO: 784990 - RNA, 19 nt, Artificial Sequence
  Description of Artificial Sequence: Synthetic oligonucleotide
caaugaacgauaaccaguu

SEQ ID NO: 784991 - RNA, 19 nt, Artificial Sequence
  Description of Artificial Sequence: Synthetic oligonucleotide
agugccaaggucauucuuu

SEQ ID NO: 784992 - RNA, 19 nt, Artificial Sequence
  Description of Artificial Sequence: Synthetic oligonucleotide
ggcccuaaagaaucuaguc

SEQ ID NO: 784993 - RNA, 19 nt, Artificial Sequence
  Description of Artificial Sequence: Synthetic oligonucleotide
cuaucucgauucuuaugca

SEQ ID NO: 784994 - RNA, 19 nt, Artificial Sequence
  Description of Artificial Sequence: Synthetic oligonucleotide
agcuuugauugucaucaua

SEQ ID NO: 784995 - RNA, 19 nt, Artificial Sequence
  Description of Artificial Sequence: Synthetic oligonucleotide
auauugcagagaaugccaa

SEQ ID NO: 784996 - RNA, 19 nt, Artificial Sequence
  Description of Artificial Sequence: Synthetic oligonucleotide
cccucuacaguacuccugc

SEQ ID NO: 784997 - RNA, 19 nt, Artificial Sequence
  Description of Artificial Sequence: Synthetic oligonucleotide
uaggaccauuuuguacagg

SEQ ID NO: 784998 - RNA, 19 nt, Artificial Sequence
  Description of Artificial Sequence: Synthetic oligonucleotide
gcaguaaucacagcccaug

SEQ ID NO: 784999 - RNA, 19 nt, Artificial Sequence
  Description of Artificial Sequence: Synthetic oligonucleotide
ucggcagacccuucccuac

SEQ ID NO: 785000 - RNA, 19 nt, Artificial Sequence
  Description of Artificial Sequence: Synthetic oligonucleotide
ggcauauugcagagaaugc

SEQ ID NO: 785001 - RNA, 19 nt, Artificial Sequence
  Description of Artificial Sequence: Synthetic oligonucleotide
cacuuacugugaaaaggga

SEQ ID NO: 785002 - RNA, 19 nt, Artificial Sequence
  Description of Artificial Sequence: Synthetic oligonucleotide
uaccgguagggagucaagu

SEQ ID NO: 785003 - RNA, 19 nt, Artificial Sequence
  Description of Artificial Sequence: Synthetic oligonucleotide
ucauaccgagucagcaauu

SEQ ID NO: 785004 - RNA, 19 nt, Artificial Sequence
  Description of Artificial Sequence: Synthetic oligonucleotide
accgguagggagucaagua

SEQ ID NO: 785005 - RNA, 19 nt, Artificial Sequence
  Description of Artificial Sequence: Synthetic oligonucleotide
ggcaaaggacacucguccc

SEQ ID NO: 785006 - RNA, 19 nt, Artificial Sequence
  Description of Artificial Sequence: Synthetic oligonucleotide
ucaagucuaauuggcccua

SEQ ID NO: 785007 - RNA, 19 nt, Artificial Sequence
  Description of Artificial Sequence: Synthetic oligonucleotide
uaggcauauugcagagaau

SEQ ID NO: 785008 - RNA, 19 nt, Artificial Sequence
  Description of Artificial Sequence: Synthetic oligonucleotide
cuccagcgaauuucauagc

SEQ ID NO: 785009 - RNA, 19 nt, Artificial Sequence
  Description of Artificial Sequence: Synthetic oligonucleotide
agacguugcuggccaaagu

SEQ ID NO: 785010 - RNA, 19 nt, Artificial Sequence
  Description of Artificial Sequence: Synthetic oligonucleotide
auccgaccaagcacuaguc

SEQ ID NO: 785011 - RNA, 19 nt, Artificial Sequence
  Description of Artificial Sequence: Synthetic oligonucleotide
ugggguuugcauugagauu

SEQ ID NO: 785012 - RNA, 19 nt, Artificial Sequence
  Description of Artificial Sequence: Synthetic oligonucleotide
ugaagcuaucucgauucuu

SEQ ID NO: 785013 - RNA, 19 nt, Artificial Sequence
  Description of Artificial Sequence: Synthetic oligonucleotide
cucucacgcauucaccaca

SEQ ID NO: 785014 - RNA, 19 nt, Artificial Sequence
  Description of Artificial Sequence: Synthetic oligonucleotide
gcagugauacagcuuguca

SEQ ID NO: 785015 - RNA, 19 nt, Artificial Sequence
  Description of Artificial Sequence: Synthetic oligonucleotide
aaucaccauagaagcagua

SEQ ID NO: 785016 - RNA, 19 nt, Artificial Sequence
  Description of Artificial Sequence: Synthetic oligonucleotide
cauauacagugauugcagu

SEQ ID NO: 785017 - RNA, 19 nt, Artificial Sequence
  Description of Artificial Sequence: Synthetic oligonucleotide
agaaugccaaugaacgaua

SEQ ID NO: 785018 - RNA, 19 nt, Artificial Sequence
  Description of Artificial Sequence: Synthetic oligonucleotide
acucgucccucuacaguac

SEQ ID NO: 785019 - RNA, 19 nt, Artificial Sequence
  Description of Artificial Sequence: Synthetic oligonucleotide
gaaugccaaugaacgauaa

SEQ ID NO: 785020 - RNA, 19 nt, Artificial Sequence
  Description of Artificial Sequence: Synthetic oligonucleotide
ggaccggcuuaauccauag

SEQ ID NO: 785021 - RNA, 19 nt, Artificial Sequence
  Description of Artificial Sequence: Synthetic oligonucleotide
caucccucgggaauuccca

SEQ ID NO: 785022 - RNA, 19 nt, Artificial Sequence
  Description of Artificial Sequence: Synthetic oligonucleotide
gguagggagucaaguaccc

SEQ ID NO: 785023 - RNA, 19 nt, Artificial Sequence
  Description of Artificial Sequence: Synthetic oligonucleotide
ucgucccucuacaguacuc

SEQ ID NO: 785024 - RNA, 19 nt, Artificial Sequence
  Description of Artificial Sequence: Synthetic oligonucleotide
gauaaccaguuugacaguu

SEQ ID NO: 785025 - RNA, 19 nt, Artificial Sequence
  Description of Artificial Sequence: Synthetic oligonucleotide
acggaguuaguugcucuca

SEQ ID NO: 785026 - RNA, 19 nt, Artificial Sequence
  Description of Artificial Sequence: Synthetic oligonucleotide
gccaccgugaguucagaac

SEQ ID NO: 785027 - RNA, 19 nt, Artificial Sequence
  Description of Artificial Sequence: Synthetic oligonucleotide
agggguauuuggaagccau

SEQ ID NO: 785028 - RNA, 19 nt, Artificial Sequence
  Description of Artificial Sequence: Synthetic oligonucleotide
uccauaggcugugccuuca

SEQ ID NO: 785029 - RNA, 19 nt, Artificial Sequence
  Description of Artificial Sequence: Synthetic oligonucleotide
agauccgaccaagcacuag

SEQ ID NO: 785030 - RNA, 19 nt, Artificial Sequence
  Description of Artificial Sequence: Synthetic oligonucleotide
ccgguagggagucaaguac

SEQ ID NO: 785031 - RNA, 19 nt, Artificial Sequence
  Description of Artificial Sequence: Synthetic oligonucleotide
ggcagacccuucccuacgg

SEQ ID NO: 785032 - RNA, 19 nt, Artificial Sequence
  Description of Artificial Sequence: Synthetic oligonucleotide
gcuuaauccauaggcugug

SEQ ID NO: 785033 - RNA, 19 nt, Artificial Sequence
  Description of Artificial Sequence: Synthetic oligonucleotide
caaucuggcucagucuuca

SEQ ID NO: 785034 - RNA, 19 nt, Artificial Sequence
  Description of Artificial Sequence: Synthetic oligonucleotide
ugagacguugcuggccaaa

SEQ ID NO: 785035 - RNA, 19 nt, Artificial Sequence
  Description of Artificial Sequence: Synthetic oligonucleotide
cuuugccaggcaucgaacu

SEQ ID NO: 785036 - RNA, 19 nt, Artificial Sequence
  Description of Artificial Sequence: Synthetic oligonucleotide
ugugccuguggggaauauc

SEQ ID NO: 785037 - RNA, 19 nt, Artificial Sequence
  Description of Artificial Sequence: Synthetic oligonucleotide
ggaccugacuuggugcagg

SEQ ID NO: 785038 - RNA, 19 nt, Artificial Sequence
  Description of Artificial Sequence: Synthetic oligonucleotide
cuuuacugccaccuucaua

SEQ ID NO: 785039 - RNA, 19 nt, Artificial Sequence
  Description of Artificial Sequence: Synthetic oligonucleotide
ugggaccggcuuaauccau

SEQ ID NO: 785040 - RNA, 19 nt, Artificial Sequence
  Description of Artificial Sequence: Synthetic oligonucleotide
caacaguuaaugugccugu

SEQ ID NO: 785041 - RNA, 19 nt, Artificial Sequence
  Description of Artificial Sequence: Synthetic oligonucleotide
ccagauccuaagauccgac

SEQ ID NO: 785042 - RNA, 19 nt, Artificial Sequence
  Description of Artificial Sequence: Synthetic oligonucleotide
ccgaccaagcacuagucca

SEQ ID NO: 785043 - RNA, 19 nt, Artificial Sequence
  Description of Artificial Sequence: Synthetic oligonucleotide
cauugagauuauaccggua

SEQ ID NO: 785044 - RNA, 19 nt, Artificial Sequence
  Description of Artificial Sequence: Synthetic oligonucleotide
cucacgcauucaccacacc

SEQ ID NO: 785045 - RNA, 19 nt, Artificial Sequence
  Description of Artificial Sequence: Synthetic oligonucleotide
uacugucgucggcaggauu

SEQ ID NO: 785046 - RNA, 19 nt, Artificial Sequence
  Description of Artificial Sequence: Synthetic oligonucleotide
ggcgauggaacucugugau

SEQ ID NO: 785047 - RNA, 19 nt, Artificial Sequence
  Description of Artificial Sequence: Synthetic oligonucleotide
auaccgguagggagucaag

SEQ ID NO: 785048 - RNA, 19 nt, Artificial Sequence
  Description of Artificial Sequence: Synthetic oligonucleotide
aguugcucucacgcauuca

SEQ ID NO: 785049 - RNA, 19 nt, Artificial Sequence
  Description of Artificial Sequence: Synthetic oligonucleotide
cauaccgagucagcaauua

SEQ ID NO: 785050 - RNA, 19 nt, Artificial Sequence
  Description of Artificial Sequence: Synthetic oligonucleotide
guuugacaguuuggauggc

SEQ ID NO: 785051 - RNA, 19 nt, Artificial Sequence
  Description of Artificial Sequence: Synthetic oligonucleotide
ccaagucuacauagcaaca

SEQ ID NO: 785052 - RNA, 19 nt, Artificial Sequence
  Description of Artificial Sequence: Synthetic oligonucleotide
uuauaccgguagggaguca

SEQ ID NO: 785053 - RNA, 19 nt, Artificial Sequence
  Description of Artificial Sequence: Synthetic oligonucleotide
aaucggggauacacucaaa

SEQ ID NO: 785054 - RNA, 19 nt, Artificial Sequence
  Description of Artificial Sequence: Synthetic oligonucleotide
cuacggaguuaguugcucu

SEQ ID NO: 785055 - RNA, 19 nt, Artificial Sequence
  Description of Artificial Sequence: Synthetic oligonucleotide
cauagcguggcuucugcuu

SEQ ID NO: 785056 - RNA, 19 nt, Artificial Sequence
  Description of Artificial Sequence: Synthetic oligonucleotide
gcaucggcagacccuuccc

SEQ ID NO: 785057 - RNA, 19 nt, Artificial Sequence
  Description of Artificial Sequence: Synthetic oligonucleotide
ccgugaguucagaacgcag

SEQ ID NO: 785058 - RNA, 19 nt, Artificial Sequence
  Description of Artificial Sequence: Synthetic oligonucleotide
guacagguuggcagaccac

SEQ ID NO: 785059 - RNA, 19 nt, Artificial Sequence
  Description of Artificial Sequence: Synthetic oligonucleotide
cgauggaacucugugauga

SEQ ID NO: 785060 - RNA, 19 nt, Artificial Sequence
  Description of Artificial Sequence: Synthetic oligonucleotide
gaacgcaggguaggagcca

SEQ ID NO: 785061 - RNA, 19 nt, Artificial Sequence
  Description of Artificial Sequence: Synthetic oligonucleotide
cagaauguuugagcuguaa

SEQ ID NO: 785062 - RNA, 19 nt, Artificial Sequence
  Description of Artificial Sequence: Synthetic oligonucleotide
aagauccgaccaagcacua

SEQ ID NO: 785063 - RNA, 19 nt, Artificial Sequence
  Description of Artificial Sequence: Synthetic oligonucleotide
caguaaucacagcccaugu

SEQ ID NO: 785064 - RNA, 19 nt, Artificial Sequence
  Description of Artificial Sequence: Synthetic oligonucleotide
acaucccucuucacaaaua

SEQ ID NO: 785065 - RNA, 19 nt, Artificial Sequence
  Description of Artificial Sequence: Synthetic oligonucleotide
gcgauggaacucugugaug

SEQ ID NO: 785066 - RNA, 19 nt, Artificial Sequence
  Description of Artificial Sequence: Synthetic oligonucleotide
cucaugaagcuaucucgau

SEQ ID NO: 785067 - RNA, 19 nt, Artificial Sequence
  Description of Artificial Sequence: Synthetic oligonucleotide
ucgggccagcuuugauugu

SEQ ID NO: 785068 - RNA, 19 nt, Artificial Sequence
  Description of Artificial Sequence: Synthetic oligonucleotide
ggcagugauacagcuuguc

SEQ ID NO: 785069 - RNA, 19 nt, Artificial Sequence
  Description of Artificial Sequence: Synthetic oligonucleotide
cgucggcaggauucaaucc

SEQ ID NO: 785070 - RNA, 19 nt, Artificial Sequence
  Description of Artificial Sequence: Synthetic oligonucleotide
cacgauguucaaguguggu

SEQ ID NO: 785071 - RNA, 19 nt, Artificial Sequence
  Description of Artificial Sequence: Synthetic oligonucleotide
uugcaucggcagacccuuc

SEQ ID NO: 785072 - RNA, 19 nt, Artificial Sequence
  Description of Artificial Sequence: Synthetic oligonucleotide
ugccucggcgauggaacuc

SEQ ID NO: 785073 - RNA, 19 nt, Artificial Sequence
  Description of Artificial Sequence: Synthetic oligonucleotide
agcucagacaugagagcuu

SEQ ID NO: 785074 - RNA, 19 nt, Artificial Sequence
  Description of Artificial Sequence: Synthetic oligonucleotide
ggcuuaauccauaggcugu

SEQ ID NO: 785075 - RNA, 19 nt, Artificial Sequence
  Description of Artificial Sequence: Synthetic oligonucleotide
gaguguggcagugcaugcu

SEQ ID NO: 785076 - RNA, 19 nt, Artificial Sequence
  Description of Artificial Sequence: Synthetic oligonucleotide
ccacauuauaagggcauca

SEQ ID NO: 785077 - RNA, 19 nt, Artificial Sequence
  Description of Artificial Sequence: Synthetic oligonucleotide
cuugcaucggcagacccuu

SEQ ID NO: 785078 - RNA, 19 nt, Artificial Sequence
  Description of Artificial Sequence: Synthetic oligonucleotide
ugucgucggcaggauucaa

SEQ ID NO: 785079 - RNA, 19 nt, Artificial Sequence
  Description of Artificial Sequence: Synthetic oligonucleotide
ccuacggaguuaguugcuc

SEQ ID NO: 785080 - RNA, 19 nt, Artificial Sequence
  Description of Artificial Sequence: Synthetic oligonucleotide
cuucccuacggaguuaguu

SEQ ID NO: 785081 - RNA, 19 nt, Artificial Sequence
  Description of Artificial Sequence: Synthetic oligonucleotide
ccaaccucauggugucaug

SEQ ID NO: 785082 - RNA, 19 nt, Artificial Sequence
  Description of Artificial Sequence: Synthetic oligonucleotide
cucagucuucacacuuacu

SEQ ID NO: 785083 - RNA, 19 nt, Artificial Sequence
  Description of Artificial Sequence: Synthetic oligonucleotide
ggugccggcucaugaagcu

SEQ ID NO: 785084 - RNA, 19 nt, Artificial Sequence
  Description of Artificial Sequence: Synthetic oligonucleotide
cugucgucggcaggauuca

SEQ ID NO: 785085 - RNA, 19 nt, Artificial Sequence
  Description of Artificial Sequence: Synthetic oligonucleotide
guccaucggggcugauaga

SEQ ID NO: 785086 - RNA, 19 nt, Artificial Sequence
  Description of Artificial Sequence: Synthetic oligonucleotide
cccuucccuacggaguuag

SEQ ID NO: 785087 - RNA, 19 nt, Artificial Sequence
  Description of Artificial Sequence: Synthetic oligonucleotide
caucggcagacccuucccu

SEQ ID NO: 785088 - RNA, 19 nt, Artificial Sequence
  Description of Artificial Sequence: Synthetic oligonucleotide
auccaaccucaugguguca

SEQ ID NO: 785089 - RNA, 19 nt, Artificial Sequence
  Description of Artificial Sequence: Synthetic oligonucleotide
aggcagugauacagcuugu

SEQ ID NO: 785090 - RNA, 19 nt, Artificial Sequence
  Description of Artificial Sequence: Synthetic oligonucleotide
caagucuaauuggcccuaa

SEQ ID NO: 785091 - RNA, 19 nt, Artificial Sequence
  Description of Artificial Sequence: Synthetic oligonucleotide
gggaccugacuuggugcag

SEQ ID NO: 785092 - RNA, 19 nt, Artificial Sequence
  Description of Artificial Sequence: Synthetic oligonucleotide
gggguauuuggaagccauc

SEQ ID NO: 785093 - RNA, 19 nt, Artificial Sequence
  Description of Artificial Sequence: Synthetic oligonucleotide
cggaguuaguugcucucac

SEQ ID NO: 785094 - RNA, 19 nt, Artificial Sequence
  Description of Artificial Sequence: Synthetic oligonucleotide
acagaauguuugagcugua

SEQ ID NO: 785095 - RNA, 19 nt, Artificial Sequence
  Description of Artificial Sequence: Synthetic oligonucleotide
cgauucuuaugcaaauagu

SEQ ID NO: 785096 - RNA, 19 nt, Artificial Sequence
  Description of Artificial Sequence: Synthetic oligonucleotide
ccggcuuaauccauaggcu

SEQ ID NO: 785097 - RNA, 19 nt, Artificial Sequence
  Description of Artificial Sequence: Synthetic oligonucleotide
ccagcgaauuucauagcgu

SEQ ID NO: 785098 - RNA, 19 nt, Artificial Sequence
  Description of Artificial Sequence: Synthetic oligonucleotide
gcugugugaaugggugaca

SEQ ID NO: 785099 - RNA, 19 nt, Artificial Sequence
  Description of Artificial Sequence: Synthetic oligonucleotide
cucgucccucuacaguacu

SEQ ID NO: 785100 - RNA, 19 nt, Artificial Sequence
  Description of Artificial Sequence: Synthetic oligonucleotide
ggugucaugcaaggcccaa

SEQ ID NO: 785101 - RNA, 19 nt, Artificial Sequence
  Description of Artificial Sequence: Synthetic oligonucleotide
cccuccagcgaauuucaua

SEQ ID NO: 785102 - RNA, 19 nt, Artificial Sequence
  Description of Artificial Sequence: Synthetic oligonucleotide
gucgucggcaggauucaau

SEQ ID NO: 785103 - RNA, 19 nt, Artificial Sequence
  Description of Artificial Sequence: Synthetic oligonucleotide
ggggaauaucacaguuaaa

SEQ ID NO: 785104 - RNA, 19 nt, Artificial Sequence
  Description of Artificial Sequence: Synthetic oligonucleotide
caauggucucuuccacuuu

SEQ ID NO: 785105 - RNA, 19 nt, Artificial Sequence
  Description of Artificial Sequence: Synthetic oligonucleotide
guacuccugccucggcgau

SEQ ID NO: 785106 - RNA, 19 nt, Artificial Sequence
  Description of Artificial Sequence: Synthetic oligonucleotide
cagccgccaccgugaguuc

SEQ ID NO: 785107 - RNA, 19 nt, Artificial Sequence
  Description of Artificial Sequence: Synthetic oligonucleotide
gugccggcucaugaagcua

SEQ ID NO: 785108 - RNA, 19 nt, Artificial Sequence
  Description of Artificial Sequence: Synthetic oligonucleotide
cggcgauggaacucuguga

SEQ ID NO: 785109 - RNA, 19 nt, Artificial Sequence
  Description of Artificial Sequence: Synthetic oligonucleotide
ccauguagucaccauuguu

SEQ ID NO: 785110 - RNA, 19 nt, Artificial Sequence
  Description of Artificial Sequence: Synthetic oligonucleotide
gguuggcagaccacauuau

SEQ ID NO: 785111 - RNA, 19 nt, Artificial Sequence
  Description of Artificial Sequence: Synthetic oligonucleotide
gggaccggcuuaauccaua

SEQ ID NO: 785112 - RNA, 19 nt, Artificial Sequence
  Description of Artificial Sequence: Synthetic oligonucleotide
gccucggcgauggaacucu

SEQ ID NO: 785113 - RNA, 19 nt, Artificial Sequence
  Description of Artificial Sequence: Synthetic oligonucleotide
gggugacaaacagaauguu

SEQ ID NO: 785114 - RNA, 19 nt, Artificial Sequence
  Description of Artificial Sequence: Synthetic oligonucleotide
ggaccauuuuguacagguu

SEQ ID NO: 785115 - RNA, 19 nt, Artificial Sequence
  Description of Artificial Sequence: Synthetic oligonucleotide
uggucccaagugggucauu

SEQ ID NO: 785116 - RNA, 19 nt, Artificial Sequence
  Description of Artificial Sequence: Synthetic oligonucleotide
ccucgggccagcuuugauu

SEQ ID NO: 785117 - RNA, 19 nt, Artificial Sequence
  Description of Artificial Sequence: Synthetic oligonucleotide
guacugucgucggcaggau

SEQ ID NO: 785118 - RNA, 19 nt, Artificial Sequence
  Description of Artificial Sequence: Synthetic oligonucleotide
gucagcaauuaggcauauu

SEQ ID NO: 785119 - RNA, 19 nt, Artificial Sequence
  Description of Artificial Sequence: Synthetic oligonucleotide
ccaucggggcugauagacu

SEQ ID NO: 785120 - RNA, 19 nt, Artificial Sequence
  Description of Artificial Sequence: Synthetic oligonucleotide
cgaccaagcacuaguccau

SEQ ID NO: 785121 - RNA, 19 nt, Artificial Sequence
  Description of Artificial Sequence: Synthetic oligonucleotide
cgauaaccaguuugacagu

SEQ ID NO: 785122 - RNA, 19 nt, Artificial Sequence
  Description of Artificial Sequence: Synthetic oligonucleotide
gccggcucaugaagcuauc

SEQ ID NO: 785123 - RNA, 19 nt, Artificial Sequence
  Description of Artificial Sequence: Synthetic oligonucleotide
cccuacggaguuaguugcu

SEQ ID NO: 785124 - RNA, 19 nt, Artificial Sequence
  Description of Artificial Sequence: Synthetic oligonucleotide
ggguuugcauugagauuau

SEQ ID NO: 785125 - RNA, 19 nt, Artificial Sequence
  Description of Artificial Sequence: Synthetic oligonucleotide
caccugcuggaagcauaua

SEQ ID NO: 785126 - RNA, 19 nt, Artificial Sequence
  Description of Artificial Sequence: Synthetic oligonucleotide
ccggcucaugaagcuaucu

SEQ ID NO: 785127 - RNA, 19 nt, Artificial Sequence
  Description of Artificial Sequence: Synthetic oligonucleotide
ccuucccuacggaguuagu

SEQ ID NO: 785128 - RNA, 19 nt, Artificial Sequence
  Description of Artificial Sequence: Synthetic oligonucleotide
aagacccgcaucuugaugg

SEQ ID NO: 785129 - RNA, 19 nt, Artificial Sequence
  Description of Artificial Sequence: Synthetic oligonucleotide
auaccagcgacacacaagc

SEQ ID NO: 785130 - RNA, 19 nt, Artificial Sequence
  Description of Artificial Sequence: Synthetic oligonucleotide
guagucuugaacuugggcg

SEQ ID NO: 785131 - RNA, 19 nt, Artificial Sequence
  Description of Artificial Sequence: Synthetic oligonucleotide
aauuccaccgacuugcucu

SEQ ID NO: 785132 - RNA, 19 nt, Artificial Sequence
  Description of Artificial Sequence: Synthetic oligonucleotide
ugguaugugaaucucuacg

SEQ ID NO: 785133 - RNA, 19 nt, Artificial Sequence
  Description of Artificial Sequence: Synthetic oligonucleotide
uaauguaacugucacacac

SEQ ID NO: 785134 - RNA, 19 nt, Artificial Sequence
  Description of Artificial Sequence: Synthetic oligonucleotide
aaauaggggaucucgaacu

SEQ ID NO: 785135 - RNA, 19 nt, Artificial Sequence
  Description of Artificial Sequence: Synthetic oligonucleotide
agguuguugugcuuaaucc

SEQ ID NO: 785136 - RNA, 19 nt, Artificial Sequence
  Description of Artificial Sequence: Synthetic oligonucleotide
ugcuuaauccacaugaaac

SEQ ID NO: 785137 - RNA, 19 nt, Artificial Sequence
  Description of Artificial Sequence: Synthetic oligonucleotide
gaaacgaacgccaccaugg

SEQ ID NO: 785138 - RNA, 19 nt, Artificial Sequence
  Description of Artificial Sequence: Synthetic oligonucleotide
cugaccaagagguuaaccg

SEQ ID NO: 785139 - RNA, 19 nt, Artificial Sequence
  Description of Artificial Sequence: Synthetic oligonucleotide
uaggacaugaguucgaacu

SEQ ID NO: 785140 - RNA, 19 nt, Artificial Sequence
  Description of Artificial Sequence: Synthetic oligonucleotide
auccacaugaaacgaacgc

SEQ ID NO: 785141 - RNA, 19 nt, Artificial Sequence
  Description of Artificial Sequence: Synthetic oligonucleotide
agguccaguacguagacgg

SEQ ID NO: 785142 - RNA, 19 nt, Artificial Sequence
  Description of Artificial Sequence: Synthetic oligonucleotide
uucacauggguguugaggc

SEQ ID NO: 785143 - RNA, 19 nt, Artificial Sequence
  Description of Artificial Sequence: Synthetic oligonucleotide
auaugcucaacaaaauggc

SEQ ID NO: 785144 - RNA, 19 nt, Artificial Sequence
  Description of Artificial Sequence: Synthetic oligonucleotide
uuaaccgccucaaugacgu

SEQ ID NO: 785145 - RNA, 19 nt, Artificial Sequence
  Description of Artificial Sequence: Synthetic oligonucleotide
ugaaguggcgaccagguac

SEQ ID NO: 785146 - RNA, 19 nt, Artificial Sequence
  Description of Artificial Sequence: Synthetic oligonucleotide
ugugauguagcgcacccag

SEQ ID NO: 785147 - RNA, 19 nt, Artificial Sequence
  Description of Artificial Sequence: Synthetic oligonucleotide
uaugugaaucucuacguug

SEQ ID NO: 785148 - RNA, 19 nt, Artificial Sequence
  Description of Artificial Sequence: Synthetic oligonucleotide
ucagcugcgguuucgaugc

SEQ ID NO: 785149 - RNA, 19 nt, Artificial Sequence
  Description of Artificial Sequence: Synthetic oligonucleotide
uguguugucgaagaggacc

SEQ ID NO: 785150 - RNA, 19 nt, Artificial Sequence
  Description of Artificial Sequence: Synthetic oligonucleotide
ucggcaauagccgagggcg

SEQ ID NO: 785151 - RNA, 19 nt, Artificial Sequence
  Description of Artificial Sequence: Synthetic oligonucleotide
aacuauccuggacauggac

SEQ ID NO: 785152 - RNA, 19 nt, Artificial Sequence
  Description of Artificial Sequence: Synthetic oligonucleotide
ucaaugacguccaggaaca

SEQ ID NO: 785153 - RNA, 19 nt, Artificial Sequence
  Description of Artificial Sequence: Synthetic oligonucleotide
agugaaauaggggaucucg

SEQ ID NO: 785154 - RNA, 19 nt, Artificial Sequence
  Description of Artificial Sequence: Synthetic oligonucleotide
agugacaguagcccaugcc

SEQ ID NO: 785155 - RNA, 19 nt, Artificial Sequence
  Description of Artificial Sequence: Synthetic oligonucleotide
cucaaugacguccaggaac

SEQ ID NO: 785156 - RNA, 19 nt, Artificial Sequence
  Description of Artificial Sequence: Synthetic oligonucleotide
uuugaaguggcgaccaggu

SEQ ID NO: 785157 - RNA, 19 nt, Artificial Sequence
  Description of Artificial Sequence: Synthetic oligonucleotide
uguagucuugaacuugggc

SEQ ID NO: 785158 - RNA, 19 nt, Artificial Sequence
  Description of Artificial Sequence: Synthetic oligonucleotide
acaugaaacgaacgccacc

SEQ ID NO: 785159 - RNA, 19 nt, Artificial Sequence
  Description of Artificial Sequence: Synthetic oligonucleotide
gacauggcgucuuuggaag

SEQ ID NO: 785160 - RNA, 19 nt, Artificial Sequence
  Description of Artificial Sequence: Synthetic oligonucleotide
ugaucaauaugcucaacaa

SEQ ID NO: 785161 - RNA, 19 nt, Artificial Sequence
  Description of Artificial Sequence: Synthetic oligonucleotide
acgaacgccaccaugggcc

SEQ ID NO: 785162 - RNA, 19 nt, Artificial Sequence
  Description of Artificial Sequence: Synthetic oligonucleotide
agcacguuaccguuggcac

SEQ ID NO: 785163 - RNA, 19 nt, Artificial Sequence
  Description of Artificial Sequence: Synthetic oligonucleotide
gucauugaggcccaggcgc

SEQ ID NO: 785164 - RNA, 19 nt, Artificial Sequence
  Description of Artificial Sequence: Synthetic oligonucleotide
gaaauaggggaucucgaac

SEQ ID NO: 785165 - RNA, 19 nt, Artificial Sequence
  Description of Artificial Sequence: Synthetic oligonucleotide
uuuugaaguggcgaccagg

SEQ ID NO: 785166 - RNA, 19 nt, Artificial Sequence
  Description of Artificial Sequence: Synthetic oligonucleotide
aaacgaacgccaccauggg

SEQ ID NO: 785167 - RNA, 19 nt, Artificial Sequence
  Description of Artificial Sequence: Synthetic oligonucleotide
ucucaaagcgugacagccg

SEQ ID NO: 785168 - RNA, 19 nt, Artificial Sequence
  Description of Artificial Sequence: Synthetic oligonucleotide
ucgaagaggaccuugucau

SEQ ID NO: 785169 - RNA, 19 nt, Artificial Sequence
  Description of Artificial Sequence: Synthetic oligonucleotide
agguuaaccgccucaauga

SEQ ID NO: 785170 - RNA, 19 nt, Artificial Sequence
  Description of Artificial Sequence: Synthetic oligonucleotide
ugaaacgaacgccaccaug

SEQ ID NO: 785171 - RNA, 19 nt, Artificial Sequence
  Description of Artificial Sequence: Synthetic oligonucleotide
uuaauccacaugaaacgaa

SEQ ID NO: 785172 - RNA, 19 nt, Artificial Sequence
  Description of Artificial Sequence: Synthetic oligonucleotide
aauaccagcgacacacaag

SEQ ID NO: 785173 - RNA, 19 nt, Artificial Sequence
  Description of Artificial Sequence: Synthetic oligonucleotide
aguuccggcagaugaguac

SEQ ID NO: 785174 - RNA, 19 nt, Artificial Sequence
  Description of Artificial Sequence: Synthetic oligonucleotide
ugcggucguucucaaagcg

SEQ ID NO: 785175 - RNA, 19 nt, Artificial Sequence
  Description of Artificial Sequence: Synthetic oligonucleotide
aggacaugaguucgaacuc

SEQ ID NO: 785176 - RNA, 19 nt, Artificial Sequence
  Description of Artificial Sequence: Synthetic oligonucleotide
ugaaauaggggaucucgaa

SEQ ID NO: 785177 - RNA, 19 nt, Artificial Sequence
  Description of Artificial Sequence: Synthetic oligonucleotide
ggaugaacgagauggugcg

SEQ ID NO: 785178 - RNA, 19 nt, Artificial Sequence
  Description of Artificial Sequence: Synthetic oligonucleotide
gauaggugacagcaugccc

SEQ ID NO: 785179 - RNA, 19 nt, Artificial Sequence
  Description of Artificial Sequence: Synthetic oligonucleotide
agagguagugaaauagggg

SEQ ID NO: 785180 - RNA, 19 nt, Artificial Sequence
  Description of Artificial Sequence: Synthetic oligonucleotide
ucgauccagaucaaaggcu

SEQ ID NO: 785181 - RNA, 19 nt, Artificial Sequence
  Description of Artificial Sequence: Synthetic oligonucleotide
cuucagguagcgcaccugg

SEQ ID NO: 785182 - RNA, 19 nt, Artificial Sequence
  Description of Artificial Sequence: Synthetic oligonucleotide
aaggccucggcaauagccg

SEQ ID NO: 785183 - RNA, 19 nt, Artificial Sequence
  Description of Artificial Sequence: Synthetic oligonucleotide
acguagacggcgcuggcgg

SEQ ID NO: 785184 - RNA, 19 nt, Artificial Sequence
  Description of Artificial Sequence: Synthetic oligonucleotide
acugccggcguucagcaag

SEQ ID NO: 785185 - RNA, 19 nt, Artificial Sequence
  Description of Artificial Sequence: Synthetic oligonucleotide
gaguaccuugccuuucagg

SEQ ID NO: 785186 - RNA, 19 nt, Artificial Sequence
  Description of Artificial Sequence: Synthetic oligonucleotide
aauguaacugucacacaca

SEQ ID NO: 785187 - RNA, 19 nt, Artificial Sequence
  Description of Artificial Sequence: Synthetic oligonucleotide
accaaagugggcccgcauc

SEQ ID NO: 785188 - RNA, 19 nt, Artificial Sequence
  Description of Artificial Sequence: Synthetic oligonucleotide
aguacguagacggcgcugg

SEQ ID NO: 785189 - RNA, 19 nt, Artificial Sequence
  Description of Artificial Sequence: Synthetic oligonucleotide
aaggacuugauggaccaca

SEQ ID NO: 785190 - RNA, 19 nt, Artificial Sequence
  Description of Artificial Sequence: Synthetic oligonucleotide
ucuccguucugugugaugu

SEQ ID NO: 785191 - RNA, 19 nt, Artificial Sequence
  Description of Artificial Sequence: Synthetic oligonucleotide
aacuucacguccuccaauu

SEQ ID NO: 785192 - RNA, 19 nt, Artificial Sequence
  Description of Artificial Sequence: Synthetic oligonucleotide
ucgggcaugccugagagga

SEQ ID NO: 785193 - RNA, 19 nt, Artificial Sequence
  Description of Artificial Sequence: Synthetic oligonucleotide
gacguccaggaacacuucg

SEQ ID NO: 785194 - RNA, 19 nt, Artificial Sequence
  Description of Artificial Sequence: Synthetic oligonucleotide
uguagcgcacccaggggag

SEQ ID NO: 785195 - RNA, 19 nt, Artificial Sequence
  Description of Artificial Sequence: Synthetic oligonucleotide
uacuugaugcccuccgagc

SEQ ID NO: 785196 - RNA, 19 nt, Artificial Sequence
  Description of Artificial Sequence: Synthetic oligonucleotide
ggugcggucguucucaaag

SEQ ID NO: 785197 - RNA, 19 nt, Artificial Sequence
  Description of Artificial Sequence: Synthetic oligonucleotide
aauagccgagggcggcggc

SEQ ID NO: 785198 - RNA, 19 nt, Artificial Sequence
  Description of Artificial Sequence: Synthetic oligonucleotide
uguaacugucacacacacc

SEQ ID NO: 785199 - RNA, 19 nt, Artificial Sequence
  Description of Artificial Sequence: Synthetic oligonucleotide
aacgagauggugcggucgu

SEQ ID NO: 785200 - RNA, 19 nt, Artificial Sequence
  Description of Artificial Sequence: Synthetic oligonucleotide
cuauccuggacauggacca

SEQ ID NO: 785201 - RNA, 19 nt, Artificial Sequence
  Description of Artificial Sequence: Synthetic oligonucleotide
aagaccaaagugggcccgc

SEQ ID NO: 785202 - RNA, 19 nt, Artificial Sequence
  Description of Artificial Sequence: Synthetic oligonucleotide
uguugaggcgguaggacau

SEQ ID NO: 785203 - RNA, 19 nt, Artificial Sequence
  Description of Artificial Sequence: Synthetic oligonucleotide
gaucucgaacuugacacug

SEQ ID NO: 785204 - RNA, 19 nt, Artificial Sequence
  Description of Artificial Sequence: Synthetic oligonucleotide
aaugacguccaggaacacu

SEQ ID NO: 785205 - RNA, 19 nt, Artificial Sequence
  Description of Artificial Sequence: Synthetic oligonucleotide
cauauccacauccccgcgg

SEQ ID NO: 785206 - RNA, 19 nt, Artificial Sequence
  Description of Artificial Sequence: Synthetic oligonucleotide
aauaggggaucucgaacuu

SEQ ID NO: 785207 - RNA, 19 nt, Artificial Sequence
  Description of Artificial Sequence: Synthetic oligonucleotide
guuaaccgccucaaugacg

SEQ ID NO: 785208 - RNA, 19 nt, Artificial Sequence
  Description of Artificial Sequence: Synthetic oligonucleotide
cuugccacccggaaaggac

SEQ ID NO: 785209 - RNA, 19 nt, Artificial Sequence
  Description of Artificial Sequence: Synthetic oligonucleotide
gaccaagagguuaaccgcc

SEQ ID NO: 785210 - RNA, 19 nt, Artificial Sequence
  Description of Artificial Sequence: Synthetic oligonucleotide
cuuggggaaacacugaugu

SEQ ID NO: 785211 - RNA, 19 nt, Artificial Sequence
  Description of Artificial Sequence: Synthetic oligonucleotide
gauggaccacacgaucucg

SEQ ID NO: 785212 - RNA, 19 nt, Artificial Sequence
  Description of Artificial Sequence: Synthetic oligonucleotide
aaggagaauaccagcgaca

SEQ ID NO: 785213 - RNA, 19 nt, Artificial Sequence
  Description of Artificial Sequence: Synthetic oligonucleotide
caugaaacgaacgccacca

SEQ ID NO: 785214 - RNA, 19 nt, Artificial Sequence
  Description of Artificial Sequence: Synthetic oligonucleotide
uuguugugcuuaauccaca

SEQ ID NO: 785215 - RNA, 19 nt, Artificial Sequence
  Description of Artificial Sequence: Synthetic oligonucleotide
uugucgaagaggaccuugu

SEQ ID NO: 785216 - RNA, 19 nt, Artificial Sequence
  Description of Artificial Sequence: Synthetic oligonucleotide
agggaaugguucugcgugg

SEQ ID NO: 785217 - RNA, 19 nt, Artificial Sequence
  Description of Artificial Sequence: Synthetic oligonucleotide
auauccacauccccgcggu

SEQ ID NO: 785218 - RNA, 19 nt, Artificial Sequence
  Description of Artificial Sequence: Synthetic oligonucleotide
aaauggcaacaaaaggaga

SEQ ID NO: 785219 - RNA, 19 nt, Artificial Sequence
  Description of Artificial Sequence: Synthetic oligonucleotide
gggaagaccaaagugggcc

SEQ ID NO: 785220 - RNA, 19 nt, Artificial Sequence
  Description of Artificial Sequence: Synthetic oligonucleotide
gaacgagauggugcggucg

SEQ ID NO: 785221 - RNA, 19 nt, Artificial Sequence
  Description of Artificial Sequence: Synthetic oligonucleotide
agcucguagaugaugacga

SEQ ID NO: 785222 - RNA, 19 nt, Artificial Sequence
  Description of Artificial Sequence: Synthetic oligonucleotide
uguugugcuuaauccacau

SEQ ID NO: 785223 - RNA, 19 nt, Artificial Sequence
  Description of Artificial Sequence: Synthetic oligonucleotide
ugaguaccuugccuuucag

SEQ ID NO: 785224 - RNA, 19 nt, Artificial Sequence
  Description of Artificial Sequence: Synthetic oligonucleotide
gaagaccaaagugggcccg

SEQ ID NO: 785225 - RNA, 19 nt, Artificial Sequence
  Description of Artificial Sequence: Synthetic oligonucleotide
cagguuguugugcuuaauc

SEQ ID NO: 785226 - RNA, 19 nt, Artificial Sequence
  Description of Artificial Sequence: Synthetic oligonucleotide
gaagacccgcaucuugaug

SEQ ID NO: 785227 - RNA, 19 nt, Artificial Sequence
  Description of Artificial Sequence: Synthetic oligonucleotide
acccgcaucuugauggagc

SEQ ID NO: 785228 - RNA, 19 nt, Artificial Sequence
  Description of Artificial Sequence: Synthetic oligonucleotide
ugcgguuucgaugcgugug

SEQ ID NO: 785229 - RNA, 19 nt, Artificial Sequence
  Description of Artificial Sequence: Synthetic oligonucleotide
uacguuguuggcuguugac

SEQ ID NO: 785230 - RNA, 19 nt, Artificial Sequence
  Description of Artificial Sequence: Synthetic oligonucleotide
cagcucguagaugaugacg

SEQ ID NO: 785231 - RNA, 19 nt, Artificial Sequence
  Description of Artificial Sequence: Synthetic oligonucleotide
uacguagacggcgcuggcg

SEQ ID NO: 785232 - RNA, 19 nt, Artificial Sequence
  Description of Artificial Sequence: Synthetic oligonucleotide
guccaguacguagacggcg

SEQ ID NO: 785233 - RNA, 19 nt, Artificial Sequence
  Description of Artificial Sequence: Synthetic oligonucleotide
ccgguuuccagcuuguggc

SEQ ID NO: 785234 - RNA, 19 nt, Artificial Sequence
  Description of Artificial Sequence: Synthetic oligonucleotide
aagagguuaaccgccucaa

SEQ ID NO: 785235 - RNA, 19 nt, Artificial Sequence
  Description of Artificial Sequence: Synthetic oligonucleotide
ucguucucaaagcgugaca

SEQ ID NO: 785236 - RNA, 19 nt, Artificial Sequence
  Description of Artificial Sequence: Synthetic oligonucleotide
gagccgaggcucaaucugg

SEQ ID NO: 785237 - RNA, 19 nt, Artificial Sequence
  Description of Artificial Sequence: Synthetic oligonucleotide
gguuguugugcuuaaucca

SEQ ID NO: 785238 - RNA, 19 nt, Artificial Sequence
  Description of Artificial Sequence: Synthetic oligonucleotide
guuaccguuggcacugacc

SEQ ID NO: 785239 - RNA, 19 nt, Artificial Sequence
  Description of Artificial Sequence: Synthetic oligonucleotide
ccagagguagugaaauagg

SEQ ID NO: 785240 - RNA, 19 nt, Artificial Sequence
  Description of Artificial Sequence: Synthetic oligonucleotide
gaauaccagcgacacacaa

SEQ ID NO: 785241 - RNA, 19 nt, Artificial Sequence
  Description of Artificial Sequence: Synthetic oligonucleotide
gagucagcgucguugggga

SEQ ID NO: 785242 - RNA, 19 nt, Artificial Sequence
  Description of Artificial Sequence: Synthetic oligonucleotide
auggaccacacgaucucgc

SEQ ID NO: 785243 - RNA, 19 nt, Artificial Sequence
  Description of Artificial Sequence: Synthetic oligonucleotide
acucgauucggcuguggga

SEQ ID NO: 785244 - RNA, 19 nt, Artificial Sequence
  Description of Artificial Sequence: Synthetic oligonucleotide
auggcgucuuuggaaggcc

SEQ ID NO: 785245 - RNA, 19 nt, Artificial Sequence
  Description of Artificial Sequence: Synthetic oligonucleotide
cacgaagugcugcauggug

SEQ ID NO: 785246 - RNA, 19 nt, Artificial Sequence
  Description of Artificial Sequence: Synthetic oligonucleotide
uuguuggcuguugaccgcc

SEQ ID NO: 785247 - RNA, 19 nt, Artificial Sequence
  Description of Artificial Sequence: Synthetic oligonucleotide
augaacgagauggugcggu

SEQ ID NO: 785248 - RNA, 19 nt, Artificial Sequence
  Description of Artificial Sequence: Synthetic oligonucleotide
ucugugugauguagcgcac

SEQ ID NO: 785249 - RNA, 19 nt, Artificial Sequence
  Description of Artificial Sequence: Synthetic oligonucleotide
gaaguggcgaccagguaca

SEQ ID NO: 785250 - RNA, 19 nt, Artificial Sequence
  Description of Artificial Sequence: Synthetic oligonucleotide
aggacuugauggaccacac

SEQ ID NO: 785251 - RNA, 19 nt, Artificial Sequence
  Description of Artificial Sequence: Synthetic oligonucleotide
guuguuggcuguugaccgc

SEQ ID NO: 785252 - RNA, 19 nt, Artificial Sequence
  Description of Artificial Sequence: Synthetic oligonucleotide
cuguagucuugaacuuggg

SEQ ID NO: 785253 - RNA, 19 nt, Artificial Sequence
  Description of Artificial Sequence: Synthetic oligonucleotide
cguuguuggcuguugaccg

SEQ ID NO: 785254 - RNA, 19 nt, Artificial Sequence
  Description of Artificial Sequence: Synthetic oligonucleotide
acugcgcagcacguuaccg

SEQ ID NO: 785255 - RNA, 19 nt, Artificial Sequence
  Description of Artificial Sequence: Synthetic oligonucleotide
guggcgaccagguacaggu

SEQ ID NO: 785256 - RNA, 19 nt, Artificial Sequence
  Description of Artificial Sequence: Synthetic oligonucleotide
cacguuaccguuggcacug

SEQ ID NO: 785257 - RNA, 19 nt, Artificial Sequence
  Description of Artificial Sequence: Synthetic oligonucleotide
gcagaggucccucacugag

SEQ ID NO: 785258 - RNA, 19 nt, Artificial Sequence
  Description of Artificial Sequence: Synthetic oligonucleotide
gaacugccggcguucagca

SEQ ID NO: 785259 - RNA, 19 nt, Artificial Sequence
  Description of Artificial Sequence: Synthetic oligonucleotide
caaagcgugacagccgcac

SEQ ID NO: 785260 - RNA, 19 nt, Artificial Sequence
  Description of Artificial Sequence: Synthetic oligonucleotide
gucguuggggacugguaug

SEQ ID NO: 785261 - RNA, 19 nt, Artificial Sequence
  Description of Artificial Sequence: Synthetic oligonucleotide
uggaccacacgaucucgcu

SEQ ID NO: 785262 - RNA, 19 nt, Artificial Sequence
  Description of Artificial Sequence: Synthetic oligonucleotide
gguaugugaaucucuacgu

SEQ ID NO: 785263 - RNA, 19 nt, Artificial Sequence
  Description of Artificial Sequence: Synthetic oligonucleotide
ucacugcgcagcacguuac

SEQ ID NO: 785264 - RNA, 19 nt, Artificial Sequence
  Description of Artificial Sequence: Synthetic oligonucleotide
uguugaccgccgcuugaac

SEQ ID NO: 785265 - RNA, 19 nt, Artificial Sequence
  Description of Artificial Sequence: Synthetic oligonucleotide
uacuccuugccacccggaa

SEQ ID NO: 785266 - RNA, 19 nt, Artificial Sequence
  Description of Artificial Sequence: Synthetic oligonucleotide
cuugggcgagucagcgucg

SEQ ID NO: 785267 - RNA, 19 nt, Artificial Sequence
  Description of Artificial Sequence: Synthetic oligonucleotide
gggaaugcuucucaaucac

SEQ ID NO: 785268 - RNA, 19 nt, Artificial Sequence
  Description of Artificial Sequence: Synthetic oligonucleotide
ggagccgaggcucaaucug

SEQ ID NO: 785269 - RNA, 19 nt, Artificial Sequence
  Description of Artificial Sequence: Synthetic oligonucleotide
ggcgagucagcgucguugg

SEQ ID NO: 785270 - RNA, 19 nt, Artificial Sequence
  Description of Artificial Sequence: Synthetic oligonucleotide
cacuucguucuuccgguac

SEQ ID NO: 785271 - RNA, 19 nt, Artificial Sequence
  Description of Artificial Sequence: Synthetic oligonucleotide
guaggacaugaguucgaac

SEQ ID NO: 785272 - RNA, 19 nt, Artificial Sequence
  Description of Artificial Sequence: Synthetic oligonucleotide
cguucugugugauguagcg

SEQ ID NO: 785273 - RNA, 19 nt, Artificial Sequence
  Description of Artificial Sequence: Synthetic oligonucleotide
ucguuggggacugguaugu

SEQ ID NO: 785274 - RNA, 19 nt, Artificial Sequence
  Description of Artificial Sequence: Synthetic oligonucleotide
gugcuuaauccacaugaaa

SEQ ID NO: 785275 - RNA, 19 nt, Artificial Sequence
  Description of Artificial Sequence: Synthetic oligonucleotide
ugaacgagauggugcgguc

SEQ ID NO: 785276 - RNA, 19 nt, Artificial Sequence
  Description of Artificial Sequence: Synthetic oligonucleotide
ucaaagcgugacagccgca

SEQ ID NO: 785277 - RNA, 19 nt, Artificial Sequence
  Description of Artificial Sequence: Synthetic oligonucleotide
gaugaguaccuugccuuuc

SEQ ID NO: 785278 - RNA, 19 nt, Artificial Sequence
  Description of Artificial Sequence: Synthetic oligonucleotide
gcggacauggcgucuuugg

SEQ ID NO: 785279 - RNA, 19 nt, Artificial Sequence
  Description of Artificial Sequence: Synthetic oligonucleotide
agucuugaacuugggcgag

SEQ ID NO: 785280 - RNA, 19 nt, Artificial Sequence
  Description of Artificial Sequence: Synthetic oligonucleotide
uucgaugcguguggcaggu

SEQ ID NO: 785281 - RNA, 19 nt, Artificial Sequence
  Description of Artificial Sequence: Synthetic oligonucleotide
gaugggaggcuugcccucc

SEQ ID NO: 785282 - RNA, 19 nt, Artificial Sequence
  Description of Artificial Sequence: Synthetic oligonucleotide
ccaccaugggccaggauag

SEQ ID NO: 785283 - RNA, 19 nt, Artificial Sequence
  Description of Artificial Sequence: Synthetic oligonucleotide
ugaccgccgcuugaacugg

SEQ ID NO: 785284 - RNA, 19 nt, Artificial Sequence
  Description of Artificial Sequence: Synthetic oligonucleotide
ucagcgucguuggggacug

SEQ ID NO: 785285 - RNA, 19 nt, Artificial Sequence
  Description of Artificial Sequence: Synthetic oligonucleotide
cucgauucggcugugggaa

SEQ ID NO: 785286 - RNA, 19 nt, Artificial Sequence
  Description of Artificial Sequence: Synthetic oligonucleotide
gaacgggaccagggaaugg

SEQ ID NO: 785287 - RNA, 19 nt, Artificial Sequence
  Description of Artificial Sequence: Synthetic oligonucleotide
gugaaauaggggaucucga

SEQ ID NO: 785288 - RNA, 19 nt, Artificial Sequence
  Description of Artificial Sequence: Synthetic oligonucleotide
gguuaaccgccucaaugac

SEQ ID NO: 785289 - RNA, 19 nt, Artificial Sequence
  Description of Artificial Sequence: Synthetic oligonucleotide
uggcgucuuuggaaggccu

SEQ ID NO: 785290 - RNA, 19 nt, Artificial Sequence
  Description of Artificial Sequence: Synthetic oligonucleotide
ggauaggugacagcaugcc

SEQ ID NO: 785291 - RNA, 19 nt, Artificial Sequence
  Description of Artificial Sequence: Synthetic oligonucleotide
gcgguuucgaugcgugugg

SEQ ID NO: 785292 - RNA, 19 nt, Artificial Sequence
  Description of Artificial Sequence: Synthetic oligonucleotide
gugcggucguucucaaagc

SEQ ID NO: 785293 - RNA, 19 nt, Artificial Sequence
  Description of Artificial Sequence: Synthetic oligonucleotide
ggacuugauggaccacacg

SEQ ID NO: 785294 - RNA, 19 nt, Artificial Sequence
  Description of Artificial Sequence: Synthetic oligonucleotide
gcauguggcaccgggagcc

SEQ ID NO: 785295 - RNA, 19 nt, Artificial Sequence
  Description of Artificial Sequence: Synthetic oligonucleotide
ggcgaccagguacagguug

SEQ ID NO: 785296 - RNA, 19 nt, Artificial Sequence
  Description of Artificial Sequence: Synthetic oligonucleotide
agccgaggcucaaucuggc

SEQ ID NO: 785297 - RNA, 19 nt, Artificial Sequence
  Description of Artificial Sequence: Synthetic oligonucleotide
uugaaguggcgaccaggua

SEQ ID NO: 785298 - RNA, 19 nt, Artificial Sequence
  Description of Artificial Sequence: Synthetic oligonucleotide
gugauguagcgcacccagg

SEQ ID NO: 785299 - RNA, 19 nt, Artificial Sequence
  Description of Artificial Sequence: Synthetic oligonucleotide
ggcgguaggacaugaguuc

SEQ ID NO: 785300 - RNA, 19 nt, Artificial Sequence
  Description of Artificial Sequence: Synthetic oligonucleotide
uaccagcgacacacaagca

SEQ ID NO: 785301 - RNA, 19 nt, Artificial Sequence
  Description of Artificial Sequence: Synthetic oligonucleotide
guugaccgccgcuugaacu

SEQ ID NO: 785302 - RNA, 19 nt, Artificial Sequence
  Description of Artificial Sequence: Synthetic oligonucleotide
uuccggcagaugaguaccu

SEQ ID NO: 785303 - RNA, 19 nt, Artificial Sequence
  Description of Artificial Sequence: Synthetic oligonucleotide
ccacaugaaacgaacgcca

SEQ ID NO: 785304 - RNA, 19 nt, Artificial Sequence
  Description of Artificial Sequence: Synthetic oligonucleotide
gcgguaggacaugaguucg

SEQ ID NO: 785305 - RNA, 19 nt, Artificial Sequence
  Description of Artificial Sequence: Synthetic oligonucleotide
uucggcugugggaaugcuu

SEQ ID NO: 785306 - RNA, 19 nt, Artificial Sequence
  Description of Artificial Sequence: Synthetic oligonucleotide
cucgcuguucucggggacc

SEQ ID NO: 785307 - RNA, 19 nt, Artificial Sequence
  Description of Artificial Sequence: Synthetic oligonucleotide
aucuccguucugugugaug

SEQ ID NO: 785308 - RNA, 19 nt, Artificial Sequence
  Description of Artificial Sequence: Synthetic oligonucleotide
ggacccacuugacacuccc

SEQ ID NO: 785309 - RNA, 19 nt, Artificial Sequence
  Description of Artificial Sequence: Synthetic oligonucleotide
guuggcuguugaccgccgc

SEQ ID NO: 785310 - RNA, 19 nt, Artificial Sequence
  Description of Artificial Sequence: Synthetic oligonucleotide
augaaacgaacgccaccau

SEQ ID NO: 785311 - RNA, 19 nt, Artificial Sequence
  Description of Artificial Sequence: Synthetic oligonucleotide
cccgguuuccagcuugugg

SEQ ID NO: 785312 - RNA, 19 nt, Artificial Sequence
  Description of Artificial Sequence: Synthetic oligonucleotide
ugucuucggcuuccacacu

SEQ ID NO: 785313 - RNA, 19 nt, Artificial Sequence
  Description of Artificial Sequence: Synthetic oligonucleotide
agacccgcaucuugaugga

SEQ ID NO: 785314 - RNA, 19 nt, Artificial Sequence
  Description of Artificial Sequence: Synthetic oligonucleotide
guagugaaauaggggaucu

SEQ ID NO: 785315 - RNA, 19 nt, Artificial Sequence
  Description of Artificial Sequence: Synthetic oligonucleotide
cuacguuguuggcuguuga

SEQ ID NO: 785316 - RNA, 19 nt, Artificial Sequence
  Description of Artificial Sequence: Synthetic oligonucleotide
ccaggcauguggcaccggg

SEQ ID NO: 785317 - RNA, 19 nt, Artificial Sequence
  Description of Artificial Sequence: Synthetic oligonucleotide
auccccgcgguaguuccgg

SEQ ID NO: 785318 - RNA, 19 nt, Artificial Sequence
  Description of Artificial Sequence: Synthetic oligonucleotide
uagugaaauaggggaucuc

SEQ ID NO: 785319 - RNA, 19 nt, Artificial Sequence
  Description of Artificial Sequence: Synthetic oligonucleotide
cacugcgcagcacguuacc

SEQ ID NO: 785320 - RNA, 19 nt, Artificial Sequence
  Description of Artificial Sequence: Synthetic oligonucleotide
cccgcaucuugauggagcc

SEQ ID NO: 785321 - RNA, 19 nt, Artificial Sequence
  Description of Artificial Sequence: Synthetic oligonucleotide
ggaccacacgaucucgcug

SEQ ID NO: 785322 - RNA, 19 nt, Artificial Sequence
  Description of Artificial Sequence: Synthetic oligonucleotide
agcucgggcaugccugaga

SEQ ID NO: 785323 - RNA, 19 nt, Artificial Sequence
  Description of Artificial Sequence: Synthetic oligonucleotide
gaugcccuccgagcgccag

SEQ ID NO: 785324 - RNA, 19 nt, Artificial Sequence
  Description of Artificial Sequence: Synthetic oligonucleotide
guaugugaaucucuacguu

SEQ ID NO: 785325 - RNA, 19 nt, Artificial Sequence
  Description of Artificial Sequence: Synthetic oligonucleotide
gacauggaccaggguggag

SEQ ID NO: 785326 - RNA, 19 nt, Artificial Sequence
  Description of Artificial Sequence: Synthetic oligonucleotide
augcccuccgagcgccagg

SEQ ID NO: 785327 - RNA, 19 nt, Artificial Sequence
  Description of Artificial Sequence: Synthetic oligonucleotide
accaagagguuaaccgccu

SEQ ID NO: 785328 - RNA, 19 nt, Artificial Sequence
  Description of Artificial Sequence: Synthetic oligonucleotide
gguaaucuccguucugugu

SEQ ID NO: 785329 - RNA, 19 nt, Artificial Sequence
  Description of Artificial Sequence: Synthetic oligonucleotide
cauccccgcgguaguuccg

SEQ ID NO: 785330 - RNA, 19 nt, Artificial Sequence
  Description of Artificial Sequence: Synthetic oligonucleotide
acguccaggaacacuucgu

SEQ ID NO: 785331 - RNA, 19 nt, Artificial Sequence
  Description of Artificial Sequence: Synthetic oligonucleotide
guacguagacggcgcuggc

SEQ ID NO: 785332 - RNA, 19 nt, Artificial Sequence
  Description of Artificial Sequence: Synthetic oligonucleotide
gaguccggagcugguaauc

SEQ ID NO: 785333 - RNA, 19 nt, Artificial Sequence
  Description of Artificial Sequence: Synthetic oligonucleotide
guugaggcgguaggacaug

SEQ ID NO: 785334 - RNA, 19 nt, Artificial Sequence
  Description of Artificial Sequence: Synthetic oligonucleotide
cugaugggaggcuugcccu

SEQ ID NO: 785335 - RNA, 19 nt, Artificial Sequence
  Description of Artificial Sequence: Synthetic oligonucleotide
cagcacguuaccguuggca

SEQ ID NO: 785336 - RNA, 19 nt, Artificial Sequence
  Description of Artificial Sequence: Synthetic oligonucleotide
ggugcgcaggguugacagg

SEQ ID NO: 785337 - RNA, 19 nt, Artificial Sequence
  Description of Artificial Sequence: Synthetic oligonucleotide
ccaugcacccucuugggga

SEQ ID NO: 785338 - RNA, 19 nt, Artificial Sequence
  Description of Artificial Sequence: Synthetic oligonucleotide
gguugcagaggucccucac

SEQ ID NO: 785339 - RNA, 19 nt, Artificial Sequence
  Description of Artificial Sequence: Synthetic oligonucleotide
aucucgaacuugacacuga

SEQ ID NO: 785340 - RNA, 19 nt, Artificial Sequence
  Description of Artificial Sequence: Synthetic oligonucleotide
accgccucaaugacgucca

SEQ ID NO: 785341 - RNA, 19 nt, Artificial Sequence
  Description of Artificial Sequence: Synthetic oligonucleotide
gacccgcaucuugauggag

SEQ ID NO: 785342 - RNA, 19 nt, Artificial Sequence
  Description of Artificial Sequence: Synthetic oligonucleotide
cggucguucucaaagcgug

SEQ ID NO: 785343 - RNA, 19 nt, Artificial Sequence
  Description of Artificial Sequence: Synthetic oligonucleotide
agcccaugccugcccaggu

SEQ ID NO: 785344 - RNA, 19 nt, Artificial Sequence
  Description of Artificial Sequence: Synthetic oligonucleotide
gggcgagucagcgucguug

SEQ ID NO: 785345 - RNA, 19 nt, Artificial Sequence
  Description of Artificial Sequence: Synthetic oligonucleotide
cgaggcucaaucuggcuug

SEQ ID NO: 785346 - RNA, 19 nt, Artificial Sequence
  Description of Artificial Sequence: Synthetic oligonucleotide
caguacguagacggcgcug

SEQ ID NO: 785347 - RNA, 19 nt, Artificial Sequence
  Description of Artificial Sequence: Synthetic oligonucleotide
uagacggcgcuggcggaca

SEQ ID NO: 785348 - RNA, 19 nt, Artificial Sequence
  Description of Artificial Sequence: Synthetic oligonucleotide
agccgcacacacuggugaa

SEQ ID NO: 785349 - RNA, 19 nt, Artificial Sequence
  Description of Artificial Sequence: Synthetic oligonucleotide
augcguguggcaggugugu

SEQ ID NO: 785350 - RNA, 19 nt, Artificial Sequence
  Description of Artificial Sequence: Synthetic oligonucleotide
caacuauccuggacaugga

SEQ ID NO: 785351 - RNA, 19 nt, Artificial Sequence
  Description of Artificial Sequence: Synthetic oligonucleotide
ucgauucggcugugggaau

SEQ ID NO: 785352 - RNA, 19 nt, Artificial Sequence
  Description of Artificial Sequence: Synthetic oligonucleotide
guaguuccggcagaugagu

SEQ ID NO: 785353 - RNA, 19 nt, Artificial Sequence
  Description of Artificial Sequence: Synthetic oligonucleotide
cucggggacccacuugaca

SEQ ID NO: 785354 - RNA, 19 nt, Artificial Sequence
  Description of Artificial Sequence: Synthetic oligonucleotide
guagacggcgcuggcggac

SEQ ID NO: 785355 - RNA, 19 nt, Artificial Sequence
  Description of Artificial Sequence: Synthetic oligonucleotide
caaucucacugcgcagcac

SEQ ID NO: 785356 - RNA, 19 nt, Artificial Sequence
  Description of Artificial Sequence: Synthetic oligonucleotide
uauccacauccccgcggua

SEQ ID NO: 785357 - RNA, 19 nt, Artificial Sequence
  Description of Artificial Sequence: Synthetic oligonucleotide
agcgucguuggggacuggu

SEQ ID NO: 785358 - RNA, 19 nt, Artificial Sequence
  Description of Artificial Sequence: Synthetic oligonucleotide
ggaccagaacgggaccagg

SEQ ID NO: 785359 - RNA, 19 nt, Artificial Sequence
  Description of Artificial Sequence: Synthetic oligonucleotide
ccggcagaugaguaccuug

SEQ ID NO: 785360 - RNA, 19 nt, Artificial Sequence
  Description of Artificial Sequence: Synthetic oligonucleotide
ccucacgaagugcugcaug

SEQ ID NO: 785361 - RNA, 19 nt, Artificial Sequence
  Description of Artificial Sequence: Synthetic oligonucleotide
uugggcgagucagcgucgu

SEQ ID NO: 785362 - RNA, 19 nt, Artificial Sequence
  Description of Artificial Sequence: Synthetic oligonucleotide
ugcguguggcagguguguc

SEQ ID NO: 785363 - RNA, 19 nt, Artificial Sequence
  Description of Artificial Sequence: Synthetic oligonucleotide
ugguucugcgugggugcgc

SEQ ID NO: 785364 - RNA, 19 nt, Artificial Sequence
  Description of Artificial Sequence: Synthetic oligonucleotide
ccggaaaggacuugaugga

SEQ ID NO: 785365 - RNA, 19 nt, Artificial Sequence
  Description of Artificial Sequence: Synthetic oligonucleotide
caggcauguggcaccggga

SEQ ID NO: 785366 - RNA, 19 nt, Artificial Sequence
  Description of Artificial Sequence: Synthetic oligonucleotide
cagaacgggaccagggaau

SEQ ID NO: 785367 - RNA, 19 nt, Artificial Sequence
  Description of Artificial Sequence: Synthetic oligonucleotide
cgcagcacguuaccguugg

SEQ ID NO: 785368 - RNA, 19 nt, Artificial Sequence
  Description of Artificial Sequence: Synthetic oligonucleotide
gcucaacaaaauggcaaca

SEQ ID NO: 785369 - RNA, 19 nt, Artificial Sequence
  Description of Artificial Sequence: Synthetic oligonucleotide
ugaugcccuccgagcgcca

SEQ ID NO: 785370 - RNA, 19 nt, Artificial Sequence
  Description of Artificial Sequence: Synthetic oligonucleotide
agaccaaagugggcccgca

SEQ ID NO: 785371 - RNA, 19 nt, Artificial Sequence
  Description of Artificial Sequence: Synthetic oligonucleotide
acacuucguucuuccggua

SEQ ID NO: 785372 - RNA, 19 nt, Artificial Sequence
  Description of Artificial Sequence: Synthetic oligonucleotide
cccgcgguaguuccggcag

SEQ ID NO: 785373 - RNA, 19 nt, Artificial Sequence
  Description of Artificial Sequence: Synthetic oligonucleotide
ggccccgguuuccagcuug

SEQ ID NO: 785374 - RNA, 19 nt, Artificial Sequence
  Description of Artificial Sequence: Synthetic oligonucleotide
gccucggcaauagccgagg

SEQ ID NO: 785375 - RNA, 19 nt, Artificial Sequence
  Description of Artificial Sequence: Synthetic oligonucleotide
ggccuguguugucgaagag

SEQ ID NO: 785376 - RNA, 19 nt, Artificial Sequence
  Description of Artificial Sequence: Synthetic oligonucleotide
ggguugacaggaggguggc

SEQ ID NO: 785377 - RNA, 19 nt, Artificial Sequence
  Description of Artificial Sequence: Synthetic oligonucleotide
ggaucucgaacuugacacu

SEQ ID NO: 785378 - RNA, 19 nt, Artificial Sequence
  Description of Artificial Sequence: Synthetic oligonucleotide
gugugauguagcgcaccca

SEQ ID NO: 785379 - RNA, 19 nt, Artificial Sequence
  Description of Artificial Sequence: Synthetic oligonucleotide
uggugcggucguucucaaa

SEQ ID NO: 785380 - RNA, 19 nt, Artificial Sequence
  Description of Artificial Sequence: Synthetic oligonucleotide
cugaggccgggugggcggg

SEQ ID NO: 785381 - RNA, 19 nt, Artificial Sequence
  Description of Artificial Sequence: Synthetic oligonucleotide
uccggcagaugaguaccuu

SEQ ID NO: 785382 - RNA, 19 nt, Artificial Sequence
  Description of Artificial Sequence: Synthetic oligonucleotide
uaaccgccucaaugacguc

SEQ ID NO: 785383 - RNA, 19 nt, Artificial Sequence
  Description of Artificial Sequence: Synthetic oligonucleotide
uggcgaccagguacagguu

SEQ ID NO: 785384 - RNA, 19 nt, Artificial Sequence
  Description of Artificial Sequence: Synthetic oligonucleotide
gcuguugaccgccgcuuga

SEQ ID NO: 785385 - RNA, 19 nt, Artificial Sequence
  Description of Artificial Sequence: Synthetic oligonucleotide
gucagcgucguuggggacu

SEQ ID NO: 785386 - RNA, 19 nt, Artificial Sequence
  Description of Artificial Sequence: Synthetic oligonucleotide
cagcugcccucacgaagug

SEQ ID NO: 785387 - RNA, 19 nt, Artificial Sequence
  Description of Artificial Sequence: Synthetic oligonucleotide
gugaguggccaggcaugug

SEQ ID NO: 785388 - RNA, 19 nt, Artificial Sequence
  Description of Artificial Sequence: Synthetic oligonucleotide
cuguugaccgccgcuugaa

SEQ ID NO: 785389 - RNA, 19 nt, Artificial Sequence
  Description of Artificial Sequence: Synthetic oligonucleotide
ccagaacgggaccagggaa

SEQ ID NO: 785390 - RNA, 19 nt, Artificial Sequence
  Description of Artificial Sequence: Synthetic oligonucleotide
gaccgccgcuugaacuggc

SEQ ID NO: 785391 - RNA, 19 nt, Artificial Sequence
  Description of Artificial Sequence: Synthetic oligonucleotide
accacacgaucucgcuguu

SEQ ID NO: 785392 - RNA, 19 nt, Artificial Sequence
  Description of Artificial Sequence: Synthetic oligonucleotide
gcacugaccaagagguuaa

SEQ ID NO: 785393 - RNA, 19 nt, Artificial Sequence
  Description of Artificial Sequence: Synthetic oligonucleotide
ccucggcaauagccgaggg

SEQ ID NO: 785394 - RNA, 19 nt, Artificial Sequence
  Description of Artificial Sequence: Synthetic oligonucleotide
cagcugcgguuucgaugcg

SEQ ID NO: 785395 - RNA, 19 nt, Artificial Sequence
  Description of Artificial Sequence: Synthetic oligonucleotide
ccgagcgccaggacacagc

SEQ ID NO: 785396 - RNA, 19 nt, Artificial Sequence
  Description of Artificial Sequence: Synthetic oligonucleotide
ucgaugcguguggcaggug

SEQ ID NO: 785397 - RNA, 19 nt, Artificial Sequence
  Description of Artificial Sequence: Synthetic oligonucleotide
gcaggaacugccggcguuc

SEQ ID NO: 785398 - RNA, 19 nt, Artificial Sequence
  Description of Artificial Sequence: Synthetic oligonucleotide
guacuccuugccacccgga

SEQ ID NO: 785399 - RNA, 19 nt, Artificial Sequence
  Description of Artificial Sequence: Synthetic oligonucleotide
uggcggacauggcgucuuu

SEQ ID NO: 785400 - RNA, 19 nt, Artificial Sequence
  Description of Artificial Sequence: Synthetic oligonucleotide
gcccucacgaagugcugca

SEQ ID NO: 785401 - RNA, 19 nt, Artificial Sequence
  Description of Artificial Sequence: Synthetic oligonucleotide
gaccaaagugggcccgcau

SEQ ID NO: 785402 - RNA, 19 nt, Artificial Sequence
  Description of Artificial Sequence: Synthetic oligonucleotide
ggcggcaacggcaggaacu

SEQ ID NO: 785403 - RNA, 19 nt, Artificial Sequence
  Description of Artificial Sequence: Synthetic oligonucleotide
ugggcgagucagcgucguu

SEQ ID NO: 785404 - RNA, 19 nt, Artificial Sequence
  Description of Artificial Sequence: Synthetic oligonucleotide
ggcgucuuuggaaggccuc

SEQ ID NO: 785405 - RNA, 19 nt, Artificial Sequence
  Description of Artificial Sequence: Synthetic oligonucleotide
gcaccgggagccgaggcuc

SEQ ID NO: 785406 - RNA, 19 nt, Artificial Sequence
  Description of Artificial Sequence: Synthetic oligonucleotide
cgucuuuggaaggccucgg

SEQ ID NO: 785407 - RNA, 19 nt, Artificial Sequence
  Description of Artificial Sequence: Synthetic oligonucleotide
agacggcgcuggcggacau

SEQ ID NO: 785408 - RNA, 19 nt, Artificial Sequence
  Description of Artificial Sequence: Synthetic oligonucleotide
cggcaauagccgagggcgg

SEQ ID NO: 785409 - RNA, 19 nt, Artificial Sequence
  Description of Artificial Sequence: Synthetic oligonucleotide
caggaacugccggcguuca

SEQ ID NO: 785410 - RNA, 19 nt, Artificial Sequence
  Description of Artificial Sequence: Synthetic oligonucleotide
accgccgcuugaacuggcu

SEQ ID NO: 785411 - RNA, 19 nt, Artificial Sequence
  Description of Artificial Sequence: Synthetic oligonucleotide
ggcggacauggcgucuuug

SEQ ID NO: 785412 - RNA, 19 nt, Artificial Sequence
  Description of Artificial Sequence: Synthetic oligonucleotide
ggccugguagccacucuuc

SEQ ID NO: 785413 - RNA, 19 nt, Artificial Sequence
  Description of Artificial Sequence: Synthetic oligonucleotide
cuccguucugugugaugua

SEQ ID NO: 785414 - RNA, 19 nt, Artificial Sequence
  Description of Artificial Sequence: Synthetic oligonucleotide
gcacguuaccguuggcacu

SEQ ID NO: 785415 - RNA, 19 nt, Artificial Sequence
  Description of Artificial Sequence: Synthetic oligonucleotide
acgggaccagggaaugguu

SEQ ID NO: 785416 - RNA, 19 nt, Artificial Sequence
  Description of Artificial Sequence: Synthetic oligonucleotide
gcagcacguuaccguuggc

SEQ ID NO: 785417 - RNA, 19 nt, Artificial Sequence
  Description of Artificial Sequence: Synthetic oligonucleotide
ggaaugguucugcgugggu

SEQ ID NO: 785418 - RNA, 19 nt, Artificial Sequence
  Description of Artificial Sequence: Synthetic oligonucleotide
gggagccgaggcucaaucu

SEQ ID NO: 785419 - RNA, 19 nt, Artificial Sequence
  Description of Artificial Sequence: Synthetic oligonucleotide
cagcucgggcaugccugag

SEQ ID NO: 785420 - RNA, 19 nt, Artificial Sequence
  Description of Artificial Sequence: Synthetic oligonucleotide
acguuaccguuggcacuga

SEQ ID NO: 785421 - RNA, 19 nt, Artificial Sequence
  Description of Artificial Sequence: Synthetic oligonucleotide
gggacccacuugacacucc

SEQ ID NO: 785422 - RNA, 19 nt, Artificial Sequence
  Description of Artificial Sequence: Synthetic oligonucleotide
cgauucggcugugggaaug

SEQ ID NO: 785423 - RNA, 19 nt, Artificial Sequence
  Description of Artificial Sequence: Synthetic oligonucleotide
cugcgguuucgaugcgugu

SEQ ID NO: 785424 - RNA, 19 nt, Artificial Sequence
  Description of Artificial Sequence: Synthetic oligonucleotide
augcacccucuuggggaaa

SEQ ID NO: 785425 - RNA, 19 nt, Artificial Sequence
  Description of Artificial Sequence: Synthetic oligonucleotide
cacccggaaaggacuugau

SEQ ID NO: 785426 - RNA, 19 nt, Artificial Sequence
  Description of Artificial Sequence: Synthetic oligonucleotide
gcggucguucucaaagcgu

SEQ ID NO: 785427 - RNA, 19 nt, Artificial Sequence
  Description of Artificial Sequence: Synthetic oligonucleotide
cgguuucgaugcguguggc

SEQ ID NO: 785428 - RNA, 19 nt, Artificial Sequence
  Description of Artificial Sequence: Synthetic oligonucleotide
cguuaccguuggcacugac

SEQ ID NO: 785429 - RNA, 19 nt, Artificial Sequence
  Description of Artificial Sequence: Synthetic oligonucleotide
ggcaggaacugccggcguu

SEQ ID NO: 785430 - RNA, 19 nt, Artificial Sequence
  Description of Artificial Sequence: Synthetic oligonucleotide
cgaugcguguggcaggugu

SEQ ID NO: 785431 - RNA, 19 nt, Artificial Sequence
  Description of Artificial Sequence: Synthetic oligonucleotide
ccucggccuguguugucga

SEQ ID NO: 785432 - RNA, 19 nt, Artificial Sequence
  Description of Artificial Sequence: Synthetic oligonucleotide
gcgaggggccccgguuucc

SEQ ID NO: 785433 - RNA, 19 nt, Artificial Sequence
  Description of Artificial Sequence: Synthetic oligonucleotide
cagcgucguuggggacugg

SEQ ID NO: 785434 - RNA, 19 nt, Artificial Sequence
  Description of Artificial Sequence: Synthetic oligonucleotide
cauggguguugaggcggua

SEQ ID NO: 785435 - RNA, 19 nt, Artificial Sequence
  Description of Artificial Sequence: Synthetic oligonucleotide
caccccucagcugcgguuu

SEQ ID NO: 785436 - RNA, 19 nt, Artificial Sequence
  Description of Artificial Sequence: Synthetic oligonucleotide
cucuacguuguuggcuguu

SEQ ID NO: 785437 - RNA, 19 nt, Artificial Sequence
  Description of Artificial Sequence: Synthetic oligonucleotide
cuggcggacauggcgucuu

SEQ ID NO: 785438 - RNA, 19 nt, Artificial Sequence
  Description of Artificial Sequence: Synthetic oligonucleotide
gcgucguuggggacuggua

SEQ ID NO: 785439 - RNA, 19 nt, Artificial Sequence
  Description of Artificial Sequence: Synthetic oligonucleotide
ccgccucaaugacguccag

SEQ ID NO: 785440 - RNA, 19 nt, Artificial Sequence
  Description of Artificial Sequence: Synthetic oligonucleotide
cguagacggcgcuggcgga

SEQ ID NO: 785441 - RNA, 19 nt, Artificial Sequence
  Description of Artificial Sequence: Synthetic oligonucleotide
ccaguacguagacggcgcu

SEQ ID NO: 785442 - RNA, 19 nt, Artificial Sequence
  Description of Artificial Sequence: Synthetic oligonucleotide
cgugacagccgcacacacu

SEQ ID NO: 785443 - RNA, 19 nt, Artificial Sequence
  Description of Artificial Sequence: Synthetic oligonucleotide
gguugacaggaggguggcu

SEQ ID NO: 785444 - RNA, 19 nt, Artificial Sequence
  Description of Artificial Sequence: Synthetic oligonucleotide
cgugggugcgcaggguuga

SEQ ID NO: 785445 - RNA, 19 nt, Artificial Sequence
  Description of Artificial Sequence: Synthetic oligonucleotide
ccgcgguaguuccggcaga

SEQ ID NO: 785446 - RNA, 19 nt, Artificial Sequence
  Description of Artificial Sequence: Synthetic oligonucleotide
cugcgugggugcgcagggu

SEQ ID NO: 785447 - RNA, 19 nt, Artificial Sequence
  Description of Artificial Sequence: Synthetic oligonucleotide
ccaccccucagcugcgguu

SEQ ID NO: 785448 - RNA, 19 nt, Artificial Sequence
  Description of Artificial Sequence: Synthetic oligonucleotide
gccccgguuuccagcuugu

SEQ ID NO: 785449 - RNA, 19 nt, Artificial Sequence
  Description of Artificial Sequence: Synthetic oligonucleotide
cccucacgaagugcugcau

SEQ ID NO: 785450 - RNA, 19 nt, Artificial Sequence
  Description of Artificial Sequence: Synthetic oligonucleotide
cgcgguaguuccggcagau

SEQ ID NO: 785451 - RNA, 19 nt, Artificial Sequence
  Description of Artificial Sequence: Synthetic oligonucleotide
ccgggagccgaggcucaau

SEQ ID NO: 785452 - RNA, 19 nt, Artificial Sequence
  Description of Artificial Sequence: Synthetic oligonucleotide
guaagaacaacucauuucg

SEQ ID NO: 785453 - RNA, 19 nt, Artificial Sequence
  Description of Artificial Sequence: Synthetic oligonucleotide
ucuauaaacaaauaguuau

SEQ ID NO: 785454 - RNA, 19 nt, Artificial Sequence
  Description of Artificial Sequence: Synthetic oligonucleotide
ucuucaacgauucagugcc

SEQ ID NO: 785455 - RNA, 19 nt, Artificial Sequence
  Description of Artificial Sequence: Synthetic oligonucleotide
aagcauucgauacacauug

SEQ ID NO: 785456 - RNA, 19 nt, Artificial Sequence
  Description of Artificial Sequence: Synthetic oligonucleotide
ggugacgugacuuagaagg

SEQ ID NO: 785457 - RNA, 19 nt, Artificial Sequence
  Description of Artificial Sequence: Synthetic oligonucleotide
aacauguugggcauggugc

SEQ ID NO: 785458 - RNA, 19 nt, Artificial Sequence
  Description of Artificial Sequence: Synthetic oligonucleotide
gaaggaaugaggaucaucc

SEQ ID NO: 785459 - RNA, 19 nt, Artificial Sequence
  Description of Artificial Sequence: Synthetic oligonucleotide
uugaucaacucuuuggcag

SEQ ID NO: 785460 - RNA, 19 nt, Artificial Sequence
  Description of Artificial Sequence: Synthetic oligonucleotide
aauccuuauucacaccauc

SEQ ID NO: 785461 - RNA, 19 nt, Artificial Sequence
  Description of Artificial Sequence: Synthetic oligonucleotide
aagccuuucaccaaauggg

SEQ ID NO: 785462 - RNA, 19 nt, Artificial Sequence
  Description of Artificial Sequence: Synthetic oligonucleotide
gguuuaacuaauuuuaaug

SEQ ID NO: 785463 - RNA, 19 nt, Artificial Sequence
  Description of Artificial Sequence: Synthetic oligonucleotide
aucgcacuuauuuucuucc

SEQ ID NO: 785464 - RNA, 19 nt, Artificial Sequence
  Description of Artificial Sequence: Synthetic oligonucleotide
cuugcugcguauaagagug

SEQ ID NO: 785465 - RNA, 19 nt, Artificial Sequence
  Description of Artificial Sequence: Synthetic oligonucleotide
auaauccuuauucacacca

SEQ ID NO: 785466 - RNA, 19 nt, Artificial Sequence
  Description of Artificial Sequence: Synthetic oligonucleotide
uuggacaugccaaagaaau

SEQ ID NO: 785467 - RNA, 19 nt, Artificial Sequence
  Description of Artificial Sequence: Synthetic oligonucleotide
aagaacaacucauuucgcu

SEQ ID NO: 785468 - RNA, 19 nt, Artificial Sequence
  Description of Artificial Sequence: Synthetic oligonucleotide
uuuuccguccuucagacau

SEQ ID NO: 785469 - RNA, 19 nt, Artificial Sequence
  Description of Artificial Sequence: Synthetic oligonucleotide
aacgauucagugccuuccc

SEQ ID NO: 785470 - RNA, 19 nt, Artificial Sequence
  Description of Artificial Sequence: Synthetic oligonucleotide
caucuugauaccauacugg

SEQ ID NO: 785471 - RNA, 19 nt, Artificial Sequence
  Description of Artificial Sequence: Synthetic oligonucleotide
cauucgauacacauugcgg

SEQ ID NO: 785472 - RNA, 19 nt, Artificial Sequence
  Description of Artificial Sequence: Synthetic oligonucleotide
aguaucaaagucccagcgg

SEQ ID NO: 785473 - RNA, 19 nt, Artificial Sequence
  Description of Artificial Sequence: Synthetic oligonucleotide
aaagggcucacuaucucgc

SEQ ID NO: 785474 - RNA, 19 nt, Artificial Sequence
  Description of Artificial Sequence: Synthetic oligonucleotide
gguaaguuuugauuggugg

SEQ ID NO: 785475 - RNA, 19 nt, Artificial Sequence
  Description of Artificial Sequence: Synthetic oligonucleotide
ucugcauaacuauuggaca

SEQ ID NO: 785476 - RNA, 19 nt, Artificial Sequence
  Description of Artificial Sequence: Synthetic oligonucleotide
acacauugcggccaagucg

SEQ ID NO: 785477 - RNA, 19 nt, Artificial Sequence
  Description of Artificial Sequence: Synthetic oligonucleotide
aagaauuuggauuccugaa

SEQ ID NO: 785478 - RNA, 19 nt, Artificial Sequence
  Description of Artificial Sequence: Synthetic oligonucleotide
uucgcuauauuccucuuga

SEQ ID NO: 785479 - RNA, 19 nt, Artificial Sequence
  Description of Artificial Sequence: Synthetic oligonucleotide
uauuggacaugccaaagaa

SEQ ID NO: 785480 - RNA, 19 nt, Artificial Sequence
  Description of Artificial Sequence: Synthetic oligonucleotide
cuagggauuaguacuuugg

SEQ ID NO: 785481 - RNA, 19 nt, Artificial Sequence
  Description of Artificial Sequence: Synthetic oligonucleotide
uuguaguuaguguagucug

SEQ ID NO: 785482 - RNA, 19 nt, Artificial Sequence
  Description of Artificial Sequence: Synthetic oligonucleotide
auauauucgcuauauuccu

SEQ ID NO: 785483 - RNA, 19 nt, Artificial Sequence
  Description of Artificial Sequence: Synthetic oligonucleotide
aucuacagccaugucaucc

SEQ ID NO: 785484 - RNA, 19 nt, Artificial Sequence
  Description of Artificial Sequence: Synthetic oligonucleotide
uuugcaaccuuucuaggaa

SEQ ID NO: 785485 - RNA, 19 nt, Artificial Sequence
  Description of Artificial Sequence: Synthetic oligonucleotide
uuacucuugaaaagcauuc

SEQ ID NO: 785486 - RNA, 19 nt, Artificial Sequence
  Description of Artificial Sequence: Synthetic oligonucleotide
uaacuauuggacaugccaa

SEQ ID NO: 785487 - RNA, 19 nt, Artificial Sequence
  Description of Artificial Sequence: Synthetic oligonucleotide
cuggaaugcagccuuaggc

SEQ ID NO: 785488 - RNA, 19 nt, Artificial Sequence
  Description of Artificial Sequence: Synthetic oligonucleotide
ugaaaagcauucgauacac

SEQ ID NO: 785489 - RNA, 19 nt, Artificial Sequence
  Description of Artificial Sequence: Synthetic oligonucleotide
uucuucaacgauucagugc

SEQ ID NO: 785490 - RNA, 19 nt, Artificial Sequence
  Description of Artificial Sequence: Synthetic oligonucleotide
agggauuaguacuuugguc

SEQ ID NO: 785491 - RNA, 19 nt, Artificial Sequence
  Description of Artificial Sequence: Synthetic oligonucleotide
aaucucagcacguaccuuu

SEQ ID NO: 785492 - RNA, 19 nt, Artificial Sequence
  Description of Artificial Sequence: Synthetic oligonucleotide
uccauuguggggcaaucag

SEQ ID NO: 785493 - RNA, 19 nt, Artificial Sequence
  Description of Artificial Sequence: Synthetic oligonucleotide
ucuccucuacaaaacaaca

SEQ ID NO: 785494 - RNA, 19 nt, Artificial Sequence
  Description of Artificial Sequence: Synthetic oligonucleotide
cugcguauaagaguggugg

SEQ ID NO: 785495 - RNA, 19 nt, Artificial Sequence
  Description of Artificial Sequence: Synthetic oligonucleotide
uuuugcuauaaucuaccuc

SEQ ID NO: 785496 - RNA, 19 nt, Artificial Sequence
  Description of Artificial Sequence: Synthetic oligonucleotide
auuuguaguuaguguaguc

SEQ ID NO: 785497 - RNA, 19 nt, Artificial Sequence
  Description of Artificial Sequence: Synthetic oligonucleotide
agucccagcggccuaaggg

SEQ ID NO: 785498 - RNA, 19 nt, Artificial Sequence
  Description of Artificial Sequence: Synthetic oligonucleotide
aauggaacauguugggcau

SEQ ID NO: 785499 - RNA, 19 nt, Artificial Sequence
  Description of Artificial Sequence: Synthetic oligonucleotide
ucguguuuuaaacucaauu

SEQ ID NO: 785500 - RNA, 19 nt, Artificial Sequence
  Description of Artificial Sequence: Synthetic oligonucleotide
auauucgcuauauuccucu

SEQ ID NO: 785501 - RNA, 19 nt, Artificial Sequence
  Description of Artificial Sequence: Synthetic oligonucleotide
ugaagcgucugguuuuccg

SEQ ID NO: 785502 - RNA, 19 nt, Artificial Sequence
  Description of Artificial Sequence: Synthetic oligonucleotide
agccaugucauccaucgug

SEQ ID NO: 785503 - RNA, 19 nt, Artificial Sequence
  Description of Artificial Sequence: Synthetic oligonucleotide
uucgauacacauugcggcc

SEQ ID NO: 785504 - RNA, 19 nt, Artificial Sequence
  Description of Artificial Sequence: Synthetic oligonucleotide
uggguaagcuugcugauaa

SEQ ID NO: 785505 - RNA, 19 nt, Artificial Sequence
  Description of Artificial Sequence: Synthetic oligonucleotide
uguaguuaguguagucuga

SEQ ID NO: 785506 - RNA, 19 nt, Artificial Sequence
  Description of Artificial Sequence: Synthetic oligonucleotide
auuguacucucuuggcauc

SEQ ID NO: 785507 - RNA, 19 nt, Artificial Sequence
  Description of Artificial Sequence: Synthetic oligonucleotide
aacuauuggacaugccaaa

SEQ ID NO: 785508 - RNA, 19 nt, Artificial Sequence
  Description of Artificial Sequence: Synthetic oligonucleotide
cagguaugacaaaaucugg

SEQ ID NO: 785509 - RNA, 19 nt, Artificial Sequence
  Description of Artificial Sequence: Synthetic oligonucleotide
uuaauggaacauguugggc

SEQ ID NO: 785510 - RNA, 19 nt, Artificial Sequence
  Description of Artificial Sequence: Synthetic oligonucleotide
cacccaagaauuuggauuc

SEQ ID NO: 785511 - RNA, 19 nt, Artificial Sequence
  Description of Artificial Sequence: Synthetic oligonucleotide
uagggauuaguacuuuggu

SEQ ID NO: 785512 - RNA, 19 nt, Artificial Sequence
  Description of Artificial Sequence: Synthetic oligonucleotide
ugcguauaagagugguggg

SEQ ID NO: 785513 - RNA, 19 nt, Artificial Sequence
  Description of Artificial Sequence: Synthetic oligonucleotide
aaguuuugauugguggaag

SEQ ID NO: 785514 - RNA, 19 nt, Artificial Sequence
  Description of Artificial Sequence: Synthetic oligonucleotide
aacucauuucgcucauaug

SEQ ID NO: 785515 - RNA, 19 nt, Artificial Sequence
  Description of Artificial Sequence: Synthetic oligonucleotide
uaaguuuugauugguggaa

SEQ ID NO: 785516 - RNA, 19 nt, Artificial Sequence
  Description of Artificial Sequence: Synthetic oligonucleotide
ugacuuagaagguggugca

SEQ ID NO: 785517 - RNA, 19 nt, Artificial Sequence
  Description of Artificial Sequence: Synthetic oligonucleotide
acucuugaaaagcauucga

SEQ ID NO: 785518 - RNA, 19 nt, Artificial Sequence
  Description of Artificial Sequence: Synthetic oligonucleotide
guuacccugguccauuuug

SEQ ID NO: 785519 - RNA, 19 nt, Artificial Sequence
  Description of Artificial Sequence: Synthetic oligonucleotide
uuacccugguccauuuugc

SEQ ID NO: 785520 - RNA, 19 nt, Artificial Sequence
  Description of Artificial Sequence: Synthetic oligonucleotide
uuguucauauauucgcuau

SEQ ID NO: 785521 - RNA, 19 nt, Artificial Sequence
  Description of Artificial Sequence: Synthetic oligonucleotide
gguaagcuugcugauaacg

SEQ ID NO: 785522 - RNA, 19 nt, Artificial Sequence
  Description of Artificial Sequence: Synthetic oligonucleotide
aucaagcucugccuuauca

SEQ ID NO: 785523 - RNA, 19 nt, Artificial Sequence
  Description of Artificial Sequence: Synthetic oligonucleotide
ugcaaguucucucucucuc

SEQ ID NO: 785524 - RNA, 19 nt, Artificial Sequence
  Description of Artificial Sequence: Synthetic oligonucleotide
aaggaaugaggaucaucca

SEQ ID NO: 785525 - RNA, 19 nt, Artificial Sequence
  Description of Artificial Sequence: Synthetic oligonucleotide
ugaucaacucuuuggcaga

SEQ ID NO: 785526 - RNA, 19 nt, Artificial Sequence
  Description of Artificial Sequence: Synthetic oligonucleotide
guucaugucugccucagga

SEQ ID NO: 785527 - RNA, 19 nt, Artificial Sequence
  Description of Artificial Sequence: Synthetic oligonucleotide
ugauaacgaugucauuugu

SEQ ID NO: 785528 - RNA, 19 nt, Artificial Sequence
  Description of Artificial Sequence: Synthetic oligonucleotide
auuuugcuauaaucuaccu

SEQ ID NO: 785529 - RNA, 19 nt, Artificial Sequence
  Description of Artificial Sequence: Synthetic oligonucleotide
uugguuuccuuuuggggcu

SEQ ID NO: 785530 - RNA, 19 nt, Artificial Sequence
  Description of Artificial Sequence: Synthetic oligonucleotide
cuuggcaucucauggugac

SEQ ID NO: 785531 - RNA, 19 nt, Artificial Sequence
  Description of Artificial Sequence: Synthetic oligonucleotide
gcauucgauacacauugcg

SEQ ID NO: 785532 - RNA, 19 nt, Artificial Sequence
  Description of Artificial Sequence: Synthetic oligonucleotide
ucucucucucucaauuucu

SEQ ID NO: 785533 - RNA, 19 nt, Artificial Sequence
  Description of Artificial Sequence: Synthetic oligonucleotide
uggcauaauaacuuuucuu

SEQ ID NO: 785534 - RNA, 19 nt, Artificial Sequence
  Description of Artificial Sequence: Synthetic oligonucleotide
ucgcucauaugauuuacuc

SEQ ID NO: 785535 - RNA, 19 nt, Artificial Sequence
  Description of Artificial Sequence: Synthetic oligonucleotide
acuagggauuaguacuuug

SEQ ID NO: 785536 - RNA, 19 nt, Artificial Sequence
  Description of Artificial Sequence: Synthetic oligonucleotide
cauaauccuuauucacacc

SEQ ID NO: 785537 - RNA, 19 nt, Artificial Sequence
  Description of Artificial Sequence: Synthetic oligonucleotide
uguucauauauucgcuaua

SEQ ID NO: 785538 - RNA, 19 nt, Artificial Sequence
  Description of Artificial Sequence: Synthetic oligonucleotide
gauaccauacuggaaugca

SEQ ID NO: 785539 - RNA, 19 nt, Artificial Sequence
  Description of Artificial Sequence: Synthetic oligonucleotide
guuugcaaccuuucuagga

SEQ ID NO: 785540 - RNA, 19 nt, Artificial Sequence
  Description of Artificial Sequence: Synthetic oligonucleotide
gcuauauuccucuugagua

SEQ ID NO: 785541 - RNA, 19 nt, Artificial Sequence
  Description of Artificial Sequence: Synthetic oligonucleotide
acaaauaguuauacaauaa

SEQ ID NO: 785542 - RNA, 19 nt, Artificial Sequence
  Description of Artificial Sequence: Synthetic oligonucleotide
uucucucucucucucaauu

SEQ ID NO: 785543 - RNA, 19 nt, Artificial Sequence
  Description of Artificial Sequence: Synthetic oligonucleotide
gaucgcacuuauuuucuuc

SEQ ID NO: 785544 - RNA, 19 nt, Artificial Sequence
  Description of Artificial Sequence: Synthetic oligonucleotide
gauauccgugucugcauac

SEQ ID NO: 785545 - RNA, 19 nt, Artificial Sequence
  Description of Artificial Sequence: Synthetic oligonucleotide
ugcauaacuauuggacaug

SEQ ID NO: 785546 - RNA, 19 nt, Artificial Sequence
  Description of Artificial Sequence: Synthetic oligonucleotide
cauacggccugguaagaac

SEQ ID NO: 785547 - RNA, 19 nt, Artificial Sequence
  Description of Artificial Sequence: Synthetic oligonucleotide
uggcuggauagcauucugc

SEQ ID NO: 785548 - RNA, 19 nt, Artificial Sequence
  Description of Artificial Sequence: Synthetic oligonucleotide
ucgugaaaaucuccucuac

SEQ ID NO: 785549 - RNA, 19 nt, Artificial Sequence
  Description of Artificial Sequence: Synthetic oligonucleotide
gggauuaguacuuuggucu

SEQ ID NO: 785550 - RNA, 19 nt, Artificial Sequence
  Description of Artificial Sequence: Synthetic oligonucleotide
aagccggcaaucgugaaaa

SEQ ID NO: 785551 - RNA, 19 nt, Artificial Sequence
  Description of Artificial Sequence: Synthetic oligonucleotide
cauaacuauuggacaugcc

SEQ ID NO: 785552 - RNA, 19 nt, Artificial Sequence
  Description of Artificial Sequence: Synthetic oligonucleotide
uaguuaguguagucugagc

SEQ ID NO: 785553 - RNA, 19 nt, Artificial Sequence
  Description of Artificial Sequence: Synthetic oligonucleotide
ugccuuaucauugguuucu

SEQ ID NO: 785554 - RNA, 19 nt, Artificial Sequence
  Description of Artificial Sequence: Synthetic oligonucleotide
ggggcaaucagccuugcug

SEQ ID NO: 785555 - RNA, 19 nt, Artificial Sequence
  Description of Artificial Sequence: Synthetic oligonucleotide
uaauccuuauucacaccau

SEQ ID NO: 785556 - RNA, 19 nt, Artificial Sequence
  Description of Artificial Sequence: Synthetic oligonucleotide
aaguucucucucucucuca

SEQ ID NO: 785557 - RNA, 19 nt, Artificial Sequence
  Description of Artificial Sequence: Synthetic oligonucleotide
caucucauggugacgugac

SEQ ID NO: 785558 - RNA, 19 nt, Artificial Sequence
  Description of Artificial Sequence: Synthetic oligonucleotide
cauaucaccacccaagaau

SEQ ID NO: 785559 - RNA, 19 nt, Artificial Sequence
  Description of Artificial Sequence: Synthetic oligonucleotide
uucccgguaucuuucccgc

SEQ ID NO: 785560 - RNA, 19 nt, Artificial Sequence
  Description of Artificial Sequence: Synthetic oligonucleotide
cagcacguaccuuuugaag

SEQ ID NO: 785561 - RNA, 19 nt, Artificial Sequence
  Description of Artificial Sequence: Synthetic oligonucleotide
caacgauucagugccuucc

SEQ ID NO: 785562 - RNA, 19 nt, Artificial Sequence
  Description of Artificial Sequence: Synthetic oligonucleotide
gaucacguucccguucccg

SEQ ID NO: 785563 - RNA, 19 nt, Artificial Sequence
  Description of Artificial Sequence: Synthetic oligonucleotide
uuucgcucauaugauuuac

SEQ ID NO: 785564 - RNA, 19 nt, Artificial Sequence
  Description of Artificial Sequence: Synthetic oligonucleotide
ucagcacguaccuuuugaa

SEQ ID NO: 785565 - RNA, 19 nt, Artificial Sequence
  Description of Artificial Sequence: Synthetic oligonucleotide
agaaaagggcucacuaucu

SEQ ID NO: 785566 - RNA, 19 nt, Artificial Sequence
  Description of Artificial Sequence: Synthetic oligonucleotide
cuuuuggggcuuuuccaug

SEQ ID NO: 785567 - RNA, 19 nt, Artificial Sequence
  Description of Artificial Sequence: Synthetic oligonucleotide
auccaucguggcuggauag

SEQ ID NO: 785568 - RNA, 19 nt, Artificial Sequence
  Description of Artificial Sequence: Synthetic oligonucleotide
uauccgugucugcauacuc

SEQ ID NO: 785569 - RNA, 19 nt, Artificial Sequence
  Description of Artificial Sequence: Synthetic oligonucleotide
uggcaucucauggugacgu

SEQ ID NO: 785570 - RNA, 19 nt, Artificial Sequence
  Description of Artificial Sequence: Synthetic oligonucleotide
agcgacaagcuucuuccca

SEQ ID NO: 785571 - RNA, 19 nt, Artificial Sequence
  Description of Artificial Sequence: Synthetic oligonucleotide
guaagcuugcugauaacga

SEQ ID NO: 785572 - RNA, 19 nt, Artificial Sequence
  Description of Artificial Sequence: Synthetic oligonucleotide
guuucggguacccugccuc

SEQ ID NO: 785573 - RNA, 19 nt, Artificial Sequence
  Description of Artificial Sequence: Synthetic oligonucleotide
cucucucucucucaauuuc

SEQ ID NO: 785574 - RNA, 19 nt, Artificial Sequence
  Description of Artificial Sequence: Synthetic oligonucleotide
aucgugaaaaucuccucua

SEQ ID NO: 785575 - RNA, 19 nt, Artificial Sequence
  Description of Artificial Sequence: Synthetic oligonucleotide
ucauuucgcucauaugauu

SEQ ID NO: 785576 - RNA, 19 nt, Artificial Sequence
  Description of Artificial Sequence: Synthetic oligonucleotide
agagugguggggauauccg

SEQ ID NO: 785577 - RNA, 19 nt, Artificial Sequence
  Description of Artificial Sequence: Synthetic oligonucleotide
accuuucuaggaauuguag

SEQ ID NO: 785578 - RNA, 19 nt, Artificial Sequence
  Description of Artificial Sequence: Synthetic oligonucleotide
aguucucucucucucucaa

SEQ ID NO: 785579 - RNA, 19 nt, Artificial Sequence
  Description of Artificial Sequence: Synthetic oligonucleotide
gguuuuccguccuucagac

SEQ ID NO: 785580 - RNA, 19 nt, Artificial Sequence
  Description of Artificial Sequence: Synthetic oligonucleotide
cucuccguuccuuggcacg

SEQ ID NO: 785581 - RNA, 19 nt, Artificial Sequence
  Description of Artificial Sequence: Synthetic oligonucleotide
gggaggcagaucuauaaac

SEQ ID NO: 785582 - RNA, 19 nt, Artificial Sequence
  Description of Artificial Sequence: Synthetic oligonucleotide
ucucuuugcuggcaaucuc

SEQ ID NO: 785583 - RNA, 19 nt, Artificial Sequence
  Description of Artificial Sequence: Synthetic oligonucleotide
acugaucagcucaguuucc

SEQ ID NO: 785584 - RNA, 19 nt, Artificial Sequence
  Description of Artificial Sequence: Synthetic oligonucleotide
ucgauacacauugcggcca

SEQ ID NO: 785585 - RNA, 19 nt, Artificial Sequence
  Description of Artificial Sequence: Synthetic oligonucleotide
ucggguacccugccucagg

SEQ ID NO: 785586 - RNA, 19 nt, Artificial Sequence
  Description of Artificial Sequence: Synthetic oligonucleotide
ucaacgauucagugccuuc

SEQ ID NO: 785587 - RNA, 19 nt, Artificial Sequence
  Description of Artificial Sequence: Synthetic oligonucleotide
uggcaaucucagcacguac

SEQ ID NO: 785588 - RNA, 19 nt, Artificial Sequence
  Description of Artificial Sequence: Synthetic oligonucleotide
ucucauggugacgugacuu

SEQ ID NO: 785589 - RNA, 19 nt, Artificial Sequence
  Description of Artificial Sequence: Synthetic oligonucleotide
uggugacgugacuuagaag

SEQ ID NO: 785590 - RNA, 19 nt, Artificial Sequence
  Description of Artificial Sequence: Synthetic oligonucleotide
ucgcuauauuccucuugag

SEQ ID NO: 785591 - RNA, 19 nt, Artificial Sequence
  Description of Artificial Sequence: Synthetic oligonucleotide
caaguucucucucucucuc

SEQ ID NO: 785592 - RNA, 19 nt, Artificial Sequence
  Description of Artificial Sequence: Synthetic oligonucleotide
gugaugguugaacuaggga

SEQ ID NO: 785593 - RNA, 19 nt, Artificial Sequence
  Description of Artificial Sequence: Synthetic oligonucleotide
auaucaccacccaagaauu

SEQ ID NO: 785594 - RNA, 19 nt, Artificial Sequence
  Description of Artificial Sequence: Synthetic oligonucleotide
guagcuuggcauaauaacu

SEQ ID NO: 785595 - RNA, 19 nt, Artificial Sequence
  Description of Artificial Sequence: Synthetic oligonucleotide
aagggcucacuaucucgcu

SEQ ID NO: 785596 - RNA, 19 nt, Artificial Sequence
  Description of Artificial Sequence: Synthetic oligonucleotide
acaacagcgacaagcuucu

SEQ ID NO: 785597 - RNA, 19 nt, Artificial Sequence
  Description of Artificial Sequence: Synthetic oligonucleotide
uguuggcguagcuuggcau

SEQ ID NO: 785598 - RNA, 19 nt, Artificial Sequence
  Description of Artificial Sequence: Synthetic oligonucleotide
aaaucuggguaagcuugcu

SEQ ID NO: 785599 - RNA, 19 nt, Artificial Sequence
  Description of Artificial Sequence: Synthetic oligonucleotide
uguccgccucugcaguggg

SEQ ID NO: 785600 - RNA, 19 nt, Artificial Sequence
  Description of Artificial Sequence: Synthetic oligonucleotide
auuucgcucauaugauuua

SEQ ID NO: 785601 - RNA, 19 nt, Artificial Sequence
  Description of Artificial Sequence: Synthetic oligonucleotide
ugcaaccuuucuaggaauu

SEQ ID NO: 785602 - RNA, 19 nt, Artificial Sequence
  Description of Artificial Sequence: Synthetic oligonucleotide
gccaagucguguuuuaaac

SEQ ID NO: 785603 - RNA, 19 nt, Artificial Sequence
  Description of Artificial Sequence: Synthetic oligonucleotide
ucgcacuuauuuucuucca

SEQ ID NO: 785604 - RNA, 19 nt, Artificial Sequence
  Description of Artificial Sequence: Synthetic oligonucleotide
uuucggguacccugccuca

SEQ ID NO: 785605 - RNA, 19 nt, Artificial Sequence
  Description of Artificial Sequence: Synthetic oligonucleotide
uccuucgugcagcuggguc

SEQ ID NO: 785606 - RNA, 19 nt, Artificial Sequence
  Description of Artificial Sequence: Synthetic oligonucleotide
auugcggccaagucguguu

SEQ ID NO: 785607 - RNA, 19 nt, Artificial Sequence
  Description of Artificial Sequence: Synthetic oligonucleotide
uugcaaccuuucuaggaau

SEQ ID NO: 785608 - RNA, 19 nt, Artificial Sequence
  Description of Artificial Sequence: Synthetic oligonucleotide
uguuucggguacccugccu

SEQ ID NO: 785609 - RNA, 19 nt, Artificial Sequence
  Description of Artificial Sequence: Synthetic oligonucleotide
ggguguguuccauaucacc

SEQ ID NO: 785610 - RNA, 19 nt, Artificial Sequence
  Description of Artificial Sequence: Synthetic oligonucleotide
uggguguguuccauaucac

SEQ ID NO: 785611 - RNA, 19 nt, Artificial Sequence
  Description of Artificial Sequence: Synthetic oligonucleotide
cacauugcggccaagucgu

SEQ ID NO: 785612 - RNA, 19 nt, Artificial Sequence
  Description of Artificial Sequence: Synthetic oligonucleotide
gccgcggucucucaaagcc

SEQ ID NO: 785613 - RNA, 19 nt, Artificial Sequence
  Description of Artificial Sequence: Synthetic oligonucleotide
ucucucucucucucaauuu

SEQ ID NO: 785614 - RNA, 19 nt, Artificial Sequence
  Description of Artificial Sequence: Synthetic oligonucleotide
uuggggcuuuuccaugagu

SEQ ID NO: 785615 - RNA, 19 nt, Artificial Sequence
  Description of Artificial Sequence: Synthetic oligonucleotide
ggccauacggccugguaag

SEQ ID NO: 785616 - RNA, 19 nt, Artificial Sequence
  Description of Artificial Sequence: Synthetic oligonucleotide
ggcaaucucagcacguacc

SEQ ID NO: 785617 - RNA, 19 nt, Artificial Sequence
  Description of Artificial Sequence: Synthetic oligonucleotide
uacccugguccauuuugcu

SEQ ID NO: 785618 - RNA, 19 nt, Artificial Sequence
  Description of Artificial Sequence: Synthetic oligonucleotide
auacggccugguaagaaca

SEQ ID NO: 785619 - RNA, 19 nt, Artificial Sequence
  Description of Artificial Sequence: Synthetic oligonucleotide
gaagcgucugguuuuccgu

SEQ ID NO: 785620 - RNA, 19 nt, Artificial Sequence
  Description of Artificial Sequence: Synthetic oligonucleotide
gcauaacuauuggacaugc

SEQ ID NO: 785621 - RNA, 19 nt, Artificial Sequence
  Description of Artificial Sequence: Synthetic oligonucleotide
ucguggcuggauagcauuc

SEQ ID NO: 785622 - RNA, 19 nt, Artificial Sequence
  Description of Artificial Sequence: Synthetic oligonucleotide
uuaguacuuuggucuuuuc

SEQ ID NO: 785623 - RNA, 19 nt, Artificial Sequence
  Description of Artificial Sequence: Synthetic oligonucleotide
gccuaagggacccuucuug

SEQ ID NO: 785624 - RNA, 19 nt, Artificial Sequence
  Description of Artificial Sequence: Synthetic oligonucleotide
uggccgcggucucucaaag

SEQ ID NO: 785625 - RNA, 19 nt, Artificial Sequence
  Description of Artificial Sequence: Synthetic oligonucleotide
uuuccguccuucagacauc

SEQ ID NO: 785626 - RNA, 19 nt, Artificial Sequence
  Description of Artificial Sequence: Synthetic oligonucleotide
cccgguauuucucugcaag

SEQ ID NO: 785627 - RNA, 19 nt, Artificial Sequence
  Description of Artificial Sequence: Synthetic oligonucleotide
ggaacauaauccccaaugu

SEQ ID NO: 785628 - RNA, 19 nt, Artificial Sequence
  Description of Artificial Sequence: Synthetic oligonucleotide
gauaguuggcugugguacu

SEQ ID NO: 785629 - RNA, 19 nt, Artificial Sequence
  Description of Artificial Sequence: Synthetic oligonucleotide
guugaacuagggauuagua

SEQ ID NO: 785630 - RNA, 19 nt, Artificial Sequence
  Description of Artificial Sequence: Synthetic oligonucleotide
ggaggcagaucuauaaaca

SEQ ID NO: 785631 - RNA, 19 nt, Artificial Sequence
  Description of Artificial Sequence: Synthetic oligonucleotide
acagcccgauaguuggcug

SEQ ID NO: 785632 - RNA, 19 nt, Artificial Sequence
  Description of Artificial Sequence: Synthetic oligonucleotide
ccauuguggggcaaucagc

SEQ ID NO: 785633 - RNA, 19 nt, Artificial Sequence
  Description of Artificial Sequence: Synthetic oligonucleotide
uugcuauaaucuaccucuu

SEQ ID NO: 785634 - RNA, 19 nt, Artificial Sequence
  Description of Artificial Sequence: Synthetic oligonucleotide
uuuggccgcggucucucaa

SEQ ID NO: 785635 - RNA, 19 nt, Artificial Sequence
  Description of Artificial Sequence: Synthetic oligonucleotide
cauuucgcucauaugauuu

SEQ ID NO: 785636 - RNA, 19 nt, Artificial Sequence
  Description of Artificial Sequence: Synthetic oligonucleotide
acggccugguaagaacaac

SEQ ID NO: 785637 - RNA, 19 nt, Artificial Sequence
  Description of Artificial Sequence: Synthetic oligonucleotide
cuauauuccucuugaguau

SEQ ID NO: 785638 - RNA, 19 nt, Artificial Sequence
  Description of Artificial Sequence: Synthetic oligonucleotide
aggcagaucuauaaacaaa

SEQ ID NO: 785639 - RNA, 19 nt, Artificial Sequence
  Description of Artificial Sequence: Synthetic oligonucleotide
gaaugaggaucauccacau

SEQ ID NO: 785640 - RNA, 19 nt, Artificial Sequence
  Description of Artificial Sequence: Synthetic oligonucleotide
uauucgcuauauuccucuu

SEQ ID NO: 785641 - RNA, 19 nt, Artificial Sequence
  Description of Artificial Sequence: Synthetic oligonucleotide
uucaacgauucagugccuu

SEQ ID NO: 785642 - RNA, 19 nt, Artificial Sequence
  Description of Artificial Sequence: Synthetic oligonucleotide
aucucauggugacgugacu

SEQ ID NO: 785643 - RNA, 19 nt, Artificial Sequence
  Description of Artificial Sequence: Synthetic oligonucleotide
guuggcguagcuuggcaua

SEQ ID NO: 785644 - RNA, 19 nt, Artificial Sequence
  Description of Artificial Sequence: Synthetic oligonucleotide
auauccgugucugcauacu

SEQ ID NO: 785645 - RNA, 19 nt, Artificial Sequence
  Description of Artificial Sequence: Synthetic oligonucleotide
cauacuggaaugcagccuu

SEQ ID NO: 785646 - RNA, 19 nt, Artificial Sequence
  Description of Artificial Sequence: Synthetic oligonucleotide
ggcaaucgugaaaaucucc

SEQ ID NO: 785647 - RNA, 19 nt, Artificial Sequence
  Description of Artificial Sequence: Synthetic oligonucleotide
aucaacucuuuggcagauc

SEQ ID NO: 785648 - RNA, 19 nt, Artificial Sequence
  Description of Artificial Sequence: Synthetic oligonucleotide
cuuaggcaaagccucuuua

SEQ ID NO: 785649 - RNA, 19 nt, Artificial Sequence
  Description of Artificial Sequence: Synthetic oligonucleotide
ugaucgcacuuauuuucuu

SEQ ID NO: 785650 - RNA, 19 nt, Artificial Sequence
  Description of Artificial Sequence: Synthetic oligonucleotide
aacuagggauuaguacuuu

SEQ ID NO: 785651 - RNA, 19 nt, Artificial Sequence
  Description of Artificial Sequence: Synthetic oligonucleotide
acggucccgguauuucucu

SEQ ID NO: 785652 - RNA, 19 nt, Artificial Sequence
  Description of Artificial Sequence: Synthetic oligonucleotide
cugcauaacuauuggacau

SEQ ID NO: 785653 - RNA, 19 nt, Artificial Sequence
  Description of Artificial Sequence: Synthetic oligonucleotide
cauggugacgugacuuaga

SEQ ID NO: 785654 - RNA, 19 nt, Artificial Sequence
  Description of Artificial Sequence: Synthetic oligonucleotide
agucguguuuuaaacucaa

SEQ ID NO: 785655 - RNA, 19 nt, Artificial Sequence
  Description of Artificial Sequence: Synthetic oligonucleotide
uuggcguagcuuggcauaa

SEQ ID NO: 785656 - RNA, 19 nt, Artificial Sequence
  Description of Artificial Sequence: Synthetic oligonucleotide
cgauaguuggcugugguac

SEQ ID NO: 785657 - RNA, 19 nt, Artificial Sequence
  Description of Artificial Sequence: Synthetic oligonucleotide
gcgacaagcuucuucccac

SEQ ID NO: 785658 - RNA, 19 nt, Artificial Sequence
  Description of Artificial Sequence: Synthetic oligonucleotide
ggucccgguauuucucugc

SEQ ID NO: 785659 - RNA, 19 nt, Artificial Sequence
  Description of Artificial Sequence: Synthetic oligonucleotide
ucuuguuacccugguccau

SEQ ID NO: 785660 - RNA, 19 nt, Artificial Sequence
  Description of Artificial Sequence: Synthetic oligonucleotide
uuggccgcggucucucaaa

SEQ ID NO: 785661 - RNA, 19 nt, Artificial Sequence
  Description of Artificial Sequence: Synthetic oligonucleotide
cacggucccgguauuucuc

SEQ ID NO: 785662 - RNA, 19 nt, Artificial Sequence
  Description of Artificial Sequence: Synthetic oligonucleotide
uguuacccugguccauuuu

SEQ ID NO: 785663 - RNA, 19 nt, Artificial Sequence
  Description of Artificial Sequence: Synthetic oligonucleotide
uucggguacccugccucag

SEQ ID NO: 785664 - RNA, 19 nt, Artificial Sequence
  Description of Artificial Sequence: Synthetic oligonucleotide
gcagauguaggugcagccc

SEQ ID NO: 785665 - RNA, 19 nt, Artificial Sequence
  Description of Artificial Sequence: Synthetic oligonucleotide
cucauuucgcucauaugau

SEQ ID NO: 785666 - RNA, 19 nt, Artificial Sequence
  Description of Artificial Sequence: Synthetic oligonucleotide
uuguuacccugguccauuu

SEQ ID NO: 785667 - RNA, 19 nt, Artificial Sequence
  Description of Artificial Sequence: Synthetic oligonucleotide
cucauggugacgugacuua

SEQ ID NO: 785668 - RNA, 19 nt, Artificial Sequence
  Description of Artificial Sequence: Synthetic oligonucleotide
caacucauuucgcucauau

SEQ ID NO: 785669 - RNA, 19 nt, Artificial Sequence
  Description of Artificial Sequence: Synthetic oligonucleotide
caugucugccucaggaggu

SEQ ID NO: 785670 - RNA, 19 nt, Artificial Sequence
  Description of Artificial Sequence: Synthetic oligonucleotide
ccggcaaucgugaaaaucu

SEQ ID NO: 785671 - RNA, 19 nt, Artificial Sequence
  Description of Artificial Sequence: Synthetic oligonucleotide
uggggcaaucagccuugcu

SEQ ID NO: 785672 - RNA, 19 nt, Artificial Sequence
  Description of Artificial Sequence: Synthetic oligonucleotide
gaacuagggauuaguacuu

SEQ ID NO: 785673 - RNA, 19 nt, Artificial Sequence
  Description of Artificial Sequence: Synthetic oligonucleotide
cacuaucucgcucuggcau

SEQ ID NO: 785674 - RNA, 19 nt, Artificial Sequence
  Description of Artificial Sequence: Synthetic oligonucleotide
gcaaucgugaaaaucuccu

SEQ ID NO: 785675 - RNA, 19 nt, Artificial Sequence
  Description of Artificial Sequence: Synthetic oligonucleotide
ucccgaucgcguucccgcu

SEQ ID NO: 785676 - RNA, 19 nt, Artificial Sequence
  Description of Artificial Sequence: Synthetic oligonucleotide
agcccgauaguuggcugug

SEQ ID NO: 785677 - RNA, 19 nt, Artificial Sequence
  Description of Artificial Sequence: Synthetic oligonucleotide
cauuuguaguuaguguagu

SEQ ID NO: 785678 - RNA, 19 nt, Artificial Sequence
  Description of Artificial Sequence: Synthetic oligonucleotide
cuuggcacggucccgguau

SEQ ID NO: 785679 - RNA, 19 nt, Artificial Sequence
  Description of Artificial Sequence: Synthetic oligonucleotide
guauaagagugguggggau

SEQ ID NO: 785680 - RNA, 19 nt, Artificial Sequence
  Description of Artificial Sequence: Synthetic oligonucleotide
cauccaucguggcuggaua

SEQ ID NO: 785681 - RNA, 19 nt, Artificial Sequence
  Description of Artificial Sequence: Synthetic oligonucleotide
gggacccuucuuguuaccc

SEQ ID NO: 785682 - RNA, 19 nt, Artificial Sequence
  Description of Artificial Sequence: Synthetic oligonucleotide
guacccugccucagguaug

SEQ ID NO: 785683 - RNA, 19 nt, Artificial Sequence
  Description of Artificial Sequence: Synthetic oligonucleotide
gguugaacuagggauuagu

SEQ ID NO: 785684 - RNA, 19 nt, Artificial Sequence
  Description of Artificial Sequence: Synthetic oligonucleotide
gcugcguauaagaguggug

SEQ ID NO: 785685 - RNA, 19 nt, Artificial Sequence
  Description of Artificial Sequence: Synthetic oligonucleotide
uugcggccaagucguguuu

SEQ ID NO: 785686 - RNA, 19 nt, Artificial Sequence
  Description of Artificial Sequence: Synthetic oligonucleotide
gaacagccauguggugaug

SEQ ID NO: 785687 - RNA, 19 nt, Artificial Sequence
  Description of Artificial Sequence: Synthetic oligonucleotide
ugcggccaagucguguuuu

SEQ ID NO: 785688 - RNA, 19 nt, Artificial Sequence
  Description of Artificial Sequence: Synthetic oligonucleotide
cuccauuguggggcaauca

SEQ ID NO: 785689 - RNA, 19 nt, Artificial Sequence
  Description of Artificial Sequence: Synthetic oligonucleotide
ggcaucucauggugacgug

SEQ ID NO: 785690 - RNA, 19 nt, Artificial Sequence
  Description of Artificial Sequence: Synthetic oligonucleotide
gaucaacucuuuggcagau

SEQ ID NO: 785691 - RNA, 19 nt, Artificial Sequence
  Description of Artificial Sequence: Synthetic oligonucleotide
gcaucucauggugacguga

SEQ ID NO: 785692 - RNA, 19 nt, Artificial Sequence
  Description of Artificial Sequence: Synthetic oligonucleotide
ccgcggucucucaaagccg

SEQ ID NO: 785693 - RNA, 19 nt, Artificial Sequence
  Description of Artificial Sequence: Synthetic oligonucleotide
ccaagucguguuuuaaacu

SEQ ID NO: 785694 - RNA, 19 nt, Artificial Sequence
  Description of Artificial Sequence: Synthetic oligonucleotide
ggguaagcuugcugauaac

SEQ ID NO: 785695 - RNA, 19 nt, Artificial Sequence
  Description of Artificial Sequence: Synthetic oligonucleotide
ccacccaagaauuuggauu

SEQ ID NO: 785696 - RNA, 19 nt, Artificial Sequence
  Description of Artificial Sequence: Synthetic oligonucleotide
gcaaguucucucucucucu

SEQ ID NO: 785697 - RNA, 19 nt, Artificial Sequence
  Description of Artificial Sequence: Synthetic oligonucleotide
gccggcaaucgugaaaauc

SEQ ID NO: 785698 - RNA, 19 nt, Artificial Sequence
  Description of Artificial Sequence: Synthetic oligonucleotide
ggcguagcuuggcauaaua

SEQ ID NO: 785699 - RNA, 19 nt, Artificial Sequence
  Description of Artificial Sequence: Synthetic oligonucleotide
ggauuaguacuuuggucuu

SEQ ID NO: 785700 - RNA, 19 nt, Artificial Sequence
  Description of Artificial Sequence: Synthetic oligonucleotide
uucuuccacuggcgaucaa

SEQ ID NO: 785701 - RNA, 19 nt, Artificial Sequence
  Description of Artificial Sequence: Synthetic oligonucleotide
auaggccauacggccuggu

SEQ ID NO: 785702 - RNA, 19 nt, Artificial Sequence
  Description of Artificial Sequence: Synthetic oligonucleotide
cuaagggacccuucuuguu

SEQ ID NO: 785703 - RNA, 19 nt, Artificial Sequence
  Description of Artificial Sequence: Synthetic oligonucleotide
acaacucauuucgcucaua

SEQ ID NO: 785704 - RNA, 19 nt, Artificial Sequence
  Description of Artificial Sequence: Synthetic oligonucleotide
cuggcaaucucagcacgua

SEQ ID NO: 785705 - RNA, 19 nt, Artificial Sequence
  Description of Artificial Sequence: Synthetic oligonucleotide
cccagcggccuaagggacc

SEQ ID NO: 785706 - RNA, 19 nt, Artificial Sequence
  Description of Artificial Sequence: Synthetic oligonucleotide
cuggguaagcuugcugaua

SEQ ID NO: 785707 - RNA, 19 nt, Artificial Sequence
  Description of Artificial Sequence: Synthetic oligonucleotide
gcguagcuuggcauaauaa

SEQ ID NO: 785708 - RNA, 19 nt, Artificial Sequence
  Description of Artificial Sequence: Synthetic oligonucleotide
ggccgcggucucucaaagc

SEQ ID NO: 785709 - RNA, 19 nt, Artificial Sequence
  Description of Artificial Sequence: Synthetic oligonucleotide
ccuaagggacccuucuugu

SEQ ID NO: 785710 - RNA, 19 nt, Artificial Sequence
  Description of Artificial Sequence: Synthetic oligonucleotide
guccgccucugcagugggg

SEQ ID NO: 785711 - RNA, 19 nt, Artificial Sequence
  Description of Artificial Sequence: Synthetic oligonucleotide
cuuguuacccugguccauu

SEQ ID NO: 785712 - RNA, 19 nt, Artificial Sequence
  Description of Artificial Sequence: Synthetic oligonucleotide
cagcccgauaguuggcugu

SEQ ID NO: 785713 - RNA, 19 nt, Artificial Sequence
  Description of Artificial Sequence: Synthetic oligonucleotide
guucucucucucucucaau

SEQ ID NO: 785714 - RNA, 19 nt, Artificial Sequence
  Description of Artificial Sequence: Synthetic oligonucleotide
cuucaacgauucagugccu

SEQ ID NO: 785715 - RNA, 19 nt, Artificial Sequence
  Description of Artificial Sequence: Synthetic oligonucleotide
ccauaucaccacccaagaa

SEQ ID NO: 785716 - RNA, 19 nt, Artificial Sequence
  Description of Artificial Sequence: Synthetic oligonucleotide
uccguccuucagacaucuu

SEQ ID NO: 785717 - RNA, 19 nt, Artificial Sequence
  Description of Artificial Sequence: Synthetic oligonucleotide
uggcguagcuuggcauaau

SEQ ID NO: 785718 - RNA, 19 nt, Artificial Sequence
  Description of Artificial Sequence: Synthetic oligonucleotide
acauugcggccaagucgug

SEQ ID NO: 785719 - RNA, 19 nt, Artificial Sequence
  Description of Artificial Sequence: Synthetic oligonucleotide
gcgaucaagcucugccuua

SEQ ID NO: 785720 - RNA, 19 nt, Artificial Sequence
  Description of Artificial Sequence: Synthetic oligonucleotide
caucguggcuggauagcau

SEQ ID NO: 785721 - RNA, 19 nt, Artificial Sequence
  Description of Artificial Sequence: Synthetic oligonucleotide
guggggcaaucagccuugc

SEQ ID NO: 785722 - RNA, 19 nt, Artificial Sequence
  Description of Artificial Sequence: Synthetic oligonucleotide
cgcuauauuccucuugagu

SEQ ID NO: 785723 - RNA, 19 nt, Artificial Sequence
  Description of Artificial Sequence: Synthetic oligonucleotide
cauugcggccaagucgugu

SEQ ID NO: 785724 - RNA, 19 nt, Artificial Sequence
  Description of Artificial Sequence: Synthetic oligonucleotide
ccaucguggcuggauagca

SEQ ID NO: 785725 - RNA, 19 nt, Artificial Sequence
  Description of Artificial Sequence: Synthetic oligonucleotide
gcccgauaguuggcugugg

SEQ ID NO: 785726 - RNA, 19 nt, Artificial Sequence
  Description of Artificial Sequence: Synthetic oligonucleotide
uggcacggucccgguauuu

SEQ ID NO: 785727 - RNA, 19 nt, Artificial Sequence
  Description of Artificial Sequence: Synthetic oligonucleotide
cgcucauaugauuuacucu

SEQ ID NO: 785728 - RNA, 19 nt, Artificial Sequence
  Description of Artificial Sequence: Synthetic oligonucleotide
gggucaugagaaguuuccu

SEQ ID NO: 785729 - RNA, 19 nt, Artificial Sequence
  Description of Artificial Sequence: Synthetic oligonucleotide
gucguguuuuaaacucaau

SEQ ID NO: 785730 - RNA, 19 nt, Artificial Sequence
  Description of Artificial Sequence: Synthetic oligonucleotide
cauuuuggccgcggucucu

SEQ ID NO: 785731 - RNA, 19 nt, Artificial Sequence
  Description of Artificial Sequence: Synthetic oligonucleotide
ccgauaguuggcuguggua

SEQ ID NO: 785732 - RNA, 19 nt, Artificial Sequence
  Description of Artificial Sequence: Synthetic oligonucleotide
gccauacggccugguaaga

SEQ ID NO: 785733 - RNA, 19 nt, Artificial Sequence
  Description of Artificial Sequence: Synthetic oligonucleotide
cccgaucgcguucccgcuc

SEQ ID NO: 785734 - RNA, 19 nt, Artificial Sequence
  Description of Artificial Sequence: Synthetic oligonucleotide
ccauacggccugguaagaa

SEQ ID NO: 785735 - RNA, 19 nt, Artificial Sequence
  Description of Artificial Sequence: Synthetic oligonucleotide
ccauacuggaaugcagccu

SEQ ID NO: 785736 - RNA, 19 nt, Artificial Sequence
  Description of Artificial Sequence: Synthetic oligonucleotide
gcggccaagucguguuuua

SEQ ID NO: 785737 - RNA, 19 nt, Artificial Sequence
  Description of Artificial Sequence: Synthetic oligonucleotide
ggguacccugccucaggua

SEQ ID NO: 785738 - RNA, 19 nt, Artificial Sequence
  Description of Artificial Sequence: Synthetic oligonucleotide
cccgauaguuggcuguggu

SEQ ID NO: 785739 - RNA, 19 nt, Artificial Sequence
  Description of Artificial Sequence: Synthetic oligonucleotide
gguaucuuucccgcuccuu

SEQ ID NO: 785740 - RNA, 19 nt, Artificial Sequence
  Description of Artificial Sequence: Synthetic oligonucleotide
cgauacacauugcggccaa

SEQ ID NO: 785741 - RNA, 19 nt, Artificial Sequence
  Description of Artificial Sequence: Synthetic oligonucleotide
cccaagaauuuggauuccu

SEQ ID NO: 785742 - RNA, 19 nt, Artificial Sequence
  Description of Artificial Sequence: Synthetic oligonucleotide
gcggccuaagggacccuuc

SEQ ID NO: 785743 - RNA, 19 nt, Artificial Sequence
  Description of Artificial Sequence: Synthetic oligonucleotide
ccaaauggguguguuccau

SEQ ID NO: 785744 - RNA, 19 nt, Artificial Sequence
  Description of Artificial Sequence: Synthetic oligonucleotide
cgguauuucucugcaaguu

SEQ ID NO: 785745 - RNA, 19 nt, Artificial Sequence
  Description of Artificial Sequence: Synthetic oligonucleotide
caaccccaucagcuuccau

SEQ ID NO: 785746 - RNA, 19 nt, Artificial Sequence
  Description of Artificial Sequence: Synthetic oligonucleotide
cgaucgcguucccgcuccc

SEQ ID NO: 785747 - RNA, 19 nt, Artificial Sequence
  Description of Artificial Sequence: Synthetic oligonucleotide
gccuuaucauugguuucuu

SEQ ID NO: 785748 - RNA, 19 nt, Artificial Sequence
  Description of Artificial Sequence: Synthetic oligonucleotide
cguucccguucccgguauc

SEQ ID NO: 785749 - RNA, 19 nt, Artificial Sequence
  Description of Artificial Sequence: Synthetic oligonucleotide
gccuuaggcaaagccucuu

SEQ ID NO: 785750 - RNA, 19 nt, Artificial Sequence
  Description of Artificial Sequence: Synthetic oligonucleotide
cggguacccugccucaggu

SEQ ID NO: 785751 - RNA, 19 nt, Artificial Sequence
  Description of Artificial Sequence: Synthetic oligonucleotide
cgaucaagcucugccuuau

SEQ ID NO: 785752 - RNA, 19 nt, Artificial Sequence
  Description of Artificial Sequence: Synthetic oligonucleotide
caacagcgacaagcuucuu

SEQ ID NO: 785753 - RNA, 19 nt, Artificial Sequence
  Description of Artificial Sequence: Synthetic oligonucleotide
cagcggccuaagggacccu

SEQ ID NO: 785754 - RNA, 19 nt, Artificial Sequence
  Description of Artificial Sequence: Synthetic oligonucleotide
acagcaaugacuuaguauc

SEQ ID NO: 785755 - RNA, 19 nt, Artificial Sequence
  Description of Artificial Sequence: Synthetic oligonucleotide
acuacguuuacucuguugc

SEQ ID NO: 785756 - RNA, 19 nt, Artificial Sequence
  Description of Artificial Sequence: Synthetic oligonucleotide
aaaguuccuaauucuauac

SEQ ID NO: 785757 - RNA, 19 nt, Artificial Sequence
  Description of Artificial Sequence: Synthetic oligonucleotide
ucuauuuugaguaaaucac

SEQ ID NO: 785758 - RNA, 19 nt, Artificial Sequence
  Description of Artificial Sequence: Synthetic oligonucleotide
aacauugucaaguuugcag

SEQ ID NO: 785759 - RNA, 19 nt, Artificial Sequence
  Description of Artificial Sequence: Synthetic oligonucleotide
uaagcuugaaucaagcaag

SEQ ID NO: 785760 - RNA, 19 nt, Artificial Sequence
  Description of Artificial Sequence: Synthetic oligonucleotide
aagacaagauccuuggauc

SEQ ID NO: 785761 - RNA, 19 nt, Artificial Sequence
  Description of Artificial Sequence: Synthetic oligonucleotide
ucaauauuggugcugaucu

SEQ ID NO: 785762 - RNA, 19 nt, Artificial Sequence
  Description of Artificial Sequence: Synthetic oligonucleotide
auaguguugaagucguucc

SEQ ID NO: 785763 - RNA, 19 nt, Artificial Sequence
  Description of Artificial Sequence: Synthetic oligonucleotide
acuaaauucagucauaguu

SEQ ID NO: 785764 - RNA, 19 nt, Artificial Sequence
  Description of Artificial Sequence: Synthetic oligonucleotide
uccuauuugaacauuguca

SEQ ID NO: 785765 - RNA, 19 nt, Artificial Sequence
  Description of Artificial Sequence: Synthetic oligonucleotide
aaagcaaucacagcagacg

SEQ ID NO: 785766 - RNA, 19 nt, Artificial Sequence
  Description of Artificial Sequence: Synthetic oligonucleotide
agauccuuggaucuguacc

SEQ ID NO: 785767 - RNA, 19 nt, Artificial Sequence
  Description of Artificial Sequence: Synthetic oligonucleotide
uagacaauacugaaugagg

SEQ ID NO: 785768 - RNA, 19 nt, Artificial Sequence
  Description of Artificial Sequence: Synthetic oligonucleotide
aauuuucggcagcugaugg

SEQ ID NO: 785769 - RNA, 19 nt, Artificial Sequence
  Description of Artificial Sequence: Synthetic oligonucleotide
ucuuugaaguauaacagcu

SEQ ID NO: 785770 - RNA, 19 nt, Artificial Sequence
  Description of Artificial Sequence: Synthetic oligonucleotide
ucaagcauacuuaagcgug

SEQ ID NO: 785771 - RNA, 19 nt, Artificial Sequence
  Description of Artificial Sequence: Synthetic oligonucleotide
cacuauuuauuccagaggc

SEQ ID NO: 785772 - RNA, 19 nt, Artificial Sequence
  Description of Artificial Sequence: Synthetic oligonucleotide
uuauuuagcagacuuguaa

SEQ ID NO: 785773 - RNA, 19 nt, Artificial Sequence
  Description of Artificial Sequence: Synthetic oligonucleotide
aacaauauaacagggacau

SEQ ID NO: 785774 - RNA, 19 nt, Artificial Sequence
  Description of Artificial Sequence: Synthetic oligonucleotide
aaauuguaguccaaccacc

SEQ ID NO: 785775 - RNA, 19 nt, Artificial Sequence
  Description of Artificial Sequence: Synthetic oligonucleotide
uuaagcgugacucucggga

SEQ ID NO: 785776 - RNA, 19 nt, Artificial Sequence
  Description of Artificial Sequence: Synthetic oligonucleotide
gacaagaaaauuuucggca

SEQ ID NO: 785777 - RNA, 19 nt, Artificial Sequence
  Description of Artificial Sequence: Synthetic oligonucleotide
aagaacggcucuuugaagu

SEQ ID NO: 785778 - RNA, 19 nt, Artificial Sequence
  Description of Artificial Sequence: Synthetic oligonucleotide
uuggcuaggaauuuaagaa

SEQ ID NO: 785779 - RNA, 19 nt, Artificial Sequence
  Description of Artificial Sequence: Synthetic oligonucleotide
aauuguaguccaaccaccc

SEQ ID NO: 785780 - RNA, 19 nt, Artificial Sequence
  Description of Artificial Sequence: Synthetic oligonucleotide
acuagcaggagcuuuguag

SEQ ID NO: 785781 - RNA, 19 nt, Artificial Sequence
  Description of Artificial Sequence: Synthetic oligonucleotide
uauaacagggacauucugu

SEQ ID NO: 785782 - RNA, 19 nt, Artificial Sequence
  Description of Artificial Sequence: Synthetic oligonucleotide
cuugaaaagaauuucaucu

SEQ ID NO: 785783 - RNA, 19 nt, Artificial Sequence
  Description of Artificial Sequence: Synthetic oligonucleotide
uuuccuacuacguuuacuc

SEQ ID NO: 785784 - RNA, 19 nt, Artificial Sequence
  Description of Artificial Sequence: Synthetic oligonucleotide
uuaagaacggcucuuugaa

SEQ ID NO: 785785 - RNA, 19 nt, Artificial Sequence
  Description of Artificial Sequence: Synthetic oligonucleotide
auaagcuugaaucaagcaa

SEQ ID NO: 785786 - RNA, 19 nt, Artificial Sequence
  Description of Artificial Sequence: Synthetic oligonucleotide
ucuguugcuaggccgaucc

SEQ ID NO: 785787 - RNA, 19 nt, Artificial Sequence
  Description of Artificial Sequence: Synthetic oligonucleotide
ugaugaaacauguuuguaa

SEQ ID NO: 785788 - RNA, 19 nt, Artificial Sequence
  Description of Artificial Sequence: Synthetic oligonucleotide
accacuauuuauuccagag

SEQ ID NO: 785789 - RNA, 19 nt, Artificial Sequence
  Description of Artificial Sequence: Synthetic oligonucleotide
aguguaagaaaugaucauc

SEQ ID NO: 785790 - RNA, 19 nt, Artificial Sequence
  Description of Artificial Sequence: Synthetic oligonucleotide
uuucuuacggcacuuggcu

SEQ ID NO: 785791 - RNA, 19 nt, Artificial Sequence
  Description of Artificial Sequence: Synthetic oligonucleotide
ugggguuaaaagaucaaca

SEQ ID NO: 785792 - RNA, 19 nt, Artificial Sequence
  Description of Artificial Sequence: Synthetic oligonucleotide
cuuuauagcaggcacucag

SEQ ID NO: 785793 - RNA, 19 nt, Artificial Sequence
  Description of Artificial Sequence: Synthetic oligonucleotide
augggauucagcuagcacu

SEQ ID NO: 785794 - RNA, 19 nt, Artificial Sequence
  Description of Artificial Sequence: Synthetic oligonucleotide
auagacaauacugaaugag

SEQ ID NO: 785795 - RNA, 19 nt, Artificial Sequence
  Description of Artificial Sequence: Synthetic oligonucleotide
uccaccaauaaauaaaguu

SEQ ID NO: 785796 - RNA, 19 nt, Artificial Sequence
  Description of Artificial Sequence: Synthetic oligonucleotide
agcagcuaaagacaagauc

SEQ ID NO: 785797 - RNA, 19 nt, Artificial Sequence
  Description of Artificial Sequence: Synthetic oligonucleotide
ugaggucauaacaauauau

SEQ ID NO: 785798 - RNA, 19 nt, Artificial Sequence
  Description of Artificial Sequence: Synthetic oligonucleotide
cuguaugaguugaauaugc

SEQ ID NO: 785799 - RNA, 19 nt, Artificial Sequence
  Description of Artificial Sequence: Synthetic oligonucleotide
ugcaguauauucuguagca

SEQ ID NO: 785800 - RNA, 19 nt, Artificial Sequence
  Description of Artificial Sequence: Synthetic oligonucleotide
uuaguaucuguguaagcug

SEQ ID NO: 785801 - RNA, 19 nt, Artificial Sequence
  Description of Artificial Sequence: Synthetic oligonucleotide
ucgaccacuauuuauucca

SEQ ID NO: 785802 - RNA, 19 nt, Artificial Sequence
  Description of Artificial Sequence: Synthetic oligonucleotide
ugaucugcaguauauucug

SEQ ID NO: 785803 - RNA, 19 nt, Artificial Sequence
  Description of Artificial Sequence: Synthetic oligonucleotide
uucucgacuaaauucaguc

SEQ ID NO: 785804 - RNA, 19 nt, Artificial Sequence
  Description of Artificial Sequence: Synthetic oligonucleotide
uuucuuucgaccacuauuu

SEQ ID NO: 785805 - RNA, 19 nt, Artificial Sequence
  Description of Artificial Sequence: Synthetic oligonucleotide
guaugaguugaauaugccc

SEQ ID NO: 785806 - RNA, 19 nt, Artificial Sequence
  Description of Artificial Sequence: Synthetic oligonucleotide
uuuucuuacggcacuuggc

SEQ ID NO: 785807 - RNA, 19 nt, Artificial Sequence
  Description of Artificial Sequence: Synthetic oligonucleotide
gcuuguaugugcuucaggg

SEQ ID NO: 785808 - RNA, 19 nt, Artificial Sequence
  Description of Artificial Sequence: Synthetic oligonucleotide
aaugaggucauaacaauau

SEQ ID NO: 785809 - RNA, 19 nt, Artificial Sequence
  Description of Artificial Sequence: Synthetic oligonucleotide
aagaucaacaagcugucua

SEQ ID NO: 785810 - RNA, 19 nt, Artificial Sequence
  Description of Artificial Sequence: Synthetic oligonucleotide
aacucugagcuucccaaag

SEQ ID NO: 785811 - RNA, 19 nt, Artificial Sequence
  Description of Artificial Sequence: Synthetic oligonucleotide
ucuuacggcacuuggcuag

SEQ ID NO: 785812 - RNA, 19 nt, Artificial Sequence
  Description of Artificial Sequence: Synthetic oligonucleotide
uuccuaauucuauacuaag

SEQ ID NO: 785813 - RNA, 19 nt, Artificial Sequence
  Description of Artificial Sequence: Synthetic oligonucleotide
uguaugaguugaauaugcc

SEQ ID NO: 785814 - RNA, 19 nt, Artificial Sequence
  Description of Artificial Sequence: Synthetic oligonucleotide
ccuagaucgacuuaggaag

SEQ ID NO: 785815 - RNA, 19 nt, Artificial Sequence
  Description of Artificial Sequence: Synthetic oligonucleotide
aaucuccuaaaauguaaga

SEQ ID NO: 785816 - RNA, 19 nt, Artificial Sequence
  Description of Artificial Sequence: Synthetic oligonucleotide
acaauacugaaugagguca

SEQ ID NO: 785817 - RNA, 19 nt, Artificial Sequence
  Description of Artificial Sequence: Synthetic oligonucleotide
cuagcaggagcuuuguagc

SEQ ID NO: 785818 - RNA, 19 nt, Artificial Sequence
  Description of Artificial Sequence: Synthetic oligonucleotide
caauaagcuugaaucaagc

SEQ ID NO: 785819 - RNA, 19 nt, Artificial Sequence
  Description of Artificial Sequence: Synthetic oligonucleotide
uguugcuucaguucaacuc

SEQ ID NO: 785820 - RNA, 19 nt, Artificial Sequence
  Description of Artificial Sequence: Synthetic oligonucleotide
uguaaaacuccucuccauc

SEQ ID NO: 785821 - RNA, 19 nt, Artificial Sequence
  Description of Artificial Sequence: Synthetic oligonucleotide
ugcguuuagaucugaaacu

SEQ ID NO: 785822 - RNA, 19 nt, Artificial Sequence
  Description of Artificial Sequence: Synthetic oligonucleotide
aaguucucgacuaaauuca

SEQ ID NO: 785823 - RNA, 19 nt, Artificial Sequence
  Description of Artificial Sequence: Synthetic oligonucleotide
acauguuuguaaucgucuc

SEQ ID NO: 785824 - RNA, 19 nt, Artificial Sequence
  Description of Artificial Sequence: Synthetic oligonucleotide
gagacaugacuguagcucc

SEQ ID NO: 785825 - RNA, 19 nt, Artificial Sequence
  Description of Artificial Sequence: Synthetic oligonucleotide
acuuaguaucuguguaagc

SEQ ID NO: 785826 - RNA, 19 nt, Artificial Sequence
  Description of Artificial Sequence: Synthetic oligonucleotide
cuuaugacuggacuaggag

SEQ ID NO: 785827 - RNA, 19 nt, Artificial Sequence
  Description of Artificial Sequence: Synthetic oligonucleotide
uuuguaaucgucuccccaa

SEQ ID NO: 785828 - RNA, 19 nt, Artificial Sequence
  Description of Artificial Sequence: Synthetic oligonucleotide
uacuuaagcgugacucucg

SEQ ID NO: 785829 - RNA, 19 nt, Artificial Sequence
  Description of Artificial Sequence: Synthetic oligonucleotide
aaguuccuaauucuauacu

SEQ ID NO: 785830 - RNA, 19 nt, Artificial Sequence
  Description of Artificial Sequence: Synthetic oligonucleotide
auaaucaaugcugauuucu

SEQ ID NO: 785831 - RNA, 19 nt, Artificial Sequence
  Description of Artificial Sequence: Synthetic oligonucleotide
uucccauaaaauaguguug

SEQ ID NO: 785832 - RNA, 19 nt, Artificial Sequence
  Description of Artificial Sequence: Synthetic oligonucleotide
gaaucaagagucccaggcc

SEQ ID NO: 785833 - RNA, 19 nt, Artificial Sequence
  Description of Artificial Sequence: Synthetic oligonucleotide
uucaagcauacuuaagcgu

SEQ ID NO: 785834 - RNA, 19 nt, Artificial Sequence
  Description of Artificial Sequence: Synthetic oligonucleotide
aaugcaggguuuuccccuc

SEQ ID NO: 785835 - RNA, 19 nt, Artificial Sequence
  Description of Artificial Sequence: Synthetic oligonucleotide
uguguaagcugggaaauug

SEQ ID NO: 785836 - RNA, 19 nt, Artificial Sequence
  Description of Artificial Sequence: Synthetic oligonucleotide
uccuacuacguuuacucug

SEQ ID NO: 785837 - RNA, 19 nt, Artificial Sequence
  Description of Artificial Sequence: Synthetic oligonucleotide
aauauaacagggacauucu

SEQ ID NO: 785838 - RNA, 19 nt, Artificial Sequence
  Description of Artificial Sequence: Synthetic oligonucleotide
ugaggaaucaagaguccca

SEQ ID NO: 785839 - RNA, 19 nt, Artificial Sequence
  Description of Artificial Sequence: Synthetic oligonucleotide
gugcguuuagaucugaaac

SEQ ID NO: 785840 - RNA, 19 nt, Artificial Sequence
  Description of Artificial Sequence: Synthetic oligonucleotide
cugcuuuauacucugugag

SEQ ID NO: 785841 - RNA, 19 nt, Artificial Sequence
  Description of Artificial Sequence: Synthetic oligonucleotide
aggucauaacaauauauau

SEQ ID NO: 785842 - RNA, 19 nt, Artificial Sequence
  Description of Artificial Sequence: Synthetic oligonucleotide
ucuagggagguuugguucc

SEQ ID NO: 785843 - RNA, 19 nt, Artificial Sequence
  Description of Artificial Sequence: Synthetic oligonucleotide
uguucaauauuggugcuga

SEQ ID NO: 785844 - RNA, 19 nt, Artificial Sequence
  Description of Artificial Sequence: Synthetic oligonucleotide
aaucagucacaauuuggaa

SEQ ID NO: 785845 - RNA, 19 nt, Artificial Sequence
  Description of Artificial Sequence: Synthetic oligonucleotide
aagugcucagguuccuuuc

SEQ ID NO: 785846 - RNA, 19 nt, Artificial Sequence
  Description of Artificial Sequence: Synthetic oligonucleotide
uuuauagcaggcacucagu

SEQ ID NO: 785847 - RNA, 19 nt, Artificial Sequence
  Description of Artificial Sequence: Synthetic oligonucleotide
ucuauacuaagcucauccu

SEQ ID NO: 785848 - RNA, 19 nt, Artificial Sequence
  Description of Artificial Sequence: Synthetic oligonucleotide
aagcuugaaucaagcaagc

SEQ ID NO: 785849 - RNA, 19 nt, Artificial Sequence
  Description of Artificial Sequence: Synthetic oligonucleotide
uaaucgucuccccaagaca

SEQ ID NO: 785850 - RNA, 19 nt, Artificial Sequence
  Description of Artificial Sequence: Synthetic oligonucleotide
ugaauaugcccucccaaaa

SEQ ID NO: 785851 - RNA, 19 nt, Artificial Sequence
  Description of Artificial Sequence: Synthetic oligonucleotide
aaauuuucggcagcugaug

SEQ ID NO: 785852 - RNA, 19 nt, Artificial Sequence
  Description of Artificial Sequence: Synthetic oligonucleotide
aguuccuaauucuauacua

SEQ ID NO: 785853 - RNA, 19 nt, Artificial Sequence
  Description of Artificial Sequence: Synthetic oligonucleotide
aggaccaauagacaauacu

SEQ ID NO: 785854 - RNA, 19 nt, Artificial Sequence
  Description of Artificial Sequence: Synthetic oligonucleotide
uuccccucuauuuugagua

SEQ ID NO: 785855 - RNA, 19 nt, Artificial Sequence
  Description of Artificial Sequence: Synthetic oligonucleotide
gauucgagaacaaucuuga

SEQ ID NO: 785856 - RNA, 19 nt, Artificial Sequence
  Description of Artificial Sequence: Synthetic oligonucleotide
acuuaagcgugacucucgg

SEQ ID NO: 785857 - RNA, 19 nt, Artificial Sequence
  Description of Artificial Sequence: Synthetic oligonucleotide
gaacaucaauuucaucgcc

SEQ ID NO: 785858 - RNA, 19 nt, Artificial Sequence
  Description of Artificial Sequence: Synthetic oligonucleotide
gacggaagcuucuuuaauc

SEQ ID NO: 785859 - RNA, 19 nt, Artificial Sequence
  Description of Artificial Sequence: Synthetic oligonucleotide
cuucuuaugacuggacuag

SEQ ID NO: 785860 - RNA, 19 nt, Artificial Sequence
  Description of Artificial Sequence: Synthetic oligonucleotide
uuuagcagacuuguaaguc

SEQ ID NO: 785861 - RNA, 19 nt, Artificial Sequence
  Description of Artificial Sequence: Synthetic oligonucleotide
gacuguagcuccuauuuga

SEQ ID NO: 785862 - RNA, 19 nt, Artificial Sequence
  Description of Artificial Sequence: Synthetic oligonucleotide
acguuuacucuguugcuag

SEQ ID NO: 785863 - RNA, 19 nt, Artificial Sequence
  Description of Artificial Sequence: Synthetic oligonucleotide
ugccaagagguaaauagau

SEQ ID NO: 785864 - RNA, 19 nt, Artificial Sequence
  Description of Artificial Sequence: Synthetic oligonucleotide
agaucgacuuaggaagugc

SEQ ID NO: 785865 - RNA, 19 nt, Artificial Sequence
  Description of Artificial Sequence: Synthetic oligonucleotide
uacuaagcucauccuuugg

SEQ ID NO: 785866 - RNA, 19 nt, Artificial Sequence
  Description of Artificial Sequence: Synthetic oligonucleotide
ccaacaaggucuuugugcg

SEQ ID NO: 785867 - RNA, 19 nt, Artificial Sequence
  Description of Artificial Sequence: Synthetic oligonucleotide
gacaauacugaaugagguc

SEQ ID NO: 785868 - RNA, 19 nt, Artificial Sequence
  Description of Artificial Sequence: Synthetic oligonucleotide
auauaacagggacauucug

SEQ ID NO: 785869 - RNA, 19 nt, Artificial Sequence
  Description of Artificial Sequence: Synthetic oligonucleotide
ggaccaauagacaauacug

SEQ ID NO: 785870 - RNA, 19 nt, Artificial Sequence
  Description of Artificial Sequence: Synthetic oligonucleotide
ucgacuuaggaagugcuca

SEQ ID NO: 785871 - RNA, 19 nt, Artificial Sequence
  Description of Artificial Sequence: Synthetic oligonucleotide
auuuaagaacggcucuuug

SEQ ID NO: 785872 - RNA, 19 nt, Artificial Sequence
  Description of Artificial Sequence: Synthetic oligonucleotide
ugcuuuauacucugugaga

SEQ ID NO: 785873 - RNA, 19 nt, Artificial Sequence
  Description of Artificial Sequence: Synthetic oligonucleotide
ucucgacuaaauucaguca

SEQ ID NO: 785874 - RNA, 19 nt, Artificial Sequence
  Description of Artificial Sequence: Synthetic oligonucleotide
cuuggcuaggaauuuaaga

SEQ ID NO: 785875 - RNA, 19 nt, Artificial Sequence
  Description of Artificial Sequence: Synthetic oligonucleotide
agcuuuguagcaauacuuc

SEQ ID NO: 785876 - RNA, 19 nt, Artificial Sequence
  Description of Artificial Sequence: Synthetic oligonucleotide
cuaggaauuuaagaacggc

SEQ ID NO: 785877 - RNA, 19 nt, Artificial Sequence
  Description of Artificial Sequence: Synthetic oligonucleotide
agcugucuaaguucucgac

SEQ ID NO: 785878 - RNA, 19 nt, Artificial Sequence
  Description of Artificial Sequence: Synthetic oligonucleotide
ggcuaggaauuuaagaacg

SEQ ID NO: 785879 - RNA, 19 nt, Artificial Sequence
  Description of Artificial Sequence: Synthetic oligonucleotide
ugacuuaguaucuguguaa

SEQ ID NO: 785880 - RNA, 19 nt, Artificial Sequence
  Description of Artificial Sequence: Synthetic oligonucleotide
auacuuaagcgugacucuc

SEQ ID NO: 785881 - RNA, 19 nt, Artificial Sequence
  Description of Artificial Sequence: Synthetic oligonucleotide
caaguuugcaguaagugua

SEQ ID NO: 785882 - RNA, 19 nt, Artificial Sequence
  Description of Artificial Sequence: Synthetic oligonucleotide
ucuauggcccuucccauaa

SEQ ID NO: 785883 - RNA, 19 nt, Artificial Sequence
  Description of Artificial Sequence: Synthetic oligonucleotide
acuucuuaugacuggacua

SEQ ID NO: 785884 - RNA, 19 nt, Artificial Sequence
  Description of Artificial Sequence: Synthetic oligonucleotide
gagaugggccuguuuagcc

SEQ ID NO: 785885 - RNA, 19 nt, Artificial Sequence
  Description of Artificial Sequence: Synthetic oligonucleotide
cuuugggguuaaaagauca

SEQ ID NO: 785886 - RNA, 19 nt, Artificial Sequence
  Description of Artificial Sequence: Synthetic oligonucleotide
guaaucgucuccccaagac

SEQ ID NO: 785887 - RNA, 19 nt, Artificial Sequence
  Description of Artificial Sequence: Synthetic oligonucleotide
agcuagcacuagcaggagc

SEQ ID NO: 785888 - RNA, 19 nt, Artificial Sequence
  Description of Artificial Sequence: Synthetic oligonucleotide
auucagcuagcacuagcag

SEQ ID NO: 785889 - RNA, 19 nt, Artificial Sequence
  Description of Artificial Sequence: Synthetic oligonucleotide
aacucugcgugcaucacug

SEQ ID NO: 785890 - RNA, 19 nt, Artificial Sequence
  Description of Artificial Sequence: Synthetic oligonucleotide
auaugcccucccaaaagcc

SEQ ID NO: 785891 - RNA, 19 nt, Artificial Sequence
  Description of Artificial Sequence: Synthetic oligonucleotide
ucuuucgaccacuauuuau

SEQ ID NO: 785892 - RNA, 19 nt, Artificial Sequence
  Description of Artificial Sequence: Synthetic oligonucleotide
ugugcguuuagaucugaaa

SEQ ID NO: 785893 - RNA, 19 nt, Artificial Sequence
  Description of Artificial Sequence: Synthetic oligonucleotide
uaaguccuuuauagcaggc

SEQ ID NO: 785894 - RNA, 19 nt, Artificial Sequence
  Description of Artificial Sequence: Synthetic oligonucleotide
ggaugaacuauuucaagca

SEQ ID NO: 785895 - RNA, 19 nt, Artificial Sequence
  Description of Artificial Sequence: Synthetic oligonucleotide
uacucuguugcuaggccga

SEQ ID NO: 785896 - RNA, 19 nt, Artificial Sequence
  Description of Artificial Sequence: Synthetic oligonucleotide
agacaauacugaaugaggu

SEQ ID NO: 785897 - RNA, 19 nt, Artificial Sequence
  Description of Artificial Sequence: Synthetic oligonucleotide
ugccuguuuagcuccaaca

SEQ ID NO: 785898 - RNA, 19 nt, Artificial Sequence
  Description of Artificial Sequence: Synthetic oligonucleotide
gcuuuauacucugugagag

SEQ ID NO: 785899 - RNA, 19 nt, Artificial Sequence
  Description of Artificial Sequence: Synthetic oligonucleotide
gagagacggcuucuguugg

SEQ ID NO: 785900 - RNA, 19 nt, Artificial Sequence
  Description of Artificial Sequence: Synthetic oligonucleotide
ucugcgugcaucacugagu

SEQ ID NO: 785901 - RNA, 19 nt, Artificial Sequence
  Description of Artificial Sequence: Synthetic oligonucleotide
auacuaagcucauccuuug

SEQ ID NO: 785902 - RNA, 19 nt, Artificial Sequence
  Description of Artificial Sequence: Synthetic oligonucleotide
gauucagcuagcacuagca

SEQ ID NO: 785903 - RNA, 19 nt, Artificial Sequence
  Description of Artificial Sequence: Synthetic oligonucleotide
augacuuaguaucugugua

SEQ ID NO: 785904 - RNA, 19 nt, Artificial Sequence
  Description of Artificial Sequence: Synthetic oligonucleotide
uucgaccacuauuuauucc

SEQ ID NO: 785905 - RNA, 19 nt, Artificial Sequence
  Description of Artificial Sequence: Synthetic oligonucleotide
uucaauauuggugcugauc

SEQ ID NO: 785906 - RNA, 19 nt, Artificial Sequence
  Description of Artificial Sequence: Synthetic oligonucleotide
ucuucaacucugagcuucc

SEQ ID NO: 785907 - RNA, 19 nt, Artificial Sequence
  Description of Artificial Sequence: Synthetic oligonucleotide
gaagucguuccuguguuug

SEQ ID NO: 785908 - RNA, 19 nt, Artificial Sequence
  Description of Artificial Sequence: Synthetic oligonucleotide
uguaaucgucuccccaaga

SEQ ID NO: 785909 - RNA, 19 nt, Artificial Sequence
  Description of Artificial Sequence: Synthetic oligonucleotide
aagcugucuaaguucucga

SEQ ID NO: 785910 - RNA, 19 nt, Artificial Sequence
  Description of Artificial Sequence: Synthetic oligonucleotide
agagacggcuucuguuggc

SEQ ID NO: 785911 - RNA, 19 nt, Artificial Sequence
  Description of Artificial Sequence: Synthetic oligonucleotide
aauuuaagaacggcucuuu

SEQ ID NO: 785912 - RNA, 19 nt, Artificial Sequence
  Description of Artificial Sequence: Synthetic oligonucleotide
ucgccaauguuucuggaua

SEQ ID NO: 785913 - RNA, 19 nt, Artificial Sequence
  Description of Artificial Sequence: Synthetic oligonucleotide
uacuacguuuacucuguug

SEQ ID NO: 785914 - RNA, 19 nt, Artificial Sequence
  Description of Artificial Sequence: Synthetic oligonucleotide
ugacucucgggaaagccuc

SEQ ID NO: 785915 - RNA, 19 nt, Artificial Sequence
  Description of Artificial Sequence: Synthetic oligonucleotide
caguauauucuguagcaga

SEQ ID NO: 785916 - RNA, 19 nt, Artificial Sequence
  Description of Artificial Sequence: Synthetic oligonucleotide
gaccaauagacaauacuga

SEQ ID NO: 785917 - RNA, 19 nt, Artificial Sequence
  Description of Artificial Sequence: Synthetic oligonucleotide
gcucuuugaaguauaacag

SEQ ID NO: 785918 - RNA, 19 nt, Artificial Sequence
  Description of Artificial Sequence: Synthetic oligonucleotide
uccugcuuauuuagcagac

SEQ ID NO: 785919 - RNA, 19 nt, Artificial Sequence
  Description of Artificial Sequence: Synthetic oligonucleotide
uuugggguuaaaagaucaa

SEQ ID NO: 785920 - RNA, 19 nt, Artificial Sequence
  Description of Artificial Sequence: Synthetic oligonucleotide
uuuucggcagcugauggaa

SEQ ID NO: 785921 - RNA, 19 nt, Artificial Sequence
  Description of Artificial Sequence: Synthetic oligonucleotide
uucuuaugacuggacuagg

SEQ ID NO: 785922 - RNA, 19 nt, Artificial Sequence
  Description of Artificial Sequence: Synthetic oligonucleotide
gauggaaguaauuccuugu

SEQ ID NO: 785923 - RNA, 19 nt, Artificial Sequence
  Description of Artificial Sequence: Synthetic oligonucleotide
cuuaguaucuguguaagcu

SEQ ID NO: 785924 - RNA, 19 nt, Artificial Sequence
  Description of Artificial Sequence: Synthetic oligonucleotide
uucaucgcccaguucuuca

SEQ ID NO: 785925 - RNA, 19 nt, Artificial Sequence
  Description of Artificial Sequence: Synthetic oligonucleotide
uauggcccuucccauaaaa

SEQ ID NO: 785926 - RNA, 19 nt, Artificial Sequence
  Description of Artificial Sequence: Synthetic oligonucleotide
uuguaaaacuccucuccau

SEQ ID NO: 785927 - RNA, 19 nt, Artificial Sequence
  Description of Artificial Sequence: Synthetic oligonucleotide
guuuacucuguugcuaggc

SEQ ID NO: 785928 - RNA, 19 nt, Artificial Sequence
  Description of Artificial Sequence: Synthetic oligonucleotide
uguaagauugcuggccuuc

SEQ ID NO: 785929 - RNA, 19 nt, Artificial Sequence
  Description of Artificial Sequence: Synthetic oligonucleotide
aucuuagucugaguucuuc

SEQ ID NO: 785930 - RNA, 19 nt, Artificial Sequence
  Description of Artificial Sequence: Synthetic oligonucleotide
gggaaauuguaguccaacc

SEQ ID NO: 785931 - RNA, 19 nt, Artificial Sequence
  Description of Artificial Sequence: Synthetic oligonucleotide
uugaaucaagcaagcugcu

SEQ ID NO: 785932 - RNA, 19 nt, Artificial Sequence
  Description of Artificial Sequence: Synthetic oligonucleotide
ugggaaauuguaguccaac

SEQ ID NO: 785933 - RNA, 19 nt, Artificial Sequence
  Description of Artificial Sequence: Synthetic oligonucleotide
cuggacuaggaguugauaa

SEQ ID NO: 785934 - RNA, 19 nt, Artificial Sequence
  Description of Artificial Sequence: Synthetic oligonucleotide
auuguaguccaaccacccu

SEQ ID NO: 785935 - RNA, 19 nt, Artificial Sequence
  Description of Artificial Sequence: Synthetic oligonucleotide
aacaaggucuuugugcguu

SEQ ID NO: 785936 - RNA, 19 nt, Artificial Sequence
  Description of Artificial Sequence: Synthetic oligonucleotide
ugguuccaccaauaaauaa

SEQ ID NO: 785937 - RNA, 19 nt, Artificial Sequence
  Description of Artificial Sequence: Synthetic oligonucleotide
uaaaacuccucuccaucuu

SEQ ID NO: 785938 - RNA, 19 nt, Artificial Sequence
  Description of Artificial Sequence: Synthetic oligonucleotide
uaagcccacacagcaauga

SEQ ID NO: 785939 - RNA, 19 nt, Artificial Sequence
  Description of Artificial Sequence: Synthetic oligonucleotide
ucuugacugaggaccaaua

SEQ ID NO: 785940 - RNA, 19 nt, Artificial Sequence
  Description of Artificial Sequence: Synthetic oligonucleotide
auuuucggcagcugaugga

SEQ ID NO: 785941 - RNA, 19 nt, Artificial Sequence
  Description of Artificial Sequence: Synthetic oligonucleotide
gacuuaggaagugcucagg

SEQ ID NO: 785942 - RNA, 19 nt, Artificial Sequence
  Description of Artificial Sequence: Synthetic oligonucleotide
gaggucauaacaauauaua

SEQ ID NO: 785943 - RNA, 19 nt, Artificial Sequence
  Description of Artificial Sequence: Synthetic oligonucleotide
ggauucgagaacaaucuug

SEQ ID NO: 785944 - RNA, 19 nt, Artificial Sequence
  Description of Artificial Sequence: Synthetic oligonucleotide
cuucccauaaaauaguguu

SEQ ID NO: 785945 - RNA, 19 nt, Artificial Sequence
  Description of Artificial Sequence: Synthetic oligonucleotide
gcauacuuaagcgugacuc

SEQ ID NO: 785946 - RNA, 19 nt, Artificial Sequence
  Description of Artificial Sequence: Synthetic oligonucleotide
cuuaagcgugacucucggg

SEQ ID NO: 785947 - RNA, 19 nt, Artificial Sequence
  Description of Artificial Sequence: Synthetic oligonucleotide
acaaucuccuaaaauguaa

SEQ ID NO: 785948 - RNA, 19 nt, Artificial Sequence
  Description of Artificial Sequence: Synthetic oligonucleotide
aacaaucuccuaaaaugua

SEQ ID NO: 785949 - RNA, 19 nt, Artificial Sequence
  Description of Artificial Sequence: Synthetic oligonucleotide
gagacggcuucuguuggcg

SEQ ID NO: 785950 - RNA, 19 nt, Artificial Sequence
  Description of Artificial Sequence: Synthetic oligonucleotide
gcuaaagacaagauccuug

SEQ ID NO: 785951 - RNA, 19 nt, Artificial Sequence
  Description of Artificial Sequence: Synthetic oligonucleotide
agcugcauugaugaaacau

SEQ ID NO: 785952 - RNA, 19 nt, Artificial Sequence
  Description of Artificial Sequence: Synthetic oligonucleotide
caggccuagaucgacuuag

SEQ ID NO: 785953 - RNA, 19 nt, Artificial Sequence
  Description of Artificial Sequence: Synthetic oligonucleotide
agaugggccuguuuagccu

SEQ ID NO: 785954 - RNA, 19 nt, Artificial Sequence
  Description of Artificial Sequence: Synthetic oligonucleotide
ccuggauucgagaacaauc

SEQ ID NO: 785955 - RNA, 19 nt, Artificial Sequence
  Description of Artificial Sequence: Synthetic oligonucleotide
aggagugcuguuuauuauu

SEQ ID NO: 785956 - RNA, 19 nt, Artificial Sequence
  Description of Artificial Sequence: Synthetic oligonucleotide
ucgacuaaauucagucaua

SEQ ID NO: 785957 - RNA, 19 nt, Artificial Sequence
  Description of Artificial Sequence: Synthetic oligonucleotide
uuccuacuacguuuacucu

SEQ ID NO: 785958 - RNA, 19 nt, Artificial Sequence
  Description of Artificial Sequence: Synthetic oligonucleotide
aaucaccacuguugaucug

SEQ ID NO: 785959 - RNA, 19 nt, Artificial Sequence
  Description of Artificial Sequence: Synthetic oligonucleotide
cuggauucgagaacaaucu

SEQ ID NO: 785960 - RNA, 19 nt, Artificial Sequence
  Description of Artificial Sequence: Synthetic oligonucleotide
cuuugugcguuuagaucug

SEQ ID NO: 785961 - RNA, 19 nt, Artificial Sequence
  Description of Artificial Sequence: Synthetic oligonucleotide
guacuucuccacuugaccu

SEQ ID NO: 785962 - RNA, 19 nt, Artificial Sequence
  Description of Artificial Sequence: Synthetic oligonucleotide
auucuauacuaagcucauc

SEQ ID NO: 785963 - RNA, 19 nt, Artificial Sequence
  Description of Artificial Sequence: Synthetic oligonucleotide
uacguuuacucuguugcua

SEQ ID NO: 785964 - RNA, 19 nt, Artificial Sequence
  Description of Artificial Sequence: Synthetic oligonucleotide
gcuaggccgauccuugagg

SEQ ID NO: 785965 - RNA, 19 nt, Artificial Sequence
  Description of Artificial Sequence: Synthetic oligonucleotide
uagaucgacuuaggaagug

SEQ ID NO: 785966 - RNA, 19 nt, Artificial Sequence
  Description of Artificial Sequence: Synthetic oligonucleotide
aucgacuuaggaagugcuc

SEQ ID NO: 785967 - RNA, 19 nt, Artificial Sequence
  Description of Artificial Sequence: Synthetic oligonucleotide
uuauguaguuucuguucuu

SEQ ID NO: 785968 - RNA, 19 nt, Artificial Sequence
  Description of Artificial Sequence: Synthetic oligonucleotide
uggauucgagaacaaucuu

SEQ ID NO: 785969 - RNA, 19 nt, Artificial Sequence
  Description of Artificial Sequence: Synthetic oligonucleotide
ggugagaugggccuguuua

SEQ ID NO: 785970 - RNA, 19 nt, Artificial Sequence
  Description of Artificial Sequence: Synthetic oligonucleotide
aaccacccuggauucgaga

SEQ ID NO: 785971 - RNA, 19 nt, Artificial Sequence
  Description of Artificial Sequence: Synthetic oligonucleotide
augaggucauaacaauaua

SEQ ID NO: 785972 - RNA, 19 nt, Artificial Sequence
  Description of Artificial Sequence: Synthetic oligonucleotide
acggcacuuggcuaggaau

SEQ ID NO: 785973 - RNA, 19 nt, Artificial Sequence
  Description of Artificial Sequence: Synthetic oligonucleotide
aguucucgacuaaauucag

SEQ ID NO: 785974 - RNA, 19 nt, Artificial Sequence
  Description of Artificial Sequence: Synthetic oligonucleotide
uucccuguacccucgccaa

SEQ ID NO: 785975 - RNA, 19 nt, Artificial Sequence
  Description of Artificial Sequence: Synthetic oligonucleotide
gcaaucuuagucugaguuc

SEQ ID NO: 785976 - RNA, 19 nt, Artificial Sequence
  Description of Artificial Sequence: Synthetic oligonucleotide
caagcauacuuaagcguga

SEQ ID NO: 785977 - RNA, 19 nt, Artificial Sequence
  Description of Artificial Sequence: Synthetic oligonucleotide
cuaggccgauccuugagga

SEQ ID NO: 785978 - RNA, 19 nt, Artificial Sequence
  Description of Artificial Sequence: Synthetic oligonucleotide
gcugcaaucuuagucugag

SEQ ID NO: 785979 - RNA, 19 nt, Artificial Sequence
  Description of Artificial Sequence: Synthetic oligonucleotide
uaguccaaccacccuggau

SEQ ID NO: 785980 - RNA, 19 nt, Artificial Sequence
  Description of Artificial Sequence: Synthetic oligonucleotide
uuucccuauuguacuucuc

SEQ ID NO: 785981 - RNA, 19 nt, Artificial Sequence
  Description of Artificial Sequence: Synthetic oligonucleotide
uucuuucgaccacuauuua

SEQ ID NO: 785982 - RNA, 19 nt, Artificial Sequence
  Description of Artificial Sequence: Synthetic oligonucleotide
ucgcccaguucuucaagcu

SEQ ID NO: 785983 - RNA, 19 nt, Artificial Sequence
  Description of Artificial Sequence: Synthetic oligonucleotide
uugccucuagggagguuug

SEQ ID NO: 785984 - RNA, 19 nt, Artificial Sequence
  Description of Artificial Sequence: Synthetic oligonucleotide
uucuuacggcacuuggcua

SEQ ID NO: 785985 - RNA, 19 nt, Artificial Sequence
  Description of Artificial Sequence: Synthetic oligonucleotide
augaacuauuucaagcaua

SEQ ID NO: 785986 - RNA, 19 nt, Artificial Sequence
  Description of Artificial Sequence: Synthetic oligonucleotide
cucgacuaaauucagucau

SEQ ID NO: 785987 - RNA, 19 nt, Artificial Sequence
  Description of Artificial Sequence: Synthetic oligonucleotide
accaaggugcuuguaugug

SEQ ID NO: 785988 - RNA, 19 nt, Artificial Sequence
  Description of Artificial Sequence: Synthetic oligonucleotide
auauucuguagcagagaca

SEQ ID NO: 785989 - RNA, 19 nt, Artificial Sequence
  Description of Artificial Sequence: Synthetic oligonucleotide
acuuggcuaggaauuuaag

SEQ ID NO: 785990 - RNA, 19 nt, Artificial Sequence
  Description of Artificial Sequence: Synthetic oligonucleotide
ucaagagucccaggccgug

SEQ ID NO: 785991 - RNA, 19 nt, Artificial Sequence
  Description of Artificial Sequence: Synthetic oligonucleotide
cuguucaauauuggugcug

SEQ ID NO: 785992 - RNA, 19 nt, Artificial Sequence
  Description of Artificial Sequence: Synthetic oligonucleotide
cauacuuaagcgugacucu

SEQ ID NO: 785993 - RNA, 19 nt, Artificial Sequence
  Description of Artificial Sequence: Synthetic oligonucleotide
cgauccuugaggaaucaag

SEQ ID NO: 785994 - RNA, 19 nt, Artificial Sequence
  Description of Artificial Sequence: Synthetic oligonucleotide
cuuacggcacuuggcuagg

SEQ ID NO: 785995 - RNA, 19 nt, Artificial Sequence
  Description of Artificial Sequence: Synthetic oligonucleotide
uacggcacuuggcuaggaa

SEQ ID NO: 785996 - RNA, 19 nt, Artificial Sequence
  Description of Artificial Sequence: Synthetic oligonucleotide
uuugugcguuuagaucuga

SEQ ID NO: 785997 - RNA, 19 nt, Artificial Sequence
  Description of Artificial Sequence: Synthetic oligonucleotide
uguaccuguuggcuucauu

SEQ ID NO: 785998 - RNA, 19 nt, Artificial Sequence
  Description of Artificial Sequence: Synthetic oligonucleotide
gccuagaucgacuuaggaa

SEQ ID NO: 785999 - RNA, 19 nt, Artificial Sequence
  Description of Artificial Sequence: Synthetic oligonucleotide
gcaguauauucuguagcag

SEQ ID NO: 786000 - RNA, 19 nt, Artificial Sequence
  Description of Artificial Sequence: Synthetic oligonucleotide
agcuugaaucaagcaagcu

SEQ ID NO: 786001 - RNA, 19 nt, Artificial Sequence
  Description of Artificial Sequence: Synthetic oligonucleotide
gcaguaaguguaagaaaug

SEQ ID NO: 786002 - RNA, 19 nt, Artificial Sequence
  Description of Artificial Sequence: Synthetic oligonucleotide
auacucugugagagacggc

SEQ ID NO: 786003 - RNA, 19 nt, Artificial Sequence
  Description of Artificial Sequence: Synthetic oligonucleotide
caggcacucagucucagua

SEQ ID NO: 786004 - RNA, 19 nt, Artificial Sequence
  Description of Artificial Sequence: Synthetic oligonucleotide
caagagguaaauagauuau

SEQ ID NO: 786005 - RNA, 19 nt, Artificial Sequence
  Description of Artificial Sequence: Synthetic oligonucleotide
guacccucgccaauguuuc

SEQ ID NO: 786006 - RNA, 19 nt, Artificial Sequence
  Description of Artificial Sequence: Synthetic oligonucleotide
gcguuuagaucugaaacuc

SEQ ID NO: 786007 - RNA, 19 nt, Artificial Sequence
  Description of Artificial Sequence: Synthetic oligonucleotide
gcuuauuuagcagacuugu

SEQ ID NO: 786008 - RNA, 19 nt, Artificial Sequence
  Description of Artificial Sequence: Synthetic oligonucleotide
gaucgacuuaggaagugcu

SEQ ID NO: 786009 - RNA, 19 nt, Artificial Sequence
  Description of Artificial Sequence: Synthetic oligonucleotide
gagcuuuguagcaauacuu

SEQ ID NO: 786010 - RNA, 19 nt, Artificial Sequence
  Description of Artificial Sequence: Synthetic oligonucleotide
cacagcaaugacuuaguau

SEQ ID NO: 786011 - RNA, 19 nt, Artificial Sequence
  Description of Artificial Sequence: Synthetic oligonucleotide
cuauacuaagcucauccuu

SEQ ID NO: 786012 - RNA, 19 nt, Artificial Sequence
  Description of Artificial Sequence: Synthetic oligonucleotide
uuucaucgcccaguucuuc

SEQ ID NO: 786013 - RNA, 19 nt, Artificial Sequence
  Description of Artificial Sequence: Synthetic oligonucleotide
uugcuaggccgauccuuga

SEQ ID NO: 786014 - RNA, 19 nt, Artificial Sequence
  Description of Artificial Sequence: Synthetic oligonucleotide
aacggcucuuugaaguaua

SEQ ID NO: 786015 - RNA, 19 nt, Artificial Sequence
  Description of Artificial Sequence: Synthetic oligonucleotide
cuaaguucucgacuaaauu

SEQ ID NO: 786016 - RNA, 19 nt, Artificial Sequence
  Description of Artificial Sequence: Synthetic oligonucleotide
auguaagauugcuggccuu

SEQ ID NO: 786017 - RNA, 19 nt, Artificial Sequence
  Description of Artificial Sequence: Synthetic oligonucleotide
guuggcggaaauucuuccu

SEQ ID NO: 786018 - RNA, 19 nt, Artificial Sequence
  Description of Artificial Sequence: Synthetic oligonucleotide
cuagaucgacuuaggaagu

SEQ ID NO: 786019 - RNA, 19 nt, Artificial Sequence
  Description of Artificial Sequence: Synthetic oligonucleotide
gccuguuuagcuccaacaa

SEQ ID NO: 786020 - RNA, 19 nt, Artificial Sequence
  Description of Artificial Sequence: Synthetic oligonucleotide
ggagcuuuguagcaauacu

SEQ ID NO: 786021 - RNA, 19 nt, Artificial Sequence
  Description of Artificial Sequence: Synthetic oligonucleotide
cgacuaaauucagucauag

SEQ ID NO: 786022 - RNA, 19 nt, Artificial Sequence
  Description of Artificial Sequence: Synthetic oligonucleotide
ccaauguuucuggauaauc

SEQ ID NO: 786023 - RNA, 19 nt, Artificial Sequence
  Description of Artificial Sequence: Synthetic oligonucleotide
uagcugcauugaugaaaca

SEQ ID NO: 786024 - RNA, 19 nt, Artificial Sequence
  Description of Artificial Sequence: Synthetic oligonucleotide
aggccuagaucgacuuagg

SEQ ID NO: 786025 - RNA, 19 nt, Artificial Sequence
  Description of Artificial Sequence: Synthetic oligonucleotide
gauugcuggccuucacagu

SEQ ID NO: 786026 - RNA, 19 nt, Artificial Sequence
  Description of Artificial Sequence: Synthetic oligonucleotide
ugcaggguuuuccccucua

SEQ ID NO: 786027 - RNA, 19 nt, Artificial Sequence
  Description of Artificial Sequence: Synthetic oligonucleotide
ggcggaaauucuuccuuuc

SEQ ID NO: 786028 - RNA, 19 nt, Artificial Sequence
  Description of Artificial Sequence: Synthetic oligonucleotide
cuggcucuaagcccacaca

SEQ ID NO: 786029 - RNA, 19 nt, Artificial Sequence
  Description of Artificial Sequence: Synthetic oligonucleotide
gaugggccuguuuagccuu

SEQ ID NO: 786030 - RNA, 19 nt, Artificial Sequence
  Description of Artificial Sequence: Synthetic oligonucleotide
gcugucuaaguucucgacu

SEQ ID NO: 786031 - RNA, 19 nt, Artificial Sequence
  Description of Artificial Sequence: Synthetic oligonucleotide
gcagacggaagcuucuuua

SEQ ID NO: 786032 - RNA, 19 nt, Artificial Sequence
  Description of Artificial Sequence: Synthetic oligonucleotide
ggcucuaagcccacacagc

SEQ ID NO: 786033 - RNA, 19 nt, Artificial Sequence
  Description of Artificial Sequence: Synthetic oligonucleotide
gcuagcacuagcaggagcu

SEQ ID NO: 786034 - RNA, 19 nt, Artificial Sequence
  Description of Artificial Sequence: Synthetic oligonucleotide
cuacguuuacucuguugcu

SEQ ID NO: 786035 - RNA, 19 nt, Artificial Sequence
  Description of Artificial Sequence: Synthetic oligonucleotide
ggucuuugugcguuuagau

SEQ ID NO: 786036 - RNA, 19 nt, Artificial Sequence
  Description of Artificial Sequence: Synthetic oligonucleotide
uccuguguuugggcgugga

SEQ ID NO: 786037 - RNA, 19 nt, Artificial Sequence
  Description of Artificial Sequence: Synthetic oligonucleotide
caguucaacucugcgugca

SEQ ID NO: 786038 - RNA, 19 nt, Artificial Sequence
  Description of Artificial Sequence: Synthetic oligonucleotide
uggugagaugggccuguuu

SEQ ID NO: 786039 - RNA, 19 nt, Artificial Sequence
  Description of Artificial Sequence: Synthetic oligonucleotide
cugaggaccaauagacaau

SEQ ID NO: 786040 - RNA, 19 nt, Artificial Sequence
  Description of Artificial Sequence: Synthetic oligonucleotide
auggcccuucccauaaaau

SEQ ID NO: 786041 - RNA, 19 nt, Artificial Sequence
  Description of Artificial Sequence: Synthetic oligonucleotide
guugccucuagggagguuu

SEQ ID NO: 786042 - RNA, 19 nt, Artificial Sequence
  Description of Artificial Sequence: Synthetic oligonucleotide
ggaucuguaccuguuggcu

SEQ ID NO: 786043 - RNA, 19 nt, Artificial Sequence
  Description of Artificial Sequence: Synthetic oligonucleotide
ggaguccaugccaagaggu

SEQ ID NO: 786044 - RNA, 19 nt, Artificial Sequence
  Description of Artificial Sequence: Synthetic oligonucleotide
uuacggcacuuggcuagga

SEQ ID NO: 786045 - RNA, 19 nt, Artificial Sequence
  Description of Artificial Sequence: Synthetic oligonucleotide
gugacucucgggaaagccu

SEQ ID NO: 786046 - RNA, 19 nt, Artificial Sequence
  Description of Artificial Sequence: Synthetic oligonucleotide
agcugcaaucuuagucuga

SEQ ID NO: 786047 - RNA, 19 nt, Artificial Sequence
  Description of Artificial Sequence: Synthetic oligonucleotide
cguuuacucuguugcuagg

SEQ ID NO: 786048 - RNA, 19 nt, Artificial Sequence
  Description of Artificial Sequence: Synthetic oligonucleotide
ugcgugcaucacugaguuc

SEQ ID NO: 786049 - RNA, 19 nt, Artificial Sequence
  Description of Artificial Sequence: Synthetic oligonucleotide
cagagacaugacuguagcu

SEQ ID NO: 786050 - RNA, 19 nt, Artificial Sequence
  Description of Artificial Sequence: Synthetic oligonucleotide
ccuacuacguuuacucugu

SEQ ID NO: 786051 - RNA, 19 nt, Artificial Sequence
  Description of Artificial Sequence: Synthetic oligonucleotide
guucucgacuaaauucagu

SEQ ID NO: 786052 - RNA, 19 nt, Artificial Sequence
  Description of Artificial Sequence: Synthetic oligonucleotide
cgaccacuauuuauuccag

SEQ ID NO: 786053 - RNA, 19 nt, Artificial Sequence
  Description of Artificial Sequence: Synthetic oligonucleotide
caagauccuuggaucugua

SEQ ID NO: 786054 - RNA, 19 nt, Artificial Sequence
  Description of Artificial Sequence: Synthetic oligonucleotide
caacucugcgugcaucacu

SEQ ID NO: 786055 - RNA, 19 nt, Artificial Sequence
  Description of Artificial Sequence: Synthetic oligonucleotide
cugcgugcaucacugaguu

SEQ ID NO: 786056 - RNA, 19 nt, Artificial Sequence
  Description of Artificial Sequence: Synthetic oligonucleotide
acggcucuuugaaguauaa

SEQ ID NO: 786057 - RNA, 19 nt, Artificial Sequence
  Description of Artificial Sequence: Synthetic oligonucleotide
gaacggcucuuugaaguau

SEQ ID NO: 786058 - RNA, 19 nt, Artificial Sequence
  Description of Artificial Sequence: Synthetic oligonucleotide
acucucgggaaagccucau

SEQ ID NO: 786059 - RNA, 19 nt, Artificial Sequence
  Description of Artificial Sequence: Synthetic oligonucleotide
cucuguugcuaggccgauc

SEQ ID NO: 786060 - RNA, 19 nt, Artificial Sequence
  Description of Artificial Sequence: Synthetic oligonucleotide
gccacaggccuagaucgac

SEQ ID NO: 786061 - RNA, 19 nt, Artificial Sequence
  Description of Artificial Sequence: Synthetic oligonucleotide
cauucuguucaggacuuuu

SEQ ID NO: 786062 - RNA, 19 nt, Artificial Sequence
  Description of Artificial Sequence: Synthetic oligonucleotide
ccuucccauaaaauagugu

SEQ ID NO: 786063 - RNA, 19 nt, Artificial Sequence
  Description of Artificial Sequence: Synthetic oligonucleotide
caggguuuuccccucuauu

SEQ ID NO: 786064 - RNA, 19 nt, Artificial Sequence
  Description of Artificial Sequence: Synthetic oligonucleotide
ggccgauccuugaggaauc

SEQ ID NO: 786065 - RNA, 19 nt, Artificial Sequence
  Description of Artificial Sequence: Synthetic oligonucleotide
cuauggcccuucccauaaa

SEQ ID NO: 786066 - RNA, 19 nt, Artificial Sequence
  Description of Artificial Sequence: Synthetic oligonucleotide
ccaaccacccuggauucga

SEQ ID NO: 786067 - RNA, 19 nt, Artificial Sequence
  Description of Artificial Sequence: Synthetic oligonucleotide
acccuggauucgagaacaa

SEQ ID NO: 786068 - RNA, 19 nt, Artificial Sequence
  Description of Artificial Sequence: Synthetic oligonucleotide
ccuuuauagcaggcacuca

SEQ ID NO: 786069 - RNA, 19 nt, Artificial Sequence
  Description of Artificial Sequence: Synthetic oligonucleotide
gcagacuuguaaguccuuu

SEQ ID NO: 786070 - RNA, 19 nt, Artificial Sequence
  Description of Artificial Sequence: Synthetic oligonucleotide
ccucauggcucucuguuuu

SEQ ID NO: 786071 - RNA, 19 nt, Artificial Sequence
  Description of Artificial Sequence: Synthetic oligonucleotide
cuguugcuaggccgauccu

SEQ ID NO: 786072 - RNA, 19 nt, Artificial Sequence
  Description of Artificial Sequence: Synthetic oligonucleotide
cggcucuuugaaguauaac

SEQ ID NO: 786073 - RNA, 19 nt, Artificial Sequence
  Description of Artificial Sequence: Synthetic oligonucleotide
gcaggguuuuccccucuau

SEQ ID NO: 786074 - RNA, 19 nt, Artificial Sequence
  Description of Artificial Sequence: Synthetic oligonucleotide
gcagcugauggaaguaauu

SEQ ID NO: 786075 - RNA, 19 nt, Artificial Sequence
  Description of Artificial Sequence: Synthetic oligonucleotide
cuacuacguuuacucuguu

SEQ ID NO: 786076 - RNA, 19 nt, Artificial Sequence
  Description of Artificial Sequence: Synthetic oligonucleotide
ccacaggccuagaucgacu

SEQ ID NO: 786077 - RNA, 19 nt, Artificial Sequence
  Description of Artificial Sequence: Synthetic oligonucleotide
ccugcuuauuuagcagacu

SEQ ID NO: 786078 - RNA, 19 nt, Artificial Sequence
  Description of Artificial Sequence: Synthetic oligonucleotide
ccgggugucuucugacaua

SEQ ID NO: 786079 - RNA, 19 nt, Artificial Sequence
  Description of Artificial Sequence: Synthetic oligonucleotide
caguugccucuagggaggu

SEQ ID NO: 786080 - RNA, 19 nt, Artificial Sequence
  Description of Artificial Sequence: Synthetic oligonucleotide
ccgauccuugaggaaucaa

SEQ ID NO: 786081 - RNA, 19 nt, Artificial Sequence
  Description of Artificial Sequence: Synthetic oligonucleotide
aaaauaaucauucauagac

SEQ ID NO: 786082 - RNA, 19 nt, Artificial Sequence
  Description of Artificial Sequence: Synthetic oligonucleotide
aauaaucauucauagacuc

SEQ ID NO: 786083 - RNA, 19 nt, Artificial Sequence
  Description of Artificial Sequence: Synthetic oligonucleotide
uaaauugugcgcaugaucc

SEQ ID NO: 786084 - RNA, 19 nt, Artificial Sequence
  Description of Artificial Sequence: Synthetic oligonucleotide
aacuucuuaaaguacgugg

SEQ ID NO: 786085 - RNA, 19 nt, Artificial Sequence
  Description of Artificial Sequence: Synthetic oligonucleotide
uuggguuugaccaagauaa

SEQ ID NO: 786086 - RNA, 19 nt, Artificial Sequence
  Description of Artificial Sequence: Synthetic oligonucleotide
cauucauagacucacaagc

SEQ ID NO: 786087 - RNA, 19 nt, Artificial Sequence
  Description of Artificial Sequence: Synthetic oligonucleotide
auacuugaaaguuguagcc

SEQ ID NO: 786088 - RNA, 19 nt, Artificial Sequence
  Description of Artificial Sequence: Synthetic oligonucleotide
uguacaccagaacacaucc

SEQ ID NO: 786089 - RNA, 19 nt, Artificial Sequence
  Description of Artificial Sequence: Synthetic oligonucleotide
gaugauugaugacggaugg

SEQ ID NO: 786090 - RNA, 19 nt, Artificial Sequence
  Description of Artificial Sequence: Synthetic oligonucleotide
guauacaagaugaagagug

SEQ ID NO: 786091 - RNA, 19 nt, Artificial Sequence
  Description of Artificial Sequence: Synthetic oligonucleotide
uuaaguaucuguucugggc

SEQ ID NO: 786092 - RNA, 19 nt, Artificial Sequence
  Description of Artificial Sequence: Synthetic oligonucleotide
aaauugugcgcaugauccc

SEQ ID NO: 786093 - RNA, 19 nt, Artificial Sequence
  Description of Artificial Sequence: Synthetic oligonucleotide
auaaauugugcgcaugauc

SEQ ID NO: 786094 - RNA, 19 nt, Artificial Sequence
  Description of Artificial Sequence: Synthetic oligonucleotide
acauagagcauguagccuc

SEQ ID NO: 786095 - RNA, 19 nt, Artificial Sequence
  Description of Artificial Sequence: Synthetic oligonucleotide
aaugaccagugauccagcc

SEQ ID NO: 786096 - RNA, 19 nt, Artificial Sequence
  Description of Artificial Sequence: Synthetic oligonucleotide
uggacaagaaucgugauca

SEQ ID NO: 786097 - RNA, 19 nt, Artificial Sequence
  Description of Artificial Sequence: Synthetic oligonucleotide
uguaaaccagcauuggccc

SEQ ID NO: 786098 - RNA, 19 nt, Artificial Sequence
  Description of Artificial Sequence: Synthetic oligonucleotide
uccaguaauagccauccug

SEQ ID NO: 786099 - RNA, 19 nt, Artificial Sequence
  Description of Artificial Sequence: Synthetic oligonucleotide
aagaaucgugaucacuggg

SEQ ID NO: 786100 - RNA, 19 nt, Artificial Sequence
  Description of Artificial Sequence: Synthetic oligonucleotide
uugagcaugucaucaaucc

SEQ ID NO: 786101 - RNA, 19 nt, Artificial Sequence
  Description of Artificial Sequence: Synthetic oligonucleotide
aaaguguaaaccagcauug

SEQ ID NO: 786102 - RNA, 19 nt, Artificial Sequence
  Description of Artificial Sequence: Synthetic oligonucleotide
aagagaugauugaugacgg

SEQ ID NO: 786103 - RNA, 19 nt, Artificial Sequence
  Description of Artificial Sequence: Synthetic oligonucleotide
aaucgugaucacugggugg

SEQ ID NO: 786104 - RNA, 19 nt, Artificial Sequence
  Description of Artificial Sequence: Synthetic oligonucleotide
uuagaaagcugaaaggguu

SEQ ID NO: 786105 - RNA, 19 nt, Artificial Sequence
  Description of Artificial Sequence: Synthetic oligonucleotide
ugagcauccgaauugcugu

SEQ ID NO: 786106 - RNA, 19 nt, Artificial Sequence
  Description of Artificial Sequence: Synthetic oligonucleotide
gagcauaucagucugaggu

SEQ ID NO: 786107 - RNA, 19 nt, Artificial Sequence
  Description of Artificial Sequence: Synthetic oligonucleotide
ccuaguuucaaacaaagug

SEQ ID NO: 786108 - RNA, 19 nt, Artificial Sequence
  Description of Artificial Sequence: Synthetic oligonucleotide
ucccuaguuucaaacaaag

SEQ ID NO: 786109 - RNA, 19 nt, Artificial Sequence
  Description of Artificial Sequence: Synthetic oligonucleotide
ucuguuugccagaaggugu

SEQ ID NO: 786110 - RNA, 19 nt, Artificial Sequence
  Description of Artificial Sequence: Synthetic oligonucleotide
ucugacuagcuaacugugg

SEQ ID NO: 786111 - RNA, 19 nt, Artificial Sequence
  Description of Artificial Sequence: Synthetic oligonucleotide
gaacacauccuccgggugg

SEQ ID NO: 786112 - RNA, 19 nt, Artificial Sequence
  Description of Artificial Sequence: Synthetic oligonucleotide
gaaauccuggacaagaauc

SEQ ID NO: 786113 - RNA, 19 nt, Artificial Sequence
  Description of Artificial Sequence: Synthetic oligonucleotide
ugucacauaguagccaggg

SEQ ID NO: 786114 - RNA, 19 nt, Artificial Sequence
  Description of Artificial Sequence: Synthetic oligonucleotide
acaagaaucgugaucacug

SEQ ID NO: 786115 - RNA, 19 nt, Artificial Sequence
  Description of Artificial Sequence: Synthetic oligonucleotide
aacacauacuugaaaguug

SEQ ID NO: 786116 - RNA, 19 nt, Artificial Sequence
  Description of Artificial Sequence: Synthetic oligonucleotide
aaacacauacuugaaaguu

SEQ ID NO: 786117 - RNA, 19 nt, Artificial Sequence
  Description of Artificial Sequence: Synthetic oligonucleotide
gaagguguggccaucacac

SEQ ID NO: 786118 - RNA, 19 nt, Artificial Sequence
  Description of Artificial Sequence: Synthetic oligonucleotide
uccuggacaagaaucguga

SEQ ID NO: 786119 - RNA, 19 nt, Artificial Sequence
  Description of Artificial Sequence: Synthetic oligonucleotide
ugagcaaucuuccggagua

SEQ ID NO: 786120 - RNA, 19 nt, Artificial Sequence
  Description of Artificial Sequence: Synthetic oligonucleotide
auuucgaaaggcuuggguu

SEQ ID NO: 786121 - RNA, 19 nt, Artificial Sequence
  Description of Artificial Sequence: Synthetic oligonucleotide
cuucacaggaugagggugg

SEQ ID NO: 786122 - RNA, 19 nt, Artificial Sequence
  Description of Artificial Sequence: Synthetic oligonucleotide
agccacauagagcauguag

SEQ ID NO: 786123 - RNA, 19 nt, Artificial Sequence
  Description of Artificial Sequence: Synthetic oligonucleotide
acucugacuagcuaacugu

SEQ ID NO: 786124 - RNA, 19 nt, Artificial Sequence
  Description of Artificial Sequence: Synthetic oligonucleotide
guguguaccacacccuugg

SEQ ID NO: 786125 - RNA, 19 nt, Artificial Sequence
  Description of Artificial Sequence: Synthetic oligonucleotide
gaaucgugaucacugggug

SEQ ID NO: 786126 - RNA, 19 nt, Artificial Sequence
  Description of Artificial Sequence: Synthetic oligonucleotide
uguaccacacccuuggguu

SEQ ID NO: 786127 - RNA, 19 nt, Artificial Sequence
  Description of Artificial Sequence: Synthetic oligonucleotide
augauuuugccugagcgug

SEQ ID NO: 786128 - RNA, 19 nt, Artificial Sequence
  Description of Artificial Sequence: Synthetic oligonucleotide
acugugguugaggacaugg

SEQ ID NO: 786129 - RNA, 19 nt, Artificial Sequence
  Description of Artificial Sequence: Synthetic oligonucleotide
ugacauaggaaugaccagu

SEQ ID NO: 786130 - RNA, 19 nt, Artificial Sequence
  Description of Artificial Sequence: Synthetic oligonucleotide
accaaucuuuucucuaauc

SEQ ID NO: 786131 - RNA, 19 nt, Artificial Sequence
  Description of Artificial Sequence: Synthetic oligonucleotide
cauucaggauugcaggugc

SEQ ID NO: 786132 - RNA, 19 nt, Artificial Sequence
  Description of Artificial Sequence: Synthetic oligonucleotide
cugggaaccuacuacccgg

SEQ ID NO: 786133 - RNA, 19 nt, Artificial Sequence
  Description of Artificial Sequence: Synthetic oligonucleotide
ugcaacuggaauccaagau

SEQ ID NO: 786134 - RNA, 19 nt, Artificial Sequence
  Description of Artificial Sequence: Synthetic oligonucleotide
aggcauucgcccuucacag

SEQ ID NO: 786135 - RNA, 19 nt, Artificial Sequence
  Description of Artificial Sequence: Synthetic oligonucleotide
aaaguacguggucucaaaa

SEQ ID NO: 786136 - RNA, 19 nt, Artificial Sequence
  Description of Artificial Sequence: Synthetic oligonucleotide
caagaaucgugaucacugg

SEQ ID NO: 786137 - RNA, 19 nt, Artificial Sequence
  Description of Artificial Sequence: Synthetic oligonucleotide
ucuuaaaguacguggucuc

SEQ ID NO: 786138 - RNA, 19 nt, Artificial Sequence
  Description of Artificial Sequence: Synthetic oligonucleotide
uguacuccggggcagcgug

SEQ ID NO: 786139 - RNA, 19 nt, Artificial Sequence
  Description of Artificial Sequence: Synthetic oligonucleotide
uucccauaaauugugcgca

SEQ ID NO: 786140 - RNA, 19 nt, Artificial Sequence
  Description of Artificial Sequence: Synthetic oligonucleotide
acccggugguaccauagcc

SEQ ID NO: 786141 - RNA, 19 nt, Artificial Sequence
  Description of Artificial Sequence: Synthetic oligonucleotide
ucagcauauggccacccgu

SEQ ID NO: 786142 - RNA, 19 nt, Artificial Sequence
  Description of Artificial Sequence: Synthetic oligonucleotide
aaacccuucucucggcacu

SEQ ID NO: 786143 - RNA, 19 nt, Artificial Sequence
  Description of Artificial Sequence: Synthetic oligonucleotide
ucggcccucauuuacacuc

SEQ ID NO: 786144 - RNA, 19 nt, Artificial Sequence
  Description of Artificial Sequence: Synthetic oligonucleotide
aauugugcgcaugaucccu

SEQ ID NO: 786145 - RNA, 19 nt, Artificial Sequence
  Description of Artificial Sequence: Synthetic oligonucleotide
ugcuugaacaccagauaac

SEQ ID NO: 786146 - RNA, 19 nt, Artificial Sequence
  Description of Artificial Sequence: Synthetic oligonucleotide
augggaccaaucuuuucuc

SEQ ID NO: 786147 - RNA, 19 nt, Artificial Sequence
  Description of Artificial Sequence: Synthetic oligonucleotide
aggguuagagcuacugccc

SEQ ID NO: 786148 - RNA, 19 nt, Artificial Sequence
  Description of Artificial Sequence: Synthetic oligonucleotide
agaguggguccucagcauc

SEQ ID NO: 786149 - RNA, 19 nt, Artificial Sequence
  Description of Artificial Sequence: Synthetic oligonucleotide
acccguuucuguuugccag

SEQ ID NO: 786150 - RNA, 19 nt, Artificial Sequence
  Description of Artificial Sequence: Synthetic oligonucleotide
uugcaugaguucaugccac

SEQ ID NO: 786151 - RNA, 19 nt, Artificial Sequence
  Description of Artificial Sequence: Synthetic oligonucleotide
ugcgcaugaucccuggcca

SEQ ID NO: 786152 - RNA, 19 nt, Artificial Sequence
  Description of Artificial Sequence: Synthetic oligonucleotide
acuucuuaaaguacguggu

SEQ ID NO: 786153 - RNA, 19 nt, Artificial Sequence
  Description of Artificial Sequence: Synthetic oligonucleotide
cucaaaacgugugugguuc

SEQ ID NO: 786154 - RNA, 19 nt, Artificial Sequence
  Description of Artificial Sequence: Synthetic oligonucleotide
aacuggugcucuuuagaaa

SEQ ID NO: 786155 - RNA, 19 nt, Artificial Sequence
  Description of Artificial Sequence: Synthetic oligonucleotide
ggaaugaccagugauccag

SEQ ID NO: 786156 - RNA, 19 nt, Artificial Sequence
  Description of Artificial Sequence: Synthetic oligonucleotide
ugaagagaugauugaugac

SEQ ID NO: 786157 - RNA, 19 nt, Artificial Sequence
  Description of Artificial Sequence: Synthetic oligonucleotide
guuggugccguguagaacu

SEQ ID NO: 786158 - RNA, 19 nt, Artificial Sequence
  Description of Artificial Sequence: Synthetic oligonucleotide
cuugcaugaguucaugcca

SEQ ID NO: 786159 - RNA, 19 nt, Artificial Sequence
  Description of Artificial Sequence: Synthetic oligonucleotide
uccggguggaaaucaaaca

SEQ ID NO: 786160 - RNA, 19 nt, Artificial Sequence
  Description of Artificial Sequence: Synthetic oligonucleotide
aggacaugguguuaaguau

SEQ ID NO: 786161 - RNA, 19 nt, Artificial Sequence
  Description of Artificial Sequence: Synthetic oligonucleotide
gauauagucugguguggca

SEQ ID NO: 786162 - RNA, 19 nt, Artificial Sequence
  Description of Artificial Sequence: Synthetic oligonucleotide
cauagagcauguagccucc

SEQ ID NO: 786163 - RNA, 19 nt, Artificial Sequence
  Description of Artificial Sequence: Synthetic oligonucleotide
aggcaagccaggugcauuc

SEQ ID NO: 786164 - RNA, 19 nt, Artificial Sequence
  Description of Artificial Sequence: Synthetic oligonucleotide
guauuuguccacaaugcuc

SEQ ID NO: 786165 - RNA, 19 nt, Artificial Sequence
  Description of Artificial Sequence: Synthetic oligonucleotide
ugccugagcguguuuuagg

SEQ ID NO: 786166 - RNA, 19 nt, Artificial Sequence
  Description of Artificial Sequence: Synthetic oligonucleotide
uguuuuaggcaagccaggu

SEQ ID NO: 786167 - RNA, 19 nt, Artificial Sequence
  Description of Artificial Sequence: Synthetic oligonucleotide
cucugacuagcuaacugug

SEQ ID NO: 786168 - RNA, 19 nt, Artificial Sequence
  Description of Artificial Sequence: Synthetic oligonucleotide
uugaugacggaugggucag

SEQ ID NO: 786169 - RNA, 19 nt, Artificial Sequence
  Description of Artificial Sequence: Synthetic oligonucleotide
agugauccagccaaugucu

SEQ ID NO: 786170 - RNA, 19 nt, Artificial Sequence
  Description of Artificial Sequence: Synthetic oligonucleotide
uaaaguacguggucucaaa

SEQ ID NO: 786171 - RNA, 19 nt, Artificial Sequence
  Description of Artificial Sequence: Synthetic oligonucleotide
ugauggguucaccuacugu

SEQ ID NO: 786172 - RNA, 19 nt, Artificial Sequence
  Description of Artificial Sequence: Synthetic oligonucleotide
acucacaagcugucauuuc

SEQ ID NO: 786173 - RNA, 19 nt, Artificial Sequence
  Description of Artificial Sequence: Synthetic oligonucleotide
ugagcguguuuuaggcaag

SEQ ID NO: 786174 - RNA, 19 nt, Artificial Sequence
  Description of Artificial Sequence: Synthetic oligonucleotide
uugauggguucaccuacug

SEQ ID NO: 786175 - RNA, 19 nt, Artificial Sequence
  Description of Artificial Sequence: Synthetic oligonucleotide
uguucuacaagugcugauu

SEQ ID NO: 786176 - RNA, 19 nt, Artificial Sequence
  Description of Artificial Sequence: Synthetic oligonucleotide
guuuuaggcaagccaggug

SEQ ID NO: 786177 - RNA, 19 nt, Artificial Sequence
  Description of Artificial Sequence: Synthetic oligonucleotide
cguguuuuaggcaagccag

SEQ ID NO: 786178 - RNA, 19 nt, Artificial Sequence
  Description of Artificial Sequence: Synthetic oligonucleotide
agggaacuucuuaaaguac

SEQ ID NO: 786179 - RNA, 19 nt, Artificial Sequence
  Description of Artificial Sequence: Synthetic oligonucleotide
uggucucaaaacgugugug

SEQ ID NO: 786180 - RNA, 19 nt, Artificial Sequence
  Description of Artificial Sequence: Synthetic oligonucleotide
uuaaaguacguggucucaa

SEQ ID NO: 786181 - RNA, 19 nt, Artificial Sequence
  Description of Artificial Sequence: Synthetic oligonucleotide
uuggccaguggcccauagg

SEQ ID NO: 786182 - RNA, 19 nt, Artificial Sequence
  Description of Artificial Sequence: Synthetic oligonucleotide
cucgccucaugauuuugcc

SEQ ID NO: 786183 - RNA, 19 nt, Artificial Sequence
  Description of Artificial Sequence: Synthetic oligonucleotide
ugcuguacaccagaacaca

SEQ ID NO: 786184 - RNA, 19 nt, Artificial Sequence
  Description of Artificial Sequence: Synthetic oligonucleotide
ugccguguagaacuugguc

SEQ ID NO: 786185 - RNA, 19 nt, Artificial Sequence
  Description of Artificial Sequence: Synthetic oligonucleotide
auaaucauucauagacuca

SEQ ID NO: 786186 - RNA, 19 nt, Artificial Sequence
  Description of Artificial Sequence: Synthetic oligonucleotide
accacaaugcagcaucuua

SEQ ID NO: 786187 - RNA, 19 nt, Artificial Sequence
  Description of Artificial Sequence: Synthetic oligonucleotide
uggcagucuaggaaacugu

SEQ ID NO: 786188 - RNA, 19 nt, Artificial Sequence
  Description of Artificial Sequence: Synthetic oligonucleotide
cauguuugaccacaaugca

SEQ ID NO: 786189 - RNA, 19 nt, Artificial Sequence
  Description of Artificial Sequence: Synthetic oligonucleotide
uggguuugaccaagauaag

SEQ ID NO: 786190 - RNA, 19 nt, Artificial Sequence
  Description of Artificial Sequence: Synthetic oligonucleotide
aaugucugcuguacaccag

SEQ ID NO: 786191 - RNA, 19 nt, Artificial Sequence
  Description of Artificial Sequence: Synthetic oligonucleotide
ugguguggcaaugggacca

SEQ ID NO: 786192 - RNA, 19 nt, Artificial Sequence
  Description of Artificial Sequence: Synthetic oligonucleotide
ucaggauugcaggugcuac

SEQ ID NO: 786193 - RNA, 19 nt, Artificial Sequence
  Description of Artificial Sequence: Synthetic oligonucleotide
accuacuacccggugguac

SEQ ID NO: 786194 - RNA, 19 nt, Artificial Sequence
  Description of Artificial Sequence: Synthetic oligonucleotide
ugauuuugccugagcgugu

SEQ ID NO: 786195 - RNA, 19 nt, Artificial Sequence
  Description of Artificial Sequence: Synthetic oligonucleotide
acucgccucaugauuuugc

SEQ ID NO: 786196 - RNA, 19 nt, Artificial Sequence
  Description of Artificial Sequence: Synthetic oligonucleotide
aggagcauaucagucugag

SEQ ID NO: 786197 - RNA, 19 nt, Artificial Sequence
  Description of Artificial Sequence: Synthetic oligonucleotide
aaaacgugugugguuccca

SEQ ID NO: 786198 - RNA, 19 nt, Artificial Sequence
  Description of Artificial Sequence: Synthetic oligonucleotide
gaaacccuucucucggcac

SEQ ID NO: 786199 - RNA, 19 nt, Artificial Sequence
  Description of Artificial Sequence: Synthetic oligonucleotide
cuguacaccagaacacauc

SEQ ID NO: 786200 - RNA, 19 nt, Artificial Sequence
  Description of Artificial Sequence: Synthetic oligonucleotide
gaugacggaugggucagcc

SEQ ID NO: 786201 - RNA, 19 nt, Artificial Sequence
  Description of Artificial Sequence: Synthetic oligonucleotide
auaucagucugagguugac

SEQ ID NO: 786202 - RNA, 19 nt, Artificial Sequence
  Description of Artificial Sequence: Synthetic oligonucleotide
cauuuacacucugacuagc

SEQ ID NO: 786203 - RNA, 19 nt, Artificial Sequence
  Description of Artificial Sequence: Synthetic oligonucleotide
acuagcuaacugugguuga

SEQ ID NO: 786204 - RNA, 19 nt, Artificial Sequence
  Description of Artificial Sequence: Synthetic oligonucleotide
caaugucugcuguacacca

SEQ ID NO: 786205 - RNA, 19 nt, Artificial Sequence
  Description of Artificial Sequence: Synthetic oligonucleotide
uucgcccuucacaggauga

SEQ ID NO: 786206 - RNA, 19 nt, Artificial Sequence
  Description of Artificial Sequence: Synthetic oligonucleotide
cagcgugcaggguggaugg

SEQ ID NO: 786207 - RNA, 19 nt, Artificial Sequence
  Description of Artificial Sequence: Synthetic oligonucleotide
uucgaaaggcuuggguuug

SEQ ID NO: 786208 - RNA, 19 nt, Artificial Sequence
  Description of Artificial Sequence: Synthetic oligonucleotide
cugcuugaacaccagauaa

SEQ ID NO: 786209 - RNA, 19 nt, Artificial Sequence
  Description of Artificial Sequence: Synthetic oligonucleotide
aacacauccuccgggugga

SEQ ID NO: 786210 - RNA, 19 nt, Artificial Sequence
  Description of Artificial Sequence: Synthetic oligonucleotide
agauaagaacuggugcucu

SEQ ID NO: 786211 - RNA, 19 nt, Artificial Sequence
  Description of Artificial Sequence: Synthetic oligonucleotide
ugcaugaguucaugccacc

SEQ ID NO: 786212 - RNA, 19 nt, Artificial Sequence
  Description of Artificial Sequence: Synthetic oligonucleotide
acaagcugucauuucgaaa

SEQ ID NO: 786213 - RNA, 19 nt, Artificial Sequence
  Description of Artificial Sequence: Synthetic oligonucleotide
auauagucugguguggcaa

SEQ ID NO: 786214 - RNA, 19 nt, Artificial Sequence
  Description of Artificial Sequence: Synthetic oligonucleotide
guguuuuaggcaagccagg

SEQ ID NO: 786215 - RNA, 19 nt, Artificial Sequence
  Description of Artificial Sequence: Synthetic oligonucleotide
gugcgcaugaucccuggcc

SEQ ID NO: 786216 - RNA, 19 nt, Artificial Sequence
  Description of Artificial Sequence: Synthetic oligonucleotide
acauugagcaugucaucaa

SEQ ID NO: 786217 - RNA, 19 nt, Artificial Sequence
  Description of Artificial Sequence: Synthetic oligonucleotide
gucagcauauggccacccg

SEQ ID NO: 786218 - RNA, 19 nt, Artificial Sequence
  Description of Artificial Sequence: Synthetic oligonucleotide
cauuggcccuuguacuccg

SEQ ID NO: 786219 - RNA, 19 nt, Artificial Sequence
  Description of Artificial Sequence: Synthetic oligonucleotide
gccguguagaacuugguca

SEQ ID NO: 786220 - RNA, 19 nt, Artificial Sequence
  Description of Artificial Sequence: Synthetic oligonucleotide
cuagcuaacugugguugag

SEQ ID NO: 786221 - RNA, 19 nt, Artificial Sequence
  Description of Artificial Sequence: Synthetic oligonucleotide
gguuugaccaagauaagaa

SEQ ID NO: 786222 - RNA, 19 nt, Artificial Sequence
  Description of Artificial Sequence: Synthetic oligonucleotide
ugguaccauagccaggcuu

SEQ ID NO: 786223 - RNA, 19 nt, Artificial Sequence
  Description of Artificial Sequence: Synthetic oligonucleotide
ugggaccaaucuuuucucu

SEQ ID NO: 786224 - RNA, 19 nt, Artificial Sequence
  Description of Artificial Sequence: Synthetic oligonucleotide
uuccggaguacucgccuca

SEQ ID NO: 786225 - RNA, 19 nt, Artificial Sequence
  Description of Artificial Sequence: Synthetic oligonucleotide
cuggugcucuuuagaaagc

SEQ ID NO: 786226 - RNA, 19 nt, Artificial Sequence
  Description of Artificial Sequence: Synthetic oligonucleotide
caauuguguguaccacacc

SEQ ID NO: 786227 - RNA, 19 nt, Artificial Sequence
  Description of Artificial Sequence: Synthetic oligonucleotide
aguacucgccucaugauuu

SEQ ID NO: 786228 - RNA, 19 nt, Artificial Sequence
  Description of Artificial Sequence: Synthetic oligonucleotide
agagaugauugaugacgga

SEQ ID NO: 786229 - RNA, 19 nt, Artificial Sequence
  Description of Artificial Sequence: Synthetic oligonucleotide
agcauaucagucugagguu

SEQ ID NO: 786230 - RNA, 19 nt, Artificial Sequence
  Description of Artificial Sequence: Synthetic oligonucleotide
cuggcagucuaggaaacug

SEQ ID NO: 786231 - RNA, 19 nt, Artificial Sequence
  Description of Artificial Sequence: Synthetic oligonucleotide
ccaguaauagccauccuga

SEQ ID NO: 786232 - RNA, 19 nt, Artificial Sequence
  Description of Artificial Sequence: Synthetic oligonucleotide
auucgcccuucacaggaug

SEQ ID NO: 786233 - RNA, 19 nt, Artificial Sequence
  Description of Artificial Sequence: Synthetic oligonucleotide
accaaagaaugggaaagaa

SEQ ID NO: 786234 - RNA, 19 nt, Artificial Sequence
  Description of Artificial Sequence: Synthetic oligonucleotide
cuacaccaaagaaugggaa

SEQ ID NO: 786235 - RNA, 19 nt, Artificial Sequence
  Description of Artificial Sequence: Synthetic oligonucleotide
ugcccggcuaugcuuggug

SEQ ID NO: 786236 - RNA, 19 nt, Artificial Sequence
  Description of Artificial Sequence: Synthetic oligonucleotide
ggugccguguagaacuugg

SEQ ID NO: 786237 - RNA, 19 nt, Artificial Sequence
  Description of Artificial Sequence: Synthetic oligonucleotide
ggagcauaucagucugagg

SEQ ID NO: 786238 - RNA, 19 nt, Artificial Sequence
  Description of Artificial Sequence: Synthetic oligonucleotide
uagagcauguagccuccaa

SEQ ID NO: 786239 - RNA, 19 nt, Artificial Sequence
  Description of Artificial Sequence: Synthetic oligonucleotide
gguaccauagccaggcuuc

SEQ ID NO: 786240 - RNA, 19 nt, Artificial Sequence
  Description of Artificial Sequence: Synthetic oligonucleotide
gcaucuuacugggaaaccc

SEQ ID NO: 786241 - RNA, 19 nt, Artificial Sequence
  Description of Artificial Sequence: Synthetic oligonucleotide
gaugcccggcuaugcuugg

SEQ ID NO: 786242 - RNA, 19 nt, Artificial Sequence
  Description of Artificial Sequence: Synthetic oligonucleotide
gccaccacaggucaacccc

SEQ ID NO: 786243 - RNA, 19 nt, Artificial Sequence
  Description of Artificial Sequence: Synthetic oligonucleotide
caaaacgugugugguuccc

SEQ ID NO: 786244 - RNA, 19 nt, Artificial Sequence
  Description of Artificial Sequence: Synthetic oligonucleotide
ucauggucauucugagcaa

SEQ ID NO: 786245 - RNA, 19 nt, Artificial Sequence
  Description of Artificial Sequence: Synthetic oligonucleotide
ccggguggaaaucaaacac

SEQ ID NO: 786246 - RNA, 19 nt, Artificial Sequence
  Description of Artificial Sequence: Synthetic oligonucleotide
agacucacaagcugucauu

SEQ ID NO: 786247 - RNA, 19 nt, Artificial Sequence
  Description of Artificial Sequence: Synthetic oligonucleotide
cagcaucuuacugggaaac

SEQ ID NO: 786248 - RNA, 19 nt, Artificial Sequence
  Description of Artificial Sequence: Synthetic oligonucleotide
gagaugauugaugacggau

SEQ ID NO: 786249 - RNA, 19 nt, Artificial Sequence
  Description of Artificial Sequence: Synthetic oligonucleotide
uuugaccacaaugcagcau

SEQ ID NO: 786250 - RNA, 19 nt, Artificial Sequence
  Description of Artificial Sequence: Synthetic oligonucleotide
aggaaugaccagugaucca

SEQ ID NO: 786251 - RNA, 19 nt, Artificial Sequence
  Description of Artificial Sequence: Synthetic oligonucleotide
caugauuuugccugagcgu

SEQ ID NO: 786252 - RNA, 19 nt, Artificial Sequence
  Description of Artificial Sequence: Synthetic oligonucleotide
gccugagcguguuuuaggc

SEQ ID NO: 786253 - RNA, 19 nt, Artificial Sequence
  Description of Artificial Sequence: Synthetic oligonucleotide
cagguuucauggguguggc

SEQ ID NO: 786254 - RNA, 19 nt, Artificial Sequence
  Description of Artificial Sequence: Synthetic oligonucleotide
cauucaugcccagcucugc

SEQ ID NO: 786255 - RNA, 19 nt, Artificial Sequence
  Description of Artificial Sequence: Synthetic oligonucleotide
auccuggacaagaaucgug

SEQ ID NO: 786256 - RNA, 19 nt, Artificial Sequence
  Description of Artificial Sequence: Synthetic oligonucleotide
caaggaugcccggcuaugc

SEQ ID NO: 786257 - RNA, 19 nt, Artificial Sequence
  Description of Artificial Sequence: Synthetic oligonucleotide
cauaucagucugagguuga

SEQ ID NO: 786258 - RNA, 19 nt, Artificial Sequence
  Description of Artificial Sequence: Synthetic oligonucleotide
ccuacuacccggugguacc

SEQ ID NO: 786259 - RNA, 19 nt, Artificial Sequence
  Description of Artificial Sequence: Synthetic oligonucleotide
aacugucucccuaguuuca

SEQ ID NO: 786260 - RNA, 19 nt, Artificial Sequence
  Description of Artificial Sequence: Synthetic oligonucleotide
agacucauucaggauugca

SEQ ID NO: 786261 - RNA, 19 nt, Artificial Sequence
  Description of Artificial Sequence: Synthetic oligonucleotide
uaccacacccuuggguuug

SEQ ID NO: 786262 - RNA, 19 nt, Artificial Sequence
  Description of Artificial Sequence: Synthetic oligonucleotide
ucgcccuucacaggaugag

SEQ ID NO: 786263 - RNA, 19 nt, Artificial Sequence
  Description of Artificial Sequence: Synthetic oligonucleotide
cugacuagcuaacuguggu

SEQ ID NO: 786264 - RNA, 19 nt, Artificial Sequence
  Description of Artificial Sequence: Synthetic oligonucleotide
ucccauaaauugugcgcau

SEQ ID NO: 786265 - RNA, 19 nt, Artificial Sequence
  Description of Artificial Sequence: Synthetic oligonucleotide
ugcccgccccacauguuug

SEQ ID NO: 786266 - RNA, 19 nt, Artificial Sequence
  Description of Artificial Sequence: Synthetic oligonucleotide
gcauucgcccuucacagga

SEQ ID NO: 786267 - RNA, 19 nt, Artificial Sequence
  Description of Artificial Sequence: Synthetic oligonucleotide
gacaagaaucgugaucacu

SEQ ID NO: 786268 - RNA, 19 nt, Artificial Sequence
  Description of Artificial Sequence: Synthetic oligonucleotide
cuuccggaguacucgccuc

SEQ ID NO: 786269 - RNA, 19 nt, Artificial Sequence
  Description of Artificial Sequence: Synthetic oligonucleotide
cagccaaugucugcuguac

SEQ ID NO: 786270 - RNA, 19 nt, Artificial Sequence
  Description of Artificial Sequence: Synthetic oligonucleotide
gguuagagcuacugcccug

SEQ ID NO: 786271 - RNA, 19 nt, Artificial Sequence
  Description of Artificial Sequence: Synthetic oligonucleotide
ccgaauugcuguuggugcc

SEQ ID NO: 786272 - RNA, 19 nt, Artificial Sequence
  Description of Artificial Sequence: Synthetic oligonucleotide
agcauauggccacccguuu

SEQ ID NO: 786273 - RNA, 19 nt, Artificial Sequence
  Description of Artificial Sequence: Synthetic oligonucleotide
ggaccaaucuuuucucuaa

SEQ ID NO: 786274 - RNA, 19 nt, Artificial Sequence
  Description of Artificial Sequence: Synthetic oligonucleotide
auugugcgcaugaucccug

SEQ ID NO: 786275 - RNA, 19 nt, Artificial Sequence
  Description of Artificial Sequence: Synthetic oligonucleotide
cucccuaguuucaaacaaa

SEQ ID NO: 786276 - RNA, 19 nt, Artificial Sequence
  Description of Artificial Sequence: Synthetic oligonucleotide
cagccucauguucuacaag

SEQ ID NO: 786277 - RNA, 19 nt, Artificial Sequence
  Description of Artificial Sequence: Synthetic oligonucleotide
cauuucgaaaggcuugggu

SEQ ID NO: 786278 - RNA, 19 nt, Artificial Sequence
  Description of Artificial Sequence: Synthetic oligonucleotide
uacucgccucaugauuuug

SEQ ID NO: 786279 - RNA, 19 nt, Artificial Sequence
  Description of Artificial Sequence: Synthetic oligonucleotide
cauauggccacccguuucu

SEQ ID NO: 786280 - RNA, 19 nt, Artificial Sequence
  Description of Artificial Sequence: Synthetic oligonucleotide
ccauaaauugugcgcauga

SEQ ID NO: 786281 - RNA, 19 nt, Artificial Sequence
  Description of Artificial Sequence: Synthetic oligonucleotide
gcagcggugacugaagaga

SEQ ID NO: 786282 - RNA, 19 nt, Artificial Sequence
  Description of Artificial Sequence: Synthetic oligonucleotide
ggguuugaccaagauaaga

SEQ ID NO: 786283 - RNA, 19 nt, Artificial Sequence
  Description of Artificial Sequence: Synthetic oligonucleotide
agcggcucucaucugggua

SEQ ID NO: 786284 - RNA, 19 nt, Artificial Sequence
  Description of Artificial Sequence: Synthetic oligonucleotide
cucggcacuucuccaagga

SEQ ID NO: 786285 - RNA, 19 nt, Artificial Sequence
  Description of Artificial Sequence: Synthetic oligonucleotide
ggcauucgcccuucacagg

SEQ ID NO: 786286 - RNA, 19 nt, Artificial Sequence
  Description of Artificial Sequence: Synthetic oligonucleotide
agccuccaauuguguguac

SEQ ID NO: 786287 - RNA, 19 nt, Artificial Sequence
  Description of Artificial Sequence: Synthetic oligonucleotide
cugccagugauccaguaau

SEQ ID NO: 786288 - RNA, 19 nt, Artificial Sequence
  Description of Artificial Sequence: Synthetic oligonucleotide
gaguacucgccucaugauu

SEQ ID NO: 786289 - RNA, 19 nt, Artificial Sequence
  Description of Artificial Sequence: Synthetic oligonucleotide
caagugcuaccaucuggca

SEQ ID NO: 786290 - RNA, 19 nt, Artificial Sequence
  Description of Artificial Sequence: Synthetic oligonucleotide
caucaauccugccagugau

SEQ ID NO: 786291 - RNA, 19 nt, Artificial Sequence
  Description of Artificial Sequence: Synthetic oligonucleotide
gauaagaacuggugcucuu

SEQ ID NO: 786292 - RNA, 19 nt, Artificial Sequence
  Description of Artificial Sequence: Synthetic oligonucleotide
gaucccuggccagggcugc

SEQ ID NO: 786293 - RNA, 19 nt, Artificial Sequence
  Description of Artificial Sequence: Synthetic oligonucleotide
acggaugggucagccacug

SEQ ID NO: 786294 - RNA, 19 nt, Artificial Sequence
  Description of Artificial Sequence: Synthetic oligonucleotide
acguggucucaaaacgugu

SEQ ID NO: 786295 - RNA, 19 nt, Artificial Sequence
  Description of Artificial Sequence: Synthetic oligonucleotide
uacuccggggcagcgugca

SEQ ID NO: 786296 - RNA, 19 nt, Artificial Sequence
  Description of Artificial Sequence: Synthetic oligonucleotide
guggucucaaaacgugugu

SEQ ID NO: 786297 - RNA, 19 nt, Artificial Sequence
  Description of Artificial Sequence: Synthetic oligonucleotide
ggaugcccggcuaugcuug

SEQ ID NO: 786298 - RNA, 19 nt, Artificial Sequence
  Description of Artificial Sequence: Synthetic oligonucleotide
gguauguggggauccccuc

SEQ ID NO: 786299 - RNA, 19 nt, Artificial Sequence
  Description of Artificial Sequence: Synthetic oligonucleotide
auauggccacccguuucug

SEQ ID NO: 786300 - RNA, 19 nt, Artificial Sequence
  Description of Artificial Sequence: Synthetic oligonucleotide
gcauauggccacccguuuc

SEQ ID NO: 786301 - RNA, 19 nt, Artificial Sequence
  Description of Artificial Sequence: Synthetic oligonucleotide
gaccaaucuuuucucuaau

SEQ ID NO: 786302 - RNA, 19 nt, Artificial Sequence
  Description of Artificial Sequence: Synthetic oligonucleotide
ugaugacggaugggucagc

SEQ ID NO: 786303 - RNA, 19 nt, Artificial Sequence
  Description of Artificial Sequence: Synthetic oligonucleotide
caaccccuucauuccagga

SEQ ID NO: 786304 - RNA, 19 nt, Artificial Sequence
  Description of Artificial Sequence: Synthetic oligonucleotide
uuggugccguguagaacuu

SEQ ID NO: 786305 - RNA, 19 nt, Artificial Sequence
  Description of Artificial Sequence: Synthetic oligonucleotide
gacucacaagcugucauuu

SEQ ID NO: 786306 - RNA, 19 nt, Artificial Sequence
  Description of Artificial Sequence: Synthetic oligonucleotide
auccuccggguggaaauca

SEQ ID NO: 786307 - RNA, 19 nt, Artificial Sequence
  Description of Artificial Sequence: Synthetic oligonucleotide
ggucaaccccuucauucca

SEQ ID NO: 786308 - RNA, 19 nt, Artificial Sequence
  Description of Artificial Sequence: Synthetic oligonucleotide
acuacccggugguaccaua

SEQ ID NO: 786309 - RNA, 19 nt, Artificial Sequence
  Description of Artificial Sequence: Synthetic oligonucleotide
cauugagcaugucaucaau

SEQ ID NO: 786310 - RNA, 19 nt, Artificial Sequence
  Description of Artificial Sequence: Synthetic oligonucleotide
uggugccguguagaacuug

SEQ ID NO: 786311 - RNA, 19 nt, Artificial Sequence
  Description of Artificial Sequence: Synthetic oligonucleotide
gcagcgugcaggguggaug

SEQ ID NO: 786312 - RNA, 19 nt, Artificial Sequence
  Description of Artificial Sequence: Synthetic oligonucleotide
cacccguuucuguuugcca

SEQ ID NO: 786313 - RNA, 19 nt, Artificial Sequence
  Description of Artificial Sequence: Synthetic oligonucleotide
cagacucauucaggauugc

SEQ ID NO: 786314 - RNA, 19 nt, Artificial Sequence
  Description of Artificial Sequence: Synthetic oligonucleotide
agguugaccugugcccugu

SEQ ID NO: 786315 - RNA, 19 nt, Artificial Sequence
  Description of Artificial Sequence: Synthetic oligonucleotide
ggacaagaaucgugaucac

SEQ ID NO: 786316 - RNA, 19 nt, Artificial Sequence
  Description of Artificial Sequence: Synthetic oligonucleotide
cauccuccggguggaaauc

SEQ ID NO: 786317 - RNA, 19 nt, Artificial Sequence
  Description of Artificial Sequence: Synthetic oligonucleotide
guggucaggcagcggugac

SEQ ID NO: 786318 - RNA, 19 nt, Artificial Sequence
  Description of Artificial Sequence: Synthetic oligonucleotide
gugcuaccaucuggcaaag

SEQ ID NO: 786319 - RNA, 19 nt, Artificial Sequence
  Description of Artificial Sequence: Synthetic oligonucleotide
guaccauagccaggcuuca

SEQ ID NO: 786320 - RNA, 19 nt, Artificial Sequence
  Description of Artificial Sequence: Synthetic oligonucleotide
cauaaauugugcgcaugau

SEQ ID NO: 786321 - RNA, 19 nt, Artificial Sequence
  Description of Artificial Sequence: Synthetic oligonucleotide
cgaauugcuguuggugccg

SEQ ID NO: 786322 - RNA, 19 nt, Artificial Sequence
  Description of Artificial Sequence: Synthetic oligonucleotide
ggcccauaggugacauagg

SEQ ID NO: 786323 - RNA, 19 nt, Artificial Sequence
  Description of Artificial Sequence: Synthetic oligonucleotide
gggaaccuacuacccggug

SEQ ID NO: 786324 - RNA, 19 nt, Artificial Sequence
  Description of Artificial Sequence: Synthetic oligonucleotide
ccagauacauugagcaugu

SEQ ID NO: 786325 - RNA, 19 nt, Artificial Sequence
  Description of Artificial Sequence: Synthetic oligonucleotide
ggucagccacuguagacgu

SEQ ID NO: 786326 - RNA, 19 nt, Artificial Sequence
  Description of Artificial Sequence: Synthetic oligonucleotide
ccaguggcccauaggugac

SEQ ID NO: 786327 - RNA, 19 nt, Artificial Sequence
  Description of Artificial Sequence: Synthetic oligonucleotide
agcgugcaggguggauggg

SEQ ID NO: 786328 - RNA, 19 nt, Artificial Sequence
  Description of Artificial Sequence: Synthetic oligonucleotide
caugagcauccgaauugcu

SEQ ID NO: 786329 - RNA, 19 nt, Artificial Sequence
  Description of Artificial Sequence: Synthetic oligonucleotide
cuacuacccggugguacca

SEQ ID NO: 786330 - RNA, 19 nt, Artificial Sequence
  Description of Artificial Sequence: Synthetic oligonucleotide
gcgcaugaucccuggccag

SEQ ID NO: 786331 - RNA, 19 nt, Artificial Sequence
  Description of Artificial Sequence: Synthetic oligonucleotide
cccggugguaccauagcca

SEQ ID NO: 786332 - RNA, 19 nt, Artificial Sequence
  Description of Artificial Sequence: Synthetic oligonucleotide
uccggaguacucgccucau

SEQ ID NO: 786333 - RNA, 19 nt, Artificial Sequence
  Description of Artificial Sequence: Synthetic oligonucleotide
gcaugaguucaugccacca

SEQ ID NO: 786334 - RNA, 19 nt, Artificial Sequence
  Description of Artificial Sequence: Synthetic oligonucleotide
ggaugggcagaaguuugga

SEQ ID NO: 786335 - RNA, 19 nt, Artificial Sequence
  Description of Artificial Sequence: Synthetic oligonucleotide
gggauccccucaaacaaaa

SEQ ID NO: 786336 - RNA, 19 nt, Artificial Sequence
  Description of Artificial Sequence: Synthetic oligonucleotide
aaccuacuacccgguggua

SEQ ID NO: 786337 - RNA, 19 nt, Artificial Sequence
  Description of Artificial Sequence: Synthetic oligonucleotide
uacuacccggugguaccau

SEQ ID NO: 786338 - RNA, 19 nt, Artificial Sequence
  Description of Artificial Sequence: Synthetic oligonucleotide
caguaauagccauccugau

SEQ ID NO: 786339 - RNA, 19 nt, Artificial Sequence
  Description of Artificial Sequence: Synthetic oligonucleotide
ggguuagagcuacugcccu

SEQ ID NO: 786340 - RNA, 19 nt, Artificial Sequence
  Description of Artificial Sequence: Synthetic oligonucleotide
cccggcuaugcuuggugac

SEQ ID NO: 786341 - RNA, 19 nt, Artificial Sequence
  Description of Artificial Sequence: Synthetic oligonucleotide
cccauaggugacauaggaa

SEQ ID NO: 786342 - RNA, 19 nt, Artificial Sequence
  Description of Artificial Sequence: Synthetic oligonucleotide
ccgccccacauguuugacc

SEQ ID NO: 786343 - RNA, 19 nt, Artificial Sequence
  Description of Artificial Sequence: Synthetic oligonucleotide
gagcauccgaauugcuguu

SEQ ID NO: 786344 - RNA, 19 nt, Artificial Sequence
  Description of Artificial Sequence: Synthetic oligonucleotide
ucgugaucacugggugguc

SEQ ID NO: 786345 - RNA, 19 nt, Artificial Sequence
  Description of Artificial Sequence: Synthetic oligonucleotide
ccacccguuucuguuugcc

SEQ ID NO: 786346 - RNA, 19 nt, Artificial Sequence
  Description of Artificial Sequence: Synthetic oligonucleotide
gguuugccuguggagccac

SEQ ID NO: 786347 - RNA, 19 nt, Artificial Sequence
  Description of Artificial Sequence: Synthetic oligonucleotide
ccugagcguguuuuaggca

SEQ ID NO: 786348 - RNA, 19 nt, Artificial Sequence
  Description of Artificial Sequence: Synthetic oligonucleotide
cagcggugacugaagagau

SEQ ID NO: 786349 - RNA, 19 nt, Artificial Sequence
  Description of Artificial Sequence: Synthetic oligonucleotide
guacuccggggcagcgugc

SEQ ID NO: 786350 - RNA, 19 nt, Artificial Sequence
  Description of Artificial Sequence: Synthetic oligonucleotide
cauccugaucccgccggca

SEQ ID NO: 786351 - RNA, 19 nt, Artificial Sequence
  Description of Artificial Sequence: Synthetic oligonucleotide
gcccuuguacuccggggca

SEQ ID NO: 786352 - RNA, 19 nt, Artificial Sequence
  Description of Artificial Sequence: Synthetic oligonucleotide
gacggaugggucagccacu

SEQ ID NO: 786353 - RNA, 19 nt, Artificial Sequence
  Description of Artificial Sequence: Synthetic oligonucleotide
ggaguacucgccucaugau

SEQ ID NO: 786354 - RNA, 19 nt, Artificial Sequence
  Description of Artificial Sequence: Synthetic oligonucleotide
caccagggagaggggucag

SEQ ID NO: 786355 - RNA, 19 nt, Artificial Sequence
  Description of Artificial Sequence: Synthetic oligonucleotide
gggucagcauauggccacc

SEQ ID NO: 786356 - RNA, 19 nt, Artificial Sequence
  Description of Artificial Sequence: Synthetic oligonucleotide
gcccggcuaugcuugguga

SEQ ID NO: 786357 - RNA, 19 nt, Artificial Sequence
  Description of Artificial Sequence: Synthetic oligonucleotide
gcggcucucaucuggguau

SEQ ID NO: 786358 - RNA, 19 nt, Artificial Sequence
  Description of Artificial Sequence: Synthetic oligonucleotide
cugcaaggaugcccggcua

SEQ ID NO: 786359 - RNA, 19 nt, Artificial Sequence
  Description of Artificial Sequence: Synthetic oligonucleotide
guacucgccucaugauuuu

SEQ ID NO: 786360 - RNA, 19 nt, Artificial Sequence
  Description of Artificial Sequence: Synthetic oligonucleotide
cggcuaugcuuggugacag

SEQ ID NO: 786361 - RNA, 19 nt, Artificial Sequence
  Description of Artificial Sequence: Synthetic oligonucleotide
augcccggcuaugcuuggu

SEQ ID NO: 786362 - RNA, 19 nt, Artificial Sequence
  Description of Artificial Sequence: Synthetic oligonucleotide
cauucgcccuucacaggau

SEQ ID NO: 786363 - RNA, 19 nt, Artificial Sequence
  Description of Artificial Sequence: Synthetic oligonucleotide
ccugcaaggaugcccggcu

SEQ ID NO: 786364 - RNA, 19 nt, Artificial Sequence
  Description of Artificial Sequence: Synthetic oligonucleotide
cucggcccucauuuacacu

SEQ ID NO: 786365 - RNA, 19 nt, Artificial Sequence
  Description of Artificial Sequence: Synthetic oligonucleotide
ccagccaaugucugcugua

SEQ ID NO: 786366 - RNA, 19 nt, Artificial Sequence
  Description of Artificial Sequence: Synthetic oligonucleotide
guggcccauaggugacaua

SEQ ID NO: 786367 - RNA, 19 nt, Artificial Sequence
  Description of Artificial Sequence: Synthetic oligonucleotide
cugcccgccccacauguuu

SEQ ID NO: 786368 - RNA, 19 nt, Artificial Sequence
  Description of Artificial Sequence: Synthetic oligonucleotide
caucuggacacugccucuu

SEQ ID NO: 786369 - RNA, 19 nt, Artificial Sequence
  Description of Artificial Sequence: Synthetic oligonucleotide
gugccguguagaacuuggu

SEQ ID NO: 786370 - RNA, 19 nt, Artificial Sequence
  Description of Artificial Sequence: Synthetic oligonucleotide
gcaaugggaccaaucuuuu

SEQ ID NO: 786371 - RNA, 19 nt, Artificial Sequence
  Description of Artificial Sequence: Synthetic oligonucleotide
gaccagugauccagccaau

SEQ ID NO: 786372 - RNA, 19 nt, Artificial Sequence
  Description of Artificial Sequence: Synthetic oligonucleotide
gcccgccccacauguuuga

SEQ ID NO: 786373 - RNA, 19 nt, Artificial Sequence
  Description of Artificial Sequence: Synthetic oligonucleotide
guuugccuguggagccacu

SEQ ID NO: 786374 - RNA, 19 nt, Artificial Sequence
  Description of Artificial Sequence: Synthetic oligonucleotide
gcuccacaagcggcucuca

SEQ ID NO: 786375 - RNA, 19 nt, Artificial Sequence
  Description of Artificial Sequence: Synthetic oligonucleotide
cauuggccaguggcccaua

SEQ ID NO: 786376 - RNA, 19 nt, Artificial Sequence
  Description of Artificial Sequence: Synthetic oligonucleotide
ccuggcagucuaggaaacu

SEQ ID NO: 786377 - RNA, 19 nt, Artificial Sequence
  Description of Artificial Sequence: Synthetic oligonucleotide
ccgccggcagccaucuccu

SEQ ID NO: 786378 - RNA, 19 nt, Artificial Sequence
  Description of Artificial Sequence: Synthetic oligonucleotide
ccauuggccaguggcccau

SEQ ID NO: 786379 - RNA, 19 nt, Artificial Sequence
  Description of Artificial Sequence: Synthetic oligonucleotide
cgccggcagccaucuccug

SEQ ID NO: 786380 - RNA, 19 nt, Artificial Sequence
  Description of Artificial Sequence: Synthetic oligonucleotide
aaagcuaccgccaugaggc

SEQ ID NO: 786381 - RNA, 19 nt, Artificial Sequence
  Description of Artificial Sequence: Synthetic oligonucleotide
uguccaaagaugcagauag

SEQ ID NO: 786382 - RNA, 19 nt, Artificial Sequence
  Description of Artificial Sequence: Synthetic oligonucleotide
acgagaaugauauucgucg

SEQ ID NO: 786383 - RNA, 19 nt, Artificial Sequence
  Description of Artificial Sequence: Synthetic oligonucleotide
uacuauaaaagcuaccgcc

SEQ ID NO: 786384 - RNA, 19 nt, Artificial Sequence
  Description of Artificial Sequence: Synthetic oligonucleotide
cucucuuuaaccaaugggg

SEQ ID NO: 786385 - RNA, 19 nt, Artificial Sequence
  Description of Artificial Sequence: Synthetic oligonucleotide
aaugauauucgucggggag

SEQ ID NO: 786386 - RNA, 19 nt, Artificial Sequence
  Description of Artificial Sequence: Synthetic oligonucleotide
ucucucuuuaaccaauggg

SEQ ID NO: 786387 - RNA, 19 nt, Artificial Sequence
  Description of Artificial Sequence: Synthetic oligonucleotide
auuagugucgcuucagcac

SEQ ID NO: 786388 - RNA, 19 nt, Artificial Sequence
  Description of Artificial Sequence: Synthetic oligonucleotide
uugacgagaaugauauucg

SEQ ID NO: 786389 - RNA, 19 nt, Artificial Sequence
  Description of Artificial Sequence: Synthetic oligonucleotide
aagacgguuccacaaugcc

SEQ ID NO: 786390 - RNA, 19 nt, Artificial Sequence
  Description of Artificial Sequence: Synthetic oligonucleotide
agcgguaguccacagagcc

SEQ ID NO: 786391 - RNA, 19 nt, Artificial Sequence
  Description of Artificial Sequence: Synthetic oligonucleotide
uauuugagagcaauuagaa

SEQ ID NO: 786392 - RNA, 19 nt, Artificial Sequence
  Description of Artificial Sequence: Synthetic oligonucleotide
ugcuaggagaccaacacgc

SEQ ID NO: 786393 - RNA, 19 nt, Artificial Sequence
  Description of Artificial Sequence: Synthetic oligonucleotide
gaaugaaucucugagagga

SEQ ID NO: 786394 - RNA, 19 nt, Artificial Sequence
  Description of Artificial Sequence: Synthetic oligonucleotide
agagcaauuagaaaagauc

SEQ ID NO: 786395 - RNA, 19 nt, Artificial Sequence
  Description of Artificial Sequence: Synthetic oligonucleotide
aguuuauuagugucgcuuc

SEQ ID NO: 786396 - RNA, 19 nt, Artificial Sequence
  Description of Artificial Sequence: Synthetic oligonucleotide
cuauuuacaugaauccugc

SEQ ID NO: 786397 - RNA, 19 nt, Artificial Sequence
  Description of Artificial Sequence: Synthetic oligonucleotide
gagaauugcaguuacagua

SEQ ID NO: 786398 - RNA, 19 nt, Artificial Sequence
  Description of Artificial Sequence: Synthetic oligonucleotide
aauuagaaaagaucugcua

SEQ ID NO: 786399 - RNA, 19 nt, Artificial Sequence
  Description of Artificial Sequence: Synthetic oligonucleotide
uuagugucgcuucagcacc

SEQ ID NO: 786400 - RNA, 19 nt, Artificial Sequence
  Description of Artificial Sequence: Synthetic oligonucleotide
gauagggaaguguuucacg

SEQ ID NO: 786401 - RNA, 19 nt, Artificial Sequence
  Description of Artificial Sequence: Synthetic oligonucleotide
uauugggaaccacaccugg

SEQ ID NO: 786402 - RNA, 19 nt, Artificial Sequence
  Description of Artificial Sequence: Synthetic oligonucleotide
guagcgguaguccacagag

SEQ ID NO: 786403 - RNA, 19 nt, Artificial Sequence
  Description of Artificial Sequence: Synthetic oligonucleotide
aacacgugcacaccacagg

SEQ ID NO: 786404 - RNA, 19 nt, Artificial Sequence
  Description of Artificial Sequence: Synthetic oligonucleotide
gagaggauucuucaucagg

SEQ ID NO: 786405 - RNA, 19 nt, Artificial Sequence
  Description of Artificial Sequence: Synthetic oligonucleotide
uauccgagagacaauggug

SEQ ID NO: 786406 - RNA, 19 nt, Artificial Sequence
  Description of Artificial Sequence: Synthetic oligonucleotide
gcuacuauaaaagcuaccg

SEQ ID NO: 786407 - RNA, 19 nt, Artificial Sequence
  Description of Artificial Sequence: Synthetic oligonucleotide
gagaaugauauucgucggg

SEQ ID NO: 786408 - RNA, 19 nt, Artificial Sequence
  Description of Artificial Sequence: Synthetic oligonucleotide
gauguagacacagacggug

SEQ ID NO: 786409 - RNA, 19 nt, Artificial Sequence
  Description of Artificial Sequence: Synthetic oligonucleotide
agcgcuguauccgagagac

SEQ ID NO: 786410 - RNA, 19 nt, Artificial Sequence
  Description of Artificial Sequence: Synthetic oligonucleotide
agaaugauauucgucgggg

SEQ ID NO: 786411 - RNA, 19 nt, Artificial Sequence
  Description of Artificial Sequence: Synthetic oligonucleotide
uagaagagagaacacugga

SEQ ID NO: 786412 - RNA, 19 nt, Artificial Sequence
  Description of Artificial Sequence: Synthetic oligonucleotide
ucuaugaguccucaucaca

SEQ ID NO: 786413 - RNA, 19 nt, Artificial Sequence
  Description of Artificial Sequence: Synthetic oligonucleotide
uuauuagugucgcuucagc

SEQ ID NO: 786414 - RNA, 19 nt, Artificial Sequence
  Description of Artificial Sequence: Synthetic oligonucleotide
uacaguagcgcuguauccg

SEQ ID NO: 786415 - RNA, 19 nt, Artificial Sequence
  Description of Artificial Sequence: Synthetic oligonucleotide
uauuagugucgcuucagca

SEQ ID NO: 786416 - RNA, 19 nt, Artificial Sequence
  Description of Artificial Sequence: Synthetic oligonucleotide
aaaggggccaaaguacuuc

SEQ ID NO: 786417 - RNA, 19 nt, Artificial Sequence
  Description of Artificial Sequence: Synthetic oligonucleotide
cacacacacacacacacgc

SEQ ID NO: 786418 - RNA, 19 nt, Artificial Sequence
  Description of Artificial Sequence: Synthetic oligonucleotide
uauaaaagcuaccgccaug

SEQ ID NO: 786419 - RNA, 19 nt, Artificial Sequence
  Description of Artificial Sequence: Synthetic oligonucleotide
ugaaagaacuugacgucgc

SEQ ID NO: 786420 - RNA, 19 nt, Artificial Sequence
  Description of Artificial Sequence: Synthetic oligonucleotide
aucagagacgaggauaugg

SEQ ID NO: 786421 - RNA, 19 nt, Artificial Sequence
  Description of Artificial Sequence: Synthetic oligonucleotide
auccgagagacaauggugc

SEQ ID NO: 786422 - RNA, 19 nt, Artificial Sequence
  Description of Artificial Sequence: Synthetic oligonucleotide
ucgucaaacguauuugaga

SEQ ID NO: 786423 - RNA, 19 nt, Artificial Sequence
  Description of Artificial Sequence: Synthetic oligonucleotide
gggaaugaaucucugagag

SEQ ID NO: 786424 - RNA, 19 nt, Artificial Sequence
  Description of Artificial Sequence: Synthetic oligonucleotide
uguauccgagagacaaugg

SEQ ID NO: 786425 - RNA, 19 nt, Artificial Sequence
  Description of Artificial Sequence: Synthetic oligonucleotide
agcgccgucaguuuauuag

SEQ ID NO: 786426 - RNA, 19 nt, Artificial Sequence
  Description of Artificial Sequence: Synthetic oligonucleotide
guugacgagaaugauauuc

SEQ ID NO: 786427 - RNA, 19 nt, Artificial Sequence
  Description of Artificial Sequence: Synthetic oligonucleotide
cucacacacacacacacac

SEQ ID NO: 786428 - RNA, 19 nt, Artificial Sequence
  Description of Artificial Sequence: Synthetic oligonucleotide
ugaagacgguuccacaaug

SEQ ID NO: 786429 - RNA, 19 nt, Artificial Sequence
  Description of Artificial Sequence: Synthetic oligonucleotide
cacggguggggcuagaagg

SEQ ID NO: 786430 - RNA, 19 nt, Artificial Sequence
  Description of Artificial Sequence: Synthetic oligonucleotide
ugcaguuacaguagcgcug

SEQ ID NO: 786431 - RNA, 19 nt, Artificial Sequence
  Description of Artificial Sequence: Synthetic oligonucleotide
cauacacuaguuuuccgug

SEQ ID NO: 786432 - RNA, 19 nt, Artificial Sequence
  Description of Artificial Sequence: Synthetic oligonucleotide
auauucgucggggaguugg

SEQ ID NO: 786433 - RNA, 19 nt, Artificial Sequence
  Description of Artificial Sequence: Synthetic oligonucleotide
auguagccaagccagucgg

SEQ ID NO: 786434 - RNA, 19 nt, Artificial Sequence
  Description of Artificial Sequence: Synthetic oligonucleotide
cugaaagaacuugacgucg

SEQ ID NO: 786435 - RNA, 19 nt, Artificial Sequence
  Description of Artificial Sequence: Synthetic oligonucleotide
cuacuauaaaagcuaccgc

SEQ ID NO: 786436 - RNA, 19 nt, Artificial Sequence
  Description of Artificial Sequence: Synthetic oligonucleotide
cacacacacacacacacac

SEQ ID NO: 786437 - RNA, 19 nt, Artificial Sequence
  Description of Artificial Sequence: Synthetic oligonucleotide
uuacaguagcgcuguaucc

SEQ ID NO: 786438 - RNA, 19 nt, Artificial Sequence
  Description of Artificial Sequence: Synthetic oligonucleotide
gaaagugcacuugagcgug

SEQ ID NO: 786439 - RNA, 19 nt, Artificial Sequence
  Description of Artificial Sequence: Synthetic oligonucleotide
cucucucacacacacacac

SEQ ID NO: 786440 - RNA, 19 nt, Artificial Sequence
  Description of Artificial Sequence: Synthetic oligonucleotide
ugagaauugcaguuacagu

SEQ ID NO: 786441 - RNA, 19 nt, Artificial Sequence
  Description of Artificial Sequence: Synthetic oligonucleotide
aacuugacgucgcugcacu

SEQ ID NO: 786442 - RNA, 19 nt, Artificial Sequence
  Description of Artificial Sequence: Synthetic oligonucleotide
agauguacugcgugaugcg

SEQ ID NO: 786443 - RNA, 19 nt, Artificial Sequence
  Description of Artificial Sequence: Synthetic oligonucleotide
aaccuucacaaccccaaca

SEQ ID NO: 786444 - RNA, 19 nt, Artificial Sequence
  Description of Artificial Sequence: Synthetic oligonucleotide
cagaucagacggcugaugc

SEQ ID NO: 786445 - RNA, 19 nt, Artificial Sequence
  Description of Artificial Sequence: Synthetic oligonucleotide
cucucacacacacacacac

SEQ ID NO: 786446 - RNA, 19 nt, Artificial Sequence
  Description of Artificial Sequence: Synthetic oligonucleotide
gaagugugugcuucugcag

SEQ ID NO: 786447 - RNA, 19 nt, Artificial Sequence
  Description of Artificial Sequence: Synthetic oligonucleotide
aaacguauuugagagcaau

SEQ ID NO: 786448 - RNA, 19 nt, Artificial Sequence
  Description of Artificial Sequence: Synthetic oligonucleotide
agauagggaaguguuucac

SEQ ID NO: 786449 - RNA, 19 nt, Artificial Sequence
  Description of Artificial Sequence: Synthetic oligonucleotide
augcuaggagaccaacacg

SEQ ID NO: 786450 - RNA, 19 nt, Artificial Sequence
  Description of Artificial Sequence: Synthetic oligonucleotide
acgugcacaccacaggaag

SEQ ID NO: 786451 - RNA, 19 nt, Artificial Sequence
  Description of Artificial Sequence: Synthetic oligonucleotide
guauuugagagcaauuaga

SEQ ID NO: 786452 - RNA, 19 nt, Artificial Sequence
  Description of Artificial Sequence: Synthetic oligonucleotide
cacacacacacacacgcag

SEQ ID NO: 786453 - RNA, 19 nt, Artificial Sequence
  Description of Artificial Sequence: Synthetic oligonucleotide
cuaggagaccaacacgccc

SEQ ID NO: 786454 - RNA, 19 nt, Artificial Sequence
  Description of Artificial Sequence: Synthetic oligonucleotide
uugaaaucguccacauggu

SEQ ID NO: 786455 - RNA, 19 nt, Artificial Sequence
  Description of Artificial Sequence: Synthetic oligonucleotide
ugcgauggggagcugguga

SEQ ID NO: 786456 - RNA, 19 nt, Artificial Sequence
  Description of Artificial Sequence: Synthetic oligonucleotide
agggauugacugcuucucg

SEQ ID NO: 786457 - RNA, 19 nt, Artificial Sequence
  Description of Artificial Sequence: Synthetic oligonucleotide
cucucucucucucacacac

SEQ ID NO: 786458 - RNA, 19 nt, Artificial Sequence
  Description of Artificial Sequence: Synthetic oligonucleotide
cugcgggagauguagacac

SEQ ID NO: 786459 - RNA, 19 nt, Artificial Sequence
  Description of Artificial Sequence: Synthetic oligonucleotide
uaaugcugugcuccggcca

SEQ ID NO: 786460 - RNA, 19 nt, Artificial Sequence
  Description of Artificial Sequence: Synthetic oligonucleotide
uugcaguuacaguagcgcu

SEQ ID NO: 786461 - RNA, 19 nt, Artificial Sequence
  Description of Artificial Sequence: Synthetic oligonucleotide
gucaguuuauuagugucgc

SEQ ID NO: 786462 - RNA, 19 nt, Artificial Sequence
  Description of Artificial Sequence: Synthetic oligonucleotide
cuagccgugccucuggaac

SEQ ID NO: 786463 - RNA, 19 nt, Artificial Sequence
  Description of Artificial Sequence: Synthetic oligonucleotide
agggaaugaaucucugaga

SEQ ID NO: 786464 - RNA, 19 nt, Artificial Sequence
  Description of Artificial Sequence: Synthetic oligonucleotide
uguuucacgugggaagacc

SEQ ID NO: 786465 - RNA, 19 nt, Artificial Sequence
  Description of Artificial Sequence: Synthetic oligonucleotide
gcuauuuacaugaauccug

SEQ ID NO: 786466 - RNA, 19 nt, Artificial Sequence
  Description of Artificial Sequence: Synthetic oligonucleotide
acacgugcacaccacagga

SEQ ID NO: 786467 - RNA, 19 nt, Artificial Sequence
  Description of Artificial Sequence: Synthetic oligonucleotide
uggcuuuuagacuccacau

SEQ ID NO: 786468 - RNA, 19 nt, Artificial Sequence
  Description of Artificial Sequence: Synthetic oligonucleotide
cgucaaacguauuugagag

SEQ ID NO: 786469 - RNA, 19 nt, Artificial Sequence
  Description of Artificial Sequence: Synthetic oligonucleotide
gacgucgcugcacuccacg

SEQ ID NO: 786470 - RNA, 19 nt, Artificial Sequence
  Description of Artificial Sequence: Synthetic oligonucleotide
cagacggugggguagaaga

SEQ ID NO: 786471 - RNA, 19 nt, Artificial Sequence
  Description of Artificial Sequence: Synthetic oligonucleotide
cucucucucucucucacac

SEQ ID NO: 786472 - RNA, 19 nt, Artificial Sequence
  Description of Artificial Sequence: Synthetic oligonucleotide
ggagauguagacacagacg

SEQ ID NO: 786473 - RNA, 19 nt, Artificial Sequence
  Description of Artificial Sequence: Synthetic oligonucleotide
agcuauuuacaugaauccu

SEQ ID NO: 786474 - RNA, 19 nt, Artificial Sequence
  Description of Artificial Sequence: Synthetic oligonucleotide
ugguucaguuggcauacac

SEQ ID NO: 786475 - RNA, 19 nt, Artificial Sequence
  Description of Artificial Sequence: Synthetic oligonucleotide
ugcgucgucaaacguauuu

SEQ ID NO: 786476 - RNA, 19 nt, Artificial Sequence
  Description of Artificial Sequence: Synthetic oligonucleotide
uagccaagccagucgggcg

SEQ ID NO: 786477 - RNA, 19 nt, Artificial Sequence
  Description of Artificial Sequence: Synthetic oligonucleotide
ugcgugaugcgcgacacga

SEQ ID NO: 786478 - RNA, 19 nt, Artificial Sequence
  Description of Artificial Sequence: Synthetic oligonucleotide
ugacgagaaugauauucgu

SEQ ID NO: 786479 - RNA, 19 nt, Artificial Sequence
  Description of Artificial Sequence: Synthetic oligonucleotide
ggaaugaaucucugagagg

SEQ ID NO: 786480 - RNA, 19 nt, Artificial Sequence
  Description of Artificial Sequence: Synthetic oligonucleotide
cagucgggcgucuuguggg

SEQ ID NO: 786481 - RNA, 19 nt, Artificial Sequence
  Description of Artificial Sequence: Synthetic oligonucleotide
ucucacacacacacacaca

SEQ ID NO: 786482 - RNA, 19 nt, Artificial Sequence
  Description of Artificial Sequence: Synthetic oligonucleotide
agucucgccacugcugggc

SEQ ID NO: 786483 - RNA, 19 nt, Artificial Sequence
  Description of Artificial Sequence: Synthetic oligonucleotide
gaagacgguuccacaaugc

SEQ ID NO: 786484 - RNA, 19 nt, Artificial Sequence
  Description of Artificial Sequence: Synthetic oligonucleotide
gagaccaacacgcccuuca

SEQ ID NO: 786485 - RNA, 19 nt, Artificial Sequence
  Description of Artificial Sequence: Synthetic oligonucleotide
uguagcgguaguccacaga

SEQ ID NO: 786486 - RNA, 19 nt, Artificial Sequence
  Description of Artificial Sequence: Synthetic oligonucleotide
uggcauacacuaguuuucc

SEQ ID NO: 786487 - RNA, 19 nt, Artificial Sequence
  Description of Artificial Sequence: Synthetic oligonucleotide
cuguauccgagagacaaug

SEQ ID NO: 786488 - RNA, 19 nt, Artificial Sequence
  Description of Artificial Sequence: Synthetic oligonucleotide
gaacacgugcacaccacag

SEQ ID NO: 786489 - RNA, 19 nt, Artificial Sequence
  Description of Artificial Sequence: Synthetic oligonucleotide
ugugcagaucagacggcug

SEQ ID NO: 786490 - RNA, 19 nt, Artificial Sequence
  Description of Artificial Sequence: Synthetic oligonucleotide
ucacacacacacacacaca

SEQ ID NO: 786491 - RNA, 19 nt, Artificial Sequence
  Description of Artificial Sequence: Synthetic oligonucleotide
uugacgucgcugcacucca

SEQ ID NO: 786492 - RNA, 19 nt, Artificial Sequence
  Description of Artificial Sequence: Synthetic oligonucleotide
gauugacugcuucucgguc

SEQ ID NO: 786493 - RNA, 19 nt, Artificial Sequence
  Description of Artificial Sequence: Synthetic oligonucleotide
uggaguguccaaagaugca

SEQ ID NO: 786494 - RNA, 19 nt, Artificial Sequence
  Description of Artificial Sequence: Synthetic oligonucleotide
ucucucacacacacacaca

SEQ ID NO: 786495 - RNA, 19 nt, Artificial Sequence
  Description of Artificial Sequence: Synthetic oligonucleotide
cugugcuccggccacugcg

SEQ ID NO: 786496 - RNA, 19 nt, Artificial Sequence
  Description of Artificial Sequence: Synthetic oligonucleotide
gacagaccuccacucacug

SEQ ID NO: 786497 - RNA, 19 nt, Artificial Sequence
  Description of Artificial Sequence: Synthetic oligonucleotide
gacgagaaugauauucguc

SEQ ID NO: 786498 - RNA, 19 nt, Artificial Sequence
  Description of Artificial Sequence: Synthetic oligonucleotide
acgaggauaugguucaguu

SEQ ID NO: 786499 - RNA, 19 nt, Artificial Sequence
  Description of Artificial Sequence: Synthetic oligonucleotide
aguguuucacgugggaaga

SEQ ID NO: 786500 - RNA, 19 nt, Artificial Sequence
  Description of Artificial Sequence: Synthetic oligonucleotide
cuuuuggccacuggacucc

SEQ ID NO: 786501 - RNA, 19 nt, Artificial Sequence
  Description of Artificial Sequence: Synthetic oligonucleotide
cagucagagguguugacga

SEQ ID NO: 786502 - RNA, 19 nt, Artificial Sequence
  Description of Artificial Sequence: Synthetic oligonucleotide
augauauucgucggggagu

SEQ ID NO: 786503 - RNA, 19 nt, Artificial Sequence
  Description of Artificial Sequence: Synthetic oligonucleotide
uuucacgugggaagaccac

SEQ ID NO: 786504 - RNA, 19 nt, Artificial Sequence
  Description of Artificial Sequence: Synthetic oligonucleotide
acugcgugaugcgcgacac

SEQ ID NO: 786505 - RNA, 19 nt, Artificial Sequence
  Description of Artificial Sequence: Synthetic oligonucleotide
acugcgaucuucacaggag

SEQ ID NO: 786506 - RNA, 19 nt, Artificial Sequence
  Description of Artificial Sequence: Synthetic oligonucleotide
acaguagcgcuguauccga

SEQ ID NO: 786507 - RNA, 19 nt, Artificial Sequence
  Description of Artificial Sequence: Synthetic oligonucleotide
acguauuugagagcaauua

SEQ ID NO: 786508 - RNA, 19 nt, Artificial Sequence
  Description of Artificial Sequence: Synthetic oligonucleotide
gucgucaaacguauuugag

SEQ ID NO: 786509 - RNA, 19 nt, Artificial Sequence
  Description of Artificial Sequence: Synthetic oligonucleotide
ucaguuuauuagugucgcu

SEQ ID NO: 786510 - RNA, 19 nt, Artificial Sequence
  Description of Artificial Sequence: Synthetic oligonucleotide
cucuaugaguccucaucac

SEQ ID NO: 786511 - RNA, 19 nt, Artificial Sequence
  Description of Artificial Sequence: Synthetic oligonucleotide
caucucucuuuaaccaaug

SEQ ID NO: 786512 - RNA, 19 nt, Artificial Sequence
  Description of Artificial Sequence: Synthetic oligonucleotide
gaccaacacgcccuucacc

SEQ ID NO: 786513 - RNA, 19 nt, Artificial Sequence
  Description of Artificial Sequence: Synthetic oligonucleotide
gguaaugcugugcuccggc

SEQ ID NO: 786514 - RNA, 19 nt, Artificial Sequence
  Description of Artificial Sequence: Synthetic oligonucleotide
agucagagguguugacgag

SEQ ID NO: 786515 - RNA, 19 nt, Artificial Sequence
  Description of Artificial Sequence: Synthetic oligonucleotide
ggggucaacgaucccaugc

SEQ ID NO: 786516 - RNA, 19 nt, Artificial Sequence
  Description of Artificial Sequence: Synthetic oligonucleotide
guaaugcugugcuccggcc

SEQ ID NO: 786517 - RNA, 19 nt, Artificial Sequence
  Description of Artificial Sequence: Synthetic oligonucleotide
uucacgugggaagaccacu

SEQ ID NO: 786518 - RNA, 19 nt, Artificial Sequence
  Description of Artificial Sequence: Synthetic oligonucleotide
uacaugaauccugcuuccc

SEQ ID NO: 786519 - RNA, 19 nt, Artificial Sequence
  Description of Artificial Sequence: Synthetic oligonucleotide
uacugcgugaugcgcgaca

SEQ ID NO: 786520 - RNA, 19 nt, Artificial Sequence
  Description of Artificial Sequence: Synthetic oligonucleotide
ucucucucacacacacaca

SEQ ID NO: 786521 - RNA, 19 nt, Artificial Sequence
  Description of Artificial Sequence: Synthetic oligonucleotide
acgaucccaugcuaggaga

SEQ ID NO: 786522 - RNA, 19 nt, Artificial Sequence
  Description of Artificial Sequence: Synthetic oligonucleotide
gauaugguucaguuggcau

SEQ ID NO: 786523 - RNA, 19 nt, Artificial Sequence
  Description of Artificial Sequence: Synthetic oligonucleotide
gcagucucgccacugcugg

SEQ ID NO: 786524 - RNA, 19 nt, Artificial Sequence
  Description of Artificial Sequence: Synthetic oligonucleotide
guguugacgagaaugauau

SEQ ID NO: 786525 - RNA, 19 nt, Artificial Sequence
  Description of Artificial Sequence: Synthetic oligonucleotide
gaaguguuucacgugggaa

SEQ ID NO: 786526 - RNA, 19 nt, Artificial Sequence
  Description of Artificial Sequence: Synthetic oligonucleotide
augcacuggcuuuuagacu

SEQ ID NO: 786527 - RNA, 19 nt, Artificial Sequence
  Description of Artificial Sequence: Synthetic oligonucleotide
gaggacccgaagcauguuc

SEQ ID NO: 786528 - RNA, 19 nt, Artificial Sequence
  Description of Artificial Sequence: Synthetic oligonucleotide
uguucugcuggugcuuagc

SEQ ID NO: 786529 - RNA, 19 nt, Artificial Sequence
  Description of Artificial Sequence: Synthetic oligonucleotide
uccgagagacaauggugcu

SEQ ID NO: 786530 - RNA, 19 nt, Artificial Sequence
  Description of Artificial Sequence: Synthetic oligonucleotide
ugaugcgcgacacgauguc

SEQ ID NO: 786531 - RNA, 19 nt, Artificial Sequence
  Description of Artificial Sequence: Synthetic oligonucleotide
gcagcugcgucgucaaacg

SEQ ID NO: 786532 - RNA, 19 nt, Artificial Sequence
  Description of Artificial Sequence: Synthetic oligonucleotide
gaccggaaagugcacuuga

SEQ ID NO: 786533 - RNA, 19 nt, Artificial Sequence
  Description of Artificial Sequence: Synthetic oligonucleotide
acugucucucucucucucu

SEQ ID NO: 786534 - RNA, 19 nt, Artificial Sequence
  Description of Artificial Sequence: Synthetic oligonucleotide
cacauggucgcaugggaca

SEQ ID NO: 786535 - RNA, 19 nt, Artificial Sequence
  Description of Artificial Sequence: Synthetic oligonucleotide
ucucucucucucucucuca

SEQ ID NO: 786536 - RNA, 19 nt, Artificial Sequence
  Description of Artificial Sequence: Synthetic oligonucleotide
ugauauucgucggggaguu

SEQ ID NO: 786537 - RNA, 19 nt, Artificial Sequence
  Description of Artificial Sequence: Synthetic oligonucleotide
cucucucucucucucucac

SEQ ID NO: 786538 - RNA, 19 nt, Artificial Sequence
  Description of Artificial Sequence: Synthetic oligonucleotide
cacgugggaagaccacugg

SEQ ID NO: 786539 - RNA, 19 nt, Artificial Sequence
  Description of Artificial Sequence: Synthetic oligonucleotide
gaucccaugcuaggagacc

SEQ ID NO: 786540 - RNA, 19 nt, Artificial Sequence
  Description of Artificial Sequence: Synthetic oligonucleotide
ugcgaucuucacaggaguu

SEQ ID NO: 786541 - RNA, 19 nt, Artificial Sequence
  Description of Artificial Sequence: Synthetic oligonucleotide
guauccgagagacaauggu

SEQ ID NO: 786542 - RNA, 19 nt, Artificial Sequence
  Description of Artificial Sequence: Synthetic oligonucleotide
cagaacacgugcacaccac

SEQ ID NO: 786543 - RNA, 19 nt, Artificial Sequence
  Description of Artificial Sequence: Synthetic oligonucleotide
cgucaguuuauuagugucg

SEQ ID NO: 786544 - RNA, 19 nt, Artificial Sequence
  Description of Artificial Sequence: Synthetic oligonucleotide
acacacacacacacacacg

SEQ ID NO: 786545 - RNA, 19 nt, Artificial Sequence
  Description of Artificial Sequence: Synthetic oligonucleotide
ucucucucucucacacaca

SEQ ID NO: 786546 - RNA, 19 nt, Artificial Sequence
  Description of Artificial Sequence: Synthetic oligonucleotide
aguuacaguagcgcuguau

SEQ ID NO: 786547 - RNA, 19 nt, Artificial Sequence
  Description of Artificial Sequence: Synthetic oligonucleotide
ugucucucucucucucucu

SEQ ID NO: 786548 - RNA, 19 nt, Artificial Sequence
  Description of Artificial Sequence: Synthetic oligonucleotide
aucccaugcuaggagacca

SEQ ID NO: 786549 - RNA, 19 nt, Artificial Sequence
  Description of Artificial Sequence: Synthetic oligonucleotide
ggcauacacuaguuuuccg

SEQ ID NO: 786550 - RNA, 19 nt, Artificial Sequence
  Description of Artificial Sequence: Synthetic oligonucleotide
uagcgguaguccacagagc

SEQ ID NO: 786551 - RNA, 19 nt, Artificial Sequence
  Description of Artificial Sequence: Synthetic oligonucleotide
ucguccgagucuccugaug

SEQ ID NO: 786552 - RNA, 19 nt, Artificial Sequence
  Description of Artificial Sequence: Synthetic oligonucleotide
guuucacgugggaagacca

SEQ ID NO: 786553 - RNA, 19 nt, Artificial Sequence
  Description of Artificial Sequence: Synthetic oligonucleotide
ucucucucucucucucucu

SEQ ID NO: 786554 - RNA, 19 nt, Artificial Sequence
  Description of Artificial Sequence: Synthetic oligonucleotide
acggugggguagaagagag

SEQ ID NO: 786555 - RNA, 19 nt, Artificial Sequence
  Description of Artificial Sequence: Synthetic oligonucleotide
gaugucgggcguguccugc

SEQ ID NO: 786556 - RNA, 19 nt, Artificial Sequence
  Description of Artificial Sequence: Synthetic oligonucleotide
ucucucucucucucucaca

SEQ ID NO: 786557 - RNA, 19 nt, Artificial Sequence
  Description of Artificial Sequence: Synthetic oligonucleotide
gaacuugacgucgcugcac

SEQ ID NO: 786558 - RNA, 19 nt, Artificial Sequence
  Description of Artificial Sequence: Synthetic oligonucleotide
ucucucucucucucacaca

SEQ ID NO: 786559 - RNA, 19 nt, Artificial Sequence
  Description of Artificial Sequence: Synthetic oligonucleotide
caucgaugaggacccgaag

SEQ ID NO: 786560 - RNA, 19 nt, Artificial Sequence
  Description of Artificial Sequence: Synthetic oligonucleotide
agacgguuccacaaugcca

SEQ ID NO: 786561 - RNA, 19 nt, Artificial Sequence
  Description of Artificial Sequence: Synthetic oligonucleotide
uggacucccuguccugugu

SEQ ID NO: 786562 - RNA, 19 nt, Artificial Sequence
  Description of Artificial Sequence: Synthetic oligonucleotide
gucaucagagacgaggaua

SEQ ID NO: 786563 - RNA, 19 nt, Artificial Sequence
  Description of Artificial Sequence: Synthetic oligonucleotide
agccuagccgugccucugg

SEQ ID NO: 786564 - RNA, 19 nt, Artificial Sequence
  Description of Artificial Sequence: Synthetic oligonucleotide
ucgggcguguccugcacac

SEQ ID NO: 786565 - RNA, 19 nt, Artificial Sequence
  Description of Artificial Sequence: Synthetic oligonucleotide
cucucucucucucucucuc

SEQ ID NO: 786566 - RNA, 19 nt, Artificial Sequence
  Description of Artificial Sequence: Synthetic oligonucleotide
uagugucgcuucagcaccu

SEQ ID NO: 786567 - RNA, 19 nt, Artificial Sequence
  Description of Artificial Sequence: Synthetic oligonucleotide
ggcuuuuagacuccacauc

SEQ ID NO: 786568 - RNA, 19 nt, Artificial Sequence
  Description of Artificial Sequence: Synthetic oligonucleotide
acacuaguuuuccguggga

SEQ ID NO: 786569 - RNA, 19 nt, Artificial Sequence
  Description of Artificial Sequence: Synthetic oligonucleotide
guuguagcgguaguccaca

SEQ ID NO: 786570 - RNA, 19 nt, Artificial Sequence
  Description of Artificial Sequence: Synthetic oligonucleotide
cagauagggaaguguuuca

SEQ ID NO: 786571 - RNA, 19 nt, Artificial Sequence
  Description of Artificial Sequence: Synthetic oligonucleotide
aaaaggggccaaaguacuu

SEQ ID NO: 786572 - RNA, 19 nt, Artificial Sequence
  Description of Artificial Sequence: Synthetic oligonucleotide
cugucucucucucucucuc

SEQ ID NO: 786573 - RNA, 19 nt, Artificial Sequence
  Description of Artificial Sequence: Synthetic oligonucleotide
cgagaaugauauucgucgg

SEQ ID NO: 786574 - RNA, 19 nt, Artificial Sequence
  Description of Artificial Sequence: Synthetic oligonucleotide
ggcacugucucucucucuc

SEQ ID NO: 786575 - RNA, 19 nt, Artificial Sequence
  Description of Artificial Sequence: Synthetic oligonucleotide
ggugaccacggucauggac

SEQ ID NO: 786576 - RNA, 19 nt, Artificial Sequence
  Description of Artificial Sequence: Synthetic oligonucleotide
acacacacacacgcagaag

SEQ ID NO: 786577 - RNA, 19 nt, Artificial Sequence
  Description of Artificial Sequence: Synthetic oligonucleotide
uagcgcuguauccgagaga

SEQ ID NO: 786578 - RNA, 19 nt, Artificial Sequence
  Description of Artificial Sequence: Synthetic oligonucleotide
gcuaccgccaugaggcugg

SEQ ID NO: 786579 - RNA, 19 nt, Artificial Sequence
  Description of Artificial Sequence: Synthetic oligonucleotide
acgaugucgggcguguccu

SEQ ID NO: 786580 - RNA, 19 nt, Artificial Sequence
  Description of Artificial Sequence: Synthetic oligonucleotide
gucucucucucucucucuc

SEQ ID NO: 786581 - RNA, 19 nt, Artificial Sequence
  Description of Artificial Sequence: Synthetic oligonucleotide
auucgucggggaguugguc

SEQ ID NO: 786582 - RNA, 19 nt, Artificial Sequence
  Description of Artificial Sequence: Synthetic oligonucleotide
caacacgcccuucacccuc

SEQ ID NO: 786583 - RNA, 19 nt, Artificial Sequence
  Description of Artificial Sequence: Synthetic oligonucleotide
aagcuaccgccaugaggcu

SEQ ID NO: 786584 - RNA, 19 nt, Artificial Sequence
  Description of Artificial Sequence: Synthetic oligonucleotide
ggagggaccggaaagugca

SEQ ID NO: 786585 - RNA, 19 nt, Artificial Sequence
  Description of Artificial Sequence: Synthetic oligonucleotide
cacgcagaagccuagccgu

SEQ ID NO: 786586 - RNA, 19 nt, Artificial Sequence
  Description of Artificial Sequence: Synthetic oligonucleotide
aguuuuccgugggaauucu

SEQ ID NO: 786587 - RNA, 19 nt, Artificial Sequence
  Description of Artificial Sequence: Synthetic oligonucleotide
ccgucaguuuauuaguguc

SEQ ID NO: 786588 - RNA, 19 nt, Artificial Sequence
  Description of Artificial Sequence: Synthetic oligonucleotide
ccagucagagguguugacg

SEQ ID NO: 786589 - RNA, 19 nt, Artificial Sequence
  Description of Artificial Sequence: Synthetic oligonucleotide
ucgggcgucuugugggaca

SEQ ID NO: 786590 - RNA, 19 nt, Artificial Sequence
  Description of Artificial Sequence: Synthetic oligonucleotide
cacugucucucucucucuc

SEQ ID NO: 786591 - RNA, 19 nt, Artificial Sequence
  Description of Artificial Sequence: Synthetic oligonucleotide
ccggaaagugcacuugagc

SEQ ID NO: 786592 - RNA, 19 nt, Artificial Sequence
  Description of Artificial Sequence: Synthetic oligonucleotide
agacggugggguagaagag

SEQ ID NO: 786593 - RNA, 19 nt, Artificial Sequence
  Description of Artificial Sequence: Synthetic oligonucleotide
ugcacaccacaggaagugu

SEQ ID NO: 786594 - RNA, 19 nt, Artificial Sequence
  Description of Artificial Sequence: Synthetic oligonucleotide
ucgucggggaguuggucau

SEQ ID NO: 786595 - RNA, 19 nt, Artificial Sequence
  Description of Artificial Sequence: Synthetic oligonucleotide
agauguagacacagacggu

SEQ ID NO: 786596 - RNA, 19 nt, Artificial Sequence
  Description of Artificial Sequence: Synthetic oligonucleotide
aagccuagccgugccucug

SEQ ID NO: 786597 - RNA, 19 nt, Artificial Sequence
  Description of Artificial Sequence: Synthetic oligonucleotide
cacacacacacacgcagaa

SEQ ID NO: 786598 - RNA, 19 nt, Artificial Sequence
  Description of Artificial Sequence: Synthetic oligonucleotide
ggaaagugcacuugagcgu

SEQ ID NO: 786599 - RNA, 19 nt, Artificial Sequence
  Description of Artificial Sequence: Synthetic oligonucleotide
caguagcgcuguauccgag

SEQ ID NO: 786600 - RNA, 19 nt, Artificial Sequence
  Description of Artificial Sequence: Synthetic oligonucleotide
cgcgacacgaugucgggcg

SEQ ID NO: 786601 - RNA, 19 nt, Artificial Sequence
  Description of Artificial Sequence: Synthetic oligonucleotide
acacacacacacacgcaga

SEQ ID NO: 786602 - RNA, 19 nt, Artificial Sequence
  Description of Artificial Sequence: Synthetic oligonucleotide
ugggacagaucagcaucug

SEQ ID NO: 786603 - RNA, 19 nt, Artificial Sequence
  Description of Artificial Sequence: Synthetic oligonucleotide
gucgcaugggacagaucag

SEQ ID NO: 786604 - RNA, 19 nt, Artificial Sequence
  Description of Artificial Sequence: Synthetic oligonucleotide
ugucgggcguguccugcac

SEQ ID NO: 786605 - RNA, 19 nt, Artificial Sequence
  Description of Artificial Sequence: Synthetic oligonucleotide
ggaaguguuucacguggga

SEQ ID NO: 786606 - RNA, 19 nt, Artificial Sequence
  Description of Artificial Sequence: Synthetic oligonucleotide
agucgggcgucuuguggga

SEQ ID NO: 786607 - RNA, 19 nt, Artificial Sequence
  Description of Artificial Sequence: Synthetic oligonucleotide
aaagugcacuugagcgugu

SEQ ID NO: 786608 - RNA, 19 nt, Artificial Sequence
  Description of Artificial Sequence: Synthetic oligonucleotide
gggaaguguuucacguggg

SEQ ID NO: 786609 - RNA, 19 nt, Artificial Sequence
  Description of Artificial Sequence: Synthetic oligonucleotide
gcgauggggagcuggugag

SEQ ID NO: 786610 - RNA, 19 nt, Artificial Sequence
  Description of Artificial Sequence: Synthetic oligonucleotide
cccggaaaagcuauuuaca

SEQ ID NO: 786611 - RNA, 19 nt, Artificial Sequence
  Description of Artificial Sequence: Synthetic oligonucleotide
ucggggaguuggucaucag

SEQ ID NO: 786612 - RNA, 19 nt, Artificial Sequence
  Description of Artificial Sequence: Synthetic oligonucleotide
agcuaccgccaugaggcug

SEQ ID NO: 786613 - RNA, 19 nt, Artificial Sequence
  Description of Artificial Sequence: Synthetic oligonucleotide
uggcugcgggagauguaga

SEQ ID NO: 786614 - RNA, 19 nt, Artificial Sequence
  Description of Artificial Sequence: Synthetic oligonucleotide
ugcgucguccgagucuccu

SEQ ID NO: 786615 - RNA, 19 nt, Artificial Sequence
  Description of Artificial Sequence: Synthetic oligonucleotide
aaucguccacauggucgca

SEQ ID NO: 786616 - RNA, 19 nt, Artificial Sequence
  Description of Artificial Sequence: Synthetic oligonucleotide
acacacacacacacacaca

SEQ ID NO: 786617 - RNA, 19 nt, Artificial Sequence
  Description of Artificial Sequence: Synthetic oligonucleotide
cagucucgccacugcuggg

SEQ ID NO: 786618 - RNA, 19 nt, Artificial Sequence
  Description of Artificial Sequence: Synthetic oligonucleotide
guuuuccgugggaauucug

SEQ ID NO: 786619 - RNA, 19 nt, Artificial Sequence
  Description of Artificial Sequence: Synthetic oligonucleotide
gguguugacgagaaugaua

SEQ ID NO: 786620 - RNA, 19 nt, Artificial Sequence
  Description of Artificial Sequence: Synthetic oligonucleotide
acacacacacacacacgca

SEQ ID NO: 786621 - RNA, 19 nt, Artificial Sequence
  Description of Artificial Sequence: Synthetic oligonucleotide
gauauucgucggggaguug

SEQ ID NO: 786622 - RNA, 19 nt, Artificial Sequence
  Description of Artificial Sequence: Synthetic oligonucleotide
agggaccggaaagugcacu

SEQ ID NO: 786623 - RNA, 19 nt, Artificial Sequence
  Description of Artificial Sequence: Synthetic oligonucleotide
gcgucgucaaacguauuug

SEQ ID NO: 786624 - RNA, 19 nt, Artificial Sequence
  Description of Artificial Sequence: Synthetic oligonucleotide
auggucgcaugggacagau

SEQ ID NO: 786625 - RNA, 19 nt, Artificial Sequence
  Description of Artificial Sequence: Synthetic oligonucleotide
augucgggcguguccugca

SEQ ID NO: 786626 - RNA, 19 nt, Artificial Sequence
  Description of Artificial Sequence: Synthetic oligonucleotide
acacacacgcagaagccua

SEQ ID NO: 786627 - RNA, 19 nt, Artificial Sequence
  Description of Artificial Sequence: Synthetic oligonucleotide
cugcgugaugcgcgacacg

SEQ ID NO: 786628 - RNA, 19 nt, Artificial Sequence
  Description of Artificial Sequence: Synthetic oligonucleotide
ccacauggucgcaugggac

SEQ ID NO: 786629 - RNA, 19 nt, Artificial Sequence
  Description of Artificial Sequence: Synthetic oligonucleotide
agcugcgucgucaaacgua

SEQ ID NO: 786630 - RNA, 19 nt, Artificial Sequence
  Description of Artificial Sequence: Synthetic oligonucleotide
ggauaugguucaguuggca

SEQ ID NO: 786631 - RNA, 19 nt, Artificial Sequence
  Description of Artificial Sequence: Synthetic oligonucleotide
caguuuauuagugucgcuu

SEQ ID NO: 786632 - RNA, 19 nt, Artificial Sequence
  Description of Artificial Sequence: Synthetic oligonucleotide
ccgagucuccugauguggc

SEQ ID NO: 786633 - RNA, 19 nt, Artificial Sequence
  Description of Artificial Sequence: Synthetic oligonucleotide
ccaaggggacuucacaaga

SEQ ID NO: 786634 - RNA, 19 nt, Artificial Sequence
  Description of Artificial Sequence: Synthetic oligonucleotide
cgaggauaugguucaguug

SEQ ID NO: 786635 - RNA, 19 nt, Artificial Sequence
  Description of Artificial Sequence: Synthetic oligonucleotide
ugacgucgcugcacuccac

SEQ ID NO: 786636 - RNA, 19 nt, Artificial Sequence
  Description of Artificial Sequence: Synthetic oligonucleotide
cuaguuuuccgugggaauu

SEQ ID NO: 786637 - RNA, 19 nt, Artificial Sequence
  Description of Artificial Sequence: Synthetic oligonucleotide
gcuaggagaccaacacgcc

SEQ ID NO: 786638 - RNA, 19 nt, Artificial Sequence
  Description of Artificial Sequence: Synthetic oligonucleotide
cgugaugcgcgacacgaug

SEQ ID NO: 786639 - RNA, 19 nt, Artificial Sequence
  Description of Artificial Sequence: Synthetic oligonucleotide
gcacaccacaggaagugug

SEQ ID NO: 786640 - RNA, 19 nt, Artificial Sequence
  Description of Artificial Sequence: Synthetic oligonucleotide
auggaccaucucucuuuaa

SEQ ID NO: 786641 - RNA, 19 nt, Artificial Sequence
  Description of Artificial Sequence: Synthetic oligonucleotide
aggagaccaacacgcccuu

SEQ ID NO: 786642 - RNA, 19 nt, Artificial Sequence
  Description of Artificial Sequence: Synthetic oligonucleotide
cacgugcacaccacaggaa

SEQ ID NO: 786643 - RNA, 19 nt, Artificial Sequence
  Description of Artificial Sequence: Synthetic oligonucleotide
gggucaacgaucccaugcu

SEQ ID NO: 786644 - RNA, 19 nt, Artificial Sequence
  Description of Artificial Sequence: Synthetic oligonucleotide
ggaccggaaagugcacuug

SEQ ID NO: 786645 - RNA, 19 nt, Artificial Sequence
  Description of Artificial Sequence: Synthetic oligonucleotide
cugaagacgguuccacaau

SEQ ID NO: 786646 - RNA, 19 nt, Artificial Sequence
  Description of Artificial Sequence: Synthetic oligonucleotide
gagggaccggaaagugcac

SEQ ID NO: 786647 - RNA, 19 nt, Artificial Sequence
  Description of Artificial Sequence: Synthetic oligonucleotide
cuggcucugccccacccaa

SEQ ID NO: 786648 - RNA, 19 nt, Artificial Sequence
  Description of Artificial Sequence: Synthetic oligonucleotide
ccaugcuaggagaccaaca

SEQ ID NO: 786649 - RNA, 19 nt, Artificial Sequence
  Description of Artificial Sequence: Synthetic oligonucleotide
gcugcgucguccgagucuc

SEQ ID NO: 786650 - RNA, 19 nt, Artificial Sequence
  Description of Artificial Sequence: Synthetic oligonucleotide
gugaugcgcgacacgaugu

SEQ ID NO: 786651 - RNA, 19 nt, Artificial Sequence
  Description of Artificial Sequence: Synthetic oligonucleotide
cgaucccaugcuaggagac

SEQ ID NO: 786652 - RNA, 19 nt, Artificial Sequence
  Description of Artificial Sequence: Synthetic oligonucleotide
acgcagaagccuagccgug

SEQ ID NO: 786653 - RNA, 19 nt, Artificial Sequence
  Description of Artificial Sequence: Synthetic oligonucleotide
ggccaaaguacuucucuau

SEQ ID NO: 786654 - RNA, 19 nt, Artificial Sequence
  Description of Artificial Sequence: Synthetic oligonucleotide
uggucgcaugggacagauc

SEQ ID NO: 786655 - RNA, 19 nt, Artificial Sequence
  Description of Artificial Sequence: Synthetic oligonucleotide
gucgggcguguccugcaca

SEQ ID NO: 786656 - RNA, 19 nt, Artificial Sequence
  Description of Artificial Sequence: Synthetic oligonucleotide
ugagcgccgucaguuuauu

SEQ ID NO: 786657 - RNA, 19 nt, Artificial Sequence
  Description of Artificial Sequence: Synthetic oligonucleotide
ccggaaaagcuauuuacau

SEQ ID NO: 786658 - RNA, 19 nt, Artificial Sequence
  Description of Artificial Sequence: Synthetic oligonucleotide
ggacucccuguccuguguc

SEQ ID NO: 786659 - RNA, 19 nt, Artificial Sequence
  Description of Artificial Sequence: Synthetic oligonucleotide
cccgagauguacugcguga

SEQ ID NO: 786660 - RNA, 19 nt, Artificial Sequence
  Description of Artificial Sequence: Synthetic oligonucleotide
gcugcgggagauguagaca

SEQ ID NO: 786661 - RNA, 19 nt, Artificial Sequence
  Description of Artificial Sequence: Synthetic oligonucleotide
ccaucgaugaggacccgaa

SEQ ID NO: 786662 - RNA, 19 nt, Artificial Sequence
  Description of Artificial Sequence: Synthetic oligonucleotide
ggucaacgaucccaugcua

SEQ ID NO: 786663 - RNA, 19 nt, Artificial Sequence
  Description of Artificial Sequence: Synthetic oligonucleotide
gccgucaguuuauuagugu

SEQ ID NO: 786664 - RNA, 19 nt, Artificial Sequence
  Description of Artificial Sequence: Synthetic oligonucleotide
cgcuguauccgagagacaa

SEQ ID NO: 786665 - RNA, 19 nt, Artificial Sequence
  Description of Artificial Sequence: Synthetic oligonucleotide
gagcgccgucaguuuauua

SEQ ID NO: 786666 - RNA, 19 nt, Artificial Sequence
  Description of Artificial Sequence: Synthetic oligonucleotide
cgccgucaguuuauuagug

SEQ ID NO: 786667 - RNA, 19 nt, Artificial Sequence
  Description of Artificial Sequence: Synthetic oligonucleotide
gcuccggccacugcgaucu

SEQ ID NO: 786668 - RNA, 19 nt, Artificial Sequence
  Description of Artificial Sequence: Synthetic oligonucleotide
cccaacaaagggaaugaau

SEQ ID NO: 786669 - RNA, 19 nt, Artificial Sequence
  Description of Artificial Sequence: Synthetic oligonucleotide
gcuuagcugugcagaucag

SEQ ID NO: 786670 - RNA, 19 nt, Artificial Sequence
  Description of Artificial Sequence: Synthetic oligonucleotide
ccacccaaggggacuucac

SEQ ID NO: 786671 - RNA, 19 nt, Artificial Sequence
  Description of Artificial Sequence: Synthetic oligonucleotide
cuuggcugcgggagaugua

SEQ ID NO: 786672 - RNA, 19 nt, Artificial Sequence
  Description of Artificial Sequence: Synthetic oligonucleotide
gcgucguccgagucuccug

SEQ ID NO: 786673 - RNA, 19 nt, Artificial Sequence
  Description of Artificial Sequence: Synthetic oligonucleotide
gcggccugagcgccgucag

SEQ ID NO: 786674 - RNA, 19 nt, Artificial Sequence
  Description of Artificial Sequence: Synthetic oligonucleotide
cugcgucguccgagucucc

SEQ ID NO: 786675 - RNA, 19 nt, Artificial Sequence
  Description of Artificial Sequence: Synthetic oligonucleotide
ccacugcgaucuucacagg

SEQ ID NO: 786676 - RNA, 19 nt, Artificial Sequence
  Description of Artificial Sequence: Synthetic oligonucleotide
gcgccgucaguuuauuagu

SEQ ID NO: 786677 - RNA, 19 nt, Artificial Sequence
  Description of Artificial Sequence: Synthetic oligonucleotide
aucagacggcugaugccuu

SEQ ID NO: 786678 - RNA, 19 nt, Artificial Sequence
  Description of Artificial Sequence: Synthetic oligonucleotide
cccaugcuaggagaccaac

SEQ ID NO: 786679 - RNA, 19 nt, Artificial Sequence
  Description of Artificial Sequence: Synthetic oligonucleotide
gucgggcgucuugugggac

SEQ ID NO: 786680 - RNA, 19 nt, Artificial Sequence
  Description of Artificial Sequence: Synthetic oligonucleotide
aggauggcgcugagguaau

SEQ ID NO: 786681 - RNA, 19 nt, Artificial Sequence
  Description of Artificial Sequence: Synthetic oligonucleotide
cugagcgccgucaguuuau

SEQ ID NO: 786682 - RNA, 19 nt, Artificial Sequence
  Description of Artificial Sequence: Synthetic oligonucleotide
gcugcgucgucaaacguau

SEQ ID NO: 786683 - RNA, 19 nt, Artificial Sequence
  Description of Artificial Sequence: Synthetic oligonucleotide
gugggcggccugagcgccg

SEQ ID NO: 786684 - RNA, 19 nt, Artificial Sequence
  Description of Artificial Sequence: Synthetic oligonucleotide
gccagucgggcgucuugug

SEQ ID NO: 786685 - RNA, 19 nt, Artificial Sequence
  Description of Artificial Sequence: Synthetic oligonucleotide
ccgaugcccuggcugggag

SEQ ID NO: 786686 - RNA, 19 nt, Artificial Sequence
  Description of Artificial Sequence: Synthetic oligonucleotide
cgaagagccgcaggauggc

SEQ ID NO: 786687 - RNA, 19 nt, Artificial Sequence
  Description of Artificial Sequence: Synthetic oligonucleotide
ggcugcgucguccgagucu

SEQ ID NO: 786688 - RNA, 19 nt, Artificial Sequence
  Description of Artificial Sequence: Synthetic oligonucleotide
gccaucgaugaggacccga

SEQ ID NO: 786689 - RNA, 19 nt, Artificial Sequence
  Description of Artificial Sequence: Synthetic oligonucleotide
gcgucuugugggacagcug

SEQ ID NO: 786690 - RNA, 19 nt, Artificial Sequence
  Description of Artificial Sequence: Synthetic oligonucleotide
gccucugcgauggggagcu

SEQ ID NO: 786691 - RNA, 19 nt, Artificial Sequence
  Description of Artificial Sequence: Synthetic oligonucleotide
gggaccggaaagugcacuu

SEQ ID NO: 786692 - RNA, 19 nt, Artificial Sequence
  Description of Artificial Sequence: Synthetic oligonucleotide
gcgcgacacgaugucgggc

SEQ ID NO: 786693 - RNA, 19 nt, Artificial Sequence
  Description of Artificial Sequence: Synthetic oligonucleotide
gccgugccucuggaacugg

SEQ ID NO: 786694 - RNA, 19 nt, Artificial Sequence
  Description of Artificial Sequence: Synthetic oligonucleotide
cgucguccgagucuccuga

SEQ ID NO: 786695 - RNA, 19 nt, Artificial Sequence
  Description of Artificial Sequence: Synthetic oligonucleotide
ggagaccaacacgcccuuc

SEQ ID NO: 786696 - RNA, 19 nt, Artificial Sequence
  Description of Artificial Sequence: Synthetic oligonucleotide
gcacugucucucucucucu

SEQ ID NO: 786697 - RNA, 19 nt, Artificial Sequence
  Description of Artificial Sequence: Synthetic oligonucleotide
cagcugcgucgucaaacgu

SEQ ID NO: 786698 - RNA, 19 nt, Artificial Sequence
  Description of Artificial Sequence: Synthetic oligonucleotide
gccuagccgugccucugga

SEQ ID NO: 786699 - RNA, 19 nt, Artificial Sequence
  Description of Artificial Sequence: Synthetic oligonucleotide
gucguccgagucuccugau

SEQ ID NO: 786700 - RNA, 19 nt, Artificial Sequence
  Description of Artificial Sequence: Synthetic oligonucleotide
cgggcgucuugugggacag

SEQ ID NO: 786701 - RNA, 19 nt, Artificial Sequence
  Description of Artificial Sequence: Synthetic oligonucleotide
gcucagcgccgaugcccug

SEQ ID NO: 786702 - RNA, 19 nt, Artificial Sequence
  Description of Artificial Sequence: Synthetic oligonucleotide
gcuguauccgagagacaau

SEQ ID NO: 786703 - RNA, 19 nt, Artificial Sequence
  Description of Artificial Sequence: Synthetic oligonucleotide
cacagacggugggguagaa

SEQ ID NO: 786704 - RNA, 19 nt, Artificial Sequence
  Description of Artificial Sequence: Synthetic oligonucleotide
gccaagccagucgggcguc

SEQ ID NO: 786705 - RNA, 19 nt, Artificial Sequence
  Description of Artificial Sequence: Synthetic oligonucleotide
ccgugccucuggaacugga

SEQ ID NO: 786706 - RNA, 19 nt, Artificial Sequence
  Description of Artificial Sequence: Synthetic oligonucleotide
ccacgccaucgaugaggac

SEQ ID NO: 786707 - RNA, 19 nt, Artificial Sequence
  Description of Artificial Sequence: Synthetic oligonucleotide
cgacacgaugucgggcgug

SEQ ID NO: 786708 - RNA, 19 nt, Artificial Sequence
  Description of Artificial Sequence: Synthetic oligonucleotide
cuaccgccaugaggcugga

SEQ ID NO: 786709 - RNA, 19 nt, Artificial Sequence
  Description of Artificial Sequence: Synthetic oligonucleotide
gcgacacgaugucgggcgu

SEQ ID NO: 786710 - RNA, 19 nt, Artificial Sequence
  Description of Artificial Sequence: Synthetic oligonucleotide
gggcgucuugugggacagc

SEQ ID NO: 786711 - RNA, 19 nt, Artificial Sequence
  Description of Artificial Sequence: Synthetic oligonucleotide
cgaugcccuggcugggaga

SEQ ID NO: 786712 - RNA, 19 nt, Artificial Sequence
  Description of Artificial Sequence: Synthetic oligonucleotide
gcgcuguauccgagagaca

SEQ ID NO: 786713 - RNA, 19 nt, Artificial Sequence
  Description of Artificial Sequence: Synthetic oligonucleotide
cugcgucgucaaacguauu

SEQ ID NO: 786714 - RNA, 19 nt, Artificial Sequence
  Description of Artificial Sequence: Synthetic oligonucleotide
gcgugaugcgcgacacgau

SEQ ID NO: 786715 - RNA, 19 nt, Artificial Sequence
  Description of Artificial Sequence: Synthetic oligonucleotide
cuccggccacugcgaucuu

SEQ ID NO: 786716 - RNA, 19 nt, Artificial Sequence
  Description of Artificial Sequence: Synthetic oligonucleotide
cgggcguguccugcacacu

SEQ ID NO: 786717 - RNA, 19 nt, Artificial Sequence
  Description of Artificial Sequence: Synthetic oligonucleotide
ucuaagucugcaaacaugg

SEQ ID NO: 786718 - RNA, 19 nt, Artificial Sequence
  Description of Artificial Sequence: Synthetic oligonucleotide
auugaccugccauugaccc

SEQ ID NO: 786719 - RNA, 19 nt, Artificial Sequence
  Description of Artificial Sequence: Synthetic oligonucleotide
acuuggacaugguagacac

SEQ ID NO: 786720 - RNA, 19 nt, Artificial Sequence
  Description of Artificial Sequence: Synthetic oligonucleotide
uaaauauaggcugccaagg

SEQ ID NO: 786721 - RNA, 19 nt, Artificial Sequence
  Description of Artificial Sequence: Synthetic oligonucleotide
aauauaggcugccaaggug

SEQ ID NO: 786722 - RNA, 19 nt, Artificial Sequence
  Description of Artificial Sequence: Synthetic oligonucleotide
ugcgacagcucauaaaagg

SEQ ID NO: 786723 - RNA, 19 nt, Artificial Sequence
  Description of Artificial Sequence: Synthetic oligonucleotide
aauacugcggugugcauca

SEQ ID NO: 786724 - RNA, 19 nt, Artificial Sequence
  Description of Artificial Sequence: Synthetic oligonucleotide
ucugcgacagcucauaaaa

SEQ ID NO: 786725 - RNA, 19 nt, Artificial Sequence
  Description of Artificial Sequence: Synthetic oligonucleotide
ucauaaaaggcccguaaga

SEQ ID NO: 786726 - RNA, 19 nt, Artificial Sequence
  Description of Artificial Sequence: Synthetic oligonucleotide
gaucaggcgguauucauag

SEQ ID NO: 786727 - RNA, 19 nt, Artificial Sequence
  Description of Artificial Sequence: Synthetic oligonucleotide
uugaggcuaagccagaaac

SEQ ID NO: 786728 - RNA, 19 nt, Artificial Sequence
  Description of Artificial Sequence: Synthetic oligonucleotide
ugcucacucgguauaaggg

SEQ ID NO: 786729 - RNA, 19 nt, Artificial Sequence
  Description of Artificial Sequence: Synthetic oligonucleotide
auaccuggacaauauagag

SEQ ID NO: 786730 - RNA, 19 nt, Artificial Sequence
  Description of Artificial Sequence: Synthetic oligonucleotide
aaauauaggcugccaaggu

SEQ ID NO: 786731 - RNA, 19 nt, Artificial Sequence
  Description of Artificial Sequence: Synthetic oligonucleotide
ucggauuccagaauccgcc

SEQ ID NO: 786732 - RNA, 19 nt, Artificial Sequence
  Description of Artificial Sequence: Synthetic oligonucleotide
ucauuguaguacuuggaca

SEQ ID NO: 786733 - RNA, 19 nt, Artificial Sequence
  Description of Artificial Sequence: Synthetic oligonucleotide
cucaaugggaaagacgucg

SEQ ID NO: 786734 - RNA, 19 nt, Artificial Sequence
  Description of Artificial Sequence: Synthetic oligonucleotide
agaaacaaauaaauauagg

SEQ ID NO: 786735 - RNA, 19 nt, Artificial Sequence
  Description of Artificial Sequence: Synthetic oligonucleotide
ugugcauguggacucgggg

SEQ ID NO: 786736 - RNA, 19 nt, Artificial Sequence
  Description of Artificial Sequence: Synthetic oligonucleotide
cauaaaaggcccguaagag

SEQ ID NO: 786737 - RNA, 19 nt, Artificial Sequence
  Description of Artificial Sequence: Synthetic oligonucleotide
aaacuucucaauacugcgg

SEQ ID NO: 786738 - RNA, 19 nt, Artificial Sequence
  Description of Artificial Sequence: Synthetic oligonucleotide
guacucacaggacaggucc

SEQ ID NO: 786739 - RNA, 19 nt, Artificial Sequence
  Description of Artificial Sequence: Synthetic oligonucleotide
uaauggauggucaccuccc

SEQ ID NO: 786740 - RNA, 19 nt, Artificial Sequence
  Description of Artificial Sequence: Synthetic oligonucleotide
uccgucaucccuuuguaca

SEQ ID NO: 786741 - RNA, 19 nt, Artificial Sequence
  Description of Artificial Sequence: Synthetic oligonucleotide
uuuaccagcccaucauugc

SEQ ID NO: 786742 - RNA, 19 nt, Artificial Sequence
  Description of Artificial Sequence: Synthetic oligonucleotide
guuuucaguagccgaaugc

SEQ ID NO: 786743 - RNA, 19 nt, Artificial Sequence
  Description of Artificial Sequence: Synthetic oligonucleotide
uggacaauauagagacagg

SEQ ID NO: 786744 - RNA, 19 nt, Artificial Sequence
  Description of Artificial Sequence: Synthetic oligonucleotide
uaagucugcaaacaugguu

SEQ ID NO: 786745 - RNA, 19 nt, Artificial Sequence
  Description of Artificial Sequence: Synthetic oligonucleotide
aggcgguauucauaguugc

SEQ ID NO: 786746 - RNA, 19 nt, Artificial Sequence
  Description of Artificial Sequence: Synthetic oligonucleotide
gguauaagggcucuccuag

SEQ ID NO: 786747 - RNA, 19 nt, Artificial Sequence
  Description of Artificial Sequence: Synthetic oligonucleotide
uucuugauggugagacgcg

SEQ ID NO: 786748 - RNA, 19 nt, Artificial Sequence
  Description of Artificial Sequence: Synthetic oligonucleotide
guaauggauggucaccucc

SEQ ID NO: 786749 - RNA, 19 nt, Artificial Sequence
  Description of Artificial Sequence: Synthetic oligonucleotide
caauacaggcccagcaucc

SEQ ID NO: 786750 - RNA, 19 nt, Artificial Sequence
  Description of Artificial Sequence: Synthetic oligonucleotide
uugagguacguguucaggu

SEQ ID NO: 786751 - RNA, 19 nt, Artificial Sequence
  Description of Artificial Sequence: Synthetic oligonucleotide
agguacucgaacuucacau

SEQ ID NO: 786752 - RNA, 19 nt, Artificial Sequence
  Description of Artificial Sequence: Synthetic oligonucleotide
aguggccccacgugcaucc

SEQ ID NO: 786753 - RNA, 19 nt, Artificial Sequence
  Description of Artificial Sequence: Synthetic oligonucleotide
uaccuggacaauauagaga

SEQ ID NO: 786754 - RNA, 19 nt, Artificial Sequence
  Description of Artificial Sequence: Synthetic oligonucleotide
uuucaguagccgaaugcca

SEQ ID NO: 786755 - RNA, 19 nt, Artificial Sequence
  Description of Artificial Sequence: Synthetic oligonucleotide
uggugagacgcguaucagg

SEQ ID NO: 786756 - RNA, 19 nt, Artificial Sequence
  Description of Artificial Sequence: Synthetic oligonucleotide
agagagucggucccacagc

SEQ ID NO: 786757 - RNA, 19 nt, Artificial Sequence
  Description of Artificial Sequence: Synthetic oligonucleotide
ucauaguugccugugcuca

SEQ ID NO: 786758 - RNA, 19 nt, Artificial Sequence
  Description of Artificial Sequence: Synthetic oligonucleotide
ggacaauauagagacaggg

SEQ ID NO: 786759 - RNA, 19 nt, Artificial Sequence
  Description of Artificial Sequence: Synthetic oligonucleotide
cuccuucaccuuuagacag

SEQ ID NO: 786760 - RNA, 19 nt, Artificial Sequence
  Description of Artificial Sequence: Synthetic oligonucleotide
uucaauacaggcccagcau

SEQ ID NO: 786761 - RNA, 19 nt, Artificial Sequence
  Description of Artificial Sequence: Synthetic oligonucleotide
gugggaaugaaggacgggg

SEQ ID NO: 786762 - RNA, 19 nt, Artificial Sequence
  Description of Artificial Sequence: Synthetic oligonucleotide
ugagacgcguaucagggau

SEQ ID NO: 786763 - RNA, 19 nt, Artificial Sequence
  Description of Artificial Sequence: Synthetic oligonucleotide
ucaggcgguauucauaguu

SEQ ID NO: 786764 - RNA, 19 nt, Artificial Sequence
  Description of Artificial Sequence: Synthetic oligonucleotide
acccaaucuacagagaaca

SEQ ID NO: 786765 - RNA, 19 nt, Artificial Sequence
  Description of Artificial Sequence: Synthetic oligonucleotide
cucgaugucauagucuaag

SEQ ID NO: 786766 - RNA, 19 nt, Artificial Sequence
  Description of Artificial Sequence: Synthetic oligonucleotide
uugguauguuccgucaucc

SEQ ID NO: 786767 - RNA, 19 nt, Artificial Sequence
  Description of Artificial Sequence: Synthetic oligonucleotide
gagagucggucccacagcc

SEQ ID NO: 786768 - RNA, 19 nt, Artificial Sequence
  Description of Artificial Sequence: Synthetic oligonucleotide
ugcgcaucugggagaagcg

SEQ ID NO: 786769 - RNA, 19 nt, Artificial Sequence
  Description of Artificial Sequence: Synthetic oligonucleotide
uacguguucagguccguca

SEQ ID NO: 786770 - RNA, 19 nt, Artificial Sequence
  Description of Artificial Sequence: Synthetic oligonucleotide
cucuccuagggcaaugcag

SEQ ID NO: 786771 - RNA, 19 nt, Artificial Sequence
  Description of Artificial Sequence: Synthetic oligonucleotide
acuacacgccuucacuguc

SEQ ID NO: 786772 - RNA, 19 nt, Artificial Sequence
  Description of Artificial Sequence: Synthetic oligonucleotide
ucccguacccaaucuacag

SEQ ID NO: 786773 - RNA, 19 nt, Artificial Sequence
  Description of Artificial Sequence: Synthetic oligonucleotide
ugaacccaccugccgaucc

SEQ ID NO: 786774 - RNA, 19 nt, Artificial Sequence
  Description of Artificial Sequence: Synthetic oligonucleotide
ccaucauugcacaggaugg

SEQ ID NO: 786775 - RNA, 19 nt, Artificial Sequence
  Description of Artificial Sequence: Synthetic oligonucleotide
aaagacgucggcaucccga

SEQ ID NO: 786776 - RNA, 19 nt, Artificial Sequence
  Description of Artificial Sequence: Synthetic oligonucleotide
guaagagauucuugguaug

SEQ ID NO: 786777 - RNA, 19 nt, Artificial Sequence
  Description of Artificial Sequence: Synthetic oligonucleotide
uuauccuccucgaugucau

SEQ ID NO: 786778 - RNA, 19 nt, Artificial Sequence
  Description of Artificial Sequence: Synthetic oligonucleotide
gugcucacucgguauaagg

SEQ ID NO: 786779 - RNA, 19 nt, Artificial Sequence
  Description of Artificial Sequence: Synthetic oligonucleotide
ggugagacgcguaucaggg

SEQ ID NO: 786780 - RNA, 19 nt, Artificial Sequence
  Description of Artificial Sequence: Synthetic oligonucleotide
ugcaaacaugguuccaaga

SEQ ID NO: 786781 - RNA, 19 nt, Artificial Sequence
  Description of Artificial Sequence: Synthetic oligonucleotide
ucaccgagagagucggucc

SEQ ID NO: 786782 - RNA, 19 nt, Artificial Sequence
  Description of Artificial Sequence: Synthetic oligonucleotide
uucuugguauguuccguca

SEQ ID NO: 786783 - RNA, 19 nt, Artificial Sequence
  Description of Artificial Sequence: Synthetic oligonucleotide
accucuacuuugguuuucc

SEQ ID NO: 786784 - RNA, 19 nt, Artificial Sequence
  Description of Artificial Sequence: Synthetic oligonucleotide
ugcaggcuuggcaccaccg

SEQ ID NO: 786785 - RNA, 19 nt, Artificial Sequence
  Description of Artificial Sequence: Synthetic oligonucleotide
guauaagggcucuccuagg

SEQ ID NO: 786786 - RNA, 19 nt, Artificial Sequence
  Description of Artificial Sequence: Synthetic oligonucleotide
cucggauuccagaauccgc

SEQ ID NO: 786787 - RNA, 19 nt, Artificial Sequence
  Description of Artificial Sequence: Synthetic oligonucleotide
uuuagacaguaggacaggu

SEQ ID NO: 786788 - RNA, 19 nt, Artificial Sequence
  Description of Artificial Sequence: Synthetic oligonucleotide
aaucuacagagaacacguc

SEQ ID NO: 786789 - RNA, 19 nt, Artificial Sequence
  Description of Artificial Sequence: Synthetic oligonucleotide
aagaguuggggccgacgug

SEQ ID NO: 786790 - RNA, 19 nt, Artificial Sequence
  Description of Artificial Sequence: Synthetic oligonucleotide
ugagguacguguucagguc

SEQ ID NO: 786791 - RNA, 19 nt, Artificial Sequence
  Description of Artificial Sequence: Synthetic oligonucleotide
aguggccccgccccguucc

SEQ ID NO: 786792 - RNA, 19 nt, Artificial Sequence
  Description of Artificial Sequence: Synthetic oligonucleotide
uacccaaucuacagagaac

SEQ ID NO: 786793 - RNA, 19 nt, Artificial Sequence
  Description of Artificial Sequence: Synthetic oligonucleotide
agcuguauuccucgucguc

SEQ ID NO: 786794 - RNA, 19 nt, Artificial Sequence
  Description of Artificial Sequence: Synthetic oligonucleotide
guacccaaucuacagagaa

SEQ ID NO: 786795 - RNA, 19 nt, Artificial Sequence
  Description of Artificial Sequence: Synthetic oligonucleotide
uauucaauacaggcccagc

SEQ ID NO: 786796 - RNA, 19 nt, Artificial Sequence
  Description of Artificial Sequence: Synthetic oligonucleotide
gauugaccugccauugacc

SEQ ID NO: 786797 - RNA, 19 nt, Artificial Sequence
  Description of Artificial Sequence: Synthetic oligonucleotide
aucgguuugaugguuuuca

SEQ ID NO: 786798 - RNA, 19 nt, Artificial Sequence
  Description of Artificial Sequence: Synthetic oligonucleotide
uugauugaccugccauuga

SEQ ID NO: 786799 - RNA, 19 nt, Artificial Sequence
  Description of Artificial Sequence: Synthetic oligonucleotide
ucgcucaccgagagagucg

SEQ ID NO: 786800 - RNA, 19 nt, Artificial Sequence
  Description of Artificial Sequence: Synthetic oligonucleotide
aggggaauggggaacuggg

SEQ ID NO: 786801 - RNA, 19 nt, Artificial Sequence
  Description of Artificial Sequence: Synthetic oligonucleotide
cucgaacuucacauccagg

SEQ ID NO: 786802 - RNA, 19 nt, Artificial Sequence
  Description of Artificial Sequence: Synthetic oligonucleotide
aagacgucggcaucccgaa

SEQ ID NO: 786803 - RNA, 19 nt, Artificial Sequence
  Description of Artificial Sequence: Synthetic oligonucleotide
ucgaugucauagucuaagu

SEQ ID NO: 786804 - RNA, 19 nt, Artificial Sequence
  Description of Artificial Sequence: Synthetic oligonucleotide
accccggugaucucaucac

SEQ ID NO: 786805 - RNA, 19 nt, Artificial Sequence
  Description of Artificial Sequence: Synthetic oligonucleotide
acguguucagguccgucag

SEQ ID NO: 786806 - RNA, 19 nt, Artificial Sequence
  Description of Artificial Sequence: Synthetic oligonucleotide
gaaagacgucggcaucccg

SEQ ID NO: 786807 - RNA, 19 nt, Artificial Sequence
  Description of Artificial Sequence: Synthetic oligonucleotide
guauucauaguugccugug

SEQ ID NO: 786808 - RNA, 19 nt, Artificial Sequence
  Description of Artificial Sequence: Synthetic oligonucleotide
caggcgguauucauaguug

SEQ ID NO: 786809 - RNA, 19 nt, Artificial Sequence
  Description of Artificial Sequence: Synthetic oligonucleotide
cauuguaguacuuggacau

SEQ ID NO: 786810 - RNA, 19 nt, Artificial Sequence
  Description of Artificial Sequence: Synthetic oligonucleotide
ucgguauaagggcucuccu

SEQ ID NO: 786811 - RNA, 19 nt, Artificial Sequence
  Description of Artificial Sequence: Synthetic oligonucleotide
cucgguauaagggcucucc

SEQ ID NO: 786812 - RNA, 19 nt, Artificial Sequence
  Description of Artificial Sequence: Synthetic oligonucleotide
cuacacgccuucacugucc

SEQ ID NO: 786813 - RNA, 19 nt, Artificial Sequence
  Description of Artificial Sequence: Synthetic oligonucleotide
ucgcuuuaccagcccauca

SEQ ID NO: 786814 - RNA, 19 nt, Artificial Sequence
  Description of Artificial Sequence: Synthetic oligonucleotide
agacgcguaucagggaugg

SEQ ID NO: 786815 - RNA, 19 nt, Artificial Sequence
  Description of Artificial Sequence: Synthetic oligonucleotide
cuugguauguuccgucauc

SEQ ID NO: 786816 - RNA, 19 nt, Artificial Sequence
  Description of Artificial Sequence: Synthetic oligonucleotide
aguggggaugccuaauuua

SEQ ID NO: 786817 - RNA, 19 nt, Artificial Sequence
  Description of Artificial Sequence: Synthetic oligonucleotide
uaugcgccacuacacgccu

SEQ ID NO: 786818 - RNA, 19 nt, Artificial Sequence
  Description of Artificial Sequence: Synthetic oligonucleotide
ccaaucuacagagaacacg

SEQ ID NO: 786819 - RNA, 19 nt, Artificial Sequence
  Description of Artificial Sequence: Synthetic oligonucleotide
accugaacccaccugccga

SEQ ID NO: 786820 - RNA, 19 nt, Artificial Sequence
  Description of Artificial Sequence: Synthetic oligonucleotide
uccgcccuuguccaugggc

SEQ ID NO: 786821 - RNA, 19 nt, Artificial Sequence
  Description of Artificial Sequence: Synthetic oligonucleotide
acgaaggccucacuugcug

SEQ ID NO: 786822 - RNA, 19 nt, Artificial Sequence
  Description of Artificial Sequence: Synthetic oligonucleotide
agagacagggacaguacug

SEQ ID NO: 786823 - RNA, 19 nt, Artificial Sequence
  Description of Artificial Sequence: Synthetic oligonucleotide
uuccagaauccgcccugcg

SEQ ID NO: 786824 - RNA, 19 nt, Artificial Sequence
  Description of Artificial Sequence: Synthetic oligonucleotide
aguagccgaaugccaaacu

SEQ ID NO: 786825 - RNA, 19 nt, Artificial Sequence
  Description of Artificial Sequence: Synthetic oligonucleotide
ugguauguuccgucauccc

SEQ ID NO: 786826 - RNA, 19 nt, Artificial Sequence
  Description of Artificial Sequence: Synthetic oligonucleotide
caaugcagcuguauuccuc

SEQ ID NO: 786827 - RNA, 19 nt, Artificial Sequence
  Description of Artificial Sequence: Synthetic oligonucleotide
caccgcguaacagucauug

SEQ ID NO: 786828 - RNA, 19 nt, Artificial Sequence
  Description of Artificial Sequence: Synthetic oligonucleotide
caucauugcacaggauggc

SEQ ID NO: 786829 - RNA, 19 nt, Artificial Sequence
  Description of Artificial Sequence: Synthetic oligonucleotide
gcucacucgguauaagggc

SEQ ID NO: 786830 - RNA, 19 nt, Artificial Sequence
  Description of Artificial Sequence: Synthetic oligonucleotide
gagguacucacaggacagg

SEQ ID NO: 786831 - RNA, 19 nt, Artificial Sequence
  Description of Artificial Sequence: Synthetic oligonucleotide
uccuucaccuuuagacagu

SEQ ID NO: 786832 - RNA, 19 nt, Artificial Sequence
  Description of Artificial Sequence: Synthetic oligonucleotide
gcacucaggagucacacca

SEQ ID NO: 786833 - RNA, 19 nt, Artificial Sequence
  Description of Artificial Sequence: Synthetic oligonucleotide
agaagcgggcucgagccuc

SEQ ID NO: 786834 - RNA, 19 nt, Artificial Sequence
  Description of Artificial Sequence: Synthetic oligonucleotide
auaggcugccaaggugugc

SEQ ID NO: 786835 - RNA, 19 nt, Artificial Sequence
  Description of Artificial Sequence: Synthetic oligonucleotide
acgcguaucagggauggcu

SEQ ID NO: 786836 - RNA, 19 nt, Artificial Sequence
  Description of Artificial Sequence: Synthetic oligonucleotide
gacagguacucgaacuuca

SEQ ID NO: 786837 - RNA, 19 nt, Artificial Sequence
  Description of Artificial Sequence: Synthetic oligonucleotide
agcaccgcguaacagucau

SEQ ID NO: 786838 - RNA, 19 nt, Artificial Sequence
  Description of Artificial Sequence: Synthetic oligonucleotide
cugcgacagcucauaaaag

SEQ ID NO: 786839 - RNA, 19 nt, Artificial Sequence
  Description of Artificial Sequence: Synthetic oligonucleotide
ucacucgguauaagggcuc

SEQ ID NO: 786840 - RNA, 19 nt, Artificial Sequence
  Description of Artificial Sequence: Synthetic oligonucleotide
ccguacccaaucuacagag

SEQ ID NO: 786841 - RNA, 19 nt, Artificial Sequence
  Description of Artificial Sequence: Synthetic oligonucleotide
cauaggcuagaguggugug

SEQ ID NO: 786842 - RNA, 19 nt, Artificial Sequence
  Description of Artificial Sequence: Synthetic oligonucleotide
caauacugcggugugcauc

SEQ ID NO: 786843 - RNA, 19 nt, Artificial Sequence
  Description of Artificial Sequence: Synthetic oligonucleotide
cacuguccuacaguggccc

SEQ ID NO: 786844 - RNA, 19 nt, Artificial Sequence
  Description of Artificial Sequence: Synthetic oligonucleotide
guagacacgaagcgcugca

SEQ ID NO: 786845 - RNA, 19 nt, Artificial Sequence
  Description of Artificial Sequence: Synthetic oligonucleotide
ugugcucacucgguauaag

SEQ ID NO: 786846 - RNA, 19 nt, Artificial Sequence
  Description of Artificial Sequence: Synthetic oligonucleotide
ugcgccacuacacgccuuc

SEQ ID NO: 786847 - RNA, 19 nt, Artificial Sequence
  Description of Artificial Sequence: Synthetic oligonucleotide
agccgaaugccaaacuucu

SEQ ID NO: 786848 - RNA, 19 nt, Artificial Sequence
  Description of Artificial Sequence: Synthetic oligonucleotide
cuuccgcccuuguccaugg

SEQ ID NO: 786849 - RNA, 19 nt, Artificial Sequence
  Description of Artificial Sequence: Synthetic oligonucleotide
ggcucgagccuccuggcgg

SEQ ID NO: 786850 - RNA, 19 nt, Artificial Sequence
  Description of Artificial Sequence: Synthetic oligonucleotide
agggcgaugggcucggauu

SEQ ID NO: 786851 - RNA, 19 nt, Artificial Sequence
  Description of Artificial Sequence: Synthetic oligonucleotide
gguuuucaguagccgaaug

SEQ ID NO: 786852 - RNA, 19 nt, Artificial Sequence
  Description of Artificial Sequence: Synthetic oligonucleotide
caccgagagagucgguccc

SEQ ID NO: 786853 - RNA, 19 nt, Artificial Sequence
  Description of Artificial Sequence: Synthetic oligonucleotide
agguacguguucagguccg

SEQ ID NO: 786854 - RNA, 19 nt, Artificial Sequence
  Description of Artificial Sequence: Synthetic oligonucleotide
caccugaacccaccugccg

SEQ ID NO: 786855 - RNA, 19 nt, Artificial Sequence
  Description of Artificial Sequence: Synthetic oligonucleotide
uccgucagcaucgguuuga

SEQ ID NO: 786856 - RNA, 19 nt, Artificial Sequence
  Description of Artificial Sequence: Synthetic oligonucleotide
aauccgcccugcggucucc

SEQ ID NO: 786857 - RNA, 19 nt, Artificial Sequence
  Description of Artificial Sequence: Synthetic oligonucleotide
gcgacagcucauaaaaggc

SEQ ID NO: 786858 - RNA, 19 nt, Artificial Sequence
  Description of Artificial Sequence: Synthetic oligonucleotide
agguacucacaggacaggu

SEQ ID NO: 786859 - RNA, 19 nt, Artificial Sequence
  Description of Artificial Sequence: Synthetic oligonucleotide
uguccuacaguggccccgc

SEQ ID NO: 786860 - RNA, 19 nt, Artificial Sequence
  Description of Artificial Sequence: Synthetic oligonucleotide
cuaacugcccaggcucggg

SEQ ID NO: 786861 - RNA, 19 nt, Artificial Sequence
  Description of Artificial Sequence: Synthetic oligonucleotide
uauguuccgucaucccuuu

SEQ ID NO: 786862 - RNA, 19 nt, Artificial Sequence
  Description of Artificial Sequence: Synthetic oligonucleotide
accgagguacucacaggac

SEQ ID NO: 786863 - RNA, 19 nt, Artificial Sequence
  Description of Artificial Sequence: Synthetic oligonucleotide
acaguggggaugccuaauu

SEQ ID NO: 786864 - RNA, 19 nt, Artificial Sequence
  Description of Artificial Sequence: Synthetic oligonucleotide
cugugcgaggacagaggag

SEQ ID NO: 786865 - RNA, 19 nt, Artificial Sequence
  Description of Artificial Sequence: Synthetic oligonucleotide
gggaaagacgucggcaucc

SEQ ID NO: 786866 - RNA, 19 nt, Artificial Sequence
  Description of Artificial Sequence: Synthetic oligonucleotide
cuguccuacaguggccccg

SEQ ID NO: 786867 - RNA, 19 nt, Artificial Sequence
  Description of Artificial Sequence: Synthetic oligonucleotide
cagggcaucagcuguaccu

SEQ ID NO: 786868 - RNA, 19 nt, Artificial Sequence
  Description of Artificial Sequence: Synthetic oligonucleotide
ucaauacugcggugugcau

SEQ ID NO: 786869 - RNA, 19 nt, Artificial Sequence
  Description of Artificial Sequence: Synthetic oligonucleotide
gguauguuccgucaucccu

SEQ ID NO: 786870 - RNA, 19 nt, Artificial Sequence
  Description of Artificial Sequence: Synthetic oligonucleotide
gagacgcguaucagggaug

SEQ ID NO: 786871 - RNA, 19 nt, Artificial Sequence
  Description of Artificial Sequence: Synthetic oligonucleotide
ggcgccccgagccagcagg

SEQ ID NO: 786872 - RNA, 19 nt, Artificial Sequence
  Description of Artificial Sequence: Synthetic oligonucleotide
cucacucgguauaagggcu

SEQ ID NO: 786873 - RNA, 19 nt, Artificial Sequence
  Description of Artificial Sequence: Synthetic oligonucleotide
ggguuugguacaggggacg

SEQ ID NO: 786874 - RNA, 19 nt, Artificial Sequence
  Description of Artificial Sequence: Synthetic oligonucleotide
ccacuacacgccuucacug

SEQ ID NO: 786875 - RNA, 19 nt, Artificial Sequence
  Description of Artificial Sequence: Synthetic oligonucleotide
accagccgguguuugacuu

SEQ ID NO: 786876 - RNA, 19 nt, Artificial Sequence
  Description of Artificial Sequence: Synthetic oligonucleotide
cacggugccauccaaggcu

SEQ ID NO: 786877 - RNA, 19 nt, Artificial Sequence
  Description of Artificial Sequence: Synthetic oligonucleotide
gucgcucaccgagagaguc

SEQ ID NO: 786878 - RNA, 19 nt, Artificial Sequence
  Description of Artificial Sequence: Synthetic oligonucleotide
gucggucccacagccaggc

SEQ ID NO: 786879 - RNA, 19 nt, Artificial Sequence
  Description of Artificial Sequence: Synthetic oligonucleotide
cuuugauugaccugccauu

SEQ ID NO: 786880 - RNA, 19 nt, Artificial Sequence
  Description of Artificial Sequence: Synthetic oligonucleotide
uugaccccggugaucucau

SEQ ID NO: 786881 - RNA, 19 nt, Artificial Sequence
  Description of Artificial Sequence: Synthetic oligonucleotide
guacuuggacaugguagac

SEQ ID NO: 786882 - RNA, 19 nt, Artificial Sequence
  Description of Artificial Sequence: Synthetic oligonucleotide
ugcggucuccagacccuug

SEQ ID NO: 786883 - RNA, 19 nt, Artificial Sequence
  Description of Artificial Sequence: Synthetic oligonucleotide
guaccugaacucauguucu

SEQ ID NO: 786884 - RNA, 19 nt, Artificial Sequence
  Description of Artificial Sequence: Synthetic oligonucleotide
ucccuagcugccccauccu

SEQ ID NO: 786885 - RNA, 19 nt, Artificial Sequence
  Description of Artificial Sequence: Synthetic oligonucleotide
caguagccgaaugccaaac

SEQ ID NO: 786886 - RNA, 19 nt, Artificial Sequence
  Description of Artificial Sequence: Synthetic oligonucleotide
acgcgguccucccgcugcc

SEQ ID NO: 786887 - RNA, 19 nt, Artificial Sequence
  Description of Artificial Sequence: Synthetic oligonucleotide
gccgacguggcuaacugcc

SEQ ID NO: 786888 - RNA, 19 nt, Artificial Sequence
  Description of Artificial Sequence: Synthetic oligonucleotide
gcggucuccagacccuugg

SEQ ID NO: 786889 - RNA, 19 nt, Artificial Sequence
  Description of Artificial Sequence: Synthetic oligonucleotide
cuucucaauacugcggugu

SEQ ID NO: 786890 - RNA, 19 nt, Artificial Sequence
  Description of Artificial Sequence: Synthetic oligonucleotide
gcucauaaaaggcccguaa

SEQ ID NO: 786891 - RNA, 19 nt, Artificial Sequence
  Description of Artificial Sequence: Synthetic oligonucleotide
aaggcccggugcgucugcg

SEQ ID NO: 786892 - RNA, 19 nt, Artificial Sequence
  Description of Artificial Sequence: Synthetic oligonucleotide
aacagucauuguaguacuu

SEQ ID NO: 786893 - RNA, 19 nt, Artificial Sequence
  Description of Artificial Sequence: Synthetic oligonucleotide
caagaguuggggccgacgu

SEQ ID NO: 786894 - RNA, 19 nt, Artificial Sequence
  Description of Artificial Sequence: Synthetic oligonucleotide
guucccgacgcgguccucc

SEQ ID NO: 786895 - RNA, 19 nt, Artificial Sequence
  Description of Artificial Sequence: Synthetic oligonucleotide
accgcguaacagucauugu

SEQ ID NO: 786896 - RNA, 19 nt, Artificial Sequence
  Description of Artificial Sequence: Synthetic oligonucleotide
agguccgucagcaucgguu

SEQ ID NO: 786897 - RNA, 19 nt, Artificial Sequence
  Description of Artificial Sequence: Synthetic oligonucleotide
ccgucaucccuuuguacag

SEQ ID NO: 786898 - RNA, 19 nt, Artificial Sequence
  Description of Artificial Sequence: Synthetic oligonucleotide
guauuucuugauggugaga

SEQ ID NO: 786899 - RNA, 19 nt, Artificial Sequence
  Description of Artificial Sequence: Synthetic oligonucleotide
gguagacacgaagcgcugc

SEQ ID NO: 786900 - RNA, 19 nt, Artificial Sequence
  Description of Artificial Sequence: Synthetic oligonucleotide
gucugcgacagcucauaaa

SEQ ID NO: 786901 - RNA, 19 nt, Artificial Sequence
  Description of Artificial Sequence: Synthetic oligonucleotide
cucccguacccaaucuaca

SEQ ID NO: 786902 - RNA, 19 nt, Artificial Sequence
  Description of Artificial Sequence: Synthetic oligonucleotide
gaauccgcccugcggucuc

SEQ ID NO: 786903 - RNA, 19 nt, Artificial Sequence
  Description of Artificial Sequence: Synthetic oligonucleotide
agaauccgcccugcggucu

SEQ ID NO: 786904 - RNA, 19 nt, Artificial Sequence
  Description of Artificial Sequence: Synthetic oligonucleotide
aggguccgccugcagcuug

SEQ ID NO: 786905 - RNA, 19 nt, Artificial Sequence
  Description of Artificial Sequence: Synthetic oligonucleotide
aggcucgggaggggaaugg

SEQ ID NO: 786906 - RNA, 19 nt, Artificial Sequence
  Description of Artificial Sequence: Synthetic oligonucleotide
ucccgacgcgguccucccg

SEQ ID NO: 786907 - RNA, 19 nt, Artificial Sequence
  Description of Artificial Sequence: Synthetic oligonucleotide
guacaggggacgaccccag

SEQ ID NO: 786908 - RNA, 19 nt, Artificial Sequence
  Description of Artificial Sequence: Synthetic oligonucleotide
gcuagaguggugugugcca

SEQ ID NO: 786909 - RNA, 19 nt, Artificial Sequence
  Description of Artificial Sequence: Synthetic oligonucleotide
ggugggaaugaaggacggg

SEQ ID NO: 786910 - RNA, 19 nt, Artificial Sequence
  Description of Artificial Sequence: Synthetic oligonucleotide
ggcuaacugcccaggcucg

SEQ ID NO: 786911 - RNA, 19 nt, Artificial Sequence
  Description of Artificial Sequence: Synthetic oligonucleotide
ggcgguauucauaguugcc

SEQ ID NO: 786912 - RNA, 19 nt, Artificial Sequence
  Description of Artificial Sequence: Synthetic oligonucleotide
acucgguauaagggcucuc

SEQ ID NO: 786913 - RNA, 19 nt, Artificial Sequence
  Description of Artificial Sequence: Synthetic oligonucleotide
ucggucgcucaccgagaga

SEQ ID NO: 786914 - RNA, 19 nt, Artificial Sequence
  Description of Artificial Sequence: Synthetic oligonucleotide
gaagcgggcucgagccucc

SEQ ID NO: 786915 - RNA, 19 nt, Artificial Sequence
  Description of Artificial Sequence: Synthetic oligonucleotide
uuccgcccuuguccauggg

SEQ ID NO: 786916 - RNA, 19 nt, Artificial Sequence
  Description of Artificial Sequence: Synthetic oligonucleotide
ggaaagacgucggcauccc

SEQ ID NO: 786917 - RNA, 19 nt, Artificial Sequence
  Description of Artificial Sequence: Synthetic oligonucleotide
caucgguuugaugguuuuc

SEQ ID NO: 786918 - RNA, 19 nt, Artificial Sequence
  Description of Artificial Sequence: Synthetic oligonucleotide
gugagacgcguaucaggga

SEQ ID NO: 786919 - RNA, 19 nt, Artificial Sequence
  Description of Artificial Sequence: Synthetic oligonucleotide
cugaucccaaucagguucu

SEQ ID NO: 786920 - RNA, 19 nt, Artificial Sequence
  Description of Artificial Sequence: Synthetic oligonucleotide
aagcaccgcguaacaguca

SEQ ID NO: 786921 - RNA, 19 nt, Artificial Sequence
  Description of Artificial Sequence: Synthetic oligonucleotide
cagucgcuuuaccagccca

SEQ ID NO: 786922 - RNA, 19 nt, Artificial Sequence
  Description of Artificial Sequence: Synthetic oligonucleotide
cuaagucugcaaacauggu

SEQ ID NO: 786923 - RNA, 19 nt, Artificial Sequence
  Description of Artificial Sequence: Synthetic oligonucleotide
ggacacuucccuagcugcc

SEQ ID NO: 786924 - RNA, 19 nt, Artificial Sequence
  Description of Artificial Sequence: Synthetic oligonucleotide
guggggaugccuaauuuau

SEQ ID NO: 786925 - RNA, 19 nt, Artificial Sequence
  Description of Artificial Sequence: Synthetic oligonucleotide
ccuuggacacuucccuagc

SEQ ID NO: 786926 - RNA, 19 nt, Artificial Sequence
  Description of Artificial Sequence: Synthetic oligonucleotide
agucgcuuuaccagcccau

SEQ ID NO: 786927 - RNA, 19 nt, Artificial Sequence
  Description of Artificial Sequence: Synthetic oligonucleotide
ugcggcucccguacccaau

SEQ ID NO: 786928 - RNA, 19 nt, Artificial Sequence
  Description of Artificial Sequence: Synthetic oligonucleotide
gggcgaugggcucggauuc

SEQ ID NO: 786929 - RNA, 19 nt, Artificial Sequence
  Description of Artificial Sequence: Synthetic oligonucleotide
aggcccguaagagauucuu

SEQ ID NO: 786930 - RNA, 19 nt, Artificial Sequence
  Description of Artificial Sequence: Synthetic oligonucleotide
auguuccgucaucccuuug

SEQ ID NO: 786931 - RNA, 19 nt, Artificial Sequence
  Description of Artificial Sequence: Synthetic oligonucleotide
cuccuggcggcagcgcagg

SEQ ID NO: 786932 - RNA, 19 nt, Artificial Sequence
  Description of Artificial Sequence: Synthetic oligonucleotide
ccucuucggucgcucaccg

SEQ ID NO: 786933 - RNA, 19 nt, Artificial Sequence
  Description of Artificial Sequence: Synthetic oligonucleotide
gucgcuuuaccagcccauc

SEQ ID NO: 786934 - RNA, 19 nt, Artificial Sequence
  Description of Artificial Sequence: Synthetic oligonucleotide
ggcucggauuccagaaucc

SEQ ID NO: 786935 - RNA, 19 nt, Artificial Sequence
  Description of Artificial Sequence: Synthetic oligonucleotide
guauguuccgucaucccuu

SEQ ID NO: 786936 - RNA, 19 nt, Artificial Sequence
  Description of Artificial Sequence: Synthetic oligonucleotide
gggccgacguggcuaacug

SEQ ID NO: 786937 - RNA, 19 nt, Artificial Sequence
  Description of Artificial Sequence: Synthetic oligonucleotide
cacuacacgccuucacugu

SEQ ID NO: 786938 - RNA, 19 nt, Artificial Sequence
  Description of Artificial Sequence: Synthetic oligonucleotide
agcucauaaaaggcccgua

SEQ ID NO: 786939 - RNA, 19 nt, Artificial Sequence
  Description of Artificial Sequence: Synthetic oligonucleotide
caaaggcccggugcgucug

SEQ ID NO: 786940 - RNA, 19 nt, Artificial Sequence
  Description of Artificial Sequence: Synthetic oligonucleotide
gcuguaccugaacucaugu

SEQ ID NO: 786941 - RNA, 19 nt, Artificial Sequence
  Description of Artificial Sequence: Synthetic oligonucleotide
ccgagguacucacaggaca

SEQ ID NO: 786942 - RNA, 19 nt, Artificial Sequence
  Description of Artificial Sequence: Synthetic oligonucleotide
cuuggacacuucccuagcu

SEQ ID NO: 786943 - RNA, 19 nt, Artificial Sequence
  Description of Artificial Sequence: Synthetic oligonucleotide
agcaucgguuugaugguuu

SEQ ID NO: 786944 - RNA, 19 nt, Artificial Sequence
  Description of Artificial Sequence: Synthetic oligonucleotide
gcgcaucugggagaagcgg

SEQ ID NO: 786945 - RNA, 19 nt, Artificial Sequence
  Description of Artificial Sequence: Synthetic oligonucleotide
gcaccaccgagguacucac

SEQ ID NO: 786946 - RNA, 19 nt, Artificial Sequence
  Description of Artificial Sequence: Synthetic oligonucleotide
aaggcccguaagagauucu

SEQ ID NO: 786947 - RNA, 19 nt, Artificial Sequence
  Description of Artificial Sequence: Synthetic oligonucleotide
gcuaacugcccaggcucgg

SEQ ID NO: 786948 - RNA, 19 nt, Artificial Sequence
  Description of Artificial Sequence: Synthetic oligonucleotide
aggccuuuaugcgccacua

SEQ ID NO: 786949 - RNA, 19 nt, Artificial Sequence
  Description of Artificial Sequence: Synthetic oligonucleotide
accgagagagucgguccca

SEQ ID NO: 786950 - RNA, 19 nt, Artificial Sequence
  Description of Artificial Sequence: Synthetic oligonucleotide
cuucccuagcugccccauc

SEQ ID NO: 786951 - RNA, 19 nt, Artificial Sequence
  Description of Artificial Sequence: Synthetic oligonucleotide
gguuugguacaggggacga

SEQ ID NO: 786952 - RNA, 19 nt, Artificial Sequence
  Description of Artificial Sequence: Synthetic oligonucleotide
agcaggccuuuaugcgcca

SEQ ID NO: 786953 - RNA, 19 nt, Artificial Sequence
  Description of Artificial Sequence: Synthetic oligonucleotide
guacguguucagguccguc

SEQ ID NO: 786954 - RNA, 19 nt, Artificial Sequence
  Description of Artificial Sequence: Synthetic oligonucleotide
gggcucgagccuccuggcg

SEQ ID NO: 786955 - RNA, 19 nt, Artificial Sequence
  Description of Artificial Sequence: Synthetic oligonucleotide
cguaagagauucuugguau

SEQ ID NO: 786956 - RNA, 19 nt, Artificial Sequence
  Description of Artificial Sequence: Synthetic oligonucleotide
ccguaagagauucuuggua

SEQ ID NO: 786957 - RNA, 19 nt, Artificial Sequence
  Description of Artificial Sequence: Synthetic oligonucleotide
ccaagaguuggggccgacg

SEQ ID NO: 786958 - RNA, 19 nt, Artificial Sequence
  Description of Artificial Sequence: Synthetic oligonucleotide
gccacuacacgccuucacu

SEQ ID NO: 786959 - RNA, 19 nt, Artificial Sequence
  Description of Artificial Sequence: Synthetic oligonucleotide
ggccuuuaugcgccacuac

SEQ ID NO: 786960 - RNA, 19 nt, Artificial Sequence
  Description of Artificial Sequence: Synthetic oligonucleotide
ggccgacguggcuaacugc

SEQ ID NO: 786961 - RNA, 19 nt, Artificial Sequence
  Description of Artificial Sequence: Synthetic oligonucleotide
cauugaccccggugaucuc

SEQ ID NO: 786962 - RNA, 19 nt, Artificial Sequence
  Description of Artificial Sequence: Synthetic oligonucleotide
gacgcguaucagggauggc

SEQ ID NO: 786963 - RNA, 19 nt, Artificial Sequence
  Description of Artificial Sequence: Synthetic oligonucleotide
uccaagaguuggggccgac

SEQ ID NO: 786964 - RNA, 19 nt, Artificial Sequence
  Description of Artificial Sequence: Synthetic oligonucleotide
ccucaaugggaaagacguc

SEQ ID NO: 786965 - RNA, 19 nt, Artificial Sequence
  Description of Artificial Sequence: Synthetic oligonucleotide
ggcucgggaggggaauggg

SEQ ID NO: 786966 - RNA, 19 nt, Artificial Sequence
  Description of Artificial Sequence: Synthetic oligonucleotide
gcaggcuuggcaccaccga

SEQ ID NO: 786967 - RNA, 19 nt, Artificial Sequence
  Description of Artificial Sequence: Synthetic oligonucleotide
ggaucaggcgguauucaua

SEQ ID NO: 786968 - RNA, 19 nt, Artificial Sequence
  Description of Artificial Sequence: Synthetic oligonucleotide
gggacgaccccaggccagg

SEQ ID NO: 786969 - RNA, 19 nt, Artificial Sequence
  Description of Artificial Sequence: Synthetic oligonucleotide
ccgacguggcuaacugccc

SEQ ID NO: 786970 - RNA, 19 nt, Artificial Sequence
  Description of Artificial Sequence: Synthetic oligonucleotide
uccuggcggcagcgcagga

SEQ ID NO: 786971 - RNA, 19 nt, Artificial Sequence
  Description of Artificial Sequence: Synthetic oligonucleotide
ccgcguaacagucauugua

SEQ ID NO: 786972 - RNA, 19 nt, Artificial Sequence
  Description of Artificial Sequence: Synthetic oligonucleotide
gcuuccgcccuuguccaug

SEQ ID NO: 786973 - RNA, 19 nt, Artificial Sequence
  Description of Artificial Sequence: Synthetic oligonucleotide
gagaagcgggcucgagccu

SEQ ID NO: 786974 - RNA, 19 nt, Artificial Sequence
  Description of Artificial Sequence: Synthetic oligonucleotide
caccucuacuuugguuuuc

SEQ ID NO: 786975 - RNA, 19 nt, Artificial Sequence
  Description of Artificial Sequence: Synthetic oligonucleotide
aggcaggcgccccgagcca

SEQ ID NO: 786976 - RNA, 19 nt, Artificial Sequence
  Description of Artificial Sequence: Synthetic oligonucleotide
uggccccacgugcauccuu

SEQ ID NO: 786977 - RNA, 19 nt, Artificial Sequence
  Description of Artificial Sequence: Synthetic oligonucleotide
gcucuccuagggcaaugca

SEQ ID NO: 786978 - RNA, 19 nt, Artificial Sequence
  Description of Artificial Sequence: Synthetic oligonucleotide
auacugcggugugcaucag

SEQ ID NO: 786979 - RNA, 19 nt, Artificial Sequence
  Description of Artificial Sequence: Synthetic oligonucleotide
cugaacccaccugccgauc

SEQ ID NO: 786980 - RNA, 19 nt, Artificial Sequence
  Description of Artificial Sequence: Synthetic oligonucleotide
cccggugcgucugcgacag

SEQ ID NO: 786981 - RNA, 19 nt, Artificial Sequence
  Description of Artificial Sequence: Synthetic oligonucleotide
cugugcucacucgguauaa

SEQ ID NO: 786982 - RNA, 19 nt, Artificial Sequence
  Description of Artificial Sequence: Synthetic oligonucleotide
agacccuugggagccucuu

SEQ ID NO: 786983 - RNA, 19 nt, Artificial Sequence
  Description of Artificial Sequence: Synthetic oligonucleotide
cuccuagggcaaugcagcu

SEQ ID NO: 786984 - RNA, 19 nt, Artificial Sequence
  Description of Artificial Sequence: Synthetic oligonucleotide
gugcgaggacagaggagca

SEQ ID NO: 786985 - RNA, 19 nt, Artificial Sequence
  Description of Artificial Sequence: Synthetic oligonucleotide
guaucagggauggcuuuau

SEQ ID NO: 786986 - RNA, 19 nt, Artificial Sequence
  Description of Artificial Sequence: Synthetic oligonucleotide
gguccgucagcaucgguuu

SEQ ID NO: 786987 - RNA, 19 nt, Artificial Sequence
  Description of Artificial Sequence: Synthetic oligonucleotide
aggcccggugcgucugcga

SEQ ID NO: 786988 - RNA, 19 nt, Artificial Sequence
  Description of Artificial Sequence: Synthetic oligonucleotide
ggggacgaccccaggccag

SEQ ID NO: 786989 - RNA, 19 nt, Artificial Sequence
  Description of Artificial Sequence: Synthetic oligonucleotide
cccguacccaaucuacaga

SEQ ID NO: 786990 - RNA, 19 nt, Artificial Sequence
  Description of Artificial Sequence: Synthetic oligonucleotide
ccggccugguacacuggcc

SEQ ID NO: 786991 - RNA, 19 nt, Artificial Sequence
  Description of Artificial Sequence: Synthetic oligonucleotide
cacgaaggccucacuugcu

SEQ ID NO: 786992 - RNA, 19 nt, Artificial Sequence
  Description of Artificial Sequence: Synthetic oligonucleotide
cucuucggucgcucaccga

SEQ ID NO: 786993 - RNA, 19 nt, Artificial Sequence
  Description of Artificial Sequence: Synthetic oligonucleotide
guccuacaguggccccgcc

SEQ ID NO: 786994 - RNA, 19 nt, Artificial Sequence
  Description of Artificial Sequence: Synthetic oligonucleotide
ugcccugcuuaggguccgc

SEQ ID NO: 786995 - RNA, 19 nt, Artificial Sequence
  Description of Artificial Sequence: Synthetic oligonucleotide
gcggcucccguacccaauc

SEQ ID NO: 786996 - RNA, 19 nt, Artificial Sequence
  Description of Artificial Sequence: Synthetic oligonucleotide
ggugcgucugcgacagcuc

SEQ ID NO: 786997 - RNA, 19 nt, Artificial Sequence
  Description of Artificial Sequence: Synthetic oligonucleotide
cgaagcaccgcguaacagu

SEQ ID NO: 786998 - RNA, 19 nt, Artificial Sequence
  Description of Artificial Sequence: Synthetic oligonucleotide
caguggggaugccuaauuu

SEQ ID NO: 786999 - RNA, 19 nt, Artificial Sequence
  Description of Artificial Sequence: Synthetic oligonucleotide
ccauaggcuagaguggugu

SEQ ID NO: 787000 - RNA, 19 nt, Artificial Sequence
  Description of Artificial Sequence: Synthetic oligonucleotide
gccauaggcuagaguggug

SEQ ID NO: 787001 - RNA, 19 nt, Artificial Sequence
  Description of Artificial Sequence: Synthetic oligonucleotide
caccaccgagguacucaca

SEQ ID NO: 787002 - RNA, 19 nt, Artificial Sequence
  Description of Artificial Sequence: Synthetic oligonucleotide
cccuagcugccccauccuc

SEQ ID NO: 787003 - RNA, 19 nt, Artificial Sequence
  Description of Artificial Sequence: Synthetic oligonucleotide
cagugcguuccagcuccuc

SEQ ID NO: 787004 - RNA, 19 nt, Artificial Sequence
  Description of Artificial Sequence: Synthetic oligonucleotide
cgucaucccuuuguacagc

SEQ ID NO: 787005 - RNA, 19 nt, Artificial Sequence
  Description of Artificial Sequence: Synthetic oligonucleotide
cccguaagagauucuuggu

SEQ ID NO: 787006 - RNA, 19 nt, Artificial Sequence
  Description of Artificial Sequence: Synthetic oligonucleotide
cuagggcaaugcagcugua

SEQ ID NO: 787007 - RNA, 19 nt, Artificial Sequence
  Description of Artificial Sequence: Synthetic oligonucleotide
cacucgguauaagggcucu

SEQ ID NO: 787008 - RNA, 19 nt, Artificial Sequence
  Description of Artificial Sequence: Synthetic oligonucleotide
caguggccccgccccguuc

SEQ ID NO: 787009 - RNA, 19 nt, Artificial Sequence
  Description of Artificial Sequence: Synthetic oligonucleotide
cugcggcucccguacccaa

SEQ ID NO: 787010 - RNA, 19 nt, Artificial Sequence
  Description of Artificial Sequence: Synthetic oligonucleotide
cguacccaaucuacagaga

SEQ ID NO: 787011 - RNA, 19 nt, Artificial Sequence
  Description of Artificial Sequence: Synthetic oligonucleotide
gccuggguucacugugcga

SEQ ID NO: 787012 - RNA, 19 nt, Artificial Sequence
  Description of Artificial Sequence: Synthetic oligonucleotide
agccgguguuugacuuucu

SEQ ID NO: 787013 - RNA, 19 nt, Artificial Sequence
  Description of Artificial Sequence: Synthetic oligonucleotide
gggcucuccuagggcaaug

SEQ ID NO: 787014 - RNA, 19 nt, Artificial Sequence
  Description of Artificial Sequence: Synthetic oligonucleotide
cgguauaagggcucuccua

SEQ ID NO: 787015 - RNA, 19 nt, Artificial Sequence
  Description of Artificial Sequence: Synthetic oligonucleotide
cgccacuacacgccuucac

SEQ ID NO: 787016 - RNA, 19 nt, Artificial Sequence
  Description of Artificial Sequence: Synthetic oligonucleotide
ccgagagagucggucccac

SEQ ID NO: 787017 - RNA, 19 nt, Artificial Sequence
  Description of Artificial Sequence: Synthetic oligonucleotide
ccuugcgcaucugggagaa

SEQ ID NO: 787018 - RNA, 19 nt, Artificial Sequence
  Description of Artificial Sequence: Synthetic oligonucleotide
gcaucgguuugaugguuuu

SEQ ID NO: 787019 - RNA, 19 nt, Artificial Sequence
  Description of Artificial Sequence: Synthetic oligonucleotide
cgacguggcuaacugccca

SEQ ID NO: 787020 - RNA, 19 nt, Artificial Sequence
  Description of Artificial Sequence: Synthetic oligonucleotide
cgggcucgagccuccuggc

SEQ ID NO: 787021 - RNA, 19 nt, Artificial Sequence
  Description of Artificial Sequence: Synthetic oligonucleotide
cgguuugaugguuuucagu

SEQ ID NO: 787022 - RNA, 19 nt, Artificial Sequence
  Description of Artificial Sequence: Synthetic oligonucleotide
cacaguggggaugccuaau

SEQ ID NO: 787023 - RNA, 19 nt, Artificial Sequence
  Description of Artificial Sequence: Synthetic oligonucleotide
cagacccuugggagccucu

SEQ ID NO: 787024 - RNA, 19 nt, Artificial Sequence
  Description of Artificial Sequence: Synthetic oligonucleotide
gcccugcuuaggguccgcc

SEQ ID NO: 787025 - RNA, 19 nt, Artificial Sequence
  Description of Artificial Sequence: Synthetic oligonucleotide
ccuugaggcuaagccagaa

SEQ ID NO: 787026 - RNA, 19 nt, Artificial Sequence
  Description of Artificial Sequence: Synthetic oligonucleotide
gcgucugcgacagcucaua

SEQ ID NO: 787027 - RNA, 19 nt, Artificial Sequence
  Description of Artificial Sequence: Synthetic oligonucleotide
cccuugaggcuaagccaga

SEQ ID NO: 787028 - RNA, 19 nt, Artificial Sequence
  Description of Artificial Sequence: Synthetic oligonucleotide
uggggccgacguggcuaac

SEQ ID NO: 787029 - RNA, 19 nt, Artificial Sequence
  Description of Artificial Sequence: Synthetic oligonucleotide
cagggcgaugggcucggau

SEQ ID NO: 787030 - RNA, 19 nt, Artificial Sequence
  Description of Artificial Sequence: Synthetic oligonucleotide
gcguaucagggauggcuuu

SEQ ID NO: 787031 - RNA, 19 nt, Artificial Sequence
  Description of Artificial Sequence: Synthetic oligonucleotide
augcgccacuacacgccuu

SEQ ID NO: 787032 - RNA, 19 nt, Artificial Sequence
  Description of Artificial Sequence: Synthetic oligonucleotide
ccaaaggcccggugcgucu

SEQ ID NO: 787033 - RNA, 19 nt, Artificial Sequence
  Description of Artificial Sequence: Synthetic oligonucleotide
gguacguguucagguccgu

SEQ ID NO: 787034 - RNA, 19 nt, Artificial Sequence
  Description of Artificial Sequence: Synthetic oligonucleotide
cguaucagggauggcuuua

SEQ ID NO: 787035 - RNA, 19 nt, Artificial Sequence
  Description of Artificial Sequence: Synthetic oligonucleotide
cgagagagucggucccaca

SEQ ID NO: 787036 - RNA, 19 nt, Artificial Sequence
  Description of Artificial Sequence: Synthetic oligonucleotide
gcgccccgagccagcaggc

SEQ ID NO: 787037 - RNA, 19 nt, Artificial Sequence
  Description of Artificial Sequence: Synthetic oligonucleotide
ggggccgacguggcuaacu

SEQ ID NO: 787038 - RNA, 19 nt, Artificial Sequence
  Description of Artificial Sequence: Synthetic oligonucleotide
cagcaucgguuugaugguu

SEQ ID NO: 787039 - RNA, 19 nt, Artificial Sequence
  Description of Artificial Sequence: Synthetic oligonucleotide
cgcguaucagggauggcuu

SEQ ID NO: 787040 - RNA, 19 nt, Artificial Sequence
  Description of Artificial Sequence: Synthetic oligonucleotide
gcgguccucccgcugcccu

SEQ ID NO: 787041 - RNA, 19 nt, Artificial Sequence
  Description of Artificial Sequence: Synthetic oligonucleotide
ccaccucuacuuugguuuu

SEQ ID NO: 787042 - RNA, 19 nt, Artificial Sequence
  Description of Artificial Sequence: Synthetic oligonucleotide
cgucugcgacagcucauaa

SEQ ID NO: 787043 - RNA, 19 nt, Artificial Sequence
  Description of Artificial Sequence: Synthetic oligonucleotide
cggugcgucugcgacagcu

SEQ ID NO: 787044 - RNA, 19 nt, Artificial Sequence
  Description of Artificial Sequence: Synthetic oligonucleotide
ggguccgccugcagcuugu

SEQ ID NO: 787045 - RNA, 19 nt, Artificial Sequence
  Description of Artificial Sequence: Synthetic oligonucleotide
guggccccacgugcauccu

SEQ ID NO: 787046 - RNA, 19 nt, Artificial Sequence
  Description of Artificial Sequence: Synthetic oligonucleotide
ccagccgguguuugacuuu

SEQ ID NO: 787047 - RNA, 19 nt, Artificial Sequence
  Description of Artificial Sequence: Synthetic oligonucleotide
ccgccccguucccgacgcg

SEQ ID NO: 787048 - RNA, 19 nt, Artificial Sequence
  Description of Artificial Sequence: Synthetic oligonucleotide
ggggccggccugguacacu

SEQ ID NO: 787049 - RNA, 19 nt, Artificial Sequence
  Description of Artificial Sequence: Synthetic oligonucleotide
ccggugcgucugcgacagc

SEQ ID NO: 787050 - RNA, 19 nt, Artificial Sequence
  Description of Artificial Sequence: Synthetic oligonucleotide
ccgucagcaucgguuugau

SEQ ID NO: 787051 - RNA, 19 nt, Artificial Sequence
  Description of Artificial Sequence: Synthetic oligonucleotide
gcaccgcguaacagucauu

SEQ ID NO: 787052 - RNA, 19 nt, Artificial Sequence
  Description of Artificial Sequence: Synthetic oligonucleotide
cguucccgacgcgguccuc

SEQ ID NO: 787053 - RNA, 19 nt, Artificial Sequence
  Description of Artificial Sequence: Synthetic oligonucleotide
uacuagaugaauuuaaggg

SEQ ID NO: 787054 - RNA, 19 nt, Artificial Sequence
  Description of Artificial Sequence: Synthetic oligonucleotide
aaagaguuaaggcaaauug

SEQ ID NO: 787055 - RNA, 19 nt, Artificial Sequence
  Description of Artificial Sequence: Synthetic oligonucleotide
aaauccguuauguagagca

SEQ ID NO: 787056 - RNA, 19 nt, Artificial Sequence
  Description of Artificial Sequence: Synthetic oligonucleotide
uucauuauaaauaacguuu

SEQ ID NO: 787057 - RNA, 19 nt, Artificial Sequence
  Description of Artificial Sequence: Synthetic oligonucleotide
uuggaauucauagaaaagg

SEQ ID NO: 787058 - RNA, 19 nt, Artificial Sequence
  Description of Artificial Sequence: Synthetic oligonucleotide
uugacuaccuuuuaaaagc

SEQ ID NO: 787059 - RNA, 19 nt, Artificial Sequence
  Description of Artificial Sequence: Synthetic oligonucleotide
aacacugaguuacagcgac

SEQ ID NO: 787060 - RNA, 19 nt, Artificial Sequence
  Description of Artificial Sequence: Synthetic oligonucleotide
uggguugaaagguauaugg

SEQ ID NO: 787061 - RNA, 19 nt, Artificial Sequence
  Description of Artificial Sequence: Synthetic oligonucleotide
aauagaccagcccauuugg

SEQ ID NO: 787062 - RNA, 19 nt, Artificial Sequence
  Description of Artificial Sequence: Synthetic oligonucleotide
auuaaaaugaccaauuaca

SEQ ID NO: 787063 - RNA, 19 nt, Artificial Sequence
  Description of Artificial Sequence: Synthetic oligonucleotide
gacacuucacacuacgucg

SEQ ID NO: 787064 - RNA, 19 nt, Artificial Sequence
  Description of Artificial Sequence: Synthetic oligonucleotide
accuuauagaacuuauagc

SEQ ID NO: 787065 - RNA, 19 nt, Artificial Sequence
  Description of Artificial Sequence: Synthetic oligonucleotide
aaggauaagacacuucaca

SEQ ID NO: 787066 - RNA, 19 nt, Artificial Sequence
  Description of Artificial Sequence: Synthetic oligonucleotide
uuaugcaccuuauagaacu

SEQ ID NO: 787067 - RNA, 19 nt, Artificial Sequence
  Description of Artificial Sequence: Synthetic oligonucleotide
uaaugguucuguaggagcg

SEQ ID NO: 787068 - RNA, 19 nt, Artificial Sequence
  Description of Artificial Sequence: Synthetic oligonucleotide
gguaaaauccguuauguag

SEQ ID NO: 787069 - RNA, 19 nt, Artificial Sequence
  Description of Artificial Sequence: Synthetic oligonucleotide
aggauaagacacuucacac

SEQ ID NO: 787070 - RNA, 19 nt, Artificial Sequence
  Description of Artificial Sequence: Synthetic oligonucleotide
uuaguuugaacuaacuuua

SEQ ID NO: 787071 - RNA, 19 nt, Artificial Sequence
  Description of Artificial Sequence: Synthetic oligonucleotide
acuagaugaauuuaagggu

SEQ ID NO: 787072 - RNA, 19 nt, Artificial Sequence
  Description of Artificial Sequence: Synthetic oligonucleotide
uacuuauuggguugaaagg

SEQ ID NO: 787073 - RNA, 19 nt, Artificial Sequence
  Description of Artificial Sequence: Synthetic oligonucleotide
acuggaaucacgcaggacu

SEQ ID NO: 787074 - RNA, 19 nt, Artificial Sequence
  Description of Artificial Sequence: Synthetic oligonucleotide
uggaauucauagaaaagga

SEQ ID NO: 787075 - RNA, 19 nt, Artificial Sequence
  Description of Artificial Sequence: Synthetic oligonucleotide
aguuugacugaucauucgg

SEQ ID NO: 787076 - RNA, 19 nt, Artificial Sequence
  Description of Artificial Sequence: Synthetic oligonucleotide
ugaguuacagcgacacucg

SEQ ID NO: 787077 - RNA, 19 nt, Artificial Sequence
  Description of Artificial Sequence: Synthetic oligonucleotide
uacaaggcguaauagacca

SEQ ID NO: 787078 - RNA, 19 nt, Artificial Sequence
  Description of Artificial Sequence: Synthetic oligonucleotide
uuugcaucauuauauuuga

SEQ ID NO: 787079 - RNA, 19 nt, Artificial Sequence
  Description of Artificial Sequence: Synthetic oligonucleotide
cuacuagaugaauuuaagg

SEQ ID NO: 787080 - RNA, 19 nt, Artificial Sequence
  Description of Artificial Sequence: Synthetic oligonucleotide
auggucauuagaugucucc

SEQ ID NO: 787081 - RNA, 19 nt, Artificial Sequence
  Description of Artificial Sequence: Synthetic oligonucleotide
gaaagguauauggagaaug

SEQ ID NO: 787082 - RNA, 19 nt, Artificial Sequence
  Description of Artificial Sequence: Synthetic oligonucleotide
aauauaggguguaagagaa

SEQ ID NO: 787083 - RNA, 19 nt, Artificial Sequence
  Description of Artificial Sequence: Synthetic oligonucleotide
uacagcgacacucguacgg

SEQ ID NO: 787084 - RNA, 19 nt, Artificial Sequence
  Description of Artificial Sequence: Synthetic oligonucleotide
uaauagaccagcccauuug

SEQ ID NO: 787085 - RNA, 19 nt, Artificial Sequence
  Description of Artificial Sequence: Synthetic oligonucleotide
ugaggcugcauccaagaag

SEQ ID NO: 787086 - RNA, 19 nt, Artificial Sequence
  Description of Artificial Sequence: Synthetic oligonucleotide
aaguuugacugaucauucg

SEQ ID NO: 787087 - RNA, 19 nt, Artificial Sequence
  Description of Artificial Sequence: Synthetic oligonucleotide
ugacugaucauucgguuug

SEQ ID NO: 787088 - RNA, 19 nt, Artificial Sequence
  Description of Artificial Sequence: Synthetic oligonucleotide
agacacuucacacuacguc

SEQ ID NO: 787089 - RNA, 19 nt, Artificial Sequence
  Description of Artificial Sequence: Synthetic oligonucleotide
uuuuaguugauuucauuau

SEQ ID NO: 787090 - RNA, 19 nt, Artificial Sequence
  Description of Artificial Sequence: Synthetic oligonucleotide
ucacgcaggacucuuguag

SEQ ID NO: 787091 - RNA, 19 nt, Artificial Sequence
  Description of Artificial Sequence: Synthetic oligonucleotide
aguuaaggcaaauuggaau

SEQ ID NO: 787092 - RNA, 19 nt, Artificial Sequence
  Description of Artificial Sequence: Synthetic oligonucleotide
aggguuugagcauauuuuc

SEQ ID NO: 787093 - RNA, 19 nt, Artificial Sequence
  Description of Artificial Sequence: Synthetic oligonucleotide
uguaagaacucccuucggu

SEQ ID NO: 787094 - RNA, 19 nt, Artificial Sequence
  Description of Artificial Sequence: Synthetic oligonucleotide
cuucacacuacgucgaaag

SEQ ID NO: 787095 - RNA, 19 nt, Artificial Sequence
  Description of Artificial Sequence: Synthetic oligonucleotide
uccuaaagcacaauugauc

SEQ ID NO: 787096 - RNA, 19 nt, Artificial Sequence
  Description of Artificial Sequence: Synthetic oligonucleotide
uguagucgggucauaagug

SEQ ID NO: 787097 - RNA, 19 nt, Artificial Sequence
  Description of Artificial Sequence: Synthetic oligonucleotide
aaggguaaaauccguuaug

SEQ ID NO: 787098 - RNA, 19 nt, Artificial Sequence
  Description of Artificial Sequence: Synthetic oligonucleotide
ucauuagaugucuccacag

SEQ ID NO: 787099 - RNA, 19 nt, Artificial Sequence
  Description of Artificial Sequence: Synthetic oligonucleotide
gauaagacacuucacacua

SEQ ID NO: 787100 - RNA, 19 nt, Artificial Sequence
  Description of Artificial Sequence: Synthetic oligonucleotide
uuacaaggcguaauagacc

SEQ ID NO: 787101 - RNA, 19 nt, Artificial Sequence
  Description of Artificial Sequence: Synthetic oligonucleotide
uauaggguguaagagaagu

SEQ ID NO: 787102 - RNA, 19 nt, Artificial Sequence
  Description of Artificial Sequence: Synthetic oligonucleotide
uaaaauccguuauguagag

SEQ ID NO: 787103 - RNA, 19 nt, Artificial Sequence
  Description of Artificial Sequence: Synthetic oligonucleotide
aagacaucgagggcaacac

SEQ ID NO: 787104 - RNA, 19 nt, Artificial Sequence
  Description of Artificial Sequence: Synthetic oligonucleotide
ucacuuaccuuacacauuu

SEQ ID NO: 787105 - RNA, 19 nt, Artificial Sequence
  Description of Artificial Sequence: Synthetic oligonucleotide
cuuugcaccugguagguag

SEQ ID NO: 787106 - RNA, 19 nt, Artificial Sequence
  Description of Artificial Sequence: Synthetic oligonucleotide
uuuaguugauuucauuaua

SEQ ID NO: 787107 - RNA, 19 nt, Artificial Sequence
  Description of Artificial Sequence: Synthetic oligonucleotide
ugcaucauuauauuugaua

SEQ ID NO: 787108 - RNA, 19 nt, Artificial Sequence
  Description of Artificial Sequence: Synthetic oligonucleotide
aaaggauaagacacuucac

SEQ ID NO: 787109 - RNA, 19 nt, Artificial Sequence
  Description of Artificial Sequence: Synthetic oligonucleotide
ugucauuccagccucuccu

SEQ ID NO: 787110 - RNA, 19 nt, Artificial Sequence
  Description of Artificial Sequence: Synthetic oligonucleotide
acaauugaaacuucagaaa

SEQ ID NO: 787111 - RNA, 19 nt, Artificial Sequence
  Description of Artificial Sequence: Synthetic oligonucleotide
uaccacuggaaucacgcag

SEQ ID NO: 787112 - RNA, 19 nt, Artificial Sequence
  Description of Artificial Sequence: Synthetic oligonucleotide
ccuuauagaacuuauagca

SEQ ID NO: 787113 - RNA, 19 nt, Artificial Sequence
  Description of Artificial Sequence: Synthetic oligonucleotide
acaccuacuacauauuuaa

SEQ ID NO: 787114 - RNA, 19 nt, Artificial Sequence
  Description of Artificial Sequence: Synthetic oligonucleotide
gcuaagaaaagacaucgag

SEQ ID NO: 787115 - RNA, 19 nt, Artificial Sequence
  Description of Artificial Sequence: Synthetic oligonucleotide
cuuguuggucgucuuaucc

SEQ ID NO: 787116 - RNA, 19 nt, Artificial Sequence
  Description of Artificial Sequence: Synthetic oligonucleotide
cuuaccuuacacauuuaug

SEQ ID NO: 787117 - RNA, 19 nt, Artificial Sequence
  Description of Artificial Sequence: Synthetic oligonucleotide
ugagcauauuuucaaguuc

SEQ ID NO: 787118 - RNA, 19 nt, Artificial Sequence
  Description of Artificial Sequence: Synthetic oligonucleotide
uucgguacaucucacaguu

SEQ ID NO: 787119 - RNA, 19 nt, Artificial Sequence
  Description of Artificial Sequence: Synthetic oligonucleotide
uuaacacggcaccaggaug

SEQ ID NO: 787120 - RNA, 19 nt, Artificial Sequence
  Description of Artificial Sequence: Synthetic oligonucleotide
acaguuacuuauuggguug

SEQ ID NO: 787121 - RNA, 19 nt, Artificial Sequence
  Description of Artificial Sequence: Synthetic oligonucleotide
accaauuacagcuucgcau

SEQ ID NO: 787122 - RNA, 19 nt, Artificial Sequence
  Description of Artificial Sequence: Synthetic oligonucleotide
guaaugguucuguaggagc

SEQ ID NO: 787123 - RNA, 19 nt, Artificial Sequence
  Description of Artificial Sequence: Synthetic oligonucleotide
acuccacuagccuucagag

SEQ ID NO: 787124 - RNA, 19 nt, Artificial Sequence
  Description of Artificial Sequence: Synthetic oligonucleotide
ucgucuuauccaaaauugc

SEQ ID NO: 787125 - RNA, 19 nt, Artificial Sequence
  Description of Artificial Sequence: Synthetic oligonucleotide
uucguggagacgauuuucc

SEQ ID NO: 787126 - RNA, 19 nt, Artificial Sequence
  Description of Artificial Sequence: Synthetic oligonucleotide
ugacuaccuuuuaaaagcc

SEQ ID NO: 787127 - RNA, 19 nt, Artificial Sequence
  Description of Artificial Sequence: Synthetic oligonucleotide
agguauauggagaaugguc

SEQ ID NO: 787128 - RNA, 19 nt, Artificial Sequence
  Description of Artificial Sequence: Synthetic oligonucleotide
acuuauuggguugaaaggu

SEQ ID NO: 787129 - RNA, 19 nt, Artificial Sequence
  Description of Artificial Sequence: Synthetic oligonucleotide
cugaucauucgguuugugg

SEQ ID NO: 787130 - RNA, 19 nt, Artificial Sequence
  Description of Artificial Sequence: Synthetic oligonucleotide
aaaauccguuauguagagc

SEQ ID NO: 787131 - RNA, 19 nt, Artificial Sequence
  Description of Artificial Sequence: Synthetic oligonucleotide
ugcauacccagaaaauugu

SEQ ID NO: 787132 - RNA, 19 nt, Artificial Sequence
  Description of Artificial Sequence: Synthetic oligonucleotide
uuauguagagcagcuguag

SEQ ID NO: 787133 - RNA, 19 nt, Artificial Sequence
  Description of Artificial Sequence: Synthetic oligonucleotide
auagaagcgggcuguagug

SEQ ID NO: 787134 - RNA, 19 nt, Artificial Sequence
  Description of Artificial Sequence: Synthetic oligonucleotide
guaaaauccguuauguaga

SEQ ID NO: 787135 - RNA, 19 nt, Artificial Sequence
  Description of Artificial Sequence: Synthetic oligonucleotide
uguugauuccauccuggca

SEQ ID NO: 787136 - RNA, 19 nt, Artificial Sequence
  Description of Artificial Sequence: Synthetic oligonucleotide
ucacaguuacuuauugggu

SEQ ID NO: 787137 - RNA, 19 nt, Artificial Sequence
  Description of Artificial Sequence: Synthetic oligonucleotide
gaguuaacacggcaccagg

SEQ ID NO: 787138 - RNA, 19 nt, Artificial Sequence
  Description of Artificial Sequence: Synthetic oligonucleotide
aaucacgcaggacucuugu

SEQ ID NO: 787139 - RNA, 19 nt, Artificial Sequence
  Description of Artificial Sequence: Synthetic oligonucleotide
agaagcgggcuguagugac

SEQ ID NO: 787140 - RNA, 19 nt, Artificial Sequence
  Description of Artificial Sequence: Synthetic oligonucleotide
gucgucuuauccaaaauug

SEQ ID NO: 787141 - RNA, 19 nt, Artificial Sequence
  Description of Artificial Sequence: Synthetic oligonucleotide
gagcggaaacuccuggugg

SEQ ID NO: 787142 - RNA, 19 nt, Artificial Sequence
  Description of Artificial Sequence: Synthetic oligonucleotide
agaguuaaggcaaauugga

SEQ ID NO: 787143 - RNA, 19 nt, Artificial Sequence
  Description of Artificial Sequence: Synthetic oligonucleotide
auaacccuugcacuuguug

SEQ ID NO: 787144 - RNA, 19 nt, Artificial Sequence
  Description of Artificial Sequence: Synthetic oligonucleotide
uggcagguuagaaauguac

SEQ ID NO: 787145 - RNA, 19 nt, Artificial Sequence
  Description of Artificial Sequence: Synthetic oligonucleotide
acagcuacuagaugaauuu

SEQ ID NO: 787146 - RNA, 19 nt, Artificial Sequence
  Description of Artificial Sequence: Synthetic oligonucleotide
ucgagggcaacacugaguu

SEQ ID NO: 787147 - RNA, 19 nt, Artificial Sequence
  Description of Artificial Sequence: Synthetic oligonucleotide
aaggcguaauagaccagcc

SEQ ID NO: 787148 - RNA, 19 nt, Artificial Sequence
  Description of Artificial Sequence: Synthetic oligonucleotide
acaucucacaguuacuuau

SEQ ID NO: 787149 - RNA, 19 nt, Artificial Sequence
  Description of Artificial Sequence: Synthetic oligonucleotide
gacaucgagggcaacacug

SEQ ID NO: 787150 - RNA, 19 nt, Artificial Sequence
  Description of Artificial Sequence: Synthetic oligonucleotide
aaugguucuguaggagcgg

SEQ ID NO: 787151 - RNA, 19 nt, Artificial Sequence
  Description of Artificial Sequence: Synthetic oligonucleotide
agaaguuugacugaucauu

SEQ ID NO: 787152 - RNA, 19 nt, Artificial Sequence
  Description of Artificial Sequence: Synthetic oligonucleotide
cauaagugagugucauucc

SEQ ID NO: 787153 - RNA, 19 nt, Artificial Sequence
  Description of Artificial Sequence: Synthetic oligonucleotide
uuauuggguugaaagguau

SEQ ID NO: 787154 - RNA, 19 nt, Artificial Sequence
  Description of Artificial Sequence: Synthetic oligonucleotide
cauuagaugucuccacagc

SEQ ID NO: 787155 - RNA, 19 nt, Artificial Sequence
  Description of Artificial Sequence: Synthetic oligonucleotide
uacccagaaaauuguaagu

SEQ ID NO: 787156 - RNA, 19 nt, Artificial Sequence
  Description of Artificial Sequence: Synthetic oligonucleotide
gucuucguggucuuugugc

SEQ ID NO: 787157 - RNA, 19 nt, Artificial Sequence
  Description of Artificial Sequence: Synthetic oligonucleotide
auccguuauguagagcagc

SEQ ID NO: 787158 - RNA, 19 nt, Artificial Sequence
  Description of Artificial Sequence: Synthetic oligonucleotide
uccguuauguagagcagcu

SEQ ID NO: 787159 - RNA, 19 nt, Artificial Sequence
  Description of Artificial Sequence: Synthetic oligonucleotide
aacccuugcacuuguuggu

SEQ ID NO: 787160 - RNA, 19 nt, Artificial Sequence
  Description of Artificial Sequence: Synthetic oligonucleotide
gcaucauuauauuugauaa

SEQ ID NO: 787161 - RNA, 19 nt, Artificial Sequence
  Description of Artificial Sequence: Synthetic oligonucleotide
uaggagcggaaacuccugg

SEQ ID NO: 787162 - RNA, 19 nt, Artificial Sequence
  Description of Artificial Sequence: Synthetic oligonucleotide
cagaaagcccauuccauac

SEQ ID NO: 787163 - RNA, 19 nt, Artificial Sequence
  Description of Artificial Sequence: Synthetic oligonucleotide
agcggaaacuccugguggg

SEQ ID NO: 787164 - RNA, 19 nt, Artificial Sequence
  Description of Artificial Sequence: Synthetic oligonucleotide
gcaacuuuuauugacuacc

SEQ ID NO: 787165 - RNA, 19 nt, Artificial Sequence
  Description of Artificial Sequence: Synthetic oligonucleotide
aaacaguuucucccuuucu

SEQ ID NO: 787166 - RNA, 19 nt, Artificial Sequence
  Description of Artificial Sequence: Synthetic oligonucleotide
ucaaaagaguuaaggcaaa

SEQ ID NO: 787167 - RNA, 19 nt, Artificial Sequence
  Description of Artificial Sequence: Synthetic oligonucleotide
uagucgggucauaagugag

SEQ ID NO: 787168 - RNA, 19 nt, Artificial Sequence
  Description of Artificial Sequence: Synthetic oligonucleotide
gaaguuugacugaucauuc

SEQ ID NO: 787169 - RNA, 19 nt, Artificial Sequence
  Description of Artificial Sequence: Synthetic oligonucleotide
gaaagcuaagaaaagacau

SEQ ID NO: 787170 - RNA, 19 nt, Artificial Sequence
  Description of Artificial Sequence: Synthetic oligonucleotide
ucguacggcaagcacagaa

SEQ ID NO: 787171 - RNA, 19 nt, Artificial Sequence
  Description of Artificial Sequence: Synthetic oligonucleotide
uccgcaaacuugcacagua

SEQ ID NO: 787172 - RNA, 19 nt, Artificial Sequence
  Description of Artificial Sequence: Synthetic oligonucleotide
gaucauucgguuuguggca

SEQ ID NO: 787173 - RNA, 19 nt, Artificial Sequence
  Description of Artificial Sequence: Synthetic oligonucleotide
caaaauugccuucguggag

SEQ ID NO: 787174 - RNA, 19 nt, Artificial Sequence
  Description of Artificial Sequence: Synthetic oligonucleotide
ugcaccuuauagaacuuau

SEQ ID NO: 787175 - RNA, 19 nt, Artificial Sequence
  Description of Artificial Sequence: Synthetic oligonucleotide
aggguaaaauccguuaugu

SEQ ID NO: 787176 - RNA, 19 nt, Artificial Sequence
  Description of Artificial Sequence: Synthetic oligonucleotide
uccggugcugccuagugac

SEQ ID NO: 787177 - RNA, 19 nt, Artificial Sequence
  Description of Artificial Sequence: Synthetic oligonucleotide
gcaauauaggguguaagag

SEQ ID NO: 787178 - RNA, 19 nt, Artificial Sequence
  Description of Artificial Sequence: Synthetic oligonucleotide
accaauaacccuugcacuu

SEQ ID NO: 787179 - RNA, 19 nt, Artificial Sequence
  Description of Artificial Sequence: Synthetic oligonucleotide
ggacuuugcaccugguagg

SEQ ID NO: 787180 - RNA, 19 nt, Artificial Sequence
  Description of Artificial Sequence: Synthetic oligonucleotide
uuugacugaucauucgguu

SEQ ID NO: 787181 - RNA, 19 nt, Artificial Sequence
  Description of Artificial Sequence: Synthetic oligonucleotide
aagccaaaauuuucagcaa

SEQ ID NO: 787182 - RNA, 19 nt, Artificial Sequence
  Description of Artificial Sequence: Synthetic oligonucleotide
uuguggcaauacuguaugg

SEQ ID NO: 787183 - RNA, 19 nt, Artificial Sequence
  Description of Artificial Sequence: Synthetic oligonucleotide
ugcacaguaaugguucugu

SEQ ID NO: 787184 - RNA, 19 nt, Artificial Sequence
  Description of Artificial Sequence: Synthetic oligonucleotide
ugugcauacccagaaaauu

SEQ ID NO: 787185 - RNA, 19 nt, Artificial Sequence
  Description of Artificial Sequence: Synthetic oligonucleotide
ugcuguuuuacaaggcgua

SEQ ID NO: 787186 - RNA, 19 nt, Artificial Sequence
  Description of Artificial Sequence: Synthetic oligonucleotide
acagcgacacucguacggc

SEQ ID NO: 787187 - RNA, 19 nt, Artificial Sequence
  Description of Artificial Sequence: Synthetic oligonucleotide
uguauguuccggugcugcc

SEQ ID NO: 787188 - RNA, 19 nt, Artificial Sequence
  Description of Artificial Sequence: Synthetic oligonucleotide
ugccuagugacagaugacu

SEQ ID NO: 787189 - RNA, 19 nt, Artificial Sequence
  Description of Artificial Sequence: Synthetic oligonucleotide
uguagugacaugguguguu

SEQ ID NO: 787190 - RNA, 19 nt, Artificial Sequence
  Description of Artificial Sequence: Synthetic oligonucleotide
uaguuugaacuaacuuuac

SEQ ID NO: 787191 - RNA, 19 nt, Artificial Sequence
  Description of Artificial Sequence: Synthetic oligonucleotide
guaugguugaggcugcauc

SEQ ID NO: 787192 - RNA, 19 nt, Artificial Sequence
  Description of Artificial Sequence: Synthetic oligonucleotide
auggccguccauuagggau

SEQ ID NO: 787193 - RNA, 19 nt, Artificial Sequence
  Description of Artificial Sequence: Synthetic oligonucleotide
uggucauuagaugucucca

SEQ ID NO: 787194 - RNA, 19 nt, Artificial Sequence
  Description of Artificial Sequence: Synthetic oligonucleotide
aguggcagguuagaaaugu

SEQ ID NO: 787195 - RNA, 19 nt, Artificial Sequence
  Description of Artificial Sequence: Synthetic oligonucleotide
accuuuuaaaagcccuaug

SEQ ID NO: 787196 - RNA, 19 nt, Artificial Sequence
  Description of Artificial Sequence: Synthetic oligonucleotide
ugacucauuugcugggcca

SEQ ID NO: 787197 - RNA, 19 nt, Artificial Sequence
  Description of Artificial Sequence: Synthetic oligonucleotide
aauccguuauguagagcag

SEQ ID NO: 787198 - RNA, 19 nt, Artificial Sequence
  Description of Artificial Sequence: Synthetic oligonucleotide
cuugcauggcugacguugc

SEQ ID NO: 787199 - RNA, 19 nt, Artificial Sequence
  Description of Artificial Sequence: Synthetic oligonucleotide
auuggguugaaagguauau

SEQ ID NO: 787200 - RNA, 19 nt, Artificial Sequence
  Description of Artificial Sequence: Synthetic oligonucleotide
guguguauacuguggcaag

SEQ ID NO: 787201 - RNA, 19 nt, Artificial Sequence
  Description of Artificial Sequence: Synthetic oligonucleotide
gucauuagaugucuccaca

SEQ ID NO: 787202 - RNA, 19 nt, Artificial Sequence
  Description of Artificial Sequence: Synthetic oligonucleotide
cauccgcaaacuugcacag

SEQ ID NO: 787203 - RNA, 19 nt, Artificial Sequence
  Description of Artificial Sequence: Synthetic oligonucleotide
gacuccacuagccuucaga

SEQ ID NO: 787204 - RNA, 19 nt, Artificial Sequence
  Description of Artificial Sequence: Synthetic oligonucleotide
ggcguaauagaccagccca

SEQ ID NO: 787205 - RNA, 19 nt, Artificial Sequence
  Description of Artificial Sequence: Synthetic oligonucleotide
uacggcaagcacagaacac

SEQ ID NO: 787206 - RNA, 19 nt, Artificial Sequence
  Description of Artificial Sequence: Synthetic oligonucleotide
ggagaauggucauuagaug

SEQ ID NO: 787207 - RNA, 19 nt, Artificial Sequence
  Description of Artificial Sequence: Synthetic oligonucleotide
uugacugaucauucgguuu

SEQ ID NO: 787208 - RNA, 19 nt, Artificial Sequence
  Description of Artificial Sequence: Synthetic oligonucleotide
uaugguugacagagcuuca

SEQ ID NO: 787209 - RNA, 19 nt, Artificial Sequence
  Description of Artificial Sequence: Synthetic oligonucleotide
uccauccgcaaacuugcac

SEQ ID NO: 787210 - RNA, 19 nt, Artificial Sequence
  Description of Artificial Sequence: Synthetic oligonucleotide
gcuguagugacauggugug

SEQ ID NO: 787211 - RNA, 19 nt, Artificial Sequence
  Description of Artificial Sequence: Synthetic oligonucleotide
ugguaccacuggaaucacg

SEQ ID NO: 787212 - RNA, 19 nt, Artificial Sequence
  Description of Artificial Sequence: Synthetic oligonucleotide
uuggucgucuuauccaaaa

SEQ ID NO: 787213 - RNA, 19 nt, Artificial Sequence
  Description of Artificial Sequence: Synthetic oligonucleotide
uuacagcgacacucguacg

SEQ ID NO: 787214 - RNA, 19 nt, Artificial Sequence
  Description of Artificial Sequence: Synthetic oligonucleotide
uggcaaguaggcuccuugc

SEQ ID NO: 787215 - RNA, 19 nt, Artificial Sequence
  Description of Artificial Sequence: Synthetic oligonucleotide
uuggguugaaagguauaug

SEQ ID NO: 787216 - RNA, 19 nt, Artificial Sequence
  Description of Artificial Sequence: Synthetic oligonucleotide
cauacccagaaaauuguaa

SEQ ID NO: 787217 - RNA, 19 nt, Artificial Sequence
  Description of Artificial Sequence: Synthetic oligonucleotide
ggucaaagcauucuacauc

SEQ ID NO: 787218 - RNA, 19 nt, Artificial Sequence
  Description of Artificial Sequence: Synthetic oligonucleotide
guagucgggucauaaguga

SEQ ID NO: 787219 - RNA, 19 nt, Artificial Sequence
  Description of Artificial Sequence: Synthetic oligonucleotide
uucacuuaccuuacacauu

SEQ ID NO: 787220 - RNA, 19 nt, Artificial Sequence
  Description of Artificial Sequence: Synthetic oligonucleotide
uuugcaccugguagguaga

SEQ ID NO: 787221 - RNA, 19 nt, Artificial Sequence
  Description of Artificial Sequence: Synthetic oligonucleotide
augcaauauaggguguaag

SEQ ID NO: 787222 - RNA, 19 nt, Artificial Sequence
  Description of Artificial Sequence: Synthetic oligonucleotide
cuuuacugaaacagcuaca

SEQ ID NO: 787223 - RNA, 19 nt, Artificial Sequence
  Description of Artificial Sequence: Synthetic oligonucleotide
uauuggguugaaagguaua

SEQ ID NO: 787224 - RNA, 19 nt, Artificial Sequence
  Description of Artificial Sequence: Synthetic oligonucleotide
gacucauuugcugggccag

SEQ ID NO: 787225 - RNA, 19 nt, Artificial Sequence
  Description of Artificial Sequence: Synthetic oligonucleotide
gagggaguuaacacggcac

SEQ ID NO: 787226 - RNA, 19 nt, Artificial Sequence
  Description of Artificial Sequence: Synthetic oligonucleotide
ucugagcuuggacuccacu

SEQ ID NO: 787227 - RNA, 19 nt, Artificial Sequence
  Description of Artificial Sequence: Synthetic oligonucleotide
cuggaaucacgcaggacuc

SEQ ID NO: 787228 - RNA, 19 nt, Artificial Sequence
  Description of Artificial Sequence: Synthetic oligonucleotide
auaagacacuucacacuac

SEQ ID NO: 787229 - RNA, 19 nt, Artificial Sequence
  Description of Artificial Sequence: Synthetic oligonucleotide
ucguggagacgauuuuccc

SEQ ID NO: 787230 - RNA, 19 nt, Artificial Sequence
  Description of Artificial Sequence: Synthetic oligonucleotide
aaaauccggucaugcacuu

SEQ ID NO: 787231 - RNA, 19 nt, Artificial Sequence
  Description of Artificial Sequence: Synthetic oligonucleotide
guacggcaagcacagaaca

SEQ ID NO: 787232 - RNA, 19 nt, Artificial Sequence
  Description of Artificial Sequence: Synthetic oligonucleotide
gauguaugguugaggcugc

SEQ ID NO: 787233 - RNA, 19 nt, Artificial Sequence
  Description of Artificial Sequence: Synthetic oligonucleotide
cauccugaguugcuacugc

SEQ ID NO: 787234 - RNA, 19 nt, Artificial Sequence
  Description of Artificial Sequence: Synthetic oligonucleotide
cgucuuauccaaaauugcc

SEQ ID NO: 787235 - RNA, 19 nt, Artificial Sequence
  Description of Artificial Sequence: Synthetic oligonucleotide
uacaucucacaguuacuua

SEQ ID NO: 787236 - RNA, 19 nt, Artificial Sequence
  Description of Artificial Sequence: Synthetic oligonucleotide
uuugccaucugagcuugga

SEQ ID NO: 787237 - RNA, 19 nt, Artificial Sequence
  Description of Artificial Sequence: Synthetic oligonucleotide
cuucacuuaccuuacacau

SEQ ID NO: 787238 - RNA, 19 nt, Artificial Sequence
  Description of Artificial Sequence: Synthetic oligonucleotide
aggguguaagagaaguuug

SEQ ID NO: 787239 - RNA, 19 nt, Artificial Sequence
  Description of Artificial Sequence: Synthetic oligonucleotide
cacacuacgucgaaagaaa

SEQ ID NO: 787240 - RNA, 19 nt, Artificial Sequence
  Description of Artificial Sequence: Synthetic oligonucleotide
augaccaauuacagcuucg

SEQ ID NO: 787241 - RNA, 19 nt, Artificial Sequence
  Description of Artificial Sequence: Synthetic oligonucleotide
ugcauggcugacguugcag

SEQ ID NO: 787242 - RNA, 19 nt, Artificial Sequence
  Description of Artificial Sequence: Synthetic oligonucleotide
gcugccuagugacagauga

SEQ ID NO: 787243 - RNA, 19 nt, Artificial Sequence
  Description of Artificial Sequence: Synthetic oligonucleotide
aggcauguauguuccggug

SEQ ID NO: 787244 - RNA, 19 nt, Artificial Sequence
  Description of Artificial Sequence: Synthetic oligonucleotide
cacagaacaccauggguga

SEQ ID NO: 787245 - RNA, 19 nt, Artificial Sequence
  Description of Artificial Sequence: Synthetic oligonucleotide
gaccaauuacagcuucgca

SEQ ID NO: 787246 - RNA, 19 nt, Artificial Sequence
  Description of Artificial Sequence: Synthetic oligonucleotide
aacugccgcugucugcaug

SEQ ID NO: 787247 - RNA, 19 nt, Artificial Sequence
  Description of Artificial Sequence: Synthetic oligonucleotide
cuuauuggguugaaaggua

SEQ ID NO: 787248 - RNA, 19 nt, Artificial Sequence
  Description of Artificial Sequence: Synthetic oligonucleotide
gcauggcugacguugcagg

SEQ ID NO: 787249 - RNA, 19 nt, Artificial Sequence
  Description of Artificial Sequence: Synthetic oligonucleotide
uuguuuggguucugucucu

SEQ ID NO: 787250 - RNA, 19 nt, Artificial Sequence
  Description of Artificial Sequence: Synthetic oligonucleotide
auacuguauggugaagggu

SEQ ID NO: 787251 - RNA, 19 nt, Artificial Sequence
  Description of Artificial Sequence: Synthetic oligonucleotide
gucgggucauaagugagug

SEQ ID NO: 787252 - RNA, 19 nt, Artificial Sequence
  Description of Artificial Sequence: Synthetic oligonucleotide
agggcugaucauagaagcg

SEQ ID NO: 787253 - RNA, 19 nt, Artificial Sequence
  Description of Artificial Sequence: Synthetic oligonucleotide
agcuacuagaugaauuuaa

SEQ ID NO: 787254 - RNA, 19 nt, Artificial Sequence
  Description of Artificial Sequence: Synthetic oligonucleotide
cuccacuagccuucagagc

SEQ ID NO: 787255 - RNA, 19 nt, Artificial Sequence
  Description of Artificial Sequence: Synthetic oligonucleotide
ugaaagguauauggagaau

SEQ ID NO: 787256 - RNA, 19 nt, Artificial Sequence
  Description of Artificial Sequence: Synthetic oligonucleotide
uuccggugcugccuaguga

SEQ ID NO: 787257 - RNA, 19 nt, Artificial Sequence
  Description of Artificial Sequence: Synthetic oligonucleotide
cagaacaccaugggugaag

SEQ ID NO: 787258 - RNA, 19 nt, Artificial Sequence
  Description of Artificial Sequence: Synthetic oligonucleotide
agcccuaugcugcuguuuu

SEQ ID NO: 787259 - RNA, 19 nt, Artificial Sequence
  Description of Artificial Sequence: Synthetic oligonucleotide
gaguuaaggcaaauuggaa

SEQ ID NO: 787260 - RNA, 19 nt, Artificial Sequence
  Description of Artificial Sequence: Synthetic oligonucleotide
aguuaacacggcaccagga

SEQ ID NO: 787261 - RNA, 19 nt, Artificial Sequence
  Description of Artificial Sequence: Synthetic oligonucleotide
aggagcggaaacuccuggu

SEQ ID NO: 787262 - RNA, 19 nt, Artificial Sequence
  Description of Artificial Sequence: Synthetic oligonucleotide
ggagcggaaacuccuggug

SEQ ID NO: 787263 - RNA, 19 nt, Artificial Sequence
  Description of Artificial Sequence: Synthetic oligonucleotide
gaugcaauauaggguguaa

SEQ ID NO: 787264 - RNA, 19 nt, Artificial Sequence
  Description of Artificial Sequence: Synthetic oligonucleotide
ucggauguagagguuuguc

SEQ ID NO: 787265 - RNA, 19 nt, Artificial Sequence
  Description of Artificial Sequence: Synthetic oligonucleotide
ggcugaucauagaagcggg

SEQ ID NO: 787266 - RNA, 19 nt, Artificial Sequence
  Description of Artificial Sequence: Synthetic oligonucleotide
aaauccggucaugcacuug

SEQ ID NO: 787267 - RNA, 19 nt, Artificial Sequence
  Description of Artificial Sequence: Synthetic oligonucleotide
caguaaugguucuguagga

SEQ ID NO: 787268 - RNA, 19 nt, Artificial Sequence
  Description of Artificial Sequence: Synthetic oligonucleotide
auauaggguguaagagaag

SEQ ID NO: 787269 - RNA, 19 nt, Artificial Sequence
  Description of Artificial Sequence: Synthetic oligonucleotide
cuguagucgggucauaagu

SEQ ID NO: 787270 - RNA, 19 nt, Artificial Sequence
  Description of Artificial Sequence: Synthetic oligonucleotide
ccuugcauggcugacguug

SEQ ID NO: 787271 - RNA, 19 nt, Artificial Sequence
  Description of Artificial Sequence: Synthetic oligonucleotide
acguugcaggcauguaugu

SEQ ID NO: 787272 - RNA, 19 nt, Artificial Sequence
  Description of Artificial Sequence: Synthetic oligonucleotide
gaaucacgcaggacucuug

SEQ ID NO: 787273 - RNA, 19 nt, Artificial Sequence
  Description of Artificial Sequence: Synthetic oligonucleotide
gacgauuuucccauauggu

SEQ ID NO: 787274 - RNA, 19 nt, Artificial Sequence
  Description of Artificial Sequence: Synthetic oligonucleotide
guuaacacggcaccaggau

SEQ ID NO: 787275 - RNA, 19 nt, Artificial Sequence
  Description of Artificial Sequence: Synthetic oligonucleotide
cugagcuuggacuccacua

SEQ ID NO: 787276 - RNA, 19 nt, Artificial Sequence
  Description of Artificial Sequence: Synthetic oligonucleotide
uccggucaugcacuuggau

SEQ ID NO: 787277 - RNA, 19 nt, Artificial Sequence
  Description of Artificial Sequence: Synthetic oligonucleotide
guuccggugcugccuagug

SEQ ID NO: 787278 - RNA, 19 nt, Artificial Sequence
  Description of Artificial Sequence: Synthetic oligonucleotide
gcuguagucgggucauaag

SEQ ID NO: 787279 - RNA, 19 nt, Artificial Sequence
  Description of Artificial Sequence: Synthetic oligonucleotide
cauagaagcgggcuguagu

SEQ ID NO: 787280 - RNA, 19 nt, Artificial Sequence
  Description of Artificial Sequence: Synthetic oligonucleotide
ugguggggucuuaaugaau

SEQ ID NO: 787281 - RNA, 19 nt, Artificial Sequence
  Description of Artificial Sequence: Synthetic oligonucleotide
acacuucacacuacgucga

SEQ ID NO: 787282 - RNA, 19 nt, Artificial Sequence
  Description of Artificial Sequence: Synthetic oligonucleotide
ggcagguuagaaauguaca

SEQ ID NO: 787283 - RNA, 19 nt, Artificial Sequence
  Description of Artificial Sequence: Synthetic oligonucleotide
cagcaucaaaagaguuaag

SEQ ID NO: 787284 - RNA, 19 nt, Artificial Sequence
  Description of Artificial Sequence: Synthetic oligonucleotide
cugccuagugacagaugac

SEQ ID NO: 787285 - RNA, 19 nt, Artificial Sequence
  Description of Artificial Sequence: Synthetic oligonucleotide
cuaccuuuuaaaagcccua

SEQ ID NO: 787286 - RNA, 19 nt, Artificial Sequence
  Description of Artificial Sequence: Synthetic oligonucleotide
uguuccauugagggaguua

SEQ ID NO: 787287 - RNA, 19 nt, Artificial Sequence
  Description of Artificial Sequence: Synthetic oligonucleotide
guuacuuauuggguugaaa

SEQ ID NO: 787288 - RNA, 19 nt, Artificial Sequence
  Description of Artificial Sequence: Synthetic oligonucleotide
cuagccuucagagcagaga

SEQ ID NO: 787289 - RNA, 19 nt, Artificial Sequence
  Description of Artificial Sequence: Synthetic oligonucleotide
ucgggucauaagugagugu

SEQ ID NO: 787290 - RNA, 19 nt, Artificial Sequence
  Description of Artificial Sequence: Synthetic oligonucleotide
cuguaggauguaugguuga

SEQ ID NO: 787291 - RNA, 19 nt, Artificial Sequence
  Description of Artificial Sequence: Synthetic oligonucleotide
ccauccgcaaacuugcaca

SEQ ID NO: 787292 - RNA, 19 nt, Artificial Sequence
  Description of Artificial Sequence: Synthetic oligonucleotide
cacaguuacuuauuggguu

SEQ ID NO: 787293 - RNA, 19 nt, Artificial Sequence
  Description of Artificial Sequence: Synthetic oligonucleotide
guuauguagagcagcugua

SEQ ID NO: 787294 - RNA, 19 nt, Artificial Sequence
  Description of Artificial Sequence: Synthetic oligonucleotide
acaucgagggcaacacuga

SEQ ID NO: 787295 - RNA, 19 nt, Artificial Sequence
  Description of Artificial Sequence: Synthetic oligonucleotide
caguggcagguuagaaaug

SEQ ID NO: 787296 - RNA, 19 nt, Artificial Sequence
  Description of Artificial Sequence: Synthetic oligonucleotide
ccauggccguccauuaggg

SEQ ID NO: 787297 - RNA, 19 nt, Artificial Sequence
  Description of Artificial Sequence: Synthetic oligonucleotide
guauauggagaauggucau

SEQ ID NO: 787298 - RNA, 19 nt, Artificial Sequence
  Description of Artificial Sequence: Synthetic oligonucleotide
auacuguggcaaguaggcu

SEQ ID NO: 787299 - RNA, 19 nt, Artificial Sequence
  Description of Artificial Sequence: Synthetic oligonucleotide
aucauucgguuuguggcaa

SEQ ID NO: 787300 - RNA, 19 nt, Artificial Sequence
  Description of Artificial Sequence: Synthetic oligonucleotide
agucgggucauaagugagu

SEQ ID NO: 787301 - RNA, 19 nt, Artificial Sequence
  Description of Artificial Sequence: Synthetic oligonucleotide
gagaaguuugacugaucau

SEQ ID NO: 787302 - RNA, 19 nt, Artificial Sequence
  Description of Artificial Sequence: Synthetic oligonucleotide
cucaacaggaacugccgcu

SEQ ID NO: 787303 - RNA, 19 nt, Artificial Sequence
  Description of Artificial Sequence: Synthetic oligonucleotide
ucccuucgguacaucucac

SEQ ID NO: 787304 - RNA, 19 nt, Artificial Sequence
  Description of Artificial Sequence: Synthetic oligonucleotide
acugaucauucgguuugug

SEQ ID NO: 787305 - RNA, 19 nt, Artificial Sequence
  Description of Artificial Sequence: Synthetic oligonucleotide
aacacggcaccaggaugcu

SEQ ID NO: 787306 - RNA, 19 nt, Artificial Sequence
  Description of Artificial Sequence: Synthetic oligonucleotide
auagaccagcccauuuggu

SEQ ID NO: 787307 - RNA, 19 nt, Artificial Sequence
  Description of Artificial Sequence: Synthetic oligonucleotide
gugcaaaacugucaauaau

SEQ ID NO: 787308 - RNA, 19 nt, Artificial Sequence
  Description of Artificial Sequence: Synthetic oligonucleotide
guaauagaccagcccauuu

SEQ ID NO: 787309 - RNA, 19 nt, Artificial Sequence
  Description of Artificial Sequence: Synthetic oligonucleotide
acacuacgucgaaagaaaa

SEQ ID NO: 787310 - RNA, 19 nt, Artificial Sequence
  Description of Artificial Sequence: Synthetic oligonucleotide
gauaagucuucguggucuu

SEQ ID NO: 787311 - RNA, 19 nt, Artificial Sequence
  Description of Artificial Sequence: Synthetic oligonucleotide
acuucacacuacgucgaaa

SEQ ID NO: 787312 - RNA, 19 nt, Artificial Sequence
  Description of Artificial Sequence: Synthetic oligonucleotide
caugauuguucagccuuca

SEQ ID NO: 787313 - RNA, 19 nt, Artificial Sequence
  Description of Artificial Sequence: Synthetic oligonucleotide
acaaggcguaauagaccag

SEQ ID NO: 787314 - RNA, 19 nt, Artificial Sequence
  Description of Artificial Sequence: Synthetic oligonucleotide
auaggguguaagagaaguu

SEQ ID NO: 787315 - RNA, 19 nt, Artificial Sequence
  Description of Artificial Sequence: Synthetic oligonucleotide
aauaacccuugcacuuguu

SEQ ID NO: 787316 - RNA, 19 nt, Artificial Sequence
  Description of Artificial Sequence: Synthetic oligonucleotide
ccucaacaggaacugccgc

SEQ ID NO: 787317 - RNA, 19 nt, Artificial Sequence
  Description of Artificial Sequence: Synthetic oligonucleotide
uguuccggugcugccuagu

SEQ ID NO: 787318 - RNA, 19 nt, Artificial Sequence
  Description of Artificial Sequence: Synthetic oligonucleotide
aguuacuuauuggguugaa

SEQ ID NO: 787319 - RNA, 19 nt, Artificial Sequence
  Description of Artificial Sequence: Synthetic oligonucleotide
ucgguacaucucacaguua

SEQ ID NO: 787320 - RNA, 19 nt, Artificial Sequence
  Description of Artificial Sequence: Synthetic oligonucleotide
aucacgcaggacucuugua

SEQ ID NO: 787321 - RNA, 19 nt, Artificial Sequence
  Description of Artificial Sequence: Synthetic oligonucleotide
cuagugacagaugacucau

SEQ ID NO: 787322 - RNA, 19 nt, Artificial Sequence
  Description of Artificial Sequence: Synthetic oligonucleotide
ccguccauuagggauguac

SEQ ID NO: 787323 - RNA, 19 nt, Artificial Sequence
  Description of Artificial Sequence: Synthetic oligonucleotide
caguuacuuauuggguuga

SEQ ID NO: 787324 - RNA, 19 nt, Artificial Sequence
  Description of Artificial Sequence: Synthetic oligonucleotide
ggaauucauagaaaaggau

SEQ ID NO: 787325 - RNA, 19 nt, Artificial Sequence
  Description of Artificial Sequence: Synthetic oligonucleotide
cgggucauaagugaguguc

SEQ ID NO: 787326 - RNA, 19 nt, Artificial Sequence
  Description of Artificial Sequence: Synthetic oligonucleotide
ggggaacagcuacuagaug

SEQ ID NO: 787327 - RNA, 19 nt, Artificial Sequence
  Description of Artificial Sequence: Synthetic oligonucleotide
gguucuguaggagcggaaa

SEQ ID NO: 787328 - RNA, 19 nt, Artificial Sequence
  Description of Artificial Sequence: Synthetic oligonucleotide
gcgacacucguacggcaag

SEQ ID NO: 787329 - RNA, 19 nt, Artificial Sequence
  Description of Artificial Sequence: Synthetic oligonucleotide
cuugcacaguaaugguucu

SEQ ID NO: 787330 - RNA, 19 nt, Artificial Sequence
  Description of Artificial Sequence: Synthetic oligonucleotide
uugccuucguggagacgau

SEQ ID NO: 787331 - RNA, 19 nt, Artificial Sequence
  Description of Artificial Sequence: Synthetic oligonucleotide
acucauuugcugggccaga

SEQ ID NO: 787332 - RNA, 19 nt, Artificial Sequence
  Description of Artificial Sequence: Synthetic oligonucleotide
cagguugguaggaucuugu

SEQ ID NO: 787333 - RNA, 19 nt, Artificial Sequence
  Description of Artificial Sequence: Synthetic oligonucleotide
uggagacgauuuucccaua

SEQ ID NO: 787334 - RNA, 19 nt, Artificial Sequence
  Description of Artificial Sequence: Synthetic oligonucleotide
gcauguauguuccggugcu

SEQ ID NO: 787335 - RNA, 19 nt, Artificial Sequence
  Description of Artificial Sequence: Synthetic oligonucleotide
cuccuugcauggcugacgu

SEQ ID NO: 787336 - RNA, 19 nt, Artificial Sequence
  Description of Artificial Sequence: Synthetic oligonucleotide
cacuggaaucacgcaggac

SEQ ID NO: 787337 - RNA, 19 nt, Artificial Sequence
  Description of Artificial Sequence: Synthetic oligonucleotide
ggucaugcacuuggauaag

SEQ ID NO: 787338 - RNA, 19 nt, Artificial Sequence
  Description of Artificial Sequence: Synthetic oligonucleotide
agcgacacucguacggcaa

SEQ ID NO: 787339 - RNA, 19 nt, Artificial Sequence
  Description of Artificial Sequence: Synthetic oligonucleotide
cauggccguccauuaggga

SEQ ID NO: 787340 - RNA, 19 nt, Artificial Sequence
  Description of Artificial Sequence: Synthetic oligonucleotide
caucugagcuuggacucca

SEQ ID NO: 787341 - RNA, 19 nt, Artificial Sequence
  Description of Artificial Sequence: Synthetic oligonucleotide
caggacucuuguagaaaua

SEQ ID NO: 787342 - RNA, 19 nt, Artificial Sequence
  Description of Artificial Sequence: Synthetic oligonucleotide
acggcugguaccacuggaa

SEQ ID NO: 787343 - RNA, 19 nt, Artificial Sequence
  Description of Artificial Sequence: Synthetic oligonucleotide
augggugaagucagacaau

SEQ ID NO: 787344 - RNA, 19 nt, Artificial Sequence
  Description of Artificial Sequence: Synthetic oligonucleotide
gccuagugacagaugacuc

SEQ ID NO: 787345 - RNA, 19 nt, Artificial Sequence
  Description of Artificial Sequence: Synthetic oligonucleotide
gggaguuaacacggcacca

SEQ ID NO: 787346 - RNA, 19 nt, Artificial Sequence
  Description of Artificial Sequence: Synthetic oligonucleotide
auguaugguugaggcugca

SEQ ID NO: 787347 - RNA, 19 nt, Artificial Sequence
  Description of Artificial Sequence: Synthetic oligonucleotide
gaacagcuacuagaugaau

SEQ ID NO: 787348 - RNA, 19 nt, Artificial Sequence
  Description of Artificial Sequence: Synthetic oligonucleotide
ccggucaugcacuuggaua

SEQ ID NO: 787349 - RNA, 19 nt, Artificial Sequence
  Description of Artificial Sequence: Synthetic oligonucleotide
guuggucgucuuauccaaa

SEQ ID NO: 787350 - RNA, 19 nt, Artificial Sequence
  Description of Artificial Sequence: Synthetic oligonucleotide
gcuguuuuacaaggcguaa

SEQ ID NO: 787351 - RNA, 19 nt, Artificial Sequence
  Description of Artificial Sequence: Synthetic oligonucleotide
ccaucugagcuuggacucc

SEQ ID NO: 787352 - RNA, 19 nt, Artificial Sequence
  Description of Artificial Sequence: Synthetic oligonucleotide
cuguuuuacaaggcguaau

SEQ ID NO: 787353 - RNA, 19 nt, Artificial Sequence
  Description of Artificial Sequence: Synthetic oligonucleotide
cacuucacacuacgucgaa

SEQ ID NO: 787354 - RNA, 19 nt, Artificial Sequence
  Description of Artificial Sequence: Synthetic oligonucleotide
cuccauccgcaaacuugca

SEQ ID NO: 787355 - RNA, 19 nt, Artificial Sequence
  Description of Artificial Sequence: Synthetic oligonucleotide
gacugaucauucgguuugu

SEQ ID NO: 787356 - RNA, 19 nt, Artificial Sequence
  Description of Artificial Sequence: Synthetic oligonucleotide
gucauaagugagugucauu

SEQ ID NO: 787357 - RNA, 19 nt, Artificial Sequence
  Description of Artificial Sequence: Synthetic oligonucleotide
gugaaggguaaaauccguu

SEQ ID NO: 787358 - RNA, 19 nt, Artificial Sequence
  Description of Artificial Sequence: Synthetic oligonucleotide
cacuagccuucagagcaga

SEQ ID NO: 787359 - RNA, 19 nt, Artificial Sequence
  Description of Artificial Sequence: Synthetic oligonucleotide
caccaugggugaagucaga

SEQ ID NO: 787360 - RNA, 19 nt, Artificial Sequence
  Description of Artificial Sequence: Synthetic oligonucleotide
caauuacagcuucgcauuu

SEQ ID NO: 787361 - RNA, 19 nt, Artificial Sequence
  Description of Artificial Sequence: Synthetic oligonucleotide
uccuugcauggcugacguu

SEQ ID NO: 787362 - RNA, 19 nt, Artificial Sequence
  Description of Artificial Sequence: Synthetic oligonucleotide
ugccuucguggagacgauu

SEQ ID NO: 787363 - RNA, 19 nt, Artificial Sequence
  Description of Artificial Sequence: Synthetic oligonucleotide
auccggucaugcacuugga

SEQ ID NO: 787364 - RNA, 19 nt, Artificial Sequence
  Description of Artificial Sequence: Synthetic oligonucleotide
cacuuaccuuacacauuua

SEQ ID NO: 787365 - RNA, 19 nt, Artificial Sequence
  Description of Artificial Sequence: Synthetic oligonucleotide
gguacaucucacaguuacu

SEQ ID NO: 787366 - RNA, 19 nt, Artificial Sequence
  Description of Artificial Sequence: Synthetic oligonucleotide
ggacuccacuagccuucag

SEQ ID NO: 787367 - RNA, 19 nt, Artificial Sequence
  Description of Artificial Sequence: Synthetic oligonucleotide
ccguuauguagagcagcug

SEQ ID NO: 787368 - RNA, 19 nt, Artificial Sequence
  Description of Artificial Sequence: Synthetic oligonucleotide
cguccauuagggauguacu

SEQ ID NO: 787369 - RNA, 19 nt, Artificial Sequence
  Description of Artificial Sequence: Synthetic oligonucleotide
ccagcccauuuggucaaag

SEQ ID NO: 787370 - RNA, 19 nt, Artificial Sequence
  Description of Artificial Sequence: Synthetic oligonucleotide
cccuucgguacaucucaca

SEQ ID NO: 787371 - RNA, 19 nt, Artificial Sequence
  Description of Artificial Sequence: Synthetic oligonucleotide
ggaaucacgcaggacucuu

SEQ ID NO: 787372 - RNA, 19 nt, Artificial Sequence
  Description of Artificial Sequence: Synthetic oligonucleotide
cuguagugacauggugugu

SEQ ID NO: 787373 - RNA, 19 nt, Artificial Sequence
  Description of Artificial Sequence: Synthetic oligonucleotide
gaacugccgcugucugcau

SEQ ID NO: 787374 - RNA, 19 nt, Artificial Sequence
  Description of Artificial Sequence: Synthetic oligonucleotide
accagcccauuuggucaaa

SEQ ID NO: 787375 - RNA, 19 nt, Artificial Sequence
  Description of Artificial Sequence: Synthetic oligonucleotide
gccuucguggagacgauuu

SEQ ID NO: 787376 - RNA, 19 nt, Artificial Sequence
  Description of Artificial Sequence: Synthetic oligonucleotide
cuccugguggggucuuaau

SEQ ID NO: 787377 - RNA, 19 nt, Artificial Sequence
  Description of Artificial Sequence: Synthetic oligonucleotide
cucguacggcaagcacaga

SEQ ID NO: 787378 - RNA, 19 nt, Artificial Sequence
  Description of Artificial Sequence: Synthetic oligonucleotide
gcccuaugcugcuguuuua

SEQ ID NO: 787379 - RNA, 19 nt, Artificial Sequence
  Description of Artificial Sequence: Synthetic oligonucleotide
ccggugcugccuagugaca

SEQ ID NO: 787380 - RNA, 19 nt, Artificial Sequence
  Description of Artificial Sequence: Synthetic oligonucleotide
ggccguccauuagggaugu

SEQ ID NO: 787381 - RNA, 19 nt, Artificial Sequence
  Description of Artificial Sequence: Synthetic oligonucleotide
cuguggcaaguaggcuccu

SEQ ID NO: 787382 - RNA, 19 nt, Artificial Sequence
  Description of Artificial Sequence: Synthetic oligonucleotide
cguaauagaccagcccauu

SEQ ID NO: 787383 - RNA, 19 nt, Artificial Sequence
  Description of Artificial Sequence: Synthetic oligonucleotide
ggccucggauguagagguu

SEQ ID NO: 787384 - RNA, 19 nt, Artificial Sequence
  Description of Artificial Sequence: Synthetic oligonucleotide
gccguccauuagggaugua

SEQ ID NO: 787385 - RNA, 19 nt, Artificial Sequence
  Description of Artificial Sequence: Synthetic oligonucleotide
aauaaaaucaaggagaccu

SEQ ID NO: 787386 - RNA, 19 nt, Artificial Sequence
  Description of Artificial Sequence: Synthetic oligonucleotide
uguuagauuaaucugucgg

SEQ ID NO: 787387 - RNA, 19 nt, Artificial Sequence
  Description of Artificial Sequence: Synthetic oligonucleotide
auauaguucuccuauaggg

SEQ ID NO: 787388 - RNA, 19 nt, Artificial Sequence
  Description of Artificial Sequence: Synthetic oligonucleotide
cuguucgacauauugaugg

SEQ ID NO: 787389 - RNA, 19 nt, Artificial Sequence
  Description of Artificial Sequence: Synthetic oligonucleotide
accagauuggcucauauag

SEQ ID NO: 787390 - RNA, 19 nt, Artificial Sequence
  Description of Artificial Sequence: Synthetic oligonucleotide
uaaucugucggccugcccg

SEQ ID NO: 787391 - RNA, 19 nt, Artificial Sequence
  Description of Artificial Sequence: Synthetic oligonucleotide
uauaaugauuccccggagg

SEQ ID NO: 787392 - RNA, 19 nt, Artificial Sequence
  Description of Artificial Sequence: Synthetic oligonucleotide
uuucggaaacacauggugg

SEQ ID NO: 787393 - RNA, 19 nt, Artificial Sequence
  Description of Artificial Sequence: Synthetic oligonucleotide
uuguuaaucuccuuaaacu

SEQ ID NO: 787394 - RNA, 19 nt, Artificial Sequence
  Description of Artificial Sequence: Synthetic oligonucleotide
uuaugcuuaggucagggca

SEQ ID NO: 787395 - RNA, 19 nt, Artificial Sequence
  Description of Artificial Sequence: Synthetic oligonucleotide
ucauauaguucuccuauag

SEQ ID NO: 787396 - RNA, 19 nt, Artificial Sequence
  Description of Artificial Sequence: Synthetic oligonucleotide
aaaucuacauucuagccuu

SEQ ID NO: 787397 - RNA, 19 nt, Artificial Sequence
  Description of Artificial Sequence: Synthetic oligonucleotide
ugauauaaugauuccccgg

SEQ ID NO: 787398 - RNA, 19 nt, Artificial Sequence
  Description of Artificial Sequence: Synthetic oligonucleotide
uauagggucagcuaggaau

SEQ ID NO: 787399 - RNA, 19 nt, Artificial Sequence
  Description of Artificial Sequence: Synthetic oligonucleotide
aucaaggagaccuuagauc

SEQ ID NO: 787400 - RNA, 19 nt, Artificial Sequence
  Description of Artificial Sequence: Synthetic oligonucleotide
aaggguuauaaacauugca

SEQ ID NO: 787401 - RNA, 19 nt, Artificial Sequence
  Description of Artificial Sequence: Synthetic oligonucleotide
aacuguucgacauauugau

SEQ ID NO: 787402 - RNA, 19 nt, Artificial Sequence
  Description of Artificial Sequence: Synthetic oligonucleotide
uagccaacccuucugaucc

SEQ ID NO: 787403 - RNA, 19 nt, Artificial Sequence
  Description of Artificial Sequence: Synthetic oligonucleotide
aggguuauaaacauugcac

SEQ ID NO: 787404 - RNA, 19 nt, Artificial Sequence
  Description of Artificial Sequence: Synthetic oligonucleotide
caugcuaccagauuggcuc

SEQ ID NO: 787405 - RNA, 19 nt, Artificial Sequence
  Description of Artificial Sequence: Synthetic oligonucleotide
cuagguucaacuucugugc

SEQ ID NO: 787406 - RNA, 19 nt, Artificial Sequence
  Description of Artificial Sequence: Synthetic oligonucleotide
ucauugggaacaaacagaa

SEQ ID NO: 787407 - RNA, 19 nt, Artificial Sequence
  Description of Artificial Sequence: Synthetic oligonucleotide
guuaccauagcuucccuag

SEQ ID NO: 787408 - RNA, 19 nt, Artificial Sequence
  Description of Artificial Sequence: Synthetic oligonucleotide
ucuagccuuggugagaugg

SEQ ID NO: 787409 - RNA, 19 nt, Artificial Sequence
  Description of Artificial Sequence: Synthetic oligonucleotide
aaucacuauuaucaccuug

SEQ ID NO: 787410 - RNA, 19 nt, Artificial Sequence
  Description of Artificial Sequence: Synthetic oligonucleotide
uauuuggucaggaauaguu

SEQ ID NO: 787411 - RNA, 19 nt, Artificial Sequence
  Description of Artificial Sequence: Synthetic oligonucleotide
uccagcuaacuguaaaagg

SEQ ID NO: 787412 - RNA, 19 nt, Artificial Sequence
  Description of Artificial Sequence: Synthetic oligonucleotide
augauauaaugauuccccg

SEQ ID NO: 787413 - RNA, 19 nt, Artificial Sequence
  Description of Artificial Sequence: Synthetic oligonucleotide
guuagauuaaucugucggc

SEQ ID NO: 787414 - RNA, 19 nt, Artificial Sequence
  Description of Artificial Sequence: Synthetic oligonucleotide
aaucaaggagaccuuagau

SEQ ID NO: 787415 - RNA, 19 nt, Artificial Sequence
  Description of Artificial Sequence: Synthetic oligonucleotide
agccauguuagauuaaucu

SEQ ID NO: 787416 - RNA, 19 nt, Artificial Sequence
  Description of Artificial Sequence: Synthetic oligonucleotide
uuacaaguuccaaaagaca

SEQ ID NO: 787417 - RNA, 19 nt, Artificial Sequence
  Description of Artificial Sequence: Synthetic oligonucleotide
uuagauuaaucugucggcc

SEQ ID NO: 787418 - RNA, 19 nt, Artificial Sequence
  Description of Artificial Sequence: Synthetic oligonucleotide
gaugaaguuccaugcacag

SEQ ID NO: 787419 - RNA, 19 nt, Artificial Sequence
  Description of Artificial Sequence: Synthetic oligonucleotide
ugaagggauauccacugca

SEQ ID NO: 787420 - RNA, 19 nt, Artificial Sequence
  Description of Artificial Sequence: Synthetic oligonucleotide
guuaggcugauccugagac

SEQ ID NO: 787421 - RNA, 19 nt, Artificial Sequence
  Description of Artificial Sequence: Synthetic oligonucleotide
auaaugauuccccggaggu

SEQ ID NO: 787422 - RNA, 19 nt, Artificial Sequence
  Description of Artificial Sequence: Synthetic oligonucleotide
aaucugucggccugcccgc

SEQ ID NO: 787423 - RNA, 19 nt, Artificial Sequence
  Description of Artificial Sequence: Synthetic oligonucleotide
agcuaauccagcuaacugu

SEQ ID NO: 787424 - RNA, 19 nt, Artificial Sequence
  Description of Artificial Sequence: Synthetic oligonucleotide
gugaccaagacugaaauac

SEQ ID NO: 787425 - RNA, 19 nt, Artificial Sequence
  Description of Artificial Sequence: Synthetic oligonucleotide
aauaguauuuggucaggaa

SEQ ID NO: 787426 - RNA, 19 nt, Artificial Sequence
  Description of Artificial Sequence: Synthetic oligonucleotide
agacacuagguucaacuuc

SEQ ID NO: 787427 - RNA, 19 nt, Artificial Sequence
  Description of Artificial Sequence: Synthetic oligonucleotide
aacgcgcacgcucaugaac

SEQ ID NO: 787428 - RNA, 19 nt, Artificial Sequence
  Description of Artificial Sequence: Synthetic oligonucleotide
aacuucugugcucucaccu

SEQ ID NO: 787429 - RNA, 19 nt, Artificial Sequence
  Description of Artificial Sequence: Synthetic oligonucleotide
cauauaguucuccuauagg

SEQ ID NO: 787430 - RNA, 19 nt, Artificial Sequence
  Description of Artificial Sequence: Synthetic oligonucleotide
guuucggaaacacauggug

SEQ ID NO: 787431 - RNA, 19 nt, Artificial Sequence
  Description of Artificial Sequence: Synthetic oligonucleotide
ugacaaguggaagcgaagg

SEQ ID NO: 787432 - RNA, 19 nt, Artificial Sequence
  Description of Artificial Sequence: Synthetic oligonucleotide
uacgaaguagguguugacg

SEQ ID NO: 787433 - RNA, 19 nt, Artificial Sequence
  Description of Artificial Sequence: Synthetic oligonucleotide
gagaguacgaaguaggugu

SEQ ID NO: 787434 - RNA, 19 nt, Artificial Sequence
  Description of Artificial Sequence: Synthetic oligonucleotide
ccagcuaacuguaaaaggg

SEQ ID NO: 787435 - RNA, 19 nt, Artificial Sequence
  Description of Artificial Sequence: Synthetic oligonucleotide
aaggagaccuuagaucaac

SEQ ID NO: 787436 - RNA, 19 nt, Artificial Sequence
  Description of Artificial Sequence: Synthetic oligonucleotide
uauuaucaccuugaaacug

SEQ ID NO: 787437 - RNA, 19 nt, Artificial Sequence
  Description of Artificial Sequence: Synthetic oligonucleotide
aaauucuguggccugcagu

SEQ ID NO: 787438 - RNA, 19 nt, Artificial Sequence
  Description of Artificial Sequence: Synthetic oligonucleotide
uagcuaauccagcuaacug

SEQ ID NO: 787439 - RNA, 19 nt, Artificial Sequence
  Description of Artificial Sequence: Synthetic oligonucleotide
cuuagaucaacacaguaaa

SEQ ID NO: 787440 - RNA, 19 nt, Artificial Sequence
  Description of Artificial Sequence: Synthetic oligonucleotide
gguuauaaacauugcacag

SEQ ID NO: 787441 - RNA, 19 nt, Artificial Sequence
  Description of Artificial Sequence: Synthetic oligonucleotide
uccguaccggcgcugaugg

SEQ ID NO: 787442 - RNA, 19 nt, Artificial Sequence
  Description of Artificial Sequence: Synthetic oligonucleotide
ucuacauugcccaccagua

SEQ ID NO: 787443 - RNA, 19 nt, Artificial Sequence
  Description of Artificial Sequence: Synthetic oligonucleotide
gaaaucuacauucuagccu

SEQ ID NO: 787444 - RNA, 19 nt, Artificial Sequence
  Description of Artificial Sequence: Synthetic oligonucleotide
uucggaaacacaugguggu

SEQ ID NO: 787445 - RNA, 19 nt, Artificial Sequence
  Description of Artificial Sequence: Synthetic oligonucleotide
uccuauagggucagcuagg

SEQ ID NO: 787446 - RNA, 19 nt, Artificial Sequence
  Description of Artificial Sequence: Synthetic oligonucleotide
auugcucggccacauagag

SEQ ID NO: 787447 - RNA, 19 nt, Artificial Sequence
  Description of Artificial Sequence: Synthetic oligonucleotide
caccuaacagcacaagucc

SEQ ID NO: 787448 - RNA, 19 nt, Artificial Sequence
  Description of Artificial Sequence: Synthetic oligonucleotide
acgugaggaggccacagac

SEQ ID NO: 787449 - RNA, 19 nt, Artificial Sequence
  Description of Artificial Sequence: Synthetic oligonucleotide
agauuaaucugucggccug

SEQ ID NO: 787450 - RNA, 19 nt, Artificial Sequence
  Description of Artificial Sequence: Synthetic oligonucleotide
aucuacauugcccaccagu

SEQ ID NO: 787451 - RNA, 19 nt, Artificial Sequence
  Description of Artificial Sequence: Synthetic oligonucleotide
ggaaggguuauaaacauug

SEQ ID NO: 787452 - RNA, 19 nt, Artificial Sequence
  Description of Artificial Sequence: Synthetic oligonucleotide
auguuagauuaaucugucg

SEQ ID NO: 787453 - RNA, 19 nt, Artificial Sequence
  Description of Artificial Sequence: Synthetic oligonucleotide
aacagaaaucuacauucua

SEQ ID NO: 787454 - RNA, 19 nt, Artificial Sequence
  Description of Artificial Sequence: Synthetic oligonucleotide
uucgacauauugaugguuu

SEQ ID NO: 787455 - RNA, 19 nt, Artificial Sequence
  Description of Artificial Sequence: Synthetic oligonucleotide
guagcagcggcagaggacg

SEQ ID NO: 787456 - RNA, 19 nt, Artificial Sequence
  Description of Artificial Sequence: Synthetic oligonucleotide
auauaaugauuccccggag

SEQ ID NO: 787457 - RNA, 19 nt, Artificial Sequence
  Description of Artificial Sequence: Synthetic oligonucleotide
auuccccggagguagacag

SEQ ID NO: 787458 - RNA, 19 nt, Artificial Sequence
  Description of Artificial Sequence: Synthetic oligonucleotide
uucccuaguagccaacccu

SEQ ID NO: 787459 - RNA, 19 nt, Artificial Sequence
  Description of Artificial Sequence: Synthetic oligonucleotide
gucagggcaaauaaaauca

SEQ ID NO: 787460 - RNA, 19 nt, Artificial Sequence
  Description of Artificial Sequence: Synthetic oligonucleotide
gacaaguggaagcgaaggc

SEQ ID NO: 787461 - RNA, 19 nt, Artificial Sequence
  Description of Artificial Sequence: Synthetic oligonucleotide
aguuaugcuuaggucaggg

SEQ ID NO: 787462 - RNA, 19 nt, Artificial Sequence
  Description of Artificial Sequence: Synthetic oligonucleotide
acugaaauacugacuagag

SEQ ID NO: 787463 - RNA, 19 nt, Artificial Sequence
  Description of Artificial Sequence: Synthetic oligonucleotide
uggguuaucaggguucuug

SEQ ID NO: 787464 - RNA, 19 nt, Artificial Sequence
  Description of Artificial Sequence: Synthetic oligonucleotide
cuccuauagggucagcuag

SEQ ID NO: 787465 - RNA, 19 nt, Artificial Sequence
  Description of Artificial Sequence: Synthetic oligonucleotide
gauuggcucauauaguucu

SEQ ID NO: 787466 - RNA, 19 nt, Artificial Sequence
  Description of Artificial Sequence: Synthetic oligonucleotide
agaggcaugaugaugacaa

SEQ ID NO: 787467 - RNA, 19 nt, Artificial Sequence
  Description of Artificial Sequence: Synthetic oligonucleotide
uggcucacuaggaugugag

SEQ ID NO: 787468 - RNA, 19 nt, Artificial Sequence
  Description of Artificial Sequence: Synthetic oligonucleotide
uagauuaaucugucggccu

SEQ ID NO: 787469 - RNA, 19 nt, Artificial Sequence
  Description of Artificial Sequence: Synthetic oligonucleotide
ggguuucggaaacacaugg

SEQ ID NO: 787470 - RNA, 19 nt, Artificial Sequence
  Description of Artificial Sequence: Synthetic oligonucleotide
uucuuuucguggcaucugu

SEQ ID NO: 787471 - RNA, 19 nt, Artificial Sequence
  Description of Artificial Sequence: Synthetic oligonucleotide
gagguucacaaagaaauuc

SEQ ID NO: 787472 - RNA, 19 nt, Artificial Sequence
  Description of Artificial Sequence: Synthetic oligonucleotide
caguuggcaucucaggccg

SEQ ID NO: 787473 - RNA, 19 nt, Artificial Sequence
  Description of Artificial Sequence: Synthetic oligonucleotide
uuagaucaacacaguaaaa

SEQ ID NO: 787474 - RNA, 19 nt, Artificial Sequence
  Description of Artificial Sequence: Synthetic oligonucleotide
acauucuagccuuggugag

SEQ ID NO: 787475 - RNA, 19 nt, Artificial Sequence
  Description of Artificial Sequence: Synthetic oligonucleotide
ugaucuggucccugaaggc

SEQ ID NO: 787476 - RNA, 19 nt, Artificial Sequence
  Description of Artificial Sequence: Synthetic oligonucleotide
ugaccaagacugaaauacu

SEQ ID NO: 787477 - RNA, 19 nt, Artificial Sequence
  Description of Artificial Sequence: Synthetic oligonucleotide
agaacgcgcacgcucauga

SEQ ID NO: 787478 - RNA, 19 nt, Artificial Sequence
  Description of Artificial Sequence: Synthetic oligonucleotide
aguuaaagcaacagcacaa

SEQ ID NO: 787479 - RNA, 19 nt, Artificial Sequence
  Description of Artificial Sequence: Synthetic oligonucleotide
acaaguggaagcgaaggca

SEQ ID NO: 787480 - RNA, 19 nt, Artificial Sequence
  Description of Artificial Sequence: Synthetic oligonucleotide
gagguugcauucuugucca

SEQ ID NO: 787481 - RNA, 19 nt, Artificial Sequence
  Description of Artificial Sequence: Synthetic oligonucleotide
aaacaucagaagacuagga

SEQ ID NO: 787482 - RNA, 19 nt, Artificial Sequence
  Description of Artificial Sequence: Synthetic oligonucleotide
guaaccauguuuuccaacu

SEQ ID NO: 787483 - RNA, 19 nt, Artificial Sequence
  Description of Artificial Sequence: Synthetic oligonucleotide
ucagggcaaauaaaaucaa

SEQ ID NO: 787484 - RNA, 19 nt, Artificial Sequence
  Description of Artificial Sequence: Synthetic oligonucleotide
uguagcuaauccagcuaac

SEQ ID NO: 787485 - RNA, 19 nt, Artificial Sequence
  Description of Artificial Sequence: Synthetic oligonucleotide
uguucgacauauugauggu

SEQ ID NO: 787486 - RNA, 19 nt, Artificial Sequence
  Description of Artificial Sequence: Synthetic oligonucleotide
uggagaguacgaaguaggu

SEQ ID NO: 787487 - RNA, 19 nt, Artificial Sequence
  Description of Artificial Sequence: Synthetic oligonucleotide
gugcuaaccaaacaucaga

SEQ ID NO: 787488 - RNA, 19 nt, Artificial Sequence
  Description of Artificial Sequence: Synthetic oligonucleotide
uggguuucggaaacacaug

SEQ ID NO: 787489 - RNA, 19 nt, Artificial Sequence
  Description of Artificial Sequence: Synthetic oligonucleotide
uaacuguaaaagggugggg

SEQ ID NO: 787490 - RNA, 19 nt, Artificial Sequence
  Description of Artificial Sequence: Synthetic oligonucleotide
gggcaaauaaaaucaagga

SEQ ID NO: 787491 - RNA, 19 nt, Artificial Sequence
  Description of Artificial Sequence: Synthetic oligonucleotide
cuaguagccaacccuucug

SEQ ID NO: 787492 - RNA, 19 nt, Artificial Sequence
  Description of Artificial Sequence: Synthetic oligonucleotide
ggucagggcaaauaaaauc

SEQ ID NO: 787493 - RNA, 19 nt, Artificial Sequence
  Description of Artificial Sequence: Synthetic oligonucleotide
agguucaacuucugugcuc

SEQ ID NO: 787494 - RNA, 19 nt, Artificial Sequence
  Description of Artificial Sequence: Synthetic oligonucleotide
uaggcugauccugagacuc

SEQ ID NO: 787495 - RNA, 19 nt, Artificial Sequence
  Description of Artificial Sequence: Synthetic oligonucleotide
aguacgaaguagguguuga

SEQ ID NO: 787496 - RNA, 19 nt, Artificial Sequence
  Description of Artificial Sequence: Synthetic oligonucleotide
guuaugcuuaggucagggc

SEQ ID NO: 787497 - RNA, 19 nt, Artificial Sequence
  Description of Artificial Sequence: Synthetic oligonucleotide
gauuaaucugucggccugc

SEQ ID NO: 787498 - RNA, 19 nt, Artificial Sequence
  Description of Artificial Sequence: Synthetic oligonucleotide
gcuaacuguaaaagggugg

SEQ ID NO: 787499 - RNA, 19 nt, Artificial Sequence
  Description of Artificial Sequence: Synthetic oligonucleotide
gguacccacaaacacugcc

SEQ ID NO: 787500 - RNA, 19 nt, Artificial Sequence
  Description of Artificial Sequence: Synthetic oligonucleotide
aggaaccuggcucauugga

SEQ ID NO: 787501 - RNA, 19 nt, Artificial Sequence
  Description of Artificial Sequence: Synthetic oligonucleotide
agauuggcucauauaguuc

SEQ ID NO: 787502 - RNA, 19 nt, Artificial Sequence
  Description of Artificial Sequence: Synthetic oligonucleotide
gaagggauauccacugcac

SEQ ID NO: 787503 - RNA, 19 nt, Artificial Sequence
  Description of Artificial Sequence: Synthetic oligonucleotide
cacucccuuggcaauacac

SEQ ID NO: 787504 - RNA, 19 nt, Artificial Sequence
  Description of Artificial Sequence: Synthetic oligonucleotide
uucguggcaucugucagga

SEQ ID NO: 787505 - RNA, 19 nt, Artificial Sequence
  Description of Artificial Sequence: Synthetic oligonucleotide
ucaccuaccccaggaaccc

SEQ ID NO: 787506 - RNA, 19 nt, Artificial Sequence
  Description of Artificial Sequence: Synthetic oligonucleotide
guguagcuaauccagcuaa

SEQ ID NO: 787507 - RNA, 19 nt, Artificial Sequence
  Description of Artificial Sequence: Synthetic oligonucleotide
agcuaacuguaaaagggug

SEQ ID NO: 787508 - RNA, 19 nt, Artificial Sequence
  Description of Artificial Sequence: Synthetic oligonucleotide
cugaaauacugacuagaga

SEQ ID NO: 787509 - RNA, 19 nt, Artificial Sequence
  Description of Artificial Sequence: Synthetic oligonucleotide
gucaccuaccccaggaacc

SEQ ID NO: 787510 - RNA, 19 nt, Artificial Sequence
  Description of Artificial Sequence: Synthetic oligonucleotide
ggaccagucaccuacccca

SEQ ID NO: 787511 - RNA, 19 nt, Artificial Sequence
  Description of Artificial Sequence: Synthetic oligonucleotide
aguuaggcugauccugaga

SEQ ID NO: 787512 - RNA, 19 nt, Artificial Sequence
  Description of Artificial Sequence: Synthetic oligonucleotide
ucgacauauugaugguuuc

SEQ ID NO: 787513 - RNA, 19 nt, Artificial Sequence
  Description of Artificial Sequence: Synthetic oligonucleotide
ucuuuucguggcaucuguc

SEQ ID NO: 787514 - RNA, 19 nt, Artificial Sequence
  Description of Artificial Sequence: Synthetic oligonucleotide
ucccuaguagccaacccuu

SEQ ID NO: 787515 - RNA, 19 nt, Artificial Sequence
  Description of Artificial Sequence: Synthetic oligonucleotide
accuuagaucaacacagua

SEQ ID NO: 787516 - RNA, 19 nt, Artificial Sequence
  Description of Artificial Sequence: Synthetic oligonucleotide
uaguuaggcugauccugag

SEQ ID NO: 787517 - RNA, 19 nt, Artificial Sequence
  Description of Artificial Sequence: Synthetic oligonucleotide
gucagccugaucugguccc

SEQ ID NO: 787518 - RNA, 19 nt, Artificial Sequence
  Description of Artificial Sequence: Synthetic oligonucleotide
ugugaccaagacugaaaua

SEQ ID NO: 787519 - RNA, 19 nt, Artificial Sequence
  Description of Artificial Sequence: Synthetic oligonucleotide
cucacuaggaugugaggga

SEQ ID NO: 787520 - RNA, 19 nt, Artificial Sequence
  Description of Artificial Sequence: Synthetic oligonucleotide
accaagacugaaauacuga

SEQ ID NO: 787521 - RNA, 19 nt, Artificial Sequence
  Description of Artificial Sequence: Synthetic oligonucleotide
cuucccuaguagccaaccc

SEQ ID NO: 787522 - RNA, 19 nt, Artificial Sequence
  Description of Artificial Sequence: Synthetic oligonucleotide
auaguuaggcugauccuga

SEQ ID NO: 787523 - RNA, 19 nt, Artificial Sequence
  Description of Artificial Sequence: Synthetic oligonucleotide
ugguuugucugagccacug

SEQ ID NO: 787524 - RNA, 19 nt, Artificial Sequence
  Description of Artificial Sequence: Synthetic oligonucleotide
ugucauccgagguugcauu

SEQ ID NO: 787525 - RNA, 19 nt, Artificial Sequence
  Description of Artificial Sequence: Synthetic oligonucleotide
gacaugcuaccagauuggc

SEQ ID NO: 787526 - RNA, 19 nt, Artificial Sequence
  Description of Artificial Sequence: Synthetic oligonucleotide
aaguuccaaaagacacuag

SEQ ID NO: 787527 - RNA, 19 nt, Artificial Sequence
  Description of Artificial Sequence: Synthetic oligonucleotide
uuaucaccuugaaacuguu

SEQ ID NO: 787528 - RNA, 19 nt, Artificial Sequence
  Description of Artificial Sequence: Synthetic oligonucleotide
cuacagcucggccugagga

SEQ ID NO: 787529 - RNA, 19 nt, Artificial Sequence
  Description of Artificial Sequence: Synthetic oligonucleotide
ugucugagccacugagcca

SEQ ID NO: 787530 - RNA, 19 nt, Artificial Sequence
  Description of Artificial Sequence: Synthetic oligonucleotide
caggaacccaacacuucag

SEQ ID NO: 787531 - RNA, 19 nt, Artificial Sequence
  Description of Artificial Sequence: Synthetic oligonucleotide
ccugaagggauauccacug

SEQ ID NO: 787532 - RNA, 19 nt, Artificial Sequence
  Description of Artificial Sequence: Synthetic oligonucleotide
cuguccaccggucccgcgg

SEQ ID NO: 787533 - RNA, 19 nt, Artificial Sequence
  Description of Artificial Sequence: Synthetic oligonucleotide
ucucaccuaacagcacaag

SEQ ID NO: 787534 - RNA, 19 nt, Artificial Sequence
  Description of Artificial Sequence: Synthetic oligonucleotide
agacuaggaaggguuauaa

SEQ ID NO: 787535 - RNA, 19 nt, Artificial Sequence
  Description of Artificial Sequence: Synthetic oligonucleotide
cugaagggauauccacugc

SEQ ID NO: 787536 - RNA, 19 nt, Artificial Sequence
  Description of Artificial Sequence: Synthetic oligonucleotide
ugaugguuucaaguucaac

SEQ ID NO: 787537 - RNA, 19 nt, Artificial Sequence
  Description of Artificial Sequence: Synthetic oligonucleotide
ugaugacaaguggaagcga

SEQ ID NO: 787538 - RNA, 19 nt, Artificial Sequence
  Description of Artificial Sequence: Synthetic oligonucleotide
aagacuaggaaggguuaua

SEQ ID NO: 787539 - RNA, 19 nt, Artificial Sequence
  Description of Artificial Sequence: Synthetic oligonucleotide
auuucagggccagcuuccg

SEQ ID NO: 787540 - RNA, 19 nt, Artificial Sequence
  Description of Artificial Sequence: Synthetic oligonucleotide
guuucccgggaccugggac

SEQ ID NO: 787541 - RNA, 19 nt, Artificial Sequence
  Description of Artificial Sequence: Synthetic oligonucleotide
cagacaacgaacagggccu

SEQ ID NO: 787542 - RNA, 19 nt, Artificial Sequence
  Description of Artificial Sequence: Synthetic oligonucleotide
aggaauaguuaggcugauc

SEQ ID NO: 787543 - RNA, 19 nt, Artificial Sequence
  Description of Artificial Sequence: Synthetic oligonucleotide
aguagccaacccuucugau

SEQ ID NO: 787544 - RNA, 19 nt, Artificial Sequence
  Description of Artificial Sequence: Synthetic oligonucleotide
uguccaccggucccgcggc

SEQ ID NO: 787545 - RNA, 19 nt, Artificial Sequence
  Description of Artificial Sequence: Synthetic oligonucleotide
uaccagauuggcucauaua

SEQ ID NO: 787546 - RNA, 19 nt, Artificial Sequence
  Description of Artificial Sequence: Synthetic oligonucleotide
caacgaacagggccuuggc

SEQ ID NO: 787547 - RNA, 19 nt, Artificial Sequence
  Description of Artificial Sequence: Synthetic oligonucleotide
ccuuagaucaacacaguaa

SEQ ID NO: 787548 - RNA, 19 nt, Artificial Sequence
  Description of Artificial Sequence: Synthetic oligonucleotide
guagacagugagcgcugcc

SEQ ID NO: 787549 - RNA, 19 nt, Artificial Sequence
  Description of Artificial Sequence: Synthetic oligonucleotide
acuguucgacauauugaug

SEQ ID NO: 787550 - RNA, 19 nt, Artificial Sequence
  Description of Artificial Sequence: Synthetic oligonucleotide
aaucuacauucuagccuug

SEQ ID NO: 787551 - RNA, 19 nt, Artificial Sequence
  Description of Artificial Sequence: Synthetic oligonucleotide
guacgaaguagguguugac

SEQ ID NO: 787552 - RNA, 19 nt, Artificial Sequence
  Description of Artificial Sequence: Synthetic oligonucleotide
ggagaguacgaaguaggug

SEQ ID NO: 787553 - RNA, 19 nt, Artificial Sequence
  Description of Artificial Sequence: Synthetic oligonucleotide
gaguacgaaguagguguug

SEQ ID NO: 787554 - RNA, 19 nt, Artificial Sequence
  Description of Artificial Sequence: Synthetic oligonucleotide
uaaugauuccccggaggua

SEQ ID NO: 787555 - RNA, 19 nt, Artificial Sequence
  Description of Artificial Sequence: Synthetic oligonucleotide
ggaguuuggggagugugug

SEQ ID NO: 787556 - RNA, 19 nt, Artificial Sequence
  Description of Artificial Sequence: Synthetic oligonucleotide
guuggcaucucaggccgag

SEQ ID NO: 787557 - RNA, 19 nt, Artificial Sequence
  Description of Artificial Sequence: Synthetic oligonucleotide
cacuauuaucaccuugaaa

SEQ ID NO: 787558 - RNA, 19 nt, Artificial Sequence
  Description of Artificial Sequence: Synthetic oligonucleotide
cacagacaacgaacagggc

SEQ ID NO: 787559 - RNA, 19 nt, Artificial Sequence
  Description of Artificial Sequence: Synthetic oligonucleotide
agcccaagaacaugauaua

SEQ ID NO: 787560 - RNA, 19 nt, Artificial Sequence
  Description of Artificial Sequence: Synthetic oligonucleotide
agugugugugugucuuuau

SEQ ID NO: 787561 - RNA, 19 nt, Artificial Sequence
  Description of Artificial Sequence: Synthetic oligonucleotide
uuggggagugugugugugu

SEQ ID NO: 787562 - RNA, 19 nt, Artificial Sequence
  Description of Artificial Sequence: Synthetic oligonucleotide
ugggugcuagcugugcuaa

SEQ ID NO: 787563 - RNA, 19 nt, Artificial Sequence
  Description of Artificial Sequence: Synthetic oligonucleotide
ggcucauuggagucuggug

SEQ ID NO: 787564 - RNA, 19 nt, Artificial Sequence
  Description of Artificial Sequence: Synthetic oligonucleotide
uggggaguguguguguguc

SEQ ID NO: 787565 - RNA, 19 nt, Artificial Sequence
  Description of Artificial Sequence: Synthetic oligonucleotide
aaaggguggggugguucca

SEQ ID NO: 787566 - RNA, 19 nt, Artificial Sequence
  Description of Artificial Sequence: Synthetic oligonucleotide
uggugagauggguccccag

SEQ ID NO: 787567 - RNA, 19 nt, Artificial Sequence
  Description of Artificial Sequence: Synthetic oligonucleotide
uagccuuggugagaugggu

SEQ ID NO: 787568 - RNA, 19 nt, Artificial Sequence
  Description of Artificial Sequence: Synthetic oligonucleotide
gucauccgagguugcauuc

SEQ ID NO: 787569 - RNA, 19 nt, Artificial Sequence
  Description of Artificial Sequence: Synthetic oligonucleotide
acgcgcacgcucaugaacu

SEQ ID NO: 787570 - RNA, 19 nt, Artificial Sequence
  Description of Artificial Sequence: Synthetic oligonucleotide
gagucugguguagcuaauc

SEQ ID NO: 787571 - RNA, 19 nt, Artificial Sequence
  Description of Artificial Sequence: Synthetic oligonucleotide
ggucagccauguuagauua

SEQ ID NO: 787572 - RNA, 19 nt, Artificial Sequence
  Description of Artificial Sequence: Synthetic oligonucleotide
cagcucggccugaggaucc

SEQ ID NO: 787573 - RNA, 19 nt, Artificial Sequence
  Description of Artificial Sequence: Synthetic oligonucleotide
aggaguuuggggagugugu

SEQ ID NO: 787574 - RNA, 19 nt, Artificial Sequence
  Description of Artificial Sequence: Synthetic oligonucleotide
cagcuaacuguaaaagggu

SEQ ID NO: 787575 - RNA, 19 nt, Artificial Sequence
  Description of Artificial Sequence: Synthetic oligonucleotide
guagcuaauccagcuaacu

SEQ ID NO: 787576 - RNA, 19 nt, Artificial Sequence
  Description of Artificial Sequence: Synthetic oligonucleotide
cucauauaguucuccuaua

SEQ ID NO: 787577 - RNA, 19 nt, Artificial Sequence
  Description of Artificial Sequence: Synthetic oligonucleotide
agagguucacaaagaaauu

SEQ ID NO: 787578 - RNA, 19 nt, Artificial Sequence
  Description of Artificial Sequence: Synthetic oligonucleotide
gguuaucaggguucuuguc

SEQ ID NO: 787579 - RNA, 19 nt, Artificial Sequence
  Description of Artificial Sequence: Synthetic oligonucleotide
aggucagggcaaauaaaau

SEQ ID NO: 787580 - RNA, 19 nt, Artificial Sequence
  Description of Artificial Sequence: Synthetic oligonucleotide
gaauccuggcaucauuguu

SEQ ID NO: 787581 - RNA, 19 nt, Artificial Sequence
  Description of Artificial Sequence: Synthetic oligonucleotide
ugauuccccggagguagac

SEQ ID NO: 787582 - RNA, 19 nt, Artificial Sequence
  Description of Artificial Sequence: Synthetic oligonucleotide
agguacccacaaacacugc

SEQ ID NO: 787583 - RNA, 19 nt, Artificial Sequence
  Description of Artificial Sequence: Synthetic oligonucleotide
uccacccaccaugguaccc

SEQ ID NO: 787584 - RNA, 19 nt, Artificial Sequence
  Description of Artificial Sequence: Synthetic oligonucleotide
ggcgagaacgcgcacgcuc

SEQ ID NO: 787585 - RNA, 19 nt, Artificial Sequence
  Description of Artificial Sequence: Synthetic oligonucleotide
gugugugugugucuuuaua

SEQ ID NO: 787586 - RNA, 19 nt, Artificial Sequence
  Description of Artificial Sequence: Synthetic oligonucleotide
gagacucaccaguuaugcu

SEQ ID NO: 787587 - RNA, 19 nt, Artificial Sequence
  Description of Artificial Sequence: Synthetic oligonucleotide
ucugucggccugcccgccu

SEQ ID NO: 787588 - RNA, 19 nt, Artificial Sequence
  Description of Artificial Sequence: Synthetic oligonucleotide
uccuacagcucggccugag

SEQ ID NO: 787589 - RNA, 19 nt, Artificial Sequence
  Description of Artificial Sequence: Synthetic oligonucleotide
cauucuagccuuggugaga

SEQ ID NO: 787590 - RNA, 19 nt, Artificial Sequence
  Description of Artificial Sequence: Synthetic oligonucleotide
gagugugugugugucuuua

SEQ ID NO: 787591 - RNA, 19 nt, Artificial Sequence
  Description of Artificial Sequence: Synthetic oligonucleotide
cugaggauccggggcggcg

SEQ ID NO: 787592 - RNA, 19 nt, Artificial Sequence
  Description of Artificial Sequence: Synthetic oligonucleotide
cccggagguagacagugag

SEQ ID NO: 787593 - RNA, 19 nt, Artificial Sequence
  Description of Artificial Sequence: Synthetic oligonucleotide
aaggguggggugguuccaa

SEQ ID NO: 787594 - RNA, 19 nt, Artificial Sequence
  Description of Artificial Sequence: Synthetic oligonucleotide
gagaacgcgcacgcucaug

SEQ ID NO: 787595 - RNA, 19 nt, Artificial Sequence
  Description of Artificial Sequence: Synthetic oligonucleotide
ggagccguacuugucauaa

SEQ ID NO: 787596 - RNA, 19 nt, Artificial Sequence
  Description of Artificial Sequence: Synthetic oligonucleotide
gauuccccggagguagaca

SEQ ID NO: 787597 - RNA, 19 nt, Artificial Sequence
  Description of Artificial Sequence: Synthetic oligonucleotide
cauugggaacaaacagaaa

SEQ ID NO: 787598 - RNA, 19 nt, Artificial Sequence
  Description of Artificial Sequence: Synthetic oligonucleotide
gacagugagcgcugccucu

SEQ ID NO: 787599 - RNA, 19 nt, Artificial Sequence
  Description of Artificial Sequence: Synthetic oligonucleotide
aucugucggccugcccgcc

SEQ ID NO: 787600 - RNA, 19 nt, Artificial Sequence
  Description of Artificial Sequence: Synthetic oligonucleotide
auaggaguuuggggagugu

SEQ ID NO: 787601 - RNA, 19 nt, Artificial Sequence
  Description of Artificial Sequence: Synthetic oligonucleotide
caugguacccugugaccaa

SEQ ID NO: 787602 - RNA, 19 nt, Artificial Sequence
  Description of Artificial Sequence: Synthetic oligonucleotide
uucuagccuuggugagaug

SEQ ID NO: 787603 - RNA, 19 nt, Artificial Sequence
  Description of Artificial Sequence: Synthetic oligonucleotide
caucuacauugcccaccag

SEQ ID NO: 787604 - RNA, 19 nt, Artificial Sequence
  Description of Artificial Sequence: Synthetic oligonucleotide
gcuaauccagcuaacugua

SEQ ID NO: 787605 - RNA, 19 nt, Artificial Sequence
  Description of Artificial Sequence: Synthetic oligonucleotide
cuccguaccggcgcugaug

SEQ ID NO: 787606 - RNA, 19 nt, Artificial Sequence
  Description of Artificial Sequence: Synthetic oligonucleotide
gggucagcuaggaauccug

SEQ ID NO: 787607 - RNA, 19 nt, Artificial Sequence
  Description of Artificial Sequence: Synthetic oligonucleotide
gcuaggaauccuggcauca

SEQ ID NO: 787608 - RNA, 19 nt, Artificial Sequence
  Description of Artificial Sequence: Synthetic oligonucleotide
acggcggaagcagcaccgg

SEQ ID NO: 787609 - RNA, 19 nt, Artificial Sequence
  Description of Artificial Sequence: Synthetic oligonucleotide
agaguacgaaguagguguu

SEQ ID NO: 787610 - RNA, 19 nt, Artificial Sequence
  Description of Artificial Sequence: Synthetic oligonucleotide
ggcggcgagaacgcgcacg

SEQ ID NO: 787611 - RNA, 19 nt, Artificial Sequence
  Description of Artificial Sequence: Synthetic oligonucleotide
ccggagguagacagugagc

SEQ ID NO: 787612 - RNA, 19 nt, Artificial Sequence
  Description of Artificial Sequence: Synthetic oligonucleotide
cgcacgcucaugaacuggc

SEQ ID NO: 787613 - RNA, 19 nt, Artificial Sequence
  Description of Artificial Sequence: Synthetic oligonucleotide
gcuucccuaguagccaacc

SEQ ID NO: 787614 - RNA, 19 nt, Artificial Sequence
  Description of Artificial Sequence: Synthetic oligonucleotide
cuauagggucagcuaggaa

SEQ ID NO: 787615 - RNA, 19 nt, Artificial Sequence
  Description of Artificial Sequence: Synthetic oligonucleotide
ccccaaauugcucggccac

SEQ ID NO: 787616 - RNA, 19 nt, Artificial Sequence
  Description of Artificial Sequence: Synthetic oligonucleotide
ggcucauauaguucuccua

SEQ ID NO: 787617 - RNA, 19 nt, Artificial Sequence
  Description of Artificial Sequence: Synthetic oligonucleotide
guaccggcgcugaugggca

SEQ ID NO: 787618 - RNA, 19 nt, Artificial Sequence
  Description of Artificial Sequence: Synthetic oligonucleotide
gaacgcgcacgcucaugaa

SEQ ID NO: 787619 - RNA, 19 nt, Artificial Sequence
  Description of Artificial Sequence: Synthetic oligonucleotide
uaccggcgcugaugggcag

SEQ ID NO: 787620 - RNA, 19 nt, Artificial Sequence
  Description of Artificial Sequence: Synthetic oligonucleotide
gguuugucugagccacuga

SEQ ID NO: 787621 - RNA, 19 nt, Artificial Sequence
  Description of Artificial Sequence: Synthetic oligonucleotide
cugucggccugcccgccug

SEQ ID NO: 787622 - RNA, 19 nt, Artificial Sequence
  Description of Artificial Sequence: Synthetic oligonucleotide
gguagacagugagcgcugc

SEQ ID NO: 787623 - RNA, 19 nt, Artificial Sequence
  Description of Artificial Sequence: Synthetic oligonucleotide
acacuagguucaacuucug

SEQ ID NO: 787624 - RNA, 19 nt, Artificial Sequence
  Description of Artificial Sequence: Synthetic oligonucleotide
ccaugguacccugugacca

SEQ ID NO: 787625 - RNA, 19 nt, Artificial Sequence
  Description of Artificial Sequence: Synthetic oligonucleotide
gaccuuagaucaacacagu

SEQ ID NO: 787626 - RNA, 19 nt, Artificial Sequence
  Description of Artificial Sequence: Synthetic oligonucleotide
ucuccguaccggcgcugau

SEQ ID NO: 787627 - RNA, 19 nt, Artificial Sequence
  Description of Artificial Sequence: Synthetic oligonucleotide
cacuagguucaacuucugu

SEQ ID NO: 787628 - RNA, 19 nt, Artificial Sequence
  Description of Artificial Sequence: Synthetic oligonucleotide
ggcgugggcguuguuaauc

SEQ ID NO: 787629 - RNA, 19 nt, Artificial Sequence
  Description of Artificial Sequence: Synthetic oligonucleotide
cuaccagauuggcucauau

SEQ ID NO: 787630 - RNA, 19 nt, Artificial Sequence
  Description of Artificial Sequence: Synthetic oligonucleotide
ugucggccugcccgccugu

SEQ ID NO: 787631 - RNA, 19 nt, Artificial Sequence
  Description of Artificial Sequence: Synthetic oligonucleotide
gguggguuucggaaacaca

SEQ ID NO: 787632 - RNA, 19 nt, Artificial Sequence
  Description of Artificial Sequence: Synthetic oligonucleotide
ccagucaccuaccccagga

SEQ ID NO: 787633 - RNA, 19 nt, Artificial Sequence
  Description of Artificial Sequence: Synthetic oligonucleotide
ggguggguuucggaaacac

SEQ ID NO: 787634 - RNA, 19 nt, Artificial Sequence
  Description of Artificial Sequence: Synthetic oligonucleotide
gauccggggcggcgacagc

SEQ ID NO: 787635 - RNA, 19 nt, Artificial Sequence
  Description of Artificial Sequence: Synthetic oligonucleotide
ccgagguugcauucuuguc

SEQ ID NO: 787636 - RNA, 19 nt, Artificial Sequence
  Description of Artificial Sequence: Synthetic oligonucleotide
gcacgugaggaggccacag

SEQ ID NO: 787637 - RNA, 19 nt, Artificial Sequence
  Description of Artificial Sequence: Synthetic oligonucleotide
uggcgugggcguuguuaau

SEQ ID NO: 787638 - RNA, 19 nt, Artificial Sequence
  Description of Artificial Sequence: Synthetic oligonucleotide
gcgcacgcucaugaacugg

SEQ ID NO: 787639 - RNA, 19 nt, Artificial Sequence
  Description of Artificial Sequence: Synthetic oligonucleotide
guucgacauauugaugguu

SEQ ID NO: 787640 - RNA, 19 nt, Artificial Sequence
  Description of Artificial Sequence: Synthetic oligonucleotide
uccaccggucccgcggcuc

SEQ ID NO: 787641 - RNA, 19 nt, Artificial Sequence
  Description of Artificial Sequence: Synthetic oligonucleotide
gcgagaacgcgcacgcuca

SEQ ID NO: 787642 - RNA, 19 nt, Artificial Sequence
  Description of Artificial Sequence: Synthetic oligonucleotide
uggaggaaccuggcucauu

SEQ ID NO: 787643 - RNA, 19 nt, Artificial Sequence
  Description of Artificial Sequence: Synthetic oligonucleotide
ccuauagggucagcuagga

SEQ ID NO: 787644 - RNA, 19 nt, Artificial Sequence
  Description of Artificial Sequence: Synthetic oligonucleotide
ccagauuggcucauauagu

SEQ ID NO: 787645 - RNA, 19 nt, Artificial Sequence
  Description of Artificial Sequence: Synthetic oligonucleotide
guucuccuauagggucagc

SEQ ID NO: 787646 - RNA, 19 nt, Artificial Sequence
  Description of Artificial Sequence: Synthetic oligonucleotide
cccuaguagccaacccuuc

SEQ ID NO: 787647 - RNA, 19 nt, Artificial Sequence
  Description of Artificial Sequence: Synthetic oligonucleotide
gguuucggaaacacauggu

SEQ ID NO: 787648 - RNA, 19 nt, Artificial Sequence
  Description of Artificial Sequence: Synthetic oligonucleotide
gccguccuacagcucggcc

SEQ ID NO: 787649 - RNA, 19 nt, Artificial Sequence
  Description of Artificial Sequence: Synthetic oligonucleotide
ccgagugacuguuaccaua

SEQ ID NO: 787650 - RNA, 19 nt, Artificial Sequence
  Description of Artificial Sequence: Synthetic oligonucleotide
cucuccguaccggcgcuga

SEQ ID NO: 787651 - RNA, 19 nt, Artificial Sequence
  Description of Artificial Sequence: Synthetic oligonucleotide
ccgcucuccguaccggcgc

SEQ ID NO: 787652 - RNA, 19 nt, Artificial Sequence
  Description of Artificial Sequence: Synthetic oligonucleotide
caaucacuauuaucaccuu

SEQ ID NO: 787653 - RNA, 19 nt, Artificial Sequence
  Description of Artificial Sequence: Synthetic oligonucleotide
ucccgggaccugggacagg

SEQ ID NO: 787654 - RNA, 19 nt, Artificial Sequence
  Description of Artificial Sequence: Synthetic oligonucleotide
ccuaguagccaacccuucu

SEQ ID NO: 787655 - RNA, 19 nt, Artificial Sequence
  Description of Artificial Sequence: Synthetic oligonucleotide
gggugcuagcugugcuaac

SEQ ID NO: 787656 - RNA, 19 nt, Artificial Sequence
  Description of Artificial Sequence: Synthetic oligonucleotide
cuguuaccauagcuucccu

SEQ ID NO: 787657 - RNA, 19 nt, Artificial Sequence
  Description of Artificial Sequence: Synthetic oligonucleotide
gcagcacgugaggaggcca

SEQ ID NO: 787658 - RNA, 19 nt, Artificial Sequence
  Description of Artificial Sequence: Synthetic oligonucleotide
caccggucccgcggcuccg

SEQ ID NO: 787659 - RNA, 19 nt, Artificial Sequence
  Description of Artificial Sequence: Synthetic oligonucleotide
ccguccuacagcucggccu

SEQ ID NO: 787660 - RNA, 19 nt, Artificial Sequence
  Description of Artificial Sequence: Synthetic oligonucleotide
aggauccggggcggcgaca

SEQ ID NO: 787661 - RNA, 19 nt, Artificial Sequence
  Description of Artificial Sequence: Synthetic oligonucleotide
gccugaucuggucccugaa

SEQ ID NO: 787662 - RNA, 19 nt, Artificial Sequence
  Description of Artificial Sequence: Synthetic oligonucleotide
gggagugugugugugucuu

SEQ ID NO: 787663 - RNA, 19 nt, Artificial Sequence
  Description of Artificial Sequence: Synthetic oligonucleotide
caccagggaccagucaccu

SEQ ID NO: 787664 - RNA, 19 nt, Artificial Sequence
  Description of Artificial Sequence: Synthetic oligonucleotide
cagcacucccuuggcaaua

SEQ ID NO: 787665 - RNA, 19 nt, Artificial Sequence
  Description of Artificial Sequence: Synthetic oligonucleotide
ggggagugugugugugucu

SEQ ID NO: 787666 - RNA, 19 nt, Artificial Sequence
  Description of Artificial Sequence: Synthetic oligonucleotide
gcacgcucaugaacuggca

SEQ ID NO: 787667 - RNA, 19 nt, Artificial Sequence
  Description of Artificial Sequence: Synthetic oligonucleotide
caccuaccccaggaaccca

SEQ ID NO: 787668 - RNA, 19 nt, Artificial Sequence
  Description of Artificial Sequence: Synthetic oligonucleotide
cgcgcacgcucaugaacug

SEQ ID NO: 787669 - RNA, 19 nt, Artificial Sequence
  Description of Artificial Sequence: Synthetic oligonucleotide
gggauaggucagggaguuc

SEQ ID NO: 787670 - RNA, 19 nt, Artificial Sequence
  Description of Artificial Sequence: Synthetic oligonucleotide
ccguaccggcgcugauggg

SEQ ID NO: 787671 - RNA, 19 nt, Artificial Sequence
  Description of Artificial Sequence: Synthetic oligonucleotide
gugguuugucugagccacu

SEQ ID NO: 787672 - RNA, 19 nt, Artificial Sequence
  Description of Artificial Sequence: Synthetic oligonucleotide
ggagugugugugugucuuu

SEQ ID NO: 787673 - RNA, 19 nt, Artificial Sequence
  Description of Artificial Sequence: Synthetic oligonucleotide
cccgggaccugggacaggu

SEQ ID NO: 787674 - RNA, 19 nt, Artificial Sequence
  Description of Artificial Sequence: Synthetic oligonucleotide
cgagaacgcgcacgcucau

SEQ ID NO: 787675 - RNA, 19 nt, Artificial Sequence
  Description of Artificial Sequence: Synthetic oligonucleotide
cgcucuccguaccggcgcu

SEQ ID NO: 787676 - RNA, 19 nt, Artificial Sequence
  Description of Artificial Sequence: Synthetic oligonucleotide
cggcgagaacgcgcacgcu

SEQ ID NO: 787677 - RNA, 19 nt, Artificial Sequence
  Description of Artificial Sequence: Synthetic oligonucleotide
aaagccaaaauccugaucc

SEQ ID NO: 787678 - RNA, 19 nt, Artificial Sequence
  Description of Artificial Sequence: Synthetic oligonucleotide
ugagcaaacagcaagagac

SEQ ID NO: 787679 - RNA, 19 nt, Artificial Sequence
  Description of Artificial Sequence: Synthetic oligonucleotide
uaaucuggaacauagcugc

SEQ ID NO: 787680 - RNA, 19 nt, Artificial Sequence
  Description of Artificial Sequence: Synthetic oligonucleotide
ugagaagugaagaaguuug

SEQ ID NO: 787681 - RNA, 19 nt, Artificial Sequence
  Description of Artificial Sequence: Synthetic oligonucleotide
aagaauggacuccacaguc

SEQ ID NO: 787682 - RNA, 19 nt, Artificial Sequence
  Description of Artificial Sequence: Synthetic oligonucleotide
accaguaguaccuuaguac

SEQ ID NO: 787683 - RNA, 19 nt, Artificial Sequence
  Description of Artificial Sequence: Synthetic oligonucleotide
ugauaagcaaguuggggcg

SEQ ID NO: 787684 - RNA, 19 nt, Artificial Sequence
  Description of Artificial Sequence: Synthetic oligonucleotide
uguaggaaaagucuggaaa

SEQ ID NO: 787685 - RNA, 19 nt, Artificial Sequence
  Description of Artificial Sequence: Synthetic oligonucleotide
acugaaguaagggagugcc

SEQ ID NO: 787686 - RNA, 19 nt, Artificial Sequence
  Description of Artificial Sequence: Synthetic oligonucleotide
ugucaauccaugcagcccc

SEQ ID NO: 787687 - RNA, 19 nt, Artificial Sequence
  Description of Artificial Sequence: Synthetic oligonucleotide
aagggagugacucuuauuu

SEQ ID NO: 787688 - RNA, 19 nt, Artificial Sequence
  Description of Artificial Sequence: Synthetic oligonucleotide
cacuaaaugacauguauuc

SEQ ID NO: 787689 - RNA, 19 nt, Artificial Sequence
  Description of Artificial Sequence: Synthetic oligonucleotide
ucauguuauaaucacccgu

SEQ ID NO: 787690 - RNA, 19 nt, Artificial Sequence
  Description of Artificial Sequence: Synthetic oligonucleotide
uuucggaagaucugcagag

SEQ ID NO: 787691 - RNA, 19 nt, Artificial Sequence
  Description of Artificial Sequence: Synthetic oligonucleotide
ugagccgacuuuaaucugg

SEQ ID NO: 787692 - RNA, 19 nt, Artificial Sequence
  Description of Artificial Sequence: Synthetic oligonucleotide
acuaaaugacauguauucc

SEQ ID NO: 787693 - RNA, 19 nt, Artificial Sequence
  Description of Artificial Sequence: Synthetic oligonucleotide
cauguuauaaucacccgug

SEQ ID NO: 787694 - RNA, 19 nt, Artificial Sequence
  Description of Artificial Sequence: Synthetic oligonucleotide
acgcaguugaugcucagcc

SEQ ID NO: 787695 - RNA, 19 nt, Artificial Sequence
  Description of Artificial Sequence: Synthetic oligonucleotide
aaucucguucucugcagcg

SEQ ID NO: 787696 - RNA, 19 nt, Artificial Sequence
  Description of Artificial Sequence: Synthetic oligonucleotide
ucugagccgacuuuaaucu

SEQ ID NO: 787697 - RNA, 19 nt, Artificial Sequence
  Description of Artificial Sequence: Synthetic oligonucleotide
auaaucacccguguagacc

SEQ ID NO: 787698 - RNA, 19 nt, Artificial Sequence
  Description of Artificial Sequence: Synthetic oligonucleotide
auaguaugccuugauuucc

SEQ ID NO: 787699 - RNA, 19 nt, Artificial Sequence
  Description of Artificial Sequence: Synthetic oligonucleotide
gaggauaccagccggaaac

SEQ ID NO: 787700 - RNA, 19 nt, Artificial Sequence
  Description of Artificial Sequence: Synthetic oligonucleotide
uuagagucucgaaugguug

SEQ ID NO: 787701 - RNA, 19 nt, Artificial Sequence
  Description of Artificial Sequence: Synthetic oligonucleotide
cagucuuugaucaucugag

SEQ ID NO: 787702 - RNA, 19 nt, Artificial Sequence
  Description of Artificial Sequence: Synthetic oligonucleotide
acccguguagaccacagac

SEQ ID NO: 787703 - RNA, 19 nt, Artificial Sequence
  Description of Artificial Sequence: Synthetic oligonucleotide
uagaugggcaccuucaggu

SEQ ID NO: 787704 - RNA, 19 nt, Artificial Sequence
  Description of Artificial Sequence: Synthetic oligonucleotide
uaguaccuuaguaccaggg

SEQ ID NO: 787705 - RNA, 19 nt, Artificial Sequence
  Description of Artificial Sequence: Synthetic oligonucleotide
uaccuuaguaccagggucc

SEQ ID NO: 787706 - RNA, 19 nt, Artificial Sequence
  Description of Artificial Sequence: Synthetic oligonucleotide
aacauguuccucuggacaa

SEQ ID NO: 787707 - RNA, 19 nt, Artificial Sequence
  Description of Artificial Sequence: Synthetic oligonucleotide
aguugcaugaugcccuugg

SEQ ID NO: 787708 - RNA, 19 nt, Artificial Sequence
  Description of Artificial Sequence: Synthetic oligonucleotide
acugcguuuccacagcccg

SEQ ID NO: 787709 - RNA, 19 nt, Artificial Sequence
  Description of Artificial Sequence: Synthetic oligonucleotide
acaggugaaacgcaguuga

SEQ ID NO: 787710 - RNA, 19 nt, Artificial Sequence
  Description of Artificial Sequence: Synthetic oligonucleotide
aauacagggaucagcaccu

SEQ ID NO: 787711 - RNA, 19 nt, Artificial Sequence
  Description of Artificial Sequence: Synthetic oligonucleotide
uguucuucucguuuccugc

SEQ ID NO: 787712 - RNA, 19 nt, Artificial Sequence
  Description of Artificial Sequence: Synthetic oligonucleotide
cauguagauaggcccaucg

SEQ ID NO: 787713 - RNA, 19 nt, Artificial Sequence
  Description of Artificial Sequence: Synthetic oligonucleotide
cauguauuccacuugcauc

SEQ ID NO: 787714 - RNA, 19 nt, Artificial Sequence
  Description of Artificial Sequence: Synthetic oligonucleotide
cuuaguaccaggguccucc

SEQ ID NO: 787715 - RNA, 19 nt, Artificial Sequence
  Description of Artificial Sequence: Synthetic oligonucleotide
ugucccaccaguugcauga

SEQ ID NO: 787716 - RNA, 19 nt, Artificial Sequence
  Description of Artificial Sequence: Synthetic oligonucleotide
gauaagaauggacuccaca

SEQ ID NO: 787717 - RNA, 19 nt, Artificial Sequence
  Description of Artificial Sequence: Synthetic oligonucleotide
aggaaaucucguucucugc

SEQ ID NO: 787718 - RNA, 19 nt, Artificial Sequence
  Description of Artificial Sequence: Synthetic oligonucleotide
gagcuuauaguagugguug

SEQ ID NO: 787719 - RNA, 19 nt, Artificial Sequence
  Description of Artificial Sequence: Synthetic oligonucleotide
uuuagagucucgaaugguu

SEQ ID NO: 787720 - RNA, 19 nt, Artificial Sequence
  Description of Artificial Sequence: Synthetic oligonucleotide
gacacuugucaauccaugc

SEQ ID NO: 787721 - RNA, 19 nt, Artificial Sequence
  Description of Artificial Sequence: Synthetic oligonucleotide
uuauaguagugguuggccu

SEQ ID NO: 787722 - RNA, 19 nt, Artificial Sequence
  Description of Artificial Sequence: Synthetic oligonucleotide
guugucagcaaauguccgg

SEQ ID NO: 787723 - RNA, 19 nt, Artificial Sequence
  Description of Artificial Sequence: Synthetic oligonucleotide
ugaagagcuuauaguagug

SEQ ID NO: 787724 - RNA, 19 nt, Artificial Sequence
  Description of Artificial Sequence: Synthetic oligonucleotide
agugugccaugcaagagcc

SEQ ID NO: 787725 - RNA, 19 nt, Artificial Sequence
  Description of Artificial Sequence: Synthetic oligonucleotide
ucgaacugcguuuccacag

SEQ ID NO: 787726 - RNA, 19 nt, Artificial Sequence
  Description of Artificial Sequence: Synthetic oligonucleotide
acagucuuugaucaucuga

SEQ ID NO: 787727 - RNA, 19 nt, Artificial Sequence
  Description of Artificial Sequence: Synthetic oligonucleotide
cauaguaugccuugauuuc

SEQ ID NO: 787728 - RNA, 19 nt, Artificial Sequence
  Description of Artificial Sequence: Synthetic oligonucleotide
agucucaugaacuuucuua

SEQ ID NO: 787729 - RNA, 19 nt, Artificial Sequence
  Description of Artificial Sequence: Synthetic oligonucleotide
gaugauuacacaguccaga

SEQ ID NO: 787730 - RNA, 19 nt, Artificial Sequence
  Description of Artificial Sequence: Synthetic oligonucleotide
uuauaaucacccguguaga

SEQ ID NO: 787731 - RNA, 19 nt, Artificial Sequence
  Description of Artificial Sequence: Synthetic oligonucleotide
agucucgaaugguuguggc

SEQ ID NO: 787732 - RNA, 19 nt, Artificial Sequence
  Description of Artificial Sequence: Synthetic oligonucleotide
cccguagagaaguagaugg

SEQ ID NO: 787733 - RNA, 19 nt, Artificial Sequence
  Description of Artificial Sequence: Synthetic oligonucleotide
aaaugacauguauuccacu

SEQ ID NO: 787734 - RNA, 19 nt, Artificial Sequence
  Description of Artificial Sequence: Synthetic oligonucleotide
guagauaggcccaucguag

SEQ ID NO: 787735 - RNA, 19 nt, Artificial Sequence
  Description of Artificial Sequence: Synthetic oligonucleotide
accucccaaagccaaaauc

SEQ ID NO: 787736 - RNA, 19 nt, Artificial Sequence
  Description of Artificial Sequence: Synthetic oligonucleotide
aggaaaagucuggaaagcg

SEQ ID NO: 787737 - RNA, 19 nt, Artificial Sequence
  Description of Artificial Sequence: Synthetic oligonucleotide
ugaugauuacacaguccag

SEQ ID NO: 787738 - RNA, 19 nt, Artificial Sequence
  Description of Artificial Sequence: Synthetic oligonucleotide
auuucaggcaucguccggg

SEQ ID NO: 787739 - RNA, 19 nt, Artificial Sequence
  Description of Artificial Sequence: Synthetic oligonucleotide
cuuccguugcccacuaagg

SEQ ID NO: 787740 - RNA, 19 nt, Artificial Sequence
  Description of Artificial Sequence: Synthetic oligonucleotide
aacgcaguugaugcucagc

SEQ ID NO: 787741 - RNA, 19 nt, Artificial Sequence
  Description of Artificial Sequence: Synthetic oligonucleotide
cuuucauaaccagugugcc

SEQ ID NO: 787742 - RNA, 19 nt, Artificial Sequence
  Description of Artificial Sequence: Synthetic oligonucleotide
uggggucauguuauaauca

SEQ ID NO: 787743 - RNA, 19 nt, Artificial Sequence
  Description of Artificial Sequence: Synthetic oligonucleotide
caagagacagagugguggg

SEQ ID NO: 787744 - RNA, 19 nt, Artificial Sequence
  Description of Artificial Sequence: Synthetic oligonucleotide
ggucauguuauaaucaccc

SEQ ID NO: 787745 - RNA, 19 nt, Artificial Sequence
  Description of Artificial Sequence: Synthetic oligonucleotide
gucauguuauaaucacccg

SEQ ID NO: 787746 - RNA, 19 nt, Artificial Sequence
  Description of Artificial Sequence: Synthetic oligonucleotide
ugggcacuaaaugacaugu

SEQ ID NO: 787747 - RNA, 19 nt, Artificial Sequence
  Description of Artificial Sequence: Synthetic oligonucleotide
uuuacucagggcacccacc

SEQ ID NO: 787748 - RNA, 19 nt, Artificial Sequence
  Description of Artificial Sequence: Synthetic oligonucleotide
uguuauaaucacccgugua

SEQ ID NO: 787749 - RNA, 19 nt, Artificial Sequence
  Description of Artificial Sequence: Synthetic oligonucleotide
augaccauguucuucucgu

SEQ ID NO: 787750 - RNA, 19 nt, Artificial Sequence
  Description of Artificial Sequence: Synthetic oligonucleotide
aguaguaccuuaguaccag

SEQ ID NO: 787751 - RNA, 19 nt, Artificial Sequence
  Description of Artificial Sequence: Synthetic oligonucleotide
aaugguuguggcauaugug

SEQ ID NO: 787752 - RNA, 19 nt, Artificial Sequence
  Description of Artificial Sequence: Synthetic oligonucleotide
ucuugugcccggcccagcg

SEQ ID NO: 787753 - RNA, 19 nt, Artificial Sequence
  Description of Artificial Sequence: Synthetic oligonucleotide
cuugcgguagucuuccaac

SEQ ID NO: 787754 - RNA, 19 nt, Artificial Sequence
  Description of Artificial Sequence: Synthetic oligonucleotide
aguaccuuaguaccagggu

SEQ ID NO: 787755 - RNA, 19 nt, Artificial Sequence
  Description of Artificial Sequence: Synthetic oligonucleotide
guagaugggcaccuucagg

SEQ ID NO: 787756 - RNA, 19 nt, Artificial Sequence
  Description of Artificial Sequence: Synthetic oligonucleotide
uuucauaaccagugugcca

SEQ ID NO: 787757 - RNA, 19 nt, Artificial Sequence
  Description of Artificial Sequence: Synthetic oligonucleotide
aguugaugcucagccaggc

SEQ ID NO: 787758 - RNA, 19 nt, Artificial Sequence
  Description of Artificial Sequence: Synthetic oligonucleotide
uggaaagcgccugucauca

SEQ ID NO: 787759 - RNA, 19 nt, Artificial Sequence
  Description of Artificial Sequence: Synthetic oligonucleotide
uuacucagggcacccaccu

SEQ ID NO: 787760 - RNA, 19 nt, Artificial Sequence
  Description of Artificial Sequence: Synthetic oligonucleotide
agcguuuagagucucgaau

SEQ ID NO: 787761 - RNA, 19 nt, Artificial Sequence
  Description of Artificial Sequence: Synthetic oligonucleotide
cagcacauggccugcauag

SEQ ID NO: 787762 - RNA, 19 nt, Artificial Sequence
  Description of Artificial Sequence: Synthetic oligonucleotide
gacccggaauuccuguucg

SEQ ID NO: 787763 - RNA, 19 nt, Artificial Sequence
  Description of Artificial Sequence: Synthetic oligonucleotide
ugcgguagucuuccaacag

SEQ ID NO: 787764 - RNA, 19 nt, Artificial Sequence
  Description of Artificial Sequence: Synthetic oligonucleotide
cucugagccgacuuuaauc

SEQ ID NO: 787765 - RNA, 19 nt, Artificial Sequence
  Description of Artificial Sequence: Synthetic oligonucleotide
uccuugaggguacuuuuga

SEQ ID NO: 787766 - RNA, 19 nt, Artificial Sequence
  Description of Artificial Sequence: Synthetic oligonucleotide
aaccgucuggugcagguga

SEQ ID NO: 787767 - RNA, 19 nt, Artificial Sequence
  Description of Artificial Sequence: Synthetic oligonucleotide
gcaaacacaaccaugggac

SEQ ID NO: 787768 - RNA, 19 nt, Artificial Sequence
  Description of Artificial Sequence: Synthetic oligonucleotide
uuccguugcccacuaagga

SEQ ID NO: 787769 - RNA, 19 nt, Artificial Sequence
  Description of Artificial Sequence: Synthetic oligonucleotide
guuacaugucagcugggug

SEQ ID NO: 787770 - RNA, 19 nt, Artificial Sequence
  Description of Artificial Sequence: Synthetic oligonucleotide
ccaguaguaccuuaguacc

SEQ ID NO: 787771 - RNA, 19 nt, Artificial Sequence
  Description of Artificial Sequence: Synthetic oligonucleotide
uuaaggaaaucucguucuc

SEQ ID NO: 787772 - RNA, 19 nt, Artificial Sequence
  Description of Artificial Sequence: Synthetic oligonucleotide
agaaagucagucagccggc

SEQ ID NO: 787773 - RNA, 19 nt, Artificial Sequence
  Description of Artificial Sequence: Synthetic oligonucleotide
aaagcgccugucaucauug

SEQ ID NO: 787774 - RNA, 19 nt, Artificial Sequence
  Description of Artificial Sequence: Synthetic oligonucleotide
guaccuuaguaccaggguc

SEQ ID NO: 787775 - RNA, 19 nt, Artificial Sequence
  Description of Artificial Sequence: Synthetic oligonucleotide
ucuugcccgaaauggagac

SEQ ID NO: 787776 - RNA, 19 nt, Artificial Sequence
  Description of Artificial Sequence: Synthetic oligonucleotide
agcgcaaauacagggauca

SEQ ID NO: 787777 - RNA, 19 nt, Artificial Sequence
  Description of Artificial Sequence: Synthetic oligonucleotide
agguggaaauggcugauga

SEQ ID NO: 787778 - RNA, 19 nt, Artificial Sequence
  Description of Artificial Sequence: Synthetic oligonucleotide
agggagugacucuuauuuc

SEQ ID NO: 787779 - RNA, 19 nt, Artificial Sequence
  Description of Artificial Sequence: Synthetic oligonucleotide
cagugugccaugcaagagc

SEQ ID NO: 787780 - RNA, 19 nt, Artificial Sequence
  Description of Artificial Sequence: Synthetic oligonucleotide
uggcauauguggauucugu

SEQ ID NO: 787781 - RNA, 19 nt, Artificial Sequence
  Description of Artificial Sequence: Synthetic oligonucleotide
ucucgaaugguuguggcau

SEQ ID NO: 787782 - RNA, 19 nt, Artificial Sequence
  Description of Artificial Sequence: Synthetic oligonucleotide
caaacacaaccaugggacc

SEQ ID NO: 787783 - RNA, 19 nt, Artificial Sequence
  Description of Artificial Sequence: Synthetic oligonucleotide
ucggaagaucugcagagau

SEQ ID NO: 787784 - RNA, 19 nt, Artificial Sequence
  Description of Artificial Sequence: Synthetic oligonucleotide
uucuugcccgaaauggaga

SEQ ID NO: 787785 - RNA, 19 nt, Artificial Sequence
  Description of Artificial Sequence: Synthetic oligonucleotide
ucuggggucauguuauaau

SEQ ID NO: 787786 - RNA, 19 nt, Artificial Sequence
  Description of Artificial Sequence: Synthetic oligonucleotide
ugcguuuccacagcccgcg

SEQ ID NO: 787787 - RNA, 19 nt, Artificial Sequence
  Description of Artificial Sequence: Synthetic oligonucleotide
aagccaaaauccugauccu

SEQ ID NO: 787788 - RNA, 19 nt, Artificial Sequence
  Description of Artificial Sequence: Synthetic oligonucleotide
aacugcguuuccacagccc

SEQ ID NO: 787789 - RNA, 19 nt, Artificial Sequence
  Description of Artificial Sequence: Synthetic oligonucleotide
ucugaggauaccagccgga

SEQ ID NO: 787790 - RNA, 19 nt, Artificial Sequence
  Description of Artificial Sequence: Synthetic oligonucleotide
uugcccgaaauggagacca

SEQ ID NO: 787791 - RNA, 19 nt, Artificial Sequence
  Description of Artificial Sequence: Synthetic oligonucleotide
accauuucacugaaguaag

SEQ ID NO: 787792 - RNA, 19 nt, Artificial Sequence
  Description of Artificial Sequence: Synthetic oligonucleotide
cucugaggauaccagccgg

SEQ ID NO: 787793 - RNA, 19 nt, Artificial Sequence
  Description of Artificial Sequence: Synthetic oligonucleotide
ugcauaguaugccuugauu

SEQ ID NO: 787794 - RNA, 19 nt, Artificial Sequence
  Description of Artificial Sequence: Synthetic oligonucleotide
gauucugugauaagcaagu

SEQ ID NO: 787795 - RNA, 19 nt, Artificial Sequence
  Description of Artificial Sequence: Synthetic oligonucleotide
caaacauguuccucuggac

SEQ ID NO: 787796 - RNA, 19 nt, Artificial Sequence
  Description of Artificial Sequence: Synthetic oligonucleotide
gauaggcccaucguagccc

SEQ ID NO: 787797 - RNA, 19 nt, Artificial Sequence
  Description of Artificial Sequence: Synthetic oligonucleotide
ugaugcucagccaggccca

SEQ ID NO: 787798 - RNA, 19 nt, Artificial Sequence
  Description of Artificial Sequence: Synthetic oligonucleotide
gcaguugaugcucagccag

SEQ ID NO: 787799 - RNA, 19 nt, Artificial Sequence
  Description of Artificial Sequence: Synthetic oligonucleotide
uuaguaccaggguccuccg

SEQ ID NO: 787800 - RNA, 19 nt, Artificial Sequence
  Description of Artificial Sequence: Synthetic oligonucleotide
uuacacaguccagaaaguc

SEQ ID NO: 787801 - RNA, 19 nt, Artificial Sequence
  Description of Artificial Sequence: Synthetic oligonucleotide
aguagccaggcaugaugac

SEQ ID NO: 787802 - RNA, 19 nt, Artificial Sequence
  Description of Artificial Sequence: Synthetic oligonucleotide
guguagaccacagacucug

SEQ ID NO: 787803 - RNA, 19 nt, Artificial Sequence
  Description of Artificial Sequence: Synthetic oligonucleotide
acuuuugagguggcuguac

SEQ ID NO: 787804 - RNA, 19 nt, Artificial Sequence
  Description of Artificial Sequence: Synthetic oligonucleotide
guaguaccuuaguaccagg

SEQ ID NO: 787805 - RNA, 19 nt, Artificial Sequence
  Description of Artificial Sequence: Synthetic oligonucleotide
augaacuuucuuaaggaaa

SEQ ID NO: 787806 - RNA, 19 nt, Artificial Sequence
  Description of Artificial Sequence: Synthetic oligonucleotide
ugguagguccaggagacca

SEQ ID NO: 787807 - RNA, 19 nt, Artificial Sequence
  Description of Artificial Sequence: Synthetic oligonucleotide
cagagauuggccagcauga

SEQ ID NO: 787808 - RNA, 19 nt, Artificial Sequence
  Description of Artificial Sequence: Synthetic oligonucleotide
uugucagcaaauguccggu

SEQ ID NO: 787809 - RNA, 19 nt, Artificial Sequence
  Description of Artificial Sequence: Synthetic oligonucleotide
gaaguuugccucucccuuc

SEQ ID NO: 787810 - RNA, 19 nt, Artificial Sequence
  Description of Artificial Sequence: Synthetic oligonucleotide
ugaaccgucuggugcaggu

SEQ ID NO: 787811 - RNA, 19 nt, Artificial Sequence
  Description of Artificial Sequence: Synthetic oligonucleotide
aaguuggggcgacacuugu

SEQ ID NO: 787812 - RNA, 19 nt, Artificial Sequence
  Description of Artificial Sequence: Synthetic oligonucleotide
ucaugcguucccagaaggu

SEQ ID NO: 787813 - RNA, 19 nt, Artificial Sequence
  Description of Artificial Sequence: Synthetic oligonucleotide
aggugcacccgacagguga

SEQ ID NO: 787814 - RNA, 19 nt, Artificial Sequence
  Description of Artificial Sequence: Synthetic oligonucleotide
gcguuuagagucucgaaug

SEQ ID NO: 787815 - RNA, 19 nt, Artificial Sequence
  Description of Artificial Sequence: Synthetic oligonucleotide
gagucucgaaugguugugg

SEQ ID NO: 787816 - RNA, 19 nt, Artificial Sequence
  Description of Artificial Sequence: Synthetic oligonucleotide
guaagggagugccccacag

SEQ ID NO: 787817 - RNA, 19 nt, Artificial Sequence
  Description of Artificial Sequence: Synthetic oligonucleotide
uccguugcccacuaaggau

SEQ ID NO: 787818 - RNA, 19 nt, Artificial Sequence
  Description of Artificial Sequence: Synthetic oligonucleotide
auguagauaggcccaucgu

SEQ ID NO: 787819 - RNA, 19 nt, Artificial Sequence
  Description of Artificial Sequence: Synthetic oligonucleotide
uaccuccagcaccugacgc

SEQ ID NO: 787820 - RNA, 19 nt, Artificial Sequence
  Description of Artificial Sequence: Synthetic oligonucleotide
aaacgcaguugaugcucag

SEQ ID NO: 787821 - RNA, 19 nt, Artificial Sequence
  Description of Artificial Sequence: Synthetic oligonucleotide
cauggccugcauaguaugc

SEQ ID NO: 787822 - RNA, 19 nt, Artificial Sequence
  Description of Artificial Sequence: Synthetic oligonucleotide
auaagcaaguuggggcgac

SEQ ID NO: 787823 - RNA, 19 nt, Artificial Sequence
  Description of Artificial Sequence: Synthetic oligonucleotide
ucguagcccaccauuucac

SEQ ID NO: 787824 - RNA, 19 nt, Artificial Sequence
  Description of Artificial Sequence: Synthetic oligonucleotide
gguacuuuugagguggcug

SEQ ID NO: 787825 - RNA, 19 nt, Artificial Sequence
  Description of Artificial Sequence: Synthetic oligonucleotide
ucucugucaggcccguaga

SEQ ID NO: 787826 - RNA, 19 nt, Artificial Sequence
  Description of Artificial Sequence: Synthetic oligonucleotide
cugaaguaagggagugccc

SEQ ID NO: 787827 - RNA, 19 nt, Artificial Sequence
  Description of Artificial Sequence: Synthetic oligonucleotide
uugcgguagucuuccaaca

SEQ ID NO: 787828 - RNA, 19 nt, Artificial Sequence
  Description of Artificial Sequence: Synthetic oligonucleotide
guucaugcguucccagaag

SEQ ID NO: 787829 - RNA, 19 nt, Artificial Sequence
  Description of Artificial Sequence: Synthetic oligonucleotide
gccgacuuuaaucuggaac

SEQ ID NO: 787830 - RNA, 19 nt, Artificial Sequence
  Description of Artificial Sequence: Synthetic oligonucleotide
cuacugucuuucauaacca

SEQ ID NO: 787831 - RNA, 19 nt, Artificial Sequence
  Description of Artificial Sequence: Synthetic oligonucleotide
ccgacuuuaaucuggaaca

SEQ ID NO: 787832 - RNA, 19 nt, Artificial Sequence
  Description of Artificial Sequence: Synthetic oligonucleotide
cacccgacaggugaaacgc

SEQ ID NO: 787833 - RNA, 19 nt, Artificial Sequence
  Description of Artificial Sequence: Synthetic oligonucleotide
ggcauguagcagcugaccc

SEQ ID NO: 787834 - RNA, 19 nt, Artificial Sequence
  Description of Artificial Sequence: Synthetic oligonucleotide
augucuugcggaucuucug

SEQ ID NO: 787835 - RNA, 19 nt, Artificial Sequence
  Description of Artificial Sequence: Synthetic oligonucleotide
ugccaugcaagagccgagg

SEQ ID NO: 787836 - RNA, 19 nt, Artificial Sequence
  Description of Artificial Sequence: Synthetic oligonucleotide
cugucucaccauuggcugg

SEQ ID NO: 787837 - RNA, 19 nt, Artificial Sequence
  Description of Artificial Sequence: Synthetic oligonucleotide
uugcccacuaaggaucuug

SEQ ID NO: 787838 - RNA, 19 nt, Artificial Sequence
  Description of Artificial Sequence: Synthetic oligonucleotide
ugaggauaccagccggaaa

SEQ ID NO: 787839 - RNA, 19 nt, Artificial Sequence
  Description of Artificial Sequence: Synthetic oligonucleotide
agccuggauaagaauggac

SEQ ID NO: 787840 - RNA, 19 nt, Artificial Sequence
  Description of Artificial Sequence: Synthetic oligonucleotide
ucagguucaugcguuccca

SEQ ID NO: 787841 - RNA, 19 nt, Artificial Sequence
  Description of Artificial Sequence: Synthetic oligonucleotide
ugcccacuaaggaucuugu

SEQ ID NO: 787842 - RNA, 19 nt, Artificial Sequence
  Description of Artificial Sequence: Synthetic oligonucleotide
accaguugcaugaugcccu

SEQ ID NO: 787843 - RNA, 19 nt, Artificial Sequence
  Description of Artificial Sequence: Synthetic oligonucleotide
agaccaguaguaccuuagu

SEQ ID NO: 787844 - RNA, 19 nt, Artificial Sequence
  Description of Artificial Sequence: Synthetic oligonucleotide
cauaaccagugugccaugc

SEQ ID NO: 787845 - RNA, 19 nt, Artificial Sequence
  Description of Artificial Sequence: Synthetic oligonucleotide
ugcugugagaaagcuuccc

SEQ ID NO: 787846 - RNA, 19 nt, Artificial Sequence
  Description of Artificial Sequence: Synthetic oligonucleotide
caugcguucccagaagguc

SEQ ID NO: 787847 - RNA, 19 nt, Artificial Sequence
  Description of Artificial Sequence: Synthetic oligonucleotide
uuguggcauauguggauuc

SEQ ID NO: 787848 - RNA, 19 nt, Artificial Sequence
  Description of Artificial Sequence: Synthetic oligonucleotide
gcuuccguugcccacuaag

SEQ ID NO: 787849 - RNA, 19 nt, Artificial Sequence
  Description of Artificial Sequence: Synthetic oligonucleotide
ugggcagcgucacugucuc

SEQ ID NO: 787850 - RNA, 19 nt, Artificial Sequence
  Description of Artificial Sequence: Synthetic oligonucleotide
ggggucauguuauaaucac

SEQ ID NO: 787851 - RNA, 19 nt, Artificial Sequence
  Description of Artificial Sequence: Synthetic oligonucleotide
uggccugcauaguaugccu

SEQ ID NO: 787852 - RNA, 19 nt, Artificial Sequence
  Description of Artificial Sequence: Synthetic oligonucleotide
caaguuggggcgacacuug

SEQ ID NO: 787853 - RNA, 19 nt, Artificial Sequence
  Description of Artificial Sequence: Synthetic oligonucleotide
uguggcauauguggauucu

SEQ ID NO: 787854 - RNA, 19 nt, Artificial Sequence
  Description of Artificial Sequence: Synthetic oligonucleotide
cauauguggauucugugau

SEQ ID NO: 787855 - RNA, 19 nt, Artificial Sequence
  Description of Artificial Sequence: Synthetic oligonucleotide
auaggcccaucguagccca

SEQ ID NO: 787856 - RNA, 19 nt, Artificial Sequence
  Description of Artificial Sequence: Synthetic oligonucleotide
uggcauguagcagcugacc

SEQ ID NO: 787857 - RNA, 19 nt, Artificial Sequence
  Description of Artificial Sequence: Synthetic oligonucleotide
auuacacaguccagaaagu

SEQ ID NO: 787858 - RNA, 19 nt, Artificial Sequence
  Description of Artificial Sequence: Synthetic oligonucleotide
caccaguugcaugaugccc

SEQ ID NO: 787859 - RNA, 19 nt, Artificial Sequence
  Description of Artificial Sequence: Synthetic oligonucleotide
uguccggucaaaggcuuug

SEQ ID NO: 787860 - RNA, 19 nt, Artificial Sequence
  Description of Artificial Sequence: Synthetic oligonucleotide
uuucaggcaucguccggga

SEQ ID NO: 787861 - RNA, 19 nt, Artificial Sequence
  Description of Artificial Sequence: Synthetic oligonucleotide
gaccaguaguaccuuagua

SEQ ID NO: 787862 - RNA, 19 nt, Artificial Sequence
  Description of Artificial Sequence: Synthetic oligonucleotide
ggcauauguggauucugug

SEQ ID NO: 787863 - RNA, 19 nt, Artificial Sequence
  Description of Artificial Sequence: Synthetic oligonucleotide
agagucucgaaugguugug

SEQ ID NO: 787864 - RNA, 19 nt, Artificial Sequence
  Description of Artificial Sequence: Synthetic oligonucleotide
gcccagcgcaaauacaggg

SEQ ID NO: 787865 - RNA, 19 nt, Artificial Sequence
  Description of Artificial Sequence: Synthetic oligonucleotide
ucguccgggaggcagucuc

SEQ ID NO: 787866 - RNA, 19 nt, Artificial Sequence
  Description of Artificial Sequence: Synthetic oligonucleotide
gcucugaggauaccagccg

SEQ ID NO: 787867 - RNA, 19 nt, Artificial Sequence
  Description of Artificial Sequence: Synthetic oligonucleotide
agaauggacuccacaguca

SEQ ID NO: 787868 - RNA, 19 nt, Artificial Sequence
  Description of Artificial Sequence: Synthetic oligonucleotide
acagacucugagccgacuu

SEQ ID NO: 787869 - RNA, 19 nt, Artificial Sequence
  Description of Artificial Sequence: Synthetic oligonucleotide
ucauacagucuuugaucau

SEQ ID NO: 787870 - RNA, 19 nt, Artificial Sequence
  Description of Artificial Sequence: Synthetic oligonucleotide
cucugucaggcccguagag

SEQ ID NO: 787871 - RNA, 19 nt, Artificial Sequence
  Description of Artificial Sequence: Synthetic oligonucleotide
aguaagggagugccccaca

SEQ ID NO: 787872 - RNA, 19 nt, Artificial Sequence
  Description of Artificial Sequence: Synthetic oligonucleotide
cagucagccggccacucug

SEQ ID NO: 787873 - RNA, 19 nt, Artificial Sequence
  Description of Artificial Sequence: Synthetic oligonucleotide
caaaugccggucugggguc

SEQ ID NO: 787874 - RNA, 19 nt, Artificial Sequence
  Description of Artificial Sequence: Synthetic oligonucleotide
aggcccaucguagcccacc

SEQ ID NO: 787875 - RNA, 19 nt, Artificial Sequence
  Description of Artificial Sequence: Synthetic oligonucleotide
uucggaagaucugcagaga

SEQ ID NO: 787876 - RNA, 19 nt, Artificial Sequence
  Description of Artificial Sequence: Synthetic oligonucleotide
ugcguucccagaaggucuc

SEQ ID NO: 787877 - RNA, 19 nt, Artificial Sequence
  Description of Artificial Sequence: Synthetic oligonucleotide
agcaccuucccaccacgcu

SEQ ID NO: 787878 - RNA, 19 nt, Artificial Sequence
  Description of Artificial Sequence: Synthetic oligonucleotide
gauaagcaaguuggggcga

SEQ ID NO: 787879 - RNA, 19 nt, Artificial Sequence
  Description of Artificial Sequence: Synthetic oligonucleotide
gcgccugucaucauuguag

SEQ ID NO: 787880 - RNA, 19 nt, Artificial Sequence
  Description of Artificial Sequence: Synthetic oligonucleotide
caguaguaccuuaguacca

SEQ ID NO: 787881 - RNA, 19 nt, Artificial Sequence
  Description of Artificial Sequence: Synthetic oligonucleotide
auauguggauucugugaua

SEQ ID NO: 787882 - RNA, 19 nt, Artificial Sequence
  Description of Artificial Sequence: Synthetic oligonucleotide
ggcugaugauuacacaguc

SEQ ID NO: 787883 - RNA, 19 nt, Artificial Sequence
  Description of Artificial Sequence: Synthetic oligonucleotide
cauuggcuggcauguagca

SEQ ID NO: 787884 - RNA, 19 nt, Artificial Sequence
  Description of Artificial Sequence: Synthetic oligonucleotide
ugcgaucuugcgguagucu

SEQ ID NO: 787885 - RNA, 19 nt, Artificial Sequence
  Description of Artificial Sequence: Synthetic oligonucleotide
gcacccgacaggugaaacg

SEQ ID NO: 787886 - RNA, 19 nt, Artificial Sequence
  Description of Artificial Sequence: Synthetic oligonucleotide
augcguucccagaaggucu

SEQ ID NO: 787887 - RNA, 19 nt, Artificial Sequence
  Description of Artificial Sequence: Synthetic oligonucleotide
cguuuagagucucgaaugg

SEQ ID NO: 787888 - RNA, 19 nt, Artificial Sequence
  Description of Artificial Sequence: Synthetic oligonucleotide
caggcaucguccgggaggc

SEQ ID NO: 787889 - RNA, 19 nt, Artificial Sequence
  Description of Artificial Sequence: Synthetic oligonucleotide
gucucgaaugguuguggca

SEQ ID NO: 787890 - RNA, 19 nt, Artificial Sequence
  Description of Artificial Sequence: Synthetic oligonucleotide
cauccugguagguccagga

SEQ ID NO: 787891 - RNA, 19 nt, Artificial Sequence
  Description of Artificial Sequence: Synthetic oligonucleotide
ugaugcccuuggcaucagc

SEQ ID NO: 787892 - RNA, 19 nt, Artificial Sequence
  Description of Artificial Sequence: Synthetic oligonucleotide
gcguguguccugcaggugc

SEQ ID NO: 787893 - RNA, 19 nt, Artificial Sequence
  Description of Artificial Sequence: Synthetic oligonucleotide
cugagccgacuuuaaucug

SEQ ID NO: 787894 - RNA, 19 nt, Artificial Sequence
  Description of Artificial Sequence: Synthetic oligonucleotide
caucguagcccaccauuuc

SEQ ID NO: 787895 - RNA, 19 nt, Artificial Sequence
  Description of Artificial Sequence: Synthetic oligonucleotide
ccguguagaccacagacuc

SEQ ID NO: 787896 - RNA, 19 nt, Artificial Sequence
  Description of Artificial Sequence: Synthetic oligonucleotide
cacugaaguaagggagugc

SEQ ID NO: 787897 - RNA, 19 nt, Artificial Sequence
  Description of Artificial Sequence: Synthetic oligonucleotide
ccauuggcuggcauguagc

SEQ ID NO: 787898 - RNA, 19 nt, Artificial Sequence
  Description of Artificial Sequence: Synthetic oligonucleotide
gcauaguaugccuugauuu

SEQ ID NO: 787899 - RNA, 19 nt, Artificial Sequence
  Description of Artificial Sequence: Synthetic oligonucleotide
gcuuauaguagugguuggc

SEQ ID NO: 787900 - RNA, 19 nt, Artificial Sequence
  Description of Artificial Sequence: Synthetic oligonucleotide
gguucaugcguucccagaa

SEQ ID NO: 787901 - RNA, 19 nt, Artificial Sequence
  Description of Artificial Sequence: Synthetic oligonucleotide
uggggugggucauguagau

SEQ ID NO: 787902 - RNA, 19 nt, Artificial Sequence
  Description of Artificial Sequence: Synthetic oligonucleotide
aagcgccugucaucauugu

SEQ ID NO: 787903 - RNA, 19 nt, Artificial Sequence
  Description of Artificial Sequence: Synthetic oligonucleotide
ccguagagaaguagauggg

SEQ ID NO: 787904 - RNA, 19 nt, Artificial Sequence
  Description of Artificial Sequence: Synthetic oligonucleotide
cuuuaccuccagcaccuga

SEQ ID NO: 787905 - RNA, 19 nt, Artificial Sequence
  Description of Artificial Sequence: Synthetic oligonucleotide
uggggcgacacuugucaau

SEQ ID NO: 787906 - RNA, 19 nt, Artificial Sequence
  Description of Artificial Sequence: Synthetic oligonucleotide
guagugguuggccuucucu

SEQ ID NO: 787907 - RNA, 19 nt, Artificial Sequence
  Description of Artificial Sequence: Synthetic oligonucleotide
aguuggggcgacacuuguc

SEQ ID NO: 787908 - RNA, 19 nt, Artificial Sequence
  Description of Artificial Sequence: Synthetic oligonucleotide
aaaugccggucugggguca

SEQ ID NO: 787909 - RNA, 19 nt, Artificial Sequence
  Description of Artificial Sequence: Synthetic oligonucleotide
cuugcccgaaauggagacc

SEQ ID NO: 787910 - RNA, 19 nt, Artificial Sequence
  Description of Artificial Sequence: Synthetic oligonucleotide
gcugaugauuacacagucc

SEQ ID NO: 787911 - RNA, 19 nt, Artificial Sequence
  Description of Artificial Sequence: Synthetic oligonucleotide
ucgaaugguuguggcauau

SEQ ID NO: 787912 - RNA, 19 nt, Artificial Sequence
  Description of Artificial Sequence: Synthetic oligonucleotide
cucgaacugcguuuccaca

SEQ ID NO: 787913 - RNA, 19 nt, Artificial Sequence
  Description of Artificial Sequence: Synthetic oligonucleotide
uaguaccaggguccuccga

SEQ ID NO: 787914 - RNA, 19 nt, Artificial Sequence
  Description of Artificial Sequence: Synthetic oligonucleotide
ugcccgaaauggagaccag

SEQ ID NO: 787915 - RNA, 19 nt, Artificial Sequence
  Description of Artificial Sequence: Synthetic oligonucleotide
agcgucacugucucaccau

SEQ ID NO: 787916 - RNA, 19 nt, Artificial Sequence
  Description of Artificial Sequence: Synthetic oligonucleotide
ccuugaggguacuuuugag

SEQ ID NO: 787917 - RNA, 19 nt, Artificial Sequence
  Description of Artificial Sequence: Synthetic oligonucleotide
cacuuucggaagaucugca

SEQ ID NO: 787918 - RNA, 19 nt, Artificial Sequence
  Description of Artificial Sequence: Synthetic oligonucleotide
ccacuuucggaagaucugc

SEQ ID NO: 787919 - RNA, 19 nt, Artificial Sequence
  Description of Artificial Sequence: Synthetic oligonucleotide
accugacgccccuccaucu

SEQ ID NO: 787920 - RNA, 19 nt, Artificial Sequence
  Description of Artificial Sequence: Synthetic oligonucleotide
guccuugaggguacuuuug

SEQ ID NO: 787921 - RNA, 19 nt, Artificial Sequence
  Description of Artificial Sequence: Synthetic oligonucleotide
cguagagaaguagaugggc

SEQ ID NO: 787922 - RNA, 19 nt, Artificial Sequence
  Description of Artificial Sequence: Synthetic oligonucleotide
gacuuuaaucuggaacaua

SEQ ID NO: 787923 - RNA, 19 nt, Artificial Sequence
  Description of Artificial Sequence: Synthetic oligonucleotide
uaagcaaguuggggcgaca

SEQ ID NO: 787924 - RNA, 19 nt, Artificial Sequence
  Description of Artificial Sequence: Synthetic oligonucleotide
cagcgcaaauacagggauc

SEQ ID NO: 787925 - RNA, 19 nt, Artificial Sequence
  Description of Artificial Sequence: Synthetic oligonucleotide
aggauaccagccggaaacu

SEQ ID NO: 787926 - RNA, 19 nt, Artificial Sequence
  Description of Artificial Sequence: Synthetic oligonucleotide
ugaccauguucuucucguu

SEQ ID NO: 787927 - RNA, 19 nt, Artificial Sequence
  Description of Artificial Sequence: Synthetic oligonucleotide
gaaccgucuggugcaggug

SEQ ID NO: 787928 - RNA, 19 nt, Artificial Sequence
  Description of Artificial Sequence: Synthetic oligonucleotide
aucucguucucugcagcgu

SEQ ID NO: 787929 - RNA, 19 nt, Artificial Sequence
  Description of Artificial Sequence: Synthetic oligonucleotide
aggguacuuuugagguggc

SEQ ID NO: 787930 - RNA, 19 nt, Artificial Sequence
  Description of Artificial Sequence: Synthetic oligonucleotide
ugcacccgacaggugaaac

SEQ ID NO: 787931 - RNA, 19 nt, Artificial Sequence
  Description of Artificial Sequence: Synthetic oligonucleotide
gaaagcgccugucaucauu

SEQ ID NO: 787932 - RNA, 19 nt, Artificial Sequence
  Description of Artificial Sequence: Synthetic oligonucleotide
uucucguuuccugcccacu

SEQ ID NO: 787933 - RNA, 19 nt, Artificial Sequence
  Description of Artificial Sequence: Synthetic oligonucleotide
uuggggcgacacuugucaa

SEQ ID NO: 787934 - RNA, 19 nt, Artificial Sequence
  Description of Artificial Sequence: Synthetic oligonucleotide
cuucauccugguaggucca

SEQ ID NO: 787935 - RNA, 19 nt, Artificial Sequence
  Description of Artificial Sequence: Synthetic oligonucleotide
acaugacauucuugcccga

SEQ ID NO: 787936 - RNA, 19 nt, Artificial Sequence
  Description of Artificial Sequence: Synthetic oligonucleotide
ggcgacacuugucaaucca

SEQ ID NO: 787937 - RNA, 19 nt, Artificial Sequence
  Description of Artificial Sequence: Synthetic oligonucleotide
cagucucgaacugcguuuc

SEQ ID NO: 787938 - RNA, 19 nt, Artificial Sequence
  Description of Artificial Sequence: Synthetic oligonucleotide
guaugccuugauuuccagu

SEQ ID NO: 787939 - RNA, 19 nt, Artificial Sequence
  Description of Artificial Sequence: Synthetic oligonucleotide
agcgccugucaucauugua

SEQ ID NO: 787940 - RNA, 19 nt, Artificial Sequence
  Description of Artificial Sequence: Synthetic oligonucleotide
cccacuuucggaagaucug

SEQ ID NO: 787941 - RNA, 19 nt, Artificial Sequence
  Description of Artificial Sequence: Synthetic oligonucleotide
uacuuuugagguggcugua

SEQ ID NO: 787942 - RNA, 19 nt, Artificial Sequence
  Description of Artificial Sequence: Synthetic oligonucleotide
caguccaacaugacauucu

SEQ ID NO: 787943 - RNA, 19 nt, Artificial Sequence
  Description of Artificial Sequence: Synthetic oligonucleotide
gagccgacuuuaaucugga

SEQ ID NO: 787944 - RNA, 19 nt, Artificial Sequence
  Description of Artificial Sequence: Synthetic oligonucleotide
uguauuccacuugcaucuu

SEQ ID NO: 787945 - RNA, 19 nt, Artificial Sequence
  Description of Artificial Sequence: Synthetic oligonucleotide
guggggugggucauguaga

SEQ ID NO: 787946 - RNA, 19 nt, Artificial Sequence
  Description of Artificial Sequence: Synthetic oligonucleotide
agcaccugacgccccucca

SEQ ID NO: 787947 - RNA, 19 nt, Artificial Sequence
  Description of Artificial Sequence: Synthetic oligonucleotide
cacugcgaucuugcgguag

SEQ ID NO: 787948 - RNA, 19 nt, Artificial Sequence
  Description of Artificial Sequence: Synthetic oligonucleotide
cuggguugucagcaaaugu

SEQ ID NO: 787949 - RNA, 19 nt, Artificial Sequence
  Description of Artificial Sequence: Synthetic oligonucleotide
acauguuccucuggacaaa

SEQ ID NO: 787950 - RNA, 19 nt, Artificial Sequence
  Description of Artificial Sequence: Synthetic oligonucleotide
gacgccccuccaucuccag

SEQ ID NO: 787951 - RNA, 19 nt, Artificial Sequence
  Description of Artificial Sequence: Synthetic oligonucleotide
gcccgaaauggagaccagg

SEQ ID NO: 787952 - RNA, 19 nt, Artificial Sequence
  Description of Artificial Sequence: Synthetic oligonucleotide
ucaggcccguagagaagua

SEQ ID NO: 787953 - RNA, 19 nt, Artificial Sequence
  Description of Artificial Sequence: Synthetic oligonucleotide
cugaaccgucuggugcagg

SEQ ID NO: 787954 - RNA, 19 nt, Artificial Sequence
  Description of Artificial Sequence: Synthetic oligonucleotide
ugcguguguccugcaggug

SEQ ID NO: 787955 - RNA, 19 nt, Artificial Sequence
  Description of Artificial Sequence: Synthetic oligonucleotide
gucaggcccguagagaagu

SEQ ID NO: 787956 - RNA, 19 nt, Artificial Sequence
  Description of Artificial Sequence: Synthetic oligonucleotide
cgacacuugucaauccaug

SEQ ID NO: 787957 - RNA, 19 nt, Artificial Sequence
  Description of Artificial Sequence: Synthetic oligonucleotide
ggggcgacacuugucaauc

SEQ ID NO: 787958 - RNA, 19 nt, Artificial Sequence
  Description of Artificial Sequence: Synthetic oligonucleotide
ggacaaaugucuugcggau

SEQ ID NO: 787959 - RNA, 19 nt, Artificial Sequence
  Description of Artificial Sequence: Synthetic oligonucleotide
ggcccagcgcaaauacagg

SEQ ID NO: 787960 - RNA, 19 nt, Artificial Sequence
  Description of Artificial Sequence: Synthetic oligonucleotide
gcagcguuuagagucucga

SEQ ID NO: 787961 - RNA, 19 nt, Artificial Sequence
  Description of Artificial Sequence: Synthetic oligonucleotide
cagcguuuagagucucgaa

SEQ ID NO: 787962 - RNA, 19 nt, Artificial Sequence
  Description of Artificial Sequence: Synthetic oligonucleotide
cgaacugcguuuccacagc

SEQ ID NO: 787963 - RNA, 19 nt, Artificial Sequence
  Description of Artificial Sequence: Synthetic oligonucleotide
cacgcuccacagucucaug

SEQ ID NO: 787964 - RNA, 19 nt, Artificial Sequence
  Description of Artificial Sequence: Synthetic oligonucleotide
cguuuccugcccacuuucg

SEQ ID NO: 787965 - RNA, 19 nt, Artificial Sequence
  Description of Artificial Sequence: Synthetic oligonucleotide
ccgggaggcagucucgaac

SEQ ID NO: 787966 - RNA, 19 nt, Artificial Sequence
  Description of Artificial Sequence: Synthetic oligonucleotide
caaccaugggaccuggguu

SEQ ID NO: 787967 - RNA, 19 nt, Artificial Sequence
  Description of Artificial Sequence: Synthetic oligonucleotide
gcccguagagaaguagaug

SEQ ID NO: 787968 - RNA, 19 nt, Artificial Sequence
  Description of Artificial Sequence: Synthetic oligonucleotide
cugagaagugaagaaguuu

SEQ ID NO: 787969 - RNA, 19 nt, Artificial Sequence
  Description of Artificial Sequence: Synthetic oligonucleotide
gcccacuaaggaucuugug

SEQ ID NO: 787970 - RNA, 19 nt, Artificial Sequence
  Description of Artificial Sequence: Synthetic oligonucleotide
aaugccggucuggggucau

SEQ ID NO: 787971 - RNA, 19 nt, Artificial Sequence
  Description of Artificial Sequence: Synthetic oligonucleotide
gcaugggcacuaaaugaca

SEQ ID NO: 787972 - RNA, 19 nt, Artificial Sequence
  Description of Artificial Sequence: Synthetic oligonucleotide
gguugguccaggugaugaa

SEQ ID NO: 787973 - RNA, 19 nt, Artificial Sequence
  Description of Artificial Sequence: Synthetic oligonucleotide
guuguggcauauguggauu

SEQ ID NO: 787974 - RNA, 19 nt, Artificial Sequence
  Description of Artificial Sequence: Synthetic oligonucleotide
cacccaccucccaaagcca

SEQ ID NO: 787975 - RNA, 19 nt, Artificial Sequence
  Description of Artificial Sequence: Synthetic oligonucleotide
ggauaagaauggacuccac

SEQ ID NO: 787976 - RNA, 19 nt, Artificial Sequence
  Description of Artificial Sequence: Synthetic oligonucleotide
cagcccgcgugcaccgccc

SEQ ID NO: 787977 - RNA, 19 nt, Artificial Sequence
  Description of Artificial Sequence: Synthetic oligonucleotide
gggcgacacuugucaaucc

SEQ ID NO: 787978 - RNA, 19 nt, Artificial Sequence
  Description of Artificial Sequence: Synthetic oligonucleotide
ggcuguacacacggagggc

SEQ ID NO: 787979 - RNA, 19 nt, Artificial Sequence
  Description of Artificial Sequence: Synthetic oligonucleotide
cugaggauaccagccggaa

SEQ ID NO: 787980 - RNA, 19 nt, Artificial Sequence
  Description of Artificial Sequence: Synthetic oligonucleotide
cucgaaugguuguggcaua

SEQ ID NO: 787981 - RNA, 19 nt, Artificial Sequence
  Description of Artificial Sequence: Synthetic oligonucleotide
cgguagucuuccaacagga

SEQ ID NO: 787982 - RNA, 19 nt, Artificial Sequence
  Description of Artificial Sequence: Synthetic oligonucleotide
gguuacaugucagcugggu

SEQ ID NO: 787983 - RNA, 19 nt, Artificial Sequence
  Description of Artificial Sequence: Synthetic oligonucleotide
cccagcgcaaauacaggga

SEQ ID NO: 787984 - RNA, 19 nt, Artificial Sequence
  Description of Artificial Sequence: Synthetic oligonucleotide
gguccuccgagugggcagc

SEQ ID NO: 787985 - RNA, 19 nt, Artificial Sequence
  Description of Artificial Sequence: Synthetic oligonucleotide
caucguccgggaggcaguc

SEQ ID NO: 787986 - RNA, 19 nt, Artificial Sequence
  Description of Artificial Sequence: Synthetic oligonucleotide
caggugcacccgacaggug

SEQ ID NO: 787987 - RNA, 19 nt, Artificial Sequence
  Description of Artificial Sequence: Synthetic oligonucleotide
augaugcccuuggcaucag

SEQ ID NO: 787988 - RNA, 19 nt, Artificial Sequence
  Description of Artificial Sequence: Synthetic oligonucleotide
gggcacccaccucccaaag

SEQ ID NO: 787989 - RNA, 19 nt, Artificial Sequence
  Description of Artificial Sequence: Synthetic oligonucleotide
gcgugcaccgcccgcagga

SEQ ID NO: 787990 - RNA, 19 nt, Artificial Sequence
  Description of Artificial Sequence: Synthetic oligonucleotide
cccggcccagcgcaaauac

SEQ ID NO: 787991 - RNA, 19 nt, Artificial Sequence
  Description of Artificial Sequence: Synthetic oligonucleotide
caucagcaugggcacuaaa

SEQ ID NO: 787992 - RNA, 19 nt, Artificial Sequence
  Description of Artificial Sequence: Synthetic oligonucleotide
caguugcaugaugcccuug

SEQ ID NO: 787993 - RNA, 19 nt, Artificial Sequence
  Description of Artificial Sequence: Synthetic oligonucleotide
guucgaucuucugccucaa

SEQ ID NO: 787994 - RNA, 19 nt, Artificial Sequence
  Description of Artificial Sequence: Synthetic oligonucleotide
cacccguguagaccacaga

SEQ ID NO: 787995 - RNA, 19 nt, Artificial Sequence
  Description of Artificial Sequence: Synthetic oligonucleotide
gcugacccggaauuccugu

SEQ ID NO: 787996 - RNA, 19 nt, Artificial Sequence
  Description of Artificial Sequence: Synthetic oligonucleotide
gucauguagauaggcccau

SEQ ID NO: 787997 - RNA, 19 nt, Artificial Sequence
  Description of Artificial Sequence: Synthetic oligonucleotide
cugcauaguaugccuugau

SEQ ID NO: 787998 - RNA, 19 nt, Artificial Sequence
  Description of Artificial Sequence: Synthetic oligonucleotide
auacagggaucagcaccuu

SEQ ID NO: 787999 - RNA, 19 nt, Artificial Sequence
  Description of Artificial Sequence: Synthetic oligonucleotide
guccgggaggcagucucga

SEQ ID NO: 788000 - RNA, 19 nt, Artificial Sequence
  Description of Artificial Sequence: Synthetic oligonucleotide
gcgcaaauacagggaucag

SEQ ID NO: 788001 - RNA, 19 nt, Artificial Sequence
  Description of Artificial Sequence: Synthetic oligonucleotide
gugccccacagugguccag

SEQ ID NO: 788002 - RNA, 19 nt, Artificial Sequence
  Description of Artificial Sequence: Synthetic oligonucleotide
accgucuggugcaggugaa

SEQ ID NO: 788003 - RNA, 19 nt, Artificial Sequence
  Description of Artificial Sequence: Synthetic oligonucleotide
agcuuccguugcccacuaa

SEQ ID NO: 788004 - RNA, 19 nt, Artificial Sequence
  Description of Artificial Sequence: Synthetic oligonucleotide
ccugacgccccuccaucuc

SEQ ID NO: 788005 - RNA, 19 nt, Artificial Sequence
  Description of Artificial Sequence: Synthetic oligonucleotide
aucguccgggaggcagucu

SEQ ID NO: 788006 - RNA, 19 nt, Artificial Sequence
  Description of Artificial Sequence: Synthetic oligonucleotide
cguccgggaggcagucucg

SEQ ID NO: 788007 - RNA, 19 nt, Artificial Sequence
  Description of Artificial Sequence: Synthetic oligonucleotide
ccagcgcaaauacagggau

SEQ ID NO: 788008 - RNA, 19 nt, Artificial Sequence
  Description of Artificial Sequence: Synthetic oligonucleotide
ccugcauaguaugccuuga

SEQ ID NO: 788009 - RNA, 19 nt, Artificial Sequence
  Description of Artificial Sequence: Synthetic oligonucleotide
caggugaaacgcaguugau

SEQ ID NO: 788010 - RNA, 19 nt, Artificial Sequence
  Description of Artificial Sequence: Synthetic oligonucleotide
ccugaaccgucuggugcag

SEQ ID NO: 788011 - RNA, 19 nt, Artificial Sequence
  Description of Artificial Sequence: Synthetic oligonucleotide
cccguguagaccacagacu

SEQ ID NO: 788012 - RNA, 19 nt, Artificial Sequence
  Description of Artificial Sequence: Synthetic oligonucleotide
cagauggccuggguggggu

SEQ ID NO: 788013 - RNA, 19 nt, Artificial Sequence
  Description of Artificial Sequence: Synthetic oligonucleotide
cagucucaugaacuuucuu

SEQ ID NO: 788014 - RNA, 19 nt, Artificial Sequence
  Description of Artificial Sequence: Synthetic oligonucleotide
agaugcccacagggaugcu

SEQ ID NO: 788015 - RNA, 19 nt, Artificial Sequence
  Description of Artificial Sequence: Synthetic oligonucleotide
cgcaguugaugcucagcca

SEQ ID NO: 788016 - RNA, 19 nt, Artificial Sequence
  Description of Artificial Sequence: Synthetic oligonucleotide
ccaaagccaaaauccugau

SEQ ID NO: 788017 - RNA, 19 nt, Artificial Sequence
  Description of Artificial Sequence: Synthetic oligonucleotide
ccaucguagcccaccauuu

SEQ ID NO: 788018 - RNA, 19 nt, Artificial Sequence
  Description of Artificial Sequence: Synthetic oligonucleotide
cuugucccaccaguugcau

SEQ ID NO: 788019 - RNA, 19 nt, Artificial Sequence
  Description of Artificial Sequence: Synthetic oligonucleotide
ccuuaagggcuugcucuga

SEQ ID NO: 788020 - RNA, 19 nt, Artificial Sequence
  Description of Artificial Sequence: Synthetic oligonucleotide
gugcacccgacaggugaaa

SEQ ID NO: 788021 - RNA, 19 nt, Artificial Sequence
  Description of Artificial Sequence: Synthetic oligonucleotide
gcgacacuugucaauccau

SEQ ID NO: 788022 - RNA, 19 nt, Artificial Sequence
  Description of Artificial Sequence: Synthetic oligonucleotide
cccaucguagcccaccauu

SEQ ID NO: 788023 - RNA, 19 nt, Artificial Sequence
  Description of Artificial Sequence: Synthetic oligonucleotide
cagcuuccguugcccacua

SEQ ID NO: 788024 - RNA, 19 nt, Artificial Sequence
  Description of Artificial Sequence: Synthetic oligonucleotide
ccgucuggugcaggugaac

SEQ ID NO: 788025 - RNA, 19 nt, Artificial Sequence
  Description of Artificial Sequence: Synthetic oligonucleotide
guccuccgagugggcagca

SEQ ID NO: 788026 - RNA, 19 nt, Artificial Sequence
  Description of Artificial Sequence: Synthetic oligonucleotide
gcaucagcaugggcacuaa

SEQ ID NO: 788027 - RNA, 19 nt, Artificial Sequence
  Description of Artificial Sequence: Synthetic oligonucleotide
cccaagggagugacucuua

SEQ ID NO: 788028 - RNA, 19 nt, Artificial Sequence
  Description of Artificial Sequence: Synthetic oligonucleotide
ggguacuuuugagguggcu

SEQ ID NO: 788029 - RNA, 19 nt, Artificial Sequence
  Description of Artificial Sequence: Synthetic oligonucleotide
aggcaucguccgggaggca

SEQ ID NO: 788030 - RNA, 19 nt, Artificial Sequence
  Description of Artificial Sequence: Synthetic oligonucleotide
gcccgcgugcaccgcccgc

SEQ ID NO: 788031 - RNA, 19 nt, Artificial Sequence
  Description of Artificial Sequence: Synthetic oligonucleotide
ccgcgugcaccgcccgcag

SEQ ID NO: 788032 - RNA, 19 nt, Artificial Sequence
  Description of Artificial Sequence: Synthetic oligonucleotide
gugcccggcccagcgcaaa

SEQ ID NO: 788033 - RNA, 19 nt, Artificial Sequence
  Description of Artificial Sequence: Synthetic oligonucleotide
ggccugcauaguaugccuu

SEQ ID NO: 788034 - RNA, 19 nt, Artificial Sequence
  Description of Artificial Sequence: Synthetic oligonucleotide
gucccaccaguugcaugau

SEQ ID NO: 788035 - RNA, 19 nt, Artificial Sequence
  Description of Artificial Sequence: Synthetic oligonucleotide
cgacuuuaaucuggaacau

SEQ ID NO: 788036 - RNA, 19 nt, Artificial Sequence
  Description of Artificial Sequence: Synthetic oligonucleotide
ccacgcuccacagucucau

SEQ ID NO: 788037 - RNA, 19 nt, Artificial Sequence
  Description of Artificial Sequence: Synthetic oligonucleotide
ccaguugcaugaugcccuu

SEQ ID NO: 788038 - RNA, 19 nt, Artificial Sequence
  Description of Artificial Sequence: Synthetic oligonucleotide
gugccuggggaaggccauu

SEQ ID NO: 788039 - RNA, 19 nt, Artificial Sequence
  Description of Artificial Sequence: Synthetic oligonucleotide
gcccggcccagcgcaaaua

SEQ ID NO: 788040 - RNA, 19 nt, Artificial Sequence
  Description of Artificial Sequence: Synthetic oligonucleotide
aaacaugucauuuugccac

SEQ ID NO: 788041 - RNA, 19 nt, Artificial Sequence
  Description of Artificial Sequence: Synthetic oligonucleotide
aaguguuuaguaucgaugc

SEQ ID NO: 788042 - RNA, 19 nt, Artificial Sequence
  Description of Artificial Sequence: Synthetic oligonucleotide
uuuucaguaggacacaucg

SEQ ID NO: 788043 - RNA, 19 nt, Artificial Sequence
  Description of Artificial Sequence: Synthetic oligonucleotide
uuaguaucgaugcaaaugg

SEQ ID NO: 788044 - RNA, 19 nt, Artificial Sequence
  Description of Artificial Sequence: Synthetic oligonucleotide
uguagaauaauauacuggc

SEQ ID NO: 788045 - RNA, 19 nt, Artificial Sequence
  Description of Artificial Sequence: Synthetic oligonucleotide
uaauuagaaacucuuauug

SEQ ID NO: 788046 - RNA, 19 nt, Artificial Sequence
  Description of Artificial Sequence: Synthetic oligonucleotide
aaggugaucauaaauaagg

SEQ ID NO: 788047 - RNA, 19 nt, Artificial Sequence
  Description of Artificial Sequence: Synthetic oligonucleotide
aauguagaauaauauacug

SEQ ID NO: 788048 - RNA, 19 nt, Artificial Sequence
  Description of Artificial Sequence: Synthetic oligonucleotide
ucuaaauugaaacauguaa

SEQ ID NO: 788049 - RNA, 19 nt, Artificial Sequence
  Description of Artificial Sequence: Synthetic oligonucleotide
aguauaggcacaaaggucc

SEQ ID NO: 788050 - RNA, 19 nt, Artificial Sequence
  Description of Artificial Sequence: Synthetic oligonucleotide
uuuaauuuuguucaauccu

SEQ ID NO: 788051 - RNA, 19 nt, Artificial Sequence
  Description of Artificial Sequence: Synthetic oligonucleotide
aaccaugaggaacaguacc

SEQ ID NO: 788052 - RNA, 19 nt, Artificial Sequence
  Description of Artificial Sequence: Synthetic oligonucleotide
ugaaacauguaacagucag

SEQ ID NO: 788053 - RNA, 19 nt, Artificial Sequence
  Description of Artificial Sequence: Synthetic oligonucleotide
ugauugauuacugagauga

SEQ ID NO: 788054 - RNA, 19 nt, Artificial Sequence
  Description of Artificial Sequence: Synthetic oligonucleotide
aauugaaacauguaacagu

SEQ ID NO: 788055 - RNA, 19 nt, Artificial Sequence
  Description of Artificial Sequence: Synthetic oligonucleotide
uuaauugcccaucaaaaug

SEQ ID NO: 788056 - RNA, 19 nt, Artificial Sequence
  Description of Artificial Sequence: Synthetic oligonucleotide
uuuugaaaauccuucaggc

SEQ ID NO: 788057 - RNA, 19 nt, Artificial Sequence
  Description of Artificial Sequence: Synthetic oligonucleotide
uggaaaucgaacuuggucc

SEQ ID NO: 788058 - RNA, 19 nt, Artificial Sequence
  Description of Artificial Sequence: Synthetic oligonucleotide
uagaauaauauacuggccu

SEQ ID NO: 788059 - RNA, 19 nt, Artificial Sequence
  Description of Artificial Sequence: Synthetic oligonucleotide
uuuaaggugaucauaaaua

SEQ ID NO: 788060 - RNA, 19 nt, Artificial Sequence
  Description of Artificial Sequence: Synthetic oligonucleotide
caacaaauauucuucaggg

SEQ ID NO: 788061 - RNA, 19 nt, Artificial Sequence
  Description of Artificial Sequence: Synthetic oligonucleotide
uggauguucacauagucag

SEQ ID NO: 788062 - RNA, 19 nt, Artificial Sequence
  Description of Artificial Sequence: Synthetic oligonucleotide
agcuacuccacuuauguac

SEQ ID NO: 788063 - RNA, 19 nt, Artificial Sequence
  Description of Artificial Sequence: Synthetic oligonucleotide
uaauauacuggccuggucu

SEQ ID NO: 788064 - RNA, 19 nt, Artificial Sequence
  Description of Artificial Sequence: Synthetic oligonucleotide
ucgaagauaagccaggagu

SEQ ID NO: 788065 - RNA, 19 nt, Artificial Sequence
  Description of Artificial Sequence: Synthetic oligonucleotide
aacacagauaguuaugcca

SEQ ID NO: 788066 - RNA, 19 nt, Artificial Sequence
  Description of Artificial Sequence: Synthetic oligonucleotide
ugggauaauuucuagacug

SEQ ID NO: 788067 - RNA, 19 nt, Artificial Sequence
  Description of Artificial Sequence: Synthetic oligonucleotide
aaugaucgaaugucucugc

SEQ ID NO: 788068 - RNA, 19 nt, Artificial Sequence
  Description of Artificial Sequence: Synthetic oligonucleotide
aaauaaaagcuuccaacga

SEQ ID NO: 788069 - RNA, 19 nt, Artificial Sequence
  Description of Artificial Sequence: Synthetic oligonucleotide
agugagauaaguuccucac

SEQ ID NO: 788070 - RNA, 19 nt, Artificial Sequence
  Description of Artificial Sequence: Synthetic oligonucleotide
uaucccaucuguuugacug

SEQ ID NO: 788071 - RNA, 19 nt, Artificial Sequence
  Description of Artificial Sequence: Synthetic oligonucleotide
aaagauuagucuccuaaga

SEQ ID NO: 788072 - RNA, 19 nt, Artificial Sequence
  Description of Artificial Sequence: Synthetic oligonucleotide
uuuaguaucgaugcaaaug

SEQ ID NO: 788073 - RNA, 19 nt, Artificial Sequence
  Description of Artificial Sequence: Synthetic oligonucleotide
aaauugaaacauguaacag

SEQ ID NO: 788074 - RNA, 19 nt, Artificial Sequence
  Description of Artificial Sequence: Synthetic oligonucleotide
uucaguaggacacaucgug

SEQ ID NO: 788075 - RNA, 19 nt, Artificial Sequence
  Description of Artificial Sequence: Synthetic oligonucleotide
uuaagacugaugcagccag

SEQ ID NO: 788076 - RNA, 19 nt, Artificial Sequence
  Description of Artificial Sequence: Synthetic oligonucleotide
aauucucacuuuuaaggug

SEQ ID NO: 788077 - RNA, 19 nt, Artificial Sequence
  Description of Artificial Sequence: Synthetic oligonucleotide
cuugggauaauuucuagac

SEQ ID NO: 788078 - RNA, 19 nt, Artificial Sequence
  Description of Artificial Sequence: Synthetic oligonucleotide
auuggaaugaucgaauguc

SEQ ID NO: 788079 - RNA, 19 nt, Artificial Sequence
  Description of Artificial Sequence: Synthetic oligonucleotide
ugcuauuucaucaaauaaa

SEQ ID NO: 788080 - RNA, 19 nt, Artificial Sequence
  Description of Artificial Sequence: Synthetic oligonucleotide
acaucgugagaguaaaugg

SEQ ID NO: 788081 - RNA, 19 nt, Artificial Sequence
  Description of Artificial Sequence: Synthetic oligonucleotide
aguuguagaaauugcacug

SEQ ID NO: 788082 - RNA, 19 nt, Artificial Sequence
  Description of Artificial Sequence: Synthetic oligonucleotide
uuauugcauagguagaagc

SEQ ID NO: 788083 - RNA, 19 nt, Artificial Sequence
  Description of Artificial Sequence: Synthetic oligonucleotide
ugagauaaguuccucacaa

SEQ ID NO: 788084 - RNA, 19 nt, Artificial Sequence
  Description of Artificial Sequence: Synthetic oligonucleotide
caacgucuuacuuuuaucc

SEQ ID NO: 788085 - RNA, 19 nt, Artificial Sequence
  Description of Artificial Sequence: Synthetic oligonucleotide
uuaaggugaucauaaauaa

SEQ ID NO: 788086 - RNA, 19 nt, Artificial Sequence
  Description of Artificial Sequence: Synthetic oligonucleotide
gucugguuaagacugaugc

SEQ ID NO: 788087 - RNA, 19 nt, Artificial Sequence
  Description of Artificial Sequence: Synthetic oligonucleotide
acauuuugcuauuucauca

SEQ ID NO: 788088 - RNA, 19 nt, Artificial Sequence
  Description of Artificial Sequence: Synthetic oligonucleotide
ugaaucaccaacaaauauu

SEQ ID NO: 788089 - RNA, 19 nt, Artificial Sequence
  Description of Artificial Sequence: Synthetic oligonucleotide
uuauuguauucaaauuuug

SEQ ID NO: 788090 - RNA, 19 nt, Artificial Sequence
  Description of Artificial Sequence: Synthetic oligonucleotide
agcaagugagauaaguucc

SEQ ID NO: 788091 - RNA, 19 nt, Artificial Sequence
  Description of Artificial Sequence: Synthetic oligonucleotide
auaguuaugccacagguua

SEQ ID NO: 788092 - RNA, 19 nt, Artificial Sequence
  Description of Artificial Sequence: Synthetic oligonucleotide
uacacugggacaauguaga

SEQ ID NO: 788093 - RNA, 19 nt, Artificial Sequence
  Description of Artificial Sequence: Synthetic oligonucleotide
aaaguguuuaguaucgaug

SEQ ID NO: 788094 - RNA, 19 nt, Artificial Sequence
  Description of Artificial Sequence: Synthetic oligonucleotide
uucuagacugaaugaaggg

SEQ ID NO: 788095 - RNA, 19 nt, Artificial Sequence
  Description of Artificial Sequence: Synthetic oligonucleotide
gguuacucaaauuaugaag

SEQ ID NO: 788096 - RNA, 19 nt, Artificial Sequence
  Description of Artificial Sequence: Synthetic oligonucleotide
uucuaaugcugauacacug

SEQ ID NO: 788097 - RNA, 19 nt, Artificial Sequence
  Description of Artificial Sequence: Synthetic oligonucleotide
aagauuagucuccuaagau

SEQ ID NO: 788098 - RNA, 19 nt, Artificial Sequence
  Description of Artificial Sequence: Synthetic oligonucleotide
agauaaguuccucacaaga

SEQ ID NO: 788099 - RNA, 19 nt, Artificial Sequence
  Description of Artificial Sequence: Synthetic oligonucleotide
uaucgaugcaaauggagug

SEQ ID NO: 788100 - RNA, 19 nt, Artificial Sequence
  Description of Artificial Sequence: Synthetic oligonucleotide
caucgugagaguaaauggg

SEQ ID NO: 788101 - RNA, 19 nt, Artificial Sequence
  Description of Artificial Sequence: Synthetic oligonucleotide
ucuucuguaucccaucugu

SEQ ID NO: 788102 - RNA, 19 nt, Artificial Sequence
  Description of Artificial Sequence: Synthetic oligonucleotide
gugaagagaagcuuucuag

SEQ ID NO: 788103 - RNA, 19 nt, Artificial Sequence
  Description of Artificial Sequence: Synthetic oligonucleotide
agauaguuaugccacaggu

SEQ ID NO: 788104 - RNA, 19 nt, Artificial Sequence
  Description of Artificial Sequence: Synthetic oligonucleotide
ucccacuacuuuaaagugg

SEQ ID NO: 788105 - RNA, 19 nt, Artificial Sequence
  Description of Artificial Sequence: Synthetic oligonucleotide
uuugaaaauccuucaggca

SEQ ID NO: 788106 - RNA, 19 nt, Artificial Sequence
  Description of Artificial Sequence: Synthetic oligonucleotide
agggcauucaucaaguggg

SEQ ID NO: 788107 - RNA, 19 nt, Artificial Sequence
  Description of Artificial Sequence: Synthetic oligonucleotide
auaaguuccucacaagaga

SEQ ID NO: 788108 - RNA, 19 nt, Artificial Sequence
  Description of Artificial Sequence: Synthetic oligonucleotide
guuacucaaauuaugaaga

SEQ ID NO: 788109 - RNA, 19 nt, Artificial Sequence
  Description of Artificial Sequence: Synthetic oligonucleotide
uuacucaaauuaugaagag

SEQ ID NO: 788110 - RNA, 19 nt, Artificial Sequence
  Description of Artificial Sequence: Synthetic oligonucleotide
uaaacaugucauuuugcca

SEQ ID NO: 788111 - RNA, 19 nt, Artificial Sequence
  Description of Artificial Sequence: Synthetic oligonucleotide
uccaauaaucuucuuguuc

SEQ ID NO: 788112 - RNA, 19 nt, Artificial Sequence
  Description of Artificial Sequence: Synthetic oligonucleotide
gaggcaguaguaaaucucg

SEQ ID NO: 788113 - RNA, 19 nt, Artificial Sequence
  Description of Artificial Sequence: Synthetic oligonucleotide
ucuagacugaaugaagggc

SEQ ID NO: 788114 - RNA, 19 nt, Artificial Sequence
  Description of Artificial Sequence: Synthetic oligonucleotide
aggaccaucaauguacaac

SEQ ID NO: 788115 - RNA, 19 nt, Artificial Sequence
  Description of Artificial Sequence: Synthetic oligonucleotide
guuacauuuugcuauuuca

SEQ ID NO: 788116 - RNA, 19 nt, Artificial Sequence
  Description of Artificial Sequence: Synthetic oligonucleotide
aacgucuuacuuuuaucca

SEQ ID NO: 788117 - RNA, 19 nt, Artificial Sequence
  Description of Artificial Sequence: Synthetic oligonucleotide
agcgguaaagucucucagc

SEQ ID NO: 788118 - RNA, 19 nt, Artificial Sequence
  Description of Artificial Sequence: Synthetic oligonucleotide
auaauuagaaacucuuauu

SEQ ID NO: 788119 - RNA, 19 nt, Artificial Sequence
  Description of Artificial Sequence: Synthetic oligonucleotide
augugaaucaccaacaaau

SEQ ID NO: 788120 - RNA, 19 nt, Artificial Sequence
  Description of Artificial Sequence: Synthetic oligonucleotide
agguccagaaauccaaauc

SEQ ID NO: 788121 - RNA, 19 nt, Artificial Sequence
  Description of Artificial Sequence: Synthetic oligonucleotide
aacuugggauaauuucuag

SEQ ID NO: 788122 - RNA, 19 nt, Artificial Sequence
  Description of Artificial Sequence: Synthetic oligonucleotide
uguugcuccggaugcagcg

SEQ ID NO: 788123 - RNA, 19 nt, Artificial Sequence
  Description of Artificial Sequence: Synthetic oligonucleotide
aagugagauaaguuccuca

SEQ ID NO: 788124 - RNA, 19 nt, Artificial Sequence
  Description of Artificial Sequence: Synthetic oligonucleotide
ugagggaugauugauuacu

SEQ ID NO: 788125 - RNA, 19 nt, Artificial Sequence
  Description of Artificial Sequence: Synthetic oligonucleotide
gugaucauaaauaaggaaa

SEQ ID NO: 788126 - RNA, 19 nt, Artificial Sequence
  Description of Artificial Sequence: Synthetic oligonucleotide
acgucuguggaaaaugagc

SEQ ID NO: 788127 - RNA, 19 nt, Artificial Sequence
  Description of Artificial Sequence: Synthetic oligonucleotide
uuccaaguuguagaaauug

SEQ ID NO: 788128 - RNA, 19 nt, Artificial Sequence
  Description of Artificial Sequence: Synthetic oligonucleotide
gagguugugaguauaccag

SEQ ID NO: 788129 - RNA, 19 nt, Artificial Sequence
  Description of Artificial Sequence: Synthetic oligonucleotide
uuugguaucuugcugcauu

SEQ ID NO: 788130 - RNA, 19 nt, Artificial Sequence
  Description of Artificial Sequence: Synthetic oligonucleotide
accauucugaguuccauga

SEQ ID NO: 788131 - RNA, 19 nt, Artificial Sequence
  Description of Artificial Sequence: Synthetic oligonucleotide
ugugcaacgucuuacuuuu

SEQ ID NO: 788132 - RNA, 19 nt, Artificial Sequence
  Description of Artificial Sequence: Synthetic oligonucleotide
agcaaaguguuuaguaucg

SEQ ID NO: 788133 - RNA, 19 nt, Artificial Sequence
  Description of Artificial Sequence: Synthetic oligonucleotide
aaaccauuggaaugaucga

SEQ ID NO: 788134 - RNA, 19 nt, Artificial Sequence
  Description of Artificial Sequence: Synthetic oligonucleotide
auaauauacuggccugguc

SEQ ID NO: 788135 - RNA, 19 nt, Artificial Sequence
  Description of Artificial Sequence: Synthetic oligonucleotide
gauuacugagaugauggug

SEQ ID NO: 788136 - RNA, 19 nt, Artificial Sequence
  Description of Artificial Sequence: Synthetic oligonucleotide
augcaaauggagugacccc

SEQ ID NO: 788137 - RNA, 19 nt, Artificial Sequence
  Description of Artificial Sequence: Synthetic oligonucleotide
ugcauacccagauaaagua

SEQ ID NO: 788138 - RNA, 19 nt, Artificial Sequence
  Description of Artificial Sequence: Synthetic oligonucleotide
auaugaguugcucugguua

SEQ ID NO: 788139 - RNA, 19 nt, Artificial Sequence
  Description of Artificial Sequence: Synthetic oligonucleotide
aagaggauugcagcuauca

SEQ ID NO: 788140 - RNA, 19 nt, Artificial Sequence
  Description of Artificial Sequence: Synthetic oligonucleotide
auugauuacugagaugaug

SEQ ID NO: 788141 - RNA, 19 nt, Artificial Sequence
  Description of Artificial Sequence: Synthetic oligonucleotide
aguauaccagaagauauca

SEQ ID NO: 788142 - RNA, 19 nt, Artificial Sequence
  Description of Artificial Sequence: Synthetic oligonucleotide
acagguuaugugcaacguc

SEQ ID NO: 788143 - RNA, 19 nt, Artificial Sequence
  Description of Artificial Sequence: Synthetic oligonucleotide
aauauacuggccuggucuu

SEQ ID NO: 788144 - RNA, 19 nt, Artificial Sequence
  Description of Artificial Sequence: Synthetic oligonucleotide
uguagaaauugcacuguuc

SEQ ID NO: 788145 - RNA, 19 nt, Artificial Sequence
  Description of Artificial Sequence: Synthetic oligonucleotide
ugcauucaauucaaggaaa

SEQ ID NO: 788146 - RNA, 19 nt, Artificial Sequence
  Description of Artificial Sequence: Synthetic oligonucleotide
ucaguaggacacaucguga

SEQ ID NO: 788147 - RNA, 19 nt, Artificial Sequence
  Description of Artificial Sequence: Synthetic oligonucleotide
uuagaguccucaaaagauu

SEQ ID NO: 788148 - RNA, 19 nt, Artificial Sequence
  Description of Artificial Sequence: Synthetic oligonucleotide
uuaaagcuacuccacuuau

SEQ ID NO: 788149 - RNA, 19 nt, Artificial Sequence
  Description of Artificial Sequence: Synthetic oligonucleotide
agauuagucuccuaagauu

SEQ ID NO: 788150 - RNA, 19 nt, Artificial Sequence
  Description of Artificial Sequence: Synthetic oligonucleotide
uugggauaauuucuagacu

SEQ ID NO: 788151 - RNA, 19 nt, Artificial Sequence
  Description of Artificial Sequence: Synthetic oligonucleotide
aaaucucggaaucguucug

SEQ ID NO: 788152 - RNA, 19 nt, Artificial Sequence
  Description of Artificial Sequence: Synthetic oligonucleotide
aguaucgaugcaaauggag

SEQ ID NO: 788153 - RNA, 19 nt, Artificial Sequence
  Description of Artificial Sequence: Synthetic oligonucleotide
agauaagccaggagugucc

SEQ ID NO: 788154 - RNA, 19 nt, Artificial Sequence
  Description of Artificial Sequence: Synthetic oligonucleotide
uagucuccuaagauuuuag

SEQ ID NO: 788155 - RNA, 19 nt, Artificial Sequence
  Description of Artificial Sequence: Synthetic oligonucleotide
cuuggaaccuucugugacc

SEQ ID NO: 788156 - RNA, 19 nt, Artificial Sequence
  Description of Artificial Sequence: Synthetic oligonucleotide
uuggaacuuaggcucuucc

SEQ ID NO: 788157 - RNA, 19 nt, Artificial Sequence
  Description of Artificial Sequence: Synthetic oligonucleotide
gauaagccaggaguguccg

SEQ ID NO: 788158 - RNA, 19 nt, Artificial Sequence
  Description of Artificial Sequence: Synthetic oligonucleotide
gguaaagucucucagcaca

SEQ ID NO: 788159 - RNA, 19 nt, Artificial Sequence
  Description of Artificial Sequence: Synthetic oligonucleotide
gaugauugauuacugagau

SEQ ID NO: 788160 - RNA, 19 nt, Artificial Sequence
  Description of Artificial Sequence: Synthetic oligonucleotide
ucgugagaguaaaugggug

SEQ ID NO: 788161 - RNA, 19 nt, Artificial Sequence
  Description of Artificial Sequence: Synthetic oligonucleotide
agagcaagucugcaaacca

SEQ ID NO: 788162 - RNA, 19 nt, Artificial Sequence
  Description of Artificial Sequence: Synthetic oligonucleotide
gagauaaguuccucacaag

SEQ ID NO: 788163 - RNA, 19 nt, Artificial Sequence
  Description of Artificial Sequence: Synthetic oligonucleotide
acuugggauaauuucuaga

SEQ ID NO: 788164 - RNA, 19 nt, Artificial Sequence
  Description of Artificial Sequence: Synthetic oligonucleotide
gaauucucacuuuuaaggu

SEQ ID NO: 788165 - RNA, 19 nt, Artificial Sequence
  Description of Artificial Sequence: Synthetic oligonucleotide
uccucauuuugguaucuug

SEQ ID NO: 788166 - RNA, 19 nt, Artificial Sequence
  Description of Artificial Sequence: Synthetic oligonucleotide
aacaugucauuuugccaca

SEQ ID NO: 788167 - RNA, 19 nt, Artificial Sequence
  Description of Artificial Sequence: Synthetic oligonucleotide
aucuugcugcauucaauuc

SEQ ID NO: 788168 - RNA, 19 nt, Artificial Sequence
  Description of Artificial Sequence: Synthetic oligonucleotide
aggauugcagcuaucagcu

SEQ ID NO: 788169 - RNA, 19 nt, Artificial Sequence
  Description of Artificial Sequence: Synthetic oligonucleotide
aguccucaaaagauuaguc

SEQ ID NO: 788170 - RNA, 19 nt, Artificial Sequence
  Description of Artificial Sequence: Synthetic oligonucleotide
aaaugagcuuggaacuuag

SEQ ID NO: 788171 - RNA, 19 nt, Artificial Sequence
  Description of Artificial Sequence: Synthetic oligonucleotide
gaacaguaccaccaccaug

SEQ ID NO: 788172 - RNA, 19 nt, Artificial Sequence
  Description of Artificial Sequence: Synthetic oligonucleotide
ugaguuccaugacaucuga

SEQ ID NO: 788173 - RNA, 19 nt, Artificial Sequence
  Description of Artificial Sequence: Synthetic oligonucleotide
cacaucgugagaguaaaug

SEQ ID NO: 788174 - RNA, 19 nt, Artificial Sequence
  Description of Artificial Sequence: Synthetic oligonucleotide
aguggacaccaaauguugc

SEQ ID NO: 788175 - RNA, 19 nt, Artificial Sequence
  Description of Artificial Sequence: Synthetic oligonucleotide
uuccagucauccagcaaag

SEQ ID NO: 788176 - RNA, 19 nt, Artificial Sequence
  Description of Artificial Sequence: Synthetic oligonucleotide
aaggaaaccuugauauucu

SEQ ID NO: 788177 - RNA, 19 nt, Artificial Sequence
  Description of Artificial Sequence: Synthetic oligonucleotide
aaccauuggaaugaucgaa

SEQ ID NO: 788178 - RNA, 19 nt, Artificial Sequence
  Description of Artificial Sequence: Synthetic oligonucleotide
guagaauaauauacuggcc

SEQ ID NO: 788179 - RNA, 19 nt, Artificial Sequence
  Description of Artificial Sequence: Synthetic oligonucleotide
gagucuaaguuucaaugaa

SEQ ID NO: 788180 - RNA, 19 nt, Artificial Sequence
  Description of Artificial Sequence: Synthetic oligonucleotide
ugcaacgucuuacuuuuau

SEQ ID NO: 788181 - RNA, 19 nt, Artificial Sequence
  Description of Artificial Sequence: Synthetic oligonucleotide
uaaccaugaggaacaguac

SEQ ID NO: 788182 - RNA, 19 nt, Artificial Sequence
  Description of Artificial Sequence: Synthetic oligonucleotide
caauguacaacuugggaua

SEQ ID NO: 788183 - RNA, 19 nt, Artificial Sequence
  Description of Artificial Sequence: Synthetic oligonucleotide
cuuauugcauagguagaag

SEQ ID NO: 788184 - RNA, 19 nt, Artificial Sequence
  Description of Artificial Sequence: Synthetic oligonucleotide
aagacugaugcagccagga

SEQ ID NO: 788185 - RNA, 19 nt, Artificial Sequence
  Description of Artificial Sequence: Synthetic oligonucleotide
aaguguuuucugguuacga

SEQ ID NO: 788186 - RNA, 19 nt, Artificial Sequence
  Description of Artificial Sequence: Synthetic oligonucleotide
uuguaugguuuccagucau

SEQ ID NO: 788187 - RNA, 19 nt, Artificial Sequence
  Description of Artificial Sequence: Synthetic oligonucleotide
ucagacccggaacaguggu

SEQ ID NO: 788188 - RNA, 19 nt, Artificial Sequence
  Description of Artificial Sequence: Synthetic oligonucleotide
acagauaguuaugccacag

SEQ ID NO: 788189 - RNA, 19 nt, Artificial Sequence
  Description of Artificial Sequence: Synthetic oligonucleotide
cauucaucaagugggcagc

SEQ ID NO: 788190 - RNA, 19 nt, Artificial Sequence
  Description of Artificial Sequence: Synthetic oligonucleotide
uucauaguucagugacucc

SEQ ID NO: 788191 - RNA, 19 nt, Artificial Sequence
  Description of Artificial Sequence: Synthetic oligonucleotide
cauaauuagaaacucuuau

SEQ ID NO: 788192 - RNA, 19 nt, Artificial Sequence
  Description of Artificial Sequence: Synthetic oligonucleotide
acuuccaaaaggaccauca

SEQ ID NO: 788193 - RNA, 19 nt, Artificial Sequence
  Description of Artificial Sequence: Synthetic oligonucleotide
guaaaucucggaaucguuc

SEQ ID NO: 788194 - RNA, 19 nt, Artificial Sequence
  Description of Artificial Sequence: Synthetic oligonucleotide
auaccagaagauaucauaa

SEQ ID NO: 788195 - RNA, 19 nt, Artificial Sequence
  Description of Artificial Sequence: Synthetic oligonucleotide
aaugagcuuggaacuuagg

SEQ ID NO: 788196 - RNA, 19 nt, Artificial Sequence
  Description of Artificial Sequence: Synthetic oligonucleotide
aaaucgaacuugguccaca

SEQ ID NO: 788197 - RNA, 19 nt, Artificial Sequence
  Description of Artificial Sequence: Synthetic oligonucleotide
augauugauuacugagaug

SEQ ID NO: 788198 - RNA, 19 nt, Artificial Sequence
  Description of Artificial Sequence: Synthetic oligonucleotide
agaagauaucauaauuaga

SEQ ID NO: 788199 - RNA, 19 nt, Artificial Sequence
  Description of Artificial Sequence: Synthetic oligonucleotide
aguaaaugggugguuuucu

SEQ ID NO: 788200 - RNA, 19 nt, Artificial Sequence
  Description of Artificial Sequence: Synthetic oligonucleotide
uaguaucgaugcaaaugga

SEQ ID NO: 788201 - RNA, 19 nt, Artificial Sequence
  Description of Artificial Sequence: Synthetic oligonucleotide
uuguucaauccugaaucug

SEQ ID NO: 788202 - RNA, 19 nt, Artificial Sequence
  Description of Artificial Sequence: Synthetic oligonucleotide
aaaggaccaucaauguaca

SEQ ID NO: 788203 - RNA, 19 nt, Artificial Sequence
  Description of Artificial Sequence: Synthetic oligonucleotide
guuugacugagguacagcu

SEQ ID NO: 788204 - RNA, 19 nt, Artificial Sequence
  Description of Artificial Sequence: Synthetic oligonucleotide
guuugauucagguaaguuu

SEQ ID NO: 788205 - RNA, 19 nt, Artificial Sequence
  Description of Artificial Sequence: Synthetic oligonucleotide
cacuauaguucacugagaa

SEQ ID NO: 788206 - RNA, 19 nt, Artificial Sequence
  Description of Artificial Sequence: Synthetic oligonucleotide
cuacuuuaaaguggacacc

SEQ ID NO: 788207 - RNA, 19 nt, Artificial Sequence
  Description of Artificial Sequence: Synthetic oligonucleotide
cauucuuugaauucucacu

SEQ ID NO: 788208 - RNA, 19 nt, Artificial Sequence
  Description of Artificial Sequence: Synthetic oligonucleotide
ugacagguuuguugcuccg

SEQ ID NO: 788209 - RNA, 19 nt, Artificial Sequence
  Description of Artificial Sequence: Synthetic oligonucleotide
ucgaaugucucugcauacc

SEQ ID NO: 788210 - RNA, 19 nt, Artificial Sequence
  Description of Artificial Sequence: Synthetic oligonucleotide
ccucaaaagauuagucucc

SEQ ID NO: 788211 - RNA, 19 nt, Artificial Sequence
  Description of Artificial Sequence: Synthetic oligonucleotide
gguuaagacugaugcagcc

SEQ ID NO: 788212 - RNA, 19 nt, Artificial Sequence
  Description of Artificial Sequence: Synthetic oligonucleotide
gaagagguugugaguauac

SEQ ID NO: 788213 - RNA, 19 nt, Artificial Sequence
  Description of Artificial Sequence: Synthetic oligonucleotide
ugaucgaaugucucugcau

SEQ ID NO: 788214 - RNA, 19 nt, Artificial Sequence
  Description of Artificial Sequence: Synthetic oligonucleotide
aguaggacacaucgugaga

SEQ ID NO: 788215 - RNA, 19 nt, Artificial Sequence
  Description of Artificial Sequence: Synthetic oligonucleotide
cuuagcuuguaugguuucc

SEQ ID NO: 788216 - RNA, 19 nt, Artificial Sequence
  Description of Artificial Sequence: Synthetic oligonucleotide
uuguagaaauugcacuguu

SEQ ID NO: 788217 - RNA, 19 nt, Artificial Sequence
  Description of Artificial Sequence: Synthetic oligonucleotide
gaguauaccagaagauauc

SEQ ID NO: 788218 - RNA, 19 nt, Artificial Sequence
  Description of Artificial Sequence: Synthetic oligonucleotide
aguuaugccacagguuaug

SEQ ID NO: 788219 - RNA, 19 nt, Artificial Sequence
  Description of Artificial Sequence: Synthetic oligonucleotide
uaccagaagauaucauaau

SEQ ID NO: 788220 - RNA, 19 nt, Artificial Sequence
  Description of Artificial Sequence: Synthetic oligonucleotide
augaucgaaugucucugca

SEQ ID NO: 788221 - RNA, 19 nt, Artificial Sequence
  Description of Artificial Sequence: Synthetic oligonucleotide
cagcuaucagcuucagagc

SEQ ID NO: 788222 - RNA, 19 nt, Artificial Sequence
  Description of Artificial Sequence: Synthetic oligonucleotide
uugguaucuugcugcauuc

SEQ ID NO: 788223 - RNA, 19 nt, Artificial Sequence
  Description of Artificial Sequence: Synthetic oligonucleotide
uggauccuuuacaaauuaa

SEQ ID NO: 788224 - RNA, 19 nt, Artificial Sequence
  Description of Artificial Sequence: Synthetic oligonucleotide
acagguuuguugcuccgga

SEQ ID NO: 788225 - RNA, 19 nt, Artificial Sequence
  Description of Artificial Sequence: Synthetic oligonucleotide
uguaugguuuccagucauc

SEQ ID NO: 788226 - RNA, 19 nt, Artificial Sequence
  Description of Artificial Sequence: Synthetic oligonucleotide
uuccucacaagagaguuuu

SEQ ID NO: 788227 - RNA, 19 nt, Artificial Sequence
  Description of Artificial Sequence: Synthetic oligonucleotide
uagaauucagugugugaua

SEQ ID NO: 788228 - RNA, 19 nt, Artificial Sequence
  Description of Artificial Sequence: Synthetic oligonucleotide
uucugugacccucgaagau

SEQ ID NO: 788229 - RNA, 19 nt, Artificial Sequence
  Description of Artificial Sequence: Synthetic oligonucleotide
gugacccucgaagauaagc

SEQ ID NO: 788230 - RNA, 19 nt, Artificial Sequence
  Description of Artificial Sequence: Synthetic oligonucleotide
uuagucuccuaagauuuua

SEQ ID NO: 788231 - RNA, 19 nt, Artificial Sequence
  Description of Artificial Sequence: Synthetic oligonucleotide
guauucaaauuuuguccca

SEQ ID NO: 788232 - RNA, 19 nt, Artificial Sequence
  Description of Artificial Sequence: Synthetic oligonucleotide
ucuuagcuuguaugguuuc

SEQ ID NO: 788233 - RNA, 19 nt, Artificial Sequence
  Description of Artificial Sequence: Synthetic oligonucleotide
cugagaagucuucugguga

SEQ ID NO: 788234 - RNA, 19 nt, Artificial Sequence
  Description of Artificial Sequence: Synthetic oligonucleotide
ucggaaucguucuguccag

SEQ ID NO: 788235 - RNA, 19 nt, Artificial Sequence
  Description of Artificial Sequence: Synthetic oligonucleotide
uccggaugcagcgguaaag

SEQ ID NO: 788236 - RNA, 19 nt, Artificial Sequence
  Description of Artificial Sequence: Synthetic oligonucleotide
cucgaagauaagccaggag

SEQ ID NO: 788237 - RNA, 19 nt, Artificial Sequence
  Description of Artificial Sequence: Synthetic oligonucleotide
ggugaucauaaauaaggaa

SEQ ID NO: 788238 - RNA, 19 nt, Artificial Sequence
  Description of Artificial Sequence: Synthetic oligonucleotide
aucgugagaguaaaugggu

SEQ ID NO: 788239 - RNA, 19 nt, Artificial Sequence
  Description of Artificial Sequence: Synthetic oligonucleotide
agaguaaaugggugguuuu

SEQ ID NO: 788240 - RNA, 19 nt, Artificial Sequence
  Description of Artificial Sequence: Synthetic oligonucleotide
cucgguuacauuuugcuau

SEQ ID NO: 788241 - RNA, 19 nt, Artificial Sequence
  Description of Artificial Sequence: Synthetic oligonucleotide
aggugaucauaaauaagga

SEQ ID NO: 788242 - RNA, 19 nt, Artificial Sequence
  Description of Artificial Sequence: Synthetic oligonucleotide
uaguuaugccacagguuau

SEQ ID NO: 788243 - RNA, 19 nt, Artificial Sequence
  Description of Artificial Sequence: Synthetic oligonucleotide
cauagucaggucuguuuuc

SEQ ID NO: 788244 - RNA, 19 nt, Artificial Sequence
  Description of Artificial Sequence: Synthetic oligonucleotide
uugcucugguuacucaaau

SEQ ID NO: 788245 - RNA, 19 nt, Artificial Sequence
  Description of Artificial Sequence: Synthetic oligonucleotide
auaagccaggaguguccgg

SEQ ID NO: 788246 - RNA, 19 nt, Artificial Sequence
  Description of Artificial Sequence: Synthetic oligonucleotide
aacucuuauugcauaggua

SEQ ID NO: 788247 - RNA, 19 nt, Artificial Sequence
  Description of Artificial Sequence: Synthetic oligonucleotide
ugagggcauucaucaagug

SEQ ID NO: 788248 - RNA, 19 nt, Artificial Sequence
  Description of Artificial Sequence: Synthetic oligonucleotide
ucgaugcaaauggagugac

SEQ ID NO: 788249 - RNA, 19 nt, Artificial Sequence
  Description of Artificial Sequence: Synthetic oligonucleotide
acgaggacguccaauaaaa

SEQ ID NO: 788250 - RNA, 19 nt, Artificial Sequence
  Description of Artificial Sequence: Synthetic oligonucleotide
ugcaucuaacagcauucuu

SEQ ID NO: 788251 - RNA, 19 nt, Artificial Sequence
  Description of Artificial Sequence: Synthetic oligonucleotide
ccagucauccagcaaagug

SEQ ID NO: 788252 - RNA, 19 nt, Artificial Sequence
  Description of Artificial Sequence: Synthetic oligonucleotide
cagcgguaaagucucucag

SEQ ID NO: 788253 - RNA, 19 nt, Artificial Sequence
  Description of Artificial Sequence: Synthetic oligonucleotide
ggaccaucaauguacaacu

SEQ ID NO: 788254 - RNA, 19 nt, Artificial Sequence
  Description of Artificial Sequence: Synthetic oligonucleotide
guuaagacugaugcagcca

SEQ ID NO: 788255 - RNA, 19 nt, Artificial Sequence
  Description of Artificial Sequence: Synthetic oligonucleotide
cucuuauugcauagguaga

SEQ ID NO: 788256 - RNA, 19 nt, Artificial Sequence
  Description of Artificial Sequence: Synthetic oligonucleotide
caaguguuuucugguuacg

SEQ ID NO: 788257 - RNA, 19 nt, Artificial Sequence
  Description of Artificial Sequence: Synthetic oligonucleotide
agacccggaacagugguga

SEQ ID NO: 788258 - RNA, 19 nt, Artificial Sequence
  Description of Artificial Sequence: Synthetic oligonucleotide
aggcaaagguccaugaaaa

SEQ ID NO: 788259 - RNA, 19 nt, Artificial Sequence
  Description of Artificial Sequence: Synthetic oligonucleotide
cugguuacgagcuucuggu

SEQ ID NO: 788260 - RNA, 19 nt, Artificial Sequence
  Description of Artificial Sequence: Synthetic oligonucleotide
aagcuacuccacuuaugua

SEQ ID NO: 788261 - RNA, 19 nt, Artificial Sequence
  Description of Artificial Sequence: Synthetic oligonucleotide
gacacaucgugagaguaaa

SEQ ID NO: 788262 - RNA, 19 nt, Artificial Sequence
  Description of Artificial Sequence: Synthetic oligonucleotide
gugagauaaguuccucaca

SEQ ID NO: 788263 - RNA, 19 nt, Artificial Sequence
  Description of Artificial Sequence: Synthetic oligonucleotide
uguaucccaucuguuugac

SEQ ID NO: 788264 - RNA, 19 nt, Artificial Sequence
  Description of Artificial Sequence: Synthetic oligonucleotide
guuuucuaaugcugauaca

SEQ ID NO: 788265 - RNA, 19 nt, Artificial Sequence
  Description of Artificial Sequence: Synthetic oligonucleotide
acccucgaagauaagccag

SEQ ID NO: 788266 - RNA, 19 nt, Artificial Sequence
  Description of Artificial Sequence: Synthetic oligonucleotide
ugggacaauguagaauaau

SEQ ID NO: 788267 - RNA, 19 nt, Artificial Sequence
  Description of Artificial Sequence: Synthetic oligonucleotide
guaucgaugcaaauggagu

SEQ ID NO: 788268 - RNA, 19 nt, Artificial Sequence
  Description of Artificial Sequence: Synthetic oligonucleotide
accaugcagacacccguca

SEQ ID NO: 788269 - RNA, 19 nt, Artificial Sequence
  Description of Artificial Sequence: Synthetic oligonucleotide
agucuaaguuucaaugaau

SEQ ID NO: 788270 - RNA, 19 nt, Artificial Sequence
  Description of Artificial Sequence: Synthetic oligonucleotide
acuuguuaugcaacauaca

SEQ ID NO: 788271 - RNA, 19 nt, Artificial Sequence
  Description of Artificial Sequence: Synthetic oligonucleotide
acccgucagacccggaaca

SEQ ID NO: 788272 - RNA, 19 nt, Artificial Sequence
  Description of Artificial Sequence: Synthetic oligonucleotide
aaggaccaucaauguacaa

SEQ ID NO: 788273 - RNA, 19 nt, Artificial Sequence
  Description of Artificial Sequence: Synthetic oligonucleotide
aucccaucuguuugacuga

SEQ ID NO: 788274 - RNA, 19 nt, Artificial Sequence
  Description of Artificial Sequence: Synthetic oligonucleotide
ucgguuacauuuugcuauu

SEQ ID NO: 788275 - RNA, 19 nt, Artificial Sequence
  Description of Artificial Sequence: Synthetic oligonucleotide
guuaugcaacauacagagc

SEQ ID NO: 788276 - RNA, 19 nt, Artificial Sequence
  Description of Artificial Sequence: Synthetic oligonucleotide
gcuuccaacgaggacgucc

SEQ ID NO: 788277 - RNA, 19 nt, Artificial Sequence
  Description of Artificial Sequence: Synthetic oligonucleotide
cagacacccgucagacccg

SEQ ID NO: 788278 - RNA, 19 nt, Artificial Sequence
  Description of Artificial Sequence: Synthetic oligonucleotide
guugcuccggaugcagcgg

SEQ ID NO: 788279 - RNA, 19 nt, Artificial Sequence
  Description of Artificial Sequence: Synthetic oligonucleotide
uggugaagagaagcuuucu

SEQ ID NO: 788280 - RNA, 19 nt, Artificial Sequence
  Description of Artificial Sequence: Synthetic oligonucleotide
ugguuuucaguaggacaca

SEQ ID NO: 788281 - RNA, 19 nt, Artificial Sequence
  Description of Artificial Sequence: Synthetic oligonucleotide
aggcaguaguaaaucucgg

SEQ ID NO: 788282 - RNA, 19 nt, Artificial Sequence
  Description of Artificial Sequence: Synthetic oligonucleotide
acgagcuucugguuuugaa

SEQ ID NO: 788283 - RNA, 19 nt, Artificial Sequence
  Description of Artificial Sequence: Synthetic oligonucleotide
ugugacccucgaagauaag

SEQ ID NO: 788284 - RNA, 19 nt, Artificial Sequence
  Description of Artificial Sequence: Synthetic oligonucleotide
gaagauaagccaggagugu

SEQ ID NO: 788285 - RNA, 19 nt, Artificial Sequence
  Description of Artificial Sequence: Synthetic oligonucleotide
gucagacccggaacagugg

SEQ ID NO: 788286 - RNA, 19 nt, Artificial Sequence
  Description of Artificial Sequence: Synthetic oligonucleotide
ccauuggaaugaucgaaug

SEQ ID NO: 788287 - RNA, 19 nt, Artificial Sequence
  Description of Artificial Sequence: Synthetic oligonucleotide
cauuggaaugaucgaaugu

SEQ ID NO: 788288 - RNA, 19 nt, Artificial Sequence
  Description of Artificial Sequence: Synthetic oligonucleotide
gucauuuugccacauucuu

SEQ ID NO: 788289 - RNA, 19 nt, Artificial Sequence
  Description of Artificial Sequence: Synthetic oligonucleotide
acacccgucagacccggaa

SEQ ID NO: 788290 - RNA, 19 nt, Artificial Sequence
  Description of Artificial Sequence: Synthetic oligonucleotide
uccaacgaggacguccaau

SEQ ID NO: 788291 - RNA, 19 nt, Artificial Sequence
  Description of Artificial Sequence: Synthetic oligonucleotide
caucaagugggcagccaca

SEQ ID NO: 788292 - RNA, 19 nt, Artificial Sequence
  Description of Artificial Sequence: Synthetic oligonucleotide
gauccuggucugguuaaga

SEQ ID NO: 788293 - RNA, 19 nt, Artificial Sequence
  Description of Artificial Sequence: Synthetic oligonucleotide
agcuuucuaggauccucau

SEQ ID NO: 788294 - RNA, 19 nt, Artificial Sequence
  Description of Artificial Sequence: Synthetic oligonucleotide
uuacgagcuucugguuuug

SEQ ID NO: 788295 - RNA, 19 nt, Artificial Sequence
  Description of Artificial Sequence: Synthetic oligonucleotide
gauaguuaugccacagguu

SEQ ID NO: 788296 - RNA, 19 nt, Artificial Sequence
  Description of Artificial Sequence: Synthetic oligonucleotide
gcaacgucuuacuuuuauc

SEQ ID NO: 788297 - RNA, 19 nt, Artificial Sequence
  Description of Artificial Sequence: Synthetic oligonucleotide
cccucgaagauaagccagg

SEQ ID NO: 788298 - RNA, 19 nt, Artificial Sequence
  Description of Artificial Sequence: Synthetic oligonucleotide
agucuagaauucagugugu

SEQ ID NO: 788299 - RNA, 19 nt, Artificial Sequence
  Description of Artificial Sequence: Synthetic oligonucleotide
caccaugcagacacccguc

SEQ ID NO: 788300 - RNA, 19 nt, Artificial Sequence
  Description of Artificial Sequence: Synthetic oligonucleotide
ccuaagauuuuagcugaag

SEQ ID NO: 788301 - RNA, 19 nt, Artificial Sequence
  Description of Artificial Sequence: Synthetic oligonucleotide
cacccgucagacccggaac

SEQ ID NO: 788302 - RNA, 19 nt, Artificial Sequence
  Description of Artificial Sequence: Synthetic oligonucleotide
acccggaacaguggugaag

SEQ ID NO: 788303 - RNA, 19 nt, Artificial Sequence
  Description of Artificial Sequence: Synthetic oligonucleotide
agacacccgucagacccgg

SEQ ID NO: 788304 - RNA, 19 nt, Artificial Sequence
  Description of Artificial Sequence: Synthetic oligonucleotide
cagcagugugcaucuaaca

SEQ ID NO: 788305 - RNA, 19 nt, Artificial Sequence
  Description of Artificial Sequence: Synthetic oligonucleotide
caaauguugcuuugguuuu

SEQ ID NO: 788306 - RNA, 19 nt, Artificial Sequence
  Description of Artificial Sequence: Synthetic oligonucleotide
guuacgagcuucugguuuu

SEQ ID NO: 788307 - RNA, 19 nt, Artificial Sequence
  Description of Artificial Sequence: Synthetic oligonucleotide
uccagucauccagcaaagu

SEQ ID NO: 788308 - RNA, 19 nt, Artificial Sequence
  Description of Artificial Sequence: Synthetic oligonucleotide
guauaggcacaaaggucca

SEQ ID NO: 788309 - RNA, 19 nt, Artificial Sequence
  Description of Artificial Sequence: Synthetic oligonucleotide
caguuguuugauucaggua

SEQ ID NO: 788310 - RNA, 19 nt, Artificial Sequence
  Description of Artificial Sequence: Synthetic oligonucleotide
cucugguuacucaaauuau

SEQ ID NO: 788311 - RNA, 19 nt, Artificial Sequence
  Description of Artificial Sequence: Synthetic oligonucleotide
gggauaauuucuagacuga

SEQ ID NO: 788312 - RNA, 19 nt, Artificial Sequence
  Description of Artificial Sequence: Synthetic oligonucleotide
ugguuacgagcuucugguu

SEQ ID NO: 788313 - RNA, 19 nt, Artificial Sequence
  Description of Artificial Sequence: Synthetic oligonucleotide
ucacauagucaggucuguu

SEQ ID NO: 788314 - RNA, 19 nt, Artificial Sequence
  Description of Artificial Sequence: Synthetic oligonucleotide
guugcucugguuacucaaa

SEQ ID NO: 788315 - RNA, 19 nt, Artificial Sequence
  Description of Artificial Sequence: Synthetic oligonucleotide
gguugugaguauaccagaa

SEQ ID NO: 788316 - RNA, 19 nt, Artificial Sequence
  Description of Artificial Sequence: Synthetic oligonucleotide
cacauagucaggucuguuu

SEQ ID NO: 788317 - RNA, 19 nt, Artificial Sequence
  Description of Artificial Sequence: Synthetic oligonucleotide
uacgagcuucugguuuuga

SEQ ID NO: 788318 - RNA, 19 nt, Artificial Sequence
  Description of Artificial Sequence: Synthetic oligonucleotide
cuucagggccucuuuauuu

SEQ ID NO: 788319 - RNA, 19 nt, Artificial Sequence
  Description of Artificial Sequence: Synthetic oligonucleotide
cccauaugaguugcucugg

SEQ ID NO: 788320 - RNA, 19 nt, Artificial Sequence
  Description of Artificial Sequence: Synthetic oligonucleotide
uugcagcuaucagcuucag

SEQ ID NO: 788321 - RNA, 19 nt, Artificial Sequence
  Description of Artificial Sequence: Synthetic oligonucleotide
caggauuaaacaugucauu

SEQ ID NO: 788322 - RNA, 19 nt, Artificial Sequence
  Description of Artificial Sequence: Synthetic oligonucleotide
ggguggguaucuaaauuga

SEQ ID NO: 788323 - RNA, 19 nt, Artificial Sequence
  Description of Artificial Sequence: Synthetic oligonucleotide
gguuaugugcaacgucuua

SEQ ID NO: 788324 - RNA, 19 nt, Artificial Sequence
  Description of Artificial Sequence: Synthetic oligonucleotide
caacgaggacguccaauaa

SEQ ID NO: 788325 - RNA, 19 nt, Artificial Sequence
  Description of Artificial Sequence: Synthetic oligonucleotide
guuaugccacagguuaugu

SEQ ID NO: 788326 - RNA, 19 nt, Artificial Sequence
  Description of Artificial Sequence: Synthetic oligonucleotide
ccaacgaggacguccaaua

SEQ ID NO: 788327 - RNA, 19 nt, Artificial Sequence
  Description of Artificial Sequence: Synthetic oligonucleotide
gguuacgagcuucugguuu

SEQ ID NO: 788328 - RNA, 19 nt, Artificial Sequence
  Description of Artificial Sequence: Synthetic oligonucleotide
caggaggguggguaucuaa

SEQ ID NO: 788329 - RNA, 19 nt, Artificial Sequence
  Description of Artificial Sequence: Synthetic oligonucleotide
agcacaguauaggcacaaa

SEQ ID NO: 788330 - RNA, 19 nt, Artificial Sequence
  Description of Artificial Sequence: Synthetic oligonucleotide
ggugaguaaauguccugau

SEQ ID NO: 788331 - RNA, 19 nt, Artificial Sequence
  Description of Artificial Sequence: Synthetic oligonucleotide
cauaugaguugcucugguu

SEQ ID NO: 788332 - RNA, 19 nt, Artificial Sequence
  Description of Artificial Sequence: Synthetic oligonucleotide
gguggguaucuaaauugaa

SEQ ID NO: 788333 - RNA, 19 nt, Artificial Sequence
  Description of Artificial Sequence: Synthetic oligonucleotide
guaucccaucuguuugacu

SEQ ID NO: 788334 - RNA, 19 nt, Artificial Sequence
  Description of Artificial Sequence: Synthetic oligonucleotide
cccggaacaguggugaaga

SEQ ID NO: 788335 - RNA, 19 nt, Artificial Sequence
  Description of Artificial Sequence: Synthetic oligonucleotide
gacccggaacaguggugaa

SEQ ID NO: 788336 - RNA, 19 nt, Artificial Sequence
  Description of Artificial Sequence: Synthetic oligonucleotide
cagcacaguauaggcacaa

SEQ ID NO: 788337 - RNA, 19 nt, Artificial Sequence
  Description of Artificial Sequence: Synthetic oligonucleotide
acacaucgugagaguaaau

SEQ ID NO: 788338 - RNA, 19 nt, Artificial Sequence
  Description of Artificial Sequence: Synthetic oligonucleotide
gcuaucagcuucagagcaa

SEQ ID NO: 788339 - RNA, 19 nt, Artificial Sequence
  Description of Artificial Sequence: Synthetic oligonucleotide
ggacaccaaauguugcuuu

SEQ ID NO: 788340 - RNA, 19 nt, Artificial Sequence
  Description of Artificial Sequence: Synthetic oligonucleotide
ccucgguuacauuuugcua

SEQ ID NO: 788341 - RNA, 19 nt, Artificial Sequence
  Description of Artificial Sequence: Synthetic oligonucleotide
ggcaaagguccaugaaaau

SEQ ID NO: 788342 - RNA, 19 nt, Artificial Sequence
  Description of Artificial Sequence: Synthetic oligonucleotide
ccggaacaguggugaagag

SEQ ID NO: 788343 - RNA, 19 nt, Artificial Sequence
  Description of Artificial Sequence: Synthetic oligonucleotide
gguuuucaguaggacacau

SEQ ID NO: 788344 - RNA, 19 nt, Artificial Sequence
  Description of Artificial Sequence: Synthetic oligonucleotide
gaccaucaauguacaacuu

SEQ ID NO: 788345 - RNA, 19 nt, Artificial Sequence
  Description of Artificial Sequence: Synthetic oligonucleotide
caaauggagugaccccaau

SEQ ID NO: 788346 - RNA, 19 nt, Artificial Sequence
  Description of Artificial Sequence: Synthetic oligonucleotide
cuccggaugcagcgguaaa

SEQ ID NO: 788347 - RNA, 19 nt, Artificial Sequence
  Description of Artificial Sequence: Synthetic oligonucleotide
cccgucagacccggaacag

SEQ ID NO: 788348 - RNA, 19 nt, Artificial Sequence
  Description of Artificial Sequence: Synthetic oligonucleotide
cagguuuguugcuccggau

SEQ ID NO: 788349 - RNA, 19 nt, Artificial Sequence
  Description of Artificial Sequence: Synthetic oligonucleotide
guuccucacaagagaguuu

SEQ ID NO: 788350 - RNA, 19 nt, Artificial Sequence
  Description of Artificial Sequence: Synthetic oligonucleotide
cguucuguccagucuccca

SEQ ID NO: 788351 - RNA, 19 nt, Artificial Sequence
  Description of Artificial Sequence: Synthetic oligonucleotide
ccucgaagauaagccagga

SEQ ID NO: 788352 - RNA, 19 nt, Artificial Sequence
  Description of Artificial Sequence: Synthetic oligonucleotide
gcuuucuaggauccucauu

SEQ ID NO: 788353 - RNA, 19 nt, Artificial Sequence
  Description of Artificial Sequence: Synthetic oligonucleotide
ccauaugaguugcucuggu

SEQ ID NO: 788354 - RNA, 19 nt, Artificial Sequence
  Description of Artificial Sequence: Synthetic oligonucleotide
cggaacaguggugaagaga

SEQ ID NO: 788355 - RNA, 19 nt, Artificial Sequence
  Description of Artificial Sequence: Synthetic oligonucleotide
gacacccgucagacccgga

SEQ ID NO: 788356 - RNA, 19 nt, Artificial Sequence
  Description of Artificial Sequence: Synthetic oligonucleotide
gcuccggaugcagcgguaa

SEQ ID NO: 788357 - RNA, 19 nt, Artificial Sequence
  Description of Artificial Sequence: Synthetic oligonucleotide
gugcaacgucuuacuuuua

SEQ ID NO: 788358 - RNA, 19 nt, Artificial Sequence
  Description of Artificial Sequence: Synthetic oligonucleotide
ccgucagacccggaacagu

SEQ ID NO: 788359 - RNA, 19 nt, Artificial Sequence
  Description of Artificial Sequence: Synthetic oligonucleotide
cggaaucguucuguccagu

SEQ ID NO: 788360 - RNA, 19 nt, Artificial Sequence
  Description of Artificial Sequence: Synthetic oligonucleotide
cgguuacauuuugcuauuu

SEQ ID NO: 788361 - RNA, 19 nt, Artificial Sequence
  Description of Artificial Sequence: Synthetic oligonucleotide
acgaaauuaaagcacaacc

SEQ ID NO: 788362 - RNA, 19 nt, Artificial Sequence
  Description of Artificial Sequence: Synthetic oligonucleotide
uaaguaauaaggcuuuggg

SEQ ID NO: 788363 - RNA, 19 nt, Artificial Sequence
  Description of Artificial Sequence: Synthetic oligonucleotide
aaauuaaagcacaaccucc

SEQ ID NO: 788364 - RNA, 19 nt, Artificial Sequence
  Description of Artificial Sequence: Synthetic oligonucleotide
aacaugcaaacccagcagc

SEQ ID NO: 788365 - RNA, 19 nt, Artificial Sequence
  Description of Artificial Sequence: Synthetic oligonucleotide
aguaauaaggcuuugggga

SEQ ID NO: 788366 - RNA, 19 nt, Artificial Sequence
  Description of Artificial Sequence: Synthetic oligonucleotide
ugauugauaacaauggggu

SEQ ID NO: 788367 - RNA, 19 nt, Artificial Sequence
  Description of Artificial Sequence: Synthetic oligonucleotide
aacaacaguccucccagcc

SEQ ID NO: 788368 - RNA, 19 nt, Artificial Sequence
  Description of Artificial Sequence: Synthetic oligonucleotide
cacacuaaugacaugauug

SEQ ID NO: 788369 - RNA, 19 nt, Artificial Sequence
  Description of Artificial Sequence: Synthetic oligonucleotide
aauaaggaauccuaacacu

SEQ ID NO: 788370 - RNA, 19 nt, Artificial Sequence
  Description of Artificial Sequence: Synthetic oligonucleotide
uccgugaugaucuugaggu

SEQ ID NO: 788371 - RNA, 19 nt, Artificial Sequence
  Description of Artificial Sequence: Synthetic oligonucleotide
uaaacaugcaaacccagca

SEQ ID NO: 788372 - RNA, 19 nt, Artificial Sequence
  Description of Artificial Sequence: Synthetic oligonucleotide
uguuacgaaauuaaagcac

SEQ ID NO: 788373 - RNA, 19 nt, Artificial Sequence
  Description of Artificial Sequence: Synthetic oligonucleotide
uuugguucagaaaugucug

SEQ ID NO: 788374 - RNA, 19 nt, Artificial Sequence
  Description of Artificial Sequence: Synthetic oligonucleotide
uguauuggaaauauagauc

SEQ ID NO: 788375 - RNA, 19 nt, Artificial Sequence
  Description of Artificial Sequence: Synthetic oligonucleotide
uggaucuugacaucaagag

SEQ ID NO: 788376 - RNA, 19 nt, Artificial Sequence
  Description of Artificial Sequence: Synthetic oligonucleotide
gacaugauugauaacaaug

SEQ ID NO: 788377 - RNA, 19 nt, Artificial Sequence
  Description of Artificial Sequence: Synthetic oligonucleotide
ugacauugagaucuccugg

SEQ ID NO: 788378 - RNA, 19 nt, Artificial Sequence
  Description of Artificial Sequence: Synthetic oligonucleotide
uauagauccgaaguuuucg

SEQ ID NO: 788379 - RNA, 19 nt, Artificial Sequence
  Description of Artificial Sequence: Synthetic oligonucleotide
auagauccgaaguuuucgc

SEQ ID NO: 788380 - RNA, 19 nt, Artificial Sequence
  Description of Artificial Sequence: Synthetic oligonucleotide
aaagccaaugcuaaaaggu

SEQ ID NO: 788381 - RNA, 19 nt, Artificial Sequence
  Description of Artificial Sequence: Synthetic oligonucleotide
uuagagcccgauuaaagcc

SEQ ID NO: 788382 - RNA, 19 nt, Artificial Sequence
  Description of Artificial Sequence: Synthetic oligonucleotide
agcaauaaggaauccuaac

SEQ ID NO: 788383 - RNA, 19 nt, Artificial Sequence
  Description of Artificial Sequence: Synthetic oligonucleotide
gaaggaggcaccaaguagg

SEQ ID NO: 788384 - RNA, 19 nt, Artificial Sequence
  Description of Artificial Sequence: Synthetic oligonucleotide
agaugugccucccaacugc

SEQ ID NO: 788385 - RNA, 19 nt, Artificial Sequence
  Description of Artificial Sequence: Synthetic oligonucleotide
aagcuaagcaugaaauccc

SEQ ID NO: 788386 - RNA, 19 nt, Artificial Sequence
  Description of Artificial Sequence: Synthetic oligonucleotide
aacggagucggccacaacu

SEQ ID NO: 788387 - RNA, 19 nt, Artificial Sequence
  Description of Artificial Sequence: Synthetic oligonucleotide
uaaauagugcaaauaccca

SEQ ID NO: 788388 - RNA, 19 nt, Artificial Sequence
  Description of Artificial Sequence: Synthetic oligonucleotide
uaacacuacauuuaugaaa

SEQ ID NO: 788389 - RNA, 19 nt, Artificial Sequence
  Description of Artificial Sequence: Synthetic oligonucleotide
uuaugaaacuagcugggga

SEQ ID NO: 788390 - RNA, 19 nt, Artificial Sequence
  Description of Artificial Sequence: Synthetic oligonucleotide
ucagaaaugucuguuacga

SEQ ID NO: 788391 - RNA, 19 nt, Artificial Sequence
  Description of Artificial Sequence: Synthetic oligonucleotide
uguaaacaugcaaacccag

SEQ ID NO: 788392 - RNA, 19 nt, Artificial Sequence
  Description of Artificial Sequence: Synthetic oligonucleotide
uucggguccacacuaauga

SEQ ID NO: 788393 - RNA, 19 nt, Artificial Sequence
  Description of Artificial Sequence: Synthetic oligonucleotide
uacauuuaugaaacuagcu

SEQ ID NO: 788394 - RNA, 19 nt, Artificial Sequence
  Description of Artificial Sequence: Synthetic oligonucleotide
cuuagagcccgauuaaagc

SEQ ID NO: 788395 - RNA, 19 nt, Artificial Sequence
  Description of Artificial Sequence: Synthetic oligonucleotide
cucacuccauccuacaugg

SEQ ID NO: 788396 - RNA, 19 nt, Artificial Sequence
  Description of Artificial Sequence: Synthetic oligonucleotide
caauaaggaauccuaacac

SEQ ID NO: 788397 - RNA, 19 nt, Artificial Sequence
  Description of Artificial Sequence: Synthetic oligonucleotide
aaaccaagaggauggucuc

SEQ ID NO: 788398 - RNA, 19 nt, Artificial Sequence
  Description of Artificial Sequence: Synthetic oligonucleotide
acuacauuuaugaaacuag

SEQ ID NO: 788399 - RNA, 19 nt, Artificial Sequence
  Description of Artificial Sequence: Synthetic oligonucleotide
auugauaacaauggggucu

SEQ ID NO: 788400 - RNA, 19 nt, Artificial Sequence
  Description of Artificial Sequence: Synthetic oligonucleotide
agugcuaaagcuaagcaug

SEQ ID NO: 788401 - RNA, 19 nt, Artificial Sequence
  Description of Artificial Sequence: Synthetic oligonucleotide
guaacaacaguccucccag

SEQ ID NO: 788402 - RNA, 19 nt, Artificial Sequence
  Description of Artificial Sequence: Synthetic oligonucleotide
caugauugauaacaauggg

SEQ ID NO: 788403 - RNA, 19 nt, Artificial Sequence
  Description of Artificial Sequence: Synthetic oligonucleotide
aguuaggucaggcgaauuc

SEQ ID NO: 788404 - RNA, 19 nt, Artificial Sequence
  Description of Artificial Sequence: Synthetic oligonucleotide
uggguuagagaacugguac

SEQ ID NO: 788405 - RNA, 19 nt, Artificial Sequence
  Description of Artificial Sequence: Synthetic oligonucleotide
uggaaauauagauccgaag

SEQ ID NO: 788406 - RNA, 19 nt, Artificial Sequence
  Description of Artificial Sequence: Synthetic oligonucleotide
aauuaaagcacaaccucca

SEQ ID NO: 788407 - RNA, 19 nt, Artificial Sequence
  Description of Artificial Sequence: Synthetic oligonucleotide
cuaaugacaugauugauaa

SEQ ID NO: 788408 - RNA, 19 nt, Artificial Sequence
  Description of Artificial Sequence: Synthetic oligonucleotide
aaggaauccuaacacuaca

SEQ ID NO: 788409 - RNA, 19 nt, Artificial Sequence
  Description of Artificial Sequence: Synthetic oligonucleotide
ucagugcuaaagcuaagca

SEQ ID NO: 788410 - RNA, 19 nt, Artificial Sequence
  Description of Artificial Sequence: Synthetic oligonucleotide
aagaccaacugcaaaaggu

SEQ ID NO: 788411 - RNA, 19 nt, Artificial Sequence
  Description of Artificial Sequence: Synthetic oligonucleotide
gaggcggcaccuuagagcc

SEQ ID NO: 788412 - RNA, 19 nt, Artificial Sequence
  Description of Artificial Sequence: Synthetic oligonucleotide
acgccugagacucugggac

SEQ ID NO: 788413 - RNA, 19 nt, Artificial Sequence
  Description of Artificial Sequence: Synthetic oligonucleotide
augacaaggcucuuaaaga

SEQ ID NO: 788414 - RNA, 19 nt, Artificial Sequence
  Description of Artificial Sequence: Synthetic oligonucleotide
aaauauagauccgaaguuu

SEQ ID NO: 788415 - RNA, 19 nt, Artificial Sequence
  Description of Artificial Sequence: Synthetic oligonucleotide
gaugcugcaacaauccagc

SEQ ID NO: 788416 - RNA, 19 nt, Artificial Sequence
  Description of Artificial Sequence: Synthetic oligonucleotide
uagcgauugcaauugaugu

SEQ ID NO: 788417 - RNA, 19 nt, Artificial Sequence
  Description of Artificial Sequence: Synthetic oligonucleotide
uuuaugaaacuagcugggg

SEQ ID NO: 788418 - RNA, 19 nt, Artificial Sequence
  Description of Artificial Sequence: Synthetic oligonucleotide
gaaucucagagaaacggag

SEQ ID NO: 788419 - RNA, 19 nt, Artificial Sequence
  Description of Artificial Sequence: Synthetic oligonucleotide
gaaguuugccuuccacucg

SEQ ID NO: 788420 - RNA, 19 nt, Artificial Sequence
  Description of Artificial Sequence: Synthetic oligonucleotide
ugcaauugauguacucccg

SEQ ID NO: 788421 - RNA, 19 nt, Artificial Sequence
  Description of Artificial Sequence: Synthetic oligonucleotide
cauugagaucuccuggucg

SEQ ID NO: 788422 - RNA, 19 nt, Artificial Sequence
  Description of Artificial Sequence: Synthetic oligonucleotide
gaaguagcgauugcaauug

SEQ ID NO: 788423 - RNA, 19 nt, Artificial Sequence
  Description of Artificial Sequence: Synthetic oligonucleotide
agccuguaaacaugcaaac

SEQ ID NO: 788424 - RNA, 19 nt, Artificial Sequence
  Description of Artificial Sequence: Synthetic oligonucleotide
cacagcgccugcaugaugg

SEQ ID NO: 788425 - RNA, 19 nt, Artificial Sequence
  Description of Artificial Sequence: Synthetic oligonucleotide
gaaaguugcucaucugggc

SEQ ID NO: 788426 - RNA, 19 nt, Artificial Sequence
  Description of Artificial Sequence: Synthetic oligonucleotide
ugcaaaagguaacaacagu

SEQ ID NO: 788427 - RNA, 19 nt, Artificial Sequence
  Description of Artificial Sequence: Synthetic oligonucleotide
gaaguuuucgcuuuugcgu

SEQ ID NO: 788428 - RNA, 19 nt, Artificial Sequence
  Description of Artificial Sequence: Synthetic oligonucleotide
ucaagagaggcaaucuccu

SEQ ID NO: 788429 - RNA, 19 nt, Artificial Sequence
  Description of Artificial Sequence: Synthetic oligonucleotide
aggagacacaccucacucc

SEQ ID NO: 788430 - RNA, 19 nt, Artificial Sequence
  Description of Artificial Sequence: Synthetic oligonucleotide
uaaggaauccuaacacuac

SEQ ID NO: 788431 - RNA, 19 nt, Artificial Sequence
  Description of Artificial Sequence: Synthetic oligonucleotide
ugacaaggcucuuaaagaa

SEQ ID NO: 788432 - RNA, 19 nt, Artificial Sequence
  Description of Artificial Sequence: Synthetic oligonucleotide
guuguguuugauguaaagc

SEQ ID NO: 788433 - RNA, 19 nt, Artificial Sequence
  Description of Artificial Sequence: Synthetic oligonucleotide
ggucguuugaccuggaagc

SEQ ID NO: 788434 - RNA, 19 nt, Artificial Sequence
  Description of Artificial Sequence: Synthetic oligonucleotide
uacauucccucccucuggg

SEQ ID NO: 788435 - RNA, 19 nt, Artificial Sequence
  Description of Artificial Sequence: Synthetic oligonucleotide
auagugcaaauacccaaag

SEQ ID NO: 788436 - RNA, 19 nt, Artificial Sequence
  Description of Artificial Sequence: Synthetic oligonucleotide
auugagaucuccuggucgu

SEQ ID NO: 788437 - RNA, 19 nt, Artificial Sequence
  Description of Artificial Sequence: Synthetic oligonucleotide
aaguagggcucccugaaaa

SEQ ID NO: 788438 - RNA, 19 nt, Artificial Sequence
  Description of Artificial Sequence: Synthetic oligonucleotide
ugaccuggaagccaucugu

SEQ ID NO: 788439 - RNA, 19 nt, Artificial Sequence
  Description of Artificial Sequence: Synthetic oligonucleotide
uguaaagccacagcgccug

SEQ ID NO: 788440 - RNA, 19 nt, Artificial Sequence
  Description of Artificial Sequence: Synthetic oligonucleotide
uuaggucaggcgaauuccc

SEQ ID NO: 788441 - RNA, 19 nt, Artificial Sequence
  Description of Artificial Sequence: Synthetic oligonucleotide
uuggaaauauagauccgaa

SEQ ID NO: 788442 - RNA, 19 nt, Artificial Sequence
  Description of Artificial Sequence: Synthetic oligonucleotide
aaaccagcugacacuggcc

SEQ ID NO: 788443 - RNA, 19 nt, Artificial Sequence
  Description of Artificial Sequence: Synthetic oligonucleotide
auuggaaauauagauccga

SEQ ID NO: 788444 - RNA, 19 nt, Artificial Sequence
  Description of Artificial Sequence: Synthetic oligonucleotide
guaauaaggcuuuggggac

SEQ ID NO: 788445 - RNA, 19 nt, Artificial Sequence
  Description of Artificial Sequence: Synthetic oligonucleotide
accccaguuaccucuguac

SEQ ID NO: 788446 - RNA, 19 nt, Artificial Sequence
  Description of Artificial Sequence: Synthetic oligonucleotide
auaacaauggggucuggau

SEQ ID NO: 788447 - RNA, 19 nt, Artificial Sequence
  Description of Artificial Sequence: Synthetic oligonucleotide
cucagagaaacggagucgg

SEQ ID NO: 788448 - RNA, 19 nt, Artificial Sequence
  Description of Artificial Sequence: Synthetic oligonucleotide
guagaaagcagcucgucuc

SEQ ID NO: 788449 - RNA, 19 nt, Artificial Sequence
  Description of Artificial Sequence: Synthetic oligonucleotide
guuacgaaauuaaagcaca

SEQ ID NO: 788450 - RNA, 19 nt, Artificial Sequence
  Description of Artificial Sequence: Synthetic oligonucleotide
agagaaacggagucggcca

SEQ ID NO: 788451 - RNA, 19 nt, Artificial Sequence
  Description of Artificial Sequence: Synthetic oligonucleotide
uguuugauguaaagccaca

SEQ ID NO: 788452 - RNA, 19 nt, Artificial Sequence
  Description of Artificial Sequence: Synthetic oligonucleotide
ugcuaaaagguaaguaaua

SEQ ID NO: 788453 - RNA, 19 nt, Artificial Sequence
  Description of Artificial Sequence: Synthetic oligonucleotide
ggaaauauagauccgaagu

SEQ ID NO: 788454 - RNA, 19 nt, Artificial Sequence
  Description of Artificial Sequence: Synthetic oligonucleotide
ugggcuuguaggaauggca

SEQ ID NO: 788455 - RNA, 19 nt, Artificial Sequence
  Description of Artificial Sequence: Synthetic oligonucleotide
aauauagauccgaaguuuu

SEQ ID NO: 788456 - RNA, 19 nt, Artificial Sequence
  Description of Artificial Sequence: Synthetic oligonucleotide
ccuaacacuacauuuauga

SEQ ID NO: 788457 - RNA, 19 nt, Artificial Sequence
  Description of Artificial Sequence: Synthetic oligonucleotide
cuguuacgaaauuaaagca

SEQ ID NO: 788458 - RNA, 19 nt, Artificial Sequence
  Description of Artificial Sequence: Synthetic oligonucleotide
cuacauggaggucugcagc

SEQ ID NO: 788459 - RNA, 19 nt, Artificial Sequence
  Description of Artificial Sequence: Synthetic oligonucleotide
acaugcaaacccagcagcc

SEQ ID NO: 788460 - RNA, 19 nt, Artificial Sequence
  Description of Artificial Sequence: Synthetic oligonucleotide
gauugauaacaaugggguc

SEQ ID NO: 788461 - RNA, 19 nt, Artificial Sequence
  Description of Artificial Sequence: Synthetic oligonucleotide
acauugagaucuccugguc

SEQ ID NO: 788462 - RNA, 19 nt, Artificial Sequence
  Description of Artificial Sequence: Synthetic oligonucleotide
cacuccauccuacauggag

SEQ ID NO: 788463 - RNA, 19 nt, Artificial Sequence
  Description of Artificial Sequence: Synthetic oligonucleotide
guagcgauugcaauugaug

SEQ ID NO: 788464 - RNA, 19 nt, Artificial Sequence
  Description of Artificial Sequence: Synthetic oligonucleotide
uaggccuacccucucuaag

SEQ ID NO: 788465 - RNA, 19 nt, Artificial Sequence
  Description of Artificial Sequence: Synthetic oligonucleotide
uuguaggaauggcaaagaa

SEQ ID NO: 788466 - RNA, 19 nt, Artificial Sequence
  Description of Artificial Sequence: Synthetic oligonucleotide
ccaguuuauacugaggcgg

SEQ ID NO: 788467 - RNA, 19 nt, Artificial Sequence
  Description of Artificial Sequence: Synthetic oligonucleotide
cuaagaccaacugcaaaag

SEQ ID NO: 788468 - RNA, 19 nt, Artificial Sequence
  Description of Artificial Sequence: Synthetic oligonucleotide
aguuccugcguuaucgccg

SEQ ID NO: 788469 - RNA, 19 nt, Artificial Sequence
  Description of Artificial Sequence: Synthetic oligonucleotide
guuaggucaggcgaauucc

SEQ ID NO: 788470 - RNA, 19 nt, Artificial Sequence
  Description of Artificial Sequence: Synthetic oligonucleotide
auaggagacacaccucacu

SEQ ID NO: 788471 - RNA, 19 nt, Artificial Sequence
  Description of Artificial Sequence: Synthetic oligonucleotide
aggaagcaaucccugagca

SEQ ID NO: 788472 - RNA, 19 nt, Artificial Sequence
  Description of Artificial Sequence: Synthetic oligonucleotide
ucucccgccagguuccggg

SEQ ID NO: 788473 - RNA, 19 nt, Artificial Sequence
  Description of Artificial Sequence: Synthetic oligonucleotide
ugugccucccaacugcuuc

SEQ ID NO: 788474 - RNA, 19 nt, Artificial Sequence
  Description of Artificial Sequence: Synthetic oligonucleotide
aacggagccauuccugaau

SEQ ID NO: 788475 - RNA, 19 nt, Artificial Sequence
  Description of Artificial Sequence: Synthetic oligonucleotide
guuugauguaaagccacag

SEQ ID NO: 788476 - RNA, 19 nt, Artificial Sequence
  Description of Artificial Sequence: Synthetic oligonucleotide
gaacugguacauucccucc

SEQ ID NO: 788477 - RNA, 19 nt, Artificial Sequence
  Description of Artificial Sequence: Synthetic oligonucleotide
cccuaaauagugcaaauac

SEQ ID NO: 788478 - RNA, 19 nt, Artificial Sequence
  Description of Artificial Sequence: Synthetic oligonucleotide
gagggugcacuugacauug

SEQ ID NO: 788479 - RNA, 19 nt, Artificial Sequence
  Description of Artificial Sequence: Synthetic oligonucleotide
ggacaaaccagcagcaagg

SEQ ID NO: 788480 - RNA, 19 nt, Artificial Sequence
  Description of Artificial Sequence: Synthetic oligonucleotide
caguuuauacugaggcggc

SEQ ID NO: 788481 - RNA, 19 nt, Artificial Sequence
  Description of Artificial Sequence: Synthetic oligonucleotide
ggugauaggagacacaccu

SEQ ID NO: 788482 - RNA, 19 nt, Artificial Sequence
  Description of Artificial Sequence: Synthetic oligonucleotide
auaaggaauccuaacacua

SEQ ID NO: 788483 - RNA, 19 nt, Artificial Sequence
  Description of Artificial Sequence: Synthetic oligonucleotide
uugggaacggagccauucc

SEQ ID NO: 788484 - RNA, 19 nt, Artificial Sequence
  Description of Artificial Sequence: Synthetic oligonucleotide
guaaacaugcaaacccagc

SEQ ID NO: 788485 - RNA, 19 nt, Artificial Sequence
  Description of Artificial Sequence: Synthetic oligonucleotide
caggcgaauucccagcacc

SEQ ID NO: 788486 - RNA, 19 nt, Artificial Sequence
  Description of Artificial Sequence: Synthetic oligonucleotide
agcucaaugacaaggcucu

SEQ ID NO: 788487 - RNA, 19 nt, Artificial Sequence
  Description of Artificial Sequence: Synthetic oligonucleotide
accaacugcaaaagguaac

SEQ ID NO: 788488 - RNA, 19 nt, Artificial Sequence
  Description of Artificial Sequence: Synthetic oligonucleotide
uccuaacacuacauuuaug

SEQ ID NO: 788489 - RNA, 19 nt, Artificial Sequence
  Description of Artificial Sequence: Synthetic oligonucleotide
ugaauguauuggaaauaua

SEQ ID NO: 788490 - RNA, 19 nt, Artificial Sequence
  Description of Artificial Sequence: Synthetic oligonucleotide
guuaucgccgucugucuug

SEQ ID NO: 788491 - RNA, 19 nt, Artificial Sequence
  Description of Artificial Sequence: Synthetic oligonucleotide
cauccgaugccacuccacc

SEQ ID NO: 788492 - RNA, 19 nt, Artificial Sequence
  Description of Artificial Sequence: Synthetic oligonucleotide
ucggcguugggaacggagc

SEQ ID NO: 788493 - RNA, 19 nt, Artificial Sequence
  Description of Artificial Sequence: Synthetic oligonucleotide
acuaaugacaugauugaua

SEQ ID NO: 788494 - RNA, 19 nt, Artificial Sequence
  Description of Artificial Sequence: Synthetic oligonucleotide
ugcgucaggggcuucuuga

SEQ ID NO: 788495 - RNA, 19 nt, Artificial Sequence
  Description of Artificial Sequence: Synthetic oligonucleotide
cagagaaacggagucggcc

SEQ ID NO: 788496 - RNA, 19 nt, Artificial Sequence
  Description of Artificial Sequence: Synthetic oligonucleotide
gaguagagggugauaggag

SEQ ID NO: 788497 - RNA, 19 nt, Artificial Sequence
  Description of Artificial Sequence: Synthetic oligonucleotide
ucggccacaacugaagauc

SEQ ID NO: 788498 - RNA, 19 nt, Artificial Sequence
  Description of Artificial Sequence: Synthetic oligonucleotide
cagcucaaugacaaggcuc

SEQ ID NO: 788499 - RNA, 19 nt, Artificial Sequence
  Description of Artificial Sequence: Synthetic oligonucleotide
uauacugaggcggcuggug

SEQ ID NO: 788500 - RNA, 19 nt, Artificial Sequence
  Description of Artificial Sequence: Synthetic oligonucleotide
ugcguuaucgccgucuguc

SEQ ID NO: 788501 - RNA, 19 nt, Artificial Sequence
  Description of Artificial Sequence: Synthetic oligonucleotide
gcaaauacccaaagaaaag

SEQ ID NO: 788502 - RNA, 19 nt, Artificial Sequence
  Description of Artificial Sequence: Synthetic oligonucleotide
augcugcaacaauccagcc

SEQ ID NO: 788503 - RNA, 19 nt, Artificial Sequence
  Description of Artificial Sequence: Synthetic oligonucleotide
uguacgccugagacucugg

SEQ ID NO: 788504 - RNA, 19 nt, Artificial Sequence
  Description of Artificial Sequence: Synthetic oligonucleotide
gaaacuagcuggggaguag

SEQ ID NO: 788505 - RNA, 19 nt, Artificial Sequence
  Description of Artificial Sequence: Synthetic oligonucleotide
augcccguccugcagcugg

SEQ ID NO: 788506 - RNA, 19 nt, Artificial Sequence
  Description of Artificial Sequence: Synthetic oligonucleotide
caucaagagaggcaaucuc

SEQ ID NO: 788507 - RNA, 19 nt, Artificial Sequence
  Description of Artificial Sequence: Synthetic oligonucleotide
aggucaggcgaauucccag

SEQ ID NO: 788508 - RNA, 19 nt, Artificial Sequence
  Description of Artificial Sequence: Synthetic oligonucleotide
agcaaggcugggcuuguag

SEQ ID NO: 788509 - RNA, 19 nt, Artificial Sequence
  Description of Artificial Sequence: Synthetic oligonucleotide
gugcacuugacauugagau

SEQ ID NO: 788510 - RNA, 19 nt, Artificial Sequence
  Description of Artificial Sequence: Synthetic oligonucleotide
gucagugcuaaagcuaagc

SEQ ID NO: 788511 - RNA, 19 nt, Artificial Sequence
  Description of Artificial Sequence: Synthetic oligonucleotide
uugaccuggaagccaucug

SEQ ID NO: 788512 - RNA, 19 nt, Artificial Sequence
  Description of Artificial Sequence: Synthetic oligonucleotide
aaacuagcuggggaguaga

SEQ ID NO: 788513 - RNA, 19 nt, Artificial Sequence
  Description of Artificial Sequence: Synthetic oligonucleotide
ugcugguuggugguagagg

SEQ ID NO: 788514 - RNA, 19 nt, Artificial Sequence
  Description of Artificial Sequence: Synthetic oligonucleotide
ucagagaaacggagucggc

SEQ ID NO: 788515 - RNA, 19 nt, Artificial Sequence
  Description of Artificial Sequence: Synthetic oligonucleotide
ugggaacggagccauuccu

SEQ ID NO: 788516 - RNA, 19 nt, Artificial Sequence
  Description of Artificial Sequence: Synthetic oligonucleotide
guguuugauguaaagccac

SEQ ID NO: 788517 - RNA, 19 nt, Artificial Sequence
  Description of Artificial Sequence: Synthetic oligonucleotide
acugguacauucccucccu

SEQ ID NO: 788518 - RNA, 19 nt, Artificial Sequence
  Description of Artificial Sequence: Synthetic oligonucleotide
gagccuguaaacaugcaaa

SEQ ID NO: 788519 - RNA, 19 nt, Artificial Sequence
  Description of Artificial Sequence: Synthetic oligonucleotide
guacgccugagacucuggg

SEQ ID NO: 788520 - RNA, 19 nt, Artificial Sequence
  Description of Artificial Sequence: Synthetic oligonucleotide
aagccaaugcuaaaaggua

SEQ ID NO: 788521 - RNA, 19 nt, Artificial Sequence
  Description of Artificial Sequence: Synthetic oligonucleotide
gguaacaacaguccuccca

SEQ ID NO: 788522 - RNA, 19 nt, Artificial Sequence
  Description of Artificial Sequence: Synthetic oligonucleotide
gcugacacuggcccuaggg

SEQ ID NO: 788523 - RNA, 19 nt, Artificial Sequence
  Description of Artificial Sequence: Synthetic oligonucleotide
caagagguccauguacgcc

SEQ ID NO: 788524 - RNA, 19 nt, Artificial Sequence
  Description of Artificial Sequence: Synthetic oligonucleotide
agccauuccugaaugaagu

SEQ ID NO: 788525 - RNA, 19 nt, Artificial Sequence
  Description of Artificial Sequence: Synthetic oligonucleotide
aggccuacccucucuaaga

SEQ ID NO: 788526 - RNA, 19 nt, Artificial Sequence
  Description of Artificial Sequence: Synthetic oligonucleotide
auacugaggcggcugguga

SEQ ID NO: 788527 - RNA, 19 nt, Artificial Sequence
  Description of Artificial Sequence: Synthetic oligonucleotide
aaacggagucggccacaac

SEQ ID NO: 788528 - RNA, 19 nt, Artificial Sequence
  Description of Artificial Sequence: Synthetic oligonucleotide
acggagccauuccugaaug

SEQ ID NO: 788529 - RNA, 19 nt, Artificial Sequence
  Description of Artificial Sequence: Synthetic oligonucleotide
uccuacauggaggucugca

SEQ ID NO: 788530 - RNA, 19 nt, Artificial Sequence
  Description of Artificial Sequence: Synthetic oligonucleotide
uggucucccgccagguucc

SEQ ID NO: 788531 - RNA, 19 nt, Artificial Sequence
  Description of Artificial Sequence: Synthetic oligonucleotide
aaguagcgauugcaauuga

SEQ ID NO: 788532 - RNA, 19 nt, Artificial Sequence
  Description of Artificial Sequence: Synthetic oligonucleotide
ggggaguagagggugauag

SEQ ID NO: 788533 - RNA, 19 nt, Artificial Sequence
  Description of Artificial Sequence: Synthetic oligonucleotide
gcaauugauguacucccgc

SEQ ID NO: 788534 - RNA, 19 nt, Artificial Sequence
  Description of Artificial Sequence: Synthetic oligonucleotide
agguaacaacaguccuccc

SEQ ID NO: 788535 - RNA, 19 nt, Artificial Sequence
  Description of Artificial Sequence: Synthetic oligonucleotide
aaaagccaagagguccaug

SEQ ID NO: 788536 - RNA, 19 nt, Artificial Sequence
  Description of Artificial Sequence: Synthetic oligonucleotide
ucuuggguggugggcaucc

SEQ ID NO: 788537 - RNA, 19 nt, Artificial Sequence
  Description of Artificial Sequence: Synthetic oligonucleotide
ccuuagagcccgauuaaag

SEQ ID NO: 788538 - RNA, 19 nt, Artificial Sequence
  Description of Artificial Sequence: Synthetic oligonucleotide
aggauggucucccgccagg

SEQ ID NO: 788539 - RNA, 19 nt, Artificial Sequence
  Description of Artificial Sequence: Synthetic oligonucleotide
aggaauggcaaagaacuuu

SEQ ID NO: 788540 - RNA, 19 nt, Artificial Sequence
  Description of Artificial Sequence: Synthetic oligonucleotide
aucuugacaucaagagagg

SEQ ID NO: 788541 - RNA, 19 nt, Artificial Sequence
  Description of Artificial Sequence: Synthetic oligonucleotide
agcgauugcaauugaugua

SEQ ID NO: 788542 - RNA, 19 nt, Artificial Sequence
  Description of Artificial Sequence: Synthetic oligonucleotide
ggaugcugcaacaauccag

SEQ ID NO: 788543 - RNA, 19 nt, Artificial Sequence
  Description of Artificial Sequence: Synthetic oligonucleotide
gguacauucccucccucug

SEQ ID NO: 788544 - RNA, 19 nt, Artificial Sequence
  Description of Artificial Sequence: Synthetic oligonucleotide
uacgccugagacucuggga

SEQ ID NO: 788545 - RNA, 19 nt, Artificial Sequence
  Description of Artificial Sequence: Synthetic oligonucleotide
cgaaguuuucgcuuuugcg

SEQ ID NO: 788546 - RNA, 19 nt, Artificial Sequence
  Description of Artificial Sequence: Synthetic oligonucleotide
guuugccuuccacucgaag

SEQ ID NO: 788547 - RNA, 19 nt, Artificial Sequence
  Description of Artificial Sequence: Synthetic oligonucleotide
gcgauugcaauugauguac

SEQ ID NO: 788548 - RNA, 19 nt, Artificial Sequence
  Description of Artificial Sequence: Synthetic oligonucleotide
gagaaacggagucggccac

SEQ ID NO: 788549 - RNA, 19 nt, Artificial Sequence
  Description of Artificial Sequence: Synthetic oligonucleotide
cuggggcugaauguauugg

SEQ ID NO: 788550 - RNA, 19 nt, Artificial Sequence
  Description of Artificial Sequence: Synthetic oligonucleotide
cucggcguugggaacggag

SEQ ID NO: 788551 - RNA, 19 nt, Artificial Sequence
  Description of Artificial Sequence: Synthetic oligonucleotide
agcccgauuaaagccaaug

SEQ ID NO: 788552 - RNA, 19 nt, Artificial Sequence
  Description of Artificial Sequence: Synthetic oligonucleotide
gauaggagacacaccucac

SEQ ID NO: 788553 - RNA, 19 nt, Artificial Sequence
  Description of Artificial Sequence: Synthetic oligonucleotide
accugcucccuaaauagug

SEQ ID NO: 788554 - RNA, 19 nt, Artificial Sequence
  Description of Artificial Sequence: Synthetic oligonucleotide
ucccuaaauagugcaaaua

SEQ ID NO: 788555 - RNA, 19 nt, Artificial Sequence
  Description of Artificial Sequence: Synthetic oligonucleotide
cagccgcuugcauagauca

SEQ ID NO: 788556 - RNA, 19 nt, Artificial Sequence
  Description of Artificial Sequence: Synthetic oligonucleotide
agucggccacaacugaaga

SEQ ID NO: 788557 - RNA, 19 nt, Artificial Sequence
  Description of Artificial Sequence: Synthetic oligonucleotide
uuaucgccgucugucuugc

SEQ ID NO: 788558 - RNA, 19 nt, Artificial Sequence
  Description of Artificial Sequence: Synthetic oligonucleotide
cugagacucugggacaagc

SEQ ID NO: 788559 - RNA, 19 nt, Artificial Sequence
  Description of Artificial Sequence: Synthetic oligonucleotide
ucaggcgaauucccagcac

SEQ ID NO: 788560 - RNA, 19 nt, Artificial Sequence
  Description of Artificial Sequence: Synthetic oligonucleotide
ggagacacaccucacucca

SEQ ID NO: 788561 - RNA, 19 nt, Artificial Sequence
  Description of Artificial Sequence: Synthetic oligonucleotide
ugaaacuagcuggggagua

SEQ ID NO: 788562 - RNA, 19 nt, Artificial Sequence
  Description of Artificial Sequence: Synthetic oligonucleotide
ugguagaggccagaaaguu

SEQ ID NO: 788563 - RNA, 19 nt, Artificial Sequence
  Description of Artificial Sequence: Synthetic oligonucleotide
ccuacccucucuaagacca

SEQ ID NO: 788564 - RNA, 19 nt, Artificial Sequence
  Description of Artificial Sequence: Synthetic oligonucleotide
uuuugcgucaggggcuucu

SEQ ID NO: 788565 - RNA, 19 nt, Artificial Sequence
  Description of Artificial Sequence: Synthetic oligonucleotide
cugagcaguuaggucaggc

SEQ ID NO: 788566 - RNA, 19 nt, Artificial Sequence
  Description of Artificial Sequence: Synthetic oligonucleotide
ugguucagaaaugucuguu

SEQ ID NO: 788567 - RNA, 19 nt, Artificial Sequence
  Description of Artificial Sequence: Synthetic oligonucleotide
augaaacuagcuggggagu

SEQ ID NO: 788568 - RNA, 19 nt, Artificial Sequence
  Description of Artificial Sequence: Synthetic oligonucleotide
guugggaacggagccauuc

SEQ ID NO: 788569 - RNA, 19 nt, Artificial Sequence
  Description of Artificial Sequence: Synthetic oligonucleotide
ucguuugaccuggaagcca

SEQ ID NO: 788570 - RNA, 19 nt, Artificial Sequence
  Description of Artificial Sequence: Synthetic oligonucleotide
cuggcccuaggguggagcc

SEQ ID NO: 788571 - RNA, 19 nt, Artificial Sequence
  Description of Artificial Sequence: Synthetic oligonucleotide
aggcccauacagcuccuug

SEQ ID NO: 788572 - RNA, 19 nt, Artificial Sequence
  Description of Artificial Sequence: Synthetic oligonucleotide
aggucucggcguugggaac

SEQ ID NO: 788573 - RNA, 19 nt, Artificial Sequence
  Description of Artificial Sequence: Synthetic oligonucleotide
agaccaacugcaaaaggua

SEQ ID NO: 788574 - RNA, 19 nt, Artificial Sequence
  Description of Artificial Sequence: Synthetic oligonucleotide
agaaagcagcucgucucuc

SEQ ID NO: 788575 - RNA, 19 nt, Artificial Sequence
  Description of Artificial Sequence: Synthetic oligonucleotide
gucguuugaccuggaagcc

SEQ ID NO: 788576 - RNA, 19 nt, Artificial Sequence
  Description of Artificial Sequence: Synthetic oligonucleotide
ccucucuaagaccaacugc

SEQ ID NO: 788577 - RNA, 19 nt, Artificial Sequence
  Description of Artificial Sequence: Synthetic oligonucleotide
agccaaugcuaaaagguaa

SEQ ID NO: 788578 - RNA, 19 nt, Artificial Sequence
  Description of Artificial Sequence: Synthetic oligonucleotide
auucggguccacacuaaug

SEQ ID NO: 788579 - RNA, 19 nt, Artificial Sequence
  Description of Artificial Sequence: Synthetic oligonucleotide
ggugauccagcaugagcag

SEQ ID NO: 788580 - RNA, 19 nt, Artificial Sequence
  Description of Artificial Sequence: Synthetic oligonucleotide
uccugcugguuggugguag

SEQ ID NO: 788581 - RNA, 19 nt, Artificial Sequence
  Description of Artificial Sequence: Synthetic oligonucleotide
uuaggccuacccucucuaa

SEQ ID NO: 788582 - RNA, 19 nt, Artificial Sequence
  Description of Artificial Sequence: Synthetic oligonucleotide
agugacucccacauagaaa

SEQ ID NO: 788583 - RNA, 19 nt, Artificial Sequence
  Description of Artificial Sequence: Synthetic oligonucleotide
ccuacauggaggucugcag

SEQ ID NO: 788584 - RNA, 19 nt, Artificial Sequence
  Description of Artificial Sequence: Synthetic oligonucleotide
ugauaacaauggggucugg

SEQ ID NO: 788585 - RNA, 19 nt, Artificial Sequence
  Description of Artificial Sequence: Synthetic oligonucleotide
gcaaucccugagcaguuag

SEQ ID NO: 788586 - RNA, 19 nt, Artificial Sequence
  Description of Artificial Sequence: Synthetic oligonucleotide
ggucaggcgaauucccagc

SEQ ID NO: 788587 - RNA, 19 nt, Artificial Sequence
  Description of Artificial Sequence: Synthetic oligonucleotide
cugaggcggcaccuuagag

SEQ ID NO: 788588 - RNA, 19 nt, Artificial Sequence
  Description of Artificial Sequence: Synthetic oligonucleotide
aggaggcaccaaguagggc

SEQ ID NO: 788589 - RNA, 19 nt, Artificial Sequence
  Description of Artificial Sequence: Synthetic oligonucleotide
gccaaugcuaaaagguaag

SEQ ID NO: 788590 - RNA, 19 nt, Artificial Sequence
  Description of Artificial Sequence: Synthetic oligonucleotide
aggaauccuaacacuacau

SEQ ID NO: 788591 - RNA, 19 nt, Artificial Sequence
  Description of Artificial Sequence: Synthetic oligonucleotide
gguagaggccagaaaguug

SEQ ID NO: 788592 - RNA, 19 nt, Artificial Sequence
  Description of Artificial Sequence: Synthetic oligonucleotide
ucaugcccguccugcagcu

SEQ ID NO: 788593 - RNA, 19 nt, Artificial Sequence
  Description of Artificial Sequence: Synthetic oligonucleotide
aguuuauacugaggcggcu

SEQ ID NO: 788594 - RNA, 19 nt, Artificial Sequence
  Description of Artificial Sequence: Synthetic oligonucleotide
uugcgucaggggcuucuug

SEQ ID NO: 788595 - RNA, 19 nt, Artificial Sequence
  Description of Artificial Sequence: Synthetic oligonucleotide
guuuucgcuuuugcgucag

SEQ ID NO: 788596 - RNA, 19 nt, Artificial Sequence
  Description of Artificial Sequence: Synthetic oligonucleotide
cucgucucuccuccucagg

SEQ ID NO: 788597 - RNA, 19 nt, Artificial Sequence
  Description of Artificial Sequence: Synthetic oligonucleotide
uuauacugaggcggcuggu

SEQ ID NO: 788598 - RNA, 19 nt, Artificial Sequence
  Description of Artificial Sequence: Synthetic oligonucleotide
ucguggaucuugacaucaa

SEQ ID NO: 788599 - RNA, 19 nt, Artificial Sequence
  Description of Artificial Sequence: Synthetic oligonucleotide
ggguuagagaacugguaca

SEQ ID NO: 788600 - RNA, 19 nt, Artificial Sequence
  Description of Artificial Sequence: Synthetic oligonucleotide
ugcagccgcuugcauagau

SEQ ID NO: 788601 - RNA, 19 nt, Artificial Sequence
  Description of Artificial Sequence: Synthetic oligonucleotide
cuccauccgcuugcgagcg

SEQ ID NO: 788602 - RNA, 19 nt, Artificial Sequence
  Description of Artificial Sequence: Synthetic oligonucleotide
auagucucguggaucuuga

SEQ ID NO: 788603 - RNA, 19 nt, Artificial Sequence
  Description of Artificial Sequence: Synthetic oligonucleotide
uccugcguuaucgccgucu

SEQ ID NO: 788604 - RNA, 19 nt, Artificial Sequence
  Description of Artificial Sequence: Synthetic oligonucleotide
cugguuguguuugauguaa

SEQ ID NO: 788605 - RNA, 19 nt, Artificial Sequence
  Description of Artificial Sequence: Synthetic oligonucleotide
gucaggcgaauucccagca

SEQ ID NO: 788606 - RNA, 19 nt, Artificial Sequence
  Description of Artificial Sequence: Synthetic oligonucleotide
ggaacggagccauuccuga

SEQ ID NO: 788607 - RNA, 19 nt, Artificial Sequence
  Description of Artificial Sequence: Synthetic oligonucleotide
gcgagcgauggucuggucc

SEQ ID NO: 788608 - RNA, 19 nt, Artificial Sequence
  Description of Artificial Sequence: Synthetic oligonucleotide
acggagucggccacaacug

SEQ ID NO: 788609 - RNA, 19 nt, Artificial Sequence
  Description of Artificial Sequence: Synthetic oligonucleotide
aguagcgauugcaauugau

SEQ ID NO: 788610 - RNA, 19 nt, Artificial Sequence
  Description of Artificial Sequence: Synthetic oligonucleotide
gcaccuuagagcccgauua

SEQ ID NO: 788611 - RNA, 19 nt, Artificial Sequence
  Description of Artificial Sequence: Synthetic oligonucleotide
uacugaggcggcuggugau

SEQ ID NO: 788612 - RNA, 19 nt, Artificial Sequence
  Description of Artificial Sequence: Synthetic oligonucleotide
cugggcuuguaggaauggc

SEQ ID NO: 788613 - RNA, 19 nt, Artificial Sequence
  Description of Artificial Sequence: Synthetic oligonucleotide
ggagccuguaaacaugcaa

SEQ ID NO: 788614 - RNA, 19 nt, Artificial Sequence
  Description of Artificial Sequence: Synthetic oligonucleotide
guacucccgcucaugcccg

SEQ ID NO: 788615 - RNA, 19 nt, Artificial Sequence
  Description of Artificial Sequence: Synthetic oligonucleotide
ugguagaaagcagcucguc

SEQ ID NO: 788616 - RNA, 19 nt, Artificial Sequence
  Description of Artificial Sequence: Synthetic oligonucleotide
gaucuggcggaaguagcga

SEQ ID NO: 788617 - RNA, 19 nt, Artificial Sequence
  Description of Artificial Sequence: Synthetic oligonucleotide
ggaaucucagagaaacgga

SEQ ID NO: 788618 - RNA, 19 nt, Artificial Sequence
  Description of Artificial Sequence: Synthetic oligonucleotide
ccgauuaaagccaaugcua

SEQ ID NO: 788619 - RNA, 19 nt, Artificial Sequence
  Description of Artificial Sequence: Synthetic oligonucleotide
gguucagaaaugucuguua

SEQ ID NO: 788620 - RNA, 19 nt, Artificial Sequence
  Description of Artificial Sequence: Synthetic oligonucleotide
cuccuggucguuugaccug

SEQ ID NO: 788621 - RNA, 19 nt, Artificial Sequence
  Description of Artificial Sequence: Synthetic oligonucleotide
gguagaaagcagcucgucu

SEQ ID NO: 788622 - RNA, 19 nt, Artificial Sequence
  Description of Artificial Sequence: Synthetic oligonucleotide
caauugauguacucccgcu

SEQ ID NO: 788623 - RNA, 19 nt, Artificial Sequence
  Description of Artificial Sequence: Synthetic oligonucleotide
gauccgaaguuuucgcuuu

SEQ ID NO: 788624 - RNA, 19 nt, Artificial Sequence
  Description of Artificial Sequence: Synthetic oligonucleotide
ggcggcaccuuagagcccg

SEQ ID NO: 788625 - RNA, 19 nt, Artificial Sequence
  Description of Artificial Sequence: Synthetic oligonucleotide
auguacgccugagacucug

SEQ ID NO: 788626 - RNA, 19 nt, Artificial Sequence
  Description of Artificial Sequence: Synthetic oligonucleotide
ggucucggcguugggaacg

SEQ ID NO: 788627 - RNA, 19 nt, Artificial Sequence
  Description of Artificial Sequence: Synthetic oligonucleotide
ugagaucuccuggucguuu

SEQ ID NO: 788628 - RNA, 19 nt, Artificial Sequence
  Description of Artificial Sequence: Synthetic oligonucleotide
agcaguuaggucaggcgaa

SEQ ID NO: 788629 - RNA, 19 nt, Artificial Sequence
  Description of Artificial Sequence: Synthetic oligonucleotide
auguaaagccacagcgccu

SEQ ID NO: 788630 - RNA, 19 nt, Artificial Sequence
  Description of Artificial Sequence: Synthetic oligonucleotide
cucgucugugugugcacuc

SEQ ID NO: 788631 - RNA, 19 nt, Artificial Sequence
  Description of Artificial Sequence: Synthetic oligonucleotide
gaacggagccauuccugaa

SEQ ID NO: 788632 - RNA, 19 nt, Artificial Sequence
  Description of Artificial Sequence: Synthetic oligonucleotide
ccgaaguuuucgcuuuugc

SEQ ID NO: 788633 - RNA, 19 nt, Artificial Sequence
  Description of Artificial Sequence: Synthetic oligonucleotide
ggaaguagcgauugcaauu

SEQ ID NO: 788634 - RNA, 19 nt, Artificial Sequence
  Description of Artificial Sequence: Synthetic oligonucleotide
ucacuccauccuacaugga

SEQ ID NO: 788635 - RNA, 19 nt, Artificial Sequence
  Description of Artificial Sequence: Synthetic oligonucleotide
caagccuuaggccuacccu

SEQ ID NO: 788636 - RNA, 19 nt, Artificial Sequence
  Description of Artificial Sequence: Synthetic oligonucleotide
cacuugacauugagaucuc

SEQ ID NO: 788637 - RNA, 19 nt, Artificial Sequence
  Description of Artificial Sequence: Synthetic oligonucleotide
ccgucugucuugcuggggc

SEQ ID NO: 788638 - RNA, 19 nt, Artificial Sequence
  Description of Artificial Sequence: Synthetic oligonucleotide
gaaacggagucggccacaa

SEQ ID NO: 788639 - RNA, 19 nt, Artificial Sequence
  Description of Artificial Sequence: Synthetic oligonucleotide
uucuguuugcuaggaucau

SEQ ID NO: 788640 - RNA, 19 nt, Artificial Sequence
  Description of Artificial Sequence: Synthetic oligonucleotide
acauucccucccucuggga

SEQ ID NO: 788641 - RNA, 19 nt, Artificial Sequence
  Description of Artificial Sequence: Synthetic oligonucleotide
auccuacauggaggucugc

SEQ ID NO: 788642 - RNA, 19 nt, Artificial Sequence
  Description of Artificial Sequence: Synthetic oligonucleotide
aggcgaauucccagcaccu

SEQ ID NO: 788643 - RNA, 19 nt, Artificial Sequence
  Description of Artificial Sequence: Synthetic oligonucleotide
cgauuaaagccaaugcuaa

SEQ ID NO: 788644 - RNA, 19 nt, Artificial Sequence
  Description of Artificial Sequence: Synthetic oligonucleotide
caugggaaucucagagaaa

SEQ ID NO: 788645 - RNA, 19 nt, Artificial Sequence
  Description of Artificial Sequence: Synthetic oligonucleotide
cuccauccuacauggaggu

SEQ ID NO: 788646 - RNA, 19 nt, Artificial Sequence
  Description of Artificial Sequence: Synthetic oligonucleotide
caguuaccucuguacaaaa

SEQ ID NO: 788647 - RNA, 19 nt, Artificial Sequence
  Description of Artificial Sequence: Synthetic oligonucleotide
ggccaggaagaguccaggc

SEQ ID NO: 788648 - RNA, 19 nt, Artificial Sequence
  Description of Artificial Sequence: Synthetic oligonucleotide
cuuaggccuacccucucua

SEQ ID NO: 788649 - RNA, 19 nt, Artificial Sequence
  Description of Artificial Sequence: Synthetic oligonucleotide
cccucucuaagaccaacug

SEQ ID NO: 788650 - RNA, 19 nt, Artificial Sequence
  Description of Artificial Sequence: Synthetic oligonucleotide
acccucucuaagaccaacu

SEQ ID NO: 788651 - RNA, 19 nt, Artificial Sequence
  Description of Artificial Sequence: Synthetic oligonucleotide
ugccuucgcugcugcaccu

SEQ ID NO: 788652 - RNA, 19 nt, Artificial Sequence
  Description of Artificial Sequence: Synthetic oligonucleotide
ccaagccuuaggccuaccc

SEQ ID NO: 788653 - RNA, 19 nt, Artificial Sequence
  Description of Artificial Sequence: Synthetic oligonucleotide
caggagggugcacuugaca

SEQ ID NO: 788654 - RNA, 19 nt, Artificial Sequence
  Description of Artificial Sequence: Synthetic oligonucleotide
ggccuacccucucuaagac

SEQ ID NO: 788655 - RNA, 19 nt, Artificial Sequence
  Description of Artificial Sequence: Synthetic oligonucleotide
gggaacggagccauuccug

SEQ ID NO: 788656 - RNA, 19 nt, Artificial Sequence
  Description of Artificial Sequence: Synthetic oligonucleotide
cuaggaucauccagaaguu

SEQ ID NO: 788657 - RNA, 19 nt, Artificial Sequence
  Description of Artificial Sequence: Synthetic oligonucleotide
cacaccucacuccauccua

SEQ ID NO: 788658 - RNA, 19 nt, Artificial Sequence
  Description of Artificial Sequence: Synthetic oligonucleotide
guuccugcguuaucgccgu

SEQ ID NO: 788659 - RNA, 19 nt, Artificial Sequence
  Description of Artificial Sequence: Synthetic oligonucleotide
gucucggcguugggaacgg

SEQ ID NO: 788660 - RNA, 19 nt, Artificial Sequence
  Description of Artificial Sequence: Synthetic oligonucleotide
gccuacccucucuaagacc

SEQ ID NO: 788661 - RNA, 19 nt, Artificial Sequence
  Description of Artificial Sequence: Synthetic oligonucleotide
gccauuccugaaugaaguc

SEQ ID NO: 788662 - RNA, 19 nt, Artificial Sequence
  Description of Artificial Sequence: Synthetic oligonucleotide
caccuuagagcccgauuaa

SEQ ID NO: 788663 - RNA, 19 nt, Artificial Sequence
  Description of Artificial Sequence: Synthetic oligonucleotide
agagcccgauuaaagccaa

SEQ ID NO: 788664 - RNA, 19 nt, Artificial Sequence
  Description of Artificial Sequence: Synthetic oligonucleotide
auccgaaguuuucgcuuuu

SEQ ID NO: 788665 - RNA, 19 nt, Artificial Sequence
  Description of Artificial Sequence: Synthetic oligonucleotide
ggaauccuaacacuacauu

SEQ ID NO: 788666 - RNA, 19 nt, Artificial Sequence
  Description of Artificial Sequence: Synthetic oligonucleotide
ugcccguccugcagcuggu

SEQ ID NO: 788667 - RNA, 19 nt, Artificial Sequence
  Description of Artificial Sequence: Synthetic oligonucleotide
cauccgcuugcgagcgaug

SEQ ID NO: 788668 - RNA, 19 nt, Artificial Sequence
  Description of Artificial Sequence: Synthetic oligonucleotide
uuugcgucaggggcuucuu

SEQ ID NO: 788669 - RNA, 19 nt, Artificial Sequence
  Description of Artificial Sequence: Synthetic oligonucleotide
gggcuuguaggaauggcaa

SEQ ID NO: 788670 - RNA, 19 nt, Artificial Sequence
  Description of Artificial Sequence: Synthetic oligonucleotide
ggacaagcucccggauucg

SEQ ID NO: 788671 - RNA, 19 nt, Artificial Sequence
  Description of Artificial Sequence: Synthetic oligonucleotide
gcucccuaaauagugcaaa

SEQ ID NO: 788672 - RNA, 19 nt, Artificial Sequence
  Description of Artificial Sequence: Synthetic oligonucleotide
guuggugguagaggccaga

SEQ ID NO: 788673 - RNA, 19 nt, Artificial Sequence
  Description of Artificial Sequence: Synthetic oligonucleotide
uugagaucuccuggucguu

SEQ ID NO: 788674 - RNA, 19 nt, Artificial Sequence
  Description of Artificial Sequence: Synthetic oligonucleotide
gaugugccucccaacugcu

SEQ ID NO: 788675 - RNA, 19 nt, Artificial Sequence
  Description of Artificial Sequence: Synthetic oligonucleotide
caaguagggcucccugaaa

SEQ ID NO: 788676 - RNA, 19 nt, Artificial Sequence
  Description of Artificial Sequence: Synthetic oligonucleotide
ucacauccgugaugaucuu

SEQ ID NO: 788677 - RNA, 19 nt, Artificial Sequence
  Description of Artificial Sequence: Synthetic oligonucleotide
ggcuuguaggaauggcaaa

SEQ ID NO: 788678 - RNA, 19 nt, Artificial Sequence
  Description of Artificial Sequence: Synthetic oligonucleotide
uccauccgcuugcgagcga

SEQ ID NO: 788679 - RNA, 19 nt, Artificial Sequence
  Description of Artificial Sequence: Synthetic oligonucleotide
ccuuccacucgaagcuccc

SEQ ID NO: 788680 - RNA, 19 nt, Artificial Sequence
  Description of Artificial Sequence: Synthetic oligonucleotide
ugccaagccuuaggccuac

SEQ ID NO: 788681 - RNA, 19 nt, Artificial Sequence
  Description of Artificial Sequence: Synthetic oligonucleotide
caccucacuccauccuaca

SEQ ID NO: 788682 - RNA, 19 nt, Artificial Sequence
  Description of Artificial Sequence: Synthetic oligonucleotide
ccugcguuaucgccgucug

SEQ ID NO: 788683 - RNA, 19 nt, Artificial Sequence
  Description of Artificial Sequence: Synthetic oligonucleotide
ggcgaauucccagcaccug

SEQ ID NO: 788684 - RNA, 19 nt, Artificial Sequence
  Description of Artificial Sequence: Synthetic oligonucleotide
gggugauaggagacacacc

SEQ ID NO: 788685 - RNA, 19 nt, Artificial Sequence
  Description of Artificial Sequence: Synthetic oligonucleotide
gcgaauucccagcaccugu

SEQ ID NO: 788686 - RNA, 19 nt, Artificial Sequence
  Description of Artificial Sequence: Synthetic oligonucleotide
gccgcuugcauagaucaaa

SEQ ID NO: 788687 - RNA, 19 nt, Artificial Sequence
  Description of Artificial Sequence: Synthetic oligonucleotide
gucggccacaacugaagau

SEQ ID NO: 788688 - RNA, 19 nt, Artificial Sequence
  Description of Artificial Sequence: Synthetic oligonucleotide
agcaccuguuccaguuccu

SEQ ID NO: 788689 - RNA, 19 nt, Artificial Sequence
  Description of Artificial Sequence: Synthetic oligonucleotide
gccuuccacucgaagcucc

SEQ ID NO: 788690 - RNA, 19 nt, Artificial Sequence
  Description of Artificial Sequence: Synthetic oligonucleotide
ggggcugaauguauuggaa

SEQ ID NO: 788691 - RNA, 19 nt, Artificial Sequence
  Description of Artificial Sequence: Synthetic oligonucleotide
gugguagaaagcagcucgu

SEQ ID NO: 788692 - RNA, 19 nt, Artificial Sequence
  Description of Artificial Sequence: Synthetic oligonucleotide
ccaguuaccucuguacaaa

SEQ ID NO: 788693 - RNA, 19 nt, Artificial Sequence
  Description of Artificial Sequence: Synthetic oligonucleotide
gcuggugauccagcaugag

SEQ ID NO: 788694 - RNA, 19 nt, Artificial Sequence
  Description of Artificial Sequence: Synthetic oligonucleotide
gugggcauccgaugccacu

SEQ ID NO: 788695 - RNA, 19 nt, Artificial Sequence
  Description of Artificial Sequence: Synthetic oligonucleotide
guuugaccuggaagccauc

SEQ ID NO: 788696 - RNA, 19 nt, Artificial Sequence
  Description of Artificial Sequence: Synthetic oligonucleotide
cucccggauucgcugaggu

SEQ ID NO: 788697 - RNA, 19 nt, Artificial Sequence
  Description of Artificial Sequence: Synthetic oligonucleotide
cuuggaucuccauccgcuu

SEQ ID NO: 788698 - RNA, 19 nt, Artificial Sequence
  Description of Artificial Sequence: Synthetic oligonucleotide
gaaaucccucugggucuuc

SEQ ID NO: 788699 - RNA, 19 nt, Artificial Sequence
  Description of Artificial Sequence: Synthetic oligonucleotide
gcgccugcaugauggcagc

SEQ ID NO: 788700 - RNA, 19 nt, Artificial Sequence
  Description of Artificial Sequence: Synthetic oligonucleotide
ggagucggccacaacugaa

SEQ ID NO: 788701 - RNA, 19 nt, Artificial Sequence
  Description of Artificial Sequence: Synthetic oligonucleotide
cuacccucucuaagaccaa

SEQ ID NO: 788702 - RNA, 19 nt, Artificial Sequence
  Description of Artificial Sequence: Synthetic oligonucleotide
cauucggguccacacuaau

SEQ ID NO: 788703 - RNA, 19 nt, Artificial Sequence
  Description of Artificial Sequence: Synthetic oligonucleotide
ggcuggugauccagcauga

SEQ ID NO: 788704 - RNA, 19 nt, Artificial Sequence
  Description of Artificial Sequence: Synthetic oligonucleotide
gucucccgccagguuccgg

SEQ ID NO: 788705 - RNA, 19 nt, Artificial Sequence
  Description of Artificial Sequence: Synthetic oligonucleotide
ccucccucugggagacucc

SEQ ID NO: 788706 - RNA, 19 nt, Artificial Sequence
  Description of Artificial Sequence: Synthetic oligonucleotide
ggccagaaaguugcucauc

SEQ ID NO: 788707 - RNA, 19 nt, Artificial Sequence
  Description of Artificial Sequence: Synthetic oligonucleotide
gcauccgaugccacuccac

SEQ ID NO: 788708 - RNA, 19 nt, Artificial Sequence
  Description of Artificial Sequence: Synthetic oligonucleotide
uuccugcguuaucgccguc

SEQ ID NO: 788709 - RNA, 19 nt, Artificial Sequence
  Description of Artificial Sequence: Synthetic oligonucleotide
gcagccgcuugcauagauc

SEQ ID NO: 788710 - RNA, 19 nt, Artificial Sequence
  Description of Artificial Sequence: Synthetic oligonucleotide
ucucggcguugggaacgga

SEQ ID NO: 788711 - RNA, 19 nt, Artificial Sequence
  Description of Artificial Sequence: Synthetic oligonucleotide
ccgcuugcauagaucaaaa

SEQ ID NO: 788712 - RNA, 19 nt, Artificial Sequence
  Description of Artificial Sequence: Synthetic oligonucleotide
gcucccggauucgcugagg

SEQ ID NO: 788713 - RNA, 19 nt, Artificial Sequence
  Description of Artificial Sequence: Synthetic oligonucleotide
caugcccguccugcagcug

SEQ ID NO: 788714 - RNA, 19 nt, Artificial Sequence
  Description of Artificial Sequence: Synthetic oligonucleotide
gccgucugucuugcugggg

SEQ ID NO: 788715 - RNA, 19 nt, Artificial Sequence
  Description of Artificial Sequence: Synthetic oligonucleotide
ccuaggguggagccuguaa

SEQ ID NO: 788716 - RNA, 19 nt, Artificial Sequence
  Description of Artificial Sequence: Synthetic oligonucleotide
cuuuugcgucaggggcuuc

SEQ ID NO: 788717 - RNA, 19 nt, Artificial Sequence
  Description of Artificial Sequence: Synthetic oligonucleotide
gcccucgucugugugugca

SEQ ID NO: 788718 - RNA, 19 nt, Artificial Sequence
  Description of Artificial Sequence: Synthetic oligonucleotide
cauguacgccugagacucu

SEQ ID NO: 788719 - RNA, 19 nt, Artificial Sequence
  Description of Artificial Sequence: Synthetic oligonucleotide
gcguuaucgccgucugucu

SEQ ID NO: 788720 - RNA, 19 nt, Artificial Sequence
  Description of Artificial Sequence: Synthetic oligonucleotide
ccugcaugauggcagcccu

SEQ ID NO: 788721 - RNA, 19 nt, Artificial Sequence
  Description of Artificial Sequence: Synthetic oligonucleotide
ggucucccgccagguuccg

SEQ ID NO: 788722 - RNA, 19 nt, Artificial Sequence
  Description of Artificial Sequence: Synthetic oligonucleotide
cgccgucugucuugcuggg

SEQ ID NO: 788723 - RNA, 19 nt, Artificial Sequence
  Description of Artificial Sequence: Synthetic oligonucleotide
cacuggcccuaggguggag

SEQ ID NO: 788724 - RNA, 19 nt, Artificial Sequence
  Description of Artificial Sequence: Synthetic oligonucleotide
cugcguuaucgccgucugu

SEQ ID NO: 788725 - RNA, 19 nt, Artificial Sequence
  Description of Artificial Sequence: Synthetic oligonucleotide
cuggggaguagagggugau

SEQ ID NO: 788726 - RNA, 19 nt, Artificial Sequence
  Description of Artificial Sequence: Synthetic oligonucleotide
ccacacuaaugacaugauu

SEQ ID NO: 788727 - RNA, 19 nt, Artificial Sequence
  Description of Artificial Sequence: Synthetic oligonucleotide
gcgucaggggcuucuugau

SEQ ID NO: 788728 - RNA, 19 nt, Artificial Sequence
  Description of Artificial Sequence: Synthetic oligonucleotide
gcaguuaggucaggcgaau

SEQ ID NO: 788729 - RNA, 19 nt, Artificial Sequence
  Description of Artificial Sequence: Synthetic oligonucleotide
cggaaguagcgauugcaau

SEQ ID NO: 788730 - RNA, 19 nt, Artificial Sequence
  Description of Artificial Sequence: Synthetic oligonucleotide
gcguugggaacggagccau

SEQ ID NO: 788731 - RNA, 19 nt, Artificial Sequence
  Description of Artificial Sequence: Synthetic oligonucleotide
cggagucggccacaacuga

SEQ ID NO: 788732 - RNA, 19 nt, Artificial Sequence
  Description of Artificial Sequence: Synthetic oligonucleotide
gcuuuugcgucaggggcuu

SEQ ID NO: 788733 - RNA, 19 nt, Artificial Sequence
  Description of Artificial Sequence: Synthetic oligonucleotide
caguuaggucaggcgaauu

SEQ ID NO: 788734 - RNA, 19 nt, Artificial Sequence
  Description of Artificial Sequence: Synthetic oligonucleotide
gccaagccuuaggccuacc

SEQ ID NO: 788735 - RNA, 19 nt, Artificial Sequence
  Description of Artificial Sequence: Synthetic oligonucleotide
gagcccgauuaaagccaau

SEQ ID NO: 788736 - RNA, 19 nt, Artificial Sequence
  Description of Artificial Sequence: Synthetic oligonucleotide
ccuggucguuugaccugga

SEQ ID NO: 788737 - RNA, 19 nt, Artificial Sequence
  Description of Artificial Sequence: Synthetic oligonucleotide
ccucgucugugugugcacu

SEQ ID NO: 788738 - RNA, 19 nt, Artificial Sequence
  Description of Artificial Sequence: Synthetic oligonucleotide
cgucugucuugcuggggcu

SEQ ID NO: 788739 - RNA, 19 nt, Artificial Sequence
  Description of Artificial Sequence: Synthetic oligonucleotide
cagcaaggcugggcuugua

SEQ ID NO: 788740 - RNA, 19 nt, Artificial Sequence
  Description of Artificial Sequence: Synthetic oligonucleotide
cguuaucgccgucugucuu

SEQ ID NO: 788741 - RNA, 19 nt, Artificial Sequence
  Description of Artificial Sequence: Synthetic oligonucleotide
ccgccagguuccggggcug

SEQ ID NO: 788742 - RNA, 19 nt, Artificial Sequence
  Description of Artificial Sequence: Synthetic oligonucleotide
gcaguccgugggccugccu

SEQ ID NO: 788743 - RNA, 19 nt, Artificial Sequence
  Description of Artificial Sequence: Synthetic oligonucleotide
gcggcaccuuagagcccga

SEQ ID NO: 788744 - RNA, 19 nt, Artificial Sequence
  Description of Artificial Sequence: Synthetic oligonucleotide
cccuaggguggagccugua

SEQ ID NO: 788745 - RNA, 19 nt, Artificial Sequence
  Description of Artificial Sequence: Synthetic oligonucleotide
gcccuaggguggagccugu

SEQ ID NO: 788746 - RNA, 19 nt, Artificial Sequence
  Description of Artificial Sequence: Synthetic oligonucleotide
cggcaccuuagagcccgau

SEQ ID NO: 788747 - RNA, 19 nt, Artificial Sequence
  Description of Artificial Sequence: Synthetic oligonucleotide
gauacgaagguccacaucc

SEQ ID NO: 788748 - RNA, 19 nt, Artificial Sequence
  Description of Artificial Sequence: Synthetic oligonucleotide
ucaaaucuaacucucuccg

SEQ ID NO: 788749 - RNA, 19 nt, Artificial Sequence
  Description of Artificial Sequence: Synthetic oligonucleotide
uguguuacagagcauaaug

SEQ ID NO: 788750 - RNA, 19 nt, Artificial Sequence
  Description of Artificial Sequence: Synthetic oligonucleotide
aaugguaucguguccaaug

SEQ ID NO: 788751 - RNA, 19 nt, Artificial Sequence
  Description of Artificial Sequence: Synthetic oligonucleotide
uuuaggaccaaacaacgug

SEQ ID NO: 788752 - RNA, 19 nt, Artificial Sequence
  Description of Artificial Sequence: Synthetic oligonucleotide
uuuuccauaucuugggcgg

SEQ ID NO: 788753 - RNA, 19 nt, Artificial Sequence
  Description of Artificial Sequence: Synthetic oligonucleotide
ucuugcauggcacauauaa

SEQ ID NO: 788754 - RNA, 19 nt, Artificial Sequence
  Description of Artificial Sequence: Synthetic oligonucleotide
cuuuuaggaccaaacaacg

SEQ ID NO: 788755 - RNA, 19 nt, Artificial Sequence
  Description of Artificial Sequence: Synthetic oligonucleotide
uguuacagagcauaaugcc

SEQ ID NO: 788756 - RNA, 19 nt, Artificial Sequence
  Description of Artificial Sequence: Synthetic oligonucleotide
uguggcaagguccugagga

SEQ ID NO: 788757 - RNA, 19 nt, Artificial Sequence
  Description of Artificial Sequence: Synthetic oligonucleotide
cuuuagacauccaaucugc

SEQ ID NO: 788758 - RNA, 19 nt, Artificial Sequence
  Description of Artificial Sequence: Synthetic oligonucleotide
uuacagagcauaaugccug

SEQ ID NO: 788759 - RNA, 19 nt, Artificial Sequence
  Description of Artificial Sequence: Synthetic oligonucleotide
agagcauaaugccugcccc

SEQ ID NO: 788760 - RNA, 19 nt, Artificial Sequence
  Description of Artificial Sequence: Synthetic oligonucleotide
uuacucuucagauaacucu

SEQ ID NO: 788761 - RNA, 19 nt, Artificial Sequence
  Description of Artificial Sequence: Synthetic oligonucleotide
uucaaaucuaacucucucc

SEQ ID NO: 788762 - RNA, 19 nt, Artificial Sequence
  Description of Artificial Sequence: Synthetic oligonucleotide
ucagauaacucuugguuug

SEQ ID NO: 788763 - RNA, 19 nt, Artificial Sequence
  Description of Artificial Sequence: Synthetic oligonucleotide
uugcauggcacauauaacu

SEQ ID NO: 788764 - RNA, 19 nt, Artificial Sequence
  Description of Artificial Sequence: Synthetic oligonucleotide
aacucagggaggcucaaag

SEQ ID NO: 788765 - RNA, 19 nt, Artificial Sequence
  Description of Artificial Sequence: Synthetic oligonucleotide
guuuuccauaucuugggcg

SEQ ID NO: 788766 - RNA, 19 nt, Artificial Sequence
  Description of Artificial Sequence: Synthetic oligonucleotide
acuuuagacauccaaucug

SEQ ID NO: 788767 - RNA, 19 nt, Artificial Sequence
  Description of Artificial Sequence: Synthetic oligonucleotide
uuaggguagcuucacuagg

SEQ ID NO: 788768 - RNA, 19 nt, Artificial Sequence
  Description of Artificial Sequence: Synthetic oligonucleotide
uuauucaaaucuaacucuc

SEQ ID NO: 788769 - RNA, 19 nt, Artificial Sequence
  Description of Artificial Sequence: Synthetic oligonucleotide
caggaagauacgaaggucc

SEQ ID NO: 788770 - RNA, 19 nt, Artificial Sequence
  Description of Artificial Sequence: Synthetic oligonucleotide
ggaacuugcucauagcugg

SEQ ID NO: 788771 - RNA, 19 nt, Artificial Sequence
  Description of Artificial Sequence: Synthetic oligonucleotide
acucuuacucuucagauaa

SEQ ID NO: 788772 - RNA, 19 nt, Artificial Sequence
  Description of Artificial Sequence: Synthetic oligonucleotide
ggaagcauacaucaguggg

SEQ ID NO: 788773 - RNA, 19 nt, Artificial Sequence
  Description of Artificial Sequence: Synthetic oligonucleotide
ugcacguucccucaccggg

SEQ ID NO: 788774 - RNA, 19 nt, Artificial Sequence
  Description of Artificial Sequence: Synthetic oligonucleotide
aaucaucccuccuggcuac

SEQ ID NO: 788775 - RNA, 19 nt, Artificial Sequence
  Description of Artificial Sequence: Synthetic oligonucleotide
aacccuggagugcaugucg

SEQ ID NO: 788776 - RNA, 19 nt, Artificial Sequence
  Description of Artificial Sequence: Synthetic oligonucleotide
uccaauguaggaagcauac

SEQ ID NO: 788777 - RNA, 19 nt, Artificial Sequence
  Description of Artificial Sequence: Synthetic oligonucleotide
aacacuugcagguacuuua

SEQ ID NO: 788778 - RNA, 19 nt, Artificial Sequence
  Description of Artificial Sequence: Synthetic oligonucleotide
aagcauacaucaguggguc

SEQ ID NO: 788779 - RNA, 19 nt, Artificial Sequence
  Description of Artificial Sequence: Synthetic oligonucleotide
ucaucgcuuucuauggagg

SEQ ID NO: 788780 - RNA, 19 nt, Artificial Sequence
  Description of Artificial Sequence: Synthetic oligonucleotide
uacuuuagacauccaaucu

SEQ ID NO: 788781 - RNA, 19 nt, Artificial Sequence
  Description of Artificial Sequence: Synthetic oligonucleotide
aacucucuccgcuguacac

SEQ ID NO: 788782 - RNA, 19 nt, Artificial Sequence
  Description of Artificial Sequence: Synthetic oligonucleotide
ugaggaacggcgaugcucu

SEQ ID NO: 788783 - RNA, 19 nt, Artificial Sequence
  Description of Artificial Sequence: Synthetic oligonucleotide
cuuucgggcacuauccugc

SEQ ID NO: 788784 - RNA, 19 nt, Artificial Sequence
  Description of Artificial Sequence: Synthetic oligonucleotide
acauauaacuucagggugg

SEQ ID NO: 788785 - RNA, 19 nt, Artificial Sequence
  Description of Artificial Sequence: Synthetic oligonucleotide
aacaacgugaugccaauuu

SEQ ID NO: 788786 - RNA, 19 nt, Artificial Sequence
  Description of Artificial Sequence: Synthetic oligonucleotide
cacauauaacuucagggug

SEQ ID NO: 788787 - RNA, 19 nt, Artificial Sequence
  Description of Artificial Sequence: Synthetic oligonucleotide
aacgucagaaucaucccuc

SEQ ID NO: 788788 - RNA, 19 nt, Artificial Sequence
  Description of Artificial Sequence: Synthetic oligonucleotide
ugcgaaccaagcuuuugcg

SEQ ID NO: 788789 - RNA, 19 nt, Artificial Sequence
  Description of Artificial Sequence: Synthetic oligonucleotide
aucacccaacgucagaauc

SEQ ID NO: 788790 - RNA, 19 nt, Artificial Sequence
  Description of Artificial Sequence: Synthetic oligonucleotide
ucuacuacagcccgcaauu

SEQ ID NO: 788791 - RNA, 19 nt, Artificial Sequence
  Description of Artificial Sequence: Synthetic oligonucleotide
cucagggaggcucaaagcc

SEQ ID NO: 788792 - RNA, 19 nt, Artificial Sequence
  Description of Artificial Sequence: Synthetic oligonucleotide
agggacugaaguccugucc

SEQ ID NO: 788793 - RNA, 19 nt, Artificial Sequence
  Description of Artificial Sequence: Synthetic oligonucleotide
aaaguggguuccucccggc

SEQ ID NO: 788794 - RNA, 19 nt, Artificial Sequence
  Description of Artificial Sequence: Synthetic oligonucleotide
gaaaguggguuccucccgg

SEQ ID NO: 788795 - RNA, 19 nt, Artificial Sequence
  Description of Artificial Sequence: Synthetic oligonucleotide
cuuaggguagcuucacuag

SEQ ID NO: 788796 - RNA, 19 nt, Artificial Sequence
  Description of Artificial Sequence: Synthetic oligonucleotide
ucacauagccccguggagg

SEQ ID NO: 788797 - RNA, 19 nt, Artificial Sequence
  Description of Artificial Sequence: Synthetic oligonucleotide
ucuauggaggcuucacugc

SEQ ID NO: 788798 - RNA, 19 nt, Artificial Sequence
  Description of Artificial Sequence: Synthetic oligonucleotide
uuugucugcgaaccaagcu

SEQ ID NO: 788799 - RNA, 19 nt, Artificial Sequence
  Description of Artificial Sequence: Synthetic oligonucleotide
guacuuuagacauccaauc

SEQ ID NO: 788800 - RNA, 19 nt, Artificial Sequence
  Description of Artificial Sequence: Synthetic oligonucleotide
agcucagccugacaagccc

SEQ ID NO: 788801 - RNA, 19 nt, Artificial Sequence
  Description of Artificial Sequence: Synthetic oligonucleotide
ucguguccaauguaggaag

SEQ ID NO: 788802 - RNA, 19 nt, Artificial Sequence
  Description of Artificial Sequence: Synthetic oligonucleotide
uuuuaggaccaaacaacgu

SEQ ID NO: 788803 - RNA, 19 nt, Artificial Sequence
  Description of Artificial Sequence: Synthetic oligonucleotide
uccucgaacacuugcaggu

SEQ ID NO: 788804 - RNA, 19 nt, Artificial Sequence
  Description of Artificial Sequence: Synthetic oligonucleotide
ugcggguaugaucagaauc

SEQ ID NO: 788805 - RNA, 19 nt, Artificial Sequence
  Description of Artificial Sequence: Synthetic oligonucleotide
caacgugaugccaauuucc

SEQ ID NO: 788806 - RNA, 19 nt, Artificial Sequence
  Description of Artificial Sequence: Synthetic oligonucleotide
uagguggacaaugguaucg

SEQ ID NO: 788807 - RNA, 19 nt, Artificial Sequence
  Description of Artificial Sequence: Synthetic oligonucleotide
agcuuuugcggguaugauc

SEQ ID NO: 788808 - RNA, 19 nt, Artificial Sequence
  Description of Artificial Sequence: Synthetic oligonucleotide
acggcgaugcucucguugc

SEQ ID NO: 788809 - RNA, 19 nt, Artificial Sequence
  Description of Artificial Sequence: Synthetic oligonucleotide
cuuccuuuuaggaccaaac

SEQ ID NO: 788810 - RNA, 19 nt, Artificial Sequence
  Description of Artificial Sequence: Synthetic oligonucleotide
uuugcggguaugaucagaa

SEQ ID NO: 788811 - RNA, 19 nt, Artificial Sequence
  Description of Artificial Sequence: Synthetic oligonucleotide
uuucgacagggccucgugg

SEQ ID NO: 788812 - RNA, 19 nt, Artificial Sequence
  Description of Artificial Sequence: Synthetic oligonucleotide
ugggguucaaacccuggag

SEQ ID NO: 788813 - RNA, 19 nt, Artificial Sequence
  Description of Artificial Sequence: Synthetic oligonucleotide
agaaaguggguuccucccg

SEQ ID NO: 788814 - RNA, 19 nt, Artificial Sequence
  Description of Artificial Sequence: Synthetic oligonucleotide
cacugauugucacuguugc

SEQ ID NO: 788815 - RNA, 19 nt, Artificial Sequence
  Description of Artificial Sequence: Synthetic oligonucleotide
acauccaaucugcuccagc

SEQ ID NO: 788816 - RNA, 19 nt, Artificial Sequence
  Description of Artificial Sequence: Synthetic oligonucleotide
aacggcgaugcucucguug

SEQ ID NO: 788817 - RNA, 19 nt, Artificial Sequence
  Description of Artificial Sequence: Synthetic oligonucleotide
agcucucuacuacagcccg

SEQ ID NO: 788818 - RNA, 19 nt, Artificial Sequence
  Description of Artificial Sequence: Synthetic oligonucleotide
acgucucgguagcagaggc

SEQ ID NO: 788819 - RNA, 19 nt, Artificial Sequence
  Description of Artificial Sequence: Synthetic oligonucleotide
ucuucagauaacucuuggu

SEQ ID NO: 788820 - RNA, 19 nt, Artificial Sequence
  Description of Artificial Sequence: Synthetic oligonucleotide
uaucguguccaauguagga

SEQ ID NO: 788821 - RNA, 19 nt, Artificial Sequence
  Description of Artificial Sequence: Synthetic oligonucleotide
aggaagcauacaucagugg

SEQ ID NO: 788822 - RNA, 19 nt, Artificial Sequence
  Description of Artificial Sequence: Synthetic oligonucleotide
uguaacgacucuuacucuu

SEQ ID NO: 788823 - RNA, 19 nt, Artificial Sequence
  Description of Artificial Sequence: Synthetic oligonucleotide
gaagauacgaagguccaca

SEQ ID NO: 788824 - RNA, 19 nt, Artificial Sequence
  Description of Artificial Sequence: Synthetic oligonucleotide
gcugcaaggacucagguuc

SEQ ID NO: 788825 - RNA, 19 nt, Artificial Sequence
  Description of Artificial Sequence: Synthetic oligonucleotide
ugucuugcauggcacauau

SEQ ID NO: 788826 - RNA, 19 nt, Artificial Sequence
  Description of Artificial Sequence: Synthetic oligonucleotide
ccuuuuaggaccaaacaac

SEQ ID NO: 788827 - RNA, 19 nt, Artificial Sequence
  Description of Artificial Sequence: Synthetic oligonucleotide
aacgacucuuacucuucag

SEQ ID NO: 788828 - RNA, 19 nt, Artificial Sequence
  Description of Artificial Sequence: Synthetic oligonucleotide
ugauugucacuguugcugu

SEQ ID NO: 788829 - RNA, 19 nt, Artificial Sequence
  Description of Artificial Sequence: Synthetic oligonucleotide
caggacaagggcagcaucc

SEQ ID NO: 788830 - RNA, 19 nt, Artificial Sequence
  Description of Artificial Sequence: Synthetic oligonucleotide
aucaguggguccaaccacc

SEQ ID NO: 788831 - RNA, 19 nt, Artificial Sequence
  Description of Artificial Sequence: Synthetic oligonucleotide
gagucugccuuccgggucg

SEQ ID NO: 788832 - RNA, 19 nt, Artificial Sequence
  Description of Artificial Sequence: Synthetic oligonucleotide
cauggauguccuuucgggc

SEQ ID NO: 788833 - RNA, 19 nt, Artificial Sequence
  Description of Artificial Sequence: Synthetic oligonucleotide
agcagaggcccucaacuuc

SEQ ID NO: 788834 - RNA, 19 nt, Artificial Sequence
  Description of Artificial Sequence: Synthetic oligonucleotide
auggauguccuuucgggca

SEQ ID NO: 788835 - RNA, 19 nt, Artificial Sequence
  Description of Artificial Sequence: Synthetic oligonucleotide
acaagcccgcagcuggucc

SEQ ID NO: 788836 - RNA, 19 nt, Artificial Sequence
  Description of Artificial Sequence: Synthetic oligonucleotide
uuuagacauccaaucugcu

SEQ ID NO: 788837 - RNA, 19 nt, Artificial Sequence
  Description of Artificial Sequence: Synthetic oligonucleotide
cucaucgcuuucuauggag

SEQ ID NO: 788838 - RNA, 19 nt, Artificial Sequence
  Description of Artificial Sequence: Synthetic oligonucleotide
uacgguucccgccauuucu

SEQ ID NO: 788839 - RNA, 19 nt, Artificial Sequence
  Description of Artificial Sequence: Synthetic oligonucleotide
guguuacagagcauaaugc

SEQ ID NO: 788840 - RNA, 19 nt, Artificial Sequence
  Description of Artificial Sequence: Synthetic oligonucleotide
caaaucuaacucucuccgc

SEQ ID NO: 788841 - RNA, 19 nt, Artificial Sequence
  Description of Artificial Sequence: Synthetic oligonucleotide
ugacgucucgguagcagag

SEQ ID NO: 788842 - RNA, 19 nt, Artificial Sequence
  Description of Artificial Sequence: Synthetic oligonucleotide
ugggccguuuucaccaggg

SEQ ID NO: 788843 - RNA, 19 nt, Artificial Sequence
  Description of Artificial Sequence: Synthetic oligonucleotide
ucuguguuacagagcauaa

SEQ ID NO: 788844 - RNA, 19 nt, Artificial Sequence
  Description of Artificial Sequence: Synthetic oligonucleotide
cuugcauggcacauauaac

SEQ ID NO: 788845 - RNA, 19 nt, Artificial Sequence
  Description of Artificial Sequence: Synthetic oligonucleotide
gguaucguguccaauguag

SEQ ID NO: 788846 - RNA, 19 nt, Artificial Sequence
  Description of Artificial Sequence: Synthetic oligonucleotide
ggauccaucacccaacguc

SEQ ID NO: 788847 - RNA, 19 nt, Artificial Sequence
  Description of Artificial Sequence: Synthetic oligonucleotide
agcauacaucagugggucc

SEQ ID NO: 788848 - RNA, 19 nt, Artificial Sequence
  Description of Artificial Sequence: Synthetic oligonucleotide
caucgcuuucuauggaggc

SEQ ID NO: 788849 - RNA, 19 nt, Artificial Sequence
  Description of Artificial Sequence: Synthetic oligonucleotide
caggguggauccaucaccc

SEQ ID NO: 788850 - RNA, 19 nt, Artificial Sequence
  Description of Artificial Sequence: Synthetic oligonucleotide
gguaugaucagaauccuca

SEQ ID NO: 788851 - RNA, 19 nt, Artificial Sequence
  Description of Artificial Sequence: Synthetic oligonucleotide
gacaccuggccacgaaggg

SEQ ID NO: 788852 - RNA, 19 nt, Artificial Sequence
  Description of Artificial Sequence: Synthetic oligonucleotide
aguccuguccuccugucca

SEQ ID NO: 788853 - RNA, 19 nt, Artificial Sequence
  Description of Artificial Sequence: Synthetic oligonucleotide
aacgugaugccaauuuccu

SEQ ID NO: 788854 - RNA, 19 nt, Artificial Sequence
  Description of Artificial Sequence: Synthetic oligonucleotide
uugggguucaaacccugga

SEQ ID NO: 788855 - RNA, 19 nt, Artificial Sequence
  Description of Artificial Sequence: Synthetic oligonucleotide
ucccauucagcgucuguag

SEQ ID NO: 788856 - RNA, 19 nt, Artificial Sequence
  Description of Artificial Sequence: Synthetic oligonucleotide
gacaaugguaucgugucca

SEQ ID NO: 788857 - RNA, 19 nt, Artificial Sequence
  Description of Artificial Sequence: Synthetic oligonucleotide
ugugcaccaagcccauacc

SEQ ID NO: 788858 - RNA, 19 nt, Artificial Sequence
  Description of Artificial Sequence: Synthetic oligonucleotide
ugaaguccuguccuccugu

SEQ ID NO: 788859 - RNA, 19 nt, Artificial Sequence
  Description of Artificial Sequence: Synthetic oligonucleotide
ucccucaccgggaagcagc

SEQ ID NO: 788860 - RNA, 19 nt, Artificial Sequence
  Description of Artificial Sequence: Synthetic oligonucleotide
ugcauggcacauauaacuu

SEQ ID NO: 788861 - RNA, 19 nt, Artificial Sequence
  Description of Artificial Sequence: Synthetic oligonucleotide
augguaucguguccaaugu

SEQ ID NO: 788862 - RNA, 19 nt, Artificial Sequence
  Description of Artificial Sequence: Synthetic oligonucleotide
gcauggauguccuuucggg

SEQ ID NO: 788863 - RNA, 19 nt, Artificial Sequence
  Description of Artificial Sequence: Synthetic oligonucleotide
uacgaagguccacauccug

SEQ ID NO: 788864 - RNA, 19 nt, Artificial Sequence
  Description of Artificial Sequence: Synthetic oligonucleotide
ugccugccccaucucaugg

SEQ ID NO: 788865 - RNA, 19 nt, Artificial Sequence
  Description of Artificial Sequence: Synthetic oligonucleotide
guaucguguccaauguagg

SEQ ID NO: 788866 - RNA, 19 nt, Artificial Sequence
  Description of Artificial Sequence: Synthetic oligonucleotide
aaacccuggagugcauguc

SEQ ID NO: 788867 - RNA, 19 nt, Artificial Sequence
  Description of Artificial Sequence: Synthetic oligonucleotide
uucaggucgcuuucaguga

SEQ ID NO: 788868 - RNA, 19 nt, Artificial Sequence
  Description of Artificial Sequence: Synthetic oligonucleotide
gaaucaucccuccuggcua

SEQ ID NO: 788869 - RNA, 19 nt, Artificial Sequence
  Description of Artificial Sequence: Synthetic oligonucleotide
uaacucucuccgcuguaca

SEQ ID NO: 788870 - RNA, 19 nt, Artificial Sequence
  Description of Artificial Sequence: Synthetic oligonucleotide
gucacuguugcuguaacga

SEQ ID NO: 788871 - RNA, 19 nt, Artificial Sequence
  Description of Artificial Sequence: Synthetic oligonucleotide
caugugcagggacacacac

SEQ ID NO: 788872 - RNA, 19 nt, Artificial Sequence
  Description of Artificial Sequence: Synthetic oligonucleotide
cugugcaccaagcccauac

SEQ ID NO: 788873 - RNA, 19 nt, Artificial Sequence
  Description of Artificial Sequence: Synthetic oligonucleotide
ugucugcgaaccaagcuuu

SEQ ID NO: 788874 - RNA, 19 nt, Artificial Sequence
  Description of Artificial Sequence: Synthetic oligonucleotide
ucgucccugugcuggaagg

SEQ ID NO: 788875 - RNA, 19 nt, Artificial Sequence
  Description of Artificial Sequence: Synthetic oligonucleotide
aucccgcucauuaaugggg

SEQ ID NO: 788876 - RNA, 19 nt, Artificial Sequence
  Description of Artificial Sequence: Synthetic oligonucleotide
ucacacucaccccucgccu

SEQ ID NO: 788877 - RNA, 19 nt, Artificial Sequence
  Description of Artificial Sequence: Synthetic oligonucleotide
aauccucaucgcuuucuau

SEQ ID NO: 788878 - RNA, 19 nt, Artificial Sequence
  Description of Artificial Sequence: Synthetic oligonucleotide
cuggagugcaugucguccc

SEQ ID NO: 788879 - RNA, 19 nt, Artificial Sequence
  Description of Artificial Sequence: Synthetic oligonucleotide
cucuccgcuguacacauuc

SEQ ID NO: 788880 - RNA, 19 nt, Artificial Sequence
  Description of Artificial Sequence: Synthetic oligonucleotide
guucccgccauuucuuccc

SEQ ID NO: 788881 - RNA, 19 nt, Artificial Sequence
  Description of Artificial Sequence: Synthetic oligonucleotide
agccggucagcauaggcca

SEQ ID NO: 788882 - RNA, 19 nt, Artificial Sequence
  Description of Artificial Sequence: Synthetic oligonucleotide
cuagccggucagcauaggc

SEQ ID NO: 788883 - RNA, 19 nt, Artificial Sequence
  Description of Artificial Sequence: Synthetic oligonucleotide
auucagcgucuguagcuuc

SEQ ID NO: 788884 - RNA, 19 nt, Artificial Sequence
  Description of Artificial Sequence: Synthetic oligonucleotide
ucgagcaguagguggacaa

SEQ ID NO: 788885 - RNA, 19 nt, Artificial Sequence
  Description of Artificial Sequence: Synthetic oligonucleotide
gcuuuugcggguaugauca

SEQ ID NO: 788886 - RNA, 19 nt, Artificial Sequence
  Description of Artificial Sequence: Synthetic oligonucleotide
acacucaccccucgccucg

SEQ ID NO: 788887 - RNA, 19 nt, Artificial Sequence
  Description of Artificial Sequence: Synthetic oligonucleotide
cuucacaguuccgacuggg

SEQ ID NO: 788888 - RNA, 19 nt, Artificial Sequence
  Description of Artificial Sequence: Synthetic oligonucleotide
uggauguccuuucgggcac

SEQ ID NO: 788889 - RNA, 19 nt, Artificial Sequence
  Description of Artificial Sequence: Synthetic oligonucleotide
aucuaacucucuccgcugu

SEQ ID NO: 788890 - RNA, 19 nt, Artificial Sequence
  Description of Artificial Sequence: Synthetic oligonucleotide
gcggguaugaucagaaucc

SEQ ID NO: 788891 - RNA, 19 nt, Artificial Sequence
  Description of Artificial Sequence: Synthetic oligonucleotide
guagcagaggcccucaacu

SEQ ID NO: 788892 - RNA, 19 nt, Artificial Sequence
  Description of Artificial Sequence: Synthetic oligonucleotide
cgaaccaagcuuuugcggg

SEQ ID NO: 788893 - RNA, 19 nt, Artificial Sequence
  Description of Artificial Sequence: Synthetic oligonucleotide
caucaguggguccaaccac

SEQ ID NO: 788894 - RNA, 19 nt, Artificial Sequence
  Description of Artificial Sequence: Synthetic oligonucleotide
aggaacuugcucauagcug

SEQ ID NO: 788895 - RNA, 19 nt, Artificial Sequence
  Description of Artificial Sequence: Synthetic oligonucleotide
cacaucccgcucauuaaug

SEQ ID NO: 788896 - RNA, 19 nt, Artificial Sequence
  Description of Artificial Sequence: Synthetic oligonucleotide
ugacaacucagggaggcuc

SEQ ID NO: 788897 - RNA, 19 nt, Artificial Sequence
  Description of Artificial Sequence: Synthetic oligonucleotide
cauucacacucaccccucg

SEQ ID NO: 788898 - RNA, 19 nt, Artificial Sequence
  Description of Artificial Sequence: Synthetic oligonucleotide
guccuuucgggcacuaucc

SEQ ID NO: 788899 - RNA, 19 nt, Artificial Sequence
  Description of Artificial Sequence: Synthetic oligonucleotide
acucgcuugggccguuuuc

SEQ ID NO: 788900 - RNA, 19 nt, Artificial Sequence
  Description of Artificial Sequence: Synthetic oligonucleotide
uuuugcggguaugaucaga

SEQ ID NO: 788901 - RNA, 19 nt, Artificial Sequence
  Description of Artificial Sequence: Synthetic oligonucleotide
acacucuucacaguuccga

SEQ ID NO: 788902 - RNA, 19 nt, Artificial Sequence
  Description of Artificial Sequence: Synthetic oligonucleotide
gaugcucucguugccacca

SEQ ID NO: 788903 - RNA, 19 nt, Artificial Sequence
  Description of Artificial Sequence: Synthetic oligonucleotide
cucguggcgcugaggaacg

SEQ ID NO: 788904 - RNA, 19 nt, Artificial Sequence
  Description of Artificial Sequence: Synthetic oligonucleotide
ucugcgaaccaagcuuuug

SEQ ID NO: 788905 - RNA, 19 nt, Artificial Sequence
  Description of Artificial Sequence: Synthetic oligonucleotide
acacagucuuccagggccc

SEQ ID NO: 788906 - RNA, 19 nt, Artificial Sequence
  Description of Artificial Sequence: Synthetic oligonucleotide
cucuagccggucagcauag

SEQ ID NO: 788907 - RNA, 19 nt, Artificial Sequence
  Description of Artificial Sequence: Synthetic oligonucleotide
uggggcuugccuccaaguc

SEQ ID NO: 788908 - RNA, 19 nt, Artificial Sequence
  Description of Artificial Sequence: Synthetic oligonucleotide
aucguguccaauguaggaa

SEQ ID NO: 788909 - RNA, 19 nt, Artificial Sequence
  Description of Artificial Sequence: Synthetic oligonucleotide
uccuuucgggcacuauccu

SEQ ID NO: 788910 - RNA, 19 nt, Artificial Sequence
  Description of Artificial Sequence: Synthetic oligonucleotide
ggcauggauguccuuucgg

SEQ ID NO: 788911 - RNA, 19 nt, Artificial Sequence
  Description of Artificial Sequence: Synthetic oligonucleotide
guuacagagcauaaugccu

SEQ ID NO: 788912 - RNA, 19 nt, Artificial Sequence
  Description of Artificial Sequence: Synthetic oligonucleotide
gcgaaccaagcuuuugcgg

SEQ ID NO: 788913 - RNA, 19 nt, Artificial Sequence
  Description of Artificial Sequence: Synthetic oligonucleotide
gacgucucgguagcagagg

SEQ ID NO: 788914 - RNA, 19 nt, Artificial Sequence
  Description of Artificial Sequence: Synthetic oligonucleotide
agccccugagcucuucuug

SEQ ID NO: 788915 - RNA, 19 nt, Artificial Sequence
  Description of Artificial Sequence: Synthetic oligonucleotide
gaagcauacaucagugggu

SEQ ID NO: 788916 - RNA, 19 nt, Artificial Sequence
  Description of Artificial Sequence: Synthetic oligonucleotide
cuugccuccaaguccaaua

SEQ ID NO: 788917 - RNA, 19 nt, Artificial Sequence
  Description of Artificial Sequence: Synthetic oligonucleotide
cucagguucucgugccacc

SEQ ID NO: 788918 - RNA, 19 nt, Artificial Sequence
  Description of Artificial Sequence: Synthetic oligonucleotide
acacuugcagguacuuuag

SEQ ID NO: 788919 - RNA, 19 nt, Artificial Sequence
  Description of Artificial Sequence: Synthetic oligonucleotide
cugaggaacggcgaugcuc

SEQ ID NO: 788920 - RNA, 19 nt, Artificial Sequence
  Description of Artificial Sequence: Synthetic oligonucleotide
cuucuuucgacagggccuc

SEQ ID NO: 788921 - RNA, 19 nt, Artificial Sequence
  Description of Artificial Sequence: Synthetic oligonucleotide
uaggggacugguccugccu

SEQ ID NO: 788922 - RNA, 19 nt, Artificial Sequence
  Description of Artificial Sequence: Synthetic oligonucleotide
cucagccugacaagcccgc

SEQ ID NO: 788923 - RNA, 19 nt, Artificial Sequence
  Description of Artificial Sequence: Synthetic oligonucleotide
cauaaugccugccccaucu

SEQ ID NO: 788924 - RNA, 19 nt, Artificial Sequence
  Description of Artificial Sequence: Synthetic oligonucleotide
guggcgcugaggaacggcg

SEQ ID NO: 788925 - RNA, 19 nt, Artificial Sequence
  Description of Artificial Sequence: Synthetic oligonucleotide
ucuaacucucuccgcugua

SEQ ID NO: 788926 - RNA, 19 nt, Artificial Sequence
  Description of Artificial Sequence: Synthetic oligonucleotide
ggggcuugccuccaagucc

SEQ ID NO: 788927 - RNA, 19 nt, Artificial Sequence
  Description of Artificial Sequence: Synthetic oligonucleotide
cuuucgacagggccucgug

SEQ ID NO: 788928 - RNA, 19 nt, Artificial Sequence
  Description of Artificial Sequence: Synthetic oligonucleotide
cauccugcuccucgaacac

SEQ ID NO: 788929 - RNA, 19 nt, Artificial Sequence
  Description of Artificial Sequence: Synthetic oligonucleotide
ugguaucguguccaaugua

SEQ ID NO: 788930 - RNA, 19 nt, Artificial Sequence
  Description of Artificial Sequence: Synthetic oligonucleotide
ucugccuuccgggucggca

SEQ ID NO: 788931 - RNA, 19 nt, Artificial Sequence
  Description of Artificial Sequence: Synthetic oligonucleotide
cuacagcccgcaauuccug

SEQ ID NO: 788932 - RNA, 19 nt, Artificial Sequence
  Description of Artificial Sequence: Synthetic oligonucleotide
ucaucccuccuggcuacgg

SEQ ID NO: 788933 - RNA, 19 nt, Artificial Sequence
  Description of Artificial Sequence: Synthetic oligonucleotide
gcuugggccguuuucacca

SEQ ID NO: 788934 - RNA, 19 nt, Artificial Sequence
  Description of Artificial Sequence: Synthetic oligonucleotide
cacauugacaagcugcggu

SEQ ID NO: 788935 - RNA, 19 nt, Artificial Sequence
  Description of Artificial Sequence: Synthetic oligonucleotide
cacucgagcugacagcuca

SEQ ID NO: 788936 - RNA, 19 nt, Artificial Sequence
  Description of Artificial Sequence: Synthetic oligonucleotide
cacauagccccguggagga

SEQ ID NO: 788937 - RNA, 19 nt, Artificial Sequence
  Description of Artificial Sequence: Synthetic oligonucleotide
aggaagauacgaaggucca

SEQ ID NO: 788938 - RNA, 19 nt, Artificial Sequence
  Description of Artificial Sequence: Synthetic oligonucleotide
gguguucucaucacugcug

SEQ ID NO: 788939 - RNA, 19 nt, Artificial Sequence
  Description of Artificial Sequence: Synthetic oligonucleotide
gugcaccaagcccauacca

SEQ ID NO: 788940 - RNA, 19 nt, Artificial Sequence
  Description of Artificial Sequence: Synthetic oligonucleotide
cauauaacuucagggugga

SEQ ID NO: 788941 - RNA, 19 nt, Artificial Sequence
  Description of Artificial Sequence: Synthetic oligonucleotide
guaacgacucuuacucuuc

SEQ ID NO: 788942 - RNA, 19 nt, Artificial Sequence
  Description of Artificial Sequence: Synthetic oligonucleotide
agcaguguggcaagguccu

SEQ ID NO: 788943 - RNA, 19 nt, Artificial Sequence
  Description of Artificial Sequence: Synthetic oligonucleotide
acaaugguaucguguccaa

SEQ ID NO: 788944 - RNA, 19 nt, Artificial Sequence
  Description of Artificial Sequence: Synthetic oligonucleotide
ccaacgucagaaucauccc

SEQ ID NO: 788945 - RNA, 19 nt, Artificial Sequence
  Description of Artificial Sequence: Synthetic oligonucleotide
agcuucacuaggggacugg

SEQ ID NO: 788946 - RNA, 19 nt, Artificial Sequence
  Description of Artificial Sequence: Synthetic oligonucleotide
cuuuugcggguaugaucag

SEQ ID NO: 788947 - RNA, 19 nt, Artificial Sequence
  Description of Artificial Sequence: Synthetic oligonucleotide
gguucaaacccuggagugc

SEQ ID NO: 788948 - RNA, 19 nt, Artificial Sequence
  Description of Artificial Sequence: Synthetic oligonucleotide
acucucuccgcuguacaca

SEQ ID NO: 788949 - RNA, 19 nt, Artificial Sequence
  Description of Artificial Sequence: Synthetic oligonucleotide
ggucggcacauucacacuc

SEQ ID NO: 788950 - RNA, 19 nt, Artificial Sequence
  Description of Artificial Sequence: Synthetic oligonucleotide
agcgggcaauggcagaggu

SEQ ID NO: 788951 - RNA, 19 nt, Artificial Sequence
  Description of Artificial Sequence: Synthetic oligonucleotide
ggcggcugcagccaucugc

SEQ ID NO: 788952 - RNA, 19 nt, Artificial Sequence
  Description of Artificial Sequence: Synthetic oligonucleotide
caucuuccuuuuaggacca

SEQ ID NO: 788953 - RNA, 19 nt, Artificial Sequence
  Description of Artificial Sequence: Synthetic oligonucleotide
gugacgucucgguagcaga

SEQ ID NO: 788954 - RNA, 19 nt, Artificial Sequence
  Description of Artificial Sequence: Synthetic oligonucleotide
accaaacaacgugaugcca

SEQ ID NO: 788955 - RNA, 19 nt, Artificial Sequence
  Description of Artificial Sequence: Synthetic oligonucleotide
ggacaaugguaucgugucc

SEQ ID NO: 788956 - RNA, 19 nt, Artificial Sequence
  Description of Artificial Sequence: Synthetic oligonucleotide
cuaggggacugguccugcc

SEQ ID NO: 788957 - RNA, 19 nt, Artificial Sequence
  Description of Artificial Sequence: Synthetic oligonucleotide
cugcacguucccucaccgg

SEQ ID NO: 788958 - RNA, 19 nt, Artificial Sequence
  Description of Artificial Sequence: Synthetic oligonucleotide
cugccuuccgggucggcac

SEQ ID NO: 788959 - RNA, 19 nt, Artificial Sequence
  Description of Artificial Sequence: Synthetic oligonucleotide
agguggacaaugguaucgu

SEQ ID NO: 788960 - RNA, 19 nt, Artificial Sequence
  Description of Artificial Sequence: Synthetic oligonucleotide
aguuccgacugggccagag

SEQ ID NO: 788961 - RNA, 19 nt, Artificial Sequence
  Description of Artificial Sequence: Synthetic oligonucleotide
gaaccaagcuuuugcgggu

SEQ ID NO: 788962 - RNA, 19 nt, Artificial Sequence
  Description of Artificial Sequence: Synthetic oligonucleotide
ucuugggcggcugcagcca

SEQ ID NO: 788963 - RNA, 19 nt, Artificial Sequence
  Description of Artificial Sequence: Synthetic oligonucleotide
gucgucccugugcuggaag

SEQ ID NO: 788964 - RNA, 19 nt, Artificial Sequence
  Description of Artificial Sequence: Synthetic oligonucleotide
guuccgacugggccagagc

SEQ ID NO: 788965 - RNA, 19 nt, Artificial Sequence
  Description of Artificial Sequence: Synthetic oligonucleotide
cuuccgggucggcacauuc

SEQ ID NO: 788966 - RNA, 19 nt, Artificial Sequence
  Description of Artificial Sequence: Synthetic oligonucleotide
aaacaacgugaugccaauu

SEQ ID NO: 788967 - RNA, 19 nt, Artificial Sequence
  Description of Artificial Sequence: Synthetic oligonucleotide
ucuuucgacagggccucgu

SEQ ID NO: 788968 - RNA, 19 nt, Artificial Sequence
  Description of Artificial Sequence: Synthetic oligonucleotide
uucccgccauuucuuccca

SEQ ID NO: 788969 - RNA, 19 nt, Artificial Sequence
  Description of Artificial Sequence: Synthetic oligonucleotide
cuugggccguuuucaccag

SEQ ID NO: 788970 - RNA, 19 nt, Artificial Sequence
  Description of Artificial Sequence: Synthetic oligonucleotide
uggcgcugaggaacggcga

SEQ ID NO: 788971 - RNA, 19 nt, Artificial Sequence
  Description of Artificial Sequence: Synthetic oligonucleotide
ccaagcccauaccacauug

SEQ ID NO: 788972 - RNA, 19 nt, Artificial Sequence
  Description of Artificial Sequence: Synthetic oligonucleotide
agcccauaccacauugaca

SEQ ID NO: 788973 - RNA, 19 nt, Artificial Sequence
  Description of Artificial Sequence: Synthetic oligonucleotide
gcaauuccugcucuuggga

SEQ ID NO: 788974 - RNA, 19 nt, Artificial Sequence
  Description of Artificial Sequence: Synthetic oligonucleotide
ucuagccggucagcauagg

SEQ ID NO: 788975 - RNA, 19 nt, Artificial Sequence
  Description of Artificial Sequence: Synthetic oligonucleotide
gcauacaucagugggucca

SEQ ID NO: 788976 - RNA, 19 nt, Artificial Sequence
  Description of Artificial Sequence: Synthetic oligonucleotide
ccacugauugucacuguug

SEQ ID NO: 788977 - RNA, 19 nt, Artificial Sequence
  Description of Artificial Sequence: Synthetic oligonucleotide
auggcacauauaacuucag

SEQ ID NO: 788978 - RNA, 19 nt, Artificial Sequence
  Description of Artificial Sequence: Synthetic oligonucleotide
gguggauccaucacccaac

SEQ ID NO: 788979 - RNA, 19 nt, Artificial Sequence
  Description of Artificial Sequence: Synthetic oligonucleotide
cacugcugugccagcgggc

SEQ ID NO: 788980 - RNA, 19 nt, Artificial Sequence
  Description of Artificial Sequence: Synthetic oligonucleotide
cucucggcugaccugugca

SEQ ID NO: 788981 - RNA, 19 nt, Artificial Sequence
  Description of Artificial Sequence: Synthetic oligonucleotide
ucgcuugggccguuuucac

SEQ ID NO: 788982 - RNA, 19 nt, Artificial Sequence
  Description of Artificial Sequence: Synthetic oligonucleotide
cucucuacuacagcccgca

SEQ ID NO: 788983 - RNA, 19 nt, Artificial Sequence
  Description of Artificial Sequence: Synthetic oligonucleotide
gguagcagaggcccucaac

SEQ ID NO: 788984 - RNA, 19 nt, Artificial Sequence
  Description of Artificial Sequence: Synthetic oligonucleotide
gguggacaaugguaucgug

SEQ ID NO: 788985 - RNA, 19 nt, Artificial Sequence
  Description of Artificial Sequence: Synthetic oligonucleotide
gcccucaacuuccaaggug

SEQ ID NO: 788986 - RNA, 19 nt, Artificial Sequence
  Description of Artificial Sequence: Synthetic oligonucleotide
cucgcuugggccguuuuca

SEQ ID NO: 788987 - RNA, 19 nt, Artificial Sequence
  Description of Artificial Sequence: Synthetic oligonucleotide
cucgagcugacagcucagc

SEQ ID NO: 788988 - RNA, 19 nt, Artificial Sequence
  Description of Artificial Sequence: Synthetic oligonucleotide
cuccuggcuacgguucccg

SEQ ID NO: 788989 - RNA, 19 nt, Artificial Sequence
  Description of Artificial Sequence: Synthetic oligonucleotide
cacuguugcuguaacgacu

SEQ ID NO: 788990 - RNA, 19 nt, Artificial Sequence
  Description of Artificial Sequence: Synthetic oligonucleotide
gcacugcugugccagcggg

SEQ ID NO: 788991 - RNA, 19 nt, Artificial Sequence
  Description of Artificial Sequence: Synthetic oligonucleotide
aggcagcugugugaagauc

SEQ ID NO: 788992 - RNA, 19 nt, Artificial Sequence
  Description of Artificial Sequence: Synthetic oligonucleotide
ugccuuccgggucggcaca

SEQ ID NO: 788993 - RNA, 19 nt, Artificial Sequence
  Description of Artificial Sequence: Synthetic oligonucleotide
ucucuacuacagcccgcaa

SEQ ID NO: 788994 - RNA, 19 nt, Artificial Sequence
  Description of Artificial Sequence: Synthetic oligonucleotide
guguccaauguaggaagca

SEQ ID NO: 788995 - RNA, 19 nt, Artificial Sequence
  Description of Artificial Sequence: Synthetic oligonucleotide
cauaucuugggcggcugca

SEQ ID NO: 788996 - RNA, 19 nt, Artificial Sequence
  Description of Artificial Sequence: Synthetic oligonucleotide
cacagaaaguggguuccuc

SEQ ID NO: 788997 - RNA, 19 nt, Artificial Sequence
  Description of Artificial Sequence: Synthetic oligonucleotide
agcccgcaauuccugcucu

SEQ ID NO: 788998 - RNA, 19 nt, Artificial Sequence
  Description of Artificial Sequence: Synthetic oligonucleotide
cucuugguuugucugcgaa

SEQ ID NO: 788999 - RNA, 19 nt, Artificial Sequence
  Description of Artificial Sequence: Synthetic oligonucleotide
aaccaagcuuuugcgggua

SEQ ID NO: 789000 - RNA, 19 nt, Artificial Sequence
  Description of Artificial Sequence: Synthetic oligonucleotide
agcauuugugcagcuggau

SEQ ID NO: 789001 - RNA, 19 nt, Artificial Sequence
  Description of Artificial Sequence: Synthetic oligonucleotide
guaugaucagaauccucau

SEQ ID NO: 789002 - RNA, 19 nt, Artificial Sequence
  Description of Artificial Sequence: Synthetic oligonucleotide
uucccucaccgggaagcag

SEQ ID NO: 789003 - RNA, 19 nt, Artificial Sequence
  Description of Artificial Sequence: Synthetic oligonucleotide
ugggcggcugcagccaucu

SEQ ID NO: 789004 - RNA, 19 nt, Artificial Sequence
  Description of Artificial Sequence: Synthetic oligonucleotide
uccuggcuacgguucccgc

SEQ ID NO: 789005 - RNA, 19 nt, Artificial Sequence
  Description of Artificial Sequence: Synthetic oligonucleotide
cucaccccucgccucgagc

SEQ ID NO: 789006 - RNA, 19 nt, Artificial Sequence
  Description of Artificial Sequence: Synthetic oligonucleotide
uucuuucgacagggccucg

SEQ ID NO: 789007 - RNA, 19 nt, Artificial Sequence
  Description of Artificial Sequence: Synthetic oligonucleotide
uugcggguaugaucagaau

SEQ ID NO: 789008 - RNA, 19 nt, Artificial Sequence
  Description of Artificial Sequence: Synthetic oligonucleotide
caacgucagaaucaucccu

SEQ ID NO: 789009 - RNA, 19 nt, Artificial Sequence
  Description of Artificial Sequence: Synthetic oligonucleotide
ucacucgagcugacagcuc

SEQ ID NO: 789010 - RNA, 19 nt, Artificial Sequence
  Description of Artificial Sequence: Synthetic oligonucleotide
ccucacucgagcugacagc

SEQ ID NO: 789011 - RNA, 19 nt, Artificial Sequence
  Description of Artificial Sequence: Synthetic oligonucleotide
cuacuacagcccgcaauuc

SEQ ID NO: 789012 - RNA, 19 nt, Artificial Sequence
  Description of Artificial Sequence: Synthetic oligonucleotide
cuacgguucccgccauuuc

SEQ ID NO: 789013 - RNA, 19 nt, Artificial Sequence
  Description of Artificial Sequence: Synthetic oligonucleotide
gagugcaugucgucccugu

SEQ ID NO: 789014 - RNA, 19 nt, Artificial Sequence
  Description of Artificial Sequence: Synthetic oligonucleotide
ccuuucgggcacuauccug

SEQ ID NO: 789015 - RNA, 19 nt, Artificial Sequence
  Description of Artificial Sequence: Synthetic oligonucleotide
ccuggcuacgguucccgcc

SEQ ID NO: 789016 - RNA, 19 nt, Artificial Sequence
  Description of Artificial Sequence: Synthetic oligonucleotide
gugccagcgggcaauggca

SEQ ID NO: 789017 - RNA, 19 nt, Artificial Sequence
  Description of Artificial Sequence: Synthetic oligonucleotide
cucgccucgagcaguaggu

SEQ ID NO: 789018 - RNA, 19 nt, Artificial Sequence
  Description of Artificial Sequence: Synthetic oligonucleotide
cucacucgagcugacagcu

SEQ ID NO: 789019 - RNA, 19 nt, Artificial Sequence
  Description of Artificial Sequence: Synthetic oligonucleotide
gccccugagcucuucuugc

SEQ ID NO: 789020 - RNA, 19 nt, Artificial Sequence
  Description of Artificial Sequence: Synthetic oligonucleotide
accaagcccauaccacauu

SEQ ID NO: 789021 - RNA, 19 nt, Artificial Sequence
  Description of Artificial Sequence: Synthetic oligonucleotide
guucucgugccacccucca

SEQ ID NO: 789022 - RNA, 19 nt, Artificial Sequence
  Description of Artificial Sequence: Synthetic oligonucleotide
ucgccucgagcaguaggug

SEQ ID NO: 789023 - RNA, 19 nt, Artificial Sequence
  Description of Artificial Sequence: Synthetic oligonucleotide
cugagagaaagggugggcu

SEQ ID NO: 789024 - RNA, 19 nt, Artificial Sequence
  Description of Artificial Sequence: Synthetic oligonucleotide
augucgucccugugcugga

SEQ ID NO: 789025 - RNA, 19 nt, Artificial Sequence
  Description of Artificial Sequence: Synthetic oligonucleotide
ccccaucucauggacacag

SEQ ID NO: 789026 - RNA, 19 nt, Artificial Sequence
  Description of Artificial Sequence: Synthetic oligonucleotide
acguucccucaccgggaag

SEQ ID NO: 789027 - RNA, 19 nt, Artificial Sequence
  Description of Artificial Sequence: Synthetic oligonucleotide
gucggcacauucacacuca

SEQ ID NO: 789028 - RNA, 19 nt, Artificial Sequence
  Description of Artificial Sequence: Synthetic oligonucleotide
aggaggcagcucucuacua

SEQ ID NO: 789029 - RNA, 19 nt, Artificial Sequence
  Description of Artificial Sequence: Synthetic oligonucleotide
ccucgccucgagcaguagg

SEQ ID NO: 789030 - RNA, 19 nt, Artificial Sequence
  Description of Artificial Sequence: Synthetic oligonucleotide
cacuaggggacugguccug

SEQ ID NO: 789031 - RNA, 19 nt, Artificial Sequence
  Description of Artificial Sequence: Synthetic oligonucleotide
uacucgcuugggccguuuu

SEQ ID NO: 789032 - RNA, 19 nt, Artificial Sequence
  Description of Artificial Sequence: Synthetic oligonucleotide
cguguccaauguaggaagc

SEQ ID NO: 789033 - RNA, 19 nt, Artificial Sequence
  Description of Artificial Sequence: Synthetic oligonucleotide
cugguccugccucacucga

SEQ ID NO: 789034 - RNA, 19 nt, Artificial Sequence
  Description of Artificial Sequence: Synthetic oligonucleotide
cucuacuacagcccgcaau

SEQ ID NO: 789035 - RNA, 19 nt, Artificial Sequence
  Description of Artificial Sequence: Synthetic oligonucleotide
acucaccccucgccucgag

SEQ ID NO: 789036 - RNA, 19 nt, Artificial Sequence
  Description of Artificial Sequence: Synthetic oligonucleotide
gacaagcccgcagcugguc

SEQ ID NO: 789037 - RNA, 19 nt, Artificial Sequence
  Description of Artificial Sequence: Synthetic oligonucleotide
gccccugacaacucaggga

SEQ ID NO: 789038 - RNA, 19 nt, Artificial Sequence
  Description of Artificial Sequence: Synthetic oligonucleotide
ccauaucuugggcggcugc

SEQ ID NO: 789039 - RNA, 19 nt, Artificial Sequence
  Description of Artificial Sequence: Synthetic oligonucleotide
auagccccguggaggaacu

SEQ ID NO: 789040 - RNA, 19 nt, Artificial Sequence
  Description of Artificial Sequence: Synthetic oligonucleotide
cccucaacuuccaaggugu

SEQ ID NO: 789041 - RNA, 19 nt, Artificial Sequence
  Description of Artificial Sequence: Synthetic oligonucleotide
gggacuaggccagccuuug

SEQ ID NO: 789042 - RNA, 19 nt, Artificial Sequence
  Description of Artificial Sequence: Synthetic oligonucleotide
ugccucacucgagcugaca

SEQ ID NO: 789043 - RNA, 19 nt, Artificial Sequence
  Description of Artificial Sequence: Synthetic oligonucleotide
gcgaugcucucguugccac

SEQ ID NO: 789044 - RNA, 19 nt, Artificial Sequence
  Description of Artificial Sequence: Synthetic oligonucleotide
ggaacggcgaugcucucgu

SEQ ID NO: 789045 - RNA, 19 nt, Artificial Sequence
  Description of Artificial Sequence: Synthetic oligonucleotide
ucguugccaccagcuggag

SEQ ID NO: 789046 - RNA, 19 nt, Artificial Sequence
  Description of Artificial Sequence: Synthetic oligonucleotide
cgccucgagcaguaggugg

SEQ ID NO: 789047 - RNA, 19 nt, Artificial Sequence
  Description of Artificial Sequence: Synthetic oligonucleotide
uugggacaccuggccacga

SEQ ID NO: 789048 - RNA, 19 nt, Artificial Sequence
  Description of Artificial Sequence: Synthetic oligonucleotide
cauacaucaguggguccaa

SEQ ID NO: 789049 - RNA, 19 nt, Artificial Sequence
  Description of Artificial Sequence: Synthetic oligonucleotide
gguucucgugccacccucc

SEQ ID NO: 789050 - RNA, 19 nt, Artificial Sequence
  Description of Artificial Sequence: Synthetic oligonucleotide
auauaacuucaggguggau

SEQ ID NO: 789051 - RNA, 19 nt, Artificial Sequence
  Description of Artificial Sequence: Synthetic oligonucleotide
agucugccuuccgggucgg

SEQ ID NO: 789052 - RNA, 19 nt, Artificial Sequence
  Description of Artificial Sequence: Synthetic oligonucleotide
acguggccccucauggaug

SEQ ID NO: 789053 - RNA, 19 nt, Artificial Sequence
  Description of Artificial Sequence: Synthetic oligonucleotide
cugccccaucucauggaca

SEQ ID NO: 789054 - RNA, 19 nt, Artificial Sequence
  Description of Artificial Sequence: Synthetic oligonucleotide
cucucuccgcuguacacau

SEQ ID NO: 789055 - RNA, 19 nt, Artificial Sequence
  Description of Artificial Sequence: Synthetic oligonucleotide
cugugccagcgggcaaugg

SEQ ID NO: 789056 - RNA, 19 nt, Artificial Sequence
  Description of Artificial Sequence: Synthetic oligonucleotide
cccugacaacucagggagg

SEQ ID NO: 789057 - RNA, 19 nt, Artificial Sequence
  Description of Artificial Sequence: Synthetic oligonucleotide
cucgugccacccuccagaa

SEQ ID NO: 789058 - RNA, 19 nt, Artificial Sequence
  Description of Artificial Sequence: Synthetic oligonucleotide
ugucgucccugugcuggaa

SEQ ID NO: 789059 - RNA, 19 nt, Artificial Sequence
  Description of Artificial Sequence: Synthetic oligonucleotide
cagccucuagccggucagc

SEQ ID NO: 789060 - RNA, 19 nt, Artificial Sequence
  Description of Artificial Sequence: Synthetic oligonucleotide
ucucuccgcuguacacauu

SEQ ID NO: 789061 - RNA, 19 nt, Artificial Sequence
  Description of Artificial Sequence: Synthetic oligonucleotide
gaacacuugcagguacuuu

SEQ ID NO: 789062 - RNA, 19 nt, Artificial Sequence
  Description of Artificial Sequence: Synthetic oligonucleotide
acgguucccgccauuucuu

SEQ ID NO: 789063 - RNA, 19 nt, Artificial Sequence
  Description of Artificial Sequence: Synthetic oligonucleotide
cacguucccucaccgggaa

SEQ ID NO: 789064 - RNA, 19 nt, Artificial Sequence
  Description of Artificial Sequence: Synthetic oligonucleotide
uggcuacgguucccgccau

SEQ ID NO: 789065 - RNA, 19 nt, Artificial Sequence
  Description of Artificial Sequence: Synthetic oligonucleotide
ucccgccauuucuucccau

SEQ ID NO: 789066 - RNA, 19 nt, Artificial Sequence
  Description of Artificial Sequence: Synthetic oligonucleotide
ggaaggccacugauuguca

SEQ ID NO: 789067 - RNA, 19 nt, Artificial Sequence
  Description of Artificial Sequence: Synthetic oligonucleotide
accccucgccucgagcagu

SEQ ID NO: 789068 - RNA, 19 nt, Artificial Sequence
  Description of Artificial Sequence: Synthetic oligonucleotide
cucgagcaguagguggaca

SEQ ID NO: 789069 - RNA, 19 nt, Artificial Sequence
  Description of Artificial Sequence: Synthetic oligonucleotide
ggagugcaugucgucccug

SEQ ID NO: 789070 - RNA, 19 nt, Artificial Sequence
  Description of Artificial Sequence: Synthetic oligonucleotide
cugcaaggacucagguucu

SEQ ID NO: 789071 - RNA, 19 nt, Artificial Sequence
  Description of Artificial Sequence: Synthetic oligonucleotide
ccucuagccggucagcaua

SEQ ID NO: 789072 - RNA, 19 nt, Artificial Sequence
  Description of Artificial Sequence: Synthetic oligonucleotide
cagaggcccucaacuucca

SEQ ID NO: 789073 - RNA, 19 nt, Artificial Sequence
  Description of Artificial Sequence: Synthetic oligonucleotide
cagauaacucuugguuugu

SEQ ID NO: 789074 - RNA, 19 nt, Artificial Sequence
  Description of Artificial Sequence: Synthetic oligonucleotide
cgucucgguagcagaggcc

SEQ ID NO: 789075 - RNA, 19 nt, Artificial Sequence
  Description of Artificial Sequence: Synthetic oligonucleotide
cgcuugggccguuuucacc

SEQ ID NO: 789076 - RNA, 19 nt, Artificial Sequence
  Description of Artificial Sequence: Synthetic oligonucleotide
ccaaguccaauagcuguga

SEQ ID NO: 789077 - RNA, 19 nt, Artificial Sequence
  Description of Artificial Sequence: Synthetic oligonucleotide
gcugcugcugcugcugcuc

SEQ ID NO: 789078 - RNA, 19 nt, Artificial Sequence
  Description of Artificial Sequence: Synthetic oligonucleotide
cuucccauucagcgucugu

SEQ ID NO: 789079 - RNA, 19 nt, Artificial Sequence
  Description of Artificial Sequence: Synthetic oligonucleotide
caucacccaacgucagaau

SEQ ID NO: 789080 - RNA, 19 nt, Artificial Sequence
  Description of Artificial Sequence: Synthetic oligonucleotide
gggcuuaggguagcuucac

SEQ ID NO: 789081 - RNA, 19 nt, Artificial Sequence
  Description of Artificial Sequence: Synthetic oligonucleotide
gcccugucuugcauggcac

SEQ ID NO: 789082 - RNA, 19 nt, Artificial Sequence
  Description of Artificial Sequence: Synthetic oligonucleotide
gccgggcccuuucauccug

SEQ ID NO: 789083 - RNA, 19 nt, Artificial Sequence
  Description of Artificial Sequence: Synthetic oligonucleotide
caucccuccuggcuacggu

SEQ ID NO: 789084 - RNA, 19 nt, Artificial Sequence
  Description of Artificial Sequence: Synthetic oligonucleotide
cacccaacgucagaaucau

SEQ ID NO: 789085 - RNA, 19 nt, Artificial Sequence
  Description of Artificial Sequence: Synthetic oligonucleotide
ccucaucgcuuucuaugga

SEQ ID NO: 789086 - RNA, 19 nt, Artificial Sequence
  Description of Artificial Sequence: Synthetic oligonucleotide
gccacugauugucacuguu

SEQ ID NO: 789087 - RNA, 19 nt, Artificial Sequence
  Description of Artificial Sequence: Synthetic oligonucleotide
gccccucauggaugcugag

SEQ ID NO: 789088 - RNA, 19 nt, Artificial Sequence
  Description of Artificial Sequence: Synthetic oligonucleotide
cgacucuuacucuucagau

SEQ ID NO: 789089 - RNA, 19 nt, Artificial Sequence
  Description of Artificial Sequence: Synthetic oligonucleotide
ccgggcccuuucauccugc

SEQ ID NO: 789090 - RNA, 19 nt, Artificial Sequence
  Description of Artificial Sequence: Synthetic oligonucleotide
cccugucuugcauggcaca

SEQ ID NO: 789091 - RNA, 19 nt, Artificial Sequence
  Description of Artificial Sequence: Synthetic oligonucleotide
gggacugguccugccucac

SEQ ID NO: 789092 - RNA, 19 nt, Artificial Sequence
  Description of Artificial Sequence: Synthetic oligonucleotide
caaugguaucguguccaau

SEQ ID NO: 789093 - RNA, 19 nt, Artificial Sequence
  Description of Artificial Sequence: Synthetic oligonucleotide
cgucccugugcuggaaggc

SEQ ID NO: 789094 - RNA, 19 nt, Artificial Sequence
  Description of Artificial Sequence: Synthetic oligonucleotide
uccggcucgcuggcuucau

SEQ ID NO: 789095 - RNA, 19 nt, Artificial Sequence
  Description of Artificial Sequence: Synthetic oligonucleotide
cugcugcugcugcugcucu

SEQ ID NO: 789096 - RNA, 19 nt, Artificial Sequence
  Description of Artificial Sequence: Synthetic oligonucleotide
ggcccucaacuuccaaggu

SEQ ID NO: 789097 - RNA, 19 nt, Artificial Sequence
  Description of Artificial Sequence: Synthetic oligonucleotide
gggucggcacauucacacu

SEQ ID NO: 789098 - RNA, 19 nt, Artificial Sequence
  Description of Artificial Sequence: Synthetic oligonucleotide
ggucgcuuucagugagggu

SEQ ID NO: 789099 - RNA, 19 nt, Artificial Sequence
  Description of Artificial Sequence: Synthetic oligonucleotide
caauggcagaggucaucuu

SEQ ID NO: 789100 - RNA, 19 nt, Artificial Sequence
  Description of Artificial Sequence: Synthetic oligonucleotide
cugcugugccagcgggcaa

SEQ ID NO: 789101 - RNA, 19 nt, Artificial Sequence
  Description of Artificial Sequence: Synthetic oligonucleotide
gucuugcauggcacauaua

SEQ ID NO: 789102 - RNA, 19 nt, Artificial Sequence
  Description of Artificial Sequence: Synthetic oligonucleotide
cuugggcggcugcagccau

SEQ ID NO: 789103 - RNA, 19 nt, Artificial Sequence
  Description of Artificial Sequence: Synthetic oligonucleotide
gucugccuuccgggucggc

SEQ ID NO: 789104 - RNA, 19 nt, Artificial Sequence
  Description of Artificial Sequence: Synthetic oligonucleotide
uagccccguggaggaacuu

SEQ ID NO: 789105 - RNA, 19 nt, Artificial Sequence
  Description of Artificial Sequence: Synthetic oligonucleotide
gggcuggcccaagcugccc

SEQ ID NO: 789106 - RNA, 19 nt, Artificial Sequence
  Description of Artificial Sequence: Synthetic oligonucleotide
ggcgggcacugcugugcca

SEQ ID NO: 789107 - RNA, 19 nt, Artificial Sequence
  Description of Artificial Sequence: Synthetic oligonucleotide
ccucaccgggaagcagccc

SEQ ID NO: 789108 - RNA, 19 nt, Artificial Sequence
  Description of Artificial Sequence: Synthetic oligonucleotide
gaacggcgaugcucucguu

SEQ ID NO: 789109 - RNA, 19 nt, Artificial Sequence
  Description of Artificial Sequence: Synthetic oligonucleotide
cggcugcugcugcugcugc

SEQ ID NO: 789110 - RNA, 19 nt, Artificial Sequence
  Description of Artificial Sequence: Synthetic oligonucleotide
ccgggucggcacauucaca

SEQ ID NO: 789111 - RNA, 19 nt, Artificial Sequence
  Description of Artificial Sequence: Synthetic oligonucleotide
gccucuagccggucagcau

SEQ ID NO: 789112 - RNA, 19 nt, Artificial Sequence
  Description of Artificial Sequence: Synthetic oligonucleotide
ggcugcugcugcugcugcu

SEQ ID NO: 789113 - RNA, 19 nt, Artificial Sequence
  Description of Artificial Sequence: Synthetic oligonucleotide
ggauggcgaguuccugcau

SEQ ID NO: 789114 - RNA, 19 nt, Artificial Sequence
  Description of Artificial Sequence: Synthetic oligonucleotide
cguggaggaacuugcucau

SEQ ID NO: 789115 - RNA, 19 nt, Artificial Sequence
  Description of Artificial Sequence: Synthetic oligonucleotide
ggauguccuuucgggcacu

SEQ ID NO: 789116 - RNA, 19 nt, Artificial Sequence
  Description of Artificial Sequence: Synthetic oligonucleotide
ggugggcuuaggguagcuu

SEQ ID NO: 789117 - RNA, 19 nt, Artificial Sequence
  Description of Artificial Sequence: Synthetic oligonucleotide
ggggacuaggccagccuuu

SEQ ID NO: 789118 - RNA, 19 nt, Artificial Sequence
  Description of Artificial Sequence: Synthetic oligonucleotide
cccgccauuucuucccauu

SEQ ID NO: 789119 - RNA, 19 nt, Artificial Sequence
  Description of Artificial Sequence: Synthetic oligonucleotide
gccuacucgcuugggccgu

SEQ ID NO: 789120 - RNA, 19 nt, Artificial Sequence
  Description of Artificial Sequence: Synthetic oligonucleotide
cggguaugaucagaauccu

SEQ ID NO: 789121 - RNA, 19 nt, Artificial Sequence
  Description of Artificial Sequence: Synthetic oligonucleotide
cccucgccucgagcaguag

SEQ ID NO: 789122 - RNA, 19 nt, Artificial Sequence
  Description of Artificial Sequence: Synthetic oligonucleotide
gcucuguguuacagagcau

SEQ ID NO: 789123 - RNA, 19 nt, Artificial Sequence
  Description of Artificial Sequence: Synthetic oligonucleotide
ccccguggaggaacuugcu

SEQ ID NO: 789124 - RNA, 19 nt, Artificial Sequence
  Description of Artificial Sequence: Synthetic oligonucleotide
ccccucgccucgagcagua

SEQ ID NO: 789125 - RNA, 19 nt, Artificial Sequence
  Description of Artificial Sequence: Synthetic oligonucleotide
cuacucgcuugggccguuu

SEQ ID NO: 789126 - RNA, 19 nt, Artificial Sequence
  Description of Artificial Sequence: Synthetic oligonucleotide
gcccgcaauuccugcucuu

SEQ ID NO: 789127 - RNA, 19 nt, Artificial Sequence
  Description of Artificial Sequence: Synthetic oligonucleotide
ccaccucauacuggccaau

SEQ ID NO: 789128 - RNA, 19 nt, Artificial Sequence
  Description of Artificial Sequence: Synthetic oligonucleotide
ccuacucgcuugggccguu

SEQ ID NO: 789129 - RNA, 19 nt, Artificial Sequence
  Description of Artificial Sequence: Synthetic oligonucleotide
ccuuccgggucggcacauu

SEQ ID NO: 789130 - RNA, 19 nt, Artificial Sequence
  Description of Artificial Sequence: Synthetic oligonucleotide
agaauaauuacugaugugg

SEQ ID NO: 789131 - RNA, 19 nt, Artificial Sequence
  Description of Artificial Sequence: Synthetic oligonucleotide
aacguuucggcacacuugc

SEQ ID NO: 789132 - RNA, 19 nt, Artificial Sequence
  Description of Artificial Sequence: Synthetic oligonucleotide
agauuuaaucauuggaagc

SEQ ID NO: 789133 - RNA, 19 nt, Artificial Sequence
  Description of Artificial Sequence: Synthetic oligonucleotide
aagagauacaugucagugc

SEQ ID NO: 789134 - RNA, 19 nt, Artificial Sequence
  Description of Artificial Sequence: Synthetic oligonucleotide
uuuguauucugacugagca

SEQ ID NO: 789135 - RNA, 19 nt, Artificial Sequence
  Description of Artificial Sequence: Synthetic oligonucleotide
aauaauuacugaugugguc

SEQ ID NO: 789136 - RNA, 19 nt, Artificial Sequence
  Description of Artificial Sequence: Synthetic oligonucleotide
uuugcaaacaaagaugucc

SEQ ID NO: 789137 - RNA, 19 nt, Artificial Sequence
  Description of Artificial Sequence: Synthetic oligonucleotide
uguauucugacugagcacg

SEQ ID NO: 789138 - RNA, 19 nt, Artificial Sequence
  Description of Artificial Sequence: Synthetic oligonucleotide
aauauugcaugccaaagaa

SEQ ID NO: 789139 - RNA, 19 nt, Artificial Sequence
  Description of Artificial Sequence: Synthetic oligonucleotide
uagauuuaaucauuggaag

SEQ ID NO: 789140 - RNA, 19 nt, Artificial Sequence
  Description of Artificial Sequence: Synthetic oligonucleotide
uacaauagagaagagauac

SEQ ID NO: 789141 - RNA, 19 nt, Artificial Sequence
  Description of Artificial Sequence: Synthetic oligonucleotide
ucgaggaugggucacaucc

SEQ ID NO: 789142 - RNA, 19 nt, Artificial Sequence
  Description of Artificial Sequence: Synthetic oligonucleotide
uguuuguagcuucacagcc

SEQ ID NO: 789143 - RNA, 19 nt, Artificial Sequence
  Description of Artificial Sequence: Synthetic oligonucleotide
auagacuuaggucccaaac

SEQ ID NO: 789144 - RNA, 19 nt, Artificial Sequence
  Description of Artificial Sequence: Synthetic oligonucleotide
uccuuguuaaucaugacuc

SEQ ID NO: 789145 - RNA, 19 nt, Artificial Sequence
  Description of Artificial Sequence: Synthetic oligonucleotide
caggauucggguaaaaucc

SEQ ID NO: 789146 - RNA, 19 nt, Artificial Sequence
  Description of Artificial Sequence: Synthetic oligonucleotide
uccaguagcacaauucgag

SEQ ID NO: 789147 - RNA, 19 nt, Artificial Sequence
  Description of Artificial Sequence: Synthetic oligonucleotide
ucguguaaucucaaugucg

SEQ ID NO: 789148 - RNA, 19 nt, Artificial Sequence
  Description of Artificial Sequence: Synthetic oligonucleotide
aauagagcuauugaugaug

SEQ ID NO: 789149 - RNA, 19 nt, Artificial Sequence
  Description of Artificial Sequence: Synthetic oligonucleotide
agacgaaugguacucgccc

SEQ ID NO: 789150 - RNA, 19 nt, Artificial Sequence
  Description of Artificial Sequence: Synthetic oligonucleotide
gacuuuuguaguaauagag

SEQ ID NO: 789151 - RNA, 19 nt, Artificial Sequence
  Description of Artificial Sequence: Synthetic oligonucleotide
uguagcuucacagccaacg

SEQ ID NO: 789152 - RNA, 19 nt, Artificial Sequence
  Description of Artificial Sequence: Synthetic oligonucleotide
uuaggucccaaacaugucc

SEQ ID NO: 789153 - RNA, 19 nt, Artificial Sequence
  Description of Artificial Sequence: Synthetic oligonucleotide
uuaaucauuggaagcaaac

SEQ ID NO: 789154 - RNA, 19 nt, Artificial Sequence
  Description of Artificial Sequence: Synthetic oligonucleotide
uguaguaauagagcuauug

SEQ ID NO: 789155 - RNA, 19 nt, Artificial Sequence
  Description of Artificial Sequence: Synthetic oligonucleotide
gagguaagcagacgaaugg

SEQ ID NO: 789156 - RNA, 19 nt, Artificial Sequence
  Description of Artificial Sequence: Synthetic oligonucleotide
auguuuguagcuucacagc

SEQ ID NO: 789157 - RNA, 19 nt, Artificial Sequence
  Description of Artificial Sequence: Synthetic oligonucleotide
uccauuugcaggauucggg

SEQ ID NO: 789158 - RNA, 19 nt, Artificial Sequence
  Description of Artificial Sequence: Synthetic oligonucleotide
agaagaauccaguagcaca

SEQ ID NO: 789159 - RNA, 19 nt, Artificial Sequence
  Description of Artificial Sequence: Synthetic oligonucleotide
gcuaauuucaaucauggac

SEQ ID NO: 789160 - RNA, 19 nt, Artificial Sequence
  Description of Artificial Sequence: Synthetic oligonucleotide
guaauagagcuauugauga

SEQ ID NO: 789161 - RNA, 19 nt, Artificial Sequence
  Description of Artificial Sequence: Synthetic oligonucleotide
aagaccaccgacugaugac

SEQ ID NO: 789162 - RNA, 19 nt, Artificial Sequence
  Description of Artificial Sequence: Synthetic oligonucleotide
aaugguacucgccccacag

SEQ ID NO: 789163 - RNA, 19 nt, Artificial Sequence
  Description of Artificial Sequence: Synthetic oligonucleotide
uuuguaguaauagagcuau

SEQ ID NO: 789164 - RNA, 19 nt, Artificial Sequence
  Description of Artificial Sequence: Synthetic oligonucleotide
cucuauauggccauuguuc

SEQ ID NO: 789165 - RNA, 19 nt, Artificial Sequence
  Description of Artificial Sequence: Synthetic oligonucleotide
uuggucaucacaaugccuc

SEQ ID NO: 789166 - RNA, 19 nt, Artificial Sequence
  Description of Artificial Sequence: Synthetic oligonucleotide
uguacuccagagaagaauc

SEQ ID NO: 789167 - RNA, 19 nt, Artificial Sequence
  Description of Artificial Sequence: Synthetic oligonucleotide
ucucguguaaucucaaugu

SEQ ID NO: 789168 - RNA, 19 nt, Artificial Sequence
  Description of Artificial Sequence: Synthetic oligonucleotide
augacuuagauuuaaucau

SEQ ID NO: 789169 - RNA, 19 nt, Artificial Sequence
  Description of Artificial Sequence: Synthetic oligonucleotide
agcuaaaucugagaugccc

SEQ ID NO: 789170 - RNA, 19 nt, Artificial Sequence
  Description of Artificial Sequence: Synthetic oligonucleotide
uagacuuaggucccaaaca

SEQ ID NO: 789171 - RNA, 19 nt, Artificial Sequence
  Description of Artificial Sequence: Synthetic oligonucleotide
agugccaugcgguaagcac

SEQ ID NO: 789172 - RNA, 19 nt, Artificial Sequence
  Description of Artificial Sequence: Synthetic oligonucleotide
agguguacugauuuucuuc

SEQ ID NO: 789173 - RNA, 19 nt, Artificial Sequence
  Description of Artificial Sequence: Synthetic oligonucleotide
gauauaacggcgcauucga

SEQ ID NO: 789174 - RNA, 19 nt, Artificial Sequence
  Description of Artificial Sequence: Synthetic oligonucleotide
ucggguaaaauccuccucu

SEQ ID NO: 789175 - RNA, 19 nt, Artificial Sequence
  Description of Artificial Sequence: Synthetic oligonucleotide
aaacugagaugggacagac

SEQ ID NO: 789176 - RNA, 19 nt, Artificial Sequence
  Description of Artificial Sequence: Synthetic oligonucleotide
gacaucaacagguguacug

SEQ ID NO: 789177 - RNA, 19 nt, Artificial Sequence
  Description of Artificial Sequence: Synthetic oligonucleotide
uaggucccaaacauguccg

SEQ ID NO: 789178 - RNA, 19 nt, Artificial Sequence
  Description of Artificial Sequence: Synthetic oligonucleotide
acgcuuuguauucugacug

SEQ ID NO: 789179 - RNA, 19 nt, Artificial Sequence
  Description of Artificial Sequence: Synthetic oligonucleotide
aauucgaggguucuugaua

SEQ ID NO: 789180 - RNA, 19 nt, Artificial Sequence
  Description of Artificial Sequence: Synthetic oligonucleotide
uaaucaugacuccacguaa

SEQ ID NO: 789181 - RNA, 19 nt, Artificial Sequence
  Description of Artificial Sequence: Synthetic oligonucleotide
caagguaccagucucacca

SEQ ID NO: 789182 - RNA, 19 nt, Artificial Sequence
  Description of Artificial Sequence: Synthetic oligonucleotide
aaggggagacugcugguuc

SEQ ID NO: 789183 - RNA, 19 nt, Artificial Sequence
  Description of Artificial Sequence: Synthetic oligonucleotide
aagaagaccaccgacugau

SEQ ID NO: 789184 - RNA, 19 nt, Artificial Sequence
  Description of Artificial Sequence: Synthetic oligonucleotide
ucaacuugauccuuugcaa

SEQ ID NO: 789185 - RNA, 19 nt, Artificial Sequence
  Description of Artificial Sequence: Synthetic oligonucleotide
aagaaaacgcugccuccuc

SEQ ID NO: 789186 - RNA, 19 nt, Artificial Sequence
  Description of Artificial Sequence: Synthetic oligonucleotide
gagguugcguucuacuucc

SEQ ID NO: 789187 - RNA, 19 nt, Artificial Sequence
  Description of Artificial Sequence: Synthetic oligonucleotide
uuuguagcuucacagccaa

SEQ ID NO: 789188 - RNA, 19 nt, Artificial Sequence
  Description of Artificial Sequence: Synthetic oligonucleotide
cucacaauucuccugggug

SEQ ID NO: 789189 - RNA, 19 nt, Artificial Sequence
  Description of Artificial Sequence: Synthetic oligonucleotide
aaaacgcugccuccucagg

SEQ ID NO: 789190 - RNA, 19 nt, Artificial Sequence
  Description of Artificial Sequence: Synthetic oligonucleotide
cauaucacgguuauugaca

SEQ ID NO: 789191 - RNA, 19 nt, Artificial Sequence
  Description of Artificial Sequence: Synthetic oligonucleotide
uaauuacugaugugguccc

SEQ ID NO: 789192 - RNA, 19 nt, Artificial Sequence
  Description of Artificial Sequence: Synthetic oligonucleotide
uuuuguaguaauagagcua

SEQ ID NO: 789193 - RNA, 19 nt, Artificial Sequence
  Description of Artificial Sequence: Synthetic oligonucleotide
uggccauuguuccacacca

SEQ ID NO: 789194 - RNA, 19 nt, Artificial Sequence
  Description of Artificial Sequence: Synthetic oligonucleotide
aagcagacgaaugguacuc

SEQ ID NO: 789195 - RNA, 19 nt, Artificial Sequence
  Description of Artificial Sequence: Synthetic oligonucleotide
gauuauugucugucuuccg

SEQ ID NO: 789196 - RNA, 19 nt, Artificial Sequence
  Description of Artificial Sequence: Synthetic oligonucleotide
cacguaagacacaugaguc

SEQ ID NO: 789197 - RNA, 19 nt, Artificial Sequence
  Description of Artificial Sequence: Synthetic oligonucleotide
cuggaucaagguacgaggg

SEQ ID NO: 789198 - RNA, 19 nt, Artificial Sequence
  Description of Artificial Sequence: Synthetic oligonucleotide
auaacggcgcauucgagga

SEQ ID NO: 789199 - RNA, 19 nt, Artificial Sequence
  Description of Artificial Sequence: Synthetic oligonucleotide
uggauaauguccucacaca

SEQ ID NO: 789200 - RNA, 19 nt, Artificial Sequence
  Description of Artificial Sequence: Synthetic oligonucleotide
ucgaauagcugugacguug

SEQ ID NO: 789201 - RNA, 19 nt, Artificial Sequence
  Description of Artificial Sequence: Synthetic oligonucleotide
ucucccgcaagaauaauua

SEQ ID NO: 789202 - RNA, 19 nt, Artificial Sequence
  Description of Artificial Sequence: Synthetic oligonucleotide
aaucaugacuccacguaag

SEQ ID NO: 789203 - RNA, 19 nt, Artificial Sequence
  Description of Artificial Sequence: Synthetic oligonucleotide
uccaggagaacguuucggc

SEQ ID NO: 789204 - RNA, 19 nt, Artificial Sequence
  Description of Artificial Sequence: Synthetic oligonucleotide
agacuuaggucccaaacau

SEQ ID NO: 789205 - RNA, 19 nt, Artificial Sequence
  Description of Artificial Sequence: Synthetic oligonucleotide
ugcguucuacuuccgacag

SEQ ID NO: 789206 - RNA, 19 nt, Artificial Sequence
  Description of Artificial Sequence: Synthetic oligonucleotide
aaagcuugggccacagcuc

SEQ ID NO: 789207 - RNA, 19 nt, Artificial Sequence
  Description of Artificial Sequence: Synthetic oligonucleotide
agaaguagaacugcagucu

SEQ ID NO: 789208 - RNA, 19 nt, Artificial Sequence
  Description of Artificial Sequence: Synthetic oligonucleotide
caagguacgagggaugacc

SEQ ID NO: 789209 - RNA, 19 nt, Artificial Sequence
  Description of Artificial Sequence: Synthetic oligonucleotide
guaaaauccuccucucgug

SEQ ID NO: 789210 - RNA, 19 nt, Artificial Sequence
  Description of Artificial Sequence: Synthetic oligonucleotide
gaaaacgcugccuccucag

SEQ ID NO: 789211 - RNA, 19 nt, Artificial Sequence
  Description of Artificial Sequence: Synthetic oligonucleotide
aaagaagaccaccgacuga

SEQ ID NO: 789212 - RNA, 19 nt, Artificial Sequence
  Description of Artificial Sequence: Synthetic oligonucleotide
caucauggcggcacgacgc

SEQ ID NO: 789213 - RNA, 19 nt, Artificial Sequence
  Description of Artificial Sequence: Synthetic oligonucleotide
uucuugauauaacggcgca

SEQ ID NO: 789214 - RNA, 19 nt, Artificial Sequence
  Description of Artificial Sequence: Synthetic oligonucleotide
cuuuuguaguaauagagcu

SEQ ID NO: 789215 - RNA, 19 nt, Artificial Sequence
  Description of Artificial Sequence: Synthetic oligonucleotide
accucuaaagcuugggcca

SEQ ID NO: 789216 - RNA, 19 nt, Artificial Sequence
  Description of Artificial Sequence: Synthetic oligonucleotide
gauucggguaaaauccucc

SEQ ID NO: 789217 - RNA, 19 nt, Artificial Sequence
  Description of Artificial Sequence: Synthetic oligonucleotide
caugcgguaagcaccaauc

SEQ ID NO: 789218 - RNA, 19 nt, Artificial Sequence
  Description of Artificial Sequence: Synthetic oligonucleotide
aaacgcugccuccucagga

SEQ ID NO: 789219 - RNA, 19 nt, Artificial Sequence
  Description of Artificial Sequence: Synthetic oligonucleotide
uaagcagacgaaugguacu

SEQ ID NO: 789220 - RNA, 19 nt, Artificial Sequence
  Description of Artificial Sequence: Synthetic oligonucleotide
caucaauccgcagaaguag

SEQ ID NO: 789221 - RNA, 19 nt, Artificial Sequence
  Description of Artificial Sequence: Synthetic oligonucleotide
acuuaggucccaaacaugu

SEQ ID NO: 789222 - RNA, 19 nt, Artificial Sequence
  Description of Artificial Sequence: Synthetic oligonucleotide
ccucuaagaagaauggugc

SEQ ID NO: 789223 - RNA, 19 nt, Artificial Sequence
  Description of Artificial Sequence: Synthetic oligonucleotide
uccacguaagacacaugag

SEQ ID NO: 789224 - RNA, 19 nt, Artificial Sequence
  Description of Artificial Sequence: Synthetic oligonucleotide
ucacaaugccucccauugg

SEQ ID NO: 789225 - RNA, 19 nt, Artificial Sequence
  Description of Artificial Sequence: Synthetic oligonucleotide
acgguuauugacaucaaca

SEQ ID NO: 789226 - RNA, 19 nt, Artificial Sequence
  Description of Artificial Sequence: Synthetic oligonucleotide
gaaucucucgaagaauggc

SEQ ID NO: 789227 - RNA, 19 nt, Artificial Sequence
  Description of Artificial Sequence: Synthetic oligonucleotide
ugcgguaagcaccaaucac

SEQ ID NO: 789228 - RNA, 19 nt, Artificial Sequence
  Description of Artificial Sequence: Synthetic oligonucleotide
gguucuugauauaacggcg

SEQ ID NO: 789229 - RNA, 19 nt, Artificial Sequence
  Description of Artificial Sequence: Synthetic oligonucleotide
uuacaauagagaagagaua

SEQ ID NO: 789230 - RNA, 19 nt, Artificial Sequence
  Description of Artificial Sequence: Synthetic oligonucleotide
uagcuucacagccaacggc

SEQ ID NO: 789231 - RNA, 19 nt, Artificial Sequence
  Description of Artificial Sequence: Synthetic oligonucleotide
gacguuggcccgcaugagg

SEQ ID NO: 789232 - RNA, 19 nt, Artificial Sequence
  Description of Artificial Sequence: Synthetic oligonucleotide
acguaagacacaugagucu

SEQ ID NO: 789233 - RNA, 19 nt, Artificial Sequence
  Description of Artificial Sequence: Synthetic oligonucleotide
uaagaaaacgcugccuccu

SEQ ID NO: 789234 - RNA, 19 nt, Artificial Sequence
  Description of Artificial Sequence: Synthetic oligonucleotide
guagugcugagcuaaaucu

SEQ ID NO: 789235 - RNA, 19 nt, Artificial Sequence
  Description of Artificial Sequence: Synthetic oligonucleotide
aaauccuccucucguguaa

SEQ ID NO: 789236 - RNA, 19 nt, Artificial Sequence
  Description of Artificial Sequence: Synthetic oligonucleotide
uuguauguuuguagcuuca

SEQ ID NO: 789237 - RNA, 19 nt, Artificial Sequence
  Description of Artificial Sequence: Synthetic oligonucleotide
agggcaauauugcaugcca

SEQ ID NO: 789238 - RNA, 19 nt, Artificial Sequence
  Description of Artificial Sequence: Synthetic oligonucleotide
auaucacgguuauugacau

SEQ ID NO: 789239 - RNA, 19 nt, Artificial Sequence
  Description of Artificial Sequence: Synthetic oligonucleotide
gaagaauccaguagcacaa

SEQ ID NO: 789240 - RNA, 19 nt, Artificial Sequence
  Description of Artificial Sequence: Synthetic oligonucleotide
ugugacguuggcccgcaug

SEQ ID NO: 789241 - RNA, 19 nt, Artificial Sequence
  Description of Artificial Sequence: Synthetic oligonucleotide
guugcguucuacuuccgac

SEQ ID NO: 789242 - RNA, 19 nt, Artificial Sequence
  Description of Artificial Sequence: Synthetic oligonucleotide
guuucggcacacuugcaug

SEQ ID NO: 789243 - RNA, 19 nt, Artificial Sequence
  Description of Artificial Sequence: Synthetic oligonucleotide
aaccggcagaagcuucugg

SEQ ID NO: 789244 - RNA, 19 nt, Artificial Sequence
  Description of Artificial Sequence: Synthetic oligonucleotide
cguguaaucucaaugucgg

SEQ ID NO: 789245 - RNA, 19 nt, Artificial Sequence
  Description of Artificial Sequence: Synthetic oligonucleotide
uugcguucuacuuccgaca

SEQ ID NO: 789246 - RNA, 19 nt, Artificial Sequence
  Description of Artificial Sequence: Synthetic oligonucleotide
gcaagaauaauuacugaug

SEQ ID NO: 789247 - RNA, 19 nt, Artificial Sequence
  Description of Artificial Sequence: Synthetic oligonucleotide
gacgaaugguacucgcccc

SEQ ID NO: 789248 - RNA, 19 nt, Artificial Sequence
  Description of Artificial Sequence: Synthetic oligonucleotide
uggaucaagguacgaggga

SEQ ID NO: 789249 - RNA, 19 nt, Artificial Sequence
  Description of Artificial Sequence: Synthetic oligonucleotide
ggcggcacgacgcagagcc

SEQ ID NO: 789250 - RNA, 19 nt, Artificial Sequence
  Description of Artificial Sequence: Synthetic oligonucleotide
uuccggacucuucgaauag

SEQ ID NO: 789251 - RNA, 19 nt, Artificial Sequence
  Description of Artificial Sequence: Synthetic oligonucleotide
auucggguaaaauccuccu

SEQ ID NO: 789252 - RNA, 19 nt, Artificial Sequence
  Description of Artificial Sequence: Synthetic oligonucleotide
ucacgcuuuguauucugac

SEQ ID NO: 789253 - RNA, 19 nt, Artificial Sequence
  Description of Artificial Sequence: Synthetic oligonucleotide
ucaauccgcagaaguagaa

SEQ ID NO: 789254 - RNA, 19 nt, Artificial Sequence
  Description of Artificial Sequence: Synthetic oligonucleotide
cuuucggccauucucuuca

SEQ ID NO: 789255 - RNA, 19 nt, Artificial Sequence
  Description of Artificial Sequence: Synthetic oligonucleotide
uaaucucaaugucggucug

SEQ ID NO: 789256 - RNA, 19 nt, Artificial Sequence
  Description of Artificial Sequence: Synthetic oligonucleotide
acaucaacagguguacuga

SEQ ID NO: 789257 - RNA, 19 nt, Artificial Sequence
  Description of Artificial Sequence: Synthetic oligonucleotide
auuguuccacaccagucau

SEQ ID NO: 789258 - RNA, 19 nt, Artificial Sequence
  Description of Artificial Sequence: Synthetic oligonucleotide
ucggcugacuauccgugcc

SEQ ID NO: 789259 - RNA, 19 nt, Artificial Sequence
  Description of Artificial Sequence: Synthetic oligonucleotide
guaaucucaaugucggucu

SEQ ID NO: 789260 - RNA, 19 nt, Artificial Sequence
  Description of Artificial Sequence: Synthetic oligonucleotide
uucacgcuuuguauucuga

SEQ ID NO: 789261 - RNA, 19 nt, Artificial Sequence
  Description of Artificial Sequence: Synthetic oligonucleotide
auagagcuauugaugaugu

SEQ ID NO: 789262 - RNA, 19 nt, Artificial Sequence
  Description of Artificial Sequence: Synthetic oligonucleotide
uccgcagaaguagaacugc

SEQ ID NO: 789263 - RNA, 19 nt, Artificial Sequence
  Description of Artificial Sequence: Synthetic oligonucleotide
uuguacuccagagaagaau

SEQ ID NO: 789264 - RNA, 19 nt, Artificial Sequence
  Description of Artificial Sequence: Synthetic oligonucleotide
agaacguuucggcacacuu

SEQ ID NO: 789265 - RNA, 19 nt, Artificial Sequence
  Description of Artificial Sequence: Synthetic oligonucleotide
uguuggacuugaaucucuc

SEQ ID NO: 789266 - RNA, 19 nt, Artificial Sequence
  Description of Artificial Sequence: Synthetic oligonucleotide
cacaauucgaggguucuug

SEQ ID NO: 789267 - RNA, 19 nt, Artificial Sequence
  Description of Artificial Sequence: Synthetic oligonucleotide
uaauagagcuauugaugau

SEQ ID NO: 789268 - RNA, 19 nt, Artificial Sequence
  Description of Artificial Sequence: Synthetic oligonucleotide
ugguacucgccccacaguu

SEQ ID NO: 789269 - RNA, 19 nt, Artificial Sequence
  Description of Artificial Sequence: Synthetic oligonucleotide
aacggcgcauucgaggaug

SEQ ID NO: 789270 - RNA, 19 nt, Artificial Sequence
  Description of Artificial Sequence: Synthetic oligonucleotide
gaacguuucggcacacuug

SEQ ID NO: 789271 - RNA, 19 nt, Artificial Sequence
  Description of Artificial Sequence: Synthetic oligonucleotide
acggcucccauauucccag

SEQ ID NO: 789272 - RNA, 19 nt, Artificial Sequence
  Description of Artificial Sequence: Synthetic oligonucleotide
agaaagugcucagccacag

SEQ ID NO: 789273 - RNA, 19 nt, Artificial Sequence
  Description of Artificial Sequence: Synthetic oligonucleotide
uucuuccagauucacgcuu

SEQ ID NO: 789274 - RNA, 19 nt, Artificial Sequence
  Description of Artificial Sequence: Synthetic oligonucleotide
acaauucgaggguucuuga

SEQ ID NO: 789275 - RNA, 19 nt, Artificial Sequence
  Description of Artificial Sequence: Synthetic oligonucleotide
auucacgcuuuguauucug

SEQ ID NO: 789276 - RNA, 19 nt, Artificial Sequence
  Description of Artificial Sequence: Synthetic oligonucleotide
uucggguaaaauccuccuc

SEQ ID NO: 789277 - RNA, 19 nt, Artificial Sequence
  Description of Artificial Sequence: Synthetic oligonucleotide
agugaaguacucaucucca

SEQ ID NO: 789278 - RNA, 19 nt, Artificial Sequence
  Description of Artificial Sequence: Synthetic oligonucleotide
gaugaccucuaaagcuugg

SEQ ID NO: 789279 - RNA, 19 nt, Artificial Sequence
  Description of Artificial Sequence: Synthetic oligonucleotide
cacgucgggcuucagcugg

SEQ ID NO: 789280 - RNA, 19 nt, Artificial Sequence
  Description of Artificial Sequence: Synthetic oligonucleotide
accggcagaagcuucugga

SEQ ID NO: 789281 - RNA, 19 nt, Artificial Sequence
  Description of Artificial Sequence: Synthetic oligonucleotide
uauucugacugagcacgag

SEQ ID NO: 789282 - RNA, 19 nt, Artificial Sequence
  Description of Artificial Sequence: Synthetic oligonucleotide
uucucccgcaagaauaauu

SEQ ID NO: 789283 - RNA, 19 nt, Artificial Sequence
  Description of Artificial Sequence: Synthetic oligonucleotide
agcagcuaagaaaacgcug

SEQ ID NO: 789284 - RNA, 19 nt, Artificial Sequence
  Description of Artificial Sequence: Synthetic oligonucleotide
agaaaacgcugccuccuca

SEQ ID NO: 789285 - RNA, 19 nt, Artificial Sequence
  Description of Artificial Sequence: Synthetic oligonucleotide
auuuaaucauuggaagcaa

SEQ ID NO: 789286 - RNA, 19 nt, Artificial Sequence
  Description of Artificial Sequence: Synthetic oligonucleotide
gagaagaauccaguagcac

SEQ ID NO: 789287 - RNA, 19 nt, Artificial Sequence
  Description of Artificial Sequence: Synthetic oligonucleotide
cucguguaaucucaauguc

SEQ ID NO: 789288 - RNA, 19 nt, Artificial Sequence
  Description of Artificial Sequence: Synthetic oligonucleotide
gacuauccgugccccacag

SEQ ID NO: 789289 - RNA, 19 nt, Artificial Sequence
  Description of Artificial Sequence: Synthetic oligonucleotide
cuucgaauagcugugacgu

SEQ ID NO: 789290 - RNA, 19 nt, Artificial Sequence
  Description of Artificial Sequence: Synthetic oligonucleotide
gaucaagguacgagggaug

SEQ ID NO: 789291 - RNA, 19 nt, Artificial Sequence
  Description of Artificial Sequence: Synthetic oligonucleotide
aagguacgagggaugaccu

SEQ ID NO: 789292 - RNA, 19 nt, Artificial Sequence
  Description of Artificial Sequence: Synthetic oligonucleotide
augcgguaagcaccaauca

SEQ ID NO: 789293 - RNA, 19 nt, Artificial Sequence
  Description of Artificial Sequence: Synthetic oligonucleotide
cgagggaugaccucuaaag

SEQ ID NO: 789294 - RNA, 19 nt, Artificial Sequence
  Description of Artificial Sequence: Synthetic oligonucleotide
gugacguuggcccgcauga

SEQ ID NO: 789295 - RNA, 19 nt, Artificial Sequence
  Description of Artificial Sequence: Synthetic oligonucleotide
agcucuauauggccauugu

SEQ ID NO: 789296 - RNA, 19 nt, Artificial Sequence
  Description of Artificial Sequence: Synthetic oligonucleotide
acgacgcagagccgaguac

SEQ ID NO: 789297 - RNA, 19 nt, Artificial Sequence
  Description of Artificial Sequence: Synthetic oligonucleotide
gaugggacagacuggggcu

SEQ ID NO: 789298 - RNA, 19 nt, Artificial Sequence
  Description of Artificial Sequence: Synthetic oligonucleotide
aucaagguacgagggauga

SEQ ID NO: 789299 - RNA, 19 nt, Artificial Sequence
  Description of Artificial Sequence: Synthetic oligonucleotide
uacuuccgacagaaucucc

SEQ ID NO: 789300 - RNA, 19 nt, Artificial Sequence
  Description of Artificial Sequence: Synthetic oligonucleotide
ugcacucagugaugaaagu

SEQ ID NO: 789301 - RNA, 19 nt, Artificial Sequence
  Description of Artificial Sequence: Synthetic oligonucleotide
ucuuccggacucuucgaau

SEQ ID NO: 789302 - RNA, 19 nt, Artificial Sequence
  Description of Artificial Sequence: Synthetic oligonucleotide
cucuaagaagaauggugca

SEQ ID NO: 789303 - RNA, 19 nt, Artificial Sequence
  Description of Artificial Sequence: Synthetic oligonucleotide
agaauccaguagcacaauu

SEQ ID NO: 789304 - RNA, 19 nt, Artificial Sequence
  Description of Artificial Sequence: Synthetic oligonucleotide
ugacuauccgugccccaca

SEQ ID NO: 789305 - RNA, 19 nt, Artificial Sequence
  Description of Artificial Sequence: Synthetic oligonucleotide
ggugugcuuggcccgaagg

SEQ ID NO: 789306 - RNA, 19 nt, Artificial Sequence
  Description of Artificial Sequence: Synthetic oligonucleotide
acuuccgacagaaucuccu

SEQ ID NO: 789307 - RNA, 19 nt, Artificial Sequence
  Description of Artificial Sequence: Synthetic oligonucleotide
acgaaugguacucgcccca

SEQ ID NO: 789308 - RNA, 19 nt, Artificial Sequence
  Description of Artificial Sequence: Synthetic oligonucleotide
caacggcucccauauuccc

SEQ ID NO: 789309 - RNA, 19 nt, Artificial Sequence
  Description of Artificial Sequence: Synthetic oligonucleotide
cacgguuauugacaucaac

SEQ ID NO: 789310 - RNA, 19 nt, Artificial Sequence
  Description of Artificial Sequence: Synthetic oligonucleotide
ggauaauguccucacacaa

SEQ ID NO: 789311 - RNA, 19 nt, Artificial Sequence
  Description of Artificial Sequence: Synthetic oligonucleotide
aggucccaaacauguccgg

SEQ ID NO: 789312 - RNA, 19 nt, Artificial Sequence
  Description of Artificial Sequence: Synthetic oligonucleotide
acauguccggaugaugucu

SEQ ID NO: 789313 - RNA, 19 nt, Artificial Sequence
  Description of Artificial Sequence: Synthetic oligonucleotide
uccaauaggccugcaccug

SEQ ID NO: 789314 - RNA, 19 nt, Artificial Sequence
  Description of Artificial Sequence: Synthetic oligonucleotide
accagucauggccuuagau

SEQ ID NO: 789315 - RNA, 19 nt, Artificial Sequence
  Description of Artificial Sequence: Synthetic oligonucleotide
acaauagagaagagauaca

SEQ ID NO: 789316 - RNA, 19 nt, Artificial Sequence
  Description of Artificial Sequence: Synthetic oligonucleotide
gcgguaagcaccaaucacc

SEQ ID NO: 789317 - RNA, 19 nt, Artificial Sequence
  Description of Artificial Sequence: Synthetic oligonucleotide
acuauccgugccccacagg

SEQ ID NO: 789318 - RNA, 19 nt, Artificial Sequence
  Description of Artificial Sequence: Synthetic oligonucleotide
gguaaaauccuccucucgu

SEQ ID NO: 789319 - RNA, 19 nt, Artificial Sequence
  Description of Artificial Sequence: Synthetic oligonucleotide
gcuccucuaagaagaaugg

SEQ ID NO: 789320 - RNA, 19 nt, Artificial Sequence
  Description of Artificial Sequence: Synthetic oligonucleotide
agcaccaaucaccacuguu

SEQ ID NO: 789321 - RNA, 19 nt, Artificial Sequence
  Description of Artificial Sequence: Synthetic oligonucleotide
uauccgugccccacaggcu

SEQ ID NO: 789322 - RNA, 19 nt, Artificial Sequence
  Description of Artificial Sequence: Synthetic oligonucleotide
agguaagcagacgaauggu

SEQ ID NO: 789323 - RNA, 19 nt, Artificial Sequence
  Description of Artificial Sequence: Synthetic oligonucleotide
guacuccagagaagaaucc

SEQ ID NO: 789324 - RNA, 19 nt, Artificial Sequence
  Description of Artificial Sequence: Synthetic oligonucleotide
agaccaccgacugaugacu

SEQ ID NO: 789325 - RNA, 19 nt, Artificial Sequence
  Description of Artificial Sequence: Synthetic oligonucleotide
ucuugauauaacggcgcau

SEQ ID NO: 789326 - RNA, 19 nt, Artificial Sequence
  Description of Artificial Sequence: Synthetic oligonucleotide
caauccgcagaaguagaac

SEQ ID NO: 789327 - RNA, 19 nt, Artificial Sequence
  Description of Artificial Sequence: Synthetic oligonucleotide
agguacgagggaugaccuc

SEQ ID NO: 789328 - RNA, 19 nt, Artificial Sequence
  Description of Artificial Sequence: Synthetic oligonucleotide
acagguguacugauuuucu

SEQ ID NO: 789329 - RNA, 19 nt, Artificial Sequence
  Description of Artificial Sequence: Synthetic oligonucleotide
ugucuuccggacucuucga

SEQ ID NO: 789330 - RNA, 19 nt, Artificial Sequence
  Description of Artificial Sequence: Synthetic oligonucleotide
ggcauugccaucauugguc

SEQ ID NO: 789331 - RNA, 19 nt, Artificial Sequence
  Description of Artificial Sequence: Synthetic oligonucleotide
aaucauggacuuggcugcu

SEQ ID NO: 789332 - RNA, 19 nt, Artificial Sequence
  Description of Artificial Sequence: Synthetic oligonucleotide
uuguggccagagacaaugu

SEQ ID NO: 789333 - RNA, 19 nt, Artificial Sequence
  Description of Artificial Sequence: Synthetic oligonucleotide
cuauauggccauuguucca

SEQ ID NO: 789334 - RNA, 19 nt, Artificial Sequence
  Description of Artificial Sequence: Synthetic oligonucleotide
cuacuuccgacagaaucuc

SEQ ID NO: 789335 - RNA, 19 nt, Artificial Sequence
  Description of Artificial Sequence: Synthetic oligonucleotide
ccuugcauacuucuugaug

SEQ ID NO: 789336 - RNA, 19 nt, Artificial Sequence
  Description of Artificial Sequence: Synthetic oligonucleotide
auauaacggcgcauucgag

SEQ ID NO: 789337 - RNA, 19 nt, Artificial Sequence
  Description of Artificial Sequence: Synthetic oligonucleotide
acucgccccacaguucugg

SEQ ID NO: 789338 - RNA, 19 nt, Artificial Sequence
  Description of Artificial Sequence: Synthetic oligonucleotide
auccgcagaaguagaacug

SEQ ID NO: 789339 - RNA, 19 nt, Artificial Sequence
  Description of Artificial Sequence: Synthetic oligonucleotide
aucaauccgcagaaguaga

SEQ ID NO: 789340 - RNA, 19 nt, Artificial Sequence
  Description of Artificial Sequence: Synthetic oligonucleotide
cugacuauccgugccccac

SEQ ID NO: 789341 - RNA, 19 nt, Artificial Sequence
  Description of Artificial Sequence: Synthetic oligonucleotide
gcgauuauugucugucuuc

SEQ ID NO: 789342 - RNA, 19 nt, Artificial Sequence
  Description of Artificial Sequence: Synthetic oligonucleotide
uccggacucuucgaauagc

SEQ ID NO: 789343 - RNA, 19 nt, Artificial Sequence
  Description of Artificial Sequence: Synthetic oligonucleotide
gacgcagagccgaguaccc

SEQ ID NO: 789344 - RNA, 19 nt, Artificial Sequence
  Description of Artificial Sequence: Synthetic oligonucleotide
ucauaucauccagugccau

SEQ ID NO: 789345 - RNA, 19 nt, Artificial Sequence
  Description of Artificial Sequence: Synthetic oligonucleotide
gaaagugcucagccacaga

SEQ ID NO: 789346 - RNA, 19 nt, Artificial Sequence
  Description of Artificial Sequence: Synthetic oligonucleotide
gccaacggcucccauauuc

SEQ ID NO: 789347 - RNA, 19 nt, Artificial Sequence
  Description of Artificial Sequence: Synthetic oligonucleotide
cuuccggacucuucgaaua

SEQ ID NO: 789348 - RNA, 19 nt, Artificial Sequence
  Description of Artificial Sequence: Synthetic oligonucleotide
uccucucguguaaucucaa

SEQ ID NO: 789349 - RNA, 19 nt, Artificial Sequence
  Description of Artificial Sequence: Synthetic oligonucleotide
gcugagcuaaaucugagau

SEQ ID NO: 789350 - RNA, 19 nt, Artificial Sequence
  Description of Artificial Sequence: Synthetic oligonucleotide
ccaacggcucccauauucc

SEQ ID NO: 789351 - RNA, 19 nt, Artificial Sequence
  Description of Artificial Sequence: Synthetic oligonucleotide
augguacucgccccacagu

SEQ ID NO: 789352 - RNA, 19 nt, Artificial Sequence
  Description of Artificial Sequence: Synthetic oligonucleotide
aggauucggguaaaauccu

SEQ ID NO: 789353 - RNA, 19 nt, Artificial Sequence
  Description of Artificial Sequence: Synthetic oligonucleotide
ucugcacguugaagucacc

SEQ ID NO: 789354 - RNA, 19 nt, Artificial Sequence
  Description of Artificial Sequence: Synthetic oligonucleotide
ucacgguuauugacaucaa

SEQ ID NO: 789355 - RNA, 19 nt, Artificial Sequence
  Description of Artificial Sequence: Synthetic oligonucleotide
gaaugguacucgccccaca

SEQ ID NO: 789356 - RNA, 19 nt, Artificial Sequence
  Description of Artificial Sequence: Synthetic oligonucleotide
aggcaugggccacagccau

SEQ ID NO: 789357 - RNA, 19 nt, Artificial Sequence
  Description of Artificial Sequence: Synthetic oligonucleotide
acguuggcccgcaugaggu

SEQ ID NO: 789358 - RNA, 19 nt, Artificial Sequence
  Description of Artificial Sequence: Synthetic oligonucleotide
gccgaguacccagagcugg

SEQ ID NO: 789359 - RNA, 19 nt, Artificial Sequence
  Description of Artificial Sequence: Synthetic oligonucleotide
acucagugaugaaagugaa

SEQ ID NO: 789360 - RNA, 19 nt, Artificial Sequence
  Description of Artificial Sequence: Synthetic oligonucleotide
gucggcugacuauccgugc

SEQ ID NO: 789361 - RNA, 19 nt, Artificial Sequence
  Description of Artificial Sequence: Synthetic oligonucleotide
cccgaagggagguaagcag

SEQ ID NO: 789362 - RNA, 19 nt, Artificial Sequence
  Description of Artificial Sequence: Synthetic oligonucleotide
aagaauggugcaggccuuu

SEQ ID NO: 789363 - RNA, 19 nt, Artificial Sequence
  Description of Artificial Sequence: Synthetic oligonucleotide
gcaaugcgauuauugucug

SEQ ID NO: 789364 - RNA, 19 nt, Artificial Sequence
  Description of Artificial Sequence: Synthetic oligonucleotide
agcacgagcacuggacggu

SEQ ID NO: 789365 - RNA, 19 nt, Artificial Sequence
  Description of Artificial Sequence: Synthetic oligonucleotide
ugacguuggcccgcaugag

SEQ ID NO: 789366 - RNA, 19 nt, Artificial Sequence
  Description of Artificial Sequence: Synthetic oligonucleotide
uacgagggaugaccucuaa

SEQ ID NO: 789367 - RNA, 19 nt, Artificial Sequence
  Description of Artificial Sequence: Synthetic oligonucleotide
uucgaauagcugugacguu

SEQ ID NO: 789368 - RNA, 19 nt, Artificial Sequence
  Description of Artificial Sequence: Synthetic oligonucleotide
gagcuaaaucugagaugcc

SEQ ID NO: 789369 - RNA, 19 nt, Artificial Sequence
  Description of Artificial Sequence: Synthetic oligonucleotide
aaugucggucuggcuuucu

SEQ ID NO: 789370 - RNA, 19 nt, Artificial Sequence
  Description of Artificial Sequence: Synthetic oligonucleotide
gacuccacguaagacacau

SEQ ID NO: 789371 - RNA, 19 nt, Artificial Sequence
  Description of Artificial Sequence: Synthetic oligonucleotide
caccgacugaugacuuuug

SEQ ID NO: 789372 - RNA, 19 nt, Artificial Sequence
  Description of Artificial Sequence: Synthetic oligonucleotide
ugggugcaucugcugcucu

SEQ ID NO: 789373 - RNA, 19 nt, Artificial Sequence
  Description of Artificial Sequence: Synthetic oligonucleotide
uuggcccgcaugagguagu

SEQ ID NO: 789374 - RNA, 19 nt, Artificial Sequence
  Description of Artificial Sequence: Synthetic oligonucleotide
cacgcuuuguauucugacu

SEQ ID NO: 789375 - RNA, 19 nt, Artificial Sequence
  Description of Artificial Sequence: Synthetic oligonucleotide
aucauagacuuagguccca

SEQ ID NO: 789376 - RNA, 19 nt, Artificial Sequence
  Description of Artificial Sequence: Synthetic oligonucleotide
cauggcggcacgacgcaga

SEQ ID NO: 789377 - RNA, 19 nt, Artificial Sequence
  Description of Artificial Sequence: Synthetic oligonucleotide
gcuuugccggcucugguca

SEQ ID NO: 789378 - RNA, 19 nt, Artificial Sequence
  Description of Artificial Sequence: Synthetic oligonucleotide
uucgaggaugggucacauc

SEQ ID NO: 789379 - RNA, 19 nt, Artificial Sequence
  Description of Artificial Sequence: Synthetic oligonucleotide
uaacggcgcauucgaggau

SEQ ID NO: 789380 - RNA, 19 nt, Artificial Sequence
  Description of Artificial Sequence: Synthetic oligonucleotide
aggaugggucacauccuug

SEQ ID NO: 789381 - RNA, 19 nt, Artificial Sequence
  Description of Artificial Sequence: Synthetic oligonucleotide
uugggugcaucugcugcuc

SEQ ID NO: 789382 - RNA, 19 nt, Artificial Sequence
  Description of Artificial Sequence: Synthetic oligonucleotide
gucuuccggacucuucgaa

SEQ ID NO: 789383 - RNA, 19 nt, Artificial Sequence
  Description of Artificial Sequence: Synthetic oligonucleotide
ggaugggucacauccuugu

SEQ ID NO: 789384 - RNA, 19 nt, Artificial Sequence
  Description of Artificial Sequence: Synthetic oligonucleotide
auucgaggaugggucacau

SEQ ID NO: 789385 - RNA, 19 nt, Artificial Sequence
  Description of Artificial Sequence: Synthetic oligonucleotide
cuuugggucuuugcacuca

SEQ ID NO: 789386 - RNA, 19 nt, Artificial Sequence
  Description of Artificial Sequence: Synthetic oligonucleotide
gguacgagggaugaccucu

SEQ ID NO: 789387 - RNA, 19 nt, Artificial Sequence
  Description of Artificial Sequence: Synthetic oligonucleotide
gguaagcagacgaauggua

SEQ ID NO: 789388 - RNA, 19 nt, Artificial Sequence
  Description of Artificial Sequence: Synthetic oligonucleotide
gguaagcaccaaucaccac

SEQ ID NO: 789389 - RNA, 19 nt, Artificial Sequence
  Description of Artificial Sequence: Synthetic oligonucleotide
ggucggcugacuauccgug

SEQ ID NO: 789390 - RNA, 19 nt, Artificial Sequence
  Description of Artificial Sequence: Synthetic oligonucleotide
cuggauguuggacuugaau

SEQ ID NO: 789391 - RNA, 19 nt, Artificial Sequence
  Description of Artificial Sequence: Synthetic oligonucleotide
gccggcucuggucaucacc

SEQ ID NO: 789392 - RNA, 19 nt, Artificial Sequence
  Description of Artificial Sequence: Synthetic oligonucleotide
ccacguaagacacaugagu

SEQ ID NO: 789393 - RNA, 19 nt, Artificial Sequence
  Description of Artificial Sequence: Synthetic oligonucleotide
gguugcguucuacuuccga

SEQ ID NO: 789394 - RNA, 19 nt, Artificial Sequence
  Description of Artificial Sequence: Synthetic oligonucleotide
gcuaaaucugagaugcccu

SEQ ID NO: 789395 - RNA, 19 nt, Artificial Sequence
  Description of Artificial Sequence: Synthetic oligonucleotide
ucgccccacaguucuggau

SEQ ID NO: 789396 - RNA, 19 nt, Artificial Sequence
  Description of Artificial Sequence: Synthetic oligonucleotide
acggcgcauucgaggaugg

SEQ ID NO: 789397 - RNA, 19 nt, Artificial Sequence
  Description of Artificial Sequence: Synthetic oligonucleotide
cauucgaggaugggucaca

SEQ ID NO: 789398 - RNA, 19 nt, Artificial Sequence
  Description of Artificial Sequence: Synthetic oligonucleotide
ccgaagggagguaagcaga

SEQ ID NO: 789399 - RNA, 19 nt, Artificial Sequence
  Description of Artificial Sequence: Synthetic oligonucleotide
ccgaguacccagagcuggg

SEQ ID NO: 789400 - RNA, 19 nt, Artificial Sequence
  Description of Artificial Sequence: Synthetic oligonucleotide
caggcucuagcaaugcgau

SEQ ID NO: 789401 - RNA, 19 nt, Artificial Sequence
  Description of Artificial Sequence: Synthetic oligonucleotide
ccuccucucguguaaucuc

SEQ ID NO: 789402 - RNA, 19 nt, Artificial Sequence
  Description of Artificial Sequence: Synthetic oligonucleotide
ggguccaggagaacguuuc

SEQ ID NO: 789403 - RNA, 19 nt, Artificial Sequence
  Description of Artificial Sequence: Synthetic oligonucleotide
gcgcauucgaggauggguc

SEQ ID NO: 789404 - RNA, 19 nt, Artificial Sequence
  Description of Artificial Sequence: Synthetic oligonucleotide
ggauucggguaaaauccuc

SEQ ID NO: 789405 - RNA, 19 nt, Artificial Sequence
  Description of Artificial Sequence: Synthetic oligonucleotide
ccaggagaacguuucggca

SEQ ID NO: 789406 - RNA, 19 nt, Artificial Sequence
  Description of Artificial Sequence: Synthetic oligonucleotide
cacuccuggccaccaucug

SEQ ID NO: 789407 - RNA, 19 nt, Artificial Sequence
  Description of Artificial Sequence: Synthetic oligonucleotide
ggaucaagguacgagggau

SEQ ID NO: 789408 - RNA, 19 nt, Artificial Sequence
  Description of Artificial Sequence: Synthetic oligonucleotide
ucggucuggcuuucuccuu

SEQ ID NO: 789409 - RNA, 19 nt, Artificial Sequence
  Description of Artificial Sequence: Synthetic oligonucleotide
ggcugacuauccgugcccc

SEQ ID NO: 789410 - RNA, 19 nt, Artificial Sequence
  Description of Artificial Sequence: Synthetic oligonucleotide
cacgacgcagagccgagua

SEQ ID NO: 789411 - RNA, 19 nt, Artificial Sequence
  Description of Artificial Sequence: Synthetic oligonucleotide
cgguggcccaucauggcgg

SEQ ID NO: 789412 - RNA, 19 nt, Artificial Sequence
  Description of Artificial Sequence: Synthetic oligonucleotide
gcccgcaugagguagugcu

SEQ ID NO: 789413 - RNA, 19 nt, Artificial Sequence
  Description of Artificial Sequence: Synthetic oligonucleotide
ccaaucaccacuguugggu

SEQ ID NO: 789414 - RNA, 19 nt, Artificial Sequence
  Description of Artificial Sequence: Synthetic oligonucleotide
cagccaacggcucccauau

SEQ ID NO: 789415 - RNA, 19 nt, Artificial Sequence
  Description of Artificial Sequence: Synthetic oligonucleotide
caucaacagguguacugau

SEQ ID NO: 789416 - RNA, 19 nt, Artificial Sequence
  Description of Artificial Sequence: Synthetic oligonucleotide
ggucccaaacauguccgga

SEQ ID NO: 789417 - RNA, 19 nt, Artificial Sequence
  Description of Artificial Sequence: Synthetic oligonucleotide
cguucuacuuccgacagaa

SEQ ID NO: 789418 - RNA, 19 nt, Artificial Sequence
  Description of Artificial Sequence: Synthetic oligonucleotide
caauugucuuagcagcauu

SEQ ID NO: 789419 - RNA, 19 nt, Artificial Sequence
  Description of Artificial Sequence: Synthetic oligonucleotide
agguugcguucuacuuccg

SEQ ID NO: 789420 - RNA, 19 nt, Artificial Sequence
  Description of Artificial Sequence: Synthetic oligonucleotide
ccauuugcaggauucgggu

SEQ ID NO: 789421 - RNA, 19 nt, Artificial Sequence
  Description of Artificial Sequence: Synthetic oligonucleotide
cgcaagaauaauuacugau

SEQ ID NO: 789422 - RNA, 19 nt, Artificial Sequence
  Description of Artificial Sequence: Synthetic oligonucleotide
cccaaacauguccggauga

SEQ ID NO: 789423 - RNA, 19 nt, Artificial Sequence
  Description of Artificial Sequence: Synthetic oligonucleotide
caaugcgauuauugucugu

SEQ ID NO: 789424 - RNA, 19 nt, Artificial Sequence
  Description of Artificial Sequence: Synthetic oligonucleotide
cgacagaaucuccuugcug

SEQ ID NO: 789425 - RNA, 19 nt, Artificial Sequence
  Description of Artificial Sequence: Synthetic oligonucleotide
guagcacaauucgaggguu

SEQ ID NO: 789426 - RNA, 19 nt, Artificial Sequence
  Description of Artificial Sequence: Synthetic oligonucleotide
acuccacguaagacacaug

SEQ ID NO: 789427 - RNA, 19 nt, Artificial Sequence
  Description of Artificial Sequence: Synthetic oligonucleotide
acgcagagccgaguaccca

SEQ ID NO: 789428 - RNA, 19 nt, Artificial Sequence
  Description of Artificial Sequence: Synthetic oligonucleotide
cugcacguugaagucaccu

SEQ ID NO: 789429 - RNA, 19 nt, Artificial Sequence
  Description of Artificial Sequence: Synthetic oligonucleotide
ccagucauggccuuagauu

SEQ ID NO: 789430 - RNA, 19 nt, Artificial Sequence
  Description of Artificial Sequence: Synthetic oligonucleotide
ccgcaagaauaauuacuga

SEQ ID NO: 789431 - RNA, 19 nt, Artificial Sequence
  Description of Artificial Sequence: Synthetic oligonucleotide
cuuccgacagaaucuccuu

SEQ ID NO: 789432 - RNA, 19 nt, Artificial Sequence
  Description of Artificial Sequence: Synthetic oligonucleotide
gcauucgaggaugggucac

SEQ ID NO: 789433 - RNA, 19 nt, Artificial Sequence
  Description of Artificial Sequence: Synthetic oligonucleotide
caccccaggucucacaauu

SEQ ID NO: 789434 - RNA, 19 nt, Artificial Sequence
  Description of Artificial Sequence: Synthetic oligonucleotide
cccgcaugagguagugcug

SEQ ID NO: 789435 - RNA, 19 nt, Artificial Sequence
  Description of Artificial Sequence: Synthetic oligonucleotide
gggaugaccucuaaagcuu

SEQ ID NO: 789436 - RNA, 19 nt, Artificial Sequence
  Description of Artificial Sequence: Synthetic oligonucleotide
cucgccccacaguucugga

SEQ ID NO: 789437 - RNA, 19 nt, Artificial Sequence
  Description of Artificial Sequence: Synthetic oligonucleotide
ggcgcauucgaggaugggu

SEQ ID NO: 789438 - RNA, 19 nt, Artificial Sequence
  Description of Artificial Sequence: Synthetic oligonucleotide
gggugugcuuggcccgaag

SEQ ID NO: 789439 - RNA, 19 nt, Artificial Sequence
  Description of Artificial Sequence: Synthetic oligonucleotide
ggcacgacgcagagccgag

SEQ ID NO: 789440 - RNA, 19 nt, Artificial Sequence
  Description of Artificial Sequence: Synthetic oligonucleotide
gagaacguuucggcacacu

SEQ ID NO: 789441 - RNA, 19 nt, Artificial Sequence
  Description of Artificial Sequence: Synthetic oligonucleotide
cagguguacugauuuucuu

SEQ ID NO: 789442 - RNA, 19 nt, Artificial Sequence
  Description of Artificial Sequence: Synthetic oligonucleotide
gcucuauauggccauuguu

SEQ ID NO: 789443 - RNA, 19 nt, Artificial Sequence
  Description of Artificial Sequence: Synthetic oligonucleotide
ccgcagaaguagaacugca

SEQ ID NO: 789444 - RNA, 19 nt, Artificial Sequence
  Description of Artificial Sequence: Synthetic oligonucleotide
uggcggcacgacgcagagc

SEQ ID NO: 789445 - RNA, 19 nt, Artificial Sequence
  Description of Artificial Sequence: Synthetic oligonucleotide
caacagguguacugauuuu

SEQ ID NO: 789446 - RNA, 19 nt, Artificial Sequence
  Description of Artificial Sequence: Synthetic oligonucleotide
acguuucggcacacuugca

SEQ ID NO: 789447 - RNA, 19 nt, Artificial Sequence
  Description of Artificial Sequence: Synthetic oligonucleotide
gcugacuauccgugcccca

SEQ ID NO: 789448 - RNA, 19 nt, Artificial Sequence
  Description of Artificial Sequence: Synthetic oligonucleotide
ggagaacguuucggcacac

SEQ ID NO: 789449 - RNA, 19 nt, Artificial Sequence
  Description of Artificial Sequence: Synthetic oligonucleotide
ggaaccggcagaagcuucu

SEQ ID NO: 789450 - RNA, 19 nt, Artificial Sequence
  Description of Artificial Sequence: Synthetic oligonucleotide
gggaaccggcagaagcuuc

SEQ ID NO: 789451 - RNA, 19 nt, Artificial Sequence
  Description of Artificial Sequence: Synthetic oligonucleotide
guacgagggaugaccucua

SEQ ID NO: 789452 - RNA, 19 nt, Artificial Sequence
  Description of Artificial Sequence: Synthetic oligonucleotide
cggcugacuauccgugccc

SEQ ID NO: 789453 - RNA, 19 nt, Artificial Sequence
  Description of Artificial Sequence: Synthetic oligonucleotide
ccacgucgggcuucagcug

SEQ ID NO: 789454 - RNA, 19 nt, Artificial Sequence
  Description of Artificial Sequence: Synthetic oligonucleotide
ugggugugcuuggcccgaa

SEQ ID NO: 789455 - RNA, 19 nt, Artificial Sequence
  Description of Artificial Sequence: Synthetic oligonucleotide
ccgcaugagguagugcuga

SEQ ID NO: 789456 - RNA, 19 nt, Artificial Sequence
  Description of Artificial Sequence: Synthetic oligonucleotide
gggacagacuggggcugcc

SEQ ID NO: 789457 - RNA, 19 nt, Artificial Sequence
  Description of Artificial Sequence: Synthetic oligonucleotide
ccaauaggccugcaccugu

SEQ ID NO: 789458 - RNA, 19 nt, Artificial Sequence
  Description of Artificial Sequence: Synthetic oligonucleotide
acgucgggcuucagcugga

SEQ ID NO: 789459 - RNA, 19 nt, Artificial Sequence
  Description of Artificial Sequence: Synthetic oligonucleotide
cgcauucgaggauggguca

SEQ ID NO: 789460 - RNA, 19 nt, Artificial Sequence
  Description of Artificial Sequence: Synthetic oligonucleotide
gcucuagcaaugcgauuau

SEQ ID NO: 789461 - RNA, 19 nt, Artificial Sequence
  Description of Artificial Sequence: Synthetic oligonucleotide
gaccaccgacugaugacuu

SEQ ID NO: 789462 - RNA, 19 nt, Artificial Sequence
  Description of Artificial Sequence: Synthetic oligonucleotide
cgaaugguacucgccccac

SEQ ID NO: 789463 - RNA, 19 nt, Artificial Sequence
  Description of Artificial Sequence: Synthetic oligonucleotide
cuuugccggcucuggucau

SEQ ID NO: 789464 - RNA, 19 nt, Artificial Sequence
  Description of Artificial Sequence: Synthetic oligonucleotide
guucuacuuccgacagaau

SEQ ID NO: 789465 - RNA, 19 nt, Artificial Sequence
  Description of Artificial Sequence: Synthetic oligonucleotide
cguuucggcacacuugcau

SEQ ID NO: 789466 - RNA, 19 nt, Artificial Sequence
  Description of Artificial Sequence: Synthetic oligonucleotide
cuggacgguggcccaucau

SEQ ID NO: 789467 - RNA, 19 nt, Artificial Sequence
  Description of Artificial Sequence: Synthetic oligonucleotide
ccucucguguaaucucaau

SEQ ID NO: 789468 - RNA, 19 nt, Artificial Sequence
  Description of Artificial Sequence: Synthetic oligonucleotide
gggucacauccuuguuaau

SEQ ID NO: 789469 - RNA, 19 nt, Artificial Sequence
  Description of Artificial Sequence: Synthetic oligonucleotide
cggcacgacgcagagccga

SEQ ID NO: 789470 - RNA, 19 nt, Artificial Sequence
  Description of Artificial Sequence: Synthetic oligonucleotide
gcacaauucgaggguucuu

SEQ ID NO: 789471 - RNA, 19 nt, Artificial Sequence
  Description of Artificial Sequence: Synthetic oligonucleotide
cggcgcauucgaggauggg

SEQ ID NO: 789472 - RNA, 19 nt, Artificial Sequence
  Description of Artificial Sequence: Synthetic oligonucleotide
cugugacguuggcccgcau

SEQ ID NO: 789473 - RNA, 19 nt, Artificial Sequence
  Description of Artificial Sequence: Synthetic oligonucleotide
gccccucaacuugauccuu

SEQ ID NO: 789474 - RNA, 19 nt, Artificial Sequence
  Description of Artificial Sequence: Synthetic oligonucleotide
ccgugccccacaggcucua

SEQ ID NO: 789475 - RNA, 19 nt, Artificial Sequence
  Description of Artificial Sequence: Synthetic oligonucleotide
aaacuucucucccaaagcc

SEQ ID NO: 789476 - RNA, 19 nt, Artificial Sequence
  Description of Artificial Sequence: Synthetic oligonucleotide
agcgaugauauacugaacc

SEQ ID NO: 789477 - RNA, 19 nt, Artificial Sequence
  Description of Artificial Sequence: Synthetic oligonucleotide
caccaaaugauccagaugg

SEQ ID NO: 789478 - RNA, 19 nt, Artificial Sequence
  Description of Artificial Sequence: Synthetic oligonucleotide
uuuauugagacugaggagc

SEQ ID NO: 789479 - RNA, 19 nt, Artificial Sequence
  Description of Artificial Sequence: Synthetic oligonucleotide
uguacgaugugccaggagc

SEQ ID NO: 789480 - RNA, 19 nt, Artificial Sequence
  Description of Artificial Sequence: Synthetic oligonucleotide
aaauuugaggugcccauuc

SEQ ID NO: 789481 - RNA, 19 nt, Artificial Sequence
  Description of Artificial Sequence: Synthetic oligonucleotide
gaugauauacugaaccugg

SEQ ID NO: 789482 - RNA, 19 nt, Artificial Sequence
  Description of Artificial Sequence: Synthetic oligonucleotide
ucugcagucaacucgaugu

SEQ ID NO: 789483 - RNA, 19 nt, Artificial Sequence
  Description of Artificial Sequence: Synthetic oligonucleotide
aaguaggacaagaaagucc

SEQ ID NO: 789484 - RNA, 19 nt, Artificial Sequence
  Description of Artificial Sequence: Synthetic oligonucleotide
aaaugauccagauggcaag

SEQ ID NO: 789485 - RNA, 19 nt, Artificial Sequence
  Description of Artificial Sequence: Synthetic oligonucleotide
augacgucguacucgaugc

SEQ ID NO: 789486 - RNA, 19 nt, Artificial Sequence
  Description of Artificial Sequence: Synthetic oligonucleotide
aaugacgucguacucgaug

SEQ ID NO: 789487 - RNA, 19 nt, Artificial Sequence
  Description of Artificial Sequence: Synthetic oligonucleotide
accaguagaugucaacucc

SEQ ID NO: 789488 - RNA, 19 nt, Artificial Sequence
  Description of Artificial Sequence: Synthetic oligonucleotide
uccgugaugguaaugacgu

SEQ ID NO: 789489 - RNA, 19 nt, Artificial Sequence
  Description of Artificial Sequence: Synthetic oligonucleotide
gaugugaaauuugaggugc

SEQ ID NO: 789490 - RNA, 19 nt, Artificial Sequence
  Description of Artificial Sequence: Synthetic oligonucleotide
uuugaggugcccauuccgg

SEQ ID NO: 789491 - RNA, 19 nt, Artificial Sequence
  Description of Artificial Sequence: Synthetic oligonucleotide
gucauuagucacuaggugc

SEQ ID NO: 789492 - RNA, 19 nt, Artificial Sequence
  Description of Artificial Sequence: Synthetic oligonucleotide
ugagcgaugauauacugaa

SEQ ID NO: 789493 - RNA, 19 nt, Artificial Sequence
  Description of Artificial Sequence: Synthetic oligonucleotide
ucuggaggcccuaaguagg

SEQ ID NO: 789494 - RNA, 19 nt, Artificial Sequence
  Description of Artificial Sequence: Synthetic oligonucleotide
ucauuagucacuaggugcu

SEQ ID NO: 789495 - RNA, 19 nt, Artificial Sequence
  Description of Artificial Sequence: Synthetic oligonucleotide
agucaagggauacugacug

SEQ ID NO: 789496 - RNA, 19 nt, Artificial Sequence
  Description of Artificial Sequence: Synthetic oligonucleotide
agucagggcauuugaaggc

SEQ ID NO: 789497 - RNA, 19 nt, Artificial Sequence
  Description of Artificial Sequence: Synthetic oligonucleotide
auuguggcaccacuuaggg

SEQ ID NO: 789498 - RNA, 19 nt, Artificial Sequence
  Description of Artificial Sequence: Synthetic oligonucleotide
aaauaaacuucucucccaa

SEQ ID NO: 789499 - RNA, 19 nt, Artificial Sequence
  Description of Artificial Sequence: Synthetic oligonucleotide
cugaacgccguccugagcg

SEQ ID NO: 789500 - RNA, 19 nt, Artificial Sequence
  Description of Artificial Sequence: Synthetic oligonucleotide
aucaggacagaguagugag

SEQ ID NO: 789501 - RNA, 19 nt, Artificial Sequence
  Description of Artificial Sequence: Synthetic oligonucleotide
ugugaugacacuguagcug

SEQ ID NO: 789502 - RNA, 19 nt, Artificial Sequence
  Description of Artificial Sequence: Synthetic oligonucleotide
ccuaaguaggacaagaaag

SEQ ID NO: 789503 - RNA, 19 nt, Artificial Sequence
  Description of Artificial Sequence: Synthetic oligonucleotide
ugucauuagucacuaggug

SEQ ID NO: 789504 - RNA, 19 nt, Artificial Sequence
  Description of Artificial Sequence: Synthetic oligonucleotide
uuauugagacugaggagcc

SEQ ID NO: 789505 - RNA, 19 nt, Artificial Sequence
  Description of Artificial Sequence: Synthetic oligonucleotide
ucugccaucacugcuaugu

SEQ ID NO: 789506 - RNA, 19 nt, Artificial Sequence
  Description of Artificial Sequence: Synthetic oligonucleotide
acugcuauguagccgcugg

SEQ ID NO: 789507 - RNA, 19 nt, Artificial Sequence
  Description of Artificial Sequence: Synthetic oligonucleotide
uccaagaucagcguugggc

SEQ ID NO: 789508 - RNA, 19 nt, Artificial Sequence
  Description of Artificial Sequence: Synthetic oligonucleotide
uucuuagaggcgaagcuac

SEQ ID NO: 789509 - RNA, 19 nt, Artificial Sequence
  Description of Artificial Sequence: Synthetic oligonucleotide
acaggaacauacuggaucu

SEQ ID NO: 789510 - RNA, 19 nt, Artificial Sequence
  Description of Artificial Sequence: Synthetic oligonucleotide
uggcgugguaucuucaggg

SEQ ID NO: 789511 - RNA, 19 nt, Artificial Sequence
  Description of Artificial Sequence: Synthetic oligonucleotide
aacucgauguggccuguac

SEQ ID NO: 789512 - RNA, 19 nt, Artificial Sequence
  Description of Artificial Sequence: Synthetic oligonucleotide
aguagugagggaaagucuc

SEQ ID NO: 789513 - RNA, 19 nt, Artificial Sequence
  Description of Artificial Sequence: Synthetic oligonucleotide
guuggugugcguuagcaug

SEQ ID NO: 789514 - RNA, 19 nt, Artificial Sequence
  Description of Artificial Sequence: Synthetic oligonucleotide
ggagauauaaccucaggac

SEQ ID NO: 789515 - RNA, 19 nt, Artificial Sequence
  Description of Artificial Sequence: Synthetic oligonucleotide
ugauuguggcaccacuuag

SEQ ID NO: 789516 - RNA, 19 nt, Artificial Sequence
  Description of Artificial Sequence: Synthetic oligonucleotide
augguaaugacgucguacu

SEQ ID NO: 789517 - RNA, 19 nt, Artificial Sequence
  Description of Artificial Sequence: Synthetic oligonucleotide
gaagcuacauugauuacac

SEQ ID NO: 789518 - RNA, 19 nt, Artificial Sequence
  Description of Artificial Sequence: Synthetic oligonucleotide
gagggaaagucucagguga

SEQ ID NO: 789519 - RNA, 19 nt, Artificial Sequence
  Description of Artificial Sequence: Synthetic oligonucleotide
uacuaccaggccuacagug

SEQ ID NO: 789520 - RNA, 19 nt, Artificial Sequence
  Description of Artificial Sequence: Synthetic oligonucleotide
cugacuguccgguaucugg

SEQ ID NO: 789521 - RNA, 19 nt, Artificial Sequence
  Description of Artificial Sequence: Synthetic oligonucleotide
ugcucggccagcaaaggcc

SEQ ID NO: 789522 - RNA, 19 nt, Artificial Sequence
  Description of Artificial Sequence: Synthetic oligonucleotide
gauuguggcaccacuuagg

SEQ ID NO: 789523 - RNA, 19 nt, Artificial Sequence
  Description of Artificial Sequence: Synthetic oligonucleotide
guaucguggacuugggaag

SEQ ID NO: 789524 - RNA, 19 nt, Artificial Sequence
  Description of Artificial Sequence: Synthetic oligonucleotide
caagaaagucccuagucuc

SEQ ID NO: 789525 - RNA, 19 nt, Artificial Sequence
  Description of Artificial Sequence: Synthetic oligonucleotide
aaccugguugucauuaguc

SEQ ID NO: 789526 - RNA, 19 nt, Artificial Sequence
  Description of Artificial Sequence: Synthetic oligonucleotide
gguacuaccaggccuacag

SEQ ID NO: 789527 - RNA, 19 nt, Artificial Sequence
  Description of Artificial Sequence: Synthetic oligonucleotide
uacuggaugugugugaucu

SEQ ID NO: 789528 - RNA, 19 nt, Artificial Sequence
  Description of Artificial Sequence: Synthetic oligonucleotide
gucaacuccgccuccaugc

SEQ ID NO: 789529 - RNA, 19 nt, Artificial Sequence
  Description of Artificial Sequence: Synthetic oligonucleotide
caugugccgccucagaucc

SEQ ID NO: 789530 - RNA, 19 nt, Artificial Sequence
  Description of Artificial Sequence: Synthetic oligonucleotide
aggccuuaggcuugagugc

SEQ ID NO: 789531 - RNA, 19 nt, Artificial Sequence
  Description of Artificial Sequence: Synthetic oligonucleotide
gaugguaaugacgucguac

SEQ ID NO: 789532 - RNA, 19 nt, Artificial Sequence
  Description of Artificial Sequence: Synthetic oligonucleotide
aggacaagaaagucccuag

SEQ ID NO: 789533 - RNA, 19 nt, Artificial Sequence
  Description of Artificial Sequence: Synthetic oligonucleotide
agugcugcgccaugugagc

SEQ ID NO: 789534 - RNA, 19 nt, Artificial Sequence
  Description of Artificial Sequence: Synthetic oligonucleotide
cauugauuacacuggugag

SEQ ID NO: 789535 - RNA, 19 nt, Artificial Sequence
  Description of Artificial Sequence: Synthetic oligonucleotide
uugaggaugauggucugag

SEQ ID NO: 789536 - RNA, 19 nt, Artificial Sequence
  Description of Artificial Sequence: Synthetic oligonucleotide
ucccuagucuccaggagag

SEQ ID NO: 789537 - RNA, 19 nt, Artificial Sequence
  Description of Artificial Sequence: Synthetic oligonucleotide
aucagggaccacgacauac

SEQ ID NO: 789538 - RNA, 19 nt, Artificial Sequence
  Description of Artificial Sequence: Synthetic oligonucleotide
cuacaguguugcuaguugc

SEQ ID NO: 789539 - RNA, 19 nt, Artificial Sequence
  Description of Artificial Sequence: Synthetic oligonucleotide
uauaaccucaggaccauuu

SEQ ID NO: 789540 - RNA, 19 nt, Artificial Sequence
  Description of Artificial Sequence: Synthetic oligonucleotide
uguggcucagucauccgug

SEQ ID NO: 789541 - RNA, 19 nt, Artificial Sequence
  Description of Artificial Sequence: Synthetic oligonucleotide
agauauaaccucaggacca

SEQ ID NO: 789542 - RNA, 19 nt, Artificial Sequence
  Description of Artificial Sequence: Synthetic oligonucleotide
aguggguacuaccaggccu

SEQ ID NO: 789543 - RNA, 19 nt, Artificial Sequence
  Description of Artificial Sequence: Synthetic oligonucleotide
ccgauauccaagaucagcg

SEQ ID NO: 789544 - RNA, 19 nt, Artificial Sequence
  Description of Artificial Sequence: Synthetic oligonucleotide
gguaaugacgucguacucg

SEQ ID NO: 789545 - RNA, 19 nt, Artificial Sequence
  Description of Artificial Sequence: Synthetic oligonucleotide
cacaugaagugucaccacc

SEQ ID NO: 789546 - RNA, 19 nt, Artificial Sequence
  Description of Artificial Sequence: Synthetic oligonucleotide
acucgauguggccuguacg

SEQ ID NO: 789547 - RNA, 19 nt, Artificial Sequence
  Description of Artificial Sequence: Synthetic oligonucleotide
guugaaacgcugcccacag

SEQ ID NO: 789548 - RNA, 19 nt, Artificial Sequence
  Description of Artificial Sequence: Synthetic oligonucleotide
aggaacauacuggaucugg

SEQ ID NO: 789549 - RNA, 19 nt, Artificial Sequence
  Description of Artificial Sequence: Synthetic oligonucleotide
ugggagcucauguucagca

SEQ ID NO: 789550 - RNA, 19 nt, Artificial Sequence
  Description of Artificial Sequence: Synthetic oligonucleotide
aauaaacuucucucccaaa

SEQ ID NO: 789551 - RNA, 19 nt, Artificial Sequence
  Description of Artificial Sequence: Synthetic oligonucleotide
ugauauacugaaccugguu

SEQ ID NO: 789552 - RNA, 19 nt, Artificial Sequence
  Description of Artificial Sequence: Synthetic oligonucleotide
ucggccaccgcuguaacag

SEQ ID NO: 789553 - RNA, 19 nt, Artificial Sequence
  Description of Artificial Sequence: Synthetic oligonucleotide
accuugcucauacuggaug

SEQ ID NO: 789554 - RNA, 19 nt, Artificial Sequence
  Description of Artificial Sequence: Synthetic oligonucleotide
acuuagggcaucaggacag

SEQ ID NO: 789555 - RNA, 19 nt, Artificial Sequence
  Description of Artificial Sequence: Synthetic oligonucleotide
ggcuuaaguacccagcaug

SEQ ID NO: 789556 - RNA, 19 nt, Artificial Sequence
  Description of Artificial Sequence: Synthetic oligonucleotide
auauccaagaucagcguug

SEQ ID NO: 789557 - RNA, 19 nt, Artificial Sequence
  Description of Artificial Sequence: Synthetic oligonucleotide
uguggugauuuccuggaua

SEQ ID NO: 789558 - RNA, 19 nt, Artificial Sequence
  Description of Artificial Sequence: Synthetic oligonucleotide
ggucccuuuauugagacug

SEQ ID NO: 789559 - RNA, 19 nt, Artificial Sequence
  Description of Artificial Sequence: Synthetic oligonucleotide
ugacaaagcugcugcagac

SEQ ID NO: 789560 - RNA, 19 nt, Artificial Sequence
  Description of Artificial Sequence: Synthetic oligonucleotide
uuaggcuugagugcugcgc

SEQ ID NO: 789561 - RNA, 19 nt, Artificial Sequence
  Description of Artificial Sequence: Synthetic oligonucleotide
gaacauacuggaucuggga

SEQ ID NO: 789562 - RNA, 19 nt, Artificial Sequence
  Description of Artificial Sequence: Synthetic oligonucleotide
ugacuguccgguaucugga

SEQ ID NO: 789563 - RNA, 19 nt, Artificial Sequence
  Description of Artificial Sequence: Synthetic oligonucleotide
uuggugugcguuagcaugu

SEQ ID NO: 789564 - RNA, 19 nt, Artificial Sequence
  Description of Artificial Sequence: Synthetic oligonucleotide
ugcagucaacucgaugugg

SEQ ID NO: 789565 - RNA, 19 nt, Artificial Sequence
  Description of Artificial Sequence: Synthetic oligonucleotide
gucacuaggugcuguacug

SEQ ID NO: 789566 - RNA, 19 nt, Artificial Sequence
  Description of Artificial Sequence: Synthetic oligonucleotide
cuaaguaggacaagaaagu

SEQ ID NO: 789567 - RNA, 19 nt, Artificial Sequence
  Description of Artificial Sequence: Synthetic oligonucleotide
guaaugacgucguacucga

SEQ ID NO: 789568 - RNA, 19 nt, Artificial Sequence
  Description of Artificial Sequence: Synthetic oligonucleotide
ucagggaccacgacauacu

SEQ ID NO: 789569 - RNA, 19 nt, Artificial Sequence
  Description of Artificial Sequence: Synthetic oligonucleotide
guggagauauaaccucagg

SEQ ID NO: 789570 - RNA, 19 nt, Artificial Sequence
  Description of Artificial Sequence: Synthetic oligonucleotide
ugugaaauuugaggugccc

SEQ ID NO: 789571 - RNA, 19 nt, Artificial Sequence
  Description of Artificial Sequence: Synthetic oligonucleotide
agaugauuguggcaccacu

SEQ ID NO: 789572 - RNA, 19 nt, Artificial Sequence
  Description of Artificial Sequence: Synthetic oligonucleotide
uccugagcgaugauauacu

SEQ ID NO: 789573 - RNA, 19 nt, Artificial Sequence
  Description of Artificial Sequence: Synthetic oligonucleotide
gguaccuugcucauacugg

SEQ ID NO: 789574 - RNA, 19 nt, Artificial Sequence
  Description of Artificial Sequence: Synthetic oligonucleotide
aucgcaguggacuccucag

SEQ ID NO: 789575 - RNA, 19 nt, Artificial Sequence
  Description of Artificial Sequence: Synthetic oligonucleotide
uguaggucgagaggggccc

SEQ ID NO: 789576 - RNA, 19 nt, Artificial Sequence
  Description of Artificial Sequence: Synthetic oligonucleotide
agauggcaaggcaaucugc

SEQ ID NO: 789577 - RNA, 19 nt, Artificial Sequence
  Description of Artificial Sequence: Synthetic oligonucleotide
agucacuaggugcuguacu

SEQ ID NO: 789578 - RNA, 19 nt, Artificial Sequence
  Description of Artificial Sequence: Synthetic oligonucleotide
agcaggcccagcaugggcc

SEQ ID NO: 789579 - RNA, 19 nt, Artificial Sequence
  Description of Artificial Sequence: Synthetic oligonucleotide
uuagaggcgaagcuacauu

SEQ ID NO: 789580 - RNA, 19 nt, Artificial Sequence
  Description of Artificial Sequence: Synthetic oligonucleotide
uggccccaccaaaugaucc

SEQ ID NO: 789581 - RNA, 19 nt, Artificial Sequence
  Description of Artificial Sequence: Synthetic oligonucleotide
ggcccuuucacacugcagc

SEQ ID NO: 789582 - RNA, 19 nt, Artificial Sequence
  Description of Artificial Sequence: Synthetic oligonucleotide
ggaugugaaauuugaggug

SEQ ID NO: 789583 - RNA, 19 nt, Artificial Sequence
  Description of Artificial Sequence: Synthetic oligonucleotide
uuuguggcucagucauccg

SEQ ID NO: 789584 - RNA, 19 nt, Artificial Sequence
  Description of Artificial Sequence: Synthetic oligonucleotide
ucagggcauuugaaggcag

SEQ ID NO: 789585 - RNA, 19 nt, Artificial Sequence
  Description of Artificial Sequence: Synthetic oligonucleotide
uggaugugugugaucuggc

SEQ ID NO: 789586 - RNA, 19 nt, Artificial Sequence
  Description of Artificial Sequence: Synthetic oligonucleotide
caguagaugucaacuccgc

SEQ ID NO: 789587 - RNA, 19 nt, Artificial Sequence
  Description of Artificial Sequence: Synthetic oligonucleotide
cacuggugaggccuuaggc

SEQ ID NO: 789588 - RNA, 19 nt, Artificial Sequence
  Description of Artificial Sequence: Synthetic oligonucleotide
cagaaugugcugcagccuc

SEQ ID NO: 789589 - RNA, 19 nt, Artificial Sequence
  Description of Artificial Sequence: Synthetic oligonucleotide
gguaucguggacuugggaa

SEQ ID NO: 789590 - RNA, 19 nt, Artificial Sequence
  Description of Artificial Sequence: Synthetic oligonucleotide
ucagucauccgugauggua

SEQ ID NO: 789591 - RNA, 19 nt, Artificial Sequence
  Description of Artificial Sequence: Synthetic oligonucleotide
gagugcugcgccaugugag

SEQ ID NO: 789592 - RNA, 19 nt, Artificial Sequence
  Description of Artificial Sequence: Synthetic oligonucleotide
ggaugauggucugagcugg

SEQ ID NO: 789593 - RNA, 19 nt, Artificial Sequence
  Description of Artificial Sequence: Synthetic oligonucleotide
auaugauggccaucaggga

SEQ ID NO: 789594 - RNA, 19 nt, Artificial Sequence
  Description of Artificial Sequence: Synthetic oligonucleotide
caccacuuagggcaucagg

SEQ ID NO: 789595 - RNA, 19 nt, Artificial Sequence
  Description of Artificial Sequence: Synthetic oligonucleotide
ugucaacuccgccuccaug

SEQ ID NO: 789596 - RNA, 19 nt, Artificial Sequence
  Description of Artificial Sequence: Synthetic oligonucleotide
cucgauguggccuguacga

SEQ ID NO: 789597 - RNA, 19 nt, Artificial Sequence
  Description of Artificial Sequence: Synthetic oligonucleotide
ggcgaagcuacauugauua

SEQ ID NO: 789598 - RNA, 19 nt, Artificial Sequence
  Description of Artificial Sequence: Synthetic oligonucleotide
ugucuggccaucugcugug

SEQ ID NO: 789599 - RNA, 19 nt, Artificial Sequence
  Description of Artificial Sequence: Synthetic oligonucleotide
augugaaauuugaggugcc

SEQ ID NO: 789600 - RNA, 19 nt, Artificial Sequence
  Description of Artificial Sequence: Synthetic oligonucleotide
uguugaggaugauggucug

SEQ ID NO: 789601 - RNA, 19 nt, Artificial Sequence
  Description of Artificial Sequence: Synthetic oligonucleotide
cuguaggucgagaggggcc

SEQ ID NO: 789602 - RNA, 19 nt, Artificial Sequence
  Description of Artificial Sequence: Synthetic oligonucleotide
aaaggccucugagcacacc

SEQ ID NO: 789603 - RNA, 19 nt, Artificial Sequence
  Description of Artificial Sequence: Synthetic oligonucleotide
uaacaagcugcuggccugg

SEQ ID NO: 789604 - RNA, 19 nt, Artificial Sequence
  Description of Artificial Sequence: Synthetic oligonucleotide
auuucuggguggcccuuuc

SEQ ID NO: 789605 - RNA, 19 nt, Artificial Sequence
  Description of Artificial Sequence: Synthetic oligonucleotide
ccaguagaugucaacuccg

SEQ ID NO: 789606 - RNA, 19 nt, Artificial Sequence
  Description of Artificial Sequence: Synthetic oligonucleotide
uggagucaagggauacuga

SEQ ID NO: 789607 - RNA, 19 nt, Artificial Sequence
  Description of Artificial Sequence: Synthetic oligonucleotide
gacgucguacucgaugccc

SEQ ID NO: 789608 - RNA, 19 nt, Artificial Sequence
  Description of Artificial Sequence: Synthetic oligonucleotide
augauuguggcaccacuua

SEQ ID NO: 789609 - RNA, 19 nt, Artificial Sequence
  Description of Artificial Sequence: Synthetic oligonucleotide
ucgagaggggcccguagcu

SEQ ID NO: 789610 - RNA, 19 nt, Artificial Sequence
  Description of Artificial Sequence: Synthetic oligonucleotide
ccauuggcgagcauggaag

SEQ ID NO: 789611 - RNA, 19 nt, Artificial Sequence
  Description of Artificial Sequence: Synthetic oligonucleotide
uggauaugauggccaucag

SEQ ID NO: 789612 - RNA, 19 nt, Artificial Sequence
  Description of Artificial Sequence: Synthetic oligonucleotide
gauacugacuguccgguau

SEQ ID NO: 789613 - RNA, 19 nt, Artificial Sequence
  Description of Artificial Sequence: Synthetic oligonucleotide
agucaacucgauguggccu

SEQ ID NO: 789614 - RNA, 19 nt, Artificial Sequence
  Description of Artificial Sequence: Synthetic oligonucleotide
uguggccuguacgaugugc

SEQ ID NO: 789615 - RNA, 19 nt, Artificial Sequence
  Description of Artificial Sequence: Synthetic oligonucleotide
caugacuggacuggagggc

SEQ ID NO: 789616 - RNA, 19 nt, Artificial Sequence
  Description of Artificial Sequence: Synthetic oligonucleotide
ugguaaugacgucguacuc

SEQ ID NO: 789617 - RNA, 19 nt, Artificial Sequence
  Description of Artificial Sequence: Synthetic oligonucleotide
gacuguccgguaucuggag

SEQ ID NO: 789618 - RNA, 19 nt, Artificial Sequence
  Description of Artificial Sequence: Synthetic oligonucleotide
uaggacaagaaagucccua

SEQ ID NO: 789619 - RNA, 19 nt, Artificial Sequence
  Description of Artificial Sequence: Synthetic oligonucleotide
uuagucacuaggugcugua

SEQ ID NO: 789620 - RNA, 19 nt, Artificial Sequence
  Description of Artificial Sequence: Synthetic oligonucleotide
cauuccgguugaaacgcug

SEQ ID NO: 789621 - RNA, 19 nt, Artificial Sequence
  Description of Artificial Sequence: Synthetic oligonucleotide
aguggagauauaaccucag

SEQ ID NO: 789622 - RNA, 19 nt, Artificial Sequence
  Description of Artificial Sequence: Synthetic oligonucleotide
uuagcaugugccgccucag

SEQ ID NO: 789623 - RNA, 19 nt, Artificial Sequence
  Description of Artificial Sequence: Synthetic oligonucleotide
auacuggaugugugugauc

SEQ ID NO: 789624 - RNA, 19 nt, Artificial Sequence
  Description of Artificial Sequence: Synthetic oligonucleotide
cuuaggcuugagugcugcg

SEQ ID NO: 789625 - RNA, 19 nt, Artificial Sequence
  Description of Artificial Sequence: Synthetic oligonucleotide
uccgguaucuggaggcccu

SEQ ID NO: 789626 - RNA, 19 nt, Artificial Sequence
  Description of Artificial Sequence: Synthetic oligonucleotide
ggccauuuuguuccagagg

SEQ ID NO: 789627 - RNA, 19 nt, Artificial Sequence
  Description of Artificial Sequence: Synthetic oligonucleotide
guacccagcauguccuggc

SEQ ID NO: 789628 - RNA, 19 nt, Artificial Sequence
  Description of Artificial Sequence: Synthetic oligonucleotide
uugcucauacuggaugugu

SEQ ID NO: 789629 - RNA, 19 nt, Artificial Sequence
  Description of Artificial Sequence: Synthetic oligonucleotide
ucccuuuauugagacugag

SEQ ID NO: 789630 - RNA, 19 nt, Artificial Sequence
  Description of Artificial Sequence: Synthetic oligonucleotide
ucugcucggccagcaaagg

SEQ ID NO: 789631 - RNA, 19 nt, Artificial Sequence
  Description of Artificial Sequence: Synthetic oligonucleotide
aacuccgccuccaugcccu

SEQ ID NO: 789632 - RNA, 19 nt, Artificial Sequence
  Description of Artificial Sequence: Synthetic oligonucleotide
guuagcaugugccgccuca

SEQ ID NO: 789633 - RNA, 19 nt, Artificial Sequence
  Description of Artificial Sequence: Synthetic oligonucleotide
cagucaacucgauguggcc

SEQ ID NO: 789634 - RNA, 19 nt, Artificial Sequence
  Description of Artificial Sequence: Synthetic oligonucleotide
aggaaugggguaccuugcu

SEQ ID NO: 789635 - RNA, 19 nt, Artificial Sequence
  Description of Artificial Sequence: Synthetic oligonucleotide
cuuuggagucaagggauac

SEQ ID NO: 789636 - RNA, 19 nt, Artificial Sequence
  Description of Artificial Sequence: Synthetic oligonucleotide
gugagggaaagucucaggu

SEQ ID NO: 789637 - RNA, 19 nt, Artificial Sequence
  Description of Artificial Sequence: Synthetic oligonucleotide
uuagggcaucaggacagag

SEQ ID NO: 789638 - RNA, 19 nt, Artificial Sequence
  Description of Artificial Sequence: Synthetic oligonucleotide
gugaaauuugaggugccca

SEQ ID NO: 789639 - RNA, 19 nt, Artificial Sequence
  Description of Artificial Sequence: Synthetic oligonucleotide
ucucguuggugugcguuag

SEQ ID NO: 789640 - RNA, 19 nt, Artificial Sequence
  Description of Artificial Sequence: Synthetic oligonucleotide
uccugcaggaaugggguac

SEQ ID NO: 789641 - RNA, 19 nt, Artificial Sequence
  Description of Artificial Sequence: Synthetic oligonucleotide
cuauguagccgcuggaugu

SEQ ID NO: 789642 - RNA, 19 nt, Artificial Sequence
  Description of Artificial Sequence: Synthetic oligonucleotide
ugacgucguacucgaugcc

SEQ ID NO: 789643 - RNA, 19 nt, Artificial Sequence
  Description of Artificial Sequence: Synthetic oligonucleotide
caguggagauauaaccuca

SEQ ID NO: 789644 - RNA, 19 nt, Artificial Sequence
  Description of Artificial Sequence: Synthetic oligonucleotide
gcuauguagccgcuggaug

SEQ ID NO: 789645 - RNA, 19 nt, Artificial Sequence
  Description of Artificial Sequence: Synthetic oligonucleotide
caggcuuaaguacccagca

SEQ ID NO: 789646 - RNA, 19 nt, Artificial Sequence
  Description of Artificial Sequence: Synthetic oligonucleotide
cgugaugguaaugacgucg

SEQ ID NO: 789647 - RNA, 19 nt, Artificial Sequence
  Description of Artificial Sequence: Synthetic oligonucleotide
cagucauccgugaugguaa

SEQ ID NO: 789648 - RNA, 19 nt, Artificial Sequence
  Description of Artificial Sequence: Synthetic oligonucleotide
cugagcacaccuugcagga

SEQ ID NO: 789649 - RNA, 19 nt, Artificial Sequence
  Description of Artificial Sequence: Synthetic oligonucleotide
cucgaugcccugguguugc

SEQ ID NO: 789650 - RNA, 19 nt, Artificial Sequence
  Description of Artificial Sequence: Synthetic oligonucleotide
cugagcgaugauauacuga

SEQ ID NO: 789651 - RNA, 19 nt, Artificial Sequence
  Description of Artificial Sequence: Synthetic oligonucleotide
uugagacugaggagccagu

SEQ ID NO: 789652 - RNA, 19 nt, Artificial Sequence
  Description of Artificial Sequence: Synthetic oligonucleotide
agggaaagucucaggugac

SEQ ID NO: 789653 - RNA, 19 nt, Artificial Sequence
  Description of Artificial Sequence: Synthetic oligonucleotide
cagggcauuugaaggcagc

SEQ ID NO: 789654 - RNA, 19 nt, Artificial Sequence
  Description of Artificial Sequence: Synthetic oligonucleotide
gucgagaggggcccguagc

SEQ ID NO: 789655 - RNA, 19 nt, Artificial Sequence
  Description of Artificial Sequence: Synthetic oligonucleotide
ugcugcgccaugugagccc

SEQ ID NO: 789656 - RNA, 19 nt, Artificial Sequence
  Description of Artificial Sequence: Synthetic oligonucleotide
cugaguggccaucgcagug

SEQ ID NO: 789657 - RNA, 19 nt, Artificial Sequence
  Description of Artificial Sequence: Synthetic oligonucleotide
ggcgugguaucuucagggg

SEQ ID NO: 789658 - RNA, 19 nt, Artificial Sequence
  Description of Artificial Sequence: Synthetic oligonucleotide
ucacuaggugcuguacugu

SEQ ID NO: 789659 - RNA, 19 nt, Artificial Sequence
  Description of Artificial Sequence: Synthetic oligonucleotide
acuaccaggccuacagugu

SEQ ID NO: 789660 - RNA, 19 nt, Artificial Sequence
  Description of Artificial Sequence: Synthetic oligonucleotide
ugcuauguagccgcuggau

SEQ ID NO: 789661 - RNA, 19 nt, Artificial Sequence
  Description of Artificial Sequence: Synthetic oligonucleotide
uucucguuggugugcguua

SEQ ID NO: 789662 - RNA, 19 nt, Artificial Sequence
  Description of Artificial Sequence: Synthetic oligonucleotide
ccauccaacaaaauaaacu

SEQ ID NO: 789663 - RNA, 19 nt, Artificial Sequence
  Description of Artificial Sequence: Synthetic oligonucleotide
gucaccaccuguggcgugg

SEQ ID NO: 789664 - RNA, 19 nt, Artificial Sequence
  Description of Artificial Sequence: Synthetic oligonucleotide
uauugagacugaggagcca

SEQ ID NO: 789665 - RNA, 19 nt, Artificial Sequence
  Description of Artificial Sequence: Synthetic oligonucleotide
gauguggccuguacgaugu

SEQ ID NO: 789666 - RNA, 19 nt, Artificial Sequence
  Description of Artificial Sequence: Synthetic oligonucleotide
gguaucuggaggcccuaag

SEQ ID NO: 789667 - RNA, 19 nt, Artificial Sequence
  Description of Artificial Sequence: Synthetic oligonucleotide
cugcagucaacucgaugug

SEQ ID NO: 789668 - RNA, 19 nt, Artificial Sequence
  Description of Artificial Sequence: Synthetic oligonucleotide
aagaucagcguugggccuu

SEQ ID NO: 789669 - RNA, 19 nt, Artificial Sequence
  Description of Artificial Sequence: Synthetic oligonucleotide
gccccgauauccaagauca

SEQ ID NO: 789670 - RNA, 19 nt, Artificial Sequence
  Description of Artificial Sequence: Synthetic oligonucleotide
gaccuggauaugauggcca

SEQ ID NO: 789671 - RNA, 19 nt, Artificial Sequence
  Description of Artificial Sequence: Synthetic oligonucleotide
gaugucaacuccgccucca

SEQ ID NO: 789672 - RNA, 19 nt, Artificial Sequence
  Description of Artificial Sequence: Synthetic oligonucleotide
ugaggugcccauuccgguu

SEQ ID NO: 789673 - RNA, 19 nt, Artificial Sequence
  Description of Artificial Sequence: Synthetic oligonucleotide
cugcucggccagcaaaggc

SEQ ID NO: 789674 - RNA, 19 nt, Artificial Sequence
  Description of Artificial Sequence: Synthetic oligonucleotide
cucaggaccauuucugggu

SEQ ID NO: 789675 - RNA, 19 nt, Artificial Sequence
  Description of Artificial Sequence: Synthetic oligonucleotide
caucaggacagaguaguga

SEQ ID NO: 789676 - RNA, 19 nt, Artificial Sequence
  Description of Artificial Sequence: Synthetic oligonucleotide
gacacuguagcuggcccca

SEQ ID NO: 789677 - RNA, 19 nt, Artificial Sequence
  Description of Artificial Sequence: Synthetic oligonucleotide
agggcauuugaaggcagca

SEQ ID NO: 789678 - RNA, 19 nt, Artificial Sequence
  Description of Artificial Sequence: Synthetic oligonucleotide
ucguggacuugggaaggag

SEQ ID NO: 789679 - RNA, 19 nt, Artificial Sequence
  Description of Artificial Sequence: Synthetic oligonucleotide
ugaacgccguccugagcga

SEQ ID NO: 789680 - RNA, 19 nt, Artificial Sequence
  Description of Artificial Sequence: Synthetic oligonucleotide
uguccgguaucuggaggcc

SEQ ID NO: 789681 - RNA, 19 nt, Artificial Sequence
  Description of Artificial Sequence: Synthetic oligonucleotide
aaucugcuguaggucgaga

SEQ ID NO: 789682 - RNA, 19 nt, Artificial Sequence
  Description of Artificial Sequence: Synthetic oligonucleotide
cuugugacucuccaucucu

SEQ ID NO: 789683 - RNA, 19 nt, Artificial Sequence
  Description of Artificial Sequence: Synthetic oligonucleotide
gucguacucgaugcccugg

SEQ ID NO: 789684 - RNA, 19 nt, Artificial Sequence
  Description of Artificial Sequence: Synthetic oligonucleotide
agauguguuccuggcucag

SEQ ID NO: 789685 - RNA, 19 nt, Artificial Sequence
  Description of Artificial Sequence: Synthetic oligonucleotide
uggcucucggcugccaagc

SEQ ID NO: 789686 - RNA, 19 nt, Artificial Sequence
  Description of Artificial Sequence: Synthetic oligonucleotide
accuggauaugauggccau

SEQ ID NO: 789687 - RNA, 19 nt, Artificial Sequence
  Description of Artificial Sequence: Synthetic oligonucleotide
gacagaguagugagggaaa

SEQ ID NO: 789688 - RNA, 19 nt, Artificial Sequence
  Description of Artificial Sequence: Synthetic oligonucleotide
uagucacuaggugcuguac

SEQ ID NO: 789689 - RNA, 19 nt, Artificial Sequence
  Description of Artificial Sequence: Synthetic oligonucleotide
aggcuuaaguacccagcau

SEQ ID NO: 789690 - RNA, 19 nt, Artificial Sequence
  Description of Artificial Sequence: Synthetic oligonucleotide
guagaugauuguggcacca

SEQ ID NO: 789691 - RNA, 19 nt, Artificial Sequence
  Description of Artificial Sequence: Synthetic oligonucleotide
gagcccggaccucaggcca

SEQ ID NO: 789692 - RNA, 19 nt, Artificial Sequence
  Description of Artificial Sequence: Synthetic oligonucleotide
cccgauauccaagaucagc

SEQ ID NO: 789693 - RNA, 19 nt, Artificial Sequence
  Description of Artificial Sequence: Synthetic oligonucleotide
gcugccuaccaguagaugu

SEQ ID NO: 789694 - RNA, 19 nt, Artificial Sequence
  Description of Artificial Sequence: Synthetic oligonucleotide
aucagcguugggccuuugu

SEQ ID NO: 789695 - RNA, 19 nt, Artificial Sequence
  Description of Artificial Sequence: Synthetic oligonucleotide
gaggcccuaaguaggacaa

SEQ ID NO: 789696 - RNA, 19 nt, Artificial Sequence
  Description of Artificial Sequence: Synthetic oligonucleotide
guacucgaugcccuggugu

SEQ ID NO: 789697 - RNA, 19 nt, Artificial Sequence
  Description of Artificial Sequence: Synthetic oligonucleotide
ugaugguaaugacgucgua

SEQ ID NO: 789698 - RNA, 19 nt, Artificial Sequence
  Description of Artificial Sequence: Synthetic oligonucleotide
cuggcucucggcugccaag

SEQ ID NO: 789699 - RNA, 19 nt, Artificial Sequence
  Description of Artificial Sequence: Synthetic oligonucleotide
uggccaucgcaguggacuc

SEQ ID NO: 789700 - RNA, 19 nt, Artificial Sequence
  Description of Artificial Sequence: Synthetic oligonucleotide
guagugagggaaagucuca

SEQ ID NO: 789701 - RNA, 19 nt, Artificial Sequence
  Description of Artificial Sequence: Synthetic oligonucleotide
uguggccccuagcucccgc

SEQ ID NO: 789702 - RNA, 19 nt, Artificial Sequence
  Description of Artificial Sequence: Synthetic oligonucleotide
agaggcgaagcuacauuga

SEQ ID NO: 789703 - RNA, 19 nt, Artificial Sequence
  Description of Artificial Sequence: Synthetic oligonucleotide
cuguacgaugugccaggag

SEQ ID NO: 789704 - RNA, 19 nt, Artificial Sequence
  Description of Artificial Sequence: Synthetic oligonucleotide
gugguaucuucaggggaag

SEQ ID NO: 789705 - RNA, 19 nt, Artificial Sequence
  Description of Artificial Sequence: Synthetic oligonucleotide
ccuaccaguagaugucaac

SEQ ID NO: 789706 - RNA, 19 nt, Artificial Sequence
  Description of Artificial Sequence: Synthetic oligonucleotide
ccgcucuggacccaggacc

SEQ ID NO: 789707 - RNA, 19 nt, Artificial Sequence
  Description of Artificial Sequence: Synthetic oligonucleotide
cccauuccgguugaaacgc

SEQ ID NO: 789708 - RNA, 19 nt, Artificial Sequence
  Description of Artificial Sequence: Synthetic oligonucleotide
gcugucugaguggccaucg

SEQ ID NO: 789709 - RNA, 19 nt, Artificial Sequence
  Description of Artificial Sequence: Synthetic oligonucleotide
gucagggcauuugaaggca

SEQ ID NO: 789710 - RNA, 19 nt, Artificial Sequence
  Description of Artificial Sequence: Synthetic oligonucleotide
gaguagugagggaaagucu

SEQ ID NO: 789711 - RNA, 19 nt, Artificial Sequence
  Description of Artificial Sequence: Synthetic oligonucleotide
ccugagcgaugauauacug

SEQ ID NO: 789712 - RNA, 19 nt, Artificial Sequence
  Description of Artificial Sequence: Synthetic oligonucleotide
gcaggcuuaaguacccagc

SEQ ID NO: 789713 - RNA, 19 nt, Artificial Sequence
  Description of Artificial Sequence: Synthetic oligonucleotide
ggaaugggguaccuugcuc

SEQ ID NO: 789714 - RNA, 19 nt, Artificial Sequence
  Description of Artificial Sequence: Synthetic oligonucleotide
uccagauggcaaggcaauc

SEQ ID NO: 789715 - RNA, 19 nt, Artificial Sequence
  Description of Artificial Sequence: Synthetic oligonucleotide
agucauccgugaugguaau

SEQ ID NO: 789716 - RNA, 19 nt, Artificial Sequence
  Description of Artificial Sequence: Synthetic oligonucleotide
accaccuguggcgugguau

SEQ ID NO: 789717 - RNA, 19 nt, Artificial Sequence
  Description of Artificial Sequence: Synthetic oligonucleotide
uggucccuuuauugagacu

SEQ ID NO: 789718 - RNA, 19 nt, Artificial Sequence
  Description of Artificial Sequence: Synthetic oligonucleotide
gagcgaugauauacugaac

SEQ ID NO: 789719 - RNA, 19 nt, Artificial Sequence
  Description of Artificial Sequence: Synthetic oligonucleotide
cucguuggugugcguuagc

SEQ ID NO: 789720 - RNA, 19 nt, Artificial Sequence
  Description of Artificial Sequence: Synthetic oligonucleotide
gauauaaccucaggaccau

SEQ ID NO: 789721 - RNA, 19 nt, Artificial Sequence
  Description of Artificial Sequence: Synthetic oligonucleotide
aggggcccguagcuggcuc

SEQ ID NO: 789722 - RNA, 19 nt, Artificial Sequence
  Description of Artificial Sequence: Synthetic oligonucleotide
caugugagcccggaccuca

SEQ ID NO: 789723 - RNA, 19 nt, Artificial Sequence
  Description of Artificial Sequence: Synthetic oligonucleotide
aucggccaccgcuguaaca

SEQ ID NO: 789724 - RNA, 19 nt, Artificial Sequence
  Description of Artificial Sequence: Synthetic oligonucleotide
cgacauacuccugaggcag

SEQ ID NO: 789725 - RNA, 19 nt, Artificial Sequence
  Description of Artificial Sequence: Synthetic oligonucleotide
caaagauguguuccuggcu

SEQ ID NO: 789726 - RNA, 19 nt, Artificial Sequence
  Description of Artificial Sequence: Synthetic oligonucleotide
cgaugauauacugaaccug

SEQ ID NO: 789727 - RNA, 19 nt, Artificial Sequence
  Description of Artificial Sequence: Synthetic oligonucleotide
uccuugcugguagaugauu

SEQ ID NO: 789728 - RNA, 19 nt, Artificial Sequence
  Description of Artificial Sequence: Synthetic oligonucleotide
uggugugcguuagcaugug

SEQ ID NO: 789729 - RNA, 19 nt, Artificial Sequence
  Description of Artificial Sequence: Synthetic oligonucleotide
ucaacucgauguggccugu

SEQ ID NO: 789730 - RNA, 19 nt, Artificial Sequence
  Description of Artificial Sequence: Synthetic oligonucleotide
augucaacuccgccuccau

SEQ ID NO: 789731 - RNA, 19 nt, Artificial Sequence
  Description of Artificial Sequence: Synthetic oligonucleotide
acugaaccugguugucauu

SEQ ID NO: 789732 - RNA, 19 nt, Artificial Sequence
  Description of Artificial Sequence: Synthetic oligonucleotide
gugcugaacgccguccuga

SEQ ID NO: 789733 - RNA, 19 nt, Artificial Sequence
  Description of Artificial Sequence: Synthetic oligonucleotide
ugcgccaugugagcccgga

SEQ ID NO: 789734 - RNA, 19 nt, Artificial Sequence
  Description of Artificial Sequence: Synthetic oligonucleotide
gcgaugauauacugaaccu

SEQ ID NO: 789735 - RNA, 19 nt, Artificial Sequence
  Description of Artificial Sequence: Synthetic oligonucleotide
ggccuguacgaugugccag

SEQ ID NO: 789736 - RNA, 19 nt, Artificial Sequence
  Description of Artificial Sequence: Synthetic oligonucleotide
gcuguaggucgagaggggc

SEQ ID NO: 789737 - RNA, 19 nt, Artificial Sequence
  Description of Artificial Sequence: Synthetic oligonucleotide
ggccccgauauccaagauc

SEQ ID NO: 789738 - RNA, 19 nt, Artificial Sequence
  Description of Artificial Sequence: Synthetic oligonucleotide
ggguggcccuuucacacug

SEQ ID NO: 789739 - RNA, 19 nt, Artificial Sequence
  Description of Artificial Sequence: Synthetic oligonucleotide
gagagcuggccccgauauc

SEQ ID NO: 789740 - RNA, 19 nt, Artificial Sequence
  Description of Artificial Sequence: Synthetic oligonucleotide
guggguacuaccaggccua

SEQ ID NO: 789741 - RNA, 19 nt, Artificial Sequence
  Description of Artificial Sequence: Synthetic oligonucleotide
gugcugcgccaugugagcc

SEQ ID NO: 789742 - RNA, 19 nt, Artificial Sequence
  Description of Artificial Sequence: Synthetic oligonucleotide
gugaugguaaugacgucgu

SEQ ID NO: 789743 - RNA, 19 nt, Artificial Sequence
  Description of Artificial Sequence: Synthetic oligonucleotide
guaggucgagaggggcccg

SEQ ID NO: 789744 - RNA, 19 nt, Artificial Sequence
  Description of Artificial Sequence: Synthetic oligonucleotide
ccgcuguaacagcagaaug

SEQ ID NO: 789745 - RNA, 19 nt, Artificial Sequence
  Description of Artificial Sequence: Synthetic oligonucleotide
gcgagcauggaaggggcag

SEQ ID NO: 789746 - RNA, 19 nt, Artificial Sequence
  Description of Artificial Sequence: Synthetic oligonucleotide
uggaggcccuaaguaggac

SEQ ID NO: 789747 - RNA, 19 nt, Artificial Sequence
  Description of Artificial Sequence: Synthetic oligonucleotide
guacgaugugccaggagcu

SEQ ID NO: 789748 - RNA, 19 nt, Artificial Sequence
  Description of Artificial Sequence: Synthetic oligonucleotide
guagccgcuggaugugaaa

SEQ ID NO: 789749 - RNA, 19 nt, Artificial Sequence
  Description of Artificial Sequence: Synthetic oligonucleotide
gucauccgugaugguaaug

SEQ ID NO: 789750 - RNA, 19 nt, Artificial Sequence
  Description of Artificial Sequence: Synthetic oligonucleotide
ccaaaugauccagauggca

SEQ ID NO: 789751 - RNA, 19 nt, Artificial Sequence
  Description of Artificial Sequence: Synthetic oligonucleotide
guccgguaucuggaggccc

SEQ ID NO: 789752 - RNA, 19 nt, Artificial Sequence
  Description of Artificial Sequence: Synthetic oligonucleotide
cugucuggccaucugcugu

SEQ ID NO: 789753 - RNA, 19 nt, Artificial Sequence
  Description of Artificial Sequence: Synthetic oligonucleotide
ugcaggaaugggguaccuu

SEQ ID NO: 789754 - RNA, 19 nt, Artificial Sequence
  Description of Artificial Sequence: Synthetic oligonucleotide
aggagagcuggccccgaua

SEQ ID NO: 789755 - RNA, 19 nt, Artificial Sequence
  Description of Artificial Sequence: Synthetic oligonucleotide
gcgugguaucuucagggga

SEQ ID NO: 789756 - RNA, 19 nt, Artificial Sequence
  Description of Artificial Sequence: Synthetic oligonucleotide
caucggccaccgcuguaac

SEQ ID NO: 789757 - RNA, 19 nt, Artificial Sequence
  Description of Artificial Sequence: Synthetic oligonucleotide
gccauuggcgagcauggaa

SEQ ID NO: 789758 - RNA, 19 nt, Artificial Sequence
  Description of Artificial Sequence: Synthetic oligonucleotide
gacuugggaaggagaugga

SEQ ID NO: 789759 - RNA, 19 nt, Artificial Sequence
  Description of Artificial Sequence: Synthetic oligonucleotide
aucguggacuugggaagga

SEQ ID NO: 789760 - RNA, 19 nt, Artificial Sequence
  Description of Artificial Sequence: Synthetic oligonucleotide
ccuguggcgugguaucuuc

SEQ ID NO: 789761 - RNA, 19 nt, Artificial Sequence
  Description of Artificial Sequence: Synthetic oligonucleotide
auauaaccucaggaccauu

SEQ ID NO: 789762 - RNA, 19 nt, Artificial Sequence
  Description of Artificial Sequence: Synthetic oligonucleotide
acacaggaacauacuggau

SEQ ID NO: 789763 - RNA, 19 nt, Artificial Sequence
  Description of Artificial Sequence: Synthetic oligonucleotide
caggccuacaguguugcua

SEQ ID NO: 789764 - RNA, 19 nt, Artificial Sequence
  Description of Artificial Sequence: Synthetic oligonucleotide
aggcccuaaguaggacaag

SEQ ID NO: 789765 - RNA, 19 nt, Artificial Sequence
  Description of Artificial Sequence: Synthetic oligonucleotide
cacugcuauguagccgcug

SEQ ID NO: 789766 - RNA, 19 nt, Artificial Sequence
  Description of Artificial Sequence: Synthetic oligonucleotide
gucaagggauacugacugu

SEQ ID NO: 789767 - RNA, 19 nt, Artificial Sequence
  Description of Artificial Sequence: Synthetic oligonucleotide
aggcgaagcuacauugauu

SEQ ID NO: 789768 - RNA, 19 nt, Artificial Sequence
  Description of Artificial Sequence: Synthetic oligonucleotide
uggguacuaccaggccuac

SEQ ID NO: 789769 - RNA, 19 nt, Artificial Sequence
  Description of Artificial Sequence: Synthetic oligonucleotide
gucccuuuauugagacuga

SEQ ID NO: 789770 - RNA, 19 nt, Artificial Sequence
  Description of Artificial Sequence: Synthetic oligonucleotide
ugggccuuuguggcucagu

SEQ ID NO: 789771 - RNA, 19 nt, Artificial Sequence
  Description of Artificial Sequence: Synthetic oligonucleotide
guacuaccaggccuacagu

SEQ ID NO: 789772 - RNA, 19 nt, Artificial Sequence
  Description of Artificial Sequence: Synthetic oligonucleotide
ggagagcuggccccgauau

SEQ ID NO: 789773 - RNA, 19 nt, Artificial Sequence
  Description of Artificial Sequence: Synthetic oligonucleotide
cuuagaggcgaagcuacau

SEQ ID NO: 789774 - RNA, 19 nt, Artificial Sequence
  Description of Artificial Sequence: Synthetic oligonucleotide
cgauguggccuguacgaug

SEQ ID NO: 789775 - RNA, 19 nt, Artificial Sequence
  Description of Artificial Sequence: Synthetic oligonucleotide
ggguaacaagcugcuggcc

SEQ ID NO: 789776 - RNA, 19 nt, Artificial Sequence
  Description of Artificial Sequence: Synthetic oligonucleotide
cugcuauguagccgcugga

SEQ ID NO: 789777 - RNA, 19 nt, Artificial Sequence
  Description of Artificial Sequence: Synthetic oligonucleotide
cuagcucccgcugggagcu

SEQ ID NO: 789778 - RNA, 19 nt, Artificial Sequence
  Description of Artificial Sequence: Synthetic oligonucleotide
gggguaucguggacuuggg

SEQ ID NO: 789779 - RNA, 19 nt, Artificial Sequence
  Description of Artificial Sequence: Synthetic oligonucleotide
ggacuccugcaggaauggg

SEQ ID NO: 789780 - RNA, 19 nt, Artificial Sequence
  Description of Artificial Sequence: Synthetic oligonucleotide
uuacacuggugaggccuua

SEQ ID NO: 789781 - RNA, 19 nt, Artificial Sequence
  Description of Artificial Sequence: Synthetic oligonucleotide
uaggucgagaggggcccgu

SEQ ID NO: 789782 - RNA, 19 nt, Artificial Sequence
  Description of Artificial Sequence: Synthetic oligonucleotide
gccccuagcucccgcuggg

SEQ ID NO: 789783 - RNA, 19 nt, Artificial Sequence
  Description of Artificial Sequence: Synthetic oligonucleotide
gcaucaggacagaguagug

SEQ ID NO: 789784 - RNA, 19 nt, Artificial Sequence
  Description of Artificial Sequence: Synthetic oligonucleotide
gcuggccccgauauccaag

SEQ ID NO: 789785 - RNA, 19 nt, Artificial Sequence
  Description of Artificial Sequence: Synthetic oligonucleotide
ccaccuguggcgugguauc

SEQ ID NO: 789786 - RNA, 19 nt, Artificial Sequence
  Description of Artificial Sequence: Synthetic oligonucleotide
cuuagggcaucaggacaga

SEQ ID NO: 789787 - RNA, 19 nt, Artificial Sequence
  Description of Artificial Sequence: Synthetic oligonucleotide
gcugaacgccguccugagc

SEQ ID NO: 789788 - RNA, 19 nt, Artificial Sequence
  Description of Artificial Sequence: Synthetic oligonucleotide
accccaugacuggacugga

SEQ ID NO: 789789 - RNA, 19 nt, Artificial Sequence
  Description of Artificial Sequence: Synthetic oligonucleotide
ggguaucguggacuuggga

SEQ ID NO: 789790 - RNA, 19 nt, Artificial Sequence
  Description of Artificial Sequence: Synthetic oligonucleotide
ccuugcucauacuggaugu

SEQ ID NO: 789791 - RNA, 19 nt, Artificial Sequence
  Description of Artificial Sequence: Synthetic oligonucleotide
gggcaucaggacagaguag

SEQ ID NO: 789792 - RNA, 19 nt, Artificial Sequence
  Description of Artificial Sequence: Synthetic oligonucleotide
agcaucggccaccgcugua

SEQ ID NO: 789793 - RNA, 19 nt, Artificial Sequence
  Description of Artificial Sequence: Synthetic oligonucleotide
cuaccaggccuacaguguu

SEQ ID NO: 789794 - RNA, 19 nt, Artificial Sequence
  Description of Artificial Sequence: Synthetic oligonucleotide
gggauacugacuguccggu

SEQ ID NO: 789795 - RNA, 19 nt, Artificial Sequence
  Description of Artificial Sequence: Synthetic oligonucleotide
ccggaccucaggccauugg

SEQ ID NO: 789796 - RNA, 19 nt, Artificial Sequence
  Description of Artificial Sequence: Synthetic oligonucleotide
cugggccacaaagaugugu

SEQ ID NO: 789797 - RNA, 19 nt, Artificial Sequence
  Description of Artificial Sequence: Synthetic oligonucleotide
ggauacugacuguccggua

SEQ ID NO: 789798 - RNA, 19 nt, Artificial Sequence
  Description of Artificial Sequence: Synthetic oligonucleotide
gugcccauuccgguugaaa

SEQ ID NO: 789799 - RNA, 19 nt, Artificial Sequence
  Description of Artificial Sequence: Synthetic oligonucleotide
cagugccaaacaggcccug

SEQ ID NO: 789800 - RNA, 19 nt, Artificial Sequence
  Description of Artificial Sequence: Synthetic oligonucleotide
cagcaugggcccgcuugug

SEQ ID NO: 789801 - RNA, 19 nt, Artificial Sequence
  Description of Artificial Sequence: Synthetic oligonucleotide
caugggcccgcuugugacu

SEQ ID NO: 789802 - RNA, 19 nt, Artificial Sequence
  Description of Artificial Sequence: Synthetic oligonucleotide
ccuagucuccaggagagcu

SEQ ID NO: 789803 - RNA, 19 nt, Artificial Sequence
  Description of Artificial Sequence: Synthetic oligonucleotide
gacuggacuggagggcagu

SEQ ID NO: 789804 - RNA, 19 nt, Artificial Sequence
  Description of Artificial Sequence: Synthetic oligonucleotide
ggcugccuaccaguagaug

SEQ ID NO: 789805 - RNA, 19 nt, Artificial Sequence
  Description of Artificial Sequence: Synthetic oligonucleotide
gcaucggccaccgcuguaa

SEQ ID NO: 789806 - RNA, 19 nt, Artificial Sequence
  Description of Artificial Sequence: Synthetic oligonucleotide
gaucagcguugggccuuug

SEQ ID NO: 789807 - RNA, 19 nt, Artificial Sequence
  Description of Artificial Sequence: Synthetic oligonucleotide
cuucucguuggugugcguu

SEQ ID NO: 789808 - RNA, 19 nt, Artificial Sequence
  Description of Artificial Sequence: Synthetic oligonucleotide
gggcuguagaagcuccagu

SEQ ID NO: 789809 - RNA, 19 nt, Artificial Sequence
  Description of Artificial Sequence: Synthetic oligonucleotide
aggccucugagcacaccuu

SEQ ID NO: 789810 - RNA, 19 nt, Artificial Sequence
  Description of Artificial Sequence: Synthetic oligonucleotide
ggccaucagggaccacgac

SEQ ID NO: 789811 - RNA, 19 nt, Artificial Sequence
  Description of Artificial Sequence: Synthetic oligonucleotide
ccguccugagcgaugauau

SEQ ID NO: 789812 - RNA, 19 nt, Artificial Sequence
  Description of Artificial Sequence: Synthetic oligonucleotide
ccccgauauccaagaucag

SEQ ID NO: 789813 - RNA, 19 nt, Artificial Sequence
  Description of Artificial Sequence: Synthetic oligonucleotide
cagcaggcuuaaguaccca

SEQ ID NO: 789814 - RNA, 19 nt, Artificial Sequence
  Description of Artificial Sequence: Synthetic oligonucleotide
gcaccacuuagggcaucag

SEQ ID NO: 789815 - RNA, 19 nt, Artificial Sequence
  Description of Artificial Sequence: Synthetic oligonucleotide
gauggccaucagggaccac

SEQ ID NO: 789816 - RNA, 19 nt, Artificial Sequence
  Description of Artificial Sequence: Synthetic oligonucleotide
cguugggccuuuguggcuc

SEQ ID NO: 789817 - RNA, 19 nt, Artificial Sequence
  Description of Artificial Sequence: Synthetic oligonucleotide
ccgugaugguaaugacguc

SEQ ID NO: 789818 - RNA, 19 nt, Artificial Sequence
  Description of Artificial Sequence: Synthetic oligonucleotide
ggcccguagcuggcucucg

SEQ ID NO: 789819 - RNA, 19 nt, Artificial Sequence
  Description of Artificial Sequence: Synthetic oligonucleotide
cgucguacucgaugcccug

SEQ ID NO: 789820 - RNA, 19 nt, Artificial Sequence
  Description of Artificial Sequence: Synthetic oligonucleotide
gcagaaugugcugcagccu

SEQ ID NO: 789821 - RNA, 19 nt, Artificial Sequence
  Description of Artificial Sequence: Synthetic oligonucleotide
ggaccacgacauacuccug

SEQ ID NO: 789822 - RNA, 19 nt, Artificial Sequence
  Description of Artificial Sequence: Synthetic oligonucleotide
gccguccugagcgaugaua

SEQ ID NO: 789823 - RNA, 19 nt, Artificial Sequence
  Description of Artificial Sequence: Synthetic oligonucleotide
cuguacugucuggccaucu

SEQ ID NO: 789824 - RNA, 19 nt, Artificial Sequence
  Description of Artificial Sequence: Synthetic oligonucleotide
gccgcuggaugugaaauuu

SEQ ID NO: 789825 - RNA, 19 nt, Artificial Sequence
  Description of Artificial Sequence: Synthetic oligonucleotide
aggucgagaggggcccgua

SEQ ID NO: 789826 - RNA, 19 nt, Artificial Sequence
  Description of Artificial Sequence: Synthetic oligonucleotide
gaacgccguccugagcgau

SEQ ID NO: 789827 - RNA, 19 nt, Artificial Sequence
  Description of Artificial Sequence: Synthetic oligonucleotide
gguggggaaguggguacua

SEQ ID NO: 789828 - RNA, 19 nt, Artificial Sequence
  Description of Artificial Sequence: Synthetic oligonucleotide
agcccggaccucaggccau

SEQ ID NO: 789829 - RNA, 19 nt, Artificial Sequence
  Description of Artificial Sequence: Synthetic oligonucleotide
ccaugugagcccggaccuc

SEQ ID NO: 789830 - RNA, 19 nt, Artificial Sequence
  Description of Artificial Sequence: Synthetic oligonucleotide
ccuguacgaugugccagga

SEQ ID NO: 789831 - RNA, 19 nt, Artificial Sequence
  Description of Artificial Sequence: Synthetic oligonucleotide
caccuguggcgugguaucu

SEQ ID NO: 789832 - RNA, 19 nt, Artificial Sequence
  Description of Artificial Sequence: Synthetic oligonucleotide
gccuaccaguagaugucaa

SEQ ID NO: 789833 - RNA, 19 nt, Artificial Sequence
  Description of Artificial Sequence: Synthetic oligonucleotide
cagcaucggccaccgcugu

SEQ ID NO: 789834 - RNA, 19 nt, Artificial Sequence
  Description of Artificial Sequence: Synthetic oligonucleotide
cguuagcaugugccgccuc

SEQ ID NO: 789835 - RNA, 19 nt, Artificial Sequence
  Description of Artificial Sequence: Synthetic oligonucleotide
ccguagcuggcucucggcu

SEQ ID NO: 789836 - RNA, 19 nt, Artificial Sequence
  Description of Artificial Sequence: Synthetic oligonucleotide
ggcucgggcuguagaagcu

SEQ ID NO: 789837 - RNA, 19 nt, Artificial Sequence
  Description of Artificial Sequence: Synthetic oligonucleotide
caacucgauguggccugua

SEQ ID NO: 789838 - RNA, 19 nt, Artificial Sequence
  Description of Artificial Sequence: Synthetic oligonucleotide
ggcucucggcugccaagcu

SEQ ID NO: 789839 - RNA, 19 nt, Artificial Sequence
  Description of Artificial Sequence: Synthetic oligonucleotide
gggcccguagcuggcucuc

SEQ ID NO: 789840 - RNA, 19 nt, Artificial Sequence
  Description of Artificial Sequence: Synthetic oligonucleotide
cugcaggaaugggguaccu

SEQ ID NO: 789841 - RNA, 19 nt, Artificial Sequence
  Description of Artificial Sequence: Synthetic oligonucleotide
caggagagcuggccccgau

SEQ ID NO: 789842 - RNA, 19 nt, Artificial Sequence
  Description of Artificial Sequence: Synthetic oligonucleotide
ccauuccgguugaaacgcu

SEQ ID NO: 789843 - RNA, 19 nt, Artificial Sequence
  Description of Artificial Sequence: Synthetic oligonucleotide
ggccuacaguguugcuagu

SEQ ID NO: 789844 - RNA, 19 nt, Artificial Sequence
  Description of Artificial Sequence: Synthetic oligonucleotide
gcguuagcaugugccgccu

SEQ ID NO: 789845 - RNA, 19 nt, Artificial Sequence
  Description of Artificial Sequence: Synthetic oligonucleotide
cccggaccucaggccauug

SEQ ID NO: 789846 - RNA, 19 nt, Artificial Sequence
  Description of Artificial Sequence: Synthetic oligonucleotide
cccgcugggagcucauguu

SEQ ID NO: 789847 - RNA, 19 nt, Artificial Sequence
  Description of Artificial Sequence: Synthetic oligonucleotide
cguccugagcgaugauaua

SEQ ID NO: 789848 - RNA, 19 nt, Artificial Sequence
  Description of Artificial Sequence: Synthetic oligonucleotide
cgagcauggaaggggcagu

SEQ ID NO: 789849 - RNA, 19 nt, Artificial Sequence
  Description of Artificial Sequence: Synthetic oligonucleotide
cgguaucuggaggcccuaa

SEQ ID NO: 789850 - RNA, 19 nt, Artificial Sequence
  Description of Artificial Sequence: Synthetic oligonucleotide
ccauuucuggguggcccuu

SEQ ID NO: 789851 - RNA, 19 nt, Artificial Sequence
  Description of Artificial Sequence: Synthetic oligonucleotide
cgguggggaaguggguacu

SEQ ID NO: 789852 - RNA, 19 nt, Artificial Sequence
  Description of Artificial Sequence: Synthetic oligonucleotide
gcccggaccucaggccauu

SEQ ID NO: 789853 - RNA, 19 nt, Artificial Sequence
  Description of Artificial Sequence: Synthetic oligonucleotide
gcccagcaugggcccgcuu

SEQ ID NO: 789854 - RNA, 19 nt, Artificial Sequence
  Description of Artificial Sequence: Synthetic oligonucleotide
acaucuacguaauagaugg

SEQ ID NO: 789855 - RNA, 19 nt, Artificial Sequence
  Description of Artificial Sequence: Synthetic oligonucleotide
gaugcguccgcucagaagg

SEQ ID NO: 789856 - RNA, 19 nt, Artificial Sequence
  Description of Artificial Sequence: Synthetic oligonucleotide
agacaccuaucucagagcc

SEQ ID NO: 789857 - RNA, 19 nt, Artificial Sequence
  Description of Artificial Sequence: Synthetic oligonucleotide
ugucgaugaagauagcucc

SEQ ID NO: 789858 - RNA, 19 nt, Artificial Sequence
  Description of Artificial Sequence: Synthetic oligonucleotide
aagacaccuaucucagagc

SEQ ID NO: 789859 - RNA, 19 nt, Artificial Sequence
  Description of Artificial Sequence: Synthetic oligonucleotide
cuacguaauagauggagcc

SEQ ID NO: 789860 - RNA, 19 nt, Artificial Sequence
  Description of Artificial Sequence: Synthetic oligonucleotide
ggugguuagguucaaaagg

SEQ ID NO: 789861 - RNA, 19 nt, Artificial Sequence
  Description of Artificial Sequence: Synthetic oligonucleotide
cauggcaguagucaggucc

SEQ ID NO: 789862 - RNA, 19 nt, Artificial Sequence
  Description of Artificial Sequence: Synthetic oligonucleotide
ucuacguaauagauggagc

SEQ ID NO: 789863 - RNA, 19 nt, Artificial Sequence
  Description of Artificial Sequence: Synthetic oligonucleotide
cauugaagaggacauuucc

SEQ ID NO: 789864 - RNA, 19 nt, Artificial Sequence
  Description of Artificial Sequence: Synthetic oligonucleotide
gaagaggacauuuccgcag

SEQ ID NO: 789865 - RNA, 19 nt, Artificial Sequence
  Description of Artificial Sequence: Synthetic oligonucleotide
gagaucaugccucggaagc

SEQ ID NO: 789866 - RNA, 19 nt, Artificial Sequence
  Description of Artificial Sequence: Synthetic oligonucleotide
ucagaguugagaugcgucc

SEQ ID NO: 789867 - RNA, 19 nt, Artificial Sequence
  Description of Artificial Sequence: Synthetic oligonucleotide
uaauagauggagccauugc

SEQ ID NO: 789868 - RNA, 19 nt, Artificial Sequence
  Description of Artificial Sequence: Synthetic oligonucleotide
ucguuaagaguguucuugg

SEQ ID NO: 789869 - RNA, 19 nt, Artificial Sequence
  Description of Artificial Sequence: Synthetic oligonucleotide
uucguuaagaguguucuug

SEQ ID NO: 789870 - RNA, 19 nt, Artificial Sequence
  Description of Artificial Sequence: Synthetic oligonucleotide
gaaaaugcuagcugccagc

SEQ ID NO: 789871 - RNA, 19 nt, Artificial Sequence
  Description of Artificial Sequence: Synthetic oligonucleotide
uggaagacaccuaucucag

SEQ ID NO: 789872 - RNA, 19 nt, Artificial Sequence
  Description of Artificial Sequence: Synthetic oligonucleotide
agggaaagugccccgaggg

SEQ ID NO: 789873 - RNA, 19 nt, Artificial Sequence
  Description of Artificial Sequence: Synthetic oligonucleotide
uucccuuaccugcaggcgg

SEQ ID NO: 789874 - RNA, 19 nt, Artificial Sequence
  Description of Artificial Sequence: Synthetic oligonucleotide
auugaagaggacauuuccg

SEQ ID NO: 789875 - RNA, 19 nt, Artificial Sequence
  Description of Artificial Sequence: Synthetic oligonucleotide
ugcuccgucgaacaggggc

SEQ ID NO: 789876 - RNA, 19 nt, Artificial Sequence
  Description of Artificial Sequence: Synthetic oligonucleotide
aauugggcuucauggagga

SEQ ID NO: 789877 - RNA, 19 nt, Artificial Sequence
  Description of Artificial Sequence: Synthetic oligonucleotide
cagagcgccaccaagcacc

SEQ ID NO: 789878 - RNA, 19 nt, Artificial Sequence
  Description of Artificial Sequence: Synthetic oligonucleotide
aacccucacacuccagcac

SEQ ID NO: 789879 - RNA, 19 nt, Artificial Sequence
  Description of Artificial Sequence: Synthetic oligonucleotide
uauugcuccgucgaacagg

SEQ ID NO: 789880 - RNA, 19 nt, Artificial Sequence
  Description of Artificial Sequence: Synthetic oligonucleotide
aucuacguaauagauggag

SEQ ID NO: 789881 - RNA, 19 nt, Artificial Sequence
  Description of Artificial Sequence: Synthetic oligonucleotide
gaauugggcuucauggagg

SEQ ID NO: 789882 - RNA, 19 nt, Artificial Sequence
  Description of Artificial Sequence: Synthetic oligonucleotide
augcuagcggcguggaacc

SEQ ID NO: 789883 - RNA, 19 nt, Artificial Sequence
  Description of Artificial Sequence: Synthetic oligonucleotide
aaggccucaacugguacuc

SEQ ID NO: 789884 - RNA, 19 nt, Artificial Sequence
  Description of Artificial Sequence: Synthetic oligonucleotide
uucagaugaaugacuuccc

SEQ ID NO: 789885 - RNA, 19 nt, Artificial Sequence
  Description of Artificial Sequence: Synthetic oligonucleotide
gggucuaacucuuuggugc

SEQ ID NO: 789886 - RNA, 19 nt, Artificial Sequence
  Description of Artificial Sequence: Synthetic oligonucleotide
uagaauugggcuucaugga

SEQ ID NO: 789887 - RNA, 19 nt, Artificial Sequence
  Description of Artificial Sequence: Synthetic oligonucleotide
gguagauagccauugaaga

SEQ ID NO: 789888 - RNA, 19 nt, Artificial Sequence
  Description of Artificial Sequence: Synthetic oligonucleotide
agaaucucgccacccgugg

SEQ ID NO: 789889 - RNA, 19 nt, Artificial Sequence
  Description of Artificial Sequence: Synthetic oligonucleotide
uucagaguugagaugcguc

SEQ ID NO: 789890 - RNA, 19 nt, Artificial Sequence
  Description of Artificial Sequence: Synthetic oligonucleotide
ugagcgucugccgagaggu

SEQ ID NO: 789891 - RNA, 19 nt, Artificial Sequence
  Description of Artificial Sequence: Synthetic oligonucleotide
cacgaugacccgcacaacc

SEQ ID NO: 789892 - RNA, 19 nt, Artificial Sequence
  Description of Artificial Sequence: Synthetic oligonucleotide
ugccgagaggugcugaacc

SEQ ID NO: 789893 - RNA, 19 nt, Artificial Sequence
  Description of Artificial Sequence: Synthetic oligonucleotide
ugagcccauagaauugggc

SEQ ID NO: 789894 - RNA, 19 nt, Artificial Sequence
  Description of Artificial Sequence: Synthetic oligonucleotide
accguagggaccgaugucg

SEQ ID NO: 789895 - RNA, 19 nt, Artificial Sequence
  Description of Artificial Sequence: Synthetic oligonucleotide
agugccccgagggaaagcc

SEQ ID NO: 789896 - RNA, 19 nt, Artificial Sequence
  Description of Artificial Sequence: Synthetic oligonucleotide
acaaggccucaacugguac

SEQ ID NO: 789897 - RNA, 19 nt, Artificial Sequence
  Description of Artificial Sequence: Synthetic oligonucleotide
gaucaugccucggaagcgg

SEQ ID NO: 789898 - RNA, 19 nt, Artificial Sequence
  Description of Artificial Sequence: Synthetic oligonucleotide
ugucaggggagucccaaga

SEQ ID NO: 789899 - RNA, 19 nt, Artificial Sequence
  Description of Artificial Sequence: Synthetic oligonucleotide
acccgcacaaccccugagc

SEQ ID NO: 789900 - RNA, 19 nt, Artificial Sequence
  Description of Artificial Sequence: Synthetic oligonucleotide
auugcuccgucgaacaggg

SEQ ID NO: 789901 - RNA, 19 nt, Artificial Sequence
  Description of Artificial Sequence: Synthetic oligonucleotide
agcagguagcgucggggcc

SEQ ID NO: 789902 - RNA, 19 nt, Artificial Sequence
  Description of Artificial Sequence: Synthetic oligonucleotide
ugugaaggcggucgugggc

SEQ ID NO: 789903 - RNA, 19 nt, Artificial Sequence
  Description of Artificial Sequence: Synthetic oligonucleotide
aagcgggucacggaccacg

SEQ ID NO: 789904 - RNA, 19 nt, Artificial Sequence
  Description of Artificial Sequence: Synthetic oligonucleotide
aaccaguggagugagccca

SEQ ID NO: 789905 - RNA, 19 nt, Artificial Sequence
  Description of Artificial Sequence: Synthetic oligonucleotide
uaacucuuuggugcgcagg

SEQ ID NO: 789906 - RNA, 19 nt, Artificial Sequence
  Description of Artificial Sequence: Synthetic oligonucleotide
acgaugacccgcacaaccc

SEQ ID NO: 789907 - RNA, 19 nt, Artificial Sequence
  Description of Artificial Sequence: Synthetic oligonucleotide
uacguaauagauggagcca

SEQ ID NO: 789908 - RNA, 19 nt, Artificial Sequence
  Description of Artificial Sequence: Synthetic oligonucleotide
uuagguucaaaaggaaguu

SEQ ID NO: 789909 - RNA, 19 nt, Artificial Sequence
  Description of Artificial Sequence: Synthetic oligonucleotide
guaauagauggagccauug

SEQ ID NO: 789910 - RNA, 19 nt, Artificial Sequence
  Description of Artificial Sequence: Synthetic oligonucleotide
cuuccgucaggccaccugc

SEQ ID NO: 789911 - RNA, 19 nt, Artificial Sequence
  Description of Artificial Sequence: Synthetic oligonucleotide
aguggagugagcccauaga

SEQ ID NO: 789912 - RNA, 19 nt, Artificial Sequence
  Description of Artificial Sequence: Synthetic oligonucleotide
gaagcuuccugccccgcgc

SEQ ID NO: 789913 - RNA, 19 nt, Artificial Sequence
  Description of Artificial Sequence: Synthetic oligonucleotide
gugaaggcggucgugggcg

SEQ ID NO: 789914 - RNA, 19 nt, Artificial Sequence
  Description of Artificial Sequence: Synthetic oligonucleotide
gaacacacccgcugccccg

SEQ ID NO: 789915 - RNA, 19 nt, Artificial Sequence
  Description of Artificial Sequence: Synthetic oligonucleotide
guugagaugcguccgcuca

SEQ ID NO: 789916 - RNA, 19 nt, Artificial Sequence
  Description of Artificial Sequence: Synthetic oligonucleotide
gaagaaggaguccgggauc

SEQ ID NO: 789917 - RNA, 19 nt, Artificial Sequence
  Description of Artificial Sequence: Synthetic oligonucleotide
auaggcaaucucaauccag

SEQ ID NO: 789918 - RNA, 19 nt, Artificial Sequence
  Description of Artificial Sequence: Synthetic oligonucleotide
gguuagguucaaaaggaag

SEQ ID NO: 789919 - RNA, 19 nt, Artificial Sequence
  Description of Artificial Sequence: Synthetic oligonucleotide
aguuucguuaagaguguuc

SEQ ID NO: 789920 - RNA, 19 nt, Artificial Sequence
  Description of Artificial Sequence: Synthetic oligonucleotide
ucuaacucuuuggugcgca

SEQ ID NO: 789921 - RNA, 19 nt, Artificial Sequence
  Description of Artificial Sequence: Synthetic oligonucleotide
aagaccuguggagggccgc

SEQ ID NO: 789922 - RNA, 19 nt, Artificial Sequence
  Description of Artificial Sequence: Synthetic oligonucleotide
caugguauugcuccgucga

SEQ ID NO: 789923 - RNA, 19 nt, Artificial Sequence
  Description of Artificial Sequence: Synthetic oligonucleotide
agaucaugccucggaagcg

SEQ ID NO: 789924 - RNA, 19 nt, Artificial Sequence
  Description of Artificial Sequence: Synthetic oligonucleotide
aagaaucucgccacccgug

SEQ ID NO: 789925 - RNA, 19 nt, Artificial Sequence
  Description of Artificial Sequence: Synthetic oligonucleotide
ugugagagccaggcgcucg

SEQ ID NO: 789926 - RNA, 19 nt, Artificial Sequence
  Description of Artificial Sequence: Synthetic oligonucleotide
guagggaccgaugucguug

SEQ ID NO: 789927 - RNA, 19 nt, Artificial Sequence
  Description of Artificial Sequence: Synthetic oligonucleotide
ugauaggcuggaccucuug

SEQ ID NO: 789928 - RNA, 19 nt, Artificial Sequence
  Description of Artificial Sequence: Synthetic oligonucleotide
gucgaacaggggcuggacg

SEQ ID NO: 789929 - RNA, 19 nt, Artificial Sequence
  Description of Artificial Sequence: Synthetic oligonucleotide
caucguaacuggugauagg

SEQ ID NO: 789930 - RNA, 19 nt, Artificial Sequence
  Description of Artificial Sequence: Synthetic oligonucleotide
cuggcaccgauccacgaag

SEQ ID NO: 789931 - RNA, 19 nt, Artificial Sequence
  Description of Artificial Sequence: Synthetic oligonucleotide
uggcaaugagcugauuccc

SEQ ID NO: 789932 - RNA, 19 nt, Artificial Sequence
  Description of Artificial Sequence: Synthetic oligonucleotide
ucccuuaccugcaggcggc

SEQ ID NO: 789933 - RNA, 19 nt, Artificial Sequence
  Description of Artificial Sequence: Synthetic oligonucleotide
agcgccaccaagcacccga

SEQ ID NO: 789934 - RNA, 19 nt, Artificial Sequence
  Description of Artificial Sequence: Synthetic oligonucleotide
gaacccucacacuccagca

SEQ ID NO: 789935 - RNA, 19 nt, Artificial Sequence
  Description of Artificial Sequence: Synthetic oligonucleotide
guuucguuaagaguguucu

SEQ ID NO: 789936 - RNA, 19 nt, Artificial Sequence
  Description of Artificial Sequence: Synthetic oligonucleotide
cagaguugagaugcguccg

SEQ ID NO: 789937 - RNA, 19 nt, Artificial Sequence
  Description of Artificial Sequence: Synthetic oligonucleotide
guggagugagcccauagaa

SEQ ID NO: 789938 - RNA, 19 nt, Artificial Sequence
  Description of Artificial Sequence: Synthetic oligonucleotide
ucggggugcugcacgauga

SEQ ID NO: 789939 - RNA, 19 nt, Artificial Sequence
  Description of Artificial Sequence: Synthetic oligonucleotide
ucgugggcgagccauccac

SEQ ID NO: 789940 - RNA, 19 nt, Artificial Sequence
  Description of Artificial Sequence: Synthetic oligonucleotide
cacccgagcugugagagcc

SEQ ID NO: 789941 - RNA, 19 nt, Artificial Sequence
  Description of Artificial Sequence: Synthetic oligonucleotide
ucacggaccacguccggac

SEQ ID NO: 789942 - RNA, 19 nt, Artificial Sequence
  Description of Artificial Sequence: Synthetic oligonucleotide
uagggaccgaugucguugc

SEQ ID NO: 789943 - RNA, 19 nt, Artificial Sequence
  Description of Artificial Sequence: Synthetic oligonucleotide
gaaggaguccgggauccag

SEQ ID NO: 789944 - RNA, 19 nt, Artificial Sequence
  Description of Artificial Sequence: Synthetic oligonucleotide
aaagugccccgagggaaag

SEQ ID NO: 789945 - RNA, 19 nt, Artificial Sequence
  Description of Artificial Sequence: Synthetic oligonucleotide
caaugagcugauucccaac

SEQ ID NO: 789946 - RNA, 19 nt, Artificial Sequence
  Description of Artificial Sequence: Synthetic oligonucleotide
agcacccgagcugugagag

SEQ ID NO: 789947 - RNA, 19 nt, Artificial Sequence
  Description of Artificial Sequence: Synthetic oligonucleotide
augucguugccagcacugc

SEQ ID NO: 789948 - RNA, 19 nt, Artificial Sequence
  Description of Artificial Sequence: Synthetic oligonucleotide
cacugcggugguuagguuc

SEQ ID NO: 789949 - RNA, 19 nt, Artificial Sequence
  Description of Artificial Sequence: Synthetic oligonucleotide
gaguggagacugguaagag

SEQ ID NO: 789950 - RNA, 19 nt, Artificial Sequence
  Description of Artificial Sequence: Synthetic oligonucleotide
guauugcuccgucgaacag

SEQ ID NO: 789951 - RNA, 19 nt, Artificial Sequence
  Description of Artificial Sequence: Synthetic oligonucleotide
cuguagagcucacugacaa

SEQ ID NO: 789952 - RNA, 19 nt, Artificial Sequence
  Description of Artificial Sequence: Synthetic oligonucleotide
gagugagcccauagaauug

SEQ ID NO: 789953 - RNA, 19 nt, Artificial Sequence
  Description of Artificial Sequence: Synthetic oligonucleotide
accgaugucguugccagca

SEQ ID NO: 789954 - RNA, 19 nt, Artificial Sequence
  Description of Artificial Sequence: Synthetic oligonucleotide
agauagccauugaagagga

SEQ ID NO: 789955 - RNA, 19 nt, Artificial Sequence
  Description of Artificial Sequence: Synthetic oligonucleotide
acguaauagauggagccau

SEQ ID NO: 789956 - RNA, 19 nt, Artificial Sequence
  Description of Artificial Sequence: Synthetic oligonucleotide
ucguuguccuucauccgaa

SEQ ID NO: 789957 - RNA, 19 nt, Artificial Sequence
  Description of Artificial Sequence: Synthetic oligonucleotide
gaaucucgccacccguggc

SEQ ID NO: 789958 - RNA, 19 nt, Artificial Sequence
  Description of Artificial Sequence: Synthetic oligonucleotide
ugguauugcuccgucgaac

SEQ ID NO: 789959 - RNA, 19 nt, Artificial Sequence
  Description of Artificial Sequence: Synthetic oligonucleotide
uuccgcaggaggaucgauc

SEQ ID NO: 789960 - RNA, 19 nt, Artificial Sequence
  Description of Artificial Sequence: Synthetic oligonucleotide
gagguguuucucugacagc

SEQ ID NO: 789961 - RNA, 19 nt, Artificial Sequence
  Description of Artificial Sequence: Synthetic oligonucleotide
agcguuccacacuccaaug

SEQ ID NO: 789962 - RNA, 19 nt, Artificial Sequence
  Description of Artificial Sequence: Synthetic oligonucleotide
cuucccuuaccugcaggcg

SEQ ID NO: 789963 - RNA, 19 nt, Artificial Sequence
  Description of Artificial Sequence: Synthetic oligonucleotide
uccacacuccaaugcgccc

SEQ ID NO: 789964 - RNA, 19 nt, Artificial Sequence
  Description of Artificial Sequence: Synthetic oligonucleotide
cuaacucuuuggugcgcag

SEQ ID NO: 789965 - RNA, 19 nt, Artificial Sequence
  Description of Artificial Sequence: Synthetic oligonucleotide
aagugccccgagggaaagc

SEQ ID NO: 789966 - RNA, 19 nt, Artificial Sequence
  Description of Artificial Sequence: Synthetic oligonucleotide
ccauaagaaggcacugcgg

SEQ ID NO: 789967 - RNA, 19 nt, Artificial Sequence
  Description of Artificial Sequence: Synthetic oligonucleotide
gaagaaucucgccacccgu

SEQ ID NO: 789968 - RNA, 19 nt, Artificial Sequence
  Description of Artificial Sequence: Synthetic oligonucleotide
uccacugagcggacagaac

SEQ ID NO: 789969 - RNA, 19 nt, Artificial Sequence
  Description of Artificial Sequence: Synthetic oligonucleotide
uagcgucggggccuggagc

SEQ ID NO: 789970 - RNA, 19 nt, Artificial Sequence
  Description of Artificial Sequence: Synthetic oligonucleotide
uugaacccucacacuccag

SEQ ID NO: 789971 - RNA, 19 nt, Artificial Sequence
  Description of Artificial Sequence: Synthetic oligonucleotide
ucuccguuucacugggaau

SEQ ID NO: 789972 - RNA, 19 nt, Artificial Sequence
  Description of Artificial Sequence: Synthetic oligonucleotide
agcugauucccaacaaaga

SEQ ID NO: 789973 - RNA, 19 nt, Artificial Sequence
  Description of Artificial Sequence: Synthetic oligonucleotide
ucccgcucaccguagggac

SEQ ID NO: 789974 - RNA, 19 nt, Artificial Sequence
  Description of Artificial Sequence: Synthetic oligonucleotide
auccgaaggggaaauuucu

SEQ ID NO: 789975 - RNA, 19 nt, Artificial Sequence
  Description of Artificial Sequence: Synthetic oligonucleotide
aagcacccgagcugugaga

SEQ ID NO: 789976 - RNA, 19 nt, Artificial Sequence
  Description of Artificial Sequence: Synthetic oligonucleotide
ggcacagacugagaugagg

SEQ ID NO: 789977 - RNA, 19 nt, Artificial Sequence
  Description of Artificial Sequence: Synthetic oligonucleotide
uuucguuaagaguguucuu

SEQ ID NO: 789978 - RNA, 19 nt, Artificial Sequence
  Description of Artificial Sequence: Synthetic oligonucleotide
uggcaccgauccacgaagc

SEQ ID NO: 789979 - RNA, 19 nt, Artificial Sequence
  Description of Artificial Sequence: Synthetic oligonucleotide
aaagacgguggggucccug

SEQ ID NO: 789980 - RNA, 19 nt, Artificial Sequence
  Description of Artificial Sequence: Synthetic oligonucleotide
cucaccguagggaccgaug

SEQ ID NO: 789981 - RNA, 19 nt, Artificial Sequence
  Description of Artificial Sequence: Synthetic oligonucleotide
cuugaacccucacacucca

SEQ ID NO: 789982 - RNA, 19 nt, Artificial Sequence
  Description of Artificial Sequence: Synthetic oligonucleotide
caguggagugagcccauag

SEQ ID NO: 789983 - RNA, 19 nt, Artificial Sequence
  Description of Artificial Sequence: Synthetic oligonucleotide
aagauagcuccggucucgu

SEQ ID NO: 789984 - RNA, 19 nt, Artificial Sequence
  Description of Artificial Sequence: Synthetic oligonucleotide
cauaggcaaucucaaucca

SEQ ID NO: 789985 - RNA, 19 nt, Artificial Sequence
  Description of Artificial Sequence: Synthetic oligonucleotide
gcugaguggagacugguaa

SEQ ID NO: 789986 - RNA, 19 nt, Artificial Sequence
  Description of Artificial Sequence: Synthetic oligonucleotide
caucccgcucaccguaggg

SEQ ID NO: 789987 - RNA, 19 nt, Artificial Sequence
  Description of Artificial Sequence: Synthetic oligonucleotide
cucgacaggccaguccagg

SEQ ID NO: 789988 - RNA, 19 nt, Artificial Sequence
  Description of Artificial Sequence: Synthetic oligonucleotide
agagcgccaccaagcaccc

SEQ ID NO: 789989 - RNA, 19 nt, Artificial Sequence
  Description of Artificial Sequence: Synthetic oligonucleotide
gaggggcuagggaaagugc

SEQ ID NO: 789990 - RNA, 19 nt, Artificial Sequence
  Description of Artificial Sequence: Synthetic oligonucleotide
auagcuccggucucgucuu

SEQ ID NO: 789991 - RNA, 19 nt, Artificial Sequence
  Description of Artificial Sequence: Synthetic oligonucleotide
uccguuucacugggaauac

SEQ ID NO: 789992 - RNA, 19 nt, Artificial Sequence
  Description of Artificial Sequence: Synthetic oligonucleotide
ccuugaacccucacacucc

SEQ ID NO: 789993 - RNA, 19 nt, Artificial Sequence
  Description of Artificial Sequence: Synthetic oligonucleotide
gucggcggacuccagcgcc

SEQ ID NO: 789994 - RNA, 19 nt, Artificial Sequence
  Description of Artificial Sequence: Synthetic oligonucleotide
gcaugguauugcuccgucg

SEQ ID NO: 789995 - RNA, 19 nt, Artificial Sequence
  Description of Artificial Sequence: Synthetic oligonucleotide
ccggucucgucuuucagag

SEQ ID NO: 789996 - RNA, 19 nt, Artificial Sequence
  Description of Artificial Sequence: Synthetic oligonucleotide
uggccggacagggaggugu

SEQ ID NO: 789997 - RNA, 19 nt, Artificial Sequence
  Description of Artificial Sequence: Synthetic oligonucleotide
ugcacgcugaaggucugga

SEQ ID NO: 789998 - RNA, 19 nt, Artificial Sequence
  Description of Artificial Sequence: Synthetic oligonucleotide
augguauugcuccgucgaa

SEQ ID NO: 789999 - RNA, 19 nt, Artificial Sequence
  Description of Artificial Sequence: Synthetic oligonucleotide
acguucagaugaaugacuu

SEQ ID NO: 790000 - RNA, 19 nt, Artificial Sequence
  Description of Artificial Sequence: Synthetic oligonucleotide
cucgucuuucagaguugag

SEQ ID NO: 790001 - RNA, 19 nt, Artificial Sequence
  Description of Artificial Sequence: Synthetic oligonucleotide
gaaguuucguuaagagugu

SEQ ID NO: 790002 - RNA, 19 nt, Artificial Sequence
  Description of Artificial Sequence: Synthetic oligonucleotide
gcgagccauccacugagcg

SEQ ID NO: 790003 - RNA, 19 nt, Artificial Sequence
  Description of Artificial Sequence: Synthetic oligonucleotide
ggucucggggugcugcacg

SEQ ID NO: 790004 - RNA, 19 nt, Artificial Sequence
  Description of Artificial Sequence: Synthetic oligonucleotide
uuccgucaggccaccugca

SEQ ID NO: 790005 - RNA, 19 nt, Artificial Sequence
  Description of Artificial Sequence: Synthetic oligonucleotide
uggucaucccgcucaccgu

SEQ ID NO: 790006 - RNA, 19 nt, Artificial Sequence
  Description of Artificial Sequence: Synthetic oligonucleotide
aaguuucguuaagaguguu

SEQ ID NO: 790007 - RNA, 19 nt, Artificial Sequence
  Description of Artificial Sequence: Synthetic oligonucleotide
aacaaggccucaacuggua

SEQ ID NO: 790008 - RNA, 19 nt, Artificial Sequence
  Description of Artificial Sequence: Synthetic oligonucleotide
ugacccgcacaaccccuga

SEQ ID NO: 790009 - RNA, 19 nt, Artificial Sequence
  Description of Artificial Sequence: Synthetic oligonucleotide
ggcaaagacgguggggucc

SEQ ID NO: 790010 - RNA, 19 nt, Artificial Sequence
  Description of Artificial Sequence: Synthetic oligonucleotide
gugggcgagccauccacug

SEQ ID NO: 790011 - RNA, 19 nt, Artificial Sequence
  Description of Artificial Sequence: Synthetic oligonucleotide
aaugcgcccuguguggcuu

SEQ ID NO: 790012 - RNA, 19 nt, Artificial Sequence
  Description of Artificial Sequence: Synthetic oligonucleotide
caguccauaagaaggcacu

SEQ ID NO: 790013 - RNA, 19 nt, Artificial Sequence
  Description of Artificial Sequence: Synthetic oligonucleotide
gcguuccacacuccaaugc

SEQ ID NO: 790014 - RNA, 19 nt, Artificial Sequence
  Description of Artificial Sequence: Synthetic oligonucleotide
gacccgcacaaccccugag

SEQ ID NO: 790015 - RNA, 19 nt, Artificial Sequence
  Description of Artificial Sequence: Synthetic oligonucleotide
agggaccgaugucguugcc

SEQ ID NO: 790016 - RNA, 19 nt, Artificial Sequence
  Description of Artificial Sequence: Synthetic oligonucleotide
ucacagcguuccacacucc

SEQ ID NO: 790017 - RNA, 19 nt, Artificial Sequence
  Description of Artificial Sequence: Synthetic oligonucleotide
uggacccguggauaccccu

SEQ ID NO: 790018 - RNA, 19 nt, Artificial Sequence
  Description of Artificial Sequence: Synthetic oligonucleotide
uuucuccguuucacuggga

SEQ ID NO: 790019 - RNA, 19 nt, Artificial Sequence
  Description of Artificial Sequence: Synthetic oligonucleotide
ccaguccauaagaaggcac

SEQ ID NO: 790020 - RNA, 19 nt, Artificial Sequence
  Description of Artificial Sequence: Synthetic oligonucleotide
gugagcagguagcgucggg

SEQ ID NO: 790021 - RNA, 19 nt, Artificial Sequence
  Description of Artificial Sequence: Synthetic oligonucleotide
gaaagugccccgagggaaa

SEQ ID NO: 790022 - RNA, 19 nt, Artificial Sequence
  Description of Artificial Sequence: Synthetic oligonucleotide
cucuuggaccugccagugc

SEQ ID NO: 790023 - RNA, 19 nt, Artificial Sequence
  Description of Artificial Sequence: Synthetic oligonucleotide
cuccguuucacugggaaua

SEQ ID NO: 790024 - RNA, 19 nt, Artificial Sequence
  Description of Artificial Sequence: Synthetic oligonucleotide
cuggcccgugagcagguag

SEQ ID NO: 790025 - RNA, 19 nt, Artificial Sequence
  Description of Artificial Sequence: Synthetic oligonucleotide
cucggggugcugcacgaug

SEQ ID NO: 790026 - RNA, 19 nt, Artificial Sequence
  Description of Artificial Sequence: Synthetic oligonucleotide
guggaaccgggcuggggug

SEQ ID NO: 790027 - RNA, 19 nt, Artificial Sequence
  Description of Artificial Sequence: Synthetic oligonucleotide
gagccggcugcaucguaac

SEQ ID NO: 790028 - RNA, 19 nt, Artificial Sequence
  Description of Artificial Sequence: Synthetic oligonucleotide
uggccgucggggcucuggc

SEQ ID NO: 790029 - RNA, 19 nt, Artificial Sequence
  Description of Artificial Sequence: Synthetic oligonucleotide
guacaucuacguaauagau

SEQ ID NO: 790030 - RNA, 19 nt, Artificial Sequence
  Description of Artificial Sequence: Synthetic oligonucleotide
caggggagucccaagaccu

SEQ ID NO: 790031 - RNA, 19 nt, Artificial Sequence
  Description of Artificial Sequence: Synthetic oligonucleotide
accgauccacgaagcuucc

SEQ ID NO: 790032 - RNA, 19 nt, Artificial Sequence
  Description of Artificial Sequence: Synthetic oligonucleotide
cacguucagaugaaugacu

SEQ ID NO: 790033 - RNA, 19 nt, Artificial Sequence
  Description of Artificial Sequence: Synthetic oligonucleotide
ucggcggacuccagcgcca

SEQ ID NO: 790034 - RNA, 19 nt, Artificial Sequence
  Description of Artificial Sequence: Synthetic oligonucleotide
aggccucaacugguacucc

SEQ ID NO: 790035 - RNA, 19 nt, Artificial Sequence
  Description of Artificial Sequence: Synthetic oligonucleotide
ggccaguccauaagaaggc

SEQ ID NO: 790036 - RNA, 19 nt, Artificial Sequence
  Description of Artificial Sequence: Synthetic oligonucleotide
augcguccgcucagaaggc

SEQ ID NO: 790037 - RNA, 19 nt, Artificial Sequence
  Description of Artificial Sequence: Synthetic oligonucleotide
cacagcguuccacacucca

SEQ ID NO: 790038 - RNA, 19 nt, Artificial Sequence
  Description of Artificial Sequence: Synthetic oligonucleotide
ggccucaacugguacuccc

SEQ ID NO: 790039 - RNA, 19 nt, Artificial Sequence
  Description of Artificial Sequence: Synthetic oligonucleotide
cuuaccugcaggcggcgaa

SEQ ID NO: 790040 - RNA, 19 nt, Artificial Sequence
  Description of Artificial Sequence: Synthetic oligonucleotide
caccuaucucagagccacg

SEQ ID NO: 790041 - RNA, 19 nt, Artificial Sequence
  Description of Artificial Sequence: Synthetic oligonucleotide
aggcggucgugggcgagcc

SEQ ID NO: 790042 - RNA, 19 nt, Artificial Sequence
  Description of Artificial Sequence: Synthetic oligonucleotide
gaccgaugucguugccagc

SEQ ID NO: 790043 - RNA, 19 nt, Artificial Sequence
  Description of Artificial Sequence: Synthetic oligonucleotide
aucccgcucaccguaggga

SEQ ID NO: 790044 - RNA, 19 nt, Artificial Sequence
  Description of Artificial Sequence: Synthetic oligonucleotide
acggaccacguccggacau

SEQ ID NO: 790045 - RNA, 19 nt, Artificial Sequence
  Description of Artificial Sequence: Synthetic oligonucleotide
ggaaagugccccgagggaa

SEQ ID NO: 790046 - RNA, 19 nt, Artificial Sequence
  Description of Artificial Sequence: Synthetic oligonucleotide
ggucucgucuuucagaguu

SEQ ID NO: 790047 - RNA, 19 nt, Artificial Sequence
  Description of Artificial Sequence: Synthetic oligonucleotide
ugcuagcggcguggaaccg

SEQ ID NO: 790048 - RNA, 19 nt, Artificial Sequence
  Description of Artificial Sequence: Synthetic oligonucleotide
gaccuguggagggccgcgg

SEQ ID NO: 790049 - RNA, 19 nt, Artificial Sequence
  Description of Artificial Sequence: Synthetic oligonucleotide
caucuacguaauagaugga

SEQ ID NO: 790050 - RNA, 19 nt, Artificial Sequence
  Description of Artificial Sequence: Synthetic oligonucleotide
cggugguuagguucaaaag

SEQ ID NO: 790051 - RNA, 19 nt, Artificial Sequence
  Description of Artificial Sequence: Synthetic oligonucleotide
cgggucacggaccacgucc

SEQ ID NO: 790052 - RNA, 19 nt, Artificial Sequence
  Description of Artificial Sequence: Synthetic oligonucleotide
cuggacccguggauacccc

SEQ ID NO: 790053 - RNA, 19 nt, Artificial Sequence
  Description of Artificial Sequence: Synthetic oligonucleotide
cgagccauccacugagcgg

SEQ ID NO: 790054 - RNA, 19 nt, Artificial Sequence
  Description of Artificial Sequence: Synthetic oligonucleotide
ggaagcgggucacggacca

SEQ ID NO: 790055 - RNA, 19 nt, Artificial Sequence
  Description of Artificial Sequence: Synthetic oligonucleotide
gcggugguuagguucaaaa

SEQ ID NO: 790056 - RNA, 19 nt, Artificial Sequence
  Description of Artificial Sequence: Synthetic oligonucleotide
ucgauccagcucuucccuu

SEQ ID NO: 790057 - RNA, 19 nt, Artificial Sequence
  Description of Artificial Sequence: Synthetic oligonucleotide
gcggcgaaccaguggagug

SEQ ID NO: 790058 - RNA, 19 nt, Artificial Sequence
  Description of Artificial Sequence: Synthetic oligonucleotide
agccgccuugaacccucac

SEQ ID NO: 790059 - RNA, 19 nt, Artificial Sequence
  Description of Artificial Sequence: Synthetic oligonucleotide
ggaggagguagauagccau

SEQ ID NO: 790060 - RNA, 19 nt, Artificial Sequence
  Description of Artificial Sequence: Synthetic oligonucleotide
gggcuagggaaagugcccc

SEQ ID NO: 790061 - RNA, 19 nt, Artificial Sequence
  Description of Artificial Sequence: Synthetic oligonucleotide
aucucgccacccguggcug

SEQ ID NO: 790062 - RNA, 19 nt, Artificial Sequence
  Description of Artificial Sequence: Synthetic oligonucleotide
gcccacagaagaaucucgc

SEQ ID NO: 790063 - RNA, 19 nt, Artificial Sequence
  Description of Artificial Sequence: Synthetic oligonucleotide
aguccgggauccaggugag

SEQ ID NO: 790064 - RNA, 19 nt, Artificial Sequence
  Description of Artificial Sequence: Synthetic oligonucleotide
ccgugagcagguagcgucg

SEQ ID NO: 790065 - RNA, 19 nt, Artificial Sequence
  Description of Artificial Sequence: Synthetic oligonucleotide
gggucacggaccacguccg

SEQ ID NO: 790066 - RNA, 19 nt, Artificial Sequence
  Description of Artificial Sequence: Synthetic oligonucleotide
aaggagccggcugcaucgu

SEQ ID NO: 790067 - RNA, 19 nt, Artificial Sequence
  Description of Artificial Sequence: Synthetic oligonucleotide
gcuagcggcguggaaccgg

SEQ ID NO: 790068 - RNA, 19 nt, Artificial Sequence
  Description of Artificial Sequence: Synthetic oligonucleotide
cacacccgcugccccgugg

SEQ ID NO: 790069 - RNA, 19 nt, Artificial Sequence
  Description of Artificial Sequence: Synthetic oligonucleotide
caccguagggaccgauguc

SEQ ID NO: 790070 - RNA, 19 nt, Artificial Sequence
  Description of Artificial Sequence: Synthetic oligonucleotide
cgauccacgaagcuuccug

SEQ ID NO: 790071 - RNA, 19 nt, Artificial Sequence
  Description of Artificial Sequence: Synthetic oligonucleotide
ggcgaaccaguggagugag

SEQ ID NO: 790072 - RNA, 19 nt, Artificial Sequence
  Description of Artificial Sequence: Synthetic oligonucleotide
gaaggcggucgugggcgag

SEQ ID NO: 790073 - RNA, 19 nt, Artificial Sequence
  Description of Artificial Sequence: Synthetic oligonucleotide
ggggcuagggaaagugccc

SEQ ID NO: 790074 - RNA, 19 nt, Artificial Sequence
  Description of Artificial Sequence: Synthetic oligonucleotide
gacauuuccgcaggaggau

SEQ ID NO: 790075 - RNA, 19 nt, Artificial Sequence
  Description of Artificial Sequence: Synthetic oligonucleotide
ugcguccgcucagaaggcu

SEQ ID NO: 790076 - RNA, 19 nt, Artificial Sequence
  Description of Artificial Sequence: Synthetic oligonucleotide
ggcuccccgacucgggacc

SEQ ID NO: 790077 - RNA, 19 nt, Artificial Sequence
  Description of Artificial Sequence: Synthetic oligonucleotide
ggugucgguggccgucggg

SEQ ID NO: 790078 - RNA, 19 nt, Artificial Sequence
  Description of Artificial Sequence: Synthetic oligonucleotide
cacccguggcugcagccac

SEQ ID NO: 790079 - RNA, 19 nt, Artificial Sequence
  Description of Artificial Sequence: Synthetic oligonucleotide
ggaccacguccggacaugg

SEQ ID NO: 790080 - RNA, 19 nt, Artificial Sequence
  Description of Artificial Sequence: Synthetic oligonucleotide
aggcugaguggagacuggu

SEQ ID NO: 790081 - RNA, 19 nt, Artificial Sequence
  Description of Artificial Sequence: Synthetic oligonucleotide
acagcguuccacacuccaa

SEQ ID NO: 790082 - RNA, 19 nt, Artificial Sequence
  Description of Artificial Sequence: Synthetic oligonucleotide
augacccgcacaaccccug

SEQ ID NO: 790083 - RNA, 19 nt, Artificial Sequence
  Description of Artificial Sequence: Synthetic oligonucleotide
gaugacccgcacaaccccu

SEQ ID NO: 790084 - RNA, 19 nt, Artificial Sequence
  Description of Artificial Sequence: Synthetic oligonucleotide
gugcacgcugaaggucugg

SEQ ID NO: 790085 - RNA, 19 nt, Artificial Sequence
  Description of Artificial Sequence: Synthetic oligonucleotide
gcccauagaauugggcuuc

SEQ ID NO: 790086 - RNA, 19 nt, Artificial Sequence
  Description of Artificial Sequence: Synthetic oligonucleotide
gccgccuugaacccucaca

SEQ ID NO: 790087 - RNA, 19 nt, Artificial Sequence
  Description of Artificial Sequence: Synthetic oligonucleotide
cuggacguccccggacuug

SEQ ID NO: 790088 - RNA, 19 nt, Artificial Sequence
  Description of Artificial Sequence: Synthetic oligonucleotide
ggucacggaccacguccgg

SEQ ID NO: 790089 - RNA, 19 nt, Artificial Sequence
  Description of Artificial Sequence: Synthetic oligonucleotide
gucacggaccacguccgga

SEQ ID NO: 790090 - RNA, 19 nt, Artificial Sequence
  Description of Artificial Sequence: Synthetic oligonucleotide
ggucaucccgcucaccgua

SEQ ID NO: 790091 - RNA, 19 nt, Artificial Sequence
  Description of Artificial Sequence: Synthetic oligonucleotide
agcccacggucucggggug

SEQ ID NO: 790092 - RNA, 19 nt, Artificial Sequence
  Description of Artificial Sequence: Synthetic oligonucleotide
gcacagacugagaugaggu

SEQ ID NO: 790093 - RNA, 19 nt, Artificial Sequence
  Description of Artificial Sequence: Synthetic oligonucleotide
cagacugagaugagguguu

SEQ ID NO: 790094 - RNA, 19 nt, Artificial Sequence
  Description of Artificial Sequence: Synthetic oligonucleotide
cgaugacccgcacaacccc

SEQ ID NO: 790095 - RNA, 19 nt, Artificial Sequence
  Description of Artificial Sequence: Synthetic oligonucleotide
gcggagccggugucggugg

SEQ ID NO: 790096 - RNA, 19 nt, Artificial Sequence
  Description of Artificial Sequence: Synthetic oligonucleotide
ggcccgugagcagguagcg

SEQ ID NO: 790097 - RNA, 19 nt, Artificial Sequence
  Description of Artificial Sequence: Synthetic oligonucleotide
agaaggaguccgggaucca

SEQ ID NO: 790098 - RNA, 19 nt, Artificial Sequence
  Description of Artificial Sequence: Synthetic oligonucleotide
ggucgugggcgagccaucc

SEQ ID NO: 790099 - RNA, 19 nt, Artificial Sequence
  Description of Artificial Sequence: Synthetic oligonucleotide
cuccgucgaacaggggcug

SEQ ID NO: 790100 - RNA, 19 nt, Artificial Sequence
  Description of Artificial Sequence: Synthetic oligonucleotide
uagcggcguggaaccgggc

SEQ ID NO: 790101 - RNA, 19 nt, Artificial Sequence
  Description of Artificial Sequence: Synthetic oligonucleotide
gacugguaagagagguccu

SEQ ID NO: 790102 - RNA, 19 nt, Artificial Sequence
  Description of Artificial Sequence: Synthetic oligonucleotide
ggacccguggauaccccug

SEQ ID NO: 790103 - RNA, 19 nt, Artificial Sequence
  Description of Artificial Sequence: Synthetic oligonucleotide
ccaggcgugggcuggaaaa

SEQ ID NO: 790104 - RNA, 19 nt, Artificial Sequence
  Description of Artificial Sequence: Synthetic oligonucleotide
agacugagaugagguguuu

SEQ ID NO: 790105 - RNA, 19 nt, Artificial Sequence
  Description of Artificial Sequence: Synthetic oligonucleotide
ccaaugcgcccuguguggc

SEQ ID NO: 790106 - RNA, 19 nt, Artificial Sequence
  Description of Artificial Sequence: Synthetic oligonucleotide
cgaagcuuccugccccgcg

SEQ ID NO: 790107 - RNA, 19 nt, Artificial Sequence
  Description of Artificial Sequence: Synthetic oligonucleotide
gaagcgggucacggaccac

SEQ ID NO: 790108 - RNA, 19 nt, Artificial Sequence
  Description of Artificial Sequence: Synthetic oligonucleotide
gcgcucgacaggccagucc

SEQ ID NO: 790109 - RNA, 19 nt, Artificial Sequence
  Description of Artificial Sequence: Synthetic oligonucleotide
cgagcccacggucucgggg

SEQ ID NO: 790110 - RNA, 19 nt, Artificial Sequence
  Description of Artificial Sequence: Synthetic oligonucleotide
ggcacugcggugguuaggu

SEQ ID NO: 790111 - RNA, 19 nt, Artificial Sequence
  Description of Artificial Sequence: Synthetic oligonucleotide
gucgugggcgagccaucca

SEQ ID NO: 790112 - RNA, 19 nt, Artificial Sequence
  Description of Artificial Sequence: Synthetic oligonucleotide
ggcaguagucaggucccac

SEQ ID NO: 790113 - RNA, 19 nt, Artificial Sequence
  Description of Artificial Sequence: Synthetic oligonucleotide
ccgaaggggaaauuucugu

SEQ ID NO: 790114 - RNA, 19 nt, Artificial Sequence
  Description of Artificial Sequence: Synthetic oligonucleotide
caccaagcacccgagcugu

SEQ ID NO: 790115 - RNA, 19 nt, Artificial Sequence
  Description of Artificial Sequence: Synthetic oligonucleotide
agcgggucacggaccacgu

SEQ ID NO: 790116 - RNA, 19 nt, Artificial Sequence
  Description of Artificial Sequence: Synthetic oligonucleotide
cccgcucaccguagggacc

SEQ ID NO: 790117 - RNA, 19 nt, Artificial Sequence
  Description of Artificial Sequence: Synthetic oligonucleotide
ccagagcgccaccaagcac

SEQ ID NO: 790118 - RNA, 19 nt, Artificial Sequence
  Description of Artificial Sequence: Synthetic oligonucleotide
cuucauccgaaggggaaau

SEQ ID NO: 790119 - RNA, 19 nt, Artificial Sequence
  Description of Artificial Sequence: Synthetic oligonucleotide
gcuccggucucgucuuuca

SEQ ID NO: 790120 - RNA, 19 nt, Artificial Sequence
  Description of Artificial Sequence: Synthetic oligonucleotide
cacggaccacguccggaca

SEQ ID NO: 790121 - RNA, 19 nt, Artificial Sequence
  Description of Artificial Sequence: Synthetic oligonucleotide
ucucggggugcugcacgau

SEQ ID NO: 790122 - RNA, 19 nt, Artificial Sequence
  Description of Artificial Sequence: Synthetic oligonucleotide
gaggagguagauagccauu

SEQ ID NO: 790123 - RNA, 19 nt, Artificial Sequence
  Description of Artificial Sequence: Synthetic oligonucleotide
cguuguccuucauccgaag

SEQ ID NO: 790124 - RNA, 19 nt, Artificial Sequence
  Description of Artificial Sequence: Synthetic oligonucleotide
aggcgcucgacaggccagu

SEQ ID NO: 790125 - RNA, 19 nt, Artificial Sequence
  Description of Artificial Sequence: Synthetic oligonucleotide
gggucccgagcccacgguc

SEQ ID NO: 790126 - RNA, 19 nt, Artificial Sequence
  Description of Artificial Sequence: Synthetic oligonucleotide
ccccguggaggagaggcgc

SEQ ID NO: 790127 - RNA, 19 nt, Artificial Sequence
  Description of Artificial Sequence: Synthetic oligonucleotide
ugcgcccuguguggcuugu

SEQ ID NO: 790128 - RNA, 19 nt, Artificial Sequence
  Description of Artificial Sequence: Synthetic oligonucleotide
gcguccgcucagaaggcug

SEQ ID NO: 790129 - RNA, 19 nt, Artificial Sequence
  Description of Artificial Sequence: Synthetic oligonucleotide
cggaagcgggucacggacc

SEQ ID NO: 790130 - RNA, 19 nt, Artificial Sequence
  Description of Artificial Sequence: Synthetic oligonucleotide
gcccagccgccuugaaccc

SEQ ID NO: 790131 - RNA, 19 nt, Artificial Sequence
  Description of Artificial Sequence: Synthetic oligonucleotide
cccagagcgccaccaagca

SEQ ID NO: 790132 - RNA, 19 nt, Artificial Sequence
  Description of Artificial Sequence: Synthetic oligonucleotide
ggcuggacguccccggacu

SEQ ID NO: 790133 - RNA, 19 nt, Artificial Sequence
  Description of Artificial Sequence: Synthetic oligonucleotide
ggcaccgauccacgaagcu

SEQ ID NO: 790134 - RNA, 19 nt, Artificial Sequence
  Description of Artificial Sequence: Synthetic oligonucleotide
gguagcgucggggccugga

SEQ ID NO: 790135 - RNA, 19 nt, Artificial Sequence
  Description of Artificial Sequence: Synthetic oligonucleotide
ccgaugucguugccagcac

SEQ ID NO: 790136 - RNA, 19 nt, Artificial Sequence
  Description of Artificial Sequence: Synthetic oligonucleotide
gcuccgucgaacaggggcu

SEQ ID NO: 790137 - RNA, 19 nt, Artificial Sequence
  Description of Artificial Sequence: Synthetic oligonucleotide
gccccguggaggagaggcg

SEQ ID NO: 790138 - RNA, 19 nt, Artificial Sequence
  Description of Artificial Sequence: Synthetic oligonucleotide
ccguggauaccccuggggu

SEQ ID NO: 790139 - RNA, 19 nt, Artificial Sequence
  Description of Artificial Sequence: Synthetic oligonucleotide
ccggggccaguccauaaga

SEQ ID NO: 790140 - RNA, 19 nt, Artificial Sequence
  Description of Artificial Sequence: Synthetic oligonucleotide
gccucggaagcgggucacg

SEQ ID NO: 790141 - RNA, 19 nt, Artificial Sequence
  Description of Artificial Sequence: Synthetic oligonucleotide
ggccgcggagccggugucg

SEQ ID NO: 790142 - RNA, 19 nt, Artificial Sequence
  Description of Artificial Sequence: Synthetic oligonucleotide
cuccccgacucgggacccc

SEQ ID NO: 790143 - RNA, 19 nt, Artificial Sequence
  Description of Artificial Sequence: Synthetic oligonucleotide
ccggugucgguggccgucg

SEQ ID NO: 790144 - RNA, 19 nt, Artificial Sequence
  Description of Artificial Sequence: Synthetic oligonucleotide
ggcguggaaccgggcuggg

SEQ ID NO: 790145 - RNA, 19 nt, Artificial Sequence
  Description of Artificial Sequence: Synthetic oligonucleotide
gaccacguccggacauggu

SEQ ID NO: 790146 - RNA, 19 nt, Artificial Sequence
  Description of Artificial Sequence: Synthetic oligonucleotide
cgggauccaggugagcguc

SEQ ID NO: 790147 - RNA, 19 nt, Artificial Sequence
  Description of Artificial Sequence: Synthetic oligonucleotide
cagcaugguauugcuccgu

SEQ ID NO: 790148 - RNA, 19 nt, Artificial Sequence
  Description of Artificial Sequence: Synthetic oligonucleotide
ggucccgagcccacggucu

SEQ ID NO: 790149 - RNA, 19 nt, Artificial Sequence
  Description of Artificial Sequence: Synthetic oligonucleotide
cugccccguggaggagagg

SEQ ID NO: 790150 - RNA, 19 nt, Artificial Sequence
  Description of Artificial Sequence: Synthetic oligonucleotide
agguagcgucggggccugg

SEQ ID NO: 790151 - RNA, 19 nt, Artificial Sequence
  Description of Artificial Sequence: Synthetic oligonucleotide
cccuuaccugcaggcggcg

SEQ ID NO: 790152 - RNA, 19 nt, Artificial Sequence
  Description of Artificial Sequence: Synthetic oligonucleotide
caggcgugggcuggaaaau

SEQ ID NO: 790153 - RNA, 19 nt, Artificial Sequence
  Description of Artificial Sequence: Synthetic oligonucleotide
ggaaccgggcuggggugga

SEQ ID NO: 790154 - RNA, 19 nt, Artificial Sequence
  Description of Artificial Sequence: Synthetic oligonucleotide
ggcggcgaaccaguggagu

SEQ ID NO: 790155 - RNA, 19 nt, Artificial Sequence
  Description of Artificial Sequence: Synthetic oligonucleotide
cgucgaacaggggcuggac

SEQ ID NO: 790156 - RNA, 19 nt, Artificial Sequence
  Description of Artificial Sequence: Synthetic oligonucleotide
cagccgccuugaacccuca

SEQ ID NO: 790157 - RNA, 19 nt, Artificial Sequence
  Description of Artificial Sequence: Synthetic oligonucleotide
cgagaggugcugaaccgcu

SEQ ID NO: 790158 - RNA, 19 nt, Artificial Sequence
  Description of Artificial Sequence: Synthetic oligonucleotide
ccgagcccacggucucggg

SEQ ID NO: 790159 - RNA, 19 nt, Artificial Sequence
  Description of Artificial Sequence: Synthetic oligonucleotide
gcgggucacggaccacguc

SEQ ID NO: 790160 - RNA, 19 nt, Artificial Sequence
  Description of Artificial Sequence: Synthetic oligonucleotide
gcucccucuguggccggac

SEQ ID NO: 790161 - RNA, 19 nt, Artificial Sequence
  Description of Artificial Sequence: Synthetic oligonucleotide
gccggacagggagguguug

SEQ ID NO: 790162 - RNA, 19 nt, Artificial Sequence
  Description of Artificial Sequence: Synthetic oligonucleotide
gcgugggcuggaaaaugcu

SEQ ID NO: 790163 - RNA, 19 nt, Artificial Sequence
  Description of Artificial Sequence: Synthetic oligonucleotide
cccauagaauugggcuuca

SEQ ID NO: 790164 - RNA, 19 nt, Artificial Sequence
  Description of Artificial Sequence: Synthetic oligonucleotide
ccacccguggcugcagcca

SEQ ID NO: 790165 - RNA, 19 nt, Artificial Sequence
  Description of Artificial Sequence: Synthetic oligonucleotide
gcggucgugggcgagccau

SEQ ID NO: 790166 - RNA, 19 nt, Artificial Sequence
  Description of Artificial Sequence: Synthetic oligonucleotide
ggcugcggugcacgcugaa

SEQ ID NO: 790167 - RNA, 19 nt, Artificial Sequence
  Description of Artificial Sequence: Synthetic oligonucleotide
ggcgcucgacaggccaguc

SEQ ID NO: 790168 - RNA, 19 nt, Artificial Sequence
  Description of Artificial Sequence: Synthetic oligonucleotide
cggggccaguccauaagaa

SEQ ID NO: 790169 - RNA, 19 nt, Artificial Sequence
  Description of Artificial Sequence: Synthetic oligonucleotide
gggccgcggagccgguguc

SEQ ID NO: 790170 - RNA, 19 nt, Artificial Sequence
  Description of Artificial Sequence: Synthetic oligonucleotide
cggaccacguccggacaug

SEQ ID NO: 790171 - RNA, 19 nt, Artificial Sequence
  Description of Artificial Sequence: Synthetic oligonucleotide
ccgcaggaggaucgaucca

SEQ ID NO: 790172 - RNA, 19 nt, Artificial Sequence
  Description of Artificial Sequence: Synthetic oligonucleotide
ccgggauccaggugagcgu

SEQ ID NO: 790173 - RNA, 19 nt, Artificial Sequence
  Description of Artificial Sequence: Synthetic oligonucleotide
cggcgaaccaguggaguga

SEQ ID NO: 790174 - RNA, 19 nt, Artificial Sequence
  Description of Artificial Sequence: Synthetic oligonucleotide
ccguagggaccgaugucgu

SEQ ID NO: 790175 - RNA, 19 nt, Artificial Sequence
  Description of Artificial Sequence: Synthetic oligonucleotide
cguaauagauggagccauu

SEQ ID NO: 790176 - RNA, 19 nt, Artificial Sequence
  Description of Artificial Sequence: Synthetic oligonucleotide
ccuuaccugcaggcggcga

SEQ ID NO: 790177 - RNA, 19 nt, Artificial Sequence
  Description of Artificial Sequence: Synthetic oligonucleotide
ggcggucgugggcgagcca

SEQ ID NO: 790178 - RNA, 19 nt, Artificial Sequence
  Description of Artificial Sequence: Synthetic oligonucleotide
gcuggacguccccggacuu

SEQ ID NO: 790179 - RNA, 19 nt, Artificial Sequence
  Description of Artificial Sequence: Synthetic oligonucleotide
cgaugucguugccagcacu

SEQ ID NO: 790180 - RNA, 19 nt, Artificial Sequence
  Description of Artificial Sequence: Synthetic oligonucleotide
cggugucgguggccgucgg

SEQ ID NO: 790181 - RNA, 19 nt, Artificial Sequence
  Description of Artificial Sequence: Synthetic oligonucleotide
caaagacgguggggucccu

SEQ ID NO: 790182 - RNA, 19 nt, Artificial Sequence
  Description of Artificial Sequence: Synthetic oligonucleotide
gcgcccuguguggcuugug

SEQ ID NO: 790183 - RNA, 19 nt, Artificial Sequence
  Description of Artificial Sequence: Synthetic oligonucleotide
ccgggcugggguggagauc

SEQ ID NO: 790184 - RNA, 19 nt, Artificial Sequence
  Description of Artificial Sequence: Synthetic oligonucleotide
cgugggcgagccauccacu

SEQ ID NO: 790185 - RNA, 19 nt, Artificial Sequence
  Description of Artificial Sequence: Synthetic oligonucleotide
cgugcccgucggcggacuc

SEQ ID NO: 790186 - RNA, 19 nt, Artificial Sequence
  Description of Artificial Sequence: Synthetic oligonucleotide
gcucaccguagggaccgau

SEQ ID NO: 790187 - RNA, 19 nt, Artificial Sequence
  Description of Artificial Sequence: Synthetic oligonucleotide
ccguuucacugggaauacu

SEQ ID NO: 790188 - RNA, 19 nt, Artificial Sequence
  Description of Artificial Sequence: Synthetic oligonucleotide
ccauagaauugggcuucau

SEQ ID NO: 790189 - RNA, 19 nt, Artificial Sequence
  Description of Artificial Sequence: Synthetic oligonucleotide
cguagggaccgaugucguu

SEQ ID NO: 790190 - RNA, 19 nt, Artificial Sequence
  Description of Artificial Sequence: Synthetic oligonucleotide
ccgccggaccucugucugu

SEQ ID NO: 790191 - RNA, 19 nt, Artificial Sequence
  Description of Artificial Sequence: Synthetic oligonucleotide
ccgauccacgaagcuuccu

SEQ ID NO: 790192 - RNA, 19 nt, Artificial Sequence
  Description of Artificial Sequence: Synthetic oligonucleotide
cgcucaccguagggaccga

SEQ ID NO: 790193 - RNA, 19 nt, Artificial Sequence
  Description of Artificial Sequence: Synthetic oligonucleotide
ccgugcccgucggcggacu

SEQ ID NO: 790194 - RNA, 19 nt, Artificial Sequence
  Description of Artificial Sequence: Synthetic oligonucleotide
agaacuuacauuuaucucc

SEQ ID NO: 790195 - RNA, 19 nt, Artificial Sequence
  Description of Artificial Sequence: Synthetic oligonucleotide
agauguacaauacugaacc

SEQ ID NO: 790196 - RNA, 19 nt, Artificial Sequence
  Description of Artificial Sequence: Synthetic oligonucleotide
aacugcaucaaacagaaag

SEQ ID NO: 790197 - RNA, 19 nt, Artificial Sequence
  Description of Artificial Sequence: Synthetic oligonucleotide
uuaaguaugaauuuguugu

SEQ ID NO: 790198 - RNA, 19 nt, Artificial Sequence
  Description of Artificial Sequence: Synthetic oligonucleotide
uuaaucaucaacuacucug

SEQ ID NO: 790199 - RNA, 19 nt, Artificial Sequence
  Description of Artificial Sequence: Synthetic oligonucleotide
uuaaacagcuuuaacacag

SEQ ID NO: 790200 - RNA, 19 nt, Artificial Sequence
  Description of Artificial Sequence: Synthetic oligonucleotide
uuauucuuuagaccgaagg

SEQ ID NO: 790201 - RNA, 19 nt, Artificial Sequence
  Description of Artificial Sequence: Synthetic oligonucleotide
aacauuuggaccuaaggca

SEQ ID NO: 790202 - RNA, 19 nt, Artificial Sequence
  Description of Artificial Sequence: Synthetic oligonucleotide
uguagucaaagucagaaga

SEQ ID NO: 790203 - RNA, 19 nt, Artificial Sequence
  Description of Artificial Sequence: Synthetic oligonucleotide
uuugguaacauuuggaccu

SEQ ID NO: 790204 - RNA, 19 nt, Artificial Sequence
  Description of Artificial Sequence: Synthetic oligonucleotide
aguaugaauuuguuguucc

SEQ ID NO: 790205 - RNA, 19 nt, Artificial Sequence
  Description of Artificial Sequence: Synthetic oligonucleotide
uaacauuuggaccuaaggc

SEQ ID NO: 790206 - RNA, 19 nt, Artificial Sequence
  Description of Artificial Sequence: Synthetic oligonucleotide
aaguuuaucgaucuuuucu

SEQ ID NO: 790207 - RNA, 19 nt, Artificial Sequence
  Description of Artificial Sequence: Synthetic oligonucleotide
ucuagagugauuuugguaa

SEQ ID NO: 790208 - RNA, 19 nt, Artificial Sequence
  Description of Artificial Sequence: Synthetic oligonucleotide
agugcauggcgauacaugc

SEQ ID NO: 790209 - RNA, 19 nt, Artificial Sequence
  Description of Artificial Sequence: Synthetic oligonucleotide
uucaucuagaucaagugug

SEQ ID NO: 790210 - RNA, 19 nt, Artificial Sequence
  Description of Artificial Sequence: Synthetic oligonucleotide
uuaucugaagcauacgugc

SEQ ID NO: 790211 - RNA, 19 nt, Artificial Sequence
  Description of Artificial Sequence: Synthetic oligonucleotide
acgaguaucaucugcuucc

SEQ ID NO: 790212 - RNA, 19 nt, Artificial Sequence
  Description of Artificial Sequence: Synthetic oligonucleotide
uguacaauacugaaccugc

SEQ ID NO: 790213 - RNA, 19 nt, Artificial Sequence
  Description of Artificial Sequence: Synthetic oligonucleotide
uuggaccuaaggcagaacg

SEQ ID NO: 790214 - RNA, 19 nt, Artificial Sequence
  Description of Artificial Sequence: Synthetic oligonucleotide
cuuucaauuaaucaucaac

SEQ ID NO: 790215 - RNA, 19 nt, Artificial Sequence
  Description of Artificial Sequence: Synthetic oligonucleotide
uaugcaguuuccuuuauca

SEQ ID NO: 790216 - RNA, 19 nt, Artificial Sequence
  Description of Artificial Sequence: Synthetic oligonucleotide
ucugaacuuacuaugagau

SEQ ID NO: 790217 - RNA, 19 nt, Artificial Sequence
  Description of Artificial Sequence: Synthetic oligonucleotide
acuuguuauuuucaauagc

SEQ ID NO: 790218 - RNA, 19 nt, Artificial Sequence
  Description of Artificial Sequence: Synthetic oligonucleotide
guaaacauccuguugauuc

SEQ ID NO: 790219 - RNA, 19 nt, Artificial Sequence
  Description of Artificial Sequence: Synthetic oligonucleotide
acaagucucauucucagug

SEQ ID NO: 790220 - RNA, 19 nt, Artificial Sequence
  Description of Artificial Sequence: Synthetic oligonucleotide
ucaaguacagugcucaccu

SEQ ID NO: 790221 - RNA, 19 nt, Artificial Sequence
  Description of Artificial Sequence: Synthetic oligonucleotide
uuuugguaacauuuggacc

SEQ ID NO: 790222 - RNA, 19 nt, Artificial Sequence
  Description of Artificial Sequence: Synthetic oligonucleotide
uccuguugauucuaggugg

SEQ ID NO: 790223 - RNA, 19 nt, Artificial Sequence
  Description of Artificial Sequence: Synthetic oligonucleotide
uauucuuuagaccgaaggu

SEQ ID NO: 790224 - RNA, 19 nt, Artificial Sequence
  Description of Artificial Sequence: Synthetic oligonucleotide
aucuugcucaaguuuaucg

SEQ ID NO: 790225 - RNA, 19 nt, Artificial Sequence
  Description of Artificial Sequence: Synthetic oligonucleotide
guaacauuuggaccuaagg

SEQ ID NO: 790226 - RNA, 19 nt, Artificial Sequence
  Description of Artificial Sequence: Synthetic oligonucleotide
uaaucaucaacuacucuga

SEQ ID NO: 790227 - RNA, 19 nt, Artificial Sequence
  Description of Artificial Sequence: Synthetic oligonucleotide
gauacaugcaauugucgcc

SEQ ID NO: 790228 - RNA, 19 nt, Artificial Sequence
  Description of Artificial Sequence: Synthetic oligonucleotide
aaucuuucaagacuggcua

SEQ ID NO: 790229 - RNA, 19 nt, Artificial Sequence
  Description of Artificial Sequence: Synthetic oligonucleotide
acucauuuaguucuugcag

SEQ ID NO: 790230 - RNA, 19 nt, Artificial Sequence
  Description of Artificial Sequence: Synthetic oligonucleotide
augucauuuacacccauag

SEQ ID NO: 790231 - RNA, 19 nt, Artificial Sequence
  Description of Artificial Sequence: Synthetic oligonucleotide
cauagaaucauccaccuca

SEQ ID NO: 790232 - RNA, 19 nt, Artificial Sequence
  Description of Artificial Sequence: Synthetic oligonucleotide
acuuccguuguccucgucc

SEQ ID NO: 790233 - RNA, 19 nt, Artificial Sequence
  Description of Artificial Sequence: Synthetic oligonucleotide
uucaauuagaucuucuaau

SEQ ID NO: 790234 - RNA, 19 nt, Artificial Sequence
  Description of Artificial Sequence: Synthetic oligonucleotide
uguuagguugaacaagucu

SEQ ID NO: 790235 - RNA, 19 nt, Artificial Sequence
  Description of Artificial Sequence: Synthetic oligonucleotide
ggugguagaacaauuaacg

SEQ ID NO: 790236 - RNA, 19 nt, Artificial Sequence
  Description of Artificial Sequence: Synthetic oligonucleotide
aacgcucucuuucaauuag

SEQ ID NO: 790237 - RNA, 19 nt, Artificial Sequence
  Description of Artificial Sequence: Synthetic oligonucleotide
uacacuuccuacaggagug

SEQ ID NO: 790238 - RNA, 19 nt, Artificial Sequence
  Description of Artificial Sequence: Synthetic oligonucleotide
uacacccauagaaucaucc

SEQ ID NO: 790239 - RNA, 19 nt, Artificial Sequence
  Description of Artificial Sequence: Synthetic oligonucleotide
aaguaugaauuuguuguuc

SEQ ID NO: 790240 - RNA, 19 nt, Artificial Sequence
  Description of Artificial Sequence: Synthetic oligonucleotide
gaagcauacgugcugaauc

SEQ ID NO: 790241 - RNA, 19 nt, Artificial Sequence
  Description of Artificial Sequence: Synthetic oligonucleotide
ucaacuacucugaacuuac

SEQ ID NO: 790242 - RNA, 19 nt, Artificial Sequence
  Description of Artificial Sequence: Synthetic oligonucleotide
ugguagaacaauuaacguc

SEQ ID NO: 790243 - RNA, 19 nt, Artificial Sequence
  Description of Artificial Sequence: Synthetic oligonucleotide
gaagguuuuguccucgaug

SEQ ID NO: 790244 - RNA, 19 nt, Artificial Sequence
  Description of Artificial Sequence: Synthetic oligonucleotide
caggacgaaauucaaauac

SEQ ID NO: 790245 - RNA, 19 nt, Artificial Sequence
  Description of Artificial Sequence: Synthetic oligonucleotide
cuggaaguuacacaugccc

SEQ ID NO: 790246 - RNA, 19 nt, Artificial Sequence
  Description of Artificial Sequence: Synthetic oligonucleotide
uuaauaaacuucuguugcu

SEQ ID NO: 790247 - RNA, 19 nt, Artificial Sequence
  Description of Artificial Sequence: Synthetic oligonucleotide
uacuaugagauguagucaa

SEQ ID NO: 790248 - RNA, 19 nt, Artificial Sequence
  Description of Artificial Sequence: Synthetic oligonucleotide
ccuucauucaucuagauca

SEQ ID NO: 790249 - RNA, 19 nt, Artificial Sequence
  Description of Artificial Sequence: Synthetic oligonucleotide
aguacacuguccuuguuug

SEQ ID NO: 790250 - RNA, 19 nt, Artificial Sequence
  Description of Artificial Sequence: Synthetic oligonucleotide
uuacacaugcccaaugaaa

SEQ ID NO: 790251 - RNA, 19 nt, Artificial Sequence
  Description of Artificial Sequence: Synthetic oligonucleotide
uguuguuccuggaaguuac

SEQ ID NO: 790252 - RNA, 19 nt, Artificial Sequence
  Description of Artificial Sequence: Synthetic oligonucleotide
auucaucuagaucaagugu

SEQ ID NO: 790253 - RNA, 19 nt, Artificial Sequence
  Description of Artificial Sequence: Synthetic oligonucleotide
aacuacagguuugaacaac

SEQ ID NO: 790254 - RNA, 19 nt, Artificial Sequence
  Description of Artificial Sequence: Synthetic oligonucleotide
aagcauacgugcugaaucu

SEQ ID NO: 790255 - RNA, 19 nt, Artificial Sequence
  Description of Artificial Sequence: Synthetic oligonucleotide
acuaccuguucccugaaug

SEQ ID NO: 790256 - RNA, 19 nt, Artificial Sequence
  Description of Artificial Sequence: Synthetic oligonucleotide
agaacaauuaacgucaauu

SEQ ID NO: 790257 - RNA, 19 nt, Artificial Sequence
  Description of Artificial Sequence: Synthetic oligonucleotide
ucuugcucaaguuuaucga

SEQ ID NO: 790258 - RNA, 19 nt, Artificial Sequence
  Description of Artificial Sequence: Synthetic oligonucleotide
aucccaauuauccauagua

SEQ ID NO: 790259 - RNA, 19 nt, Artificial Sequence
  Description of Artificial Sequence: Synthetic oligonucleotide
gaccuuguuagguugaaca

SEQ ID NO: 790260 - RNA, 19 nt, Artificial Sequence
  Description of Artificial Sequence: Synthetic oligonucleotide
cauuuacacccauagaauc

SEQ ID NO: 790261 - RNA, 19 nt, Artificial Sequence
  Description of Artificial Sequence: Synthetic oligonucleotide
ugcgagaaaagauucuaga

SEQ ID NO: 790262 - RNA, 19 nt, Artificial Sequence
  Description of Artificial Sequence: Synthetic oligonucleotide
agugucugcacacuauuug

SEQ ID NO: 790263 - RNA, 19 nt, Artificial Sequence
  Description of Artificial Sequence: Synthetic oligonucleotide
acuacucugaacuuacuau

SEQ ID NO: 790264 - RNA, 19 nt, Artificial Sequence
  Description of Artificial Sequence: Synthetic oligonucleotide
ugcaucaauguaaacacuu

SEQ ID NO: 790265 - RNA, 19 nt, Artificial Sequence
  Description of Artificial Sequence: Synthetic oligonucleotide
ucaauguaaacacuucguu

SEQ ID NO: 790266 - RNA, 19 nt, Artificial Sequence
  Description of Artificial Sequence: Synthetic oligonucleotide
uguugauucuaggugguag

SEQ ID NO: 790267 - RNA, 19 nt, Artificial Sequence
  Description of Artificial Sequence: Synthetic oligonucleotide
aaaccagccauacuuguua

SEQ ID NO: 790268 - RNA, 19 nt, Artificial Sequence
  Description of Artificial Sequence: Synthetic oligonucleotide
guuagguugaacaagucuc

SEQ ID NO: 790269 - RNA, 19 nt, Artificial Sequence
  Description of Artificial Sequence: Synthetic oligonucleotide
aacuucuguugcuuugcuc

SEQ ID NO: 790270 - RNA, 19 nt, Artificial Sequence
  Description of Artificial Sequence: Synthetic oligonucleotide
aggacgaaauucaaauacc

SEQ ID NO: 790271 - RNA, 19 nt, Artificial Sequence
  Description of Artificial Sequence: Synthetic oligonucleotide
ugagagaacuuacauuuau

SEQ ID NO: 790272 - RNA, 19 nt, Artificial Sequence
  Description of Artificial Sequence: Synthetic oligonucleotide
uguuuacuacuucuuccag

SEQ ID NO: 790273 - RNA, 19 nt, Artificial Sequence
  Description of Artificial Sequence: Synthetic oligonucleotide
gguugaacaagucucauuc

SEQ ID NO: 790274 - RNA, 19 nt, Artificial Sequence
  Description of Artificial Sequence: Synthetic oligonucleotide
uuacaucuaugucauuuac

SEQ ID NO: 790275 - RNA, 19 nt, Artificial Sequence
  Description of Artificial Sequence: Synthetic oligonucleotide
aauugucgccaccuccagg

SEQ ID NO: 790276 - RNA, 19 nt, Artificial Sequence
  Description of Artificial Sequence: Synthetic oligonucleotide
cuacucugaacuuacuaug

SEQ ID NO: 790277 - RNA, 19 nt, Artificial Sequence
  Description of Artificial Sequence: Synthetic oligonucleotide
caauuaaucaucaacuacu

SEQ ID NO: 790278 - RNA, 19 nt, Artificial Sequence
  Description of Artificial Sequence: Synthetic oligonucleotide
ugcaauugucgccaccucc

SEQ ID NO: 790279 - RNA, 19 nt, Artificial Sequence
  Description of Artificial Sequence: Synthetic oligonucleotide
ucuagaucaaguguguuua

SEQ ID NO: 790280 - RNA, 19 nt, Artificial Sequence
  Description of Artificial Sequence: Synthetic oligonucleotide
ucaaguguguuuaauucuu

SEQ ID NO: 790281 - RNA, 19 nt, Artificial Sequence
  Description of Artificial Sequence: Synthetic oligonucleotide
aagaaugcacacaccacag

SEQ ID NO: 790282 - RNA, 19 nt, Artificial Sequence
  Description of Artificial Sequence: Synthetic oligonucleotide
caggcuuacaucuauguca

SEQ ID NO: 790283 - RNA, 19 nt, Artificial Sequence
  Description of Artificial Sequence: Synthetic oligonucleotide
aguuuaucgaucuuuucuu

SEQ ID NO: 790284 - RNA, 19 nt, Artificial Sequence
  Description of Artificial Sequence: Synthetic oligonucleotide
gguagaacaauuaacguca

SEQ ID NO: 790285 - RNA, 19 nt, Artificial Sequence
  Description of Artificial Sequence: Synthetic oligonucleotide
uccaugcgagaaaagauuc

SEQ ID NO: 790286 - RNA, 19 nt, Artificial Sequence
  Description of Artificial Sequence: Synthetic oligonucleotide
aacuacucugaacuuacua

SEQ ID NO: 790287 - RNA, 19 nt, Artificial Sequence
  Description of Artificial Sequence: Synthetic oligonucleotide
acuuugugcuaccugacgu

SEQ ID NO: 790288 - RNA, 19 nt, Artificial Sequence
  Description of Artificial Sequence: Synthetic oligonucleotide
cucacgaccacugaucacc

SEQ ID NO: 790289 - RNA, 19 nt, Artificial Sequence
  Description of Artificial Sequence: Synthetic oligonucleotide
aguuacacaugcccaauga

SEQ ID NO: 790290 - RNA, 19 nt, Artificial Sequence
  Description of Artificial Sequence: Synthetic oligonucleotide
ugcucaaguuuaucgaucu

SEQ ID NO: 790291 - RNA, 19 nt, Artificial Sequence
  Description of Artificial Sequence: Synthetic oligonucleotide
ucaaguuuaucgaucuuuu

SEQ ID NO: 790292 - RNA, 19 nt, Artificial Sequence
  Description of Artificial Sequence: Synthetic oligonucleotide
gagaacuuacauuuaucuc

SEQ ID NO: 790293 - RNA, 19 nt, Artificial Sequence
  Description of Artificial Sequence: Synthetic oligonucleotide
aucuuucaagacuggcuac

SEQ ID NO: 790294 - RNA, 19 nt, Artificial Sequence
  Description of Artificial Sequence: Synthetic oligonucleotide
acaggcuuacaucuauguc

SEQ ID NO: 790295 - RNA, 19 nt, Artificial Sequence
  Description of Artificial Sequence: Synthetic oligonucleotide
cuggcuacagugauacccg

SEQ ID NO: 790296 - RNA, 19 nt, Artificial Sequence
  Description of Artificial Sequence: Synthetic oligonucleotide
uaucgaucuuuucuugucu

SEQ ID NO: 790297 - RNA, 19 nt, Artificial Sequence
  Description of Artificial Sequence: Synthetic oligonucleotide
uacugaaccugcauaugca

SEQ ID NO: 790298 - RNA, 19 nt, Artificial Sequence
  Description of Artificial Sequence: Synthetic oligonucleotide
ucaucuagaucaagugugu

SEQ ID NO: 790299 - RNA, 19 nt, Artificial Sequence
  Description of Artificial Sequence: Synthetic oligonucleotide
ugcauggcgauacaugcaa

SEQ ID NO: 790300 - RNA, 19 nt, Artificial Sequence
  Description of Artificial Sequence: Synthetic oligonucleotide
agaaucaucggaaggaagu

SEQ ID NO: 790301 - RNA, 19 nt, Artificial Sequence
  Description of Artificial Sequence: Synthetic oligonucleotide
uguacaggcuuacaucuau

SEQ ID NO: 790302 - RNA, 19 nt, Artificial Sequence
  Description of Artificial Sequence: Synthetic oligonucleotide
auaugcaguuuccuuuauc

SEQ ID NO: 790303 - RNA, 19 nt, Artificial Sequence
  Description of Artificial Sequence: Synthetic oligonucleotide
uuaucgaucuuuucuuguc

SEQ ID NO: 790304 - RNA, 19 nt, Artificial Sequence
  Description of Artificial Sequence: Synthetic oligonucleotide
aguugaccuuguuagguug

SEQ ID NO: 790305 - RNA, 19 nt, Artificial Sequence
  Description of Artificial Sequence: Synthetic oligonucleotide
aaguacagugcucaccuuu

SEQ ID NO: 790306 - RNA, 19 nt, Artificial Sequence
  Description of Artificial Sequence: Synthetic oligonucleotide
aggcagaacgcucucuuuc

SEQ ID NO: 790307 - RNA, 19 nt, Artificial Sequence
  Description of Artificial Sequence: Synthetic oligonucleotide
aauuaacgucaauuucagu

SEQ ID NO: 790308 - RNA, 19 nt, Artificial Sequence
  Description of Artificial Sequence: Synthetic oligonucleotide
guagucaaagucagaagag

SEQ ID NO: 790309 - RNA, 19 nt, Artificial Sequence
  Description of Artificial Sequence: Synthetic oligonucleotide
guuguccucguccaaauca

SEQ ID NO: 790310 - RNA, 19 nt, Artificial Sequence
  Description of Artificial Sequence: Synthetic oligonucleotide
uccuccagaaucaucggaa

SEQ ID NO: 790311 - RNA, 19 nt, Artificial Sequence
  Description of Artificial Sequence: Synthetic oligonucleotide
acauuuggaccuaaggcag

SEQ ID NO: 790312 - RNA, 19 nt, Artificial Sequence
  Description of Artificial Sequence: Synthetic oligonucleotide
uacagugcucaccuuucag

SEQ ID NO: 790313 - RNA, 19 nt, Artificial Sequence
  Description of Artificial Sequence: Synthetic oligonucleotide
guucccugaauguaacgag

SEQ ID NO: 790314 - RNA, 19 nt, Artificial Sequence
  Description of Artificial Sequence: Synthetic oligonucleotide
aaguaaacauccuguugau

SEQ ID NO: 790315 - RNA, 19 nt, Artificial Sequence
  Description of Artificial Sequence: Synthetic oligonucleotide
ucuuuaucugaagcauacg

SEQ ID NO: 790316 - RNA, 19 nt, Artificial Sequence
  Description of Artificial Sequence: Synthetic oligonucleotide
uguuugaagaaugcacaca

SEQ ID NO: 790317 - RNA, 19 nt, Artificial Sequence
  Description of Artificial Sequence: Synthetic oligonucleotide
ucccaauuauccauaguau

SEQ ID NO: 790318 - RNA, 19 nt, Artificial Sequence
  Description of Artificial Sequence: Synthetic oligonucleotide
uucgucucuccauaucuug

SEQ ID NO: 790319 - RNA, 19 nt, Artificial Sequence
  Description of Artificial Sequence: Synthetic oligonucleotide
ugaaaaccaaaagcuggag

SEQ ID NO: 790320 - RNA, 19 nt, Artificial Sequence
  Description of Artificial Sequence: Synthetic oligonucleotide
aggugguagaacaauuaac

SEQ ID NO: 790321 - RNA, 19 nt, Artificial Sequence
  Description of Artificial Sequence: Synthetic oligonucleotide
agaucaaguguguuuaauu

SEQ ID NO: 790322 - RNA, 19 nt, Artificial Sequence
  Description of Artificial Sequence: Synthetic oligonucleotide
uucuuauucuuuagaccga

SEQ ID NO: 790323 - RNA, 19 nt, Artificial Sequence
  Description of Artificial Sequence: Synthetic oligonucleotide
uuccaugcgagaaaagauu

SEQ ID NO: 790324 - RNA, 19 nt, Artificial Sequence
  Description of Artificial Sequence: Synthetic oligonucleotide
cuaugagauguagucaaag

SEQ ID NO: 790325 - RNA, 19 nt, Artificial Sequence
  Description of Artificial Sequence: Synthetic oligonucleotide
gguacaacaacaaucaucu

SEQ ID NO: 790326 - RNA, 19 nt, Artificial Sequence
  Description of Artificial Sequence: Synthetic oligonucleotide
cauaucuugcucaaguuua

SEQ ID NO: 790327 - RNA, 19 nt, Artificial Sequence
  Description of Artificial Sequence: Synthetic oligonucleotide
ucugaagcauacgugcuga

SEQ ID NO: 790328 - RNA, 19 nt, Artificial Sequence
  Description of Artificial Sequence: Synthetic oligonucleotide
uucaggcagucuuuaaaac

SEQ ID NO: 790329 - RNA, 19 nt, Artificial Sequence
  Description of Artificial Sequence: Synthetic oligonucleotide
gaccuaauuuucuuccuuc

SEQ ID NO: 790330 - RNA, 19 nt, Artificial Sequence
  Description of Artificial Sequence: Synthetic oligonucleotide
ucaucggaaggaaguaaac

SEQ ID NO: 790331 - RNA, 19 nt, Artificial Sequence
  Description of Artificial Sequence: Synthetic oligonucleotide
auacaugcaauugucgcca

SEQ ID NO: 790332 - RNA, 19 nt, Artificial Sequence
  Description of Artificial Sequence: Synthetic oligonucleotide
gcgagaaaagauucuagag

SEQ ID NO: 790333 - RNA, 19 nt, Artificial Sequence
  Description of Artificial Sequence: Synthetic oligonucleotide
ucuaggugguagaacaauu

SEQ ID NO: 790334 - RNA, 19 nt, Artificial Sequence
  Description of Artificial Sequence: Synthetic oligonucleotide
ucgucucuccauaucuugc

SEQ ID NO: 790335 - RNA, 19 nt, Artificial Sequence
  Description of Artificial Sequence: Synthetic oligonucleotide
caucgauggacccauuuuc

SEQ ID NO: 790336 - RNA, 19 nt, Artificial Sequence
  Description of Artificial Sequence: Synthetic oligonucleotide
uggcgauacaugcaauugu

SEQ ID NO: 790337 - RNA, 19 nt, Artificial Sequence
  Description of Artificial Sequence: Synthetic oligonucleotide
acaugcaauugucgccacc

SEQ ID NO: 790338 - RNA, 19 nt, Artificial Sequence
  Description of Artificial Sequence: Synthetic oligonucleotide
caauuagaucuucuaauga

SEQ ID NO: 790339 - RNA, 19 nt, Artificial Sequence
  Description of Artificial Sequence: Synthetic oligonucleotide
uuuacacccauagaaucau

SEQ ID NO: 790340 - RNA, 19 nt, Artificial Sequence
  Description of Artificial Sequence: Synthetic oligonucleotide
gugcucaccuuucaggcag

SEQ ID NO: 790341 - RNA, 19 nt, Artificial Sequence
  Description of Artificial Sequence: Synthetic oligonucleotide
gaacaauuaacgucaauuu

SEQ ID NO: 790342 - RNA, 19 nt, Artificial Sequence
  Description of Artificial Sequence: Synthetic oligonucleotide
cacccauagaaucauccac

SEQ ID NO: 790343 - RNA, 19 nt, Artificial Sequence
  Description of Artificial Sequence: Synthetic oligonucleotide
aucucuugcaucaauguaa

SEQ ID NO: 790344 - RNA, 19 nt, Artificial Sequence
  Description of Artificial Sequence: Synthetic oligonucleotide
agaacgcucucuuucaauu

SEQ ID NO: 790345 - RNA, 19 nt, Artificial Sequence
  Description of Artificial Sequence: Synthetic oligonucleotide
ccuuucuuauucuuuagac

SEQ ID NO: 790346 - RNA, 19 nt, Artificial Sequence
  Description of Artificial Sequence: Synthetic oligonucleotide
uucaccauuuucagcucga

SEQ ID NO: 790347 - RNA, 19 nt, Artificial Sequence
  Description of Artificial Sequence: Synthetic oligonucleotide
aucuagaucaaguguguuu

SEQ ID NO: 790348 - RNA, 19 nt, Artificial Sequence
  Description of Artificial Sequence: Synthetic oligonucleotide
uugcucaaguuuaucgauc

SEQ ID NO: 790349 - RNA, 19 nt, Artificial Sequence
  Description of Artificial Sequence: Synthetic oligonucleotide
cuuauucuuuagaccgaag

SEQ ID NO: 790350 - RNA, 19 nt, Artificial Sequence
  Description of Artificial Sequence: Synthetic oligonucleotide
aguacagugcucaccuuuc

SEQ ID NO: 790351 - RNA, 19 nt, Artificial Sequence
  Description of Artificial Sequence: Synthetic oligonucleotide
uuuuccgccucaccgugcu

SEQ ID NO: 790352 - RNA, 19 nt, Artificial Sequence
  Description of Artificial Sequence: Synthetic oligonucleotide
acgaccacugaucaccaga

SEQ ID NO: 790353 - RNA, 19 nt, Artificial Sequence
  Description of Artificial Sequence: Synthetic oligonucleotide
ucuuauucuuuagaccgaa

SEQ ID NO: 790354 - RNA, 19 nt, Artificial Sequence
  Description of Artificial Sequence: Synthetic oligonucleotide
cauacgugcugaaucuuuc

SEQ ID NO: 790355 - RNA, 19 nt, Artificial Sequence
  Description of Artificial Sequence: Synthetic oligonucleotide
ugcuaccugacguggauuc

SEQ ID NO: 790356 - RNA, 19 nt, Artificial Sequence
  Description of Artificial Sequence: Synthetic oligonucleotide
acccgucucuucuacaucu

SEQ ID NO: 790357 - RNA, 19 nt, Artificial Sequence
  Description of Artificial Sequence: Synthetic oligonucleotide
cuagagugauuuugguaac

SEQ ID NO: 790358 - RNA, 19 nt, Artificial Sequence
  Description of Artificial Sequence: Synthetic oligonucleotide
aaucaucggaaggaaguaa

SEQ ID NO: 790359 - RNA, 19 nt, Artificial Sequence
  Description of Artificial Sequence: Synthetic oligonucleotide
aggucaugagagaacuuac

SEQ ID NO: 790360 - RNA, 19 nt, Artificial Sequence
  Description of Artificial Sequence: Synthetic oligonucleotide
cugacguggauucuguuga

SEQ ID NO: 790361 - RNA, 19 nt, Artificial Sequence
  Description of Artificial Sequence: Synthetic oligonucleotide
cacuuugugcuaccugacg

SEQ ID NO: 790362 - RNA, 19 nt, Artificial Sequence
  Description of Artificial Sequence: Synthetic oligonucleotide
cuuguuagguugaacaagu

SEQ ID NO: 790363 - RNA, 19 nt, Artificial Sequence
  Description of Artificial Sequence: Synthetic oligonucleotide
agagaggacgcagggagag

SEQ ID NO: 790364 - RNA, 19 nt, Artificial Sequence
  Description of Artificial Sequence: Synthetic oligonucleotide
caccuaauuguccagaugu

SEQ ID NO: 790365 - RNA, 19 nt, Artificial Sequence
  Description of Artificial Sequence: Synthetic oligonucleotide
ugauacccgucucuucuac

SEQ ID NO: 790366 - RNA, 19 nt, Artificial Sequence
  Description of Artificial Sequence: Synthetic oligonucleotide
acacccauagaaucaucca

SEQ ID NO: 790367 - RNA, 19 nt, Artificial Sequence
  Description of Artificial Sequence: Synthetic oligonucleotide
cugaucaccagagcuuucc

SEQ ID NO: 790368 - RNA, 19 nt, Artificial Sequence
  Description of Artificial Sequence: Synthetic oligonucleotide
gacgaaauucaaauaccuc

SEQ ID NO: 790369 - RNA, 19 nt, Artificial Sequence
  Description of Artificial Sequence: Synthetic oligonucleotide
ucacuuaauuuguuaucau

SEQ ID NO: 790370 - RNA, 19 nt, Artificial Sequence
  Description of Artificial Sequence: Synthetic oligonucleotide
uucaaggaagugucugcac

SEQ ID NO: 790371 - RNA, 19 nt, Artificial Sequence
  Description of Artificial Sequence: Synthetic oligonucleotide
agaaaguauuuaaguauga

SEQ ID NO: 790372 - RNA, 19 nt, Artificial Sequence
  Description of Artificial Sequence: Synthetic oligonucleotide
uuccuacaggaguggacag

SEQ ID NO: 790373 - RNA, 19 nt, Artificial Sequence
  Description of Artificial Sequence: Synthetic oligonucleotide
gacgcagggagaguauucc

SEQ ID NO: 790374 - RNA, 19 nt, Artificial Sequence
  Description of Artificial Sequence: Synthetic oligonucleotide
accuuguuagguugaacaa

SEQ ID NO: 790375 - RNA, 19 nt, Artificial Sequence
  Description of Artificial Sequence: Synthetic oligonucleotide
accucacgaccacugauca

SEQ ID NO: 790376 - RNA, 19 nt, Artificial Sequence
  Description of Artificial Sequence: Synthetic oligonucleotide
uugaucacggugagcugac

SEQ ID NO: 790377 - RNA, 19 nt, Artificial Sequence
  Description of Artificial Sequence: Synthetic oligonucleotide
agcuucaaggaagugucug

SEQ ID NO: 790378 - RNA, 19 nt, Artificial Sequence
  Description of Artificial Sequence: Synthetic oligonucleotide
acuuccuacaggaguggac

SEQ ID NO: 790379 - RNA, 19 nt, Artificial Sequence
  Description of Artificial Sequence: Synthetic oligonucleotide
auacgugcugaaucuuuca

SEQ ID NO: 790380 - RNA, 19 nt, Artificial Sequence
  Description of Artificial Sequence: Synthetic oligonucleotide
cucaggacgaaauucaaau

SEQ ID NO: 790381 - RNA, 19 nt, Artificial Sequence
  Description of Artificial Sequence: Synthetic oligonucleotide
agaaugcacacaccacaga

SEQ ID NO: 790382 - RNA, 19 nt, Artificial Sequence
  Description of Artificial Sequence: Synthetic oligonucleotide
ucuuuagaccgaagguuuu

SEQ ID NO: 790383 - RNA, 19 nt, Artificial Sequence
  Description of Artificial Sequence: Synthetic oligonucleotide
cuucacuuugugcuaccug

SEQ ID NO: 790384 - RNA, 19 nt, Artificial Sequence
  Description of Artificial Sequence: Synthetic oligonucleotide
guugaucacggugagcuga

SEQ ID NO: 790385 - RNA, 19 nt, Artificial Sequence
  Description of Artificial Sequence: Synthetic oligonucleotide
uuguuagguugaacaaguc

SEQ ID NO: 790386 - RNA, 19 nt, Artificial Sequence
  Description of Artificial Sequence: Synthetic oligonucleotide
ucguccaaaucacuucuuu

SEQ ID NO: 790387 - RNA, 19 nt, Artificial Sequence
  Description of Artificial Sequence: Synthetic oligonucleotide
cuuccuacaggaguggaca

SEQ ID NO: 790388 - RNA, 19 nt, Artificial Sequence
  Description of Artificial Sequence: Synthetic oligonucleotide
gaggucaugagagaacuua

SEQ ID NO: 790389 - RNA, 19 nt, Artificial Sequence
  Description of Artificial Sequence: Synthetic oligonucleotide
cuguucccugaauguaacg

SEQ ID NO: 790390 - RNA, 19 nt, Artificial Sequence
  Description of Artificial Sequence: Synthetic oligonucleotide
uuuguuguuccuggaaguu

SEQ ID NO: 790391 - RNA, 19 nt, Artificial Sequence
  Description of Artificial Sequence: Synthetic oligonucleotide
acuuacuaugagauguagu

SEQ ID NO: 790392 - RNA, 19 nt, Artificial Sequence
  Description of Artificial Sequence: Synthetic oligonucleotide
cgauacaugcaauugucgc

SEQ ID NO: 790393 - RNA, 19 nt, Artificial Sequence
  Description of Artificial Sequence: Synthetic oligonucleotide
uguugaucacggugagcug

SEQ ID NO: 790394 - RNA, 19 nt, Artificial Sequence
  Description of Artificial Sequence: Synthetic oligonucleotide
ugaccaaauuucacuugau

SEQ ID NO: 790395 - RNA, 19 nt, Artificial Sequence
  Description of Artificial Sequence: Synthetic oligonucleotide
guuacacuuccuacaggag

SEQ ID NO: 790396 - RNA, 19 nt, Artificial Sequence
  Description of Artificial Sequence: Synthetic oligonucleotide
uugauucuaggugguagaa

SEQ ID NO: 790397 - RNA, 19 nt, Artificial Sequence
  Description of Artificial Sequence: Synthetic oligonucleotide
cuuuaucaaguacagugcu

SEQ ID NO: 790398 - RNA, 19 nt, Artificial Sequence
  Description of Artificial Sequence: Synthetic oligonucleotide
ucacgaccacugaucacca

SEQ ID NO: 790399 - RNA, 19 nt, Artificial Sequence
  Description of Artificial Sequence: Synthetic oligonucleotide
ucaccagagcuuucccagc

SEQ ID NO: 790400 - RNA, 19 nt, Artificial Sequence
  Description of Artificial Sequence: Synthetic oligonucleotide
uccaccuaauuguccagau

SEQ ID NO: 790401 - RNA, 19 nt, Artificial Sequence
  Description of Artificial Sequence: Synthetic oligonucleotide
auaccucacgaccacugau

SEQ ID NO: 790402 - RNA, 19 nt, Artificial Sequence
  Description of Artificial Sequence: Synthetic oligonucleotide
cgaaauucaaauaccucac

SEQ ID NO: 790403 - RNA, 19 nt, Artificial Sequence
  Description of Artificial Sequence: Synthetic oligonucleotide
augcaauugucgccaccuc

SEQ ID NO: 790404 - RNA, 19 nt, Artificial Sequence
  Description of Artificial Sequence: Synthetic oligonucleotide
uugaugagugacagccuua

SEQ ID NO: 790405 - RNA, 19 nt, Artificial Sequence
  Description of Artificial Sequence: Synthetic oligonucleotide
uagaucaaguguguuuaau

SEQ ID NO: 790406 - RNA, 19 nt, Artificial Sequence
  Description of Artificial Sequence: Synthetic oligonucleotide
uaccugacguggauucugu

SEQ ID NO: 790407 - RNA, 19 nt, Artificial Sequence
  Description of Artificial Sequence: Synthetic oligonucleotide
aaaaccagccauacuuguu

SEQ ID NO: 790408 - RNA, 19 nt, Artificial Sequence
  Description of Artificial Sequence: Synthetic oligonucleotide
gcuucaaggaagugucugc

SEQ ID NO: 790409 - RNA, 19 nt, Artificial Sequence
  Description of Artificial Sequence: Synthetic oligonucleotide
acgucaauuucaguucaug

SEQ ID NO: 790410 - RNA, 19 nt, Artificial Sequence
  Description of Artificial Sequence: Synthetic oligonucleotide
cacaaauccaggaggaagu

SEQ ID NO: 790411 - RNA, 19 nt, Artificial Sequence
  Description of Artificial Sequence: Synthetic oligonucleotide
caucacuaccuguucccug

SEQ ID NO: 790412 - RNA, 19 nt, Artificial Sequence
  Description of Artificial Sequence: Synthetic oligonucleotide
ugcacacuauuugaguuuu

SEQ ID NO: 790413 - RNA, 19 nt, Artificial Sequence
  Description of Artificial Sequence: Synthetic oligonucleotide
ugaauguaacgaguaucau

SEQ ID NO: 790414 - RNA, 19 nt, Artificial Sequence
  Description of Artificial Sequence: Synthetic oligonucleotide
gacguggauucuguugacc

SEQ ID NO: 790415 - RNA, 19 nt, Artificial Sequence
  Description of Artificial Sequence: Synthetic oligonucleotide
ugaagcauacgugcugaau

SEQ ID NO: 790416 - RNA, 19 nt, Artificial Sequence
  Description of Artificial Sequence: Synthetic oligonucleotide
gguuugaacaacucauuua

SEQ ID NO: 790417 - RNA, 19 nt, Artificial Sequence
  Description of Artificial Sequence: Synthetic oligonucleotide
gauguacaauacugaaccu

SEQ ID NO: 790418 - RNA, 19 nt, Artificial Sequence
  Description of Artificial Sequence: Synthetic oligonucleotide
gucaugagagaacuuacau

SEQ ID NO: 790419 - RNA, 19 nt, Artificial Sequence
  Description of Artificial Sequence: Synthetic oligonucleotide
accgaagguuuuguccucg

SEQ ID NO: 790420 - RNA, 19 nt, Artificial Sequence
  Description of Artificial Sequence: Synthetic oligonucleotide
caucggaaggaaguaaaca

SEQ ID NO: 790421 - RNA, 19 nt, Artificial Sequence
  Description of Artificial Sequence: Synthetic oligonucleotide
uugugcuaccugacgugga

SEQ ID NO: 790422 - RNA, 19 nt, Artificial Sequence
  Description of Artificial Sequence: Synthetic oligonucleotide
ccgacugcgacgcggaugg

SEQ ID NO: 790423 - RNA, 19 nt, Artificial Sequence
  Description of Artificial Sequence: Synthetic oligonucleotide
aucaucggaaggaaguaaa

SEQ ID NO: 790424 - RNA, 19 nt, Artificial Sequence
  Description of Artificial Sequence: Synthetic oligonucleotide
gacgcggauggcuaccguc

SEQ ID NO: 790425 - RNA, 19 nt, Artificial Sequence
  Description of Artificial Sequence: Synthetic oligonucleotide
agccgagccgacugcgacg

SEQ ID NO: 790426 - RNA, 19 nt, Artificial Sequence
  Description of Artificial Sequence: Synthetic oligonucleotide
uuacacccauagaaucauc

SEQ ID NO: 790427 - RNA, 19 nt, Artificial Sequence
  Description of Artificial Sequence: Synthetic oligonucleotide
aucgauggacccauuuucu

SEQ ID NO: 790428 - RNA, 19 nt, Artificial Sequence
  Description of Artificial Sequence: Synthetic oligonucleotide
gugguagaacaauuaacgu

SEQ ID NO: 790429 - RNA, 19 nt, Artificial Sequence
  Description of Artificial Sequence: Synthetic oligonucleotide
gaucacggugagcugaccu

SEQ ID NO: 790430 - RNA, 19 nt, Artificial Sequence
  Description of Artificial Sequence: Synthetic oligonucleotide
ggaaguuacacaugcccaa

SEQ ID NO: 790431 - RNA, 19 nt, Artificial Sequence
  Description of Artificial Sequence: Synthetic oligonucleotide
uuguuguuccuggaaguua

SEQ ID NO: 790432 - RNA, 19 nt, Artificial Sequence
  Description of Artificial Sequence: Synthetic oligonucleotide
ucgaucuuuucuugucuuu

SEQ ID NO: 790433 - RNA, 19 nt, Artificial Sequence
  Description of Artificial Sequence: Synthetic oligonucleotide
acgcggauggcuaccgucg

SEQ ID NO: 790434 - RNA, 19 nt, Artificial Sequence
  Description of Artificial Sequence: Synthetic oligonucleotide
caauugucgccaccuccag

SEQ ID NO: 790435 - RNA, 19 nt, Artificial Sequence
  Description of Artificial Sequence: Synthetic oligonucleotide
agguugaacaagucucauu

SEQ ID NO: 790436 - RNA, 19 nt, Artificial Sequence
  Description of Artificial Sequence: Synthetic oligonucleotide
cuuuuccgccucaccgugc

SEQ ID NO: 790437 - RNA, 19 nt, Artificial Sequence
  Description of Artificial Sequence: Synthetic oligonucleotide
acagcaucgauggacccau

SEQ ID NO: 790438 - RNA, 19 nt, Artificial Sequence
  Description of Artificial Sequence: Synthetic oligonucleotide
ucgauggacccauuuucuu

SEQ ID NO: 790439 - RNA, 19 nt, Artificial Sequence
  Description of Artificial Sequence: Synthetic oligonucleotide
cuuccguuguccucgucca

SEQ ID NO: 790440 - RNA, 19 nt, Artificial Sequence
  Description of Artificial Sequence: Synthetic oligonucleotide
gaaucaucggaaggaagua

SEQ ID NO: 790441 - RNA, 19 nt, Artificial Sequence
  Description of Artificial Sequence: Synthetic oligonucleotide
aucacggugagcugaccua

SEQ ID NO: 790442 - RNA, 19 nt, Artificial Sequence
  Description of Artificial Sequence: Synthetic oligonucleotide
cuaccugacguggauucug

SEQ ID NO: 790443 - RNA, 19 nt, Artificial Sequence
  Description of Artificial Sequence: Synthetic oligonucleotide
cuucaaggaagugucugca

SEQ ID NO: 790444 - RNA, 19 nt, Artificial Sequence
  Description of Artificial Sequence: Synthetic oligonucleotide
gguuuuguccucgaugauc

SEQ ID NO: 790445 - RNA, 19 nt, Artificial Sequence
  Description of Artificial Sequence: Synthetic oligonucleotide
agcaucgauggacccauuu

SEQ ID NO: 790446 - RNA, 19 nt, Artificial Sequence
  Description of Artificial Sequence: Synthetic oligonucleotide
gaacgcucucuuucaauua

SEQ ID NO: 790447 - RNA, 19 nt, Artificial Sequence
  Description of Artificial Sequence: Synthetic oligonucleotide
accuaaggcagaacgcucu

SEQ ID NO: 790448 - RNA, 19 nt, Artificial Sequence
  Description of Artificial Sequence: Synthetic oligonucleotide
uaucuugcucaaguuuauc

SEQ ID NO: 790449 - RNA, 19 nt, Artificial Sequence
  Description of Artificial Sequence: Synthetic oligonucleotide
ccugacguggauucuguug

SEQ ID NO: 790450 - RNA, 19 nt, Artificial Sequence
  Description of Artificial Sequence: Synthetic oligonucleotide
uuccuucauucaucuagau

SEQ ID NO: 790451 - RNA, 19 nt, Artificial Sequence
  Description of Artificial Sequence: Synthetic oligonucleotide
cuccauaucuugcucaagu

SEQ ID NO: 790452 - RNA, 19 nt, Artificial Sequence
  Description of Artificial Sequence: Synthetic oligonucleotide
ccuaauuguccagauguac

SEQ ID NO: 790453 - RNA, 19 nt, Artificial Sequence
  Description of Artificial Sequence: Synthetic oligonucleotide
cacccaaaaccagccauac

SEQ ID NO: 790454 - RNA, 19 nt, Artificial Sequence
  Description of Artificial Sequence: Synthetic oligonucleotide
ucacggugagcugaccuaa

SEQ ID NO: 790455 - RNA, 19 nt, Artificial Sequence
  Description of Artificial Sequence: Synthetic oligonucleotide
gcgauacaugcaauugucg

SEQ ID NO: 790456 - RNA, 19 nt, Artificial Sequence
  Description of Artificial Sequence: Synthetic oligonucleotide
cuuccaugcgagaaaagau

SEQ ID NO: 790457 - RNA, 19 nt, Artificial Sequence
  Description of Artificial Sequence: Synthetic oligonucleotide
gugagcugaccuaauuuuc

SEQ ID NO: 790458 - RNA, 19 nt, Artificial Sequence
  Description of Artificial Sequence: Synthetic oligonucleotide
ccugaauguaacgaguauc

SEQ ID NO: 790459 - RNA, 19 nt, Artificial Sequence
  Description of Artificial Sequence: Synthetic oligonucleotide
gaguggacagguacaacaa

SEQ ID NO: 790460 - RNA, 19 nt, Artificial Sequence
  Description of Artificial Sequence: Synthetic oligonucleotide
ugacguggauucuguugac

SEQ ID NO: 790461 - RNA, 19 nt, Artificial Sequence
  Description of Artificial Sequence: Synthetic oligonucleotide
aagugucugcacacuauuu

SEQ ID NO: 790462 - RNA, 19 nt, Artificial Sequence
  Description of Artificial Sequence: Synthetic oligonucleotide
gucgccaccuccaggacac

SEQ ID NO: 790463 - RNA, 19 nt, Artificial Sequence
  Description of Artificial Sequence: Synthetic oligonucleotide
auggcuaccgucggggcgu

SEQ ID NO: 790464 - RNA, 19 nt, Artificial Sequence
  Description of Artificial Sequence: Synthetic oligonucleotide
uacaugcaauugucgccac

SEQ ID NO: 790465 - RNA, 19 nt, Artificial Sequence
  Description of Artificial Sequence: Synthetic oligonucleotide
uugggauguacaggcuuac

SEQ ID NO: 790466 - RNA, 19 nt, Artificial Sequence
  Description of Artificial Sequence: Synthetic oligonucleotide
uccguuguccucguccaaa

SEQ ID NO: 790467 - RNA, 19 nt, Artificial Sequence
  Description of Artificial Sequence: Synthetic oligonucleotide
gagccgagccgacugcgac

SEQ ID NO: 790468 - RNA, 19 nt, Artificial Sequence
  Description of Artificial Sequence: Synthetic oligonucleotide
gaagugucugcacacuauu

SEQ ID NO: 790469 - RNA, 19 nt, Artificial Sequence
  Description of Artificial Sequence: Synthetic oligonucleotide
cuugcucaaguuuaucgau

SEQ ID NO: 790470 - RNA, 19 nt, Artificial Sequence
  Description of Artificial Sequence: Synthetic oligonucleotide
uagguugaacaagucucau

SEQ ID NO: 790471 - RNA, 19 nt, Artificial Sequence
  Description of Artificial Sequence: Synthetic oligonucleotide
ugaggucaugagagaacuu

SEQ ID NO: 790472 - RNA, 19 nt, Artificial Sequence
  Description of Artificial Sequence: Synthetic oligonucleotide
cuacagugauacccgucuc

SEQ ID NO: 790473 - RNA, 19 nt, Artificial Sequence
  Description of Artificial Sequence: Synthetic oligonucleotide
auugaccagcucaggacga

SEQ ID NO: 790474 - RNA, 19 nt, Artificial Sequence
  Description of Artificial Sequence: Synthetic oligonucleotide
ggcgauacaugcaauuguc

SEQ ID NO: 790475 - RNA, 19 nt, Artificial Sequence
  Description of Artificial Sequence: Synthetic oligonucleotide
auggacccauuuucuugug

SEQ ID NO: 790476 - RNA, 19 nt, Artificial Sequence
  Description of Artificial Sequence: Synthetic oligonucleotide
acagugauacccgucucuu

SEQ ID NO: 790477 - RNA, 19 nt, Artificial Sequence
  Description of Artificial Sequence: Synthetic oligonucleotide
gaccuaaggcagaacgcuc

SEQ ID NO: 790478 - RNA, 19 nt, Artificial Sequence
  Description of Artificial Sequence: Synthetic oligonucleotide
aguaaacauccuguugauu

SEQ ID NO: 790479 - RNA, 19 nt, Artificial Sequence
  Description of Artificial Sequence: Synthetic oligonucleotide
cauuuggaccuaaggcaga

SEQ ID NO: 790480 - RNA, 19 nt, Artificial Sequence
  Description of Artificial Sequence: Synthetic oligonucleotide
gcuacagugauacccgucu

SEQ ID NO: 790481 - RNA, 19 nt, Artificial Sequence
  Description of Artificial Sequence: Synthetic oligonucleotide
acccaaaaccagccauacu

SEQ ID NO: 790482 - RNA, 19 nt, Artificial Sequence
  Description of Artificial Sequence: Synthetic oligonucleotide
uggcuacagugauacccgu

SEQ ID NO: 790483 - RNA, 19 nt, Artificial Sequence
  Description of Artificial Sequence: Synthetic oligonucleotide
cgugcugaaucuuucaaga

SEQ ID NO: 790484 - RNA, 19 nt, Artificial Sequence
  Description of Artificial Sequence: Synthetic oligonucleotide
cugcaucaaacagaaagua

SEQ ID NO: 790485 - RNA, 19 nt, Artificial Sequence
  Description of Artificial Sequence: Synthetic oligonucleotide
cagugauacccgucucuuc

SEQ ID NO: 790486 - RNA, 19 nt, Artificial Sequence
  Description of Artificial Sequence: Synthetic oligonucleotide
ccaaagugaggucaugaga

SEQ ID NO: 790487 - RNA, 19 nt, Artificial Sequence
  Description of Artificial Sequence: Synthetic oligonucleotide
gccuuaauaaacuucuguu

SEQ ID NO: 790488 - RNA, 19 nt, Artificial Sequence
  Description of Artificial Sequence: Synthetic oligonucleotide
guacaauacugaaccugca

SEQ ID NO: 790489 - RNA, 19 nt, Artificial Sequence
  Description of Artificial Sequence: Synthetic oligonucleotide
cuagaucaaguguguuuaa

SEQ ID NO: 790490 - RNA, 19 nt, Artificial Sequence
  Description of Artificial Sequence: Synthetic oligonucleotide
uugguaacauuuggaccua

SEQ ID NO: 790491 - RNA, 19 nt, Artificial Sequence
  Description of Artificial Sequence: Synthetic oligonucleotide
acuaugagauguagucaaa

SEQ ID NO: 790492 - RNA, 19 nt, Artificial Sequence
  Description of Artificial Sequence: Synthetic oligonucleotide
ggacgaaauucaaauaccu

SEQ ID NO: 790493 - RNA, 19 nt, Artificial Sequence
  Description of Artificial Sequence: Synthetic oligonucleotide
aguaguccuccagaaucau

SEQ ID NO: 790494 - RNA, 19 nt, Artificial Sequence
  Description of Artificial Sequence: Synthetic oligonucleotide
caccgugcuucuuguuuac

SEQ ID NO: 790495 - RNA, 19 nt, Artificial Sequence
  Description of Artificial Sequence: Synthetic oligonucleotide
acggugagcugaccuaauu

SEQ ID NO: 790496 - RNA, 19 nt, Artificial Sequence
  Description of Artificial Sequence: Synthetic oligonucleotide
cgauggacccauuuucuug

SEQ ID NO: 790497 - RNA, 19 nt, Artificial Sequence
  Description of Artificial Sequence: Synthetic oligonucleotide
ggagaagcaguuacacuuc

SEQ ID NO: 790498 - RNA, 19 nt, Artificial Sequence
  Description of Artificial Sequence: Synthetic oligonucleotide
ggugagcugaccuaauuuu

SEQ ID NO: 790499 - RNA, 19 nt, Artificial Sequence
  Description of Artificial Sequence: Synthetic oligonucleotide
gacaguaguccuccagaau

SEQ ID NO: 790500 - RNA, 19 nt, Artificial Sequence
  Description of Artificial Sequence: Synthetic oligonucleotide
ucgggcagcgcggcgggag

SEQ ID NO: 790501 - RNA, 19 nt, Artificial Sequence
  Description of Artificial Sequence: Synthetic oligonucleotide
ugcgacgcggauggcuacc

SEQ ID NO: 790502 - RNA, 19 nt, Artificial Sequence
  Description of Artificial Sequence: Synthetic oligonucleotide
cuaccgucggggcgucggg

SEQ ID NO: 790503 - RNA, 19 nt, Artificial Sequence
  Description of Artificial Sequence: Synthetic oligonucleotide
ugaucacggugagcugacc

SEQ ID NO: 790504 - RNA, 19 nt, Artificial Sequence
  Description of Artificial Sequence: Synthetic oligonucleotide
ggacaguaguccuccagaa

SEQ ID NO: 790505 - RNA, 19 nt, Artificial Sequence
  Description of Artificial Sequence: Synthetic oligonucleotide
cgaccacugaucaccagag

SEQ ID NO: 790506 - RNA, 19 nt, Artificial Sequence
  Description of Artificial Sequence: Synthetic oligonucleotide
gagugauuuugguaacauu

SEQ ID NO: 790507 - RNA, 19 nt, Artificial Sequence
  Description of Artificial Sequence: Synthetic oligonucleotide
uuccguuguccucguccaa

SEQ ID NO: 790508 - RNA, 19 nt, Artificial Sequence
  Description of Artificial Sequence: Synthetic oligonucleotide
cacgaccacugaucaccag

SEQ ID NO: 790509 - RNA, 19 nt, Artificial Sequence
  Description of Artificial Sequence: Synthetic oligonucleotide
gcuuacaucuaugucauuu

SEQ ID NO: 790510 - RNA, 19 nt, Artificial Sequence
  Description of Artificial Sequence: Synthetic oligonucleotide
ugguaacauuuggaccuaa

SEQ ID NO: 790511 - RNA, 19 nt, Artificial Sequence
  Description of Artificial Sequence: Synthetic oligonucleotide
acacccaaaaccagccaua

SEQ ID NO: 790512 - RNA, 19 nt, Artificial Sequence
  Description of Artificial Sequence: Synthetic oligonucleotide
ccauuuucagcucgaccuc

SEQ ID NO: 790513 - RNA, 19 nt, Artificial Sequence
  Description of Artificial Sequence: Synthetic oligonucleotide
gcuaccgucggggcgucgg

SEQ ID NO: 790514 - RNA, 19 nt, Artificial Sequence
  Description of Artificial Sequence: Synthetic oligonucleotide
cacacccaaaaccagccau

SEQ ID NO: 790515 - RNA, 19 nt, Artificial Sequence
  Description of Artificial Sequence: Synthetic oligonucleotide
accuaauuguccagaugua

SEQ ID NO: 790516 - RNA, 19 nt, Artificial Sequence
  Description of Artificial Sequence: Synthetic oligonucleotide
agcucaggacgaaauucaa

SEQ ID NO: 790517 - RNA, 19 nt, Artificial Sequence
  Description of Artificial Sequence: Synthetic oligonucleotide
acgcucucuuucaauuaga

SEQ ID NO: 790518 - RNA, 19 nt, Artificial Sequence
  Description of Artificial Sequence: Synthetic oligonucleotide
agcauacgugcugaaucuu

SEQ ID NO: 790519 - RNA, 19 nt, Artificial Sequence
  Description of Artificial Sequence: Synthetic oligonucleotide
ccaccuaauuguccagaug

SEQ ID NO: 790520 - RNA, 19 nt, Artificial Sequence
  Description of Artificial Sequence: Synthetic oligonucleotide
ggaccuaaggcagaacgcu

SEQ ID NO: 790521 - RNA, 19 nt, Artificial Sequence
  Description of Artificial Sequence: Synthetic oligonucleotide
caucgcggaggcgcgggag

SEQ ID NO: 790522 - RNA, 19 nt, Artificial Sequence
  Description of Artificial Sequence: Synthetic oligonucleotide
cugcgacgcggauggcuac

SEQ ID NO: 790523 - RNA, 19 nt, Artificial Sequence
  Description of Artificial Sequence: Synthetic oligonucleotide
gcggauggcuaccgucggg

SEQ ID NO: 790524 - RNA, 19 nt, Artificial Sequence
  Description of Artificial Sequence: Synthetic oligonucleotide
gaggaagugcauggcgaua

SEQ ID NO: 790525 - RNA, 19 nt, Artificial Sequence
  Description of Artificial Sequence: Synthetic oligonucleotide
accugacguggauucuguu

SEQ ID NO: 790526 - RNA, 19 nt, Artificial Sequence
  Description of Artificial Sequence: Synthetic oligonucleotide
cugcacacuauuugaguuu

SEQ ID NO: 790527 - RNA, 19 nt, Artificial Sequence
  Description of Artificial Sequence: Synthetic oligonucleotide
cugaagcauacgugcugaa

SEQ ID NO: 790528 - RNA, 19 nt, Artificial Sequence
  Description of Artificial Sequence: Synthetic oligonucleotide
accgugcuucuuguuuacu

SEQ ID NO: 790529 - RNA, 19 nt, Artificial Sequence
  Description of Artificial Sequence: Synthetic oligonucleotide
gagccgacugcgacgcgga

SEQ ID NO: 790530 - RNA, 19 nt, Artificial Sequence
  Description of Artificial Sequence: Synthetic oligonucleotide
accacagauuugggaucug

SEQ ID NO: 790531 - RNA, 19 nt, Artificial Sequence
  Description of Artificial Sequence: Synthetic oligonucleotide
cggauggcuaccgucgggg

SEQ ID NO: 790532 - RNA, 19 nt, Artificial Sequence
  Description of Artificial Sequence: Synthetic oligonucleotide
cagcuuuucgucucuccau

SEQ ID NO: 790533 - RNA, 19 nt, Artificial Sequence
  Description of Artificial Sequence: Synthetic oligonucleotide
cacuuccuacaggagugga

SEQ ID NO: 790534 - RNA, 19 nt, Artificial Sequence
  Description of Artificial Sequence: Synthetic oligonucleotide
caucaacuacucugaacuu

SEQ ID NO: 790535 - RNA, 19 nt, Artificial Sequence
  Description of Artificial Sequence: Synthetic oligonucleotide
cagaacgcucucuuucaau

SEQ ID NO: 790536 - RNA, 19 nt, Artificial Sequence
  Description of Artificial Sequence: Synthetic oligonucleotide
ggacgcagggagaguauuc

SEQ ID NO: 790537 - RNA, 19 nt, Artificial Sequence
  Description of Artificial Sequence: Synthetic oligonucleotide
ggaggaagugcauggcgau

SEQ ID NO: 790538 - RNA, 19 nt, Artificial Sequence
  Description of Artificial Sequence: Synthetic oligonucleotide
cgucaauuucaguucaugu

SEQ ID NO: 790539 - RNA, 19 nt, Artificial Sequence
  Description of Artificial Sequence: Synthetic oligonucleotide
uuuccgccucaccgugcuu

SEQ ID NO: 790540 - RNA, 19 nt, Artificial Sequence
  Description of Artificial Sequence: Synthetic oligonucleotide
ggcuacagugauacccguc

SEQ ID NO: 790541 - RNA, 19 nt, Artificial Sequence
  Description of Artificial Sequence: Synthetic oligonucleotide
gcgacgcggauggcuaccg

SEQ ID NO: 790542 - RNA, 19 nt, Artificial Sequence
  Description of Artificial Sequence: Synthetic oligonucleotide
ccucacgaccacugaucac

SEQ ID NO: 790543 - RNA, 19 nt, Artificial Sequence
  Description of Artificial Sequence: Synthetic oligonucleotide
gcaucgauggacccauuuu

SEQ ID NO: 790544 - RNA, 19 nt, Artificial Sequence
  Description of Artificial Sequence: Synthetic oligonucleotide
ggggcgucgggcagcgcgg

SEQ ID NO: 790545 - RNA, 19 nt, Artificial Sequence
  Description of Artificial Sequence: Synthetic oligonucleotide
gccgacugcgacgcggaug

SEQ ID NO: 790546 - RNA, 19 nt, Artificial Sequence
  Description of Artificial Sequence: Synthetic oligonucleotide
caacaggaacagcaucgau

SEQ ID NO: 790547 - RNA, 19 nt, Artificial Sequence
  Description of Artificial Sequence: Synthetic oligonucleotide
cgagccgacugcgacgcgg

SEQ ID NO: 790548 - RNA, 19 nt, Artificial Sequence
  Description of Artificial Sequence: Synthetic oligonucleotide
ccgugcuucuuguuuacua

SEQ ID NO: 790549 - RNA, 19 nt, Artificial Sequence
  Description of Artificial Sequence: Synthetic oligonucleotide
cuguugauucuagguggua

SEQ ID NO: 790550 - RNA, 19 nt, Artificial Sequence
  Description of Artificial Sequence: Synthetic oligonucleotide
gcuuuucgucucuccauau

SEQ ID NO: 790551 - RNA, 19 nt, Artificial Sequence
  Description of Artificial Sequence: Synthetic oligonucleotide
cccgucucuucuacaucuc

SEQ ID NO: 790552 - RNA, 19 nt, Artificial Sequence
  Description of Artificial Sequence: Synthetic oligonucleotide
ccaugcgagaaaagauucu

SEQ ID NO: 790553 - RNA, 19 nt, Artificial Sequence
  Description of Artificial Sequence: Synthetic oligonucleotide
agccgacugcgacgcggau

SEQ ID NO: 790554 - RNA, 19 nt, Artificial Sequence
  Description of Artificial Sequence: Synthetic oligonucleotide
gaggacgcagggagaguau

SEQ ID NO: 790555 - RNA, 19 nt, Artificial Sequence
  Description of Artificial Sequence: Synthetic oligonucleotide
caaguacagugcucaccuu

SEQ ID NO: 790556 - RNA, 19 nt, Artificial Sequence
  Description of Artificial Sequence: Synthetic oligonucleotide
gcauacgugcugaaucuuu

SEQ ID NO: 790557 - RNA, 19 nt, Artificial Sequence
  Description of Artificial Sequence: Synthetic oligonucleotide
ccgaagguuuuguccucga

SEQ ID NO: 790558 - RNA, 19 nt, Artificial Sequence
  Description of Artificial Sequence: Synthetic oligonucleotide
ucgccaccuccaggacaca

SEQ ID NO: 790559 - RNA, 19 nt, Artificial Sequence
  Description of Artificial Sequence: Synthetic oligonucleotide
cacggugagcugaccuaau

SEQ ID NO: 790560 - RNA, 19 nt, Artificial Sequence
  Description of Artificial Sequence: Synthetic oligonucleotide
uggcuaccgucggggcguc

SEQ ID NO: 790561 - RNA, 19 nt, Artificial Sequence
  Description of Artificial Sequence: Synthetic oligonucleotide
gugcuaccugacguggauu

SEQ ID NO: 790562 - RNA, 19 nt, Artificial Sequence
  Description of Artificial Sequence: Synthetic oligonucleotide
cccugaauguaacgaguau

SEQ ID NO: 790563 - RNA, 19 nt, Artificial Sequence
  Description of Artificial Sequence: Synthetic oligonucleotide
cgcucucuuucaauuagau

SEQ ID NO: 790564 - RNA, 19 nt, Artificial Sequence
  Description of Artificial Sequence: Synthetic oligonucleotide
gcaucgcggaggcgcggga

SEQ ID NO: 790565 - RNA, 19 nt, Artificial Sequence
  Description of Artificial Sequence: Synthetic oligonucleotide
ggcuaccgucggggcgucg

SEQ ID NO: 790566 - RNA, 19 nt, Artificial Sequence
  Description of Artificial Sequence: Synthetic oligonucleotide
cggugagcugaccuaauuu

SEQ ID NO: 790567 - RNA, 19 nt, Artificial Sequence
  Description of Artificial Sequence: Synthetic oligonucleotide
gcauggcgauacaugcaau

SEQ ID NO: 790568 - RNA, 19 nt, Artificial Sequence
  Description of Artificial Sequence: Synthetic oligonucleotide
ccgagccgacugcgacgcg

SEQ ID NO: 790569 - RNA, 19 nt, Artificial Sequence
  Description of Artificial Sequence: Synthetic oligonucleotide
cgaguaucaucugcuuccu

SEQ ID NO: 790570 - RNA, 19 nt, Artificial Sequence
  Description of Artificial Sequence: Synthetic oligonucleotide
ggcuuacaucuaugucauu

SEQ ID NO: 790571 - RNA, 19 nt, Artificial Sequence
  Description of Artificial Sequence: Synthetic oligonucleotide
cgaagguuuuguccucgau

SEQ ID NO: 790572 - RNA, 19 nt, Artificial Sequence
  Description of Artificial Sequence: Synthetic oligonucleotide
cagcaucgauggacccauu

SEQ ID NO: 790573 - RNA, 19 nt, Artificial Sequence
  Description of Artificial Sequence: Synthetic oligonucleotide
cgcgggagccgagccgacu

SEQ ID NO: 790574 - RNA, 19 nt, Artificial Sequence
  Description of Artificial Sequence: Synthetic oligonucleotide
ccccggccugagccuguuu

SEQ ID NO: 790575 - RNA, 19 nt, Artificial Sequence
  Description of Artificial Sequence: Synthetic oligonucleotide
gaaacauacgcaaagaggc

SEQ ID NO: 790576 - RNA, 19 nt, Artificial Sequence
  Description of Artificial Sequence: Synthetic oligonucleotide
aauaccagcaucgugaugu

SEQ ID NO: 790577 - RNA, 19 nt, Artificial Sequence
  Description of Artificial Sequence: Synthetic oligonucleotide
aagguugaagugcauagcg

SEQ ID NO: 790578 - RNA, 19 nt, Artificial Sequence
  Description of Artificial Sequence: Synthetic oligonucleotide
uuuaccacgguccuggcag

SEQ ID NO: 790579 - RNA, 19 nt, Artificial Sequence
  Description of Artificial Sequence: Synthetic oligonucleotide
ucucauauguggcacaugc

SEQ ID NO: 790580 - RNA, 19 nt, Artificial Sequence
  Description of Artificial Sequence: Synthetic oligonucleotide
uuuguauacuccaugacau

SEQ ID NO: 790581 - RNA, 19 nt, Artificial Sequence
  Description of Artificial Sequence: Synthetic oligonucleotide
gaugccauaaccauccggg

SEQ ID NO: 790582 - RNA, 19 nt, Artificial Sequence
  Description of Artificial Sequence: Synthetic oligonucleotide
aacauacgcaaagaggcgc

SEQ ID NO: 790583 - RNA, 19 nt, Artificial Sequence
  Description of Artificial Sequence: Synthetic oligonucleotide
  modified_base (8)..(8): a, c, u, g, unknown or other
cugaacunaacccuggugc

SEQ ID NO: 790584 - RNA, 19 nt, Artificial Sequence
  Description of Artificial Sequence: Synthetic oligonucleotide
uguauacuccaugacaugg

SEQ ID NO: 790585 - RNA, 19 nt, Artificial Sequence
  Description of Artificial Sequence: Synthetic oligonucleotide
aaggauuccccucggauag

SEQ ID NO: 790586 - RNA, 19 nt, Artificial Sequence
  Description of Artificial Sequence: Synthetic oligonucleotide
aaaggguuugguuguguac

SEQ ID NO: 790587 - RNA, 19 nt, Artificial Sequence
  Description of Artificial Sequence: Synthetic oligonucleotide
ucauauguggcacaugccu

SEQ ID NO: 790588 - RNA, 19 nt, Artificial Sequence
  Description of Artificial Sequence: Synthetic oligonucleotide
caaguagugagccaugcgg

SEQ ID NO: 790589 - RNA, 19 nt, Artificial Sequence
  Description of Artificial Sequence: Synthetic oligonucleotide
cuugaagcgaccagaaacc

SEQ ID NO: 790590 - RNA, 19 nt, Artificial Sequence
  Description of Artificial Sequence: Synthetic oligonucleotide
aaauaucugauccgaggug

SEQ ID NO: 790591 - RNA, 19 nt, Artificial Sequence
  Description of Artificial Sequence: Synthetic oligonucleotide
aauaucugauccgagguga

SEQ ID NO: 790592 - RNA, 19 nt, Artificial Sequence
  Description of Artificial Sequence: Synthetic oligonucleotide
uguuauguugaaccgcagc

SEQ ID NO: 790593 - RNA, 19 nt, Artificial Sequence
  Description of Artificial Sequence: Synthetic oligonucleotide
gauaugggccuccaugggg

SEQ ID NO: 790594 - RNA, 19 nt, Artificial Sequence
  Description of Artificial Sequence: Synthetic oligonucleotide
guauuguaggccuuggccc

SEQ ID NO: 790595 - RNA, 19 nt, Artificial Sequence
  Description of Artificial Sequence: Synthetic oligonucleotide
aaggcuaacaucgucccag

SEQ ID NO: 790596 - RNA, 19 nt, Artificial Sequence
  Description of Artificial Sequence: Synthetic oligonucleotide
auaggagguauccaugaag

SEQ ID NO: 790597 - RNA, 19 nt, Artificial Sequence
  Description of Artificial Sequence: Synthetic oligonucleotide
guugauaugggccuccaug

SEQ ID NO: 790598 - RNA, 19 nt, Artificial Sequence
  Description of Artificial Sequence: Synthetic oligonucleotide
ucugauccgaggugaaugg

SEQ ID NO: 790599 - RNA, 19 nt, Artificial Sequence
  Description of Artificial Sequence: Synthetic oligonucleotide
ucuaccaguuguuuggugu

SEQ ID NO: 790600 - RNA, 19 nt, Artificial Sequence
  Description of Artificial Sequence: Synthetic oligonucleotide
augaagaugucaggcaugc

SEQ ID NO: 790601 - RNA, 19 nt, Artificial Sequence
  Description of Artificial Sequence: Synthetic oligonucleotide
agugaaugaccacaggcug

SEQ ID NO: 790602 - RNA, 19 nt, Artificial Sequence
  Description of Artificial Sequence: Synthetic oligonucleotide
uguugguuugcagugauga

SEQ ID NO: 790603 - RNA, 19 nt, Artificial Sequence
  Description of Artificial Sequence: Synthetic oligonucleotide
  modified_base (9)..(9): a, c, u, g, unknown or other
ucugaacunaacccuggug

SEQ ID NO: 790604 - RNA, 19 nt, Artificial Sequence
  Description of Artificial Sequence: Synthetic oligonucleotide
auuccccucggauagcucg

SEQ ID NO: 790605 - RNA, 19 nt, Artificial Sequence
  Description of Artificial Sequence: Synthetic oligonucleotide
gaucucagguguuauguug

SEQ ID NO: 790606 - RNA, 19 nt, Artificial Sequence
  Description of Artificial Sequence: Synthetic oligonucleotide
aggugaaacauacgcaaag

SEQ ID NO: 790607 - RNA, 19 nt, Artificial Sequence
  Description of Artificial Sequence: Synthetic oligonucleotide
cuaacaucgucccagucug

SEQ ID NO: 790608 - RNA, 19 nt, Artificial Sequence
  Description of Artificial Sequence: Synthetic oligonucleotide
uauguugaaccgcagcuuc

SEQ ID NO: 790609 - RNA, 19 nt, Artificial Sequence
  Description of Artificial Sequence: Synthetic oligonucleotide
aaguagugagccaugcggg

SEQ ID NO: 790610 - RNA, 19 nt, Artificial Sequence
  Description of Artificial Sequence: Synthetic oligonucleotide
ugcagugucuugucgaacc

SEQ ID NO: 790611 - RNA, 19 nt, Artificial Sequence
  Description of Artificial Sequence: Synthetic oligonucleotide
aaacauacgcaaagaggcg

SEQ ID NO: 790612 - RNA, 19 nt, Artificial Sequence
  Description of Artificial Sequence: Synthetic oligonucleotide
caucgugauguccaggucc

SEQ ID NO: 790613 - RNA, 19 nt, Artificial Sequence
  Description of Artificial Sequence: Synthetic oligonucleotide
aaaggauuccccucggaua

SEQ ID NO: 790614 - RNA, 19 nt, Artificial Sequence
  Description of Artificial Sequence: Synthetic oligonucleotide
ugucuugagccaccagucg

SEQ ID NO: 790615 - RNA, 19 nt, Artificial Sequence
  Description of Artificial Sequence: Synthetic oligonucleotide
gguauuguaggccuuggcc

SEQ ID NO: 790616 - RNA, 19 nt, Artificial Sequence
  Description of Artificial Sequence: Synthetic oligonucleotide
  modified_base (5)..(5): a, c, u, g, unknown or other
aacunaacccuggugcuug

SEQ ID NO: 790617 - RNA, 19 nt, Artificial Sequence
  Description of Artificial Sequence: Synthetic oligonucleotide
gagguaaugauccagggau

SEQ ID NO: 790618 - RNA, 19 nt, Artificial Sequence
  Description of Artificial Sequence: Synthetic oligonucleotide
acaugguugcgguagacgu

SEQ ID NO: 790619 - RNA, 19 nt, Artificial Sequence
  Description of Artificial Sequence: Synthetic oligonucleotide
caaaggcuaacaucguccc

SEQ ID NO: 790620 - RNA, 19 nt, Artificial Sequence
  Description of Artificial Sequence: Synthetic oligonucleotide
acccuguugauccacgaag

SEQ ID NO: 790621 - RNA, 19 nt, Artificial Sequence
  Description of Artificial Sequence: Synthetic oligonucleotide
ugccacaauaaacugcagu

SEQ ID NO: 790622 - RNA, 19 nt, Artificial Sequence
  Description of Artificial Sequence: Synthetic oligonucleotide
aagaggcgcucucauaugu

SEQ ID NO: 790623 - RNA, 19 nt, Artificial Sequence
  Description of Artificial Sequence: Synthetic oligonucleotide
uggugcuccagcacagugg

SEQ ID NO: 790624 - RNA, 19 nt, Artificial Sequence
  Description of Artificial Sequence: Synthetic oligonucleotide
gauagcucgguccguguag

SEQ ID NO: 790625 - RNA, 19 nt, Artificial Sequence
  Description of Artificial Sequence: Synthetic oligonucleotide
gaggcgcucucauaugugg

SEQ ID NO: 790626 - RNA, 19 nt, Artificial Sequence
  Description of Artificial Sequence: Synthetic oligonucleotide
ugcuacaugguugcgguag

SEQ ID NO: 790627 - RNA, 19 nt, Artificial Sequence
  Description of Artificial Sequence: Synthetic oligonucleotide
uauacuccaugacaugguc

SEQ ID NO: 790628 - RNA, 19 nt, Artificial Sequence
  Description of Artificial Sequence: Synthetic oligonucleotide
aacaugacgcagucugucu

SEQ ID NO: 790629 - RNA, 19 nt, Artificial Sequence
  Description of Artificial Sequence: Synthetic oligonucleotide
agugccuugagguaaugau

SEQ ID NO: 790630 - RNA, 19 nt, Artificial Sequence
  Description of Artificial Sequence: Synthetic oligonucleotide
cuugaacuauggcaagugc

SEQ ID NO: 790631 - RNA, 19 nt, Artificial Sequence
  Description of Artificial Sequence: Synthetic oligonucleotide
cuugaccggguauuguagg

SEQ ID NO: 790632 - RNA, 19 nt, Artificial Sequence
  Description of Artificial Sequence: Synthetic oligonucleotide
agguguuauguugaaccgc

SEQ ID NO: 790633 - RNA, 19 nt, Artificial Sequence
  Description of Artificial Sequence: Synthetic oligonucleotide
aaggcgucagggcucagcu

SEQ ID NO: 790634 - RNA, 19 nt, Artificial Sequence
  Description of Artificial Sequence: Synthetic oligonucleotide
aaagaggcgcucucauaug

SEQ ID NO: 790635 - RNA, 19 nt, Artificial Sequence
  Description of Artificial Sequence: Synthetic oligonucleotide
gacgcagucugucuuagca

SEQ ID NO: 790636 - RNA, 19 nt, Artificial Sequence
  Description of Artificial Sequence: Synthetic oligonucleotide
ugcuagagacuuucccugg

SEQ ID NO: 790637 - RNA, 19 nt, Artificial Sequence
  Description of Artificial Sequence: Synthetic oligonucleotide
cucacgaugggcugcagug

SEQ ID NO: 790638 - RNA, 19 nt, Artificial Sequence
  Description of Artificial Sequence: Synthetic oligonucleotide
aaaaggguuugguugugua

SEQ ID NO: 790639 - RNA, 19 nt, Artificial Sequence
  Description of Artificial Sequence: Synthetic oligonucleotide
gaacucugagccauggcag

SEQ ID NO: 790640 - RNA, 19 nt, Artificial Sequence
  Description of Artificial Sequence: Synthetic oligonucleotide
cauauguggcacaugccug

SEQ ID NO: 790641 - RNA, 19 nt, Artificial Sequence
  Description of Artificial Sequence: Synthetic oligonucleotide
auacuccaugacauggucc

SEQ ID NO: 790642 - RNA, 19 nt, Artificial Sequence
  Description of Artificial Sequence: Synthetic oligonucleotide
  modified_base (2)..(2): a, c, u, g, unknown or other
unaacccuggugcuugaac

SEQ ID NO: 790643 - RNA, 19 nt, Artificial Sequence
  Description of Artificial Sequence: Synthetic oligonucleotide
uuuguugguuugcagugau

SEQ ID NO: 790644 - RNA, 19 nt, Artificial Sequence
  Description of Artificial Sequence: Synthetic oligonucleotide
auagcagaugccauaacca

SEQ ID NO: 790645 - RNA, 19 nt, Artificial Sequence
  Description of Artificial Sequence: Synthetic oligonucleotide
auauguggcacaugccugu

SEQ ID NO: 790646 - RNA, 19 nt, Artificial Sequence
  Description of Artificial Sequence: Synthetic oligonucleotide
ugacugguagaaagguuga

SEQ ID NO: 790647 - RNA, 19 nt, Artificial Sequence
  Description of Artificial Sequence: Synthetic oligonucleotide
guuauguugaaccgcagcu

SEQ ID NO: 790648 - RNA, 19 nt, Artificial Sequence
  Description of Artificial Sequence: Synthetic oligonucleotide
ugccauaaccauccgggac

SEQ ID NO: 790649 - RNA, 19 nt, Artificial Sequence
  Description of Artificial Sequence: Synthetic oligonucleotide
ugggguuauagcagaugcc

SEQ ID NO: 790650 - RNA, 19 nt, Artificial Sequence
  Description of Artificial Sequence: Synthetic oligonucleotide
ugguuguguaccugacagg

SEQ ID NO: 790651 - RNA, 19 nt, Artificial Sequence
  Description of Artificial Sequence: Synthetic oligonucleotide
auggaauaccagcaucgug

SEQ ID NO: 790652 - RNA, 19 nt, Artificial Sequence
  Description of Artificial Sequence: Synthetic oligonucleotide
uugaccggguauuguaggc

SEQ ID NO: 790653 - RNA, 19 nt, Artificial Sequence
  Description of Artificial Sequence: Synthetic oligonucleotide
aggugaauggugucccauc

SEQ ID NO: 790654 - RNA, 19 nt, Artificial Sequence
  Description of Artificial Sequence: Synthetic oligonucleotide
aucugauccgaggugaaug

SEQ ID NO: 790655 - RNA, 19 nt, Artificial Sequence
  Description of Artificial Sequence: Synthetic oligonucleotide
aaaggcuaacaucguccca

SEQ ID NO: 790656 - RNA, 19 nt, Artificial Sequence
  Description of Artificial Sequence: Synthetic oligonucleotide
acacggaaaaguugauaug

SEQ ID NO: 790657 - RNA, 19 nt, Artificial Sequence
  Description of Artificial Sequence: Synthetic oligonucleotide
gcauggguaacauaggaga

SEQ ID NO: 790658 - RNA, 19 nt, Artificial Sequence
  Description of Artificial Sequence: Synthetic oligonucleotide
agugcggcccaggugaaac

SEQ ID NO: 790659 - RNA, 19 nt, Artificial Sequence
  Description of Artificial Sequence: Synthetic oligonucleotide
cacugugguacacauccag

SEQ ID NO: 790660 - RNA, 19 nt, Artificial Sequence
  Description of Artificial Sequence: Synthetic oligonucleotide
guuguaggcagacacggaa

SEQ ID NO: 790661 - RNA, 19 nt, Artificial Sequence
  Description of Artificial Sequence: Synthetic oligonucleotide
cucauauguggcacaugcc

SEQ ID NO: 790662 - RNA, 19 nt, Artificial Sequence
  Description of Artificial Sequence: Synthetic oligonucleotide
auggcaagugcugaggaca

SEQ ID NO: 790663 - RNA, 19 nt, Artificial Sequence
  Description of Artificial Sequence: Synthetic oligonucleotide
cauccgggaccacaggucc

SEQ ID NO: 790664 - RNA, 19 nt, Artificial Sequence
  Description of Artificial Sequence: Synthetic oligonucleotide
cuaccaguuguuuggugug

SEQ ID NO: 790665 - RNA, 19 nt, Artificial Sequence
  Description of Artificial Sequence: Synthetic oligonucleotide
cugucuugagccaccaguc

SEQ ID NO: 790666 - RNA, 19 nt, Artificial Sequence
  Description of Artificial Sequence: Synthetic oligonucleotide
ugcauagcgauggcauagg

SEQ ID NO: 790667 - RNA, 19 nt, Artificial Sequence
  Description of Artificial Sequence: Synthetic oligonucleotide
gccauaaccauccgggacc

SEQ ID NO: 790668 - RNA, 19 nt, Artificial Sequence
  Description of Artificial Sequence: Synthetic oligonucleotide
cacaguggagucauccaug

SEQ ID NO: 790669 - RNA, 19 nt, Artificial Sequence
  Description of Artificial Sequence: Synthetic oligonucleotide
uugucgaaccagcgguugc

SEQ ID NO: 790670 - RNA, 19 nt, Artificial Sequence
  Description of Artificial Sequence: Synthetic oligonucleotide
  modified_base (18)..(18): a, c, u, g, unknown or other
uguucagcuucugaacuna

SEQ ID NO: 790671 - RNA, 19 nt, Artificial Sequence
  Description of Artificial Sequence: Synthetic oligonucleotide
uuauagcagaugccauaac

SEQ ID NO: 790672 - RNA, 19 nt, Artificial Sequence
  Description of Artificial Sequence: Synthetic oligonucleotide
uggcuugaacuuuggggcc

SEQ ID NO: 790673 - RNA, 19 nt, Artificial Sequence
  Description of Artificial Sequence: Synthetic oligonucleotide
cuggcgguacuggagauag

SEQ ID NO: 790674 - RNA, 19 nt, Artificial Sequence
  Description of Artificial Sequence: Synthetic oligonucleotide
auaaccauccgggaccaca

SEQ ID NO: 790675 - RNA, 19 nt, Artificial Sequence
  Description of Artificial Sequence: Synthetic oligonucleotide
cacggggcagccuuggcag

SEQ ID NO: 790676 - RNA, 19 nt, Artificial Sequence
  Description of Artificial Sequence: Synthetic oligonucleotide
aguuacccuguugauccac

SEQ ID NO: 790677 - RNA, 19 nt, Artificial Sequence
  Description of Artificial Sequence: Synthetic oligonucleotide
ucccgguuuacuuugucuu

SEQ ID NO: 790678 - RNA, 19 nt, Artificial Sequence
  Description of Artificial Sequence: Synthetic oligonucleotide
uuccccucggauagcucgg

SEQ ID NO: 790679 - RNA, 19 nt, Artificial Sequence
  Description of Artificial Sequence: Synthetic oligonucleotide
acgcagucugucuuagcag

SEQ ID NO: 790680 - RNA, 19 nt, Artificial Sequence
  Description of Artificial Sequence: Synthetic oligonucleotide
caaauaucugauccgaggu

SEQ ID NO: 790681 - RNA, 19 nt, Artificial Sequence
  Description of Artificial Sequence: Synthetic oligonucleotide
auagcucgguccguguagg

SEQ ID NO: 790682 - RNA, 19 nt, Artificial Sequence
  Description of Artificial Sequence: Synthetic oligonucleotide
uaccaguuguuuggugugg

SEQ ID NO: 790683 - RNA, 19 nt, Artificial Sequence
  Description of Artificial Sequence: Synthetic oligonucleotide
gagcggauggugucagugc

SEQ ID NO: 790684 - RNA, 19 nt, Artificial Sequence
  Description of Artificial Sequence: Synthetic oligonucleotide
cacgaugggcugcagugcc

SEQ ID NO: 790685 - RNA, 19 nt, Artificial Sequence
  Description of Artificial Sequence: Synthetic oligonucleotide
gaugagcggauggugucag

SEQ ID NO: 790686 - RNA, 19 nt, Artificial Sequence
  Description of Artificial Sequence: Synthetic oligonucleotide
cuagugaguccauggagga

SEQ ID NO: 790687 - RNA, 19 nt, Artificial Sequence
  Description of Artificial Sequence: Synthetic oligonucleotide
gguaacauaggagaccgca

SEQ ID NO: 790688 - RNA, 19 nt, Artificial Sequence
  Description of Artificial Sequence: Synthetic oligonucleotide
gaacaugacgcagucuguc

SEQ ID NO: 790689 - RNA, 19 nt, Artificial Sequence
  Description of Artificial Sequence: Synthetic oligonucleotide
cacgaaguucugcuugggc

SEQ ID NO: 790690 - RNA, 19 nt, Artificial Sequence
  Description of Artificial Sequence: Synthetic oligonucleotide
uuacccuguugauccacga

SEQ ID NO: 790691 - RNA, 19 nt, Artificial Sequence
  Description of Artificial Sequence: Synthetic oligonucleotide
uuguugguuugcagugaug

SEQ ID NO: 790692 - RNA, 19 nt, Artificial Sequence
  Description of Artificial Sequence: Synthetic oligonucleotide
uuauguugaaccgcagcuu

SEQ ID NO: 790693 - RNA, 19 nt, Artificial Sequence
  Description of Artificial Sequence: Synthetic oligonucleotide
aacccuggugcuugaacua

SEQ ID NO: 790694 - RNA, 19 nt, Artificial Sequence
  Description of Artificial Sequence: Synthetic oligonucleotide
acuugaccggguauuguag

SEQ ID NO: 790695 - RNA, 19 nt, Artificial Sequence
  Description of Artificial Sequence: Synthetic oligonucleotide
agacucugggcacugguuu

SEQ ID NO: 790696 - RNA, 19 nt, Artificial Sequence
  Description of Artificial Sequence: Synthetic oligonucleotide
uacgcaaagaggcgcucuc

SEQ ID NO: 790697 - RNA, 19 nt, Artificial Sequence
  Description of Artificial Sequence: Synthetic oligonucleotide
ggcagcguuagucucagca

SEQ ID NO: 790698 - RNA, 19 nt, Artificial Sequence
  Description of Artificial Sequence: Synthetic oligonucleotide
guaguugugcaccacaguu

SEQ ID NO: 790699 - RNA, 19 nt, Artificial Sequence
  Description of Artificial Sequence: Synthetic oligonucleotide
agaaagguugaagugcaua

SEQ ID NO: 790700 - RNA, 19 nt, Artificial Sequence
  Description of Artificial Sequence: Synthetic oligonucleotide
gaaccagcgguugccacug

SEQ ID NO: 790701 - RNA, 19 nt, Artificial Sequence
  Description of Artificial Sequence: Synthetic oligonucleotide
cauggcagguauccauccc

SEQ ID NO: 790702 - RNA, 19 nt, Artificial Sequence
  Description of Artificial Sequence: Synthetic oligonucleotide
accaguuguuugguguggg

SEQ ID NO: 790703 - RNA, 19 nt, Artificial Sequence
  Description of Artificial Sequence: Synthetic oligonucleotide
aguagggugcgcaugucca

SEQ ID NO: 790704 - RNA, 19 nt, Artificial Sequence
  Description of Artificial Sequence: Synthetic oligonucleotide
gacuugaccggguauugua

SEQ ID NO: 790705 - RNA, 19 nt, Artificial Sequence
  Description of Artificial Sequence: Synthetic oligonucleotide
gucuugucgaaccagcggu

SEQ ID NO: 790706 - RNA, 19 nt, Artificial Sequence
  Description of Artificial Sequence: Synthetic oligonucleotide
cugggcuagagugaaugac

SEQ ID NO: 790707 - RNA, 19 nt, Artificial Sequence
  Description of Artificial Sequence: Synthetic oligonucleotide
uccaccaauuggagggcac

SEQ ID NO: 790708 - RNA, 19 nt, Artificial Sequence
  Description of Artificial Sequence: Synthetic oligonucleotide
gaagugcauagcgauggca

SEQ ID NO: 790709 - RNA, 19 nt, Artificial Sequence
  Description of Artificial Sequence: Synthetic oligonucleotide
uccauagauccuguaguau

SEQ ID NO: 790710 - RNA, 19 nt, Artificial Sequence
  Description of Artificial Sequence: Synthetic oligonucleotide
gacgucgucggagacucug

SEQ ID NO: 790711 - RNA, 19 nt, Artificial Sequence
  Description of Artificial Sequence: Synthetic oligonucleotide
gguguuauguugaaccgca

SEQ ID NO: 790712 - RNA, 19 nt, Artificial Sequence
  Description of Artificial Sequence: Synthetic oligonucleotide
ugaucucagguguuauguu

SEQ ID NO: 790713 - RNA, 19 nt, Artificial Sequence
  Description of Artificial Sequence: Synthetic oligonucleotide
gcagacacggaaaaguuga

SEQ ID NO: 790714 - RNA, 19 nt, Artificial Sequence
  Description of Artificial Sequence: Synthetic oligonucleotide
uugaacuuuggggcccugc

SEQ ID NO: 790715 - RNA, 19 nt, Artificial Sequence
  Description of Artificial Sequence: Synthetic oligonucleotide
guagggugcgcauguccag

SEQ ID NO: 790716 - RNA, 19 nt, Artificial Sequence
  Description of Artificial Sequence: Synthetic oligonucleotide
caugguugcgguagacguc

SEQ ID NO: 790717 - RNA, 19 nt, Artificial Sequence
  Description of Artificial Sequence: Synthetic oligonucleotide
acaugacgcagucugucuu

SEQ ID NO: 790718 - RNA, 19 nt, Artificial Sequence
  Description of Artificial Sequence: Synthetic oligonucleotide
ggcacaugccuguccauag

SEQ ID NO: 790719 - RNA, 19 nt, Artificial Sequence
  Description of Artificial Sequence: Synthetic oligonucleotide
auaggagaccgcacaagcu

SEQ ID NO: 790720 - RNA, 19 nt, Artificial Sequence
  Description of Artificial Sequence: Synthetic oligonucleotide
cuauggcaagugcugagga

SEQ ID NO: 790721 - RNA, 19 nt, Artificial Sequence
  Description of Artificial Sequence: Synthetic oligonucleotide
caaagaggcgcucucauau

SEQ ID NO: 790722 - RNA, 19 nt, Artificial Sequence
  Description of Artificial Sequence: Synthetic oligonucleotide
ucuugucgaaccagcgguu

SEQ ID NO: 790723 - RNA, 19 nt, Artificial Sequence
  Description of Artificial Sequence: Synthetic oligonucleotide
acaugccuguccauagauc

SEQ ID NO: 790724 - RNA, 19 nt, Artificial Sequence
  Description of Artificial Sequence: Synthetic oligonucleotide
agcgguugccacuguugag

SEQ ID NO: 790725 - RNA, 19 nt, Artificial Sequence
  Description of Artificial Sequence: Synthetic oligonucleotide
ugccggucaaaggauuccc

SEQ ID NO: 790726 - RNA, 19 nt, Artificial Sequence
  Description of Artificial Sequence: Synthetic oligonucleotide
agcaucacuccugggcuag

SEQ ID NO: 790727 - RNA, 19 nt, Artificial Sequence
  Description of Artificial Sequence: Synthetic oligonucleotide
ucggauagcucgguccgug

SEQ ID NO: 790728 - RNA, 19 nt, Artificial Sequence
  Description of Artificial Sequence: Synthetic oligonucleotide
ucucagguguuauguugaa

SEQ ID NO: 790729 - RNA, 19 nt, Artificial Sequence
  Description of Artificial Sequence: Synthetic oligonucleotide
acucacgaugggcugcagu

SEQ ID NO: 790730 - RNA, 19 nt, Artificial Sequence
  Description of Artificial Sequence: Synthetic oligonucleotide
cucgguccguguaggcucg

SEQ ID NO: 790731 - RNA, 19 nt, Artificial Sequence
  Description of Artificial Sequence: Synthetic oligonucleotide
ggcauggguaacauaggag

SEQ ID NO: 790732 - RNA, 19 nt, Artificial Sequence
  Description of Artificial Sequence: Synthetic oligonucleotide
  modified_base (4)..(4): a, c, u, g, unknown or other
acunaacccuggugcuuga

SEQ ID NO: 790733 - RNA, 19 nt, Artificial Sequence
  Description of Artificial Sequence: Synthetic oligonucleotide
cagcguuagucucagcaca

SEQ ID NO: 790734 - RNA, 19 nt, Artificial Sequence
  Description of Artificial Sequence: Synthetic oligonucleotide
acuagguccucaauggcuu

SEQ ID NO: 790735 - RNA, 19 nt, Artificial Sequence
  Description of Artificial Sequence: Synthetic oligonucleotide
gaaggcgucagggcucagc

SEQ ID NO: 790736 - RNA, 19 nt, Artificial Sequence
  Description of Artificial Sequence: Synthetic oligonucleotide
gucgucggagacucugggc

SEQ ID NO: 790737 - RNA, 19 nt, Artificial Sequence
  Description of Artificial Sequence: Synthetic oligonucleotide
gccgcaugcucauaaacca

SEQ ID NO: 790738 - RNA, 19 nt, Artificial Sequence
  Description of Artificial Sequence: Synthetic oligonucleotide
aucgugauguccagguccu

SEQ ID NO: 790739 - RNA, 19 nt, Artificial Sequence
  Description of Artificial Sequence: Synthetic oligonucleotide
acauacgcaaagaggcgcu

SEQ ID NO: 790740 - RNA, 19 nt, Artificial Sequence
  Description of Artificial Sequence: Synthetic oligonucleotide
augacgcagucugucuuag

SEQ ID NO: 790741 - RNA, 19 nt, Artificial Sequence
  Description of Artificial Sequence: Synthetic oligonucleotide
ugacuugaccggguauugu

SEQ ID NO: 790742 - RNA, 19 nt, Artificial Sequence
  Description of Artificial Sequence: Synthetic oligonucleotide
caccaauuggagggcacag

SEQ ID NO: 790743 - RNA, 19 nt, Artificial Sequence
  Description of Artificial Sequence: Synthetic oligonucleotide
ccaccagucggacagccag

SEQ ID NO: 790744 - RNA, 19 nt, Artificial Sequence
  Description of Artificial Sequence: Synthetic oligonucleotide
auggcauaggagguaucca

SEQ ID NO: 790745 - RNA, 19 nt, Artificial Sequence
  Description of Artificial Sequence: Synthetic oligonucleotide
auacgcaaagaggcgcucu

SEQ ID NO: 790746 - RNA, 19 nt, Artificial Sequence
  Description of Artificial Sequence: Synthetic oligonucleotide
ugcggugguuggagguaag

SEQ ID NO: 790747 - RNA, 19 nt, Artificial Sequence
  Description of Artificial Sequence: Synthetic oligonucleotide
aggcguuccccuacacccc

SEQ ID NO: 790748 - RNA, 19 nt, Artificial Sequence
  Description of Artificial Sequence: Synthetic oligonucleotide
ggugugggcccacucuucc

SEQ ID NO: 790749 - RNA, 19 nt, Artificial Sequence
  Description of Artificial Sequence: Synthetic oligonucleotide
ccucggauagcucgguccg

SEQ ID NO: 790750 - RNA, 19 nt, Artificial Sequence
  Description of Artificial Sequence: Synthetic oligonucleotide
gcagcguuagucucagcac

SEQ ID NO: 790751 - RNA, 19 nt, Artificial Sequence
  Description of Artificial Sequence: Synthetic oligonucleotide
gcuagagacuuucccuggc

SEQ ID NO: 790752 - RNA, 19 nt, Artificial Sequence
  Description of Artificial Sequence: Synthetic oligonucleotide
gcgaccagaaaccuucauc

SEQ ID NO: 790753 - RNA, 19 nt, Artificial Sequence
  Description of Artificial Sequence: Synthetic oligonucleotide
ccaaguagugagccaugcg

SEQ ID NO: 790754 - RNA, 19 nt, Artificial Sequence
  Description of Artificial Sequence: Synthetic oligonucleotide
cacgguccuggcagcaaag

SEQ ID NO: 790755 - RNA, 19 nt, Artificial Sequence
  Description of Artificial Sequence: Synthetic oligonucleotide
aggauuccccucggauagc

SEQ ID NO: 790756 - RNA, 19 nt, Artificial Sequence
  Description of Artificial Sequence: Synthetic oligonucleotide
gcgguugccacuguugagc

SEQ ID NO: 790757 - RNA, 19 nt, Artificial Sequence
  Description of Artificial Sequence: Synthetic oligonucleotide
cacuagguccucaauggcu

SEQ ID NO: 790758 - RNA, 19 nt, Artificial Sequence
  Description of Artificial Sequence: Synthetic oligonucleotide
aggcuaacaucgucccagu

SEQ ID NO: 790759 - RNA, 19 nt, Artificial Sequence
  Description of Artificial Sequence: Synthetic oligonucleotide
gaacuuuggggcccugcua

SEQ ID NO: 790760 - RNA, 19 nt, Artificial Sequence
  Description of Artificial Sequence: Synthetic oligonucleotide
ggcagacacggaaaaguug

SEQ ID NO: 790761 - RNA, 19 nt, Artificial Sequence
  Description of Artificial Sequence: Synthetic oligonucleotide
gauggaauaccagcaucgu

SEQ ID NO: 790762 - RNA, 19 nt, Artificial Sequence
  Description of Artificial Sequence: Synthetic oligonucleotide
uggugugggcccacucuuc

SEQ ID NO: 790763 - RNA, 19 nt, Artificial Sequence
  Description of Artificial Sequence: Synthetic oligonucleotide
cccucggauagcucggucc

SEQ ID NO: 790764 - RNA, 19 nt, Artificial Sequence
  Description of Artificial Sequence: Synthetic oligonucleotide
ggagucauccaugccuuug

SEQ ID NO: 790765 - RNA, 19 nt, Artificial Sequence
  Description of Artificial Sequence: Synthetic oligonucleotide
guguuauguugaaccgcag

SEQ ID NO: 790766 - RNA, 19 nt, Artificial Sequence
  Description of Artificial Sequence: Synthetic oligonucleotide
cauaggagguauccaugaa

SEQ ID NO: 790767 - RNA, 19 nt, Artificial Sequence
  Description of Artificial Sequence: Synthetic oligonucleotide
ugcaggcguuccccuacac

SEQ ID NO: 790768 - RNA, 19 nt, Artificial Sequence
  Description of Artificial Sequence: Synthetic oligonucleotide
gcuaucugaaugaaggcgu

SEQ ID NO: 790769 - RNA, 19 nt, Artificial Sequence
  Description of Artificial Sequence: Synthetic oligonucleotide
caaaggauuccccucggau

SEQ ID NO: 790770 - RNA, 19 nt, Artificial Sequence
  Description of Artificial Sequence: Synthetic oligonucleotide
ggguauuguaggccuuggc

SEQ ID NO: 790771 - RNA, 19 nt, Artificial Sequence
  Description of Artificial Sequence: Synthetic oligonucleotide
agggauugcuggagugggg

SEQ ID NO: 790772 - RNA, 19 nt, Artificial Sequence
  Description of Artificial Sequence: Synthetic oligonucleotide
uagcucgguccguguaggc

SEQ ID NO: 790773 - RNA, 19 nt, Artificial Sequence
  Description of Artificial Sequence: Synthetic oligonucleotide
gguauccaugaagauguca

SEQ ID NO: 790774 - RNA, 19 nt, Artificial Sequence
  Description of Artificial Sequence: Synthetic oligonucleotide
agcucgguccguguaggcu

SEQ ID NO: 790775 - RNA, 19 nt, Artificial Sequence
  Description of Artificial Sequence: Synthetic oligonucleotide
guuguuuggugugggccca

SEQ ID NO: 790776 - RNA, 19 nt, Artificial Sequence
  Description of Artificial Sequence: Synthetic oligonucleotide
caugacgcagucugucuua

SEQ ID NO: 790777 - RNA, 19 nt, Artificial Sequence
  Description of Artificial Sequence: Synthetic oligonucleotide
gccugcuacaugguugcgg

SEQ ID NO: 790778 - RNA, 19 nt, Artificial Sequence
  Description of Artificial Sequence: Synthetic oligonucleotide
cagcgguugccacuguuga

SEQ ID NO: 790779 - RNA, 19 nt, Artificial Sequence
  Description of Artificial Sequence: Synthetic oligonucleotide
ucacugacucccgguuuac

SEQ ID NO: 790780 - RNA, 19 nt, Artificial Sequence
  Description of Artificial Sequence: Synthetic oligonucleotide
ugcggcccaggugaaacau

SEQ ID NO: 790781 - RNA, 19 nt, Artificial Sequence
  Description of Artificial Sequence: Synthetic oligonucleotide
agcgaccagaaaccuucau

SEQ ID NO: 790782 - RNA, 19 nt, Artificial Sequence
  Description of Artificial Sequence: Synthetic oligonucleotide
guugauccacgaaguucug

SEQ ID NO: 790783 - RNA, 19 nt, Artificial Sequence
  Description of Artificial Sequence: Synthetic oligonucleotide
guccgcuccgccucucgug

SEQ ID NO: 790784 - RNA, 19 nt, Artificial Sequence
  Description of Artificial Sequence: Synthetic oligonucleotide
gcucgguccguguaggcuc

SEQ ID NO: 790785 - RNA, 19 nt, Artificial Sequence
  Description of Artificial Sequence: Synthetic oligonucleotide
guauacuccaugacauggu

SEQ ID NO: 790786 - RNA, 19 nt, Artificial Sequence
  Description of Artificial Sequence: Synthetic oligonucleotide
cauacgcaaagaggcgcuc

SEQ ID NO: 790787 - RNA, 19 nt, Artificial Sequence
  Description of Artificial Sequence: Synthetic oligonucleotide
gguagacgucgucggagac

SEQ ID NO: 790788 - RNA, 19 nt, Artificial Sequence
  Description of Artificial Sequence: Synthetic oligonucleotide
cagaaaccuucaucaggga

SEQ ID NO: 790789 - RNA, 19 nt, Artificial Sequence
  Description of Artificial Sequence: Synthetic oligonucleotide
auaucugauccgaggugaa

SEQ ID NO: 790790 - RNA, 19 nt, Artificial Sequence
  Description of Artificial Sequence: Synthetic oligonucleotide
ccagcgguugccacuguug

SEQ ID NO: 790791 - RNA, 19 nt, Artificial Sequence
  Description of Artificial Sequence: Synthetic oligonucleotide
guugugcaccacaguuacc

SEQ ID NO: 790792 - RNA, 19 nt, Artificial Sequence
  Description of Artificial Sequence: Synthetic oligonucleotide
gggcuagagugaaugacca

SEQ ID NO: 790793 - RNA, 19 nt, Artificial Sequence
  Description of Artificial Sequence: Synthetic oligonucleotide
cucucauauguggcacaug

SEQ ID NO: 790794 - RNA, 19 nt, Artificial Sequence
  Description of Artificial Sequence: Synthetic oligonucleotide
acgcaaagaggcgcucuca

SEQ ID NO: 790795 - RNA, 19 nt, Artificial Sequence
  Description of Artificial Sequence: Synthetic oligonucleotide
guaugccaacugcagggcu

SEQ ID NO: 790796 - RNA, 19 nt, Artificial Sequence
  Description of Artificial Sequence: Synthetic oligonucleotide
uaccacgguccuggcagca

SEQ ID NO: 790797 - RNA, 19 nt, Artificial Sequence
  Description of Artificial Sequence: Synthetic oligonucleotide
cugcagugucuugucgaac

SEQ ID NO: 790798 - RNA, 19 nt, Artificial Sequence
  Description of Artificial Sequence: Synthetic oligonucleotide
augagcggauggugucagu

SEQ ID NO: 790799 - RNA, 19 nt, Artificial Sequence
  Description of Artificial Sequence: Synthetic oligonucleotide
cugcagugccuugagguaa

SEQ ID NO: 790800 - RNA, 19 nt, Artificial Sequence
  Description of Artificial Sequence: Synthetic oligonucleotide
aaccagcgguugccacugu

SEQ ID NO: 790801 - RNA, 19 nt, Artificial Sequence
  Description of Artificial Sequence: Synthetic oligonucleotide
gauccacgaaguucugcuu

SEQ ID NO: 790802 - RNA, 19 nt, Artificial Sequence
  Description of Artificial Sequence: Synthetic oligonucleotide
gauuccccucggauagcuc

SEQ ID NO: 790803 - RNA, 19 nt, Artificial Sequence
  Description of Artificial Sequence: Synthetic oligonucleotide
ccgguuuacuuugucuuug

SEQ ID NO: 790804 - RNA, 19 nt, Artificial Sequence
  Description of Artificial Sequence: Synthetic oligonucleotide
gcauagcgauggcauagga

SEQ ID NO: 790805 - RNA, 19 nt, Artificial Sequence
  Description of Artificial Sequence: Synthetic oligonucleotide
gcuacaugguugcgguaga

SEQ ID NO: 790806 - RNA, 19 nt, Artificial Sequence
  Description of Artificial Sequence: Synthetic oligonucleotide
guagacgucgucggagacu

SEQ ID NO: 790807 - RNA, 19 nt, Artificial Sequence
  Description of Artificial Sequence: Synthetic oligonucleotide
gcggugguuggagguaagg

SEQ ID NO: 790808 - RNA, 19 nt, Artificial Sequence
  Description of Artificial Sequence: Synthetic oligonucleotide
gucgaaccagcgguugcca

SEQ ID NO: 790809 - RNA, 19 nt, Artificial Sequence
  Description of Artificial Sequence: Synthetic oligonucleotide
ggugccggucaaaggauuc

SEQ ID NO: 790810 - RNA, 19 nt, Artificial Sequence
  Description of Artificial Sequence: Synthetic oligonucleotide
gguuugcagugaugaguuc

SEQ ID NO: 790811 - RNA, 19 nt, Artificial Sequence
  Description of Artificial Sequence: Synthetic oligonucleotide
ggaugagcggaugguguca

SEQ ID NO: 790812 - RNA, 19 nt, Artificial Sequence
  Description of Artificial Sequence: Synthetic oligonucleotide
  modified_base (6)..(6): a, c, u, g, unknown or other
gaacunaacccuggugcuu

SEQ ID NO: 790813 - RNA, 19 nt, Artificial Sequence
  Description of Artificial Sequence: Synthetic oligonucleotide
guugcggugguuggaggua

SEQ ID NO: 790814 - RNA, 19 nt, Artificial Sequence
  Description of Artificial Sequence: Synthetic oligonucleotide
cuccgccucucgugcuggg

SEQ ID NO: 790815 - RNA, 19 nt, Artificial Sequence
  Description of Artificial Sequence: Synthetic oligonucleotide
gcggauggugucagugcgg

SEQ ID NO: 790816 - RNA, 19 nt, Artificial Sequence
  Description of Artificial Sequence: Synthetic oligonucleotide
gcacggggcagccuuggca

SEQ ID NO: 790817 - RNA, 19 nt, Artificial Sequence
  Description of Artificial Sequence: Synthetic oligonucleotide
caguuacccuguugaucca

SEQ ID NO: 790818 - RNA, 19 nt, Artificial Sequence
  Description of Artificial Sequence: Synthetic oligonucleotide
ggcuaacaucgucccaguc

SEQ ID NO: 790819 - RNA, 19 nt, Artificial Sequence
  Description of Artificial Sequence: Synthetic oligonucleotide
ggauagcucgguccgugua

SEQ ID NO: 790820 - RNA, 19 nt, Artificial Sequence
  Description of Artificial Sequence: Synthetic oligonucleotide
gugcggcccaggugaaaca

SEQ ID NO: 790821 - RNA, 19 nt, Artificial Sequence
  Description of Artificial Sequence: Synthetic oligonucleotide
gcaucgugauguccagguc

SEQ ID NO: 790822 - RNA, 19 nt, Artificial Sequence
  Description of Artificial Sequence: Synthetic oligonucleotide
gcaaagaggcgcucucaua

SEQ ID NO: 790823 - RNA, 19 nt, Artificial Sequence
  Description of Artificial Sequence: Synthetic oligonucleotide
ggguuugguuguguaccug

SEQ ID NO: 790824 - RNA, 19 nt, Artificial Sequence
  Description of Artificial Sequence: Synthetic oligonucleotide
uccccucggauagcucggu

SEQ ID NO: 790825 - RNA, 19 nt, Artificial Sequence
  Description of Artificial Sequence: Synthetic oligonucleotide
gcacaugccuguccauaga

SEQ ID NO: 790826 - RNA, 19 nt, Artificial Sequence
  Description of Artificial Sequence: Synthetic oligonucleotide
ucgguccguguaggcucgg

SEQ ID NO: 790827 - RNA, 19 nt, Artificial Sequence
  Description of Artificial Sequence: Synthetic oligonucleotide
cguguaggcucggugggcc

SEQ ID NO: 790828 - RNA, 19 nt, Artificial Sequence
  Description of Artificial Sequence: Synthetic oligonucleotide
cauaaccauccgggaccac

SEQ ID NO: 790829 - RNA, 19 nt, Artificial Sequence
  Description of Artificial Sequence: Synthetic oligonucleotide
  modified_base (3)..(3): a, c, u, g, unknown or other
cunaacccuggugcuugaa

SEQ ID NO: 790830 - RNA, 19 nt, Artificial Sequence
  Description of Artificial Sequence: Synthetic oligonucleotide
cuccaccaauuggagggca

SEQ ID NO: 790831 - RNA, 19 nt, Artificial Sequence
  Description of Artificial Sequence: Synthetic oligonucleotide
gcgcucucauauguggcac

SEQ ID NO: 790832 - RNA, 19 nt, Artificial Sequence
  Description of Artificial Sequence: Synthetic oligonucleotide
ccugggcuagagugaauga

SEQ ID NO: 790833 - RNA, 19 nt, Artificial Sequence
  Description of Artificial Sequence: Synthetic oligonucleotide
aggugccggucaaaggauu

SEQ ID NO: 790834 - RNA, 19 nt, Artificial Sequence
  Description of Artificial Sequence: Synthetic oligonucleotide
ggccuugaagcgaccagaa

SEQ ID NO: 790835 - RNA, 19 nt, Artificial Sequence
  Description of Artificial Sequence: Synthetic oligonucleotide
ggguaacauaggagaccgc

SEQ ID NO: 790836 - RNA, 19 nt, Artificial Sequence
  Description of Artificial Sequence: Synthetic oligonucleotide
ccggguauuguaggccuug

SEQ ID NO: 790837 - RNA, 19 nt, Artificial Sequence
  Description of Artificial Sequence: Synthetic oligonucleotide
cugcaggcguuccccuaca

SEQ ID NO: 790838 - RNA, 19 nt, Artificial Sequence
  Description of Artificial Sequence: Synthetic oligonucleotide
ccccuggggucugaaauuc

SEQ ID NO: 790839 - RNA, 19 nt, Artificial Sequence
  Description of Artificial Sequence: Synthetic oligonucleotide
cacucgguccgcuccgccu

SEQ ID NO: 790840 - RNA, 19 nt, Artificial Sequence
  Description of Artificial Sequence: Synthetic oligonucleotide
gccaugcgggcagcguuag

SEQ ID NO: 790841 - RNA, 19 nt, Artificial Sequence
  Description of Artificial Sequence: Synthetic oligonucleotide
ggcacggggcagccuuggc

SEQ ID NO: 790842 - RNA, 19 nt, Artificial Sequence
  Description of Artificial Sequence: Synthetic oligonucleotide
ggauuccccucggauagcu

SEQ ID NO: 790843 - RNA, 19 nt, Artificial Sequence
  Description of Artificial Sequence: Synthetic oligonucleotide
gggcacggggcagccuugg

SEQ ID NO: 790844 - RNA, 19 nt, Artificial Sequence
  Description of Artificial Sequence: Synthetic oligonucleotide
cgucccagucugucugcgg

SEQ ID NO: 790845 - RNA, 19 nt, Artificial Sequence
  Description of Artificial Sequence: Synthetic oligonucleotide
cugauccgaggugaauggu

SEQ ID NO: 790846 - RNA, 19 nt, Artificial Sequence
  Description of Artificial Sequence: Synthetic oligonucleotide
guguaggcucggugggccu

SEQ ID NO: 790847 - RNA, 19 nt, Artificial Sequence
  Description of Artificial Sequence: Synthetic oligonucleotide
ccggucaaaggauuccccu

SEQ ID NO: 790848 - RNA, 19 nt, Artificial Sequence
  Description of Artificial Sequence: Synthetic oligonucleotide
gcagggcuaucugaaugaa

SEQ ID NO: 790849 - RNA, 19 nt, Artificial Sequence
  Description of Artificial Sequence: Synthetic oligonucleotide
cugcuacaugguugcggua

SEQ ID NO: 790850 - RNA, 19 nt, Artificial Sequence
  Description of Artificial Sequence: Synthetic oligonucleotide
caccagucggacagccagu

SEQ ID NO: 790851 - RNA, 19 nt, Artificial Sequence
  Description of Artificial Sequence: Synthetic oligonucleotide
ccaccaauuggagggcaca

SEQ ID NO: 790852 - RNA, 19 nt, Artificial Sequence
  Description of Artificial Sequence: Synthetic oligonucleotide
gguccacaagagcaacgau

SEQ ID NO: 790853 - RNA, 19 nt, Artificial Sequence
  Description of Artificial Sequence: Synthetic oligonucleotide
ugccaacugcagggcuauc

SEQ ID NO: 790854 - RNA, 19 nt, Artificial Sequence
  Description of Artificial Sequence: Synthetic oligonucleotide
ggcaccugacugguagaaa

SEQ ID NO: 790855 - RNA, 19 nt, Artificial Sequence
  Description of Artificial Sequence: Synthetic oligonucleotide
gcucucauauguggcacau

SEQ ID NO: 790856 - RNA, 19 nt, Artificial Sequence
  Description of Artificial Sequence: Synthetic oligonucleotide
gguacacauccagcucgaa

SEQ ID NO: 790857 - RNA, 19 nt, Artificial Sequence
  Description of Artificial Sequence: Synthetic oligonucleotide
ucgguccgcuccgccucuc

SEQ ID NO: 790858 - RNA, 19 nt, Artificial Sequence
  Description of Artificial Sequence: Synthetic oligonucleotide
cucggauagcucgguccgu

SEQ ID NO: 790859 - RNA, 19 nt, Artificial Sequence
  Description of Artificial Sequence: Synthetic oligonucleotide
gggcagcguuagucucagc

SEQ ID NO: 790860 - RNA, 19 nt, Artificial Sequence
  Description of Artificial Sequence: Synthetic oligonucleotide
ccccucggauagcucgguc

SEQ ID NO: 790861 - RNA, 19 nt, Artificial Sequence
  Description of Artificial Sequence: Synthetic oligonucleotide
ggggcccugcuagagacuu

SEQ ID NO: 790862 - RNA, 19 nt, Artificial Sequence
  Description of Artificial Sequence: Synthetic oligonucleotide
cucgguccgcuccgccucu

SEQ ID NO: 790863 - RNA, 19 nt, Artificial Sequence
  Description of Artificial Sequence: Synthetic oligonucleotide
cugcggccacucgguccgc

SEQ ID NO: 790864 - RNA, 19 nt, Artificial Sequence
  Description of Artificial Sequence: Synthetic oligonucleotide
ggcuggcgguacuggagau

SEQ ID NO: 790865 - RNA, 19 nt, Artificial Sequence
  Description of Artificial Sequence: Synthetic oligonucleotide
cgguccgcuccgccucucg

SEQ ID NO: 790866 - RNA, 19 nt, Artificial Sequence
  Description of Artificial Sequence: Synthetic oligonucleotide
gcaucacuccugggcuaga

SEQ ID NO: 790867 - RNA, 19 nt, Artificial Sequence
  Description of Artificial Sequence: Synthetic oligonucleotide
cagugcggcccaggugaaa

SEQ ID NO: 790868 - RNA, 19 nt, Artificial Sequence
  Description of Artificial Sequence: Synthetic oligonucleotide
gccuguccauagauccugu

SEQ ID NO: 790869 - RNA, 19 nt, Artificial Sequence
  Description of Artificial Sequence: Synthetic oligonucleotide
gcggcccaggugaaacaua

SEQ ID NO: 790870 - RNA, 19 nt, Artificial Sequence
  Description of Artificial Sequence: Synthetic oligonucleotide
cggauagcucgguccgugu

SEQ ID NO: 790871 - RNA, 19 nt, Artificial Sequence
  Description of Artificial Sequence: Synthetic oligonucleotide
ccgggaccacagguccaaa

SEQ ID NO: 790872 - RNA, 19 nt, Artificial Sequence
  Description of Artificial Sequence: Synthetic oligonucleotide
aauaacuguucucaggcac

SEQ ID NO: 790873 - RNA, 19 nt, Artificial Sequence
  Description of Artificial Sequence: Synthetic oligonucleotide
ucaauaacuguucucaggc

SEQ ID NO: 790874 - RNA, 19 nt, Artificial Sequence
  Description of Artificial Sequence: Synthetic oligonucleotide
uacuaugaagacaucaggg

SEQ ID NO: 790875 - RNA, 19 nt, Artificial Sequence
  Description of Artificial Sequence: Synthetic oligonucleotide
aguaccucagcucugacgg

SEQ ID NO: 790876 - RNA, 19 nt, Artificial Sequence
  Description of Artificial Sequence: Synthetic oligonucleotide
ugugcugaaccaaaggugg

SEQ ID NO: 790877 - RNA, 19 nt, Artificial Sequence
  Description of Artificial Sequence: Synthetic oligonucleotide
uacccuaugaccuucaggc

SEQ ID NO: 790878 - RNA, 19 nt, Artificial Sequence
  Description of Artificial Sequence: Synthetic oligonucleotide
uauggggacccuuagaggg

SEQ ID NO: 790879 - RNA, 19 nt, Artificial Sequence
  Description of Artificial Sequence: Synthetic oligonucleotide
gguauaagaguucaaaagg

SEQ ID NO: 790880 - RNA, 19 nt, Artificial Sequence
  Description of Artificial Sequence: Synthetic oligonucleotide
ugguauaagaguucaaaag

SEQ ID NO: 790881 - RNA, 19 nt, Artificial Sequence
  Description of Artificial Sequence: Synthetic oligonucleotide
ucaagaaucaccgacuugc

SEQ ID NO: 790882 - RNA, 19 nt, Artificial Sequence
  Description of Artificial Sequence: Synthetic oligonucleotide
auagucuauggacaugucc

SEQ ID NO: 790883 - RNA, 19 nt, Artificial Sequence
  Description of Artificial Sequence: Synthetic oligonucleotide
auaauuacaaccuguccag

SEQ ID NO: 790884 - RNA, 19 nt, Artificial Sequence
  Description of Artificial Sequence: Synthetic oligonucleotide
uuagcgaugggacaaagac

SEQ ID NO: 790885 - RNA, 19 nt, Artificial Sequence
  Description of Artificial Sequence: Synthetic oligonucleotide
uguauagaaacaaugucuc

SEQ ID NO: 790886 - RNA, 19 nt, Artificial Sequence
  Description of Artificial Sequence: Synthetic oligonucleotide
uguugcacgucccuuagcg

SEQ ID NO: 790887 - RNA, 19 nt, Artificial Sequence
  Description of Artificial Sequence: Synthetic oligonucleotide
ucucccucaagaaucaccg

SEQ ID NO: 790888 - RNA, 19 nt, Artificial Sequence
  Description of Artificial Sequence: Synthetic oligonucleotide
agauaaauccaccggaauc

SEQ ID NO: 790889 - RNA, 19 nt, Artificial Sequence
  Description of Artificial Sequence: Synthetic oligonucleotide
agagcuacagaucuccucg

SEQ ID NO: 790890 - RNA, 19 nt, Artificial Sequence
  Description of Artificial Sequence: Synthetic oligonucleotide
acuccauuuauggagaggc

SEQ ID NO: 790891 - RNA, 19 nt, Artificial Sequence
  Description of Artificial Sequence: Synthetic oligonucleotide
ucugacgguacuaugaaga

SEQ ID NO: 790892 - RNA, 19 nt, Artificial Sequence
  Description of Artificial Sequence: Synthetic oligonucleotide
ucuucuaucuuacagguua

SEQ ID NO: 790893 - RNA, 19 nt, Artificial Sequence
  Description of Artificial Sequence: Synthetic oligonucleotide
uguucaaaagaguucagga

SEQ ID NO: 790894 - RNA, 19 nt, Artificial Sequence
  Description of Artificial Sequence: Synthetic oligonucleotide
gagagaauauuccuugagg

SEQ ID NO: 790895 - RNA, 19 nt, Artificial Sequence
  Description of Artificial Sequence: Synthetic oligonucleotide
ugguauagggcccacaggc

SEQ ID NO: 790896 - RNA, 19 nt, Artificial Sequence
  Description of Artificial Sequence: Synthetic oligonucleotide
ugucccaacaguuugguca

SEQ ID NO: 790897 - RNA, 19 nt, Artificial Sequence
  Description of Artificial Sequence: Synthetic oligonucleotide
aaagccucaaucuuguaau

SEQ ID NO: 790898 - RNA, 19 nt, Artificial Sequence
  Description of Artificial Sequence: Synthetic oligonucleotide
aaacaaugucucuggcucc

SEQ ID NO: 790899 - RNA, 19 nt, Artificial Sequence
  Description of Artificial Sequence: Synthetic oligonucleotide
uucaauaacuguucucagg

SEQ ID NO: 790900 - RNA, 19 nt, Artificial Sequence
  Description of Artificial Sequence: Synthetic oligonucleotide
acagguuagaacuucacga

SEQ ID NO: 790901 - RNA, 19 nt, Artificial Sequence
  Description of Artificial Sequence: Synthetic oligonucleotide
ugucccuauggccagaucc

SEQ ID NO: 790902 - RNA, 19 nt, Artificial Sequence
  Description of Artificial Sequence: Synthetic oligonucleotide
uacagguuagaacuucacg

SEQ ID NO: 790903 - RNA, 19 nt, Artificial Sequence
  Description of Artificial Sequence: Synthetic oligonucleotide
ucaaucagcucuuguauag

SEQ ID NO: 790904 - RNA, 19 nt, Artificial Sequence
  Description of Artificial Sequence: Synthetic oligonucleotide
ucaaaagaguucaggaucu

SEQ ID NO: 790905 - RNA, 19 nt, Artificial Sequence
  Description of Artificial Sequence: Synthetic oligonucleotide
agaaucaccgacuugcugu

SEQ ID NO: 790906 - RNA, 19 nt, Artificial Sequence
  Description of Artificial Sequence: Synthetic oligonucleotide
ugagagaagcugauguggg

SEQ ID NO: 790907 - RNA, 19 nt, Artificial Sequence
  Description of Artificial Sequence: Synthetic oligonucleotide
aaaagccucaaucuuguaa

SEQ ID NO: 790908 - RNA, 19 nt, Artificial Sequence
  Description of Artificial Sequence: Synthetic oligonucleotide
ucguaugugaugcugucag

SEQ ID NO: 790909 - RNA, 19 nt, Artificial Sequence
  Description of Artificial Sequence: Synthetic oligonucleotide
aaguucucauagucuaugg

SEQ ID NO: 790910 - RNA, 19 nt, Artificial Sequence
  Description of Artificial Sequence: Synthetic oligonucleotide
ucauguuuagcauccagga

SEQ ID NO: 790911 - RNA, 19 nt, Artificial Sequence
  Description of Artificial Sequence: Synthetic oligonucleotide
agugguguugaauccuucc

SEQ ID NO: 790912 - RNA, 19 nt, Artificial Sequence
  Description of Artificial Sequence: Synthetic oligonucleotide
ugggcauagguauagaagu

SEQ ID NO: 790913 - RNA, 19 nt, Artificial Sequence
  Description of Artificial Sequence: Synthetic oligonucleotide
aauuacaaccuguccagga

SEQ ID NO: 790914 - RNA, 19 nt, Artificial Sequence
  Description of Artificial Sequence: Synthetic oligonucleotide
uaaaucuccuaccaguggu

SEQ ID NO: 790915 - RNA, 19 nt, Artificial Sequence
  Description of Artificial Sequence: Synthetic oligonucleotide
cugucuguaaagaacacac

SEQ ID NO: 790916 - RNA, 19 nt, Artificial Sequence
  Description of Artificial Sequence: Synthetic oligonucleotide
aaguggcacacccucauag

SEQ ID NO: 790917 - RNA, 19 nt, Artificial Sequence
  Description of Artificial Sequence: Synthetic oligonucleotide
ugucagaggugguauaggg

SEQ ID NO: 790918 - RNA, 19 nt, Artificial Sequence
  Description of Artificial Sequence: Synthetic oligonucleotide
agaucuguagcuccuccgc

SEQ ID NO: 790919 - RNA, 19 nt, Artificial Sequence
  Description of Artificial Sequence: Synthetic oligonucleotide
aaauccaccggaaucugcg

SEQ ID NO: 790920 - RNA, 19 nt, Artificial Sequence
  Description of Artificial Sequence: Synthetic oligonucleotide
aaaaccauaguuugcucaa

SEQ ID NO: 790921 - RNA, 19 nt, Artificial Sequence
  Description of Artificial Sequence: Synthetic oligonucleotide
cucauguuuagcauccagg

SEQ ID NO: 790922 - RNA, 19 nt, Artificial Sequence
  Description of Artificial Sequence: Synthetic oligonucleotide
agaauauuccuugagguca

SEQ ID NO: 790923 - RNA, 19 nt, Artificial Sequence
  Description of Artificial Sequence: Synthetic oligonucleotide
uaugcuucaggauucggcu

SEQ ID NO: 790924 - RNA, 19 nt, Artificial Sequence
  Description of Artificial Sequence: Synthetic oligonucleotide
guacuaugaagacaucagg

SEQ ID NO: 790925 - RNA, 19 nt, Artificial Sequence
  Description of Artificial Sequence: Synthetic oligonucleotide
cuucaguucgcuuccaagc

SEQ ID NO: 790926 - RNA, 19 nt, Artificial Sequence
  Description of Artificial Sequence: Synthetic oligonucleotide
uucacgaacaucugagagc

SEQ ID NO: 790927 - RNA, 19 nt, Artificial Sequence
  Description of Artificial Sequence: Synthetic oligonucleotide
ucuuguaaugcuccuucag

SEQ ID NO: 790928 - RNA, 19 nt, Artificial Sequence
  Description of Artificial Sequence: Synthetic oligonucleotide
aaagguggugaccacuucu

SEQ ID NO: 790929 - RNA, 19 nt, Artificial Sequence
  Description of Artificial Sequence: Synthetic oligonucleotide
uccuuccauaauuacaacc

SEQ ID NO: 790930 - RNA, 19 nt, Artificial Sequence
  Description of Artificial Sequence: Synthetic oligonucleotide
uggugaucagaucaagcag

SEQ ID NO: 790931 - RNA, 19 nt, Artificial Sequence
  Description of Artificial Sequence: Synthetic oligonucleotide
uaccgguucauguugcacg

SEQ ID NO: 790932 - RNA, 19 nt, Artificial Sequence
  Description of Artificial Sequence: Synthetic oligonucleotide
ucacuagagggucacaccu

SEQ ID NO: 790933 - RNA, 19 nt, Artificial Sequence
  Description of Artificial Sequence: Synthetic oligonucleotide
auaugcuucaggauucggc

SEQ ID NO: 790934 - RNA, 19 nt, Artificial Sequence
  Description of Artificial Sequence: Synthetic oligonucleotide
ucaggauucggcugaaucu

SEQ ID NO: 790935 - RNA, 19 nt, Artificial Sequence
  Description of Artificial Sequence: Synthetic oligonucleotide
uccauaauuacaaccuguc

SEQ ID NO: 790936 - RNA, 19 nt, Artificial Sequence
  Description of Artificial Sequence: Synthetic oligonucleotide
acuagagggucacaccugg

SEQ ID NO: 790937 - RNA, 19 nt, Artificial Sequence
  Description of Artificial Sequence: Synthetic oligonucleotide
uuccauaauuacaaccugu

SEQ ID NO: 790938 - RNA, 19 nt, Artificial Sequence
  Description of Artificial Sequence: Synthetic oligonucleotide
uugucaagugucccaacag

SEQ ID NO: 790939 - RNA, 19 nt, Artificial Sequence
  Description of Artificial Sequence: Synthetic oligonucleotide
cuucacgaacaucugagag

SEQ ID NO: 790940 - RNA, 19 nt, Artificial Sequence
  Description of Artificial Sequence: Synthetic oligonucleotide
ucacgaacaucugagagcu

SEQ ID NO: 790941 - RNA, 19 nt, Artificial Sequence
  Description of Artificial Sequence: Synthetic oligonucleotide
aagcucgcuuaccauuccc

SEQ ID NO: 790942 - RNA, 19 nt, Artificial Sequence
  Description of Artificial Sequence: Synthetic oligonucleotide
uuauggggacccuuagagg

SEQ ID NO: 790943 - RNA, 19 nt, Artificial Sequence
  Description of Artificial Sequence: Synthetic oligonucleotide
uucgcuuccaagcucuucu

SEQ ID NO: 790944 - RNA, 19 nt, Artificial Sequence
  Description of Artificial Sequence: Synthetic oligonucleotide
gaaucugcgugccugagga

SEQ ID NO: 790945 - RNA, 19 nt, Artificial Sequence
  Description of Artificial Sequence: Synthetic oligonucleotide
cauaguuugcucaaaaucu

SEQ ID NO: 790946 - RNA, 19 nt, Artificial Sequence
  Description of Artificial Sequence: Synthetic oligonucleotide
aguaaaagccucaaucuug

SEQ ID NO: 790947 - RNA, 19 nt, Artificial Sequence
  Description of Artificial Sequence: Synthetic oligonucleotide
cauugugccaggcuuuugg

SEQ ID NO: 790948 - RNA, 19 nt, Artificial Sequence
  Description of Artificial Sequence: Synthetic oligonucleotide
uacgaguagagacacuccu

SEQ ID NO: 790949 - RNA, 19 nt, Artificial Sequence
  Description of Artificial Sequence: Synthetic oligonucleotide
cuacagaucuccucggccc

SEQ ID NO: 790950 - RNA, 19 nt, Artificial Sequence
  Description of Artificial Sequence: Synthetic oligonucleotide
cuaccagugguguugaauc

SEQ ID NO: 790951 - RNA, 19 nt, Artificial Sequence
  Description of Artificial Sequence: Synthetic oligonucleotide
auagguauagaaguucuca

SEQ ID NO: 790952 - RNA, 19 nt, Artificial Sequence
  Description of Artificial Sequence: Synthetic oligonucleotide
ccaggauucauacagacac

SEQ ID NO: 790953 - RNA, 19 nt, Artificial Sequence
  Description of Artificial Sequence: Synthetic oligonucleotide
augugaugcugucagaggu

SEQ ID NO: 790954 - RNA, 19 nt, Artificial Sequence
  Description of Artificial Sequence: Synthetic oligonucleotide
uucaguucgcuuccaagcu

SEQ ID NO: 790955 - RNA, 19 nt, Artificial Sequence
  Description of Artificial Sequence: Synthetic oligonucleotide
cugauagaauggaaguggc

SEQ ID NO: 790956 - RNA, 19 nt, Artificial Sequence
  Description of Artificial Sequence: Synthetic oligonucleotide
uccauuuauggagaggcug

SEQ ID NO: 790957 - RNA, 19 nt, Artificial Sequence
  Description of Artificial Sequence: Synthetic oligonucleotide
aagaaucaccgacuugcug

SEQ ID NO: 790958 - RNA, 19 nt, Artificial Sequence
  Description of Artificial Sequence: Synthetic oligonucleotide
uucaaaugggcuugucagc

SEQ ID NO: 790959 - RNA, 19 nt, Artificial Sequence
  Description of Artificial Sequence: Synthetic oligonucleotide
ucaaaugggcuugucagcu

SEQ ID NO: 790960 - RNA, 19 nt, Artificial Sequence
  Description of Artificial Sequence: Synthetic oligonucleotide
guaugugaugcugucagag

SEQ ID NO: 790961 - RNA, 19 nt, Artificial Sequence
  Description of Artificial Sequence: Synthetic oligonucleotide
aggauucauacagacacag

SEQ ID NO: 790962 - RNA, 19 nt, Artificial Sequence
  Description of Artificial Sequence: Synthetic oligonucleotide
ugggcuacgaguagagaca

SEQ ID NO: 790963 - RNA, 19 nt, Artificial Sequence
  Description of Artificial Sequence: Synthetic oligonucleotide
cucauguucaaaagaguuc

SEQ ID NO: 790964 - RNA, 19 nt, Artificial Sequence
  Description of Artificial Sequence: Synthetic oligonucleotide
cuuaccauucccuccucag

SEQ ID NO: 790965 - RNA, 19 nt, Artificial Sequence
  Description of Artificial Sequence: Synthetic oligonucleotide
gguaaaagguggcuguggg

SEQ ID NO: 790966 - RNA, 19 nt, Artificial Sequence
  Description of Artificial Sequence: Synthetic oligonucleotide
agcuguauuucugggaggg

SEQ ID NO: 790967 - RNA, 19 nt, Artificial Sequence
  Description of Artificial Sequence: Synthetic oligonucleotide
ugaauccuuccauaauuac

SEQ ID NO: 790968 - RNA, 19 nt, Artificial Sequence
  Description of Artificial Sequence: Synthetic oligonucleotide
agccucaaucuuguaaugc

SEQ ID NO: 790969 - RNA, 19 nt, Artificial Sequence
  Description of Artificial Sequence: Synthetic oligonucleotide
gauaaauccaccggaaucu

SEQ ID NO: 790970 - RNA, 19 nt, Artificial Sequence
  Description of Artificial Sequence: Synthetic oligonucleotide
ggagcuguauuucugggag

SEQ ID NO: 790971 - RNA, 19 nt, Artificial Sequence
  Description of Artificial Sequence: Synthetic oligonucleotide
gucagauaaauccaccgga

SEQ ID NO: 790972 - RNA, 19 nt, Artificial Sequence
  Description of Artificial Sequence: Synthetic oligonucleotide
guggcaguaaaucuccuac

SEQ ID NO: 790973 - RNA, 19 nt, Artificial Sequence
  Description of Artificial Sequence: Synthetic oligonucleotide
gacauguccucguggggcg

SEQ ID NO: 790974 - RNA, 19 nt, Artificial Sequence
  Description of Artificial Sequence: Synthetic oligonucleotide
uaaauccaccggaaucugc

SEQ ID NO: 790975 - RNA, 19 nt, Artificial Sequence
  Description of Artificial Sequence: Synthetic oligonucleotide
ugucuguaaagaacacaca

SEQ ID NO: 790976 - RNA, 19 nt, Artificial Sequence
  Description of Artificial Sequence: Synthetic oligonucleotide
agcuacagaucuccucggc

SEQ ID NO: 790977 - RNA, 19 nt, Artificial Sequence
  Description of Artificial Sequence: Synthetic oligonucleotide
agauccuugucaagugucc

SEQ ID NO: 790978 - RNA, 19 nt, Artificial Sequence
  Description of Artificial Sequence: Synthetic oligonucleotide
uuacaaccuguccaggaaa

SEQ ID NO: 790979 - RNA, 19 nt, Artificial Sequence
  Description of Artificial Sequence: Synthetic oligonucleotide
caguaaggcacacuuuccc

SEQ ID NO: 790980 - RNA, 19 nt, Artificial Sequence
  Description of Artificial Sequence: Synthetic oligonucleotide
aguaaaucuccuaccagug

SEQ ID NO: 790981 - RNA, 19 nt, Artificial Sequence
  Description of Artificial Sequence: Synthetic oligonucleotide
auaucacuccauuuaugga

SEQ ID NO: 790982 - RNA, 19 nt, Artificial Sequence
  Description of Artificial Sequence: Synthetic oligonucleotide
uggguauaccgguucaugu

SEQ ID NO: 790983 - RNA, 19 nt, Artificial Sequence
  Description of Artificial Sequence: Synthetic oligonucleotide
acuguucucaggcacugcu

SEQ ID NO: 790984 - RNA, 19 nt, Artificial Sequence
  Description of Artificial Sequence: Synthetic oligonucleotide
uguugaauccuuccauaau

SEQ ID NO: 790985 - RNA, 19 nt, Artificial Sequence
  Description of Artificial Sequence: Synthetic oligonucleotide
agcgaugggacaaagacaa

SEQ ID NO: 790986 - RNA, 19 nt, Artificial Sequence
  Description of Artificial Sequence: Synthetic oligonucleotide
uaauuacaaccuguccagg

SEQ ID NO: 790987 - RNA, 19 nt, Artificial Sequence
  Description of Artificial Sequence: Synthetic oligonucleotide
uagcgaugggacaaagaca

SEQ ID NO: 790988 - RNA, 19 nt, Artificial Sequence
  Description of Artificial Sequence: Synthetic oligonucleotide
aguucucauagucuaugga

SEQ ID NO: 790989 - RNA, 19 nt, Artificial Sequence
  Description of Artificial Sequence: Synthetic oligonucleotide
uuacagguuagaacuucac

SEQ ID NO: 790990 - RNA, 19 nt, Artificial Sequence
  Description of Artificial Sequence: Synthetic oligonucleotide
gguacuaugaagacaucag

SEQ ID NO: 790991 - RNA, 19 nt, Artificial Sequence
  Description of Artificial Sequence: Synthetic oligonucleotide
agauccugaccaccugcgc

SEQ ID NO: 790992 - RNA, 19 nt, Artificial Sequence
  Description of Artificial Sequence: Synthetic oligonucleotide
aggauaugcuucaggauuc

SEQ ID NO: 790993 - RNA, 19 nt, Artificial Sequence
  Description of Artificial Sequence: Synthetic oligonucleotide
auaguuugcucaaaaucug

SEQ ID NO: 790994 - RNA, 19 nt, Artificial Sequence
  Description of Artificial Sequence: Synthetic oligonucleotide
aagccucaaucuuguaaug

SEQ ID NO: 790995 - RNA, 19 nt, Artificial Sequence
  Description of Artificial Sequence: Synthetic oligonucleotide
aguguucccggucucccuc

SEQ ID NO: 790996 - RNA, 19 nt, Artificial Sequence
  Description of Artificial Sequence: Synthetic oligonucleotide
guacccuaugaccuucagg

SEQ ID NO: 790997 - RNA, 19 nt, Artificial Sequence
  Description of Artificial Sequence: Synthetic oligonucleotide
ucgcuuaccauucccuccu

SEQ ID NO: 790998 - RNA, 19 nt, Artificial Sequence
  Description of Artificial Sequence: Synthetic oligonucleotide
ucugggcauagguauagaa

SEQ ID NO: 790999 - RNA, 19 nt, Artificial Sequence
  Description of Artificial Sequence: Synthetic oligonucleotide
gacgaaguaccucagcucu

SEQ ID NO: 791000 - RNA, 19 nt, Artificial Sequence
  Description of Artificial Sequence: Synthetic oligonucleotide
uggcaguaaaucuccuacc

SEQ ID NO: 791001 - RNA, 19 nt, Artificial Sequence
  Description of Artificial Sequence: Synthetic oligonucleotide
uggguaguagcuucucugu

SEQ ID NO: 791002 - RNA, 19 nt, Artificial Sequence
  Description of Artificial Sequence: Synthetic oligonucleotide
cucgcuuaccauucccucc

SEQ ID NO: 791003 - RNA, 19 nt, Artificial Sequence
  Description of Artificial Sequence: Synthetic oligonucleotide
ugguucuagaagaggagua

SEQ ID NO: 791004 - RNA, 19 nt, Artificial Sequence
  Description of Artificial Sequence: Synthetic oligonucleotide
guggcacacccucauagag

SEQ ID NO: 791005 - RNA, 19 nt, Artificial Sequence
  Description of Artificial Sequence: Synthetic oligonucleotide
uccaccggaaucugcgugc

SEQ ID NO: 791006 - RNA, 19 nt, Artificial Sequence
  Description of Artificial Sequence: Synthetic oligonucleotide
ucguggggcggguagagug

SEQ ID NO: 791007 - RNA, 19 nt, Artificial Sequence
  Description of Artificial Sequence: Synthetic oligonucleotide
ggugguauagggcccacag

SEQ ID NO: 791008 - RNA, 19 nt, Artificial Sequence
  Description of Artificial Sequence: Synthetic oligonucleotide
uggccggucaugauugaug

SEQ ID NO: 791009 - RNA, 19 nt, Artificial Sequence
  Description of Artificial Sequence: Synthetic oligonucleotide
gauccugaccaccugcgca

SEQ ID NO: 791010 - RNA, 19 nt, Artificial Sequence
  Description of Artificial Sequence: Synthetic oligonucleotide
ugcugaaacauggucuugu

SEQ ID NO: 791011 - RNA, 19 nt, Artificial Sequence
  Description of Artificial Sequence: Synthetic oligonucleotide
uaaugcuccuucaguucgc

SEQ ID NO: 791012 - RNA, 19 nt, Artificial Sequence
  Description of Artificial Sequence: Synthetic oligonucleotide
caaccuguccaggaaagag

SEQ ID NO: 791013 - RNA, 19 nt, Artificial Sequence
  Description of Artificial Sequence: Synthetic oligonucleotide
uugcacgucccuuagcgau

SEQ ID NO: 791014 - RNA, 19 nt, Artificial Sequence
  Description of Artificial Sequence: Synthetic oligonucleotide
cuacgaguagagacacucc

SEQ ID NO: 791015 - RNA, 19 nt, Artificial Sequence
  Description of Artificial Sequence: Synthetic oligonucleotide
agacucagauccugaccac

SEQ ID NO: 791016 - RNA, 19 nt, Artificial Sequence
  Description of Artificial Sequence: Synthetic oligonucleotide
ugacgaaguaccucagcuc

SEQ ID NO: 791017 - RNA, 19 nt, Artificial Sequence
  Description of Artificial Sequence: Synthetic oligonucleotide
cuugacgaaguaccucagc

SEQ ID NO: 791018 - RNA, 19 nt, Artificial Sequence
  Description of Artificial Sequence: Synthetic oligonucleotide
cugacgguacuaugaagac

SEQ ID NO: 791019 - RNA, 19 nt, Artificial Sequence
  Description of Artificial Sequence: Synthetic oligonucleotide
guaguagcuucucuguguc

SEQ ID NO: 791020 - RNA, 19 nt, Artificial Sequence
  Description of Artificial Sequence: Synthetic oligonucleotide
cauguucaaaagaguucag

SEQ ID NO: 791021 - RNA, 19 nt, Artificial Sequence
  Description of Artificial Sequence: Synthetic oligonucleotide
uccguggaugucaagccaa

SEQ ID NO: 791022 - RNA, 19 nt, Artificial Sequence
  Description of Artificial Sequence: Synthetic oligonucleotide
aauccaccggaaucugcgu

SEQ ID NO: 791023 - RNA, 19 nt, Artificial Sequence
  Description of Artificial Sequence: Synthetic oligonucleotide
caggccgaagaucuguagc

SEQ ID NO: 791024 - RNA, 19 nt, Artificial Sequence
  Description of Artificial Sequence: Synthetic oligonucleotide
gauguccuugacgaaguac

SEQ ID NO: 791025 - RNA, 19 nt, Artificial Sequence
  Description of Artificial Sequence: Synthetic oligonucleotide
agccgcccaggauucauac

SEQ ID NO: 791026 - RNA, 19 nt, Artificial Sequence
  Description of Artificial Sequence: Synthetic oligonucleotide
gacgguacuaugaagacau

SEQ ID NO: 791027 - RNA, 19 nt, Artificial Sequence
  Description of Artificial Sequence: Synthetic oligonucleotide
accauaguuugcucaaaau

SEQ ID NO: 791028 - RNA, 19 nt, Artificial Sequence
  Description of Artificial Sequence: Synthetic oligonucleotide
ucgguuggguucuggagcu

SEQ ID NO: 791029 - RNA, 19 nt, Artificial Sequence
  Description of Artificial Sequence: Synthetic oligonucleotide
uaagcucgcuuaccauucc

SEQ ID NO: 791030 - RNA, 19 nt, Artificial Sequence
  Description of Artificial Sequence: Synthetic oligonucleotide
aaccuguccaggaaagaga

SEQ ID NO: 791031 - RNA, 19 nt, Artificial Sequence
  Description of Artificial Sequence: Synthetic oligonucleotide
cauagguauagaaguucuc

SEQ ID NO: 791032 - RNA, 19 nt, Artificial Sequence
  Description of Artificial Sequence: Synthetic oligonucleotide
acuucacgaacaucugaga

SEQ ID NO: 791033 - RNA, 19 nt, Artificial Sequence
  Description of Artificial Sequence: Synthetic oligonucleotide
cugcccuuacuguccaugg

SEQ ID NO: 791034 - RNA, 19 nt, Artificial Sequence
  Description of Artificial Sequence: Synthetic oligonucleotide
uggugagccgcccaggauu

SEQ ID NO: 791035 - RNA, 19 nt, Artificial Sequence
  Description of Artificial Sequence: Synthetic oligonucleotide
cucgaggcagcucagagaa

SEQ ID NO: 791036 - RNA, 19 nt, Artificial Sequence
  Description of Artificial Sequence: Synthetic oligonucleotide
gagggugugguauaagagu

SEQ ID NO: 791037 - RNA, 19 nt, Artificial Sequence
  Description of Artificial Sequence: Synthetic oligonucleotide
cagcugacaguucucuacc

SEQ ID NO: 791038 - RNA, 19 nt, Artificial Sequence
  Description of Artificial Sequence: Synthetic oligonucleotide
ucaguucgcuuccaagcuc

SEQ ID NO: 791039 - RNA, 19 nt, Artificial Sequence
  Description of Artificial Sequence: Synthetic oligonucleotide
ucucgaggcagcucagaga

SEQ ID NO: 791040 - RNA, 19 nt, Artificial Sequence
  Description of Artificial Sequence: Synthetic oligonucleotide
ggaguaaaagccucaaucu

SEQ ID NO: 791041 - RNA, 19 nt, Artificial Sequence
  Description of Artificial Sequence: Synthetic oligonucleotide
cauguugcacgucccuuag

SEQ ID NO: 791042 - RNA, 19 nt, Artificial Sequence
  Description of Artificial Sequence: Synthetic oligonucleotide
auguugcacgucccuuagc

SEQ ID NO: 791043 - RNA, 19 nt, Artificial Sequence
  Description of Artificial Sequence: Synthetic oligonucleotide
augauugaugauggugauc

SEQ ID NO: 791044 - RNA, 19 nt, Artificial Sequence
  Description of Artificial Sequence: Synthetic oligonucleotide
cugacacaaacugcacucg

SEQ ID NO: 791045 - RNA, 19 nt, Artificial Sequence
  Description of Artificial Sequence: Synthetic oligonucleotide
gugguauagggcccacagg

SEQ ID NO: 791046 - RNA, 19 nt, Artificial Sequence
  Description of Artificial Sequence: Synthetic oligonucleotide
aaucugcgugccugaggag

SEQ ID NO: 791047 - RNA, 19 nt, Artificial Sequence
  Description of Artificial Sequence: Synthetic oligonucleotide
auaccgguucauguugcac

SEQ ID NO: 791048 - RNA, 19 nt, Artificial Sequence
  Description of Artificial Sequence: Synthetic oligonucleotide
uauaccgguucauguugca

SEQ ID NO: 791049 - RNA, 19 nt, Artificial Sequence
  Description of Artificial Sequence: Synthetic oligonucleotide
aucaggggugacuggcauc

SEQ ID NO: 791050 - RNA, 19 nt, Artificial Sequence
  Description of Artificial Sequence: Synthetic oligonucleotide
cuaugaagacaucaggggu

SEQ ID NO: 791051 - RNA, 19 nt, Artificial Sequence
  Description of Artificial Sequence: Synthetic oligonucleotide
uuagagggugugguauaag

SEQ ID NO: 791052 - RNA, 19 nt, Artificial Sequence
  Description of Artificial Sequence: Synthetic oligonucleotide
auaaauccaccggaaucug

SEQ ID NO: 791053 - RNA, 19 nt, Artificial Sequence
  Description of Artificial Sequence: Synthetic oligonucleotide
aguggcacacccucauaga

SEQ ID NO: 791054 - RNA, 19 nt, Artificial Sequence
  Description of Artificial Sequence: Synthetic oligonucleotide
cucugacgguacuaugaag

SEQ ID NO: 791055 - RNA, 19 nt, Artificial Sequence
  Description of Artificial Sequence: Synthetic oligonucleotide
aaugcuccuucaguucgcu

SEQ ID NO: 791056 - RNA, 19 nt, Artificial Sequence
  Description of Artificial Sequence: Synthetic oligonucleotide
gguuagaacuucacgaaca

SEQ ID NO: 791057 - RNA, 19 nt, Artificial Sequence
  Description of Artificial Sequence: Synthetic oligonucleotide
ggcaguaaaucuccuacca

SEQ ID NO: 791058 - RNA, 19 nt, Artificial Sequence
  Description of Artificial Sequence: Synthetic oligonucleotide
ccauaauuacaaccugucc

SEQ ID NO: 791059 - RNA, 19 nt, Artificial Sequence
  Description of Artificial Sequence: Synthetic oligonucleotide
gcaguaaaucuccuaccag

SEQ ID NO: 791060 - RNA, 19 nt, Artificial Sequence
  Description of Artificial Sequence: Synthetic oligonucleotide
acgugaccuaggcugaaga

SEQ ID NO: 791061 - RNA, 19 nt, Artificial Sequence
  Description of Artificial Sequence: Synthetic oligonucleotide
gucccaacaguuuggucac

SEQ ID NO: 791062 - RNA, 19 nt, Artificial Sequence
  Description of Artificial Sequence: Synthetic oligonucleotide
augcuucaggauucggcug

SEQ ID NO: 791063 - RNA, 19 nt, Artificial Sequence
  Description of Artificial Sequence: Synthetic oligonucleotide
ugcccuuacuguccauggc

SEQ ID NO: 791064 - RNA, 19 nt, Artificial Sequence
  Description of Artificial Sequence: Synthetic oligonucleotide
accgguucauguugcacgu

SEQ ID NO: 791065 - RNA, 19 nt, Artificial Sequence
  Description of Artificial Sequence: Synthetic oligonucleotide
caucugggcauagguauag

SEQ ID NO: 791066 - RNA, 19 nt, Artificial Sequence
  Description of Artificial Sequence: Synthetic oligonucleotide
gaagcugaugugggcuacg

SEQ ID NO: 791067 - RNA, 19 nt, Artificial Sequence
  Description of Artificial Sequence: Synthetic oligonucleotide
cagguuagaacuucacgaa

SEQ ID NO: 791068 - RNA, 19 nt, Artificial Sequence
  Description of Artificial Sequence: Synthetic oligonucleotide
guguugaauccuuccauaa

SEQ ID NO: 791069 - RNA, 19 nt, Artificial Sequence
  Description of Artificial Sequence: Synthetic oligonucleotide
gugguguugaauccuucca

SEQ ID NO: 791070 - RNA, 19 nt, Artificial Sequence
  Description of Artificial Sequence: Synthetic oligonucleotide
cucaagaaucaccgacuug

SEQ ID NO: 791071 - RNA, 19 nt, Artificial Sequence
  Description of Artificial Sequence: Synthetic oligonucleotide
gaugugggcuacgaguaga

SEQ ID NO: 791072 - RNA, 19 nt, Artificial Sequence
  Description of Artificial Sequence: Synthetic oligonucleotide
uagaguuugguggcaguaa

SEQ ID NO: 791073 - RNA, 19 nt, Artificial Sequence
  Description of Artificial Sequence: Synthetic oligonucleotide
gucacaccugggcucuugg

SEQ ID NO: 791074 - RNA, 19 nt, Artificial Sequence
  Description of Artificial Sequence: Synthetic oligonucleotide
gcuacagaucuccucggcc

SEQ ID NO: 791075 - RNA, 19 nt, Artificial Sequence
  Description of Artificial Sequence: Synthetic oligonucleotide
cugccugcccuuacugucc

SEQ ID NO: 791076 - RNA, 19 nt, Artificial Sequence
  Description of Artificial Sequence: Synthetic oligonucleotide
accggaaucugcgugccug

SEQ ID NO: 791077 - RNA, 19 nt, Artificial Sequence
  Description of Artificial Sequence: Synthetic oligonucleotide
uggguugccuccugaagua

SEQ ID NO: 791078 - RNA, 19 nt, Artificial Sequence
  Description of Artificial Sequence: Synthetic oligonucleotide
ggguagaguggguaguagc

SEQ ID NO: 791079 - RNA, 19 nt, Artificial Sequence
  Description of Artificial Sequence: Synthetic oligonucleotide
gucucccucaagaaucacc

SEQ ID NO: 791080 - RNA, 19 nt, Artificial Sequence
  Description of Artificial Sequence: Synthetic oligonucleotide
ggaaucugcgugccugagg

SEQ ID NO: 791081 - RNA, 19 nt, Artificial Sequence
  Description of Artificial Sequence: Synthetic oligonucleotide
gcuacgaguagagacacuc

SEQ ID NO: 791082 - RNA, 19 nt, Artificial Sequence
  Description of Artificial Sequence: Synthetic oligonucleotide
gguccguggaugucaagcc

SEQ ID NO: 791083 - RNA, 19 nt, Artificial Sequence
  Description of Artificial Sequence: Synthetic oligonucleotide
cuuagcgaugggacaaaga

SEQ ID NO: 791084 - RNA, 19 nt, Artificial Sequence
  Description of Artificial Sequence: Synthetic oligonucleotide
cacuagagggucacaccug

SEQ ID NO: 791085 - RNA, 19 nt, Artificial Sequence
  Description of Artificial Sequence: Synthetic oligonucleotide
gcccuuacuguccauggcc

SEQ ID NO: 791086 - RNA, 19 nt, Artificial Sequence
  Description of Artificial Sequence: Synthetic oligonucleotide
cugucagaggugguauagg

SEQ ID NO: 791087 - RNA, 19 nt, Artificial Sequence
  Description of Artificial Sequence: Synthetic oligonucleotide
uuggucacuagagggucac

SEQ ID NO: 791088 - RNA, 19 nt, Artificial Sequence
  Description of Artificial Sequence: Synthetic oligonucleotide
cagcccugucccuauggcc

SEQ ID NO: 791089 - RNA, 19 nt, Artificial Sequence
  Description of Artificial Sequence: Synthetic oligonucleotide
guaaaagccucaaucuugu

SEQ ID NO: 791090 - RNA, 19 nt, Artificial Sequence
  Description of Artificial Sequence: Synthetic oligonucleotide
caaaugggcuugucagcug

SEQ ID NO: 791091 - RNA, 19 nt, Artificial Sequence
  Description of Artificial Sequence: Synthetic oligonucleotide
ggacauguccucguggggc

SEQ ID NO: 791092 - RNA, 19 nt, Artificial Sequence
  Description of Artificial Sequence: Synthetic oligonucleotide
ccgcccaggauucauacag

SEQ ID NO: 791093 - RNA, 19 nt, Artificial Sequence
  Description of Artificial Sequence: Synthetic oligonucleotide
ucgcuuauggggacccuua

SEQ ID NO: 791094 - RNA, 19 nt, Artificial Sequence
  Description of Artificial Sequence: Synthetic oligonucleotide
aagcugaugugggcuacga

SEQ ID NO: 791095 - RNA, 19 nt, Artificial Sequence
  Description of Artificial Sequence: Synthetic oligonucleotide
cgaugggacaaagacaagg

SEQ ID NO: 791096 - RNA, 19 nt, Artificial Sequence
  Description of Artificial Sequence: Synthetic oligonucleotide
agcagguccguggauguca

SEQ ID NO: 791097 - RNA, 19 nt, Artificial Sequence
  Description of Artificial Sequence: Synthetic oligonucleotide
auagaguuugguggcagua

SEQ ID NO: 791098 - RNA, 19 nt, Artificial Sequence
  Description of Artificial Sequence: Synthetic oligonucleotide
cauagucuauggacauguc

SEQ ID NO: 791099 - RNA, 19 nt, Artificial Sequence
  Description of Artificial Sequence: Synthetic oligonucleotide
ggugugguauaagaguuca

SEQ ID NO: 791100 - RNA, 19 nt, Artificial Sequence
  Description of Artificial Sequence: Synthetic oligonucleotide
guggguauaccgguucaug

SEQ ID NO: 791101 - RNA, 19 nt, Artificial Sequence
  Description of Artificial Sequence: Synthetic oligonucleotide
acucagauccugaccaccu

SEQ ID NO: 791102 - RNA, 19 nt, Artificial Sequence
  Description of Artificial Sequence: Synthetic oligonucleotide
caggauaugcuucaggauu

SEQ ID NO: 791103 - RNA, 19 nt, Artificial Sequence
  Description of Artificial Sequence: Synthetic oligonucleotide
cauguuuagcauccaggaa

SEQ ID NO: 791104 - RNA, 19 nt, Artificial Sequence
  Description of Artificial Sequence: Synthetic oligonucleotide
agcugcucgugaguggcuc

SEQ ID NO: 791105 - RNA, 19 nt, Artificial Sequence
  Description of Artificial Sequence: Synthetic oligonucleotide
gcugaugugggcuacgagu

SEQ ID NO: 791106 - RNA, 19 nt, Artificial Sequence
  Description of Artificial Sequence: Synthetic oligonucleotide
uggaucgcuuauggggacc

SEQ ID NO: 791107 - RNA, 19 nt, Artificial Sequence
  Description of Artificial Sequence: Synthetic oligonucleotide
aggauguccuugacgaagu

SEQ ID NO: 791108 - RNA, 19 nt, Artificial Sequence
  Description of Artificial Sequence: Synthetic oligonucleotide
caggacacgcccugugcug

SEQ ID NO: 791109 - RNA, 19 nt, Artificial Sequence
  Description of Artificial Sequence: Synthetic oligonucleotide
augugggcuacgaguagag

SEQ ID NO: 791110 - RNA, 19 nt, Artificial Sequence
  Description of Artificial Sequence: Synthetic oligonucleotide
gcugucagaggugguauag

SEQ ID NO: 791111 - RNA, 19 nt, Artificial Sequence
  Description of Artificial Sequence: Synthetic oligonucleotide
cucagauccugaccaccug

SEQ ID NO: 791112 - RNA, 19 nt, Artificial Sequence
  Description of Artificial Sequence: Synthetic oligonucleotide
uggggacccuuagagggug

SEQ ID NO: 791113 - RNA, 19 nt, Artificial Sequence
  Description of Artificial Sequence: Synthetic oligonucleotide
uaaaagccucaaucuugua

SEQ ID NO: 791114 - RNA, 19 nt, Artificial Sequence
  Description of Artificial Sequence: Synthetic oligonucleotide
cuggaucgcuuauggggac

SEQ ID NO: 791115 - RNA, 19 nt, Artificial Sequence
  Description of Artificial Sequence: Synthetic oligonucleotide
ggauaugcuucaggauucg

SEQ ID NO: 791116 - RNA, 19 nt, Artificial Sequence
  Description of Artificial Sequence: Synthetic oligonucleotide
ggcugaaucuaucuggagu

SEQ ID NO: 791117 - RNA, 19 nt, Artificial Sequence
  Description of Artificial Sequence: Synthetic oligonucleotide
ggucacuagagggucacac

SEQ ID NO: 791118 - RNA, 19 nt, Artificial Sequence
  Description of Artificial Sequence: Synthetic oligonucleotide
aguucucuaccugcucaug

SEQ ID NO: 791119 - RNA, 19 nt, Artificial Sequence
  Description of Artificial Sequence: Synthetic oligonucleotide
ucgaggcagcucagagaag

SEQ ID NO: 791120 - RNA, 19 nt, Artificial Sequence
  Description of Artificial Sequence: Synthetic oligonucleotide
acagaucuccucggccccg

SEQ ID NO: 791121 - RNA, 19 nt, Artificial Sequence
  Description of Artificial Sequence: Synthetic oligonucleotide
cugaggaguguucccgguc

SEQ ID NO: 791122 - RNA, 19 nt, Artificial Sequence
  Description of Artificial Sequence: Synthetic oligonucleotide
accucagcucugacgguac

SEQ ID NO: 791123 - RNA, 19 nt, Artificial Sequence
  Description of Artificial Sequence: Synthetic oligonucleotide
gcucuuggugccugugagg

SEQ ID NO: 791124 - RNA, 19 nt, Artificial Sequence
  Description of Artificial Sequence: Synthetic oligonucleotide
guugcacgucccuuagcga

SEQ ID NO: 791125 - RNA, 19 nt, Artificial Sequence
  Description of Artificial Sequence: Synthetic oligonucleotide
ugugggcuacgaguagaga

SEQ ID NO: 791126 - RNA, 19 nt, Artificial Sequence
  Description of Artificial Sequence: Synthetic oligonucleotide
ggccggucaugauugauga

SEQ ID NO: 791127 - RNA, 19 nt, Artificial Sequence
  Description of Artificial Sequence: Synthetic oligonucleotide
uguggguauaccgguucau

SEQ ID NO: 791128 - RNA, 19 nt, Artificial Sequence
  Description of Artificial Sequence: Synthetic oligonucleotide
aaagguggcuguggguaua

SEQ ID NO: 791129 - RNA, 19 nt, Artificial Sequence
  Description of Artificial Sequence: Synthetic oligonucleotide
gucccuuagcgaugggaca

SEQ ID NO: 791130 - RNA, 19 nt, Artificial Sequence
  Description of Artificial Sequence: Synthetic oligonucleotide
guccucguggggcggguag

SEQ ID NO: 791131 - RNA, 19 nt, Artificial Sequence
  Description of Artificial Sequence: Synthetic oligonucleotide
gaugacccggaggggccgg

SEQ ID NO: 791132 - RNA, 19 nt, Artificial Sequence
  Description of Artificial Sequence: Synthetic oligonucleotide
guccguggaugucaagcca

SEQ ID NO: 791133 - RNA, 19 nt, Artificial Sequence
  Description of Artificial Sequence: Synthetic oligonucleotide
aucagcucuuguauagaaa

SEQ ID NO: 791134 - RNA, 19 nt, Artificial Sequence
  Description of Artificial Sequence: Synthetic oligonucleotide
agaguggguaguagcuucu

SEQ ID NO: 791135 - RNA, 19 nt, Artificial Sequence
  Description of Artificial Sequence: Synthetic oligonucleotide
gugaccuaggcugaagacu

SEQ ID NO: 791136 - RNA, 19 nt, Artificial Sequence
  Description of Artificial Sequence: Synthetic oligonucleotide
agcucgcuuaccauucccu

SEQ ID NO: 791137 - RNA, 19 nt, Artificial Sequence
  Description of Artificial Sequence: Synthetic oligonucleotide
ccagaagagcuacagaucu

SEQ ID NO: 791138 - RNA, 19 nt, Artificial Sequence
  Description of Artificial Sequence: Synthetic oligonucleotide
cagugguguugaauccuuc

SEQ ID NO: 791139 - RNA, 19 nt, Artificial Sequence
  Description of Artificial Sequence: Synthetic oligonucleotide
ucccggucucccucaagaa

SEQ ID NO: 791140 - RNA, 19 nt, Artificial Sequence
  Description of Artificial Sequence: Synthetic oligonucleotide
caugaccacugucuuugga

SEQ ID NO: 791141 - RNA, 19 nt, Artificial Sequence
  Description of Artificial Sequence: Synthetic oligonucleotide
ugcugucagaggugguaua

SEQ ID NO: 791142 - RNA, 19 nt, Artificial Sequence
  Description of Artificial Sequence: Synthetic oligonucleotide
acgucccuuagcgauggga

SEQ ID NO: 791143 - RNA, 19 nt, Artificial Sequence
  Description of Artificial Sequence: Synthetic oligonucleotide
gguacccuaugaccuucag

SEQ ID NO: 791144 - RNA, 19 nt, Artificial Sequence
  Description of Artificial Sequence: Synthetic oligonucleotide
uggguacccuaugaccuuc

SEQ ID NO: 791145 - RNA, 19 nt, Artificial Sequence
  Description of Artificial Sequence: Synthetic oligonucleotide
ggucguaugugaugcuguc

SEQ ID NO: 791146 - RNA, 19 nt, Artificial Sequence
  Description of Artificial Sequence: Synthetic oligonucleotide
gguucuagaagaggaguaa

SEQ ID NO: 791147 - RNA, 19 nt, Artificial Sequence
  Description of Artificial Sequence: Synthetic oligonucleotide
ggucuuguagcugcucgug

SEQ ID NO: 791148 - RNA, 19 nt, Artificial Sequence
  Description of Artificial Sequence: Synthetic oligonucleotide
ucuggccggucaugauuga

SEQ ID NO: 791149 - RNA, 19 nt, Artificial Sequence
  Description of Artificial Sequence: Synthetic oligonucleotide
gcuggaucgcuuaugggga

SEQ ID NO: 791150 - RNA, 19 nt, Artificial Sequence
  Description of Artificial Sequence: Synthetic oligonucleotide
cuuagagggugugguauaa

SEQ ID NO: 791151 - RNA, 19 nt, Artificial Sequence
  Description of Artificial Sequence: Synthetic oligonucleotide
gacccuuagaggguguggu

SEQ ID NO: 791152 - RNA, 19 nt, Artificial Sequence
  Description of Artificial Sequence: Synthetic oligonucleotide
cgguucauguugcacgucc

SEQ ID NO: 791153 - RNA, 19 nt, Artificial Sequence
  Description of Artificial Sequence: Synthetic oligonucleotide
cagccaaucuggcccagca

SEQ ID NO: 791154 - RNA, 19 nt, Artificial Sequence
  Description of Artificial Sequence: Synthetic oligonucleotide
ggccauaggugccacccac

SEQ ID NO: 791155 - RNA, 19 nt, Artificial Sequence
  Description of Artificial Sequence: Synthetic oligonucleotide
cgucccuuagcgaugggac

SEQ ID NO: 791156 - RNA, 19 nt, Artificial Sequence
  Description of Artificial Sequence: Synthetic oligonucleotide
ccuaugaccuucaggcuga

SEQ ID NO: 791157 - RNA, 19 nt, Artificial Sequence
  Description of Artificial Sequence: Synthetic oligonucleotide
caguucgcuuccaagcucu

SEQ ID NO: 791158 - RNA, 19 nt, Artificial Sequence
  Description of Artificial Sequence: Synthetic oligonucleotide
aggacacgcccugugcuga

SEQ ID NO: 791159 - RNA, 19 nt, Artificial Sequence
  Description of Artificial Sequence: Synthetic oligonucleotide
guggggcggguagaguggg

SEQ ID NO: 791160 - RNA, 19 nt, Artificial Sequence
  Description of Artificial Sequence: Synthetic oligonucleotide
gaaucaccgacuugcuguu

SEQ ID NO: 791161 - RNA, 19 nt, Artificial Sequence
  Description of Artificial Sequence: Synthetic oligonucleotide
gcucgugaguggcucuggg

SEQ ID NO: 791162 - RNA, 19 nt, Artificial Sequence
  Description of Artificial Sequence: Synthetic oligonucleotide
ggaucgcuuauggggaccc

SEQ ID NO: 791163 - RNA, 19 nt, Artificial Sequence
  Description of Artificial Sequence: Synthetic oligonucleotide
ucucccggaccaggacacg

SEQ ID NO: 791164 - RNA, 19 nt, Artificial Sequence
  Description of Artificial Sequence: Synthetic oligonucleotide
uccucgcaguccaggccga

SEQ ID NO: 791165 - RNA, 19 nt, Artificial Sequence
  Description of Artificial Sequence: Synthetic oligonucleotide
caugauugaugauggugau

SEQ ID NO: 791166 - RNA, 19 nt, Artificial Sequence
  Description of Artificial Sequence: Synthetic oligonucleotide
ggagucccagaagagcuac

SEQ ID NO: 791167 - RNA, 19 nt, Artificial Sequence
  Description of Artificial Sequence: Synthetic oligonucleotide
ggaguguucccggucuccc

SEQ ID NO: 791168 - RNA, 19 nt, Artificial Sequence
  Description of Artificial Sequence: Synthetic oligonucleotide
ggacacggccaugaugacc

SEQ ID NO: 791169 - RNA, 19 nt, Artificial Sequence
  Description of Artificial Sequence: Synthetic oligonucleotide
aggccacgugaccuaggcu

SEQ ID NO: 791170 - RNA, 19 nt, Artificial Sequence
  Description of Artificial Sequence: Synthetic oligonucleotide
cugguucuagaagaggagu

SEQ ID NO: 791171 - RNA, 19 nt, Artificial Sequence
  Description of Artificial Sequence: Synthetic oligonucleotide
cacgugaccuaggcugaag

SEQ ID NO: 791172 - RNA, 19 nt, Artificial Sequence
  Description of Artificial Sequence: Synthetic oligonucleotide
caagaaucaccgacuugcu

SEQ ID NO: 791173 - RNA, 19 nt, Artificial Sequence
  Description of Artificial Sequence: Synthetic oligonucleotide
ggggucguaugugaugcug

SEQ ID NO: 791174 - RNA, 19 nt, Artificial Sequence
  Description of Artificial Sequence: Synthetic oligonucleotide
guccauggcccuggguugc

SEQ ID NO: 791175 - RNA, 19 nt, Artificial Sequence
  Description of Artificial Sequence: Synthetic oligonucleotide
gcaugaccacugucuuugg

SEQ ID NO: 791176 - RNA, 19 nt, Artificial Sequence
  Description of Artificial Sequence: Synthetic oligonucleotide
gcacacuuucccugugcug

SEQ ID NO: 791177 - RNA, 19 nt, Artificial Sequence
  Description of Artificial Sequence: Synthetic oligonucleotide
cagauaaauccaccggaau

SEQ ID NO: 791178 - RNA, 19 nt, Artificial Sequence
  Description of Artificial Sequence: Synthetic oligonucleotide
gaguggguaguagcuucuc

SEQ ID NO: 791179 - RNA, 19 nt, Artificial Sequence
  Description of Artificial Sequence: Synthetic oligonucleotide
aucgcuuauggggacccuu

SEQ ID NO: 791180 - RNA, 19 nt, Artificial Sequence
  Description of Artificial Sequence: Synthetic oligonucleotide
acgaguagagacacuccuu

SEQ ID NO: 791181 - RNA, 19 nt, Artificial Sequence
  Description of Artificial Sequence: Synthetic oligonucleotide
cauagaguuugguggcagu

SEQ ID NO: 791182 - RNA, 19 nt, Artificial Sequence
  Description of Artificial Sequence: Synthetic oligonucleotide
cuuguagcugcucgugagu

SEQ ID NO: 791183 - RNA, 19 nt, Artificial Sequence
  Description of Artificial Sequence: Synthetic oligonucleotide
gcucgcuuaccauucccuc

SEQ ID NO: 791184 - RNA, 19 nt, Artificial Sequence
  Description of Artificial Sequence: Synthetic oligonucleotide
caauaagcucgcuuaccau

SEQ ID NO: 791185 - RNA, 19 nt, Artificial Sequence
  Description of Artificial Sequence: Synthetic oligonucleotide
gcucugacgguacuaugaa

SEQ ID NO: 791186 - RNA, 19 nt, Artificial Sequence
  Description of Artificial Sequence: Synthetic oligonucleotide
acgguacuaugaagacauc

SEQ ID NO: 791187 - RNA, 19 nt, Artificial Sequence
  Description of Artificial Sequence: Synthetic oligonucleotide
gguauagggcccacaggca

SEQ ID NO: 791188 - RNA, 19 nt, Artificial Sequence
  Description of Artificial Sequence: Synthetic oligonucleotide
uccucguggggcggguaga

SEQ ID NO: 791189 - RNA, 19 nt, Artificial Sequence
  Description of Artificial Sequence: Synthetic oligonucleotide
auggggacccuuagagggu

SEQ ID NO: 791190 - RNA, 19 nt, Artificial Sequence
  Description of Artificial Sequence: Synthetic oligonucleotide
guucgcuuccaagcucuuc

SEQ ID NO: 791191 - RNA, 19 nt, Artificial Sequence
  Description of Artificial Sequence: Synthetic oligonucleotide
gggcuacgaguagagacac

SEQ ID NO: 791192 - RNA, 19 nt, Artificial Sequence
  Description of Artificial Sequence: Synthetic oligonucleotide
aucugggcauagguauaga

SEQ ID NO: 791193 - RNA, 19 nt, Artificial Sequence
  Description of Artificial Sequence: Synthetic oligonucleotide
cugcucgugaguggcucug

SEQ ID NO: 791194 - RNA, 19 nt, Artificial Sequence
  Description of Artificial Sequence: Synthetic oligonucleotide
aggauucggcugaaucuau

SEQ ID NO: 791195 - RNA, 19 nt, Artificial Sequence
  Description of Artificial Sequence: Synthetic oligonucleotide
ucccuauggccagauccuu

SEQ ID NO: 791196 - RNA, 19 nt, Artificial Sequence
  Description of Artificial Sequence: Synthetic oligonucleotide
cccuauggccagauccuug

SEQ ID NO: 791197 - RNA, 19 nt, Artificial Sequence
  Description of Artificial Sequence: Synthetic oligonucleotide
gugaccacuucuccucggu

SEQ ID NO: 791198 - RNA, 19 nt, Artificial Sequence
  Description of Artificial Sequence: Synthetic oligonucleotide
cacgcccugugcugaacca

SEQ ID NO: 791199 - RNA, 19 nt, Artificial Sequence
  Description of Artificial Sequence: Synthetic oligonucleotide
gcuuaccauucccuccuca

SEQ ID NO: 791200 - RNA, 19 nt, Artificial Sequence
  Description of Artificial Sequence: Synthetic oligonucleotide
gaccuucaggcugacacuu

SEQ ID NO: 791201 - RNA, 19 nt, Artificial Sequence
  Description of Artificial Sequence: Synthetic oligonucleotide
cucccucaagaaucaccga

SEQ ID NO: 791202 - RNA, 19 nt, Artificial Sequence
  Description of Artificial Sequence: Synthetic oligonucleotide
gcguccucgcaguccaggc

SEQ ID NO: 791203 - RNA, 19 nt, Artificial Sequence
  Description of Artificial Sequence: Synthetic oligonucleotide
gucccuauggccagauccu

SEQ ID NO: 791204 - RNA, 19 nt, Artificial Sequence
  Description of Artificial Sequence: Synthetic oligonucleotide
cuccauuuauggagaggcu

SEQ ID NO: 791205 - RNA, 19 nt, Artificial Sequence
  Description of Artificial Sequence: Synthetic oligonucleotide
gaguguucccggucucccu

SEQ ID NO: 791206 - RNA, 19 nt, Artificial Sequence
  Description of Artificial Sequence: Synthetic oligonucleotide
gacacgcccugugcugaac

SEQ ID NO: 791207 - RNA, 19 nt, Artificial Sequence
  Description of Artificial Sequence: Synthetic oligonucleotide
cugaccaccugcgcagcca

SEQ ID NO: 791208 - RNA, 19 nt, Artificial Sequence
  Description of Artificial Sequence: Synthetic oligonucleotide
uggggcggguagagugggu

SEQ ID NO: 791209 - RNA, 19 nt, Artificial Sequence
  Description of Artificial Sequence: Synthetic oligonucleotide
ggcacacuuucccugugcu

SEQ ID NO: 791210 - RNA, 19 nt, Artificial Sequence
  Description of Artificial Sequence: Synthetic oligonucleotide
gagucccagaagagcuaca

SEQ ID NO: 791211 - RNA, 19 nt, Artificial Sequence
  Description of Artificial Sequence: Synthetic oligonucleotide
aggcauugugccaggcuuu

SEQ ID NO: 791212 - RNA, 19 nt, Artificial Sequence
  Description of Artificial Sequence: Synthetic oligonucleotide
cucgugaguggcucugggu

SEQ ID NO: 791213 - RNA, 19 nt, Artificial Sequence
  Description of Artificial Sequence: Synthetic oligonucleotide
uccuaccagugguguugaa

SEQ ID NO: 791214 - RNA, 19 nt, Artificial Sequence
  Description of Artificial Sequence: Synthetic oligonucleotide
caucuggccggucaugauu

SEQ ID NO: 791215 - RNA, 19 nt, Artificial Sequence
  Description of Artificial Sequence: Synthetic oligonucleotide
ccuuagcgaugggacaaag

SEQ ID NO: 791216 - RNA, 19 nt, Artificial Sequence
  Description of Artificial Sequence: Synthetic oligonucleotide
cuccuaccagugguguuga

SEQ ID NO: 791217 - RNA, 19 nt, Artificial Sequence
  Description of Artificial Sequence: Synthetic oligonucleotide
cacgucccuuagcgauggg

SEQ ID NO: 791218 - RNA, 19 nt, Artificial Sequence
  Description of Artificial Sequence: Synthetic oligonucleotide
ccuauggccagauccuugu

SEQ ID NO: 791219 - RNA, 19 nt, Artificial Sequence
  Description of Artificial Sequence: Synthetic oligonucleotide
acgcccugugcugaaccaa

SEQ ID NO: 791220 - RNA, 19 nt, Artificial Sequence
  Description of Artificial Sequence: Synthetic oligonucleotide
cugucccuauggccagauc

SEQ ID NO: 791221 - RNA, 19 nt, Artificial Sequence
  Description of Artificial Sequence: Synthetic oligonucleotide
gugugguauaagaguucaa

SEQ ID NO: 791222 - RNA, 19 nt, Artificial Sequence
  Description of Artificial Sequence: Synthetic oligonucleotide
cccucaagaaucaccgacu

SEQ ID NO: 791223 - RNA, 19 nt, Artificial Sequence
  Description of Artificial Sequence: Synthetic oligonucleotide
gcccugugcugaaccaaag

SEQ ID NO: 791224 - RNA, 19 nt, Artificial Sequence
  Description of Artificial Sequence: Synthetic oligonucleotide
cgcuuauggggacccuuag

SEQ ID NO: 791225 - RNA, 19 nt, Artificial Sequence
  Description of Artificial Sequence: Synthetic oligonucleotide
cuggguggacacggccaug

SEQ ID NO: 791226 - RNA, 19 nt, Artificial Sequence
  Description of Artificial Sequence: Synthetic oligonucleotide
cucuucuaucuuacagguu

SEQ ID NO: 791227 - RNA, 19 nt, Artificial Sequence
  Description of Artificial Sequence: Synthetic oligonucleotide
ccgauguggaacagcaggu

SEQ ID NO: 791228 - RNA, 19 nt, Artificial Sequence
  Description of Artificial Sequence: Synthetic oligonucleotide
ccaccggaaucugcgugcc

SEQ ID NO: 791229 - RNA, 19 nt, Artificial Sequence
  Description of Artificial Sequence: Synthetic oligonucleotide
guaccucagcucugacggu

SEQ ID NO: 791230 - RNA, 19 nt, Artificial Sequence
  Description of Artificial Sequence: Synthetic oligonucleotide
ccuuagagggugugguaua

SEQ ID NO: 791231 - RNA, 19 nt, Artificial Sequence
  Description of Artificial Sequence: Synthetic oligonucleotide
auguccucguggggcgggu

SEQ ID NO: 791232 - RNA, 19 nt, Artificial Sequence
  Description of Artificial Sequence: Synthetic oligonucleotide
gcgaugggacaaagacaag

SEQ ID NO: 791233 - RNA, 19 nt, Artificial Sequence
  Description of Artificial Sequence: Synthetic oligonucleotide
gcauugugccaggcuuuug

SEQ ID NO: 791234 - RNA, 19 nt, Artificial Sequence
  Description of Artificial Sequence: Synthetic oligonucleotide
cggcugaaucuaucuggag

SEQ ID NO: 791235 - RNA, 19 nt, Artificial Sequence
  Description of Artificial Sequence: Synthetic oligonucleotide
gggucguaugugaugcugu

SEQ ID NO: 791236 - RNA, 19 nt, Artificial Sequence
  Description of Artificial Sequence: Synthetic oligonucleotide
cuggguacccuaugaccuu

SEQ ID NO: 791237 - RNA, 19 nt, Artificial Sequence
  Description of Artificial Sequence: Synthetic oligonucleotide
ggcggccauaggugccacc

SEQ ID NO: 791238 - RNA, 19 nt, Artificial Sequence
  Description of Artificial Sequence: Synthetic oligonucleotide
ggucucccucaagaaucac

SEQ ID NO: 791239 - RNA, 19 nt, Artificial Sequence
  Description of Artificial Sequence: Synthetic oligonucleotide
ccauaggugccacccaccu

SEQ ID NO: 791240 - RNA, 19 nt, Artificial Sequence
  Description of Artificial Sequence: Synthetic oligonucleotide
gaucgcuuauggggacccu

SEQ ID NO: 791241 - RNA, 19 nt, Artificial Sequence
  Description of Artificial Sequence: Synthetic oligonucleotide
aguucgcuuccaagcucuu

SEQ ID NO: 791242 - RNA, 19 nt, Artificial Sequence
  Description of Artificial Sequence: Synthetic oligonucleotide
cagaucuccucggccccga

SEQ ID NO: 791243 - RNA, 19 nt, Artificial Sequence
  Description of Artificial Sequence: Synthetic oligonucleotide
gccgcccaggauucauaca

SEQ ID NO: 791244 - RNA, 19 nt, Artificial Sequence
  Description of Artificial Sequence: Synthetic oligonucleotide
ccggaaucugcgugccuga

SEQ ID NO: 791245 - RNA, 19 nt, Artificial Sequence
  Description of Artificial Sequence: Synthetic oligonucleotide
ggguacccuaugaccuuca

SEQ ID NO: 791246 - RNA, 19 nt, Artificial Sequence
  Description of Artificial Sequence: Synthetic oligonucleotide
cucugcaguaaggcacacu

SEQ ID NO: 791247 - RNA, 19 nt, Artificial Sequence
  Description of Artificial Sequence: Synthetic oligonucleotide
ggggcggguagagugggua

SEQ ID NO: 791248 - RNA, 19 nt, Artificial Sequence
  Description of Artificial Sequence: Synthetic oligonucleotide
gggcauagguauagaaguu

SEQ ID NO: 791249 - RNA, 19 nt, Artificial Sequence
  Description of Artificial Sequence: Synthetic oligonucleotide
gcugcucgugaguggcucu

SEQ ID NO: 791250 - RNA, 19 nt, Artificial Sequence
  Description of Artificial Sequence: Synthetic oligonucleotide
ggacacgcccugugcugaa

SEQ ID NO: 791251 - RNA, 19 nt, Artificial Sequence
  Description of Artificial Sequence: Synthetic oligonucleotide
ccaucagggcguccucgca

SEQ ID NO: 791252 - RNA, 19 nt, Artificial Sequence
  Description of Artificial Sequence: Synthetic oligonucleotide
ccguggaugucaagccaaa

SEQ ID NO: 791253 - RNA, 19 nt, Artificial Sequence
  Description of Artificial Sequence: Synthetic oligonucleotide
ggcggguagaguggguagu

SEQ ID NO: 791254 - RNA, 19 nt, Artificial Sequence
  Description of Artificial Sequence: Synthetic oligonucleotide
ccuaccagugguguugaau

SEQ ID NO: 791255 - RNA, 19 nt, Artificial Sequence
  Description of Artificial Sequence: Synthetic oligonucleotide
gcggguagaguggguagua

SEQ ID NO: 791256 - RNA, 19 nt, Artificial Sequence
  Description of Artificial Sequence: Synthetic oligonucleotide
ccugaggaguguucccggu

SEQ ID NO: 791257 - RNA, 19 nt, Artificial Sequence
  Description of Artificial Sequence: Synthetic oligonucleotide
cuggccggucaugauugau

SEQ ID NO: 791258 - RNA, 19 nt, Artificial Sequence
  Description of Artificial Sequence: Synthetic oligonucleotide
ggcauugugccaggcuuuu

SEQ ID NO: 791259 - RNA, 19 nt, Artificial Sequence
  Description of Artificial Sequence: Synthetic oligonucleotide
cgcccugugcugaaccaaa

SEQ ID NO: 791260 - RNA, 19 nt, Artificial Sequence
  Description of Artificial Sequence: Synthetic oligonucleotide
cccggucucccucaagaau

SEQ ID NO: 791261 - RNA, 19 nt, Artificial Sequence
  Description of Artificial Sequence: Synthetic oligonucleotide
caccggaaucugcgugccu

SEQ ID NO: 791262 - RNA, 19 nt, Artificial Sequence
  Description of Artificial Sequence: Synthetic oligonucleotide
ccgguucauguugcacguc

SEQ ID NO: 791263 - RNA, 19 nt, Artificial Sequence
  Description of Artificial Sequence: Synthetic oligonucleotide
cucguggggcggguagagu

SEQ ID NO: 791264 - RNA, 19 nt, Artificial Sequence
  Description of Artificial Sequence: Synthetic oligonucleotide
cugcgugccugaggagugu

SEQ ID NO: 791265 - RNA, 19 nt, Artificial Sequence
  Description of Artificial Sequence: Synthetic oligonucleotide
cgcuuaccauucccuccuc

SEQ ID NO: 791266 - RNA, 19 nt, Artificial Sequence
  Description of Artificial Sequence: Synthetic oligonucleotide
ggcuacgaguagagacacu

SEQ ID NO: 791267 - RNA, 19 nt, Artificial Sequence
  Description of Artificial Sequence: Synthetic oligonucleotide
cccuuagcgaugggacaaa

SEQ ID NO: 791268 - RNA, 19 nt, Artificial Sequence
  Description of Artificial Sequence: Synthetic oligonucleotide
cgcuuccaagcucuucuau

SEQ ID NO: 791269 - RNA, 19 nt, Artificial Sequence
  Description of Artificial Sequence: Synthetic oligonucleotide
ggggacccuuagagggugu

SEQ ID NO: 791270 - RNA, 19 nt, Artificial Sequence
  Description of Artificial Sequence: Synthetic oligonucleotide
ccacgugaccuaggcugaa

SEQ ID NO: 791271 - RNA, 19 nt, Artificial Sequence
  Description of Artificial Sequence: Synthetic oligonucleotide
ccaccugcgcagccacacu

SEQ ID NO: 791272 - RNA, 19 nt, Artificial Sequence
  Description of Artificial Sequence: Synthetic oligonucleotide
auauguaacaaaaugaacc

SEQ ID NO: 791273 - RNA, 19 nt, Artificial Sequence
  Description of Artificial Sequence: Synthetic oligonucleotide
aauacagccacucccgugc

SEQ ID NO: 791274 - RNA, 19 nt, Artificial Sequence
  Description of Artificial Sequence: Synthetic oligonucleotide
guggaaguaagacagaugg

SEQ ID NO: 791275 - RNA, 19 nt, Artificial Sequence
  Description of Artificial Sequence: Synthetic oligonucleotide
uguuuucucugcuagaagg

SEQ ID NO: 791276 - RNA, 19 nt, Artificial Sequence
  Description of Artificial Sequence: Synthetic oligonucleotide
uuucaauucagacauaaaa

SEQ ID NO: 791277 - RNA, 19 nt, Artificial Sequence
  Description of Artificial Sequence: Synthetic oligonucleotide
uucucuagaauccacacca

SEQ ID NO: 791278 - RNA, 19 nt, Artificial Sequence
  Description of Artificial Sequence: Synthetic oligonucleotide
acacgaaagggcuucaucc

SEQ ID NO: 791279 - RNA, 19 nt, Artificial Sequence
  Description of Artificial Sequence: Synthetic oligonucleotide
uucaauucagacauaaaac

SEQ ID NO: 791280 - RNA, 19 nt, Artificial Sequence
  Description of Artificial Sequence: Synthetic oligonucleotide
agaguguaaauauuguccg

SEQ ID NO: 791281 - RNA, 19 nt, Artificial Sequence
  Description of Artificial Sequence: Synthetic oligonucleotide
ugguagacagacaaggagg

SEQ ID NO: 791282 - RNA, 19 nt, Artificial Sequence
  Description of Artificial Sequence: Synthetic oligonucleotide
uccauuaacauuucaagac

SEQ ID NO: 791283 - RNA, 19 nt, Artificial Sequence
  Description of Artificial Sequence: Synthetic oligonucleotide
augucaauccgguuaaagc

SEQ ID NO: 791284 - RNA, 19 nt, Artificial Sequence
  Description of Artificial Sequence: Synthetic oligonucleotide
ucauaggacucauagggcg

SEQ ID NO: 791285 - RNA, 19 nt, Artificial Sequence
  Description of Artificial Sequence: Synthetic oligonucleotide
ugucacaaguaaaugggcg

SEQ ID NO: 791286 - RNA, 19 nt, Artificial Sequence
  Description of Artificial Sequence: Synthetic oligonucleotide
cagaguguaaauauugucc

SEQ ID NO: 791287 - RNA, 19 nt, Artificial Sequence
  Description of Artificial Sequence: Synthetic oligonucleotide
ugucaauccgguuaaagca

SEQ ID NO: 791288 - RNA, 19 nt, Artificial Sequence
  Description of Artificial Sequence: Synthetic oligonucleotide
guuaguuuagcucuuagca

SEQ ID NO: 791289 - RNA, 19 nt, Artificial Sequence
  Description of Artificial Sequence: Synthetic oligonucleotide
agaucuuacacgaaagggc

SEQ ID NO: 791290 - RNA, 19 nt, Artificial Sequence
  Description of Artificial Sequence: Synthetic oligonucleotide
  modified_base (4)..(4): a, c, u, g, unknown or other
caunuaaaaguccauuaac

SEQ ID NO: 791291 - RNA, 19 nt, Artificial Sequence
  Description of Artificial Sequence: Synthetic oligonucleotide
aguccauuaacauuucaag

SEQ ID NO: 791292 - RNA, 19 nt, Artificial Sequence
  Description of Artificial Sequence: Synthetic oligonucleotide
uugauuagcuccaugacau

SEQ ID NO: 791293 - RNA, 19 nt, Artificial Sequence
  Description of Artificial Sequence: Synthetic oligonucleotide
agauccgacagcuggaugg

SEQ ID NO: 791294 - RNA, 19 nt, Artificial Sequence
  Description of Artificial Sequence: Synthetic oligonucleotide
ucuagaauccacaccaaac

SEQ ID NO: 791295 - RNA, 19 nt, Artificial Sequence
  Description of Artificial Sequence: Synthetic oligonucleotide
aaugggacugugaagcccc

SEQ ID NO: 791296 - RNA, 19 nt, Artificial Sequence
  Description of Artificial Sequence: Synthetic oligonucleotide
uuucagaagggccuaacca

SEQ ID NO: 791297 - RNA, 19 nt, Artificial Sequence
  Description of Artificial Sequence: Synthetic oligonucleotide
  modified_base (10)..(10): a, c, u, g, unknown or other
aauccccaunuaaaagucc

SEQ ID NO: 791298 - RNA, 19 nt, Artificial Sequence
  Description of Artificial Sequence: Synthetic oligonucleotide
uuagcucuuagcaaucccc

SEQ ID NO: 791299 - RNA, 19 nt, Artificial Sequence
  Description of Artificial Sequence: Synthetic oligonucleotide
aaaugaaccugaccucccg

SEQ ID NO: 791300 - RNA, 19 nt, Artificial Sequence
  Description of Artificial Sequence: Synthetic oligonucleotide
gcaucuaucagguggaugg

SEQ ID NO: 791301 - RNA, 19 nt, Artificial Sequence
  Description of Artificial Sequence: Synthetic oligonucleotide
aaccaccucacaauguugc

SEQ ID NO: 791302 - RNA, 19 nt, Artificial Sequence
  Description of Artificial Sequence: Synthetic oligonucleotide
cauuauaacacauuugaaa

SEQ ID NO: 791303 - RNA, 19 nt, Artificial Sequence
  Description of Artificial Sequence: Synthetic oligonucleotide
uguucuguuaguuuagcuc

SEQ ID NO: 791304 - RNA, 19 nt, Artificial Sequence
  Description of Artificial Sequence: Synthetic oligonucleotide
gauggugaagagucgaggc

SEQ ID NO: 791305 - RNA, 19 nt, Artificial Sequence
  Description of Artificial Sequence: Synthetic oligonucleotide
  modified_base (3)..(3): a, c, u, g, unknown or other
aunuaaaaguccauuaaca

SEQ ID NO: 791306 - RNA, 19 nt, Artificial Sequence
  Description of Artificial Sequence: Synthetic oligonucleotide
gaugcgacccacaaagugg

SEQ ID NO: 791307 - RNA, 19 nt, Artificial Sequence
  Description of Artificial Sequence: Synthetic oligonucleotide
aaugaaccugaccucccgg

SEQ ID NO: 791308 - RNA, 19 nt, Artificial Sequence
  Description of Artificial Sequence: Synthetic oligonucleotide
aaccugaccucccgggucc

SEQ ID NO: 791309 - RNA, 19 nt, Artificial Sequence
  Description of Artificial Sequence: Synthetic oligonucleotide
uuauguagugcccauggaa

SEQ ID NO: 791310 - RNA, 19 nt, Artificial Sequence
  Description of Artificial Sequence: Synthetic oligonucleotide
aaguugugaguuuauugca

SEQ ID NO: 791311 - RNA, 19 nt, Artificial Sequence
  Description of Artificial Sequence: Synthetic oligonucleotide
uagagcuucucauaggacu

SEQ ID NO: 791312 - RNA, 19 nt, Artificial Sequence
  Description of Artificial Sequence: Synthetic oligonucleotide
gaguccauaauacggauuc

SEQ ID NO: 791313 - RNA, 19 nt, Artificial Sequence
  Description of Artificial Sequence: Synthetic oligonucleotide
acaaaguggaaguaagaca

SEQ ID NO: 791314 - RNA, 19 nt, Artificial Sequence
  Description of Artificial Sequence: Synthetic oligonucleotide
uguuaguuuagcucuuagc

SEQ ID NO: 791315 - RNA, 19 nt, Artificial Sequence
  Description of Artificial Sequence: Synthetic oligonucleotide
uugugcauagcaccaaccc

SEQ ID NO: 791316 - RNA, 19 nt, Artificial Sequence
  Description of Artificial Sequence: Synthetic oligonucleotide
agaacuagcauuucuuuaa

SEQ ID NO: 791317 - RNA, 19 nt, Artificial Sequence
  Description of Artificial Sequence: Synthetic oligonucleotide
  modified_base (8)..(8): a, c, u, g, unknown or other
aaaacccncacuguuugag

SEQ ID NO: 791318 - RNA, 19 nt, Artificial Sequence
  Description of Artificial Sequence: Synthetic oligonucleotide
agcgcugcgaagcagagug

SEQ ID NO: 791319 - RNA, 19 nt, Artificial Sequence
  Description of Artificial Sequence: Synthetic oligonucleotide
uguaaauauuguccgugga

SEQ ID NO: 791320 - RNA, 19 nt, Artificial Sequence
  Description of Artificial Sequence: Synthetic oligonucleotide
acggauucaacauuucaug

SEQ ID NO: 791321 - RNA, 19 nt, Artificial Sequence
  Description of Artificial Sequence: Synthetic oligonucleotide
ucgagaucuuacacgaaag

SEQ ID NO: 791322 - RNA, 19 nt, Artificial Sequence
  Description of Artificial Sequence: Synthetic oligonucleotide
ugaugcgacccacaaagug

SEQ ID NO: 791323 - RNA, 19 nt, Artificial Sequence
  Description of Artificial Sequence: Synthetic oligonucleotide
ucaauccgguuaaagcagg

SEQ ID NO: 791324 - RNA, 19 nt, Artificial Sequence
  Description of Artificial Sequence: Synthetic oligonucleotide
uuaguuuagcucuuagcaa

SEQ ID NO: 791325 - RNA, 19 nt, Artificial Sequence
  Description of Artificial Sequence: Synthetic oligonucleotide
uaguuuagcucuuagcaau

SEQ ID NO: 791326 - RNA, 19 nt, Artificial Sequence
  Description of Artificial Sequence: Synthetic oligonucleotide
augugagaauuucaaacug

SEQ ID NO: 791327 - RNA, 19 nt, Artificial Sequence
  Description of Artificial Sequence: Synthetic oligonucleotide
aagacagauggucaggguu

SEQ ID NO: 791328 - RNA, 19 nt, Artificial Sequence
  Description of Artificial Sequence: Synthetic oligonucleotide
gagaacauagcaaauggga

SEQ ID NO: 791329 - RNA, 19 nt, Artificial Sequence
  Description of Artificial Sequence: Synthetic oligonucleotide
aggagcuuagccgugggcc

SEQ ID NO: 791330 - RNA, 19 nt, Artificial Sequence
  Description of Artificial Sequence: Synthetic oligonucleotide
uaauacggauucaacauuu

SEQ ID NO: 791331 - RNA, 19 nt, Artificial Sequence
  Description of Artificial Sequence: Synthetic oligonucleotide
uuuagcucuuagcaauccc

SEQ ID NO: 791332 - RNA, 19 nt, Artificial Sequence
  Description of Artificial Sequence: Synthetic oligonucleotide
uacggauucaacauuucau

SEQ ID NO: 791333 - RNA, 19 nt, Artificial Sequence
  Description of Artificial Sequence: Synthetic oligonucleotide
uucauccagacccaaagua

SEQ ID NO: 791334 - RNA, 19 nt, Artificial Sequence
  Description of Artificial Sequence: Synthetic oligonucleotide
agaaugggacugugaagcc

SEQ ID NO: 791335 - RNA, 19 nt, Artificial Sequence
  Description of Artificial Sequence: Synthetic oligonucleotide
aauagaacuagcauuucuu

SEQ ID NO: 791336 - RNA, 19 nt, Artificial Sequence
  Description of Artificial Sequence: Synthetic oligonucleotide
ugaagcaucugggugaugu

SEQ ID NO: 791337 - RNA, 19 nt, Artificial Sequence
  Description of Artificial Sequence: Synthetic oligonucleotide
aacucuugugcaguucugg

SEQ ID NO: 791338 - RNA, 19 nt, Artificial Sequence
  Description of Artificial Sequence: Synthetic oligonucleotide
gacggugcugcgcagacag

SEQ ID NO: 791339 - RNA, 19 nt, Artificial Sequence
  Description of Artificial Sequence: Synthetic oligonucleotide
aacagaacauuaguguaca

SEQ ID NO: 791340 - RNA, 19 nt, Artificial Sequence
  Description of Artificial Sequence: Synthetic oligonucleotide
gacaaucgagaucuuacac

SEQ ID NO: 791341 - RNA, 19 nt, Artificial Sequence
  Description of Artificial Sequence: Synthetic oligonucleotide
ugggagagcaacuagggua

SEQ ID NO: 791342 - RNA, 19 nt, Artificial Sequence
  Description of Artificial Sequence: Synthetic oligonucleotide
aguguaaauauuguccgug

SEQ ID NO: 791343 - RNA, 19 nt, Artificial Sequence
  Description of Artificial Sequence: Synthetic oligonucleotide
cuuuucaaccaggauaccc

SEQ ID NO: 791344 - RNA, 19 nt, Artificial Sequence
  Description of Artificial Sequence: Synthetic oligonucleotide
acagacaaggaggugcagc

SEQ ID NO: 791345 - RNA, 19 nt, Artificial Sequence
  Description of Artificial Sequence: Synthetic oligonucleotide
aauuucaaacuggguagag

SEQ ID NO: 791346 - RNA, 19 nt, Artificial Sequence
  Description of Artificial Sequence: Synthetic oligonucleotide
acuggaagaguccauaaua

SEQ ID NO: 791347 - RNA, 19 nt, Artificial Sequence
  Description of Artificial Sequence: Synthetic oligonucleotide
ucagaagggccuaaccaug

SEQ ID NO: 791348 - RNA, 19 nt, Artificial Sequence
  Description of Artificial Sequence: Synthetic oligonucleotide
ugugcauagcaccaacccu

SEQ ID NO: 791349 - RNA, 19 nt, Artificial Sequence
  Description of Artificial Sequence: Synthetic oligonucleotide
uccauaauacggauucaac

SEQ ID NO: 791350 - RNA, 19 nt, Artificial Sequence
  Description of Artificial Sequence: Synthetic oligonucleotide
  modified_base (7)..(7): a, c, u, g, unknown or other
aaacccncacuguuugaga

SEQ ID NO: 791351 - RNA, 19 nt, Artificial Sequence
  Description of Artificial Sequence: Synthetic oligonucleotide
uuagcuccaugacauguga

SEQ ID NO: 791352 - RNA, 19 nt, Artificial Sequence
  Description of Artificial Sequence: Synthetic oligonucleotide
ugaguguggcugcuggccg

SEQ ID NO: 791353 - RNA, 19 nt, Artificial Sequence
  Description of Artificial Sequence: Synthetic oligonucleotide
uagaaggucaguccagggu

SEQ ID NO: 791354 - RNA, 19 nt, Artificial Sequence
  Description of Artificial Sequence: Synthetic oligonucleotide
uucagaagggccuaaccau

SEQ ID NO: 791355 - RNA, 19 nt, Artificial Sequence
  Description of Artificial Sequence: Synthetic oligonucleotide
aauguaaaguugugaguuu

SEQ ID NO: 791356 - RNA, 19 nt, Artificial Sequence
  Description of Artificial Sequence: Synthetic oligonucleotide
gaugucaauccgguuaaag

SEQ ID NO: 791357 - RNA, 19 nt, Artificial Sequence
  Description of Artificial Sequence: Synthetic oligonucleotide
cauaggacucauagggcgg

SEQ ID NO: 791358 - RNA, 19 nt, Artificial Sequence
  Description of Artificial Sequence: Synthetic oligonucleotide
uccgguuaaagcagguaug

SEQ ID NO: 791359 - RNA, 19 nt, Artificial Sequence
  Description of Artificial Sequence: Synthetic oligonucleotide
caaucgagaucuuacacga

SEQ ID NO: 791360 - RNA, 19 nt, Artificial Sequence
  Description of Artificial Sequence: Synthetic oligonucleotide
guaagacagauggucaggg

SEQ ID NO: 791361 - RNA, 19 nt, Artificial Sequence
  Description of Artificial Sequence: Synthetic oligonucleotide
cacgcaguguccuuugagg

SEQ ID NO: 791362 - RNA, 19 nt, Artificial Sequence
  Description of Artificial Sequence: Synthetic oligonucleotide
aacauagcaaaugggacuu

SEQ ID NO: 791363 - RNA, 19 nt, Artificial Sequence
  Description of Artificial Sequence: Synthetic oligonucleotide
  modified_base (16)..(16): a, c, u, g, unknown or other
cuuagcaauccccaunuaa

SEQ ID NO: 791364 - RNA, 19 nt, Artificial Sequence
  Description of Artificial Sequence: Synthetic oligonucleotide
ugacaaucgagaucuuaca

SEQ ID NO: 791365 - RNA, 19 nt, Artificial Sequence
  Description of Artificial Sequence: Synthetic oligonucleotide
aauacggauucaacauuuc

SEQ ID NO: 791366 - RNA, 19 nt, Artificial Sequence
  Description of Artificial Sequence: Synthetic oligonucleotide
augaaccugaccucccggg

SEQ ID NO: 791367 - RNA, 19 nt, Artificial Sequence
  Description of Artificial Sequence: Synthetic oligonucleotide
augcaagcaccacaggcuc

SEQ ID NO: 791368 - RNA, 19 nt, Artificial Sequence
  Description of Artificial Sequence: Synthetic oligonucleotide
uuguccguggaauacugga

SEQ ID NO: 791369 - RNA, 19 nt, Artificial Sequence
  Description of Artificial Sequence: Synthetic oligonucleotide
acauuaguguacaacuguc

SEQ ID NO: 791370 - RNA, 19 nt, Artificial Sequence
  Description of Artificial Sequence: Synthetic oligonucleotide
guagaaccuuugcagagcc

SEQ ID NO: 791371 - RNA, 19 nt, Artificial Sequence
  Description of Artificial Sequence: Synthetic oligonucleotide
uacaacugucacaaguaaa

SEQ ID NO: 791372 - RNA, 19 nt, Artificial Sequence
  Description of Artificial Sequence: Synthetic oligonucleotide
agagaacauagcaaauggg

SEQ ID NO: 791373 - RNA, 19 nt, Artificial Sequence
  Description of Artificial Sequence: Synthetic oligonucleotide
cuuugauuagcuccaugac

SEQ ID NO: 791374 - RNA, 19 nt, Artificial Sequence
  Description of Artificial Sequence: Synthetic oligonucleotide
  modified_base (6)..(6): a, c, u, g, unknown or other
aacccncacuguuugagaa

SEQ ID NO: 791375 - RNA, 19 nt, Artificial Sequence
  Description of Artificial Sequence: Synthetic oligonucleotide
ucuaucuuauccagcccac

SEQ ID NO: 791376 - RNA, 19 nt, Artificial Sequence
  Description of Artificial Sequence: Synthetic oligonucleotide
guagaaugggacugugaag

SEQ ID NO: 791377 - RNA, 19 nt, Artificial Sequence
  Description of Artificial Sequence: Synthetic oligonucleotide
auacggauucaacauuuca

SEQ ID NO: 791378 - RNA, 19 nt, Artificial Sequence
  Description of Artificial Sequence: Synthetic oligonucleotide
aucgagaucuuacacgaaa

SEQ ID NO: 791379 - RNA, 19 nt, Artificial Sequence
  Description of Artificial Sequence: Synthetic oligonucleotide
uaucuuauccagcccacua

SEQ ID NO: 791380 - RNA, 19 nt, Artificial Sequence
  Description of Artificial Sequence: Synthetic oligonucleotide
guaaauauuguccguggaa

SEQ ID NO: 791381 - RNA, 19 nt, Artificial Sequence
  Description of Artificial Sequence: Synthetic oligonucleotide
acaacugucacaaguaaau

SEQ ID NO: 791382 - RNA, 19 nt, Artificial Sequence
  Description of Artificial Sequence: Synthetic oligonucleotide
auaauacggauucaacauu

SEQ ID NO: 791383 - RNA, 19 nt, Artificial Sequence
  Description of Artificial Sequence: Synthetic oligonucleotide
guucuguuaguuuagcucu

SEQ ID NO: 791384 - RNA, 19 nt, Artificial Sequence
  Description of Artificial Sequence: Synthetic oligonucleotide
cugucacaaguaaaugggc

SEQ ID NO: 791385 - RNA, 19 nt, Artificial Sequence
  Description of Artificial Sequence: Synthetic oligonucleotide
gaggaacucguguggaccc

SEQ ID NO: 791386 - RNA, 19 nt, Artificial Sequence
  Description of Artificial Sequence: Synthetic oligonucleotide
gaggguagccuggagagcc

SEQ ID NO: 791387 - RNA, 19 nt, Artificial Sequence
  Description of Artificial Sequence: Synthetic oligonucleotide
cuggguagagaacauagca

SEQ ID NO: 791388 - RNA, 19 nt, Artificial Sequence
  Description of Artificial Sequence: Synthetic oligonucleotide
auccgguuaaagcagguau

SEQ ID NO: 791389 - RNA, 19 nt, Artificial Sequence
  Description of Artificial Sequence: Synthetic oligonucleotide
  modified_base (11)..(11): a, c, u, g, unknown or other
caauccccaunuaaaaguc

SEQ ID NO: 791390 - RNA, 19 nt, Artificial Sequence
  Description of Artificial Sequence: Synthetic oligonucleotide
guccguggaauacuggaag

SEQ ID NO: 791391 - RNA, 19 nt, Artificial Sequence
  Description of Artificial Sequence: Synthetic oligonucleotide
cuagaaggucaguccaggg

SEQ ID NO: 791392 - RNA, 19 nt, Artificial Sequence
  Description of Artificial Sequence: Synthetic oligonucleotide
aucuggguugauuugcaga

SEQ ID NO: 791393 - RNA, 19 nt, Artificial Sequence
  Description of Artificial Sequence: Synthetic oligonucleotide
cauaauacggauucaacau

SEQ ID NO: 791394 - RNA, 19 nt, Artificial Sequence
  Description of Artificial Sequence: Synthetic oligonucleotide
acgaaagggcuucauccag

SEQ ID NO: 791395 - RNA, 19 nt, Artificial Sequence
  Description of Artificial Sequence: Synthetic oligonucleotide
gaagaaucuggguugauuu

SEQ ID NO: 791396 - RNA, 19 nt, Artificial Sequence
  Description of Artificial Sequence: Synthetic oligonucleotide
agagcaacuaggguagcag

SEQ ID NO: 791397 - RNA, 19 nt, Artificial Sequence
  Description of Artificial Sequence: Synthetic oligonucleotide
gucaauccgguuaaagcag

SEQ ID NO: 791398 - RNA, 19 nt, Artificial Sequence
  Description of Artificial Sequence: Synthetic oligonucleotide
cagaagggccuaaccaugg

SEQ ID NO: 791399 - RNA, 19 nt, Artificial Sequence
  Description of Artificial Sequence: Synthetic oligonucleotide
accugcuuugugcauagca

SEQ ID NO: 791400 - RNA, 19 nt, Artificial Sequence
  Description of Artificial Sequence: Synthetic oligonucleotide
gugacaaucgagaucuuac

SEQ ID NO: 791401 - RNA, 19 nt, Artificial Sequence
  Description of Artificial Sequence: Synthetic oligonucleotide
gugauguggggccaccagg

SEQ ID NO: 791402 - RNA, 19 nt, Artificial Sequence
  Description of Artificial Sequence: Synthetic oligonucleotide
auguggggccaccaggagg

SEQ ID NO: 791403 - RNA, 19 nt, Artificial Sequence
  Description of Artificial Sequence: Synthetic oligonucleotide
gccuguagaaccuuugcag

SEQ ID NO: 791404 - RNA, 19 nt, Artificial Sequence
  Description of Artificial Sequence: Synthetic oligonucleotide
gucacaaguaaaugggcga

SEQ ID NO: 791405 - RNA, 19 nt, Artificial Sequence
  Description of Artificial Sequence: Synthetic oligonucleotide
ucuuacacgaaagggcuuc

SEQ ID NO: 791406 - RNA, 19 nt, Artificial Sequence
  Description of Artificial Sequence: Synthetic oligonucleotide
caacaaauacagccacucc

SEQ ID NO: 791407 - RNA, 19 nt, Artificial Sequence
  Description of Artificial Sequence: Synthetic oligonucleotide
aggcguguguuugacuucc

SEQ ID NO: 791408 - RNA, 19 nt, Artificial Sequence
  Description of Artificial Sequence: Synthetic oligonucleotide
agcgguaccaacagaggac

SEQ ID NO: 791409 - RNA, 19 nt, Artificial Sequence
  Description of Artificial Sequence: Synthetic oligonucleotide
gagcaacuaggguagcagc

SEQ ID NO: 791410 - RNA, 19 nt, Artificial Sequence
  Description of Artificial Sequence: Synthetic oligonucleotide
uacacgaaagggcuucauc

SEQ ID NO: 791411 - RNA, 19 nt, Artificial Sequence
  Description of Artificial Sequence: Synthetic oligonucleotide
uagggcgggaugucaaucc

SEQ ID NO: 791412 - RNA, 19 nt, Artificial Sequence
  Description of Artificial Sequence: Synthetic oligonucleotide
uguggacccggucacgaac

SEQ ID NO: 791413 - RNA, 19 nt, Artificial Sequence
  Description of Artificial Sequence: Synthetic oligonucleotide
acucguguggacccgguca

SEQ ID NO: 791414 - RNA, 19 nt, Artificial Sequence
  Description of Artificial Sequence: Synthetic oligonucleotide
aacucguguggacccgguc

SEQ ID NO: 791415 - RNA, 19 nt, Artificial Sequence
  Description of Artificial Sequence: Synthetic oligonucleotide
auguagugcccauggaaca

SEQ ID NO: 791416 - RNA, 19 nt, Artificial Sequence
  Description of Artificial Sequence: Synthetic oligonucleotide
caugugagaauuucaaacu

SEQ ID NO: 791417 - RNA, 19 nt, Artificial Sequence
  Description of Artificial Sequence: Synthetic oligonucleotide
uccguggaauacuggaaga

SEQ ID NO: 791418 - RNA, 19 nt, Artificial Sequence
  Description of Artificial Sequence: Synthetic oligonucleotide
auguaacaaaaugaaccug

SEQ ID NO: 791419 - RNA, 19 nt, Artificial Sequence
  Description of Artificial Sequence: Synthetic oligonucleotide
uaccaacagaggacggugc

SEQ ID NO: 791420 - RNA, 19 nt, Artificial Sequence
  Description of Artificial Sequence: Synthetic oligonucleotide
ugcugucggccacacaaug

SEQ ID NO: 791421 - RNA, 19 nt, Artificial Sequence
  Description of Artificial Sequence: Synthetic oligonucleotide
acuaggguagcagcagcac

SEQ ID NO: 791422 - RNA, 19 nt, Artificial Sequence
  Description of Artificial Sequence: Synthetic oligonucleotide
gaucuuacacgaaagggcu

SEQ ID NO: 791423 - RNA, 19 nt, Artificial Sequence
  Description of Artificial Sequence: Synthetic oligonucleotide
gaaugggacugugaagccc

SEQ ID NO: 791424 - RNA, 19 nt, Artificial Sequence
  Description of Artificial Sequence: Synthetic oligonucleotide
auaggacucauagggcggg

SEQ ID NO: 791425 - RNA, 19 nt, Artificial Sequence
  Description of Artificial Sequence: Synthetic oligonucleotide
guggaauacuggaagaguc

SEQ ID NO: 791426 - RNA, 19 nt, Artificial Sequence
  Description of Artificial Sequence: Synthetic oligonucleotide
uguccguggaauacuggaa

SEQ ID NO: 791427 - RNA, 19 nt, Artificial Sequence
  Description of Artificial Sequence: Synthetic oligonucleotide
acaaguaaaugggcgauaa

SEQ ID NO: 791428 - RNA, 19 nt, Artificial Sequence
  Description of Artificial Sequence: Synthetic oligonucleotide
cagguaugagccuugggca

SEQ ID NO: 791429 - RNA, 19 nt, Artificial Sequence
  Description of Artificial Sequence: Synthetic oligonucleotide
aaaugggacuuuaaagauu

SEQ ID NO: 791430 - RNA, 19 nt, Artificial Sequence
  Description of Artificial Sequence: Synthetic oligonucleotide
cuugugcaguucugggucc

SEQ ID NO: 791431 - RNA, 19 nt, Artificial Sequence
  Description of Artificial Sequence: Synthetic oligonucleotide
ccaugguagacagacaagg

SEQ ID NO: 791432 - RNA, 19 nt, Artificial Sequence
  Description of Artificial Sequence: Synthetic oligonucleotide
ugaaccugaccucccgggu

SEQ ID NO: 791433 - RNA, 19 nt, Artificial Sequence
  Description of Artificial Sequence: Synthetic oligonucleotide
uguagugcccauggaacac

SEQ ID NO: 791434 - RNA, 19 nt, Artificial Sequence
  Description of Artificial Sequence: Synthetic oligonucleotide
  modified_base (9)..(9): a, c, u, g, unknown or other
auccccaunuaaaagucca

SEQ ID NO: 791435 - RNA, 19 nt, Artificial Sequence
  Description of Artificial Sequence: Synthetic oligonucleotide
gauccgacagcuggauggg

SEQ ID NO: 791436 - RNA, 19 nt, Artificial Sequence
  Description of Artificial Sequence: Synthetic oligonucleotide
acgcaguguccuuugaggu

SEQ ID NO: 791437 - RNA, 19 nt, Artificial Sequence
  Description of Artificial Sequence: Synthetic oligonucleotide
ucauguggccccaccuggc

SEQ ID NO: 791438 - RNA, 19 nt, Artificial Sequence
  Description of Artificial Sequence: Synthetic oligonucleotide
gaauuucaaacuggguaga

SEQ ID NO: 791439 - RNA, 19 nt, Artificial Sequence
  Description of Artificial Sequence: Synthetic oligonucleotide
ucacaaguaaaugggcgau

SEQ ID NO: 791440 - RNA, 19 nt, Artificial Sequence
  Description of Artificial Sequence: Synthetic oligonucleotide
aggguugacagaagaaucu

SEQ ID NO: 791441 - RNA, 19 nt, Artificial Sequence
  Description of Artificial Sequence: Synthetic oligonucleotide
aacuaggguagcagcagca

SEQ ID NO: 791442 - RNA, 19 nt, Artificial Sequence
  Description of Artificial Sequence: Synthetic oligonucleotide
ugaagagucgaggcccugc

SEQ ID NO: 791443 - RNA, 19 nt, Artificial Sequence
  Description of Artificial Sequence: Synthetic oligonucleotide
ccauaauacggauucaaca

SEQ ID NO: 791444 - RNA, 19 nt, Artificial Sequence
  Description of Artificial Sequence: Synthetic oligonucleotide
aaagcagguaugagccuug

SEQ ID NO: 791445 - RNA, 19 nt, Artificial Sequence
  Description of Artificial Sequence: Synthetic oligonucleotide
  modified_base (5)..(5): a, c, u, g, unknown or other
acccncacuguuugagaag

SEQ ID NO: 791446 - RNA, 19 nt, Artificial Sequence
  Description of Artificial Sequence: Synthetic oligonucleotide
agggcgggaugucaauccg

SEQ ID NO: 791447 - RNA, 19 nt, Artificial Sequence
  Description of Artificial Sequence: Synthetic oligonucleotide
cacacaaugcuucaggcgu

SEQ ID NO: 791448 - RNA, 19 nt, Artificial Sequence
  Description of Artificial Sequence: Synthetic oligonucleotide
ggguagagaacauagcaaa

SEQ ID NO: 791449 - RNA, 19 nt, Artificial Sequence
  Description of Artificial Sequence: Synthetic oligonucleotide
guuuagcucuuagcaaucc

SEQ ID NO: 791450 - RNA, 19 nt, Artificial Sequence
  Description of Artificial Sequence: Synthetic oligonucleotide
auauuguccguggaauacu

SEQ ID NO: 791451 - RNA, 19 nt, Artificial Sequence
  Description of Artificial Sequence: Synthetic oligonucleotide
ucgugaugucauucucuag

SEQ ID NO: 791452 - RNA, 19 nt, Artificial Sequence
  Description of Artificial Sequence: Synthetic oligonucleotide
ugcgccuguagaaccuuug

SEQ ID NO: 791453 - RNA, 19 nt, Artificial Sequence
  Description of Artificial Sequence: Synthetic oligonucleotide
agacccaaaguagggcaac

SEQ ID NO: 791454 - RNA, 19 nt, Artificial Sequence
  Description of Artificial Sequence: Synthetic oligonucleotide
gcauauguaacaaaaugaa

SEQ ID NO: 791455 - RNA, 19 nt, Artificial Sequence
  Description of Artificial Sequence: Synthetic oligonucleotide
caucgaaggucuccacugc

SEQ ID NO: 791456 - RNA, 19 nt, Artificial Sequence
  Description of Artificial Sequence: Synthetic oligonucleotide
gaaggucaguccagggucc

SEQ ID NO: 791457 - RNA, 19 nt, Artificial Sequence
  Description of Artificial Sequence: Synthetic oligonucleotide
aaggucaguccaggguccg

SEQ ID NO: 791458 - RNA, 19 nt, Artificial Sequence
  Description of Artificial Sequence: Synthetic oligonucleotide
ggugcagcgguaccaacag

SEQ ID NO: 791459 - RNA, 19 nt, Artificial Sequence
  Description of Artificial Sequence: Synthetic oligonucleotide
ugcugcgucccugagugug

SEQ ID NO: 791460 - RNA, 19 nt, Artificial Sequence
  Description of Artificial Sequence: Synthetic oligonucleotide
ugggacuuuaaagauuguu

SEQ ID NO: 791461 - RNA, 19 nt, Artificial Sequence
  Description of Artificial Sequence: Synthetic oligonucleotide
ggagcuuagccgugggccg

SEQ ID NO: 791462 - RNA, 19 nt, Artificial Sequence
  Description of Artificial Sequence: Synthetic oligonucleotide
uccugaacuugaccaugug

SEQ ID NO: 791463 - RNA, 19 nt, Artificial Sequence
  Description of Artificial Sequence: Synthetic oligonucleotide
aagcagguaugagccuugg

SEQ ID NO: 791464 - RNA, 19 nt, Artificial Sequence
  Description of Artificial Sequence: Synthetic oligonucleotide
acuguuugagaaggcuguc

SEQ ID NO: 791465 - RNA, 19 nt, Artificial Sequence
  Description of Artificial Sequence: Synthetic oligonucleotide
aagcugcgacacucagaac

SEQ ID NO: 791466 - RNA, 19 nt, Artificial Sequence
  Description of Artificial Sequence: Synthetic oligonucleotide
ucuggucgugaugucauuc

SEQ ID NO: 791467 - RNA, 19 nt, Artificial Sequence
  Description of Artificial Sequence: Synthetic oligonucleotide
agacccaugaugcgaccca

SEQ ID NO: 791468 - RNA, 19 nt, Artificial Sequence
  Description of Artificial Sequence: Synthetic oligonucleotide
gggagagcaacuaggguag

SEQ ID NO: 791469 - RNA, 19 nt, Artificial Sequence
  Description of Artificial Sequence: Synthetic oligonucleotide
guugugaguuuauugcaua

SEQ ID NO: 791470 - RNA, 19 nt, Artificial Sequence
  Description of Artificial Sequence: Synthetic oligonucleotide
gaaccugaccucccggguc

SEQ ID NO: 791471 - RNA, 19 nt, Artificial Sequence
  Description of Artificial Sequence: Synthetic oligonucleotide
ugguuccacaacugcauua

SEQ ID NO: 791472 - RNA, 19 nt, Artificial Sequence
  Description of Artificial Sequence: Synthetic oligonucleotide
caaaugggacuuuaaagau

SEQ ID NO: 791473 - RNA, 19 nt, Artificial Sequence
  Description of Artificial Sequence: Synthetic oligonucleotide
auguaaaguugugaguuua

SEQ ID NO: 791474 - RNA, 19 nt, Artificial Sequence
  Description of Artificial Sequence: Synthetic oligonucleotide
agcaacuaggguagcagca

SEQ ID NO: 791475 - RNA, 19 nt, Artificial Sequence
  Description of Artificial Sequence: Synthetic oligonucleotide
agguaugagccuugggcaa

SEQ ID NO: 791476 - RNA, 19 nt, Artificial Sequence
  Description of Artificial Sequence: Synthetic oligonucleotide
acauuucaagacagucagg

SEQ ID NO: 791477 - RNA, 19 nt, Artificial Sequence
  Description of Artificial Sequence: Synthetic oligonucleotide
  modified_base (4)..(4): a, c, u, g, unknown or other
cccncacuguuugagaagg

SEQ ID NO: 791478 - RNA, 19 nt, Artificial Sequence
  Description of Artificial Sequence: Synthetic oligonucleotide
aguugugaguuuauugcau

SEQ ID NO: 791479 - RNA, 19 nt, Artificial Sequence
  Description of Artificial Sequence: Synthetic oligonucleotide
auuguccguggaauacugg

SEQ ID NO: 791480 - RNA, 19 nt, Artificial Sequence
  Description of Artificial Sequence: Synthetic oligonucleotide
ggcuguggugacaaaauug

SEQ ID NO: 791481 - RNA, 19 nt, Artificial Sequence
  Description of Artificial Sequence: Synthetic oligonucleotide
uccgccuauccugaacuug

SEQ ID NO: 791482 - RNA, 19 nt, Artificial Sequence
  Description of Artificial Sequence: Synthetic oligonucleotide
uguuugacuuccagucauu

SEQ ID NO: 791483 - RNA, 19 nt, Artificial Sequence
  Description of Artificial Sequence: Synthetic oligonucleotide
cugcugcgccuguagaacc

SEQ ID NO: 791484 - RNA, 19 nt, Artificial Sequence
  Description of Artificial Sequence: Synthetic oligonucleotide
gacaaggaggugcagcggu

SEQ ID NO: 791485 - RNA, 19 nt, Artificial Sequence
  Description of Artificial Sequence: Synthetic oligonucleotide
ucggccacacaaugcuuca

SEQ ID NO: 791486 - RNA, 19 nt, Artificial Sequence
  Description of Artificial Sequence: Synthetic oligonucleotide
caauguugcugucggccac

SEQ ID NO: 791487 - RNA, 19 nt, Artificial Sequence
  Description of Artificial Sequence: Synthetic oligonucleotide
aauccgguuaaagcaggua

SEQ ID NO: 791488 - RNA, 19 nt, Artificial Sequence
  Description of Artificial Sequence: Synthetic oligonucleotide
aucuaucagguggauggug

SEQ ID NO: 791489 - RNA, 19 nt, Artificial Sequence
  Description of Artificial Sequence: Synthetic oligonucleotide
gcuagaaggucaguccagg

SEQ ID NO: 791490 - RNA, 19 nt, Artificial Sequence
  Description of Artificial Sequence: Synthetic oligonucleotide
  modified_base (8)..(8): a, c, u, g, unknown or other
uccccaunuaaaaguccau

SEQ ID NO: 791491 - RNA, 19 nt, Artificial Sequence
  Description of Artificial Sequence: Synthetic oligonucleotide
  modified_base (12)..(12): a, c, u, g, unknown or other
gcaauccccaunuaaaagu

SEQ ID NO: 791492 - RNA, 19 nt, Artificial Sequence
  Description of Artificial Sequence: Synthetic oligonucleotide
ugucccacccaguggcugu

SEQ ID NO: 791493 - RNA, 19 nt, Artificial Sequence
  Description of Artificial Sequence: Synthetic oligonucleotide
gaagggccuaaccauggua

SEQ ID NO: 791494 - RNA, 19 nt, Artificial Sequence
  Description of Artificial Sequence: Synthetic oligonucleotide
ucccgugccacuccgccau

SEQ ID NO: 791495 - RNA, 19 nt, Artificial Sequence
  Description of Artificial Sequence: Synthetic oligonucleotide
cucguguggacccggucac

SEQ ID NO: 791496 - RNA, 19 nt, Artificial Sequence
  Description of Artificial Sequence: Synthetic oligonucleotide
gacccaaaguagggcaacc

SEQ ID NO: 791497 - RNA, 19 nt, Artificial Sequence
  Description of Artificial Sequence: Synthetic oligonucleotide
ucuuuucaaccaggauacc

SEQ ID NO: 791498 - RNA, 19 nt, Artificial Sequence
  Description of Artificial Sequence: Synthetic oligonucleotide
cagcgguaccaacagagga

SEQ ID NO: 791499 - RNA, 19 nt, Artificial Sequence
  Description of Artificial Sequence: Synthetic oligonucleotide
gaguguaaauauuguccgu

SEQ ID NO: 791500 - RNA, 19 nt, Artificial Sequence
  Description of Artificial Sequence: Synthetic oligonucleotide
ggugauguggggccaccag

SEQ ID NO: 791501 - RNA, 19 nt, Artificial Sequence
  Description of Artificial Sequence: Synthetic oligonucleotide
uucaggcguguguuugacu

SEQ ID NO: 791502 - RNA, 19 nt, Artificial Sequence
  Description of Artificial Sequence: Synthetic oligonucleotide
gcccacuauuaucagcucc

SEQ ID NO: 791503 - RNA, 19 nt, Artificial Sequence
  Description of Artificial Sequence: Synthetic oligonucleotide
caggaccuuacaaaauaaa

SEQ ID NO: 791504 - RNA, 19 nt, Artificial Sequence
  Description of Artificial Sequence: Synthetic oligonucleotide
  modified_base (5)..(5): a, c, u, g, unknown or other
ccaunuaaaaguccauuaa

SEQ ID NO: 791505 - RNA, 19 nt, Artificial Sequence
  Description of Artificial Sequence: Synthetic oligonucleotide
gagcuuagccgugggccgg

SEQ ID NO: 791506 - RNA, 19 nt, Artificial Sequence
  Description of Artificial Sequence: Synthetic oligonucleotide
agggccuaaccaugguaga

SEQ ID NO: 791507 - RNA, 19 nt, Artificial Sequence
  Description of Artificial Sequence: Synthetic oligonucleotide
  modified_base (17)..(17): a, c, u, g, unknown or other
ucuuagcaauccccaunua

SEQ ID NO: 791508 - RNA, 19 nt, Artificial Sequence
  Description of Artificial Sequence: Synthetic oligonucleotide
agucaauguuuuguguuuu

SEQ ID NO: 791509 - RNA, 19 nt, Artificial Sequence
  Description of Artificial Sequence: Synthetic oligonucleotide
ccaggaggggugacaaucg

SEQ ID NO: 791510 - RNA, 19 nt, Artificial Sequence
  Description of Artificial Sequence: Synthetic oligonucleotide
cagacccaugaugcgaccc

SEQ ID NO: 791511 - RNA, 19 nt, Artificial Sequence
  Description of Artificial Sequence: Synthetic oligonucleotide
augcgacccacaaagugga

SEQ ID NO: 791512 - RNA, 19 nt, Artificial Sequence
  Description of Artificial Sequence: Synthetic oligonucleotide
agcucuuagcaauccccau

SEQ ID NO: 791513 - RNA, 19 nt, Artificial Sequence
  Description of Artificial Sequence: Synthetic oligonucleotide
cccaaaguagggcaaccag

SEQ ID NO: 791514 - RNA, 19 nt, Artificial Sequence
  Description of Artificial Sequence: Synthetic oligonucleotide
ggucuaucuuauccagccc

SEQ ID NO: 791515 - RNA, 19 nt, Artificial Sequence
  Description of Artificial Sequence: Synthetic oligonucleotide
cucuagaauccacaccaaa

SEQ ID NO: 791516 - RNA, 19 nt, Artificial Sequence
  Description of Artificial Sequence: Synthetic oligonucleotide
gcaacuaggguagcagcag

SEQ ID NO: 791517 - RNA, 19 nt, Artificial Sequence
  Description of Artificial Sequence: Synthetic oligonucleotide
  modified_base (18)..(18): a, c, u, g, unknown or other
cucuuagcaauccccaunu

SEQ ID NO: 791518 - RNA, 19 nt, Artificial Sequence
  Description of Artificial Sequence: Synthetic oligonucleotide
accaaacucuugugcaguu

SEQ ID NO: 791519 - RNA, 19 nt, Artificial Sequence
  Description of Artificial Sequence: Synthetic oligonucleotide
uggacccggucacgaacug

SEQ ID NO: 791520 - RNA, 19 nt, Artificial Sequence
  Description of Artificial Sequence: Synthetic oligonucleotide
guggauggugaagagucga

SEQ ID NO: 791521 - RNA, 19 nt, Artificial Sequence
  Description of Artificial Sequence: Synthetic oligonucleotide
acaaccugcuuugugcaua

SEQ ID NO: 791522 - RNA, 19 nt, Artificial Sequence
  Description of Artificial Sequence: Synthetic oligonucleotide
guagccuggagagccgggc

SEQ ID NO: 791523 - RNA, 19 nt, Artificial Sequence
  Description of Artificial Sequence: Synthetic oligonucleotide
uaggugucaggcugccauc

SEQ ID NO: 791524 - RNA, 19 nt, Artificial Sequence
  Description of Artificial Sequence: Synthetic oligonucleotide
aggaacucguguggacccg

SEQ ID NO: 791525 - RNA, 19 nt, Artificial Sequence
  Description of Artificial Sequence: Synthetic oligonucleotide
ugcgaagcagagugguguu

SEQ ID NO: 791526 - RNA, 19 nt, Artificial Sequence
  Description of Artificial Sequence: Synthetic oligonucleotide
gaagagucgaggcccugcu

SEQ ID NO: 791527 - RNA, 19 nt, Artificial Sequence
  Description of Artificial Sequence: Synthetic oligonucleotide
aguccauaauacggauuca

SEQ ID NO: 791528 - RNA, 19 nt, Artificial Sequence
  Description of Artificial Sequence: Synthetic oligonucleotide
aggaggugcagcgguacca

SEQ ID NO: 791529 - RNA, 19 nt, Artificial Sequence
  Description of Artificial Sequence: Synthetic oligonucleotide
gguaugagccuugggcaag

SEQ ID NO: 791530 - RNA, 19 nt, Artificial Sequence
  Description of Artificial Sequence: Synthetic oligonucleotide
ccuguagaaccuuugcaga

SEQ ID NO: 791531 - RNA, 19 nt, Artificial Sequence
  Description of Artificial Sequence: Synthetic oligonucleotide
aaucgagaucuuacacgaa

SEQ ID NO: 791532 - RNA, 19 nt, Artificial Sequence
  Description of Artificial Sequence: Synthetic oligonucleotide
ggguugacagaagaaucug

SEQ ID NO: 791533 - RNA, 19 nt, Artificial Sequence
  Description of Artificial Sequence: Synthetic oligonucleotide
ucugggugauguggggcca

SEQ ID NO: 791534 - RNA, 19 nt, Artificial Sequence
  Description of Artificial Sequence: Synthetic oligonucleotide
gccuugggcaaguugucug

SEQ ID NO: 791535 - RNA, 19 nt, Artificial Sequence
  Description of Artificial Sequence: Synthetic oligonucleotide
guuuucucugcuagaaggu

SEQ ID NO: 791536 - RNA, 19 nt, Artificial Sequence
  Description of Artificial Sequence: Synthetic oligonucleotide
gucggccacacaaugcuuc

SEQ ID NO: 791537 - RNA, 19 nt, Artificial Sequence
  Description of Artificial Sequence: Synthetic oligonucleotide
agcuuagccgugggccggc

SEQ ID NO: 791538 - RNA, 19 nt, Artificial Sequence
  Description of Artificial Sequence: Synthetic oligonucleotide
ggaacccacaggcaaugca

SEQ ID NO: 791539 - RNA, 19 nt, Artificial Sequence
  Description of Artificial Sequence: Synthetic oligonucleotide
acacaaugcuucaggcgug

SEQ ID NO: 791540 - RNA, 19 nt, Artificial Sequence
  Description of Artificial Sequence: Synthetic oligonucleotide
acccaaaguagggcaacca

SEQ ID NO: 791541 - RNA, 19 nt, Artificial Sequence
  Description of Artificial Sequence: Synthetic oligonucleotide
cacugacuccagauccgac

SEQ ID NO: 791542 - RNA, 19 nt, Artificial Sequence
  Description of Artificial Sequence: Synthetic oligonucleotide
ccucacuccacagcaaagc

SEQ ID NO: 791543 - RNA, 19 nt, Artificial Sequence
  Description of Artificial Sequence: Synthetic oligonucleotide
agagugguguuugcugcgu

SEQ ID NO: 791544 - RNA, 19 nt, Artificial Sequence
  Description of Artificial Sequence: Synthetic oligonucleotide
gagugguguuugcugcguc

SEQ ID NO: 791545 - RNA, 19 nt, Artificial Sequence
  Description of Artificial Sequence: Synthetic oligonucleotide
  modified_base (6)..(6): a, c, u, g, unknown or other
cccaunuaaaaguccauua

SEQ ID NO: 791546 - RNA, 19 nt, Artificial Sequence
  Description of Artificial Sequence: Synthetic oligonucleotide
uguugcugucggccacaca

SEQ ID NO: 791547 - RNA, 19 nt, Artificial Sequence
  Description of Artificial Sequence: Synthetic oligonucleotide
cuaucagguggauggugaa

SEQ ID NO: 791548 - RNA, 19 nt, Artificial Sequence
  Description of Artificial Sequence: Synthetic oligonucleotide
gccuauccugaacuugacc

SEQ ID NO: 791549 - RNA, 19 nt, Artificial Sequence
  Description of Artificial Sequence: Synthetic oligonucleotide
aggcgggguguuuucucug

SEQ ID NO: 791550 - RNA, 19 nt, Artificial Sequence
  Description of Artificial Sequence: Synthetic oligonucleotide
ucguguggacccggucacg

SEQ ID NO: 791551 - RNA, 19 nt, Artificial Sequence
  Description of Artificial Sequence: Synthetic oligonucleotide
ggaccuuacaaaauaaauu

SEQ ID NO: 791552 - RNA, 19 nt, Artificial Sequence
  Description of Artificial Sequence: Synthetic oligonucleotide
gccugcucuacagucaaug

SEQ ID NO: 791553 - RNA, 19 nt, Artificial Sequence
  Description of Artificial Sequence: Synthetic oligonucleotide
ccucacaauguugcugucg

SEQ ID NO: 791554 - RNA, 19 nt, Artificial Sequence
  Description of Artificial Sequence: Synthetic oligonucleotide
gaggugcagcgguaccaac

SEQ ID NO: 791555 - RNA, 19 nt, Artificial Sequence
  Description of Artificial Sequence: Synthetic oligonucleotide
cagauccgacagcuggaug

SEQ ID NO: 791556 - RNA, 19 nt, Artificial Sequence
  Description of Artificial Sequence: Synthetic oligonucleotide
agaguccauaauacggauu

SEQ ID NO: 791557 - RNA, 19 nt, Artificial Sequence
  Description of Artificial Sequence: Synthetic oligonucleotide
caggcguguguuugacuuc

SEQ ID NO: 791558 - RNA, 19 nt, Artificial Sequence
  Description of Artificial Sequence: Synthetic oligonucleotide
gcguguguuugacuuccag

SEQ ID NO: 791559 - RNA, 19 nt, Artificial Sequence
  Description of Artificial Sequence: Synthetic oligonucleotide
gaggggugacaaucgagau

SEQ ID NO: 791560 - RNA, 19 nt, Artificial Sequence
  Description of Artificial Sequence: Synthetic oligonucleotide
ggaacucguguggacccgg

SEQ ID NO: 791561 - RNA, 19 nt, Artificial Sequence
  Description of Artificial Sequence: Synthetic oligonucleotide
gcagcgguaccaacagagg

SEQ ID NO: 791562 - RNA, 19 nt, Artificial Sequence
  Description of Artificial Sequence: Synthetic oligonucleotide
ggcgggguguuuucucugc

SEQ ID NO: 791563 - RNA, 19 nt, Artificial Sequence
  Description of Artificial Sequence: Synthetic oligonucleotide
aagcgcugcgaagcagagu

SEQ ID NO: 791564 - RNA, 19 nt, Artificial Sequence
  Description of Artificial Sequence: Synthetic oligonucleotide
cuaggguagcagcagcacu

SEQ ID NO: 791565 - RNA, 19 nt, Artificial Sequence
  Description of Artificial Sequence: Synthetic oligonucleotide
  modified_base (2)..(2): a, c, u, g, unknown or other
cncacuguuugagaaggcu

SEQ ID NO: 791566 - RNA, 19 nt, Artificial Sequence
  Description of Artificial Sequence: Synthetic oligonucleotide
gcugucggccacacaaugc

SEQ ID NO: 791567 - RNA, 19 nt, Artificial Sequence
  Description of Artificial Sequence: Synthetic oligonucleotide
  modified_base (19)..(19): a, c, u, g, unknown or other
gcucuuagcaauccccaun

SEQ ID NO: 791568 - RNA, 19 nt, Artificial Sequence
  Description of Artificial Sequence: Synthetic oligonucleotide
ggcaucuaucagguggaug

SEQ ID NO: 791569 - RNA, 19 nt, Artificial Sequence
  Description of Artificial Sequence: Synthetic oligonucleotide
ugugcaguucuggguccac

SEQ ID NO: 791570 - RNA, 19 nt, Artificial Sequence
  Description of Artificial Sequence: Synthetic oligonucleotide
cccggucacgaacugcagg

SEQ ID NO: 791571 - RNA, 19 nt, Artificial Sequence
  Description of Artificial Sequence: Synthetic oligonucleotide
gcgccuguagaaccuuugc

SEQ ID NO: 791572 - RNA, 19 nt, Artificial Sequence
  Description of Artificial Sequence: Synthetic oligonucleotide
uagccgugggccggccacg

SEQ ID NO: 791573 - RNA, 19 nt, Artificial Sequence
  Description of Artificial Sequence: Synthetic oligonucleotide
ccguggaauacuggaagag

SEQ ID NO: 791574 - RNA, 19 nt, Artificial Sequence
  Description of Artificial Sequence: Synthetic oligonucleotide
augaugcgacccacaaagu

SEQ ID NO: 791575 - RNA, 19 nt, Artificial Sequence
  Description of Artificial Sequence: Synthetic oligonucleotide
ugcgacccacaaaguggaa

SEQ ID NO: 791576 - RNA, 19 nt, Artificial Sequence
  Description of Artificial Sequence: Synthetic oligonucleotide
agccgugggccggccacgc

SEQ ID NO: 791577 - RNA, 19 nt, Artificial Sequence
  Description of Artificial Sequence: Synthetic oligonucleotide
guuugcugcgucccugagu

SEQ ID NO: 791578 - RNA, 19 nt, Artificial Sequence
  Description of Artificial Sequence: Synthetic oligonucleotide
cugcgaagcagaguggugu

SEQ ID NO: 791579 - RNA, 19 nt, Artificial Sequence
  Description of Artificial Sequence: Synthetic oligonucleotide
caaacuggguagagaacau

SEQ ID NO: 791580 - RNA, 19 nt, Artificial Sequence
  Description of Artificial Sequence: Synthetic oligonucleotide
caaauacagccacucccgu

SEQ ID NO: 791581 - RNA, 19 nt, Artificial Sequence
  Description of Artificial Sequence: Synthetic oligonucleotide
ccccuugugcaaaaccauc

SEQ ID NO: 791582 - RNA, 19 nt, Artificial Sequence
  Description of Artificial Sequence: Synthetic oligonucleotide
  modified_base (3)..(3): a, c, u, g, unknown or other
ccncacuguuugagaaggc

SEQ ID NO: 791583 - RNA, 19 nt, Artificial Sequence
  Description of Artificial Sequence: Synthetic oligonucleotide
caggaggggugacaaucga

SEQ ID NO: 791584 - RNA, 19 nt, Artificial Sequence
  Description of Artificial Sequence: Synthetic oligonucleotide
ggggaacccacaggcaaug

SEQ ID NO: 791585 - RNA, 19 nt, Artificial Sequence
  Description of Artificial Sequence: Synthetic oligonucleotide
cugcgucccugaguguggc

SEQ ID NO: 791586 - RNA, 19 nt, Artificial Sequence
  Description of Artificial Sequence: Synthetic oligonucleotide
aggacucauagggcgggau

SEQ ID NO: 791587 - RNA, 19 nt, Artificial Sequence
  Description of Artificial Sequence: Synthetic oligonucleotide
ggugacaaucgagaucuua

SEQ ID NO: 791588 - RNA, 19 nt, Artificial Sequence
  Description of Artificial Sequence: Synthetic oligonucleotide
gggcgggaugucaauccgg

SEQ ID NO: 791589 - RNA, 19 nt, Artificial Sequence
  Description of Artificial Sequence: Synthetic oligonucleotide
ggggaucugagccugguuu

SEQ ID NO: 791590 - RNA, 19 nt, Artificial Sequence
  Description of Artificial Sequence: Synthetic oligonucleotide
gggccuaaccaugguagac

SEQ ID NO: 791591 - RNA, 19 nt, Artificial Sequence
  Description of Artificial Sequence: Synthetic oligonucleotide
cacucccgugccacuccgc

SEQ ID NO: 791592 - RNA, 19 nt, Artificial Sequence
  Description of Artificial Sequence: Synthetic oligonucleotide
cugcucuacagucaauguu

SEQ ID NO: 791593 - RNA, 19 nt, Artificial Sequence
  Description of Artificial Sequence: Synthetic oligonucleotide
ggguagccuggagagccgg

SEQ ID NO: 791594 - RNA, 19 nt, Artificial Sequence
  Description of Artificial Sequence: Synthetic oligonucleotide
ugcgucccugaguguggcu

SEQ ID NO: 791595 - RNA, 19 nt, Artificial Sequence
  Description of Artificial Sequence: Synthetic oligonucleotide
cgcagacagaugcacccgg

SEQ ID NO: 791596 - RNA, 19 nt, Artificial Sequence
  Description of Artificial Sequence: Synthetic oligonucleotide
gcugcgucccugagugugg

SEQ ID NO: 791597 - RNA, 19 nt, Artificial Sequence
  Description of Artificial Sequence: Synthetic oligonucleotide
ccgccuauccugaacuuga

SEQ ID NO: 791598 - RNA, 19 nt, Artificial Sequence
  Description of Artificial Sequence: Synthetic oligonucleotide
gcgucccugaguguggcug

SEQ ID NO: 791599 - RNA, 19 nt, Artificial Sequence
  Description of Artificial Sequence: Synthetic oligonucleotide
caauccgguuaaagcaggu

SEQ ID NO: 791600 - RNA, 19 nt, Artificial Sequence
  Description of Artificial Sequence: Synthetic oligonucleotide
ugcaguaggcgggguguuu

SEQ ID NO: 791601 - RNA, 19 nt, Artificial Sequence
  Description of Artificial Sequence: Synthetic oligonucleotide
cugucauguggccccaccu

SEQ ID NO: 791602 - RNA, 19 nt, Artificial Sequence
  Description of Artificial Sequence: Synthetic oligonucleotide
cacaaguaaaugggcgaua

SEQ ID NO: 791603 - RNA, 19 nt, Artificial Sequence
  Description of Artificial Sequence: Synthetic oligonucleotide
caggggaccccaggucagc

SEQ ID NO: 791604 - RNA, 19 nt, Artificial Sequence
  Description of Artificial Sequence: Synthetic oligonucleotide
uugcugcgucccugagugu

SEQ ID NO: 791605 - RNA, 19 nt, Artificial Sequence
  Description of Artificial Sequence: Synthetic oligonucleotide
gguagagaacauagcaaau

SEQ ID NO: 791606 - RNA, 19 nt, Artificial Sequence
  Description of Artificial Sequence: Synthetic oligonucleotide
ugccugccagaaccaccuc

SEQ ID NO: 791607 - RNA, 19 nt, Artificial Sequence
  Description of Artificial Sequence: Synthetic oligonucleotide
cugggugauguggggccac

SEQ ID NO: 791608 - RNA, 19 nt, Artificial Sequence
  Description of Artificial Sequence: Synthetic oligonucleotide
acauagcaaaugggacuuu

SEQ ID NO: 791609 - RNA, 19 nt, Artificial Sequence
  Description of Artificial Sequence: Synthetic oligonucleotide
uggcaucuaucagguggau

SEQ ID NO: 791610 - RNA, 19 nt, Artificial Sequence
  Description of Artificial Sequence: Synthetic oligonucleotide
gggccuccagugaaggcug

SEQ ID NO: 791611 - RNA, 19 nt, Artificial Sequence
  Description of Artificial Sequence: Synthetic oligonucleotide
ggccacgcaguguccuuug

SEQ ID NO: 791612 - RNA, 19 nt, Artificial Sequence
  Description of Artificial Sequence: Synthetic oligonucleotide
ucccggguccagccugcuc

SEQ ID NO: 791613 - RNA, 19 nt, Artificial Sequence
  Description of Artificial Sequence: Synthetic oligonucleotide
caccaaacucuugugcagu

SEQ ID NO: 791614 - RNA, 19 nt, Artificial Sequence
  Description of Artificial Sequence: Synthetic oligonucleotide
caucccauugcugcagccu

SEQ ID NO: 791615 - RNA, 19 nt, Artificial Sequence
  Description of Artificial Sequence: Synthetic oligonucleotide
gugcagcgguaccaacaga

SEQ ID NO: 791616 - RNA, 19 nt, Artificial Sequence
  Description of Artificial Sequence: Synthetic oligonucleotide
gcugcgaagcagaguggug

SEQ ID NO: 791617 - RNA, 19 nt, Artificial Sequence
  Description of Artificial Sequence: Synthetic oligonucleotide
ggacccggucacgaacugc

SEQ ID NO: 791618 - RNA, 19 nt, Artificial Sequence
  Description of Artificial Sequence: Synthetic oligonucleotide
ggguccacugacuccagau

SEQ ID NO: 791619 - RNA, 19 nt, Artificial Sequence
  Description of Artificial Sequence: Synthetic oligonucleotide
ugggccggccacgcagugu

SEQ ID NO: 791620 - RNA, 19 nt, Artificial Sequence
  Description of Artificial Sequence: Synthetic oligonucleotide
cuaucuuauccagcccacu

SEQ ID NO: 791621 - RNA, 19 nt, Artificial Sequence
  Description of Artificial Sequence: Synthetic oligonucleotide
guggacccggucacgaacu

SEQ ID NO: 791622 - RNA, 19 nt, Artificial Sequence
  Description of Artificial Sequence: Synthetic oligonucleotide
ccgugggccggccacgcag

SEQ ID NO: 791623 - RNA, 19 nt, Artificial Sequence
  Description of Artificial Sequence: Synthetic oligonucleotide
guguggacccggucacgaa

SEQ ID NO: 791624 - RNA, 19 nt, Artificial Sequence
  Description of Artificial Sequence: Synthetic oligonucleotide
ccacucccgugccacuccg

SEQ ID NO: 791625 - RNA, 19 nt, Artificial Sequence
  Description of Artificial Sequence: Synthetic oligonucleotide
guaugagccuugggcaagu

SEQ ID NO: 791626 - RNA, 19 nt, Artificial Sequence
  Description of Artificial Sequence: Synthetic oligonucleotide
cgguuaaagcagguaugag

SEQ ID NO: 791627 - RNA, 19 nt, Artificial Sequence
  Description of Artificial Sequence: Synthetic oligonucleotide
caucuaucagguggauggu

SEQ ID NO: 791628 - RNA, 19 nt, Artificial Sequence
  Description of Artificial Sequence: Synthetic oligonucleotide
ccaagccaguguagguguc

SEQ ID NO: 791629 - RNA, 19 nt, Artificial Sequence
  Description of Artificial Sequence: Synthetic oligonucleotide
cacaaugcuucaggcgugu

SEQ ID NO: 791630 - RNA, 19 nt, Artificial Sequence
  Description of Artificial Sequence: Synthetic oligonucleotide
cugaagcaucugggugaug

SEQ ID NO: 791631 - RNA, 19 nt, Artificial Sequence
  Description of Artificial Sequence: Synthetic oligonucleotide
gaacucguguggacccggu

SEQ ID NO: 791632 - RNA, 19 nt, Artificial Sequence
  Description of Artificial Sequence: Synthetic oligonucleotide
ggcgggaugucaauccggu

SEQ ID NO: 791633 - RNA, 19 nt, Artificial Sequence
  Description of Artificial Sequence: Synthetic oligonucleotide
ccugcucuacagucaaugu

SEQ ID NO: 791634 - RNA, 19 nt, Artificial Sequence
  Description of Artificial Sequence: Synthetic oligonucleotide
ggggaagcugcgacacuca

SEQ ID NO: 791635 - RNA, 19 nt, Artificial Sequence
  Description of Artificial Sequence: Synthetic oligonucleotide
ccaacccugggaagcuaca

SEQ ID NO: 791636 - RNA, 19 nt, Artificial Sequence
  Description of Artificial Sequence: Synthetic oligonucleotide
gcgcugcgaagcagagugg

SEQ ID NO: 791637 - RNA, 19 nt, Artificial Sequence
  Description of Artificial Sequence: Synthetic oligonucleotide
cuggguugauuugcagagu

SEQ ID NO: 791638 - RNA, 19 nt, Artificial Sequence
  Description of Artificial Sequence: Synthetic oligonucleotide
ccaugaugcgacccacaaa

SEQ ID NO: 791639 - RNA, 19 nt, Artificial Sequence
  Description of Artificial Sequence: Synthetic oligonucleotide
ggguugauuugcagagugu

SEQ ID NO: 791640 - RNA, 19 nt, Artificial Sequence
  Description of Artificial Sequence: Synthetic oligonucleotide
cccggguccagccugcucu

SEQ ID NO: 791641 - RNA, 19 nt, Artificial Sequence
  Description of Artificial Sequence: Synthetic oligonucleotide
cgccuauccugaacuugac

SEQ ID NO: 791642 - RNA, 19 nt, Artificial Sequence
  Description of Artificial Sequence: Synthetic oligonucleotide
  modified_base (7)..(7): a, c, u, g, unknown or other
ccccaunuaaaaguccauu

SEQ ID NO: 791643 - RNA, 19 nt, Artificial Sequence
  Description of Artificial Sequence: Synthetic oligonucleotide
guccgccuauccugaacuu

SEQ ID NO: 791644 - RNA, 19 nt, Artificial Sequence
  Description of Artificial Sequence: Synthetic oligonucleotide
cguggaauacuggaagagu

SEQ ID NO: 791645 - RNA, 19 nt, Artificial Sequence
  Description of Artificial Sequence: Synthetic oligonucleotide
cggucacgaacugcaggag

SEQ ID NO: 791646 - RNA, 19 nt, Artificial Sequence
  Description of Artificial Sequence: Synthetic oligonucleotide
cguguggacccggucacga

SEQ ID NO: 791647 - RNA, 19 nt, Artificial Sequence
  Description of Artificial Sequence: Synthetic oligonucleotide
gcuuagccgugggccggcc

SEQ ID NO: 791648 - RNA, 19 nt, Artificial Sequence
  Description of Artificial Sequence: Synthetic oligonucleotide
gcgggguguuuucucugcu

SEQ ID NO: 791649 - RNA, 19 nt, Artificial Sequence
  Description of Artificial Sequence: Synthetic oligonucleotide
gcaguaggcgggguguuuu

SEQ ID NO: 791650 - RNA, 19 nt, Artificial Sequence
  Description of Artificial Sequence: Synthetic oligonucleotide
caccaacccugggaagcua

SEQ ID NO: 791651 - RNA, 19 nt, Artificial Sequence
  Description of Artificial Sequence: Synthetic oligonucleotide
ggccggccacgcagugucc

SEQ ID NO: 791652 - RNA, 19 nt, Artificial Sequence
  Description of Artificial Sequence: Synthetic oligonucleotide
ccugaagcaucugggugau

SEQ ID NO: 791653 - RNA, 19 nt, Artificial Sequence
  Description of Artificial Sequence: Synthetic oligonucleotide
cgggguguuuucucugcua

SEQ ID NO: 791654 - RNA, 19 nt, Artificial Sequence
  Description of Artificial Sequence: Synthetic oligonucleotide
caguguccuuugagguguu

SEQ ID NO: 791655 - RNA, 19 nt, Artificial Sequence
  Description of Artificial Sequence: Synthetic oligonucleotide
gcgggaugucaauccgguu

SEQ ID NO: 791656 - RNA, 19 nt, Artificial Sequence
  Description of Artificial Sequence: Synthetic oligonucleotide
gccggccacgcaguguccu

SEQ ID NO: 791657 - RNA, 19 nt, Artificial Sequence
  Description of Artificial Sequence: Synthetic oligonucleotide
cgcugcgaagcagaguggu

SEQ ID NO: 791658 - RNA, 19 nt, Artificial Sequence
  Description of Artificial Sequence: Synthetic oligonucleotide
gccgugggccggccacgca

SEQ ID NO: 791659 - RNA, 19 nt, Artificial Sequence
  Description of Artificial Sequence: Synthetic oligonucleotide
guagggcaaccaggagcuu

SEQ ID NO: 791660 - RNA, 19 nt, Artificial Sequence
  Description of Artificial Sequence: Synthetic oligonucleotide
cggugcugcgcagacagau

SEQ ID NO: 791661 - RNA, 19 nt, Artificial Sequence
  Description of Artificial Sequence: Synthetic oligonucleotide
cgugggccggccacgcagu

SEQ ID NO: 791662 - RNA, 19 nt, Artificial Sequence
  Description of Artificial Sequence: Synthetic oligonucleotide
ccggccacgcaguguccuu

SEQ ID NO: 791663 - RNA, 19 nt, Artificial Sequence
  Description of Artificial Sequence: Synthetic oligonucleotide
cggccacgcaguguccuuu

SEQ ID NO: 791664 - RNA, 19 nt, Artificial Sequence
  Description of Artificial Sequence: Synthetic oligonucleotide
aacguuaaaacauacaaac

SEQ ID NO: 791665 - RNA, 19 nt, Artificial Sequence
  Description of Artificial Sequence: Synthetic oligonucleotide
aaagguaaaauguagggug

SEQ ID NO: 791666 - RNA, 19 nt, Artificial Sequence
  Description of Artificial Sequence: Synthetic oligonucleotide
aggauuagagaguaaaugc

SEQ ID NO: 791667 - RNA, 19 nt, Artificial Sequence
  Description of Artificial Sequence: Synthetic oligonucleotide
cuaguuuccaacauaaagg

SEQ ID NO: 791668 - RNA, 19 nt, Artificial Sequence
  Description of Artificial Sequence: Synthetic oligonucleotide
ucuaguuuccaacauaaag

SEQ ID NO: 791669 - RNA, 19 nt, Artificial Sequence
  Description of Artificial Sequence: Synthetic oligonucleotide
uaaacauuccuucaaagug

SEQ ID NO: 791670 - RNA, 19 nt, Artificial Sequence
  Description of Artificial Sequence: Synthetic oligonucleotide
ucuaaguuuugguagagag

SEQ ID NO: 791671 - RNA, 19 nt, Artificial Sequence
  Description of Artificial Sequence: Synthetic oligonucleotide
aaguuacaagguuacgugc

SEQ ID NO: 791672 - RNA, 19 nt, Artificial Sequence
  Description of Artificial Sequence: Synthetic oligonucleotide
ugaaguaauauuuucgugu

SEQ ID NO: 791673 - RNA, 19 nt, Artificial Sequence
  Description of Artificial Sequence: Synthetic oligonucleotide
ucugcuucgaauuaggacu

SEQ ID NO: 791674 - RNA, 19 nt, Artificial Sequence
  Description of Artificial Sequence: Synthetic oligonucleotide
aggauugauacguaguggc

SEQ ID NO: 791675 - RNA, 19 nt, Artificial Sequence
  Description of Artificial Sequence: Synthetic oligonucleotide
uguaaagaacguuaaaaca

SEQ ID NO: 791676 - RNA, 19 nt, Artificial Sequence
  Description of Artificial Sequence: Synthetic oligonucleotide
ucgaauuaggacuugacug

SEQ ID NO: 791677 - RNA, 19 nt, Artificial Sequence
  Description of Artificial Sequence: Synthetic oligonucleotide
gaagaaagugaugauaacg

SEQ ID NO: 791678 - RNA, 19 nt, Artificial Sequence
  Description of Artificial Sequence: Synthetic oligonucleotide
cucauuuagaagauggacg

SEQ ID NO: 791679 - RNA, 19 nt, Artificial Sequence
  Description of Artificial Sequence: Synthetic oligonucleotide
aagaacuuagcuuauguaa

SEQ ID NO: 791680 - RNA, 19 nt, Artificial Sequence
  Description of Artificial Sequence: Synthetic oligonucleotide
uucgugucaagaaagacug

SEQ ID NO: 791681 - RNA, 19 nt, Artificial Sequence
  Description of Artificial Sequence: Synthetic oligonucleotide
uauuuucgugucaagaaag

SEQ ID NO: 791682 - RNA, 19 nt, Artificial Sequence
  Description of Artificial Sequence: Synthetic oligonucleotide
ucuccuuacaaacacggag

SEQ ID NO: 791683 - RNA, 19 nt, Artificial Sequence
  Description of Artificial Sequence: Synthetic oligonucleotide
cuaccuauccaccagaagc

SEQ ID NO: 791684 - RNA, 19 nt, Artificial Sequence
  Description of Artificial Sequence: Synthetic oligonucleotide
uggagcauaggcuugaagc

SEQ ID NO: 791685 - RNA, 19 nt, Artificial Sequence
  Description of Artificial Sequence: Synthetic oligonucleotide
uguuuaaugagagucaaga

SEQ ID NO: 791686 - RNA, 19 nt, Artificial Sequence
  Description of Artificial Sequence: Synthetic oligonucleotide
agaacguuaaaacauacaa

SEQ ID NO: 791687 - RNA, 19 nt, Artificial Sequence
  Description of Artificial Sequence: Synthetic oligonucleotide
ugaggaaguaccaggaugc

SEQ ID NO: 791688 - RNA, 19 nt, Artificial Sequence
  Description of Artificial Sequence: Synthetic oligonucleotide
aauguagggugucuggauc

SEQ ID NO: 791689 - RNA, 19 nt, Artificial Sequence
  Description of Artificial Sequence: Synthetic oligonucleotide
gaagugucaauggaaaugg

SEQ ID NO: 791690 - RNA, 19 nt, Artificial Sequence
  Description of Artificial Sequence: Synthetic oligonucleotide
auuacucauguaaagaacg

SEQ ID NO: 791691 - RNA, 19 nt, Artificial Sequence
  Description of Artificial Sequence: Synthetic oligonucleotide
agugugagcagcucuauuc

SEQ ID NO: 791692 - RNA, 19 nt, Artificial Sequence
  Description of Artificial Sequence: Synthetic oligonucleotide
ucauuuagaagauggacgu

SEQ ID NO: 791693 - RNA, 19 nt, Artificial Sequence
  Description of Artificial Sequence: Synthetic oligonucleotide
aaaacagggcuguuuaaug

SEQ ID NO: 791694 - RNA, 19 nt, Artificial Sequence
  Description of Artificial Sequence: Synthetic oligonucleotide
gaaguuacaagguuacgug

SEQ ID NO: 791695 - RNA, 19 nt, Artificial Sequence
  Description of Artificial Sequence: Synthetic oligonucleotide
aaacacauugaggaaguac

SEQ ID NO: 791696 - RNA, 19 nt, Artificial Sequence
  Description of Artificial Sequence: Synthetic oligonucleotide
ugaguagccacuuacagua

SEQ ID NO: 791697 - RNA, 19 nt, Artificial Sequence
  Description of Artificial Sequence: Synthetic oligonucleotide
uaaaauguagggugucugg

SEQ ID NO: 791698 - RNA, 19 nt, Artificial Sequence
  Description of Artificial Sequence: Synthetic oligonucleotide
auuagagaguaaaugcucc

SEQ ID NO: 791699 - RNA, 19 nt, Artificial Sequence
  Description of Artificial Sequence: Synthetic oligonucleotide
uuucgugucaagaaagacu

SEQ ID NO: 791700 - RNA, 19 nt, Artificial Sequence
  Description of Artificial Sequence: Synthetic oligonucleotide
uugagauauucucaguagc

SEQ ID NO: 791701 - RNA, 19 nt, Artificial Sequence
  Description of Artificial Sequence: Synthetic oligonucleotide
aaagaacguuaaaacauac

SEQ ID NO: 791702 - RNA, 19 nt, Artificial Sequence
  Description of Artificial Sequence: Synthetic oligonucleotide
ucugacacccuuacuagag

SEQ ID NO: 791703 - RNA, 19 nt, Artificial Sequence
  Description of Artificial Sequence: Synthetic oligonucleotide
guuggagucgagcagaagc

SEQ ID NO: 791704 - RNA, 19 nt, Artificial Sequence
  Description of Artificial Sequence: Synthetic oligonucleotide
uggauccuaagaaaacagg

SEQ ID NO: 791705 - RNA, 19 nt, Artificial Sequence
  Description of Artificial Sequence: Synthetic oligonucleotide
ugagauauucucaguagcu

SEQ ID NO: 791706 - RNA, 19 nt, Artificial Sequence
  Description of Artificial Sequence: Synthetic oligonucleotide
auauuacucauguaaagaa

SEQ ID NO: 791707 - RNA, 19 nt, Artificial Sequence
  Description of Artificial Sequence: Synthetic oligonucleotide
guauauuacucauguaaag

SEQ ID NO: 791708 - RNA, 19 nt, Artificial Sequence
  Description of Artificial Sequence: Synthetic oligonucleotide
ugggagaugagaucacucg

SEQ ID NO: 791709 - RNA, 19 nt, Artificial Sequence
  Description of Artificial Sequence: Synthetic oligonucleotide
uuugaucuaccuauccacc

SEQ ID NO: 791710 - RNA, 19 nt, Artificial Sequence
  Description of Artificial Sequence: Synthetic oligonucleotide
cuuugaucuaccuauccac

SEQ ID NO: 791711 - RNA, 19 nt, Artificial Sequence
  Description of Artificial Sequence: Synthetic oligonucleotide
gaugauaacgaugggcagg

SEQ ID NO: 791712 - RNA, 19 nt, Artificial Sequence
  Description of Artificial Sequence: Synthetic oligonucleotide
gaguaaaugcuccggagcc

SEQ ID NO: 791713 - RNA, 19 nt, Artificial Sequence
  Description of Artificial Sequence: Synthetic oligonucleotide
agaacuuagcuuauguaac

SEQ ID NO: 791714 - RNA, 19 nt, Artificial Sequence
  Description of Artificial Sequence: Synthetic oligonucleotide
ugacaaagccugaaaaugu

SEQ ID NO: 791715 - RNA, 19 nt, Artificial Sequence
  Description of Artificial Sequence: Synthetic oligonucleotide
uucgaauuaggacuugacu

SEQ ID NO: 791716 - RNA, 19 nt, Artificial Sequence
  Description of Artificial Sequence: Synthetic oligonucleotide
uaauauuuucgugucaaga

SEQ ID NO: 791717 - RNA, 19 nt, Artificial Sequence
  Description of Artificial Sequence: Synthetic oligonucleotide
cuccacggaaguuacaagg

SEQ ID NO: 791718 - RNA, 19 nt, Artificial Sequence
  Description of Artificial Sequence: Synthetic oligonucleotide
gaugcaucuagugugagca

SEQ ID NO: 791719 - RNA, 19 nt, Artificial Sequence
  Description of Artificial Sequence: Synthetic oligonucleotide
ucaggcugacugaauauag

SEQ ID NO: 791720 - RNA, 19 nt, Artificial Sequence
  Description of Artificial Sequence: Synthetic oligonucleotide
ugaauauaguaacuggcua

SEQ ID NO: 791721 - RNA, 19 nt, Artificial Sequence
  Description of Artificial Sequence: Synthetic oligonucleotide
uaaagaacguuaaaacaua

SEQ ID NO: 791722 - RNA, 19 nt, Artificial Sequence
  Description of Artificial Sequence: Synthetic oligonucleotide
uugaaguaauauuuucgug

SEQ ID NO: 791723 - RNA, 19 nt, Artificial Sequence
  Description of Artificial Sequence: Synthetic oligonucleotide
auuaggacuugacugucag

SEQ ID NO: 791724 - RNA, 19 nt, Artificial Sequence
  Description of Artificial Sequence: Synthetic oligonucleotide
accgaucagaaucauuggg

SEQ ID NO: 791725 - RNA, 19 nt, Artificial Sequence
  Description of Artificial Sequence: Synthetic oligonucleotide
ugcucaguauggaaucugg

SEQ ID NO: 791726 - RNA, 19 nt, Artificial Sequence
  Description of Artificial Sequence: Synthetic oligonucleotide
uguugauccauccaccgau

SEQ ID NO: 791727 - RNA, 19 nt, Artificial Sequence
  Description of Artificial Sequence: Synthetic oligonucleotide
uggacuaaagaugaagaga

SEQ ID NO: 791728 - RNA, 19 nt, Artificial Sequence
  Description of Artificial Sequence: Synthetic oligonucleotide
ugaucuaccuauccaccag

SEQ ID NO: 791729 - RNA, 19 nt, Artificial Sequence
  Description of Artificial Sequence: Synthetic oligonucleotide
uagagucaccugaagaaug

SEQ ID NO: 791730 - RNA, 19 nt, Artificial Sequence
  Description of Artificial Sequence: Synthetic oligonucleotide
gaggacguugguuacauuc

SEQ ID NO: 791731 - RNA, 19 nt, Artificial Sequence
  Description of Artificial Sequence: Synthetic oligonucleotide
agaacgagccuugcuaugc

SEQ ID NO: 791732 - RNA, 19 nt, Artificial Sequence
  Description of Artificial Sequence: Synthetic oligonucleotide
ugacugaauauaguaacug

SEQ ID NO: 791733 - RNA, 19 nt, Artificial Sequence
  Description of Artificial Sequence: Synthetic oligonucleotide
uagcuuauguaacccaucu

SEQ ID NO: 791734 - RNA, 19 nt, Artificial Sequence
  Description of Artificial Sequence: Synthetic oligonucleotide
uaacugacaauucuccuua

SEQ ID NO: 791735 - RNA, 19 nt, Artificial Sequence
  Description of Artificial Sequence: Synthetic oligonucleotide
gagaguaaaugcuccggag

SEQ ID NO: 791736 - RNA, 19 nt, Artificial Sequence
  Description of Artificial Sequence: Synthetic oligonucleotide
uucucaguagcuugggaca

SEQ ID NO: 791737 - RNA, 19 nt, Artificial Sequence
  Description of Artificial Sequence: Synthetic oligonucleotide
acaaacacggaguuuugcu

SEQ ID NO: 791738 - RNA, 19 nt, Artificial Sequence
  Description of Artificial Sequence: Synthetic oligonucleotide
agaagauggacgucugcag

SEQ ID NO: 791739 - RNA, 19 nt, Artificial Sequence
  Description of Artificial Sequence: Synthetic oligonucleotide
ucgagauuggucugcagca

SEQ ID NO: 791740 - RNA, 19 nt, Artificial Sequence
  Description of Artificial Sequence: Synthetic oligonucleotide
uaccuauccaccagaagcu

SEQ ID NO: 791741 - RNA, 19 nt, Artificial Sequence
  Description of Artificial Sequence: Synthetic oligonucleotide
agcucagacaagaacgagc

SEQ ID NO: 791742 - RNA, 19 nt, Artificial Sequence
  Description of Artificial Sequence: Synthetic oligonucleotide
aauggaacuuuaguuguga

SEQ ID NO: 791743 - RNA, 19 nt, Artificial Sequence
  Description of Artificial Sequence: Synthetic oligonucleotide
uccuaagaaaacaggaguu

SEQ ID NO: 791744 - RNA, 19 nt, Artificial Sequence
  Description of Artificial Sequence: Synthetic oligonucleotide
aacgagccuugcuaugcac

SEQ ID NO: 791745 - RNA, 19 nt, Artificial Sequence
  Description of Artificial Sequence: Synthetic oligonucleotide
aagagucgcuuguucuugg

SEQ ID NO: 791746 - RNA, 19 nt, Artificial Sequence
  Description of Artificial Sequence: Synthetic oligonucleotide
uggaacuuuaguugugaca

SEQ ID NO: 791747 - RNA, 19 nt, Artificial Sequence
  Description of Artificial Sequence: Synthetic oligonucleotide
gauuagagaguaaaugcuc

SEQ ID NO: 791748 - RNA, 19 nt, Artificial Sequence
  Description of Artificial Sequence: Synthetic oligonucleotide
auaggcuugaagcgaagug

SEQ ID NO: 791749 - RNA, 19 nt, Artificial Sequence
  Description of Artificial Sequence: Synthetic oligonucleotide
uguuugggaauguauuuuc

SEQ ID NO: 791750 - RNA, 19 nt, Artificial Sequence
  Description of Artificial Sequence: Synthetic oligonucleotide
guuucaguaaggucgggac

SEQ ID NO: 791751 - RNA, 19 nt, Artificial Sequence
  Description of Artificial Sequence: Synthetic oligonucleotide
agagucaccugaagaaugc

SEQ ID NO: 791752 - RNA, 19 nt, Artificial Sequence
  Description of Artificial Sequence: Synthetic oligonucleotide
aaauguagggugucuggau

SEQ ID NO: 791753 - RNA, 19 nt, Artificial Sequence
  Description of Artificial Sequence: Synthetic oligonucleotide
uuucaguaaggucgggaca

SEQ ID NO: 791754 - RNA, 19 nt, Artificial Sequence
  Description of Artificial Sequence: Synthetic oligonucleotide
aauauaguaacuggcuaua

SEQ ID NO: 791755 - RNA, 19 nt, Artificial Sequence
  Description of Artificial Sequence: Synthetic oligonucleotide
aggaguuuacuguggcugg

SEQ ID NO: 791756 - RNA, 19 nt, Artificial Sequence
  Description of Artificial Sequence: Synthetic oligonucleotide
acaagaacgagccuugcua

SEQ ID NO: 791757 - RNA, 19 nt, Artificial Sequence
  Description of Artificial Sequence: Synthetic oligonucleotide
cuugcuaugcacccgccag

SEQ ID NO: 791758 - RNA, 19 nt, Artificial Sequence
  Description of Artificial Sequence: Synthetic oligonucleotide
gagaucacucguucaaaug

SEQ ID NO: 791759 - RNA, 19 nt, Artificial Sequence
  Description of Artificial Sequence: Synthetic oligonucleotide
auaacgaugggcaggacca

SEQ ID NO: 791760 - RNA, 19 nt, Artificial Sequence
  Description of Artificial Sequence: Synthetic oligonucleotide
uugaucuaccuauccacca

SEQ ID NO: 791761 - RNA, 19 nt, Artificial Sequence
  Description of Artificial Sequence: Synthetic oligonucleotide
gaugagaucacucguucaa

SEQ ID NO: 791762 - RNA, 19 nt, Artificial Sequence
  Description of Artificial Sequence: Synthetic oligonucleotide
agucaagagucgcuuguuc

SEQ ID NO: 791763 - RNA, 19 nt, Artificial Sequence
  Description of Artificial Sequence: Synthetic oligonucleotide
ucuaccuauccaccagaag

SEQ ID NO: 791764 - RNA, 19 nt, Artificial Sequence
  Description of Artificial Sequence: Synthetic oligonucleotide
ucuauuccuugcuggagca

SEQ ID NO: 791765 - RNA, 19 nt, Artificial Sequence
  Description of Artificial Sequence: Synthetic oligonucleotide
auggaacuuuaguugugac

SEQ ID NO: 791766 - RNA, 19 nt, Artificial Sequence
  Description of Artificial Sequence: Synthetic oligonucleotide
aguaaaugcuccggagccc

SEQ ID NO: 791767 - RNA, 19 nt, Artificial Sequence
  Description of Artificial Sequence: Synthetic oligonucleotide
aacacggaguuuugcuaag

SEQ ID NO: 791768 - RNA, 19 nt, Artificial Sequence
  Description of Artificial Sequence: Synthetic oligonucleotide
uuugcuaaguuuugagaua

SEQ ID NO: 791769 - RNA, 19 nt, Artificial Sequence
  Description of Artificial Sequence: Synthetic oligonucleotide
ugauccauccaccgaucag

SEQ ID NO: 791770 - RNA, 19 nt, Artificial Sequence
  Description of Artificial Sequence: Synthetic oligonucleotide
gcuacagugcuuaacaugc

SEQ ID NO: 791771 - RNA, 19 nt, Artificial Sequence
  Description of Artificial Sequence: Synthetic oligonucleotide
ucaucgagugcccacuggu

SEQ ID NO: 791772 - RNA, 19 nt, Artificial Sequence
  Description of Artificial Sequence: Synthetic oligonucleotide
caaguuccaaucaagaacu

SEQ ID NO: 791773 - RNA, 19 nt, Artificial Sequence
  Description of Artificial Sequence: Synthetic oligonucleotide
uuucucgacggacuguuuc

SEQ ID NO: 791774 - RNA, 19 nt, Artificial Sequence
  Description of Artificial Sequence: Synthetic oligonucleotide
aacuggcuauaacugacaa

SEQ ID NO: 791775 - RNA, 19 nt, Artificial Sequence
  Description of Artificial Sequence: Synthetic oligonucleotide
guuuugcuaaguuuugaga

SEQ ID NO: 791776 - RNA, 19 nt, Artificial Sequence
  Description of Artificial Sequence: Synthetic oligonucleotide
aggacguugguuacauucc

SEQ ID NO: 791777 - RNA, 19 nt, Artificial Sequence
  Description of Artificial Sequence: Synthetic oligonucleotide
uccacggaaguuacaaggu

SEQ ID NO: 791778 - RNA, 19 nt, Artificial Sequence
  Description of Artificial Sequence: Synthetic oligonucleotide
gaagcgaagugucaaugga

SEQ ID NO: 791779 - RNA, 19 nt, Artificial Sequence
  Description of Artificial Sequence: Synthetic oligonucleotide
aaaugaguagccacuuaca

SEQ ID NO: 791780 - RNA, 19 nt, Artificial Sequence
  Description of Artificial Sequence: Synthetic oligonucleotide
acggacuguuuccagcugg

SEQ ID NO: 791781 - RNA, 19 nt, Artificial Sequence
  Description of Artificial Sequence: Synthetic oligonucleotide
gcucucauuuagaagaugg

SEQ ID NO: 791782 - RNA, 19 nt, Artificial Sequence
  Description of Artificial Sequence: Synthetic oligonucleotide
gauacguaguggcggauca

SEQ ID NO: 791783 - RNA, 19 nt, Artificial Sequence
  Description of Artificial Sequence: Synthetic oligonucleotide
aagaacgagccuugcuaug

SEQ ID NO: 791784 - RNA, 19 nt, Artificial Sequence
  Description of Artificial Sequence: Synthetic oligonucleotide
uuagcuuauguaacccauc

SEQ ID NO: 791785 - RNA, 19 nt, Artificial Sequence
  Description of Artificial Sequence: Synthetic oligonucleotide
uucucgacggacuguuucc

SEQ ID NO: 791786 - RNA, 19 nt, Artificial Sequence
  Description of Artificial Sequence: Synthetic oligonucleotide
aagguaaaauguagggugu

SEQ ID NO: 791787 - RNA, 19 nt, Artificial Sequence
  Description of Artificial Sequence: Synthetic oligonucleotide
acgugcuacugcaaguucc

SEQ ID NO: 791788 - RNA, 19 nt, Artificial Sequence
  Description of Artificial Sequence: Synthetic oligonucleotide
uaugcccuggcccuggaaa

SEQ ID NO: 791789 - RNA, 19 nt, Artificial Sequence
  Description of Artificial Sequence: Synthetic oligonucleotide
acauaaaggggaacccagc

SEQ ID NO: 791790 - RNA, 19 nt, Artificial Sequence
  Description of Artificial Sequence: Synthetic oligonucleotide
gaauauaguaacuggcuau

SEQ ID NO: 791791 - RNA, 19 nt, Artificial Sequence
  Description of Artificial Sequence: Synthetic oligonucleotide
gcugacugaauauaguaac

SEQ ID NO: 791792 - RNA, 19 nt, Artificial Sequence
  Description of Artificial Sequence: Synthetic oligonucleotide
aagaacguuaaaacauaca

SEQ ID NO: 791793 - RNA, 19 nt, Artificial Sequence
  Description of Artificial Sequence: Synthetic oligonucleotide
guaaaauguagggugucug

SEQ ID NO: 791794 - RNA, 19 nt, Artificial Sequence
  Description of Artificial Sequence: Synthetic oligonucleotide
aagauggacgucugcaguu

SEQ ID NO: 791795 - RNA, 19 nt, Artificial Sequence
  Description of Artificial Sequence: Synthetic oligonucleotide
acggaaguuacaagguuac

SEQ ID NO: 791796 - RNA, 19 nt, Artificial Sequence
  Description of Artificial Sequence: Synthetic oligonucleotide
ugaaaaguuugcugaguau

SEQ ID NO: 791797 - RNA, 19 nt, Artificial Sequence
  Description of Artificial Sequence: Synthetic oligonucleotide
ugcccugacaguaguaagu

SEQ ID NO: 791798 - RNA, 19 nt, Artificial Sequence
  Description of Artificial Sequence: Synthetic oligonucleotide
uugcuaaguuuugagauau

SEQ ID NO: 791799 - RNA, 19 nt, Artificial Sequence
  Description of Artificial Sequence: Synthetic oligonucleotide
uaacuggcuauaacugaca

SEQ ID NO: 791800 - RNA, 19 nt, Artificial Sequence
  Description of Artificial Sequence: Synthetic oligonucleotide
agcuuauguaacccaucuc

SEQ ID NO: 791801 - RNA, 19 nt, Artificial Sequence
  Description of Artificial Sequence: Synthetic oligonucleotide
ggaacuuuaguugugacaa

SEQ ID NO: 791802 - RNA, 19 nt, Artificial Sequence
  Description of Artificial Sequence: Synthetic oligonucleotide
ugagaucacucguucaaau

SEQ ID NO: 791803 - RNA, 19 nt, Artificial Sequence
  Description of Artificial Sequence: Synthetic oligonucleotide
ugcaucuagugugagcagc

SEQ ID NO: 791804 - RNA, 19 nt, Artificial Sequence
  Description of Artificial Sequence: Synthetic oligonucleotide
cagugcuuaacaugcaauc

SEQ ID NO: 791805 - RNA, 19 nt, Artificial Sequence
  Description of Artificial Sequence: Synthetic oligonucleotide
ccaccgaucagaaucauug

SEQ ID NO: 791806 - RNA, 19 nt, Artificial Sequence
  Description of Artificial Sequence: Synthetic oligonucleotide
cuucgaauuaggacuugac

SEQ ID NO: 791807 - RNA, 19 nt, Artificial Sequence
  Description of Artificial Sequence: Synthetic oligonucleotide
cucaguauggaaucuggga

SEQ ID NO: 791808 - RNA, 19 nt, Artificial Sequence
  Description of Artificial Sequence: Synthetic oligonucleotide
acacccuuacuagagucac

SEQ ID NO: 791809 - RNA, 19 nt, Artificial Sequence
  Description of Artificial Sequence: Synthetic oligonucleotide
uugauccauccaccgauca

SEQ ID NO: 791810 - RNA, 19 nt, Artificial Sequence
  Description of Artificial Sequence: Synthetic oligonucleotide
cacugacuggccaauggag

SEQ ID NO: 791811 - RNA, 19 nt, Artificial Sequence
  Description of Artificial Sequence: Synthetic oligonucleotide
uguuucaguaaggucggga

SEQ ID NO: 791812 - RNA, 19 nt, Artificial Sequence
  Description of Artificial Sequence: Synthetic oligonucleotide
guaacuggcuauaacugac

SEQ ID NO: 791813 - RNA, 19 nt, Artificial Sequence
  Description of Artificial Sequence: Synthetic oligonucleotide
guaaguucucuccugccca

SEQ ID NO: 791814 - RNA, 19 nt, Artificial Sequence
  Description of Artificial Sequence: Synthetic oligonucleotide
caucaugucugugagcaug

SEQ ID NO: 791815 - RNA, 19 nt, Artificial Sequence
  Description of Artificial Sequence: Synthetic oligonucleotide
agguucaagucaacagugc

SEQ ID NO: 791816 - RNA, 19 nt, Artificial Sequence
  Description of Artificial Sequence: Synthetic oligonucleotide
cauugaggaaguaccagga

SEQ ID NO: 791817 - RNA, 19 nt, Artificial Sequence
  Description of Artificial Sequence: Synthetic oligonucleotide
uggguuguugaaguaauau

SEQ ID NO: 791818 - RNA, 19 nt, Artificial Sequence
  Description of Artificial Sequence: Synthetic oligonucleotide
uacaagguuacgugcuacu

SEQ ID NO: 791819 - RNA, 19 nt, Artificial Sequence
  Description of Artificial Sequence: Synthetic oligonucleotide
ugaaaaugucauguugauc

SEQ ID NO: 791820 - RNA, 19 nt, Artificial Sequence
  Description of Artificial Sequence: Synthetic oligonucleotide
caggauugauacguagugg

SEQ ID NO: 791821 - RNA, 19 nt, Artificial Sequence
  Description of Artificial Sequence: Synthetic oligonucleotide
aucgagugcccacugguga

SEQ ID NO: 791822 - RNA, 19 nt, Artificial Sequence
  Description of Artificial Sequence: Synthetic oligonucleotide
agaugagaucacucguuca

SEQ ID NO: 791823 - RNA, 19 nt, Artificial Sequence
  Description of Artificial Sequence: Synthetic oligonucleotide
ccacuuacaguacagcacc

SEQ ID NO: 791824 - RNA, 19 nt, Artificial Sequence
  Description of Artificial Sequence: Synthetic oligonucleotide
ccauccaccgaucagaauc

SEQ ID NO: 791825 - RNA, 19 nt, Artificial Sequence
  Description of Artificial Sequence: Synthetic oligonucleotide
cagacaagaacgagccuug

SEQ ID NO: 791826 - RNA, 19 nt, Artificial Sequence
  Description of Artificial Sequence: Synthetic oligonucleotide
ucgacggacuguuuccagc

SEQ ID NO: 791827 - RNA, 19 nt, Artificial Sequence
  Description of Artificial Sequence: Synthetic oligonucleotide
agaagguggcacaaccuuc

SEQ ID NO: 791828 - RNA, 19 nt, Artificial Sequence
  Description of Artificial Sequence: Synthetic oligonucleotide
uggcggaucaugcccacga

SEQ ID NO: 791829 - RNA, 19 nt, Artificial Sequence
  Description of Artificial Sequence: Synthetic oligonucleotide
uugcccugacaguaguaag

SEQ ID NO: 791830 - RNA, 19 nt, Artificial Sequence
  Description of Artificial Sequence: Synthetic oligonucleotide
uucuccuuacaaacacgga

SEQ ID NO: 791831 - RNA, 19 nt, Artificial Sequence
  Description of Artificial Sequence: Synthetic oligonucleotide
augauaacgaugggcagga

SEQ ID NO: 791832 - RNA, 19 nt, Artificial Sequence
  Description of Artificial Sequence: Synthetic oligonucleotide
acucauguaaagaacguua

SEQ ID NO: 791833 - RNA, 19 nt, Artificial Sequence
  Description of Artificial Sequence: Synthetic oligonucleotide
gcaggauugauacguagug

SEQ ID NO: 791834 - RNA, 19 nt, Artificial Sequence
  Description of Artificial Sequence: Synthetic oligonucleotide
uccuuacaaacacggaguu

SEQ ID NO: 791835 - RNA, 19 nt, Artificial Sequence
  Description of Artificial Sequence: Synthetic oligonucleotide
uuacauucccuuucaucau

SEQ ID NO: 791836 - RNA, 19 nt, Artificial Sequence
  Description of Artificial Sequence: Synthetic oligonucleotide
aggcugacugaauauagua

SEQ ID NO: 791837 - RNA, 19 nt, Artificial Sequence
  Description of Artificial Sequence: Synthetic oligonucleotide
gaucuaccuauccaccaga

SEQ ID NO: 791838 - RNA, 19 nt, Artificial Sequence
  Description of Artificial Sequence: Synthetic oligonucleotide
aauuaggacuugacuguca

SEQ ID NO: 791839 - RNA, 19 nt, Artificial Sequence
  Description of Artificial Sequence: Synthetic oligonucleotide
gcuuauguaacccaucucu

SEQ ID NO: 791840 - RNA, 19 nt, Artificial Sequence
  Description of Artificial Sequence: Synthetic oligonucleotide
uugcuaugcacccgccagc

SEQ ID NO: 791841 - RNA, 19 nt, Artificial Sequence
  Description of Artificial Sequence: Synthetic oligonucleotide
uacguaguggcggaucaug

SEQ ID NO: 791842 - RNA, 19 nt, Artificial Sequence
  Description of Artificial Sequence: Synthetic oligonucleotide
caccgaucagaaucauugg

SEQ ID NO: 791843 - RNA, 19 nt, Artificial Sequence
  Description of Artificial Sequence: Synthetic oligonucleotide
acccuuacuagagucaccu

SEQ ID NO: 791844 - RNA, 19 nt, Artificial Sequence
  Description of Artificial Sequence: Synthetic oligonucleotide
cucauguaaagaacguuaa

SEQ ID NO: 791845 - RNA, 19 nt, Artificial Sequence
  Description of Artificial Sequence: Synthetic oligonucleotide
cugcaaguuccugacacag

SEQ ID NO: 791846 - RNA, 19 nt, Artificial Sequence
  Description of Artificial Sequence: Synthetic oligonucleotide
agccauaguuucuaaguuu

SEQ ID NO: 791847 - RNA, 19 nt, Artificial Sequence
  Description of Artificial Sequence: Synthetic oligonucleotide
acguaguggcggaucaugc

SEQ ID NO: 791848 - RNA, 19 nt, Artificial Sequence
  Description of Artificial Sequence: Synthetic oligonucleotide
agccucgcuuucucgacgg

SEQ ID NO: 791849 - RNA, 19 nt, Artificial Sequence
  Description of Artificial Sequence: Synthetic oligonucleotide
agcucuauuccuugcugga

SEQ ID NO: 791850 - RNA, 19 nt, Artificial Sequence
  Description of Artificial Sequence: Synthetic oligonucleotide
uagagagaaaauguauauu

SEQ ID NO: 791851 - RNA, 19 nt, Artificial Sequence
  Description of Artificial Sequence: Synthetic oligonucleotide
uaguggcggaucaugccca

SEQ ID NO: 791852 - RNA, 19 nt, Artificial Sequence
  Description of Artificial Sequence: Synthetic oligonucleotide
gcucacaaacuucuaagac

SEQ ID NO: 791853 - RNA, 19 nt, Artificial Sequence
  Description of Artificial Sequence: Synthetic oligonucleotide
agucgcuuguucuuggcua

SEQ ID NO: 791854 - RNA, 19 nt, Artificial Sequence
  Description of Artificial Sequence: Synthetic oligonucleotide
ucuucgcugagaguuggcu

SEQ ID NO: 791855 - RNA, 19 nt, Artificial Sequence
  Description of Artificial Sequence: Synthetic oligonucleotide
ggaaguaccaggaugcaga

SEQ ID NO: 791856 - RNA, 19 nt, Artificial Sequence
  Description of Artificial Sequence: Synthetic oligonucleotide
agauggacgucugcaguuc

SEQ ID NO: 791857 - RNA, 19 nt, Artificial Sequence
  Description of Artificial Sequence: Synthetic oligonucleotide
ggauccuaagaaaacagga

SEQ ID NO: 791858 - RNA, 19 nt, Artificial Sequence
  Description of Artificial Sequence: Synthetic oligonucleotide
uucuaaguuuugguagaga

SEQ ID NO: 791859 - RNA, 19 nt, Artificial Sequence
  Description of Artificial Sequence: Synthetic oligonucleotide
ugcuaugcacccgccagcc

SEQ ID NO: 791860 - RNA, 19 nt, Artificial Sequence
  Description of Artificial Sequence: Synthetic oligonucleotide
ucgcuuucucgacggacug

SEQ ID NO: 791861 - RNA, 19 nt, Artificial Sequence
  Description of Artificial Sequence: Synthetic oligonucleotide
aaagacuguuugggaaugu

SEQ ID NO: 791862 - RNA, 19 nt, Artificial Sequence
  Description of Artificial Sequence: Synthetic oligonucleotide
acggaguuuugcuaaguuu

SEQ ID NO: 791863 - RNA, 19 nt, Artificial Sequence
  Description of Artificial Sequence: Synthetic oligonucleotide
uuauucucagaggcuccag

SEQ ID NO: 791864 - RNA, 19 nt, Artificial Sequence
  Description of Artificial Sequence: Synthetic oligonucleotide
uggcuauaacugacaauuc

SEQ ID NO: 791865 - RNA, 19 nt, Artificial Sequence
  Description of Artificial Sequence: Synthetic oligonucleotide
cagcaggauugauacguag

SEQ ID NO: 791866 - RNA, 19 nt, Artificial Sequence
  Description of Artificial Sequence: Synthetic oligonucleotide
cugggagaugagaucacuc

SEQ ID NO: 791867 - RNA, 19 nt, Artificial Sequence
  Description of Artificial Sequence: Synthetic oligonucleotide
ccugcaucauucgagauug

SEQ ID NO: 791868 - RNA, 19 nt, Artificial Sequence
  Description of Artificial Sequence: Synthetic oligonucleotide
ugagagucaagagucgcuu

SEQ ID NO: 791869 - RNA, 19 nt, Artificial Sequence
  Description of Artificial Sequence: Synthetic oligonucleotide
uaaggucgggacacccagc

SEQ ID NO: 791870 - RNA, 19 nt, Artificial Sequence
  Description of Artificial Sequence: Synthetic oligonucleotide
aagcgaagugucaauggaa

SEQ ID NO: 791871 - RNA, 19 nt, Artificial Sequence
  Description of Artificial Sequence: Synthetic oligonucleotide
ggauugauacguaguggcg

SEQ ID NO: 791872 - RNA, 19 nt, Artificial Sequence
  Description of Artificial Sequence: Synthetic oligonucleotide
gcuaaguuuugagauauuc

SEQ ID NO: 791873 - RNA, 19 nt, Artificial Sequence
  Description of Artificial Sequence: Synthetic oligonucleotide
ggcacuuugaucuaccuau

SEQ ID NO: 791874 - RNA, 19 nt, Artificial Sequence
  Description of Artificial Sequence: Synthetic oligonucleotide
cccgcucucauuuagaaga

SEQ ID NO: 791875 - RNA, 19 nt, Artificial Sequence
  Description of Artificial Sequence: Synthetic oligonucleotide
ucucaguagcuugggacac

SEQ ID NO: 791876 - RNA, 19 nt, Artificial Sequence
  Description of Artificial Sequence: Synthetic oligonucleotide
caucuucgcugagaguugg

SEQ ID NO: 791877 - RNA, 19 nt, Artificial Sequence
  Description of Artificial Sequence: Synthetic oligonucleotide
uacucauguaaagaacguu

SEQ ID NO: 791878 - RNA, 19 nt, Artificial Sequence
  Description of Artificial Sequence: Synthetic oligonucleotide
ugagaguuggcugcggguu

SEQ ID NO: 791879 - RNA, 19 nt, Artificial Sequence
  Description of Artificial Sequence: Synthetic oligonucleotide
aguggcggaucaugcccac

SEQ ID NO: 791880 - RNA, 19 nt, Artificial Sequence
  Description of Artificial Sequence: Synthetic oligonucleotide
acguugguuacauucccuu

SEQ ID NO: 791881 - RNA, 19 nt, Artificial Sequence
  Description of Artificial Sequence: Synthetic oligonucleotide
ggagucgagcagaagcucg

SEQ ID NO: 791882 - RNA, 19 nt, Artificial Sequence
  Description of Artificial Sequence: Synthetic oligonucleotide
caagaacuuagcuuaugua

SEQ ID NO: 791883 - RNA, 19 nt, Artificial Sequence
  Description of Artificial Sequence: Synthetic oligonucleotide
cauccaccgaucagaauca

SEQ ID NO: 791884 - RNA, 19 nt, Artificial Sequence
  Description of Artificial Sequence: Synthetic oligonucleotide
uacgugcuacugcaaguuc

SEQ ID NO: 791885 - RNA, 19 nt, Artificial Sequence
  Description of Artificial Sequence: Synthetic oligonucleotide
guagcuugggacacucccc

SEQ ID NO: 791886 - RNA, 19 nt, Artificial Sequence
  Description of Artificial Sequence: Synthetic oligonucleotide
agcgaagugucaauggaaa

SEQ ID NO: 791887 - RNA, 19 nt, Artificial Sequence
  Description of Artificial Sequence: Synthetic oligonucleotide
agaagcucgggccccgcca

SEQ ID NO: 791888 - RNA, 19 nt, Artificial Sequence
  Description of Artificial Sequence: Synthetic oligonucleotide
ugacacagcggaccccgcu

SEQ ID NO: 791889 - RNA, 19 nt, Artificial Sequence
  Description of Artificial Sequence: Synthetic oligonucleotide
auucgagauuggucugcag

SEQ ID NO: 791890 - RNA, 19 nt, Artificial Sequence
  Description of Artificial Sequence: Synthetic oligonucleotide
caucgagugcccacuggug

SEQ ID NO: 791891 - RNA, 19 nt, Artificial Sequence
  Description of Artificial Sequence: Synthetic oligonucleotide
uccacucuggaaagaguuu

SEQ ID NO: 791892 - RNA, 19 nt, Artificial Sequence
  Description of Artificial Sequence: Synthetic oligonucleotide
cguucaaaugaguagccac

SEQ ID NO: 791893 - RNA, 19 nt, Artificial Sequence
  Description of Artificial Sequence: Synthetic oligonucleotide
gucgcuuguucuuggcuac

SEQ ID NO: 791894 - RNA, 19 nt, Artificial Sequence
  Description of Artificial Sequence: Synthetic oligonucleotide
ugauacguaguggcggauc

SEQ ID NO: 791895 - RNA, 19 nt, Artificial Sequence
  Description of Artificial Sequence: Synthetic oligonucleotide
cuccuuacaaacacggagu

SEQ ID NO: 791896 - RNA, 19 nt, Artificial Sequence
  Description of Artificial Sequence: Synthetic oligonucleotide
augcaucuagugugagcag

SEQ ID NO: 791897 - RNA, 19 nt, Artificial Sequence
  Description of Artificial Sequence: Synthetic oligonucleotide
ggacuaaagaugaagagau

SEQ ID NO: 791898 - RNA, 19 nt, Artificial Sequence
  Description of Artificial Sequence: Synthetic oligonucleotide
cacggaaguuacaagguua

SEQ ID NO: 791899 - RNA, 19 nt, Artificial Sequence
  Description of Artificial Sequence: Synthetic oligonucleotide
auauaguaacuggcuauaa

SEQ ID NO: 791900 - RNA, 19 nt, Artificial Sequence
  Description of Artificial Sequence: Synthetic oligonucleotide
gucaagagucgcuuguucu

SEQ ID NO: 791901 - RNA, 19 nt, Artificial Sequence
  Description of Artificial Sequence: Synthetic oligonucleotide
gguagagagaaaauguaua

SEQ ID NO: 791902 - RNA, 19 nt, Artificial Sequence
  Description of Artificial Sequence: Synthetic oligonucleotide
gucgagcagaagcucgggc

SEQ ID NO: 791903 - RNA, 19 nt, Artificial Sequence
  Description of Artificial Sequence: Synthetic oligonucleotide
agggugucuggauccuaag

SEQ ID NO: 791904 - RNA, 19 nt, Artificial Sequence
  Description of Artificial Sequence: Synthetic oligonucleotide
cuuagcuuauguaacccau

SEQ ID NO: 791905 - RNA, 19 nt, Artificial Sequence
  Description of Artificial Sequence: Synthetic oligonucleotide
aguuccugacacagcggac

SEQ ID NO: 791906 - RNA, 19 nt, Artificial Sequence
  Description of Artificial Sequence: Synthetic oligonucleotide
ugggcacuuugaucuaccu

SEQ ID NO: 791907 - RNA, 19 nt, Artificial Sequence
  Description of Artificial Sequence: Synthetic oligonucleotide
gacacccuuacuagaguca

SEQ ID NO: 791908 - RNA, 19 nt, Artificial Sequence
  Description of Artificial Sequence: Synthetic oligonucleotide
ggacguugguuacauuccc

SEQ ID NO: 791909 - RNA, 19 nt, Artificial Sequence
  Description of Artificial Sequence: Synthetic oligonucleotide
cuugggacacuccccuuuc

SEQ ID NO: 791910 - RNA, 19 nt, Artificial Sequence
  Description of Artificial Sequence: Synthetic oligonucleotide
caagucaacagugcaggga

SEQ ID NO: 791911 - RNA, 19 nt, Artificial Sequence
  Description of Artificial Sequence: Synthetic oligonucleotide
ggaugcaucuagugugagc

SEQ ID NO: 791912 - RNA, 19 nt, Artificial Sequence
  Description of Artificial Sequence: Synthetic oligonucleotide
ggaaucugggacagccucg

SEQ ID NO: 791913 - RNA, 19 nt, Artificial Sequence
  Description of Artificial Sequence: Synthetic oligonucleotide
cacgucaucgagugcccac

SEQ ID NO: 791914 - RNA, 19 nt, Artificial Sequence
  Description of Artificial Sequence: Synthetic oligonucleotide
ucucgacggacuguuucca

SEQ ID NO: 791915 - RNA, 19 nt, Artificial Sequence
  Description of Artificial Sequence: Synthetic oligonucleotide
gaacgagccuugcuaugca

SEQ ID NO: 791916 - RNA, 19 nt, Artificial Sequence
  Description of Artificial Sequence: Synthetic oligonucleotide
ggaaguuacaagguuacgu

SEQ ID NO: 791917 - RNA, 19 nt, Artificial Sequence
  Description of Artificial Sequence: Synthetic oligonucleotide
aggacucugcuucgaauua

SEQ ID NO: 791918 - RNA, 19 nt, Artificial Sequence
  Description of Artificial Sequence: Synthetic oligonucleotide
guuacgugcuacugcaagu

SEQ ID NO: 791919 - RNA, 19 nt, Artificial Sequence
  Description of Artificial Sequence: Synthetic oligonucleotide
ucgugucaagaaagacugu

SEQ ID NO: 791920 - RNA, 19 nt, Artificial Sequence
  Description of Artificial Sequence: Synthetic oligonucleotide
ucgagugcccacuggugau

SEQ ID NO: 791921 - RNA, 19 nt, Artificial Sequence
  Description of Artificial Sequence: Synthetic oligonucleotide
gggucaccuguuuucacug

SEQ ID NO: 791922 - RNA, 19 nt, Artificial Sequence
  Description of Artificial Sequence: Synthetic oligonucleotide
uguuggagucgagcagaag

SEQ ID NO: 791923 - RNA, 19 nt, Artificial Sequence
  Description of Artificial Sequence: Synthetic oligonucleotide
cucgacggacuguuuccag

SEQ ID NO: 791924 - RNA, 19 nt, Artificial Sequence
  Description of Artificial Sequence: Synthetic oligonucleotide
gacggacuguuuccagcug

SEQ ID NO: 791925 - RNA, 19 nt, Artificial Sequence
  Description of Artificial Sequence: Synthetic oligonucleotide
uuguuucaguaaggucggg

SEQ ID NO: 791926 - RNA, 19 nt, Artificial Sequence
  Description of Artificial Sequence: Synthetic oligonucleotide
gaguaugcccuggcccugg

SEQ ID NO: 791927 - RNA, 19 nt, Artificial Sequence
  Description of Artificial Sequence: Synthetic oligonucleotide
gacaagaacgagccuugcu

SEQ ID NO: 791928 - RNA, 19 nt, Artificial Sequence
  Description of Artificial Sequence: Synthetic oligonucleotide
ggcuauaacugacaauucu

SEQ ID NO: 791929 - RNA, 19 nt, Artificial Sequence
  Description of Artificial Sequence: Synthetic oligonucleotide
ggucaccuguuuucacugg

SEQ ID NO: 791930 - RNA, 19 nt, Artificial Sequence
  Description of Artificial Sequence: Synthetic oligonucleotide
ggauuagagaguaaaugcu

SEQ ID NO: 791931 - RNA, 19 nt, Artificial Sequence
  Description of Artificial Sequence: Synthetic oligonucleotide
uggcacaaccuuccuuuua

SEQ ID NO: 791932 - RNA, 19 nt, Artificial Sequence
  Description of Artificial Sequence: Synthetic oligonucleotide
aguaaggucgggacaccca

SEQ ID NO: 791933 - RNA, 19 nt, Artificial Sequence
  Description of Artificial Sequence: Synthetic oligonucleotide
ugguuacauucccuuucau

SEQ ID NO: 791934 - RNA, 19 nt, Artificial Sequence
  Description of Artificial Sequence: Synthetic oligonucleotide
uccaccgaucagaaucauu

SEQ ID NO: 791935 - RNA, 19 nt, Artificial Sequence
  Description of Artificial Sequence: Synthetic oligonucleotide
cacccuuacuagagucacc

SEQ ID NO: 791936 - RNA, 19 nt, Artificial Sequence
  Description of Artificial Sequence: Synthetic oligonucleotide
aucacucguucaaaugagu

SEQ ID NO: 791937 - RNA, 19 nt, Artificial Sequence
  Description of Artificial Sequence: Synthetic oligonucleotide
ucgcugagaguuggcugcg

SEQ ID NO: 791938 - RNA, 19 nt, Artificial Sequence
  Description of Artificial Sequence: Synthetic oligonucleotide
ugaguaugcccuggcccug

SEQ ID NO: 791939 - RNA, 19 nt, Artificial Sequence
  Description of Artificial Sequence: Synthetic oligonucleotide
accccgcucucauuuagaa

SEQ ID NO: 791940 - RNA, 19 nt, Artificial Sequence
  Description of Artificial Sequence: Synthetic oligonucleotide
cagccucgcuuucucgacg

SEQ ID NO: 791941 - RNA, 19 nt, Artificial Sequence
  Description of Artificial Sequence: Synthetic oligonucleotide
ccgaucagaaucauuggga

SEQ ID NO: 791942 - RNA, 19 nt, Artificial Sequence
  Description of Artificial Sequence: Synthetic oligonucleotide
aucuucgcugagaguuggc

SEQ ID NO: 791943 - RNA, 19 nt, Artificial Sequence
  Description of Artificial Sequence: Synthetic oligonucleotide
cucugacacccuuacuaga

SEQ ID NO: 791944 - RNA, 19 nt, Artificial Sequence
  Description of Artificial Sequence: Synthetic oligonucleotide
ccucuaguuuccaacauaa

SEQ ID NO: 791945 - RNA, 19 nt, Artificial Sequence
  Description of Artificial Sequence: Synthetic oligonucleotide
cgaagugucaauggaaaug

SEQ ID NO: 791946 - RNA, 19 nt, Artificial Sequence
  Description of Artificial Sequence: Synthetic oligonucleotide
gcaucauucgagauugguc

SEQ ID NO: 791947 - RNA, 19 nt, Artificial Sequence
  Description of Artificial Sequence: Synthetic oligonucleotide
cugcucaguauggaaucug

SEQ ID NO: 791948 - RNA, 19 nt, Artificial Sequence
  Description of Artificial Sequence: Synthetic oligonucleotide
ccggagcccaaacacauug

SEQ ID NO: 791949 - RNA, 19 nt, Artificial Sequence
  Description of Artificial Sequence: Synthetic oligonucleotide
ccugacacagcggaccccg

SEQ ID NO: 791950 - RNA, 19 nt, Artificial Sequence
  Description of Artificial Sequence: Synthetic oligonucleotide
aggucgggacacccagcuc

SEQ ID NO: 791951 - RNA, 19 nt, Artificial Sequence
  Description of Artificial Sequence: Synthetic oligonucleotide
caguagcuugggacacucc

SEQ ID NO: 791952 - RNA, 19 nt, Artificial Sequence
  Description of Artificial Sequence: Synthetic oligonucleotide
ugcuaaguuuugagauauu

SEQ ID NO: 791953 - RNA, 19 nt, Artificial Sequence
  Description of Artificial Sequence: Synthetic oligonucleotide
uggacgucugcaguucuuu

SEQ ID NO: 791954 - RNA, 19 nt, Artificial Sequence
  Description of Artificial Sequence: Synthetic oligonucleotide
cagcucagacaagaacgag

SEQ ID NO: 791955 - RNA, 19 nt, Artificial Sequence
  Description of Artificial Sequence: Synthetic oligonucleotide
cugcaucauucgagauugg

SEQ ID NO: 791956 - RNA, 19 nt, Artificial Sequence
  Description of Artificial Sequence: Synthetic oligonucleotide
caagaacgagccuugcuau

SEQ ID NO: 791957 - RNA, 19 nt, Artificial Sequence
  Description of Artificial Sequence: Synthetic oligonucleotide
cuacagugcuuaacaugca

SEQ ID NO: 791958 - RNA, 19 nt, Artificial Sequence
  Description of Artificial Sequence: Synthetic oligonucleotide
ggacucugcuucgaauuag

SEQ ID NO: 791959 - RNA, 19 nt, Artificial Sequence
  Description of Artificial Sequence: Synthetic oligonucleotide
acgucaucgagugcccacu

SEQ ID NO: 791960 - RNA, 19 nt, Artificial Sequence
  Description of Artificial Sequence: Synthetic oligonucleotide
guugauccauccaccgauc

SEQ ID NO: 791961 - RNA, 19 nt, Artificial Sequence
  Description of Artificial Sequence: Synthetic oligonucleotide
cacuuacaguacagcacca

SEQ ID NO: 791962 - RNA, 19 nt, Artificial Sequence
  Description of Artificial Sequence: Synthetic oligonucleotide
cuuccacgucaucgagugc

SEQ ID NO: 791963 - RNA, 19 nt, Artificial Sequence
  Description of Artificial Sequence: Synthetic oligonucleotide
cucgcuuucucgacggacu

SEQ ID NO: 791964 - RNA, 19 nt, Artificial Sequence
  Description of Artificial Sequence: Synthetic oligonucleotide
cucuaguuuccaacauaaa

SEQ ID NO: 791965 - RNA, 19 nt, Artificial Sequence
  Description of Artificial Sequence: Synthetic oligonucleotide
uaacgaugggcaggaccac

SEQ ID NO: 791966 - RNA, 19 nt, Artificial Sequence
  Description of Artificial Sequence: Synthetic oligonucleotide
gaguuuacuguggcuggaa

SEQ ID NO: 791967 - RNA, 19 nt, Artificial Sequence
  Description of Artificial Sequence: Synthetic oligonucleotide
aucuaccuauccaccagaa

SEQ ID NO: 791968 - RNA, 19 nt, Artificial Sequence
  Description of Artificial Sequence: Synthetic oligonucleotide
acacggaguuuugcuaagu

SEQ ID NO: 791969 - RNA, 19 nt, Artificial Sequence
  Description of Artificial Sequence: Synthetic oligonucleotide
gcucuauuccuugcuggag

SEQ ID NO: 791970 - RNA, 19 nt, Artificial Sequence
  Description of Artificial Sequence: Synthetic oligonucleotide
ugcggguugggaggagcug

SEQ ID NO: 791971 - RNA, 19 nt, Artificial Sequence
  Description of Artificial Sequence: Synthetic oligonucleotide
ggaccccgcucucauuuag

SEQ ID NO: 791972 - RNA, 19 nt, Artificial Sequence
  Description of Artificial Sequence: Synthetic oligonucleotide
cauucgagauuggucugca

SEQ ID NO: 791973 - RNA, 19 nt, Artificial Sequence
  Description of Artificial Sequence: Synthetic oligonucleotide
gaguuggcugcggguuggg

SEQ ID NO: 791974 - RNA, 19 nt, Artificial Sequence
  Description of Artificial Sequence: Synthetic oligonucleotide
caucuagugugagcagcuc

SEQ ID NO: 791975 - RNA, 19 nt, Artificial Sequence
  Description of Artificial Sequence: Synthetic oligonucleotide
cuugaagcgaagugucaau

SEQ ID NO: 791976 - RNA, 19 nt, Artificial Sequence
  Description of Artificial Sequence: Synthetic oligonucleotide
gggugucuggauccuaaga

SEQ ID NO: 791977 - RNA, 19 nt, Artificial Sequence
  Description of Artificial Sequence: Synthetic oligonucleotide
aguaugcccuggcccugga

SEQ ID NO: 791978 - RNA, 19 nt, Artificial Sequence
  Description of Artificial Sequence: Synthetic oligonucleotide
cacaaccuuccuuuuaguu

SEQ ID NO: 791979 - RNA, 19 nt, Artificial Sequence
  Description of Artificial Sequence: Synthetic oligonucleotide
uccggagcccaaacacauu

SEQ ID NO: 791980 - RNA, 19 nt, Artificial Sequence
  Description of Artificial Sequence: Synthetic oligonucleotide
gggagaugagaucacucgu

SEQ ID NO: 791981 - RNA, 19 nt, Artificial Sequence
  Description of Artificial Sequence: Synthetic oligonucleotide
cuacugcaaguuccugaca

SEQ ID NO: 791982 - RNA, 19 nt, Artificial Sequence
  Description of Artificial Sequence: Synthetic oligonucleotide
guauggaaucugggacagc

SEQ ID NO: 791983 - RNA, 19 nt, Artificial Sequence
  Description of Artificial Sequence: Synthetic oligonucleotide
caccuguuuucacuggacu

SEQ ID NO: 791984 - RNA, 19 nt, Artificial Sequence
  Description of Artificial Sequence: Synthetic oligonucleotide
gcauuaucuuggcccagga

SEQ ID NO: 791985 - RNA, 19 nt, Artificial Sequence
  Description of Artificial Sequence: Synthetic oligonucleotide
ugauaacgaugggcaggac

SEQ ID NO: 791986 - RNA, 19 nt, Artificial Sequence
  Description of Artificial Sequence: Synthetic oligonucleotide
caggcugacugaauauagu

SEQ ID NO: 791987 - RNA, 19 nt, Artificial Sequence
  Description of Artificial Sequence: Synthetic oligonucleotide
acagcggaccccgcucuca

SEQ ID NO: 791988 - RNA, 19 nt, Artificial Sequence
  Description of Artificial Sequence: Synthetic oligonucleotide
guggcggaucaugcccacg

SEQ ID NO: 791989 - RNA, 19 nt, Artificial Sequence
  Description of Artificial Sequence: Synthetic oligonucleotide
gcuucgaauuaggacuuga

SEQ ID NO: 791990 - RNA, 19 nt, Artificial Sequence
  Description of Artificial Sequence: Synthetic oligonucleotide
auacguaguggcggaucau

SEQ ID NO: 791991 - RNA, 19 nt, Artificial Sequence
  Description of Artificial Sequence: Synthetic oligonucleotide
cuccggagcccaaacacau

SEQ ID NO: 791992 - RNA, 19 nt, Artificial Sequence
  Description of Artificial Sequence: Synthetic oligonucleotide
gggacagccucgcuuucuc

SEQ ID NO: 791993 - RNA, 19 nt, Artificial Sequence
  Description of Artificial Sequence: Synthetic oligonucleotide
cccaggauuagagaguaaa

SEQ ID NO: 791994 - RNA, 19 nt, Artificial Sequence
  Description of Artificial Sequence: Synthetic oligonucleotide
cugagaguuggcugcgggu

SEQ ID NO: 791995 - RNA, 19 nt, Artificial Sequence
  Description of Artificial Sequence: Synthetic oligonucleotide
cauaggcuugaagcgaagu

SEQ ID NO: 791996 - RNA, 19 nt, Artificial Sequence
  Description of Artificial Sequence: Synthetic oligonucleotide
gaaucauugggaggacguu

SEQ ID NO: 791997 - RNA, 19 nt, Artificial Sequence
  Description of Artificial Sequence: Synthetic oligonucleotide
gaccccgcucucauuuaga

SEQ ID NO: 791998 - RNA, 19 nt, Artificial Sequence
  Description of Artificial Sequence: Synthetic oligonucleotide
cuguuugggaauguauuuu

SEQ ID NO: 791999 - RNA, 19 nt, Artificial Sequence
  Description of Artificial Sequence: Synthetic oligonucleotide
gaagcucgggccccgccau

SEQ ID NO: 792000 - RNA, 19 nt, Artificial Sequence
  Description of Artificial Sequence: Synthetic oligonucleotide
ggacuguuuccagcugggc

SEQ ID NO: 792001 - RNA, 19 nt, Artificial Sequence
  Description of Artificial Sequence: Synthetic oligonucleotide
cugacacccuuacuagagu

SEQ ID NO: 792002 - RNA, 19 nt, Artificial Sequence
  Description of Artificial Sequence: Synthetic oligonucleotide
ggaguuuacuguggcugga

SEQ ID NO: 792003 - RNA, 19 nt, Artificial Sequence
  Description of Artificial Sequence: Synthetic oligonucleotide
cugcuucgaauuaggacuu

SEQ ID NO: 792004 - RNA, 19 nt, Artificial Sequence
  Description of Artificial Sequence: Synthetic oligonucleotide
gcuaugcacccgccagccc

SEQ ID NO: 792005 - RNA, 19 nt, Artificial Sequence
  Description of Artificial Sequence: Synthetic oligonucleotide
gggcacuuugaucuaccua

SEQ ID NO: 792006 - RNA, 19 nt, Artificial Sequence
  Description of Artificial Sequence: Synthetic oligonucleotide
gcauaggcuugaagcgaag

SEQ ID NO: 792007 - RNA, 19 nt, Artificial Sequence
  Description of Artificial Sequence: Synthetic oligonucleotide
gcuuaacaugcaaucacau

SEQ ID NO: 792008 - RNA, 19 nt, Artificial Sequence
  Description of Artificial Sequence: Synthetic oligonucleotide
ucgggacacccagcucucu

SEQ ID NO: 792009 - RNA, 19 nt, Artificial Sequence
  Description of Artificial Sequence: Synthetic oligonucleotide
cacccgccccucagacugc

SEQ ID NO: 792010 - RNA, 19 nt, Artificial Sequence
  Description of Artificial Sequence: Synthetic oligonucleotide
cucuugcccugacaguagu

SEQ ID NO: 792011 - RNA, 19 nt, Artificial Sequence
  Description of Artificial Sequence: Synthetic oligonucleotide
ccucgcuuucucgacggac

SEQ ID NO: 792012 - RNA, 19 nt, Artificial Sequence
  Description of Artificial Sequence: Synthetic oligonucleotide
cacagcggaccccgcucuc

SEQ ID NO: 792013 - RNA, 19 nt, Artificial Sequence
  Description of Artificial Sequence: Synthetic oligonucleotide
caaacacauugaggaagua

SEQ ID NO: 792014 - RNA, 19 nt, Artificial Sequence
  Description of Artificial Sequence: Synthetic oligonucleotide
ggagaugagaucacucguu

SEQ ID NO: 792015 - RNA, 19 nt, Artificial Sequence
  Description of Artificial Sequence: Synthetic oligonucleotide
cggaaguuacaagguuacg

SEQ ID NO: 792016 - RNA, 19 nt, Artificial Sequence
  Description of Artificial Sequence: Synthetic oligonucleotide
cccuuacuagagucaccug

SEQ ID NO: 792017 - RNA, 19 nt, Artificial Sequence
  Description of Artificial Sequence: Synthetic oligonucleotide
auggacgucugcaguucuu

SEQ ID NO: 792018 - RNA, 19 nt, Artificial Sequence
  Description of Artificial Sequence: Synthetic oligonucleotide
gcaucuagugugagcagcu

SEQ ID NO: 792019 - RNA, 19 nt, Artificial Sequence
  Description of Artificial Sequence: Synthetic oligonucleotide
auccaccgaucagaaucau

SEQ ID NO: 792020 - RNA, 19 nt, Artificial Sequence
  Description of Artificial Sequence: Synthetic oligonucleotide
ccaggauuagagaguaaau

SEQ ID NO: 792021 - RNA, 19 nt, Artificial Sequence
  Description of Artificial Sequence: Synthetic oligonucleotide
gcgaagugucaauggaaau

SEQ ID NO: 792022 - RNA, 19 nt, Artificial Sequence
  Description of Artificial Sequence: Synthetic oligonucleotide
cauugggaggacguugguu

SEQ ID NO: 792023 - RNA, 19 nt, Artificial Sequence
  Description of Artificial Sequence: Synthetic oligonucleotide
agcggaccccgcucucauu

SEQ ID NO: 792024 - RNA, 19 nt, Artificial Sequence
  Description of Artificial Sequence: Synthetic oligonucleotide
ccuaagaaaacaggaguuu

SEQ ID NO: 792025 - RNA, 19 nt, Artificial Sequence
  Description of Artificial Sequence: Synthetic oligonucleotide
ggcggaucaugcccacgaa

SEQ ID NO: 792026 - RNA, 19 nt, Artificial Sequence
  Description of Artificial Sequence: Synthetic oligonucleotide
gcuuucucgacggacuguu

SEQ ID NO: 792027 - RNA, 19 nt, Artificial Sequence
  Description of Artificial Sequence: Synthetic oligonucleotide
gcaccccgucacuucccug

SEQ ID NO: 792028 - RNA, 19 nt, Artificial Sequence
  Description of Artificial Sequence: Synthetic oligonucleotide
cgucaucgagugcccacug

SEQ ID NO: 792029 - RNA, 19 nt, Artificial Sequence
  Description of Artificial Sequence: Synthetic oligonucleotide
cuuucucgacggacuguuu

SEQ ID NO: 792030 - RNA, 19 nt, Artificial Sequence
  Description of Artificial Sequence: Synthetic oligonucleotide
gcggaccccgcucucauuu

SEQ ID NO: 792031 - RNA, 19 nt, Artificial Sequence
  Description of Artificial Sequence: Synthetic oligonucleotide
cgacggacuguuuccagcu

SEQ ID NO: 792032 - RNA, 19 nt, Artificial Sequence
  Description of Artificial Sequence: Synthetic oligonucleotide
ccacggaaguuacaagguu

SEQ ID NO: 792033 - RNA, 19 nt, Artificial Sequence
  Description of Artificial Sequence: Synthetic oligonucleotide
gccucgcuuucucgacgga

SEQ ID NO: 792034 - RNA, 19 nt, Artificial Sequence
  Description of Artificial Sequence: Synthetic oligonucleotide
cagcggaccccgcucucau

SEQ ID NO: 792035 - RNA, 19 nt, Artificial Sequence
  Description of Artificial Sequence: Synthetic oligonucleotide
ccgcucucauuuagaagau

SEQ ID NO: 792036 - RNA, 19 nt, Artificial Sequence
  Description of Artificial Sequence: Synthetic oligonucleotide
ggaggacguugguuacauu

SEQ ID NO: 792037 - RNA, 19 nt, Artificial Sequence
  Description of Artificial Sequence: Synthetic oligonucleotide
ccaccagaagcugcccucu

SEQ ID NO: 792038 - RNA, 19 nt, Artificial Sequence
  Description of Artificial Sequence: Synthetic oligonucleotide
ccccgccaucuucgcugag

SEQ ID NO: 792039 - RNA, 19 nt, Artificial Sequence
  Description of Artificial Sequence: Synthetic oligonucleotide
cggaccccgcucucauuua

SEQ ID NO: 792040 - RNA, 19 nt, Artificial Sequence
  Description of Artificial Sequence: Synthetic oligonucleotide
aauugagagacucagagac

SEQ ID NO: 792041 - RNA, 19 nt, Artificial Sequence
  Description of Artificial Sequence: Synthetic oligonucleotide
aacaugagcaucuuggcac

SEQ ID NO: 792042 - RNA, 19 nt, Artificial Sequence
  Description of Artificial Sequence: Synthetic oligonucleotide
aaaacuguagguccagccc

SEQ ID NO: 792043 - RNA, 19 nt, Artificial Sequence
  Description of Artificial Sequence: Synthetic oligonucleotide
aaacguagugaauugagag

SEQ ID NO: 792044 - RNA, 19 nt, Artificial Sequence
  Description of Artificial Sequence: Synthetic oligonucleotide
aaaggagaaaucguggcgc

SEQ ID NO: 792045 - RNA, 19 nt, Artificial Sequence
  Description of Artificial Sequence: Synthetic oligonucleotide
auuaugaccagucccaggg

SEQ ID NO: 792046 - RNA, 19 nt, Artificial Sequence
  Description of Artificial Sequence: Synthetic oligonucleotide
accgauaacacacugguuc

SEQ ID NO: 792047 - RNA, 19 nt, Artificial Sequence
  Description of Artificial Sequence: Synthetic oligonucleotide
aacgccgaucaucagaccg

SEQ ID NO: 792048 - RNA, 19 nt, Artificial Sequence
  Description of Artificial Sequence: Synthetic oligonucleotide
uucguugcuuagcagagcg

SEQ ID NO: 792049 - RNA, 19 nt, Artificial Sequence
  Description of Artificial Sequence: Synthetic oligonucleotide
gauauugcccuuaaguucc

SEQ ID NO: 792050 - RNA, 19 nt, Artificial Sequence
  Description of Artificial Sequence: Synthetic oligonucleotide
uaaaccagggucuagccgc

SEQ ID NO: 792051 - RNA, 19 nt, Artificial Sequence
  Description of Artificial Sequence: Synthetic oligonucleotide
aaucguggcgcguaguggg

SEQ ID NO: 792052 - RNA, 19 nt, Artificial Sequence
  Description of Artificial Sequence: Synthetic oligonucleotide
agaauacccggauauugcc

SEQ ID NO: 792053 - RNA, 19 nt, Artificial Sequence
  Description of Artificial Sequence: Synthetic oligonucleotide
ugaucucucauucugggca

SEQ ID NO: 792054 - RNA, 19 nt, Artificial Sequence
  Description of Artificial Sequence: Synthetic oligonucleotide
uaagguuaaaccagggucu

SEQ ID NO: 792055 - RNA, 19 nt, Artificial Sequence
  Description of Artificial Sequence: Synthetic oligonucleotide
cuaagguuaaaccaggguc

SEQ ID NO: 792056 - RNA, 19 nt, Artificial Sequence
  Description of Artificial Sequence: Synthetic oligonucleotide
agcaguaccgauaacacac

SEQ ID NO: 792057 - RNA, 19 nt, Artificial Sequence
  Description of Artificial Sequence: Synthetic oligonucleotide
uaacuugccacaaaacugu

SEQ ID NO: 792058 - RNA, 19 nt, Artificial Sequence
  Description of Artificial Sequence: Synthetic oligonucleotide
uuaaaccagggucuagccg

SEQ ID NO: 792059 - RNA, 19 nt, Artificial Sequence
  Description of Artificial Sequence: Synthetic oligonucleotide
aagaacagggcgcacccgg

SEQ ID NO: 792060 - RNA, 19 nt, Artificial Sequence
  Description of Artificial Sequence: Synthetic oligonucleotide
ucucucacaggaaacagga

SEQ ID NO: 792061 - RNA, 19 nt, Artificial Sequence
  Description of Artificial Sequence: Synthetic oligonucleotide
acguagugaauugagagac

SEQ ID NO: 792062 - RNA, 19 nt, Artificial Sequence
  Description of Artificial Sequence: Synthetic oligonucleotide
aagacacgggcacacagag

SEQ ID NO: 792063 - RNA, 19 nt, Artificial Sequence
  Description of Artificial Sequence: Synthetic oligonucleotide
guuucgguaaggcacgugg

SEQ ID NO: 792064 - RNA, 19 nt, Artificial Sequence
  Description of Artificial Sequence: Synthetic oligonucleotide
aacacacugguucaccuug

SEQ ID NO: 792065 - RNA, 19 nt, Artificial Sequence
  Description of Artificial Sequence: Synthetic oligonucleotide
ucaauuuuggucacugcac

SEQ ID NO: 792066 - RNA, 19 nt, Artificial Sequence
  Description of Artificial Sequence: Synthetic oligonucleotide
auuaauggacuguguuucc

SEQ ID NO: 792067 - RNA, 19 nt, Artificial Sequence
  Description of Artificial Sequence: Synthetic oligonucleotide
aauacccggauauugcccu

SEQ ID NO: 792068 - RNA, 19 nt, Artificial Sequence
  Description of Artificial Sequence: Synthetic oligonucleotide
aggguagccguccagugcc

SEQ ID NO: 792069 - RNA, 19 nt, Artificial Sequence
  Description of Artificial Sequence: Synthetic oligonucleotide
aaacuguagguccagcccu

SEQ ID NO: 792070 - RNA, 19 nt, Artificial Sequence
  Description of Artificial Sequence: Synthetic oligonucleotide
cacagcucgauucuggugg

SEQ ID NO: 792071 - RNA, 19 nt, Artificial Sequence
  Description of Artificial Sequence: Synthetic oligonucleotide
aacguagugaauugagaga

SEQ ID NO: 792072 - RNA, 19 nt, Artificial Sequence
  Description of Artificial Sequence: Synthetic oligonucleotide
uauuaauggacuguguuuc

SEQ ID NO: 792073 - RNA, 19 nt, Artificial Sequence
  Description of Artificial Sequence: Synthetic oligonucleotide
aaggcgaucacguucccca

SEQ ID NO: 792074 - RNA, 19 nt, Artificial Sequence
  Description of Artificial Sequence: Synthetic oligonucleotide
agugaauugagagacucag

SEQ ID NO: 792075 - RNA, 19 nt, Artificial Sequence
  Description of Artificial Sequence: Synthetic oligonucleotide
uagaucucuacguaacuug

SEQ ID NO: 792076 - RNA, 19 nt, Artificial Sequence
  Description of Artificial Sequence: Synthetic oligonucleotide
ucuugcucgacgaaucuca

SEQ ID NO: 792077 - RNA, 19 nt, Artificial Sequence
  Description of Artificial Sequence: Synthetic oligonucleotide
agcgacacacugcaggccc

SEQ ID NO: 792078 - RNA, 19 nt, Artificial Sequence
  Description of Artificial Sequence: Synthetic oligonucleotide
caacugacccuuuaagucc

SEQ ID NO: 792079 - RNA, 19 nt, Artificial Sequence
  Description of Artificial Sequence: Synthetic oligonucleotide
guaacuugccacaaaacug

SEQ ID NO: 792080 - RNA, 19 nt, Artificial Sequence
  Description of Artificial Sequence: Synthetic oligonucleotide
ugagcaguaccgauaacac

SEQ ID NO: 792081 - RNA, 19 nt, Artificial Sequence
  Description of Artificial Sequence: Synthetic oligonucleotide
uuucgguaaggcacguggg

SEQ ID NO: 792082 - RNA, 19 nt, Artificial Sequence
  Description of Artificial Sequence: Synthetic oligonucleotide
ucuuauuagccugagcagu

SEQ ID NO: 792083 - RNA, 19 nt, Artificial Sequence
  Description of Artificial Sequence: Synthetic oligonucleotide
caauuuuggucacugcacc

SEQ ID NO: 792084 - RNA, 19 nt, Artificial Sequence
  Description of Artificial Sequence: Synthetic oligonucleotide
agcaaaacguagugaauug

SEQ ID NO: 792085 - RNA, 19 nt, Artificial Sequence
  Description of Artificial Sequence: Synthetic oligonucleotide
ucgagaugaucucucauuc

SEQ ID NO: 792086 - RNA, 19 nt, Artificial Sequence
  Description of Artificial Sequence: Synthetic oligonucleotide
agaucucuacguaacuugc

SEQ ID NO: 792087 - RNA, 19 nt, Artificial Sequence
  Description of Artificial Sequence: Synthetic oligonucleotide
agggccuaagguuaaacca

SEQ ID NO: 792088 - RNA, 19 nt, Artificial Sequence
  Description of Artificial Sequence: Synthetic oligonucleotide
gaaaucguggcgcguagug

SEQ ID NO: 792089 - RNA, 19 nt, Artificial Sequence
  Description of Artificial Sequence: Synthetic oligonucleotide
aagaugcacacaggguagc

SEQ ID NO: 792090 - RNA, 19 nt, Artificial Sequence
  Description of Artificial Sequence: Synthetic oligonucleotide
cucacacucgccuugcccc

SEQ ID NO: 792091 - RNA, 19 nt, Artificial Sequence
  Description of Artificial Sequence: Synthetic oligonucleotide
ugaggucacacaacugacc

SEQ ID NO: 792092 - RNA, 19 nt, Artificial Sequence
  Description of Artificial Sequence: Synthetic oligonucleotide
aaaucguggcgcguagugg

SEQ ID NO: 792093 - RNA, 19 nt, Artificial Sequence
  Description of Artificial Sequence: Synthetic oligonucleotide
aaacaggaacauagcgugc

SEQ ID NO: 792094 - RNA, 19 nt, Artificial Sequence
  Description of Artificial Sequence: Synthetic oligonucleotide
gaccgugaaaggcuaaggc

SEQ ID NO: 792095 - RNA, 19 nt, Artificial Sequence
  Description of Artificial Sequence: Synthetic oligonucleotide
gauucguugcuuagcagag

SEQ ID NO: 792096 - RNA, 19 nt, Artificial Sequence
  Description of Artificial Sequence: Synthetic oligonucleotide
ucgacgaaucucacacucg

SEQ ID NO: 792097 - RNA, 19 nt, Artificial Sequence
  Description of Artificial Sequence: Synthetic oligonucleotide
gacccuuuaagucccaguc

SEQ ID NO: 792098 - RNA, 19 nt, Artificial Sequence
  Description of Artificial Sequence: Synthetic oligonucleotide
acgugggacuccuuauugc

SEQ ID NO: 792099 - RNA, 19 nt, Artificial Sequence
  Description of Artificial Sequence: Synthetic oligonucleotide
ucgaacgccgaucaucaga

SEQ ID NO: 792100 - RNA, 19 nt, Artificial Sequence
  Description of Artificial Sequence: Synthetic oligonucleotide
guuaaggggagcgacacac

SEQ ID NO: 792101 - RNA, 19 nt, Artificial Sequence
  Description of Artificial Sequence: Synthetic oligonucleotide
aucucuacguaacuugcca

SEQ ID NO: 792102 - RNA, 19 nt, Artificial Sequence
  Description of Artificial Sequence: Synthetic oligonucleotide
auaacacacugguucaccu

SEQ ID NO: 792103 - RNA, 19 nt, Artificial Sequence
  Description of Artificial Sequence: Synthetic oligonucleotide
cuuaccaggccucuuccgc

SEQ ID NO: 792104 - RNA, 19 nt, Artificial Sequence
  Description of Artificial Sequence: Synthetic oligonucleotide
cuugcguccgcacacuggc

SEQ ID NO: 792105 - RNA, 19 nt, Artificial Sequence
  Description of Artificial Sequence: Synthetic oligonucleotide
gauaacacacugguucacc

SEQ ID NO: 792106 - RNA, 19 nt, Artificial Sequence
  Description of Artificial Sequence: Synthetic oligonucleotide
agagaagagaugccgcaug

SEQ ID NO: 792107 - RNA, 19 nt, Artificial Sequence
  Description of Artificial Sequence: Synthetic oligonucleotide
cucucucacaggaaacagg

SEQ ID NO: 792108 - RNA, 19 nt, Artificial Sequence
  Description of Artificial Sequence: Synthetic oligonucleotide
uuuaagucccagucaggac

SEQ ID NO: 792109 - RNA, 19 nt, Artificial Sequence
  Description of Artificial Sequence: Synthetic oligonucleotide
aguaccgauaacacacugg

SEQ ID NO: 792110 - RNA, 19 nt, Artificial Sequence
  Description of Artificial Sequence: Synthetic oligonucleotide
gaauugagagacucagaga

SEQ ID NO: 792111 - RNA, 19 nt, Artificial Sequence
  Description of Artificial Sequence: Synthetic oligonucleotide
ucucacacucgccuugccc

SEQ ID NO: 792112 - RNA, 19 nt, Artificial Sequence
  Description of Artificial Sequence: Synthetic oligonucleotide
aaggggagcgacacacugc

SEQ ID NO: 792113 - RNA, 19 nt, Artificial Sequence
  Description of Artificial Sequence: Synthetic oligonucleotide
uucgguaaggcacguggga

SEQ ID NO: 792114 - RNA, 19 nt, Artificial Sequence
  Description of Artificial Sequence: Synthetic oligonucleotide
guaagcuccucacugccug

SEQ ID NO: 792115 - RNA, 19 nt, Artificial Sequence
  Description of Artificial Sequence: Synthetic oligonucleotide
uguccguuucuuugcaggc

SEQ ID NO: 792116 - RNA, 19 nt, Artificial Sequence
  Description of Artificial Sequence: Synthetic oligonucleotide
uuuggagcgggauguguca

SEQ ID NO: 792117 - RNA, 19 nt, Artificial Sequence
  Description of Artificial Sequence: Synthetic oligonucleotide
cauuaugaccagucccagg

SEQ ID NO: 792118 - RNA, 19 nt, Artificial Sequence
  Description of Artificial Sequence: Synthetic oligonucleotide
gauccaacggcagugcaac

SEQ ID NO: 792119 - RNA, 19 nt, Artificial Sequence
  Description of Artificial Sequence: Synthetic oligonucleotide
acugauccaacggcagugc

SEQ ID NO: 792120 - RNA, 19 nt, Artificial Sequence
  Description of Artificial Sequence: Synthetic oligonucleotide
gucucggacggucucauug

SEQ ID NO: 792121 - RNA, 19 nt, Artificial Sequence
  Description of Artificial Sequence: Synthetic oligonucleotide
ccgugaaaggcuaaggcgg

SEQ ID NO: 792122 - RNA, 19 nt, Artificial Sequence
  Description of Artificial Sequence: Synthetic oligonucleotide
aggguagacagacugcuau

SEQ ID NO: 792123 - RNA, 19 nt, Artificial Sequence
  Description of Artificial Sequence: Synthetic oligonucleotide
agcucgauucuggugggcc

SEQ ID NO: 792124 - RNA, 19 nt, Artificial Sequence
  Description of Artificial Sequence: Synthetic oligonucleotide
ucucuacguaacuugccac

SEQ ID NO: 792125 - RNA, 19 nt, Artificial Sequence
  Description of Artificial Sequence: Synthetic oligonucleotide
gaauacccggauauugccc

SEQ ID NO: 792126 - RNA, 19 nt, Artificial Sequence
  Description of Artificial Sequence: Synthetic oligonucleotide
cucgacgaaucucacacuc

SEQ ID NO: 792127 - RNA, 19 nt, Artificial Sequence
  Description of Artificial Sequence: Synthetic oligonucleotide
gugacaguaagcuccucac

SEQ ID NO: 792128 - RNA, 19 nt, Artificial Sequence
  Description of Artificial Sequence: Synthetic oligonucleotide
ugcuauuaauggacugugu

SEQ ID NO: 792129 - RNA, 19 nt, Artificial Sequence
  Description of Artificial Sequence: Synthetic oligonucleotide
cauagcgugcauuggugac

SEQ ID NO: 792130 - RNA, 19 nt, Artificial Sequence
  Description of Artificial Sequence: Synthetic oligonucleotide
guaaccuccucucuugcuc

SEQ ID NO: 792131 - RNA, 19 nt, Artificial Sequence
  Description of Artificial Sequence: Synthetic oligonucleotide
cuuuaagucccagucagga

SEQ ID NO: 792132 - RNA, 19 nt, Artificial Sequence
  Description of Artificial Sequence: Synthetic oligonucleotide
ugacaguaagcuccucacu

SEQ ID NO: 792133 - RNA, 19 nt, Artificial Sequence
  Description of Artificial Sequence: Synthetic oligonucleotide
cucguguccguuucuuugc

SEQ ID NO: 792134 - RNA, 19 nt, Artificial Sequence
  Description of Artificial Sequence: Synthetic oligonucleotide
cuuuggagcgggauguguc

SEQ ID NO: 792135 - RNA, 19 nt, Artificial Sequence
  Description of Artificial Sequence: Synthetic oligonucleotide
aggggagcgacacacugca

SEQ ID NO: 792136 - RNA, 19 nt, Artificial Sequence
  Description of Artificial Sequence: Synthetic oligonucleotide
cagugcaaccacgaggucc

SEQ ID NO: 792137 - RNA, 19 nt, Artificial Sequence
  Description of Artificial Sequence: Synthetic oligonucleotide
ucggacggucucauuguag

SEQ ID NO: 792138 - RNA, 19 nt, Artificial Sequence
  Description of Artificial Sequence: Synthetic oligonucleotide
agggccauuaugaccaguc

SEQ ID NO: 792139 - RNA, 19 nt, Artificial Sequence
  Description of Artificial Sequence: Synthetic oligonucleotide
ucguugcuuagcagagcgg

SEQ ID NO: 792140 - RNA, 19 nt, Artificial Sequence
  Description of Artificial Sequence: Synthetic oligonucleotide
ucuguccguaggcaaagau

SEQ ID NO: 792141 - RNA, 19 nt, Artificial Sequence
  Description of Artificial Sequence: Synthetic oligonucleotide
guaccgauaacacacuggu

SEQ ID NO: 792142 - RNA, 19 nt, Artificial Sequence
  Description of Artificial Sequence: Synthetic oligonucleotide
ucgccuugccccuuccggg

SEQ ID NO: 792143 - RNA, 19 nt, Artificial Sequence
  Description of Artificial Sequence: Synthetic oligonucleotide
acgcuuaccaggccucuuc

SEQ ID NO: 792144 - RNA, 19 nt, Artificial Sequence
  Description of Artificial Sequence: Synthetic oligonucleotide
cucccgguagcauuucagc

SEQ ID NO: 792145 - RNA, 19 nt, Artificial Sequence
  Description of Artificial Sequence: Synthetic oligonucleotide
cugagcaguaccgauaaca

SEQ ID NO: 792146 - RNA, 19 nt, Artificial Sequence
  Description of Artificial Sequence: Synthetic oligonucleotide
uguuucccgaaggcgauca

SEQ ID NO: 792147 - RNA, 19 nt, Artificial Sequence
  Description of Artificial Sequence: Synthetic oligonucleotide
caugcucuccagaaaucug

SEQ ID NO: 792148 - RNA, 19 nt, Artificial Sequence
  Description of Artificial Sequence: Synthetic oligonucleotide
uguguuucccgaaggcgau

SEQ ID NO: 792149 - RNA, 19 nt, Artificial Sequence
  Description of Artificial Sequence: Synthetic oligonucleotide
gaucucuacguaacuugcc

SEQ ID NO: 792150 - RNA, 19 nt, Artificial Sequence
  Description of Artificial Sequence: Synthetic oligonucleotide
ggccauuaugaccaguccc

SEQ ID NO: 792151 - RNA, 19 nt, Artificial Sequence
  Description of Artificial Sequence: Synthetic oligonucleotide
uccgcuugcguccgcacac

SEQ ID NO: 792152 - RNA, 19 nt, Artificial Sequence
  Description of Artificial Sequence: Synthetic oligonucleotide
aaccacgagguccugucuu

SEQ ID NO: 792153 - RNA, 19 nt, Artificial Sequence
  Description of Artificial Sequence: Synthetic oligonucleotide
acguaacuugccacaaaac

SEQ ID NO: 792154 - RNA, 19 nt, Artificial Sequence
  Description of Artificial Sequence: Synthetic oligonucleotide
acuucgagaugaucucuca

SEQ ID NO: 792155 - RNA, 19 nt, Artificial Sequence
  Description of Artificial Sequence: Synthetic oligonucleotide
acccagcgaguucugcagc

SEQ ID NO: 792156 - RNA, 19 nt, Artificial Sequence
  Description of Artificial Sequence: Synthetic oligonucleotide
cucgccuugccccuuccgg

SEQ ID NO: 792157 - RNA, 19 nt, Artificial Sequence
  Description of Artificial Sequence: Synthetic oligonucleotide
ucucggacggucucauugu

SEQ ID NO: 792158 - RNA, 19 nt, Artificial Sequence
  Description of Artificial Sequence: Synthetic oligonucleotide
ccuuggaagcaaaacguag

SEQ ID NO: 792159 - RNA, 19 nt, Artificial Sequence
  Description of Artificial Sequence: Synthetic oligonucleotide
uuaaggggagcgacacacu

SEQ ID NO: 792160 - RNA, 19 nt, Artificial Sequence
  Description of Artificial Sequence: Synthetic oligonucleotide
acccuuuaagucccaguca

SEQ ID NO: 792161 - RNA, 19 nt, Artificial Sequence
  Description of Artificial Sequence: Synthetic oligonucleotide
cacugcuccgcuugcgucc

SEQ ID NO: 792162 - RNA, 19 nt, Artificial Sequence
  Description of Artificial Sequence: Synthetic oligonucleotide
ugacccuuuaagucccagu

SEQ ID NO: 792163 - RNA, 19 nt, Artificial Sequence
  Description of Artificial Sequence: Synthetic oligonucleotide
uuauuagccugagcaguac

SEQ ID NO: 792164 - RNA, 19 nt, Artificial Sequence
  Description of Artificial Sequence: Synthetic oligonucleotide
ggucuagccgcucacuccc

SEQ ID NO: 792165 - RNA, 19 nt, Artificial Sequence
  Description of Artificial Sequence: Synthetic oligonucleotide
cuuggaagcaaaacguagu

SEQ ID NO: 792166 - RNA, 19 nt, Artificial Sequence
  Description of Artificial Sequence: Synthetic oligonucleotide
cacgugggacuccuuauug

SEQ ID NO: 792167 - RNA, 19 nt, Artificial Sequence
  Description of Artificial Sequence: Synthetic oligonucleotide
cagugcgggccacagcucg

SEQ ID NO: 792168 - RNA, 19 nt, Artificial Sequence
  Description of Artificial Sequence: Synthetic oligonucleotide
ucgguaaggcacgugggac

SEQ ID NO: 792169 - RNA, 19 nt, Artificial Sequence
  Description of Artificial Sequence: Synthetic oligonucleotide
gaugccgcauggcccgagg

SEQ ID NO: 792170 - RNA, 19 nt, Artificial Sequence
  Description of Artificial Sequence: Synthetic oligonucleotide
gagcaguaccgauaacaca

SEQ ID NO: 792171 - RNA, 19 nt, Artificial Sequence
  Description of Artificial Sequence: Synthetic oligonucleotide
cuuauuagccugagcagua

SEQ ID NO: 792172 - RNA, 19 nt, Artificial Sequence
  Description of Artificial Sequence: Synthetic oligonucleotide
agcgggaugugucaauuuu

SEQ ID NO: 792173 - RNA, 19 nt, Artificial Sequence
  Description of Artificial Sequence: Synthetic oligonucleotide
ccggucaaaggagaaaucg

SEQ ID NO: 792174 - RNA, 19 nt, Artificial Sequence
  Description of Artificial Sequence: Synthetic oligonucleotide
ucguguccguuucuuugca

SEQ ID NO: 792175 - RNA, 19 nt, Artificial Sequence
  Description of Artificial Sequence: Synthetic oligonucleotide
gaagcccuugguucuccug

SEQ ID NO: 792176 - RNA, 19 nt, Artificial Sequence
  Description of Artificial Sequence: Synthetic oligonucleotide
agaacagggcgcacccggc

SEQ ID NO: 792177 - RNA, 19 nt, Artificial Sequence
  Description of Artificial Sequence: Synthetic oligonucleotide
uagcccguggagccgguca

SEQ ID NO: 792178 - RNA, 19 nt, Artificial Sequence
  Description of Artificial Sequence: Synthetic oligonucleotide
cuugcucgacgaaucucac

SEQ ID NO: 792179 - RNA, 19 nt, Artificial Sequence
  Description of Artificial Sequence: Synthetic oligonucleotide
uggccaaugccuuccgcuc

SEQ ID NO: 792180 - RNA, 19 nt, Artificial Sequence
  Description of Artificial Sequence: Synthetic oligonucleotide
aagguuaaaccagggucua

SEQ ID NO: 792181 - RNA, 19 nt, Artificial Sequence
  Description of Artificial Sequence: Synthetic oligonucleotide
auagcgugcauuggugaca

SEQ ID NO: 792182 - RNA, 19 nt, Artificial Sequence
  Description of Artificial Sequence: Synthetic oligonucleotide
gggccuaagguuaaaccag

SEQ ID NO: 792183 - RNA, 19 nt, Artificial Sequence
  Description of Artificial Sequence: Synthetic oligonucleotide
ugcuuagcagagcggcuuc

SEQ ID NO: 792184 - RNA, 19 nt, Artificial Sequence
  Description of Artificial Sequence: Synthetic oligonucleotide
ugggaacacccggucaaag

SEQ ID NO: 792185 - RNA, 19 nt, Artificial Sequence
  Description of Artificial Sequence: Synthetic oligonucleotide
caguaccgauaacacacug

SEQ ID NO: 792186 - RNA, 19 nt, Artificial Sequence
  Description of Artificial Sequence: Synthetic oligonucleotide
uaacacacugguucaccuu

SEQ ID NO: 792187 - RNA, 19 nt, Artificial Sequence
  Description of Artificial Sequence: Synthetic oligonucleotide
caccuuggaagcaaaacgu

SEQ ID NO: 792188 - RNA, 19 nt, Artificial Sequence
  Description of Artificial Sequence: Synthetic oligonucleotide
uugcucgacgaaucucaca

SEQ ID NO: 792189 - RNA, 19 nt, Artificial Sequence
  Description of Artificial Sequence: Synthetic oligonucleotide
augaccagucccaggguag

SEQ ID NO: 792190 - RNA, 19 nt, Artificial Sequence
  Description of Artificial Sequence: Synthetic oligonucleotide
ucccugaaaggggcgggcg

SEQ ID NO: 792191 - RNA, 19 nt, Artificial Sequence
  Description of Artificial Sequence: Synthetic oligonucleotide
caacggcagugcaaccacg

SEQ ID NO: 792192 - RNA, 19 nt, Artificial Sequence
  Description of Artificial Sequence: Synthetic oligonucleotide
agucggguggccaaugccu

SEQ ID NO: 792193 - RNA, 19 nt, Artificial Sequence
  Description of Artificial Sequence: Synthetic oligonucleotide
agagcggcuucugaggccu

SEQ ID NO: 792194 - RNA, 19 nt, Artificial Sequence
  Description of Artificial Sequence: Synthetic oligonucleotide
uaaggcacgugggacuccu

SEQ ID NO: 792195 - RNA, 19 nt, Artificial Sequence
  Description of Artificial Sequence: Synthetic oligonucleotide
guagacagacugcuauuaa

SEQ ID NO: 792196 - RNA, 19 nt, Artificial Sequence
  Description of Artificial Sequence: Synthetic oligonucleotide
ugugucaauuuuggucacu

SEQ ID NO: 792197 - RNA, 19 nt, Artificial Sequence
  Description of Artificial Sequence: Synthetic oligonucleotide
gaaggcgaucacguucccc

SEQ ID NO: 792198 - RNA, 19 nt, Artificial Sequence
  Description of Artificial Sequence: Synthetic oligonucleotide
ugaaaggcuaaggcggguu

SEQ ID NO: 792199 - RNA, 19 nt, Artificial Sequence
  Description of Artificial Sequence: Synthetic oligonucleotide
ugcggccugcuccugggcu

SEQ ID NO: 792200 - RNA, 19 nt, Artificial Sequence
  Description of Artificial Sequence: Synthetic oligonucleotide
cagucggguggccaaugcc

SEQ ID NO: 792201 - RNA, 19 nt, Artificial Sequence
  Description of Artificial Sequence: Synthetic oligonucleotide
cuagccgcucacucccagc

SEQ ID NO: 792202 - RNA, 19 nt, Artificial Sequence
  Description of Artificial Sequence: Synthetic oligonucleotide
cgggaugugucaauuuugg

SEQ ID NO: 792203 - RNA, 19 nt, Artificial Sequence
  Description of Artificial Sequence: Synthetic oligonucleotide
acacugguucaccuuggaa

SEQ ID NO: 792204 - RNA, 19 nt, Artificial Sequence
  Description of Artificial Sequence: Synthetic oligonucleotide
gaccagcauggaaaucucc

SEQ ID NO: 792205 - RNA, 19 nt, Artificial Sequence
  Description of Artificial Sequence: Synthetic oligonucleotide
acaagguuaaggggagcga

SEQ ID NO: 792206 - RNA, 19 nt, Artificial Sequence
  Description of Artificial Sequence: Synthetic oligonucleotide
gccaguaaggucaccuggg

SEQ ID NO: 792207 - RNA, 19 nt, Artificial Sequence
  Description of Artificial Sequence: Synthetic oligonucleotide
gccgacuggaccagcaugg

SEQ ID NO: 792208 - RNA, 19 nt, Artificial Sequence
  Description of Artificial Sequence: Synthetic oligonucleotide
cagaccgugaaaggcuaag

SEQ ID NO: 792209 - RNA, 19 nt, Artificial Sequence
  Description of Artificial Sequence: Synthetic oligonucleotide
ucacacucgccuugccccu

SEQ ID NO: 792210 - RNA, 19 nt, Artificial Sequence
  Description of Artificial Sequence: Synthetic oligonucleotide
ucagaccgugaaaggcuaa

SEQ ID NO: 792211 - RNA, 19 nt, Artificial Sequence
  Description of Artificial Sequence: Synthetic oligonucleotide
agacugcuauuaauggacu

SEQ ID NO: 792212 - RNA, 19 nt, Artificial Sequence
  Description of Artificial Sequence: Synthetic oligonucleotide
cagccaguaaggucaccug

SEQ ID NO: 792213 - RNA, 19 nt, Artificial Sequence
  Description of Artificial Sequence: Synthetic oligonucleotide
ucagggucgaacgccgauc

SEQ ID NO: 792214 - RNA, 19 nt, Artificial Sequence
  Description of Artificial Sequence: Synthetic oligonucleotide
ugguucaccuuggaagcaa

SEQ ID NO: 792215 - RNA, 19 nt, Artificial Sequence
  Description of Artificial Sequence: Synthetic oligonucleotide
acacaggguagccguccag

SEQ ID NO: 792216 - RNA, 19 nt, Artificial Sequence
  Description of Artificial Sequence: Synthetic oligonucleotide
cugccggucuguccguagg

SEQ ID NO: 792217 - RNA, 19 nt, Artificial Sequence
  Description of Artificial Sequence: Synthetic oligonucleotide
acugccggucuguccguag

SEQ ID NO: 792218 - RNA, 19 nt, Artificial Sequence
  Description of Artificial Sequence: Synthetic oligonucleotide
ggucacugcacccaggccu

SEQ ID NO: 792219 - RNA, 19 nt, Artificial Sequence
  Description of Artificial Sequence: Synthetic oligonucleotide
aggacgcuuaccaggccuc

SEQ ID NO: 792220 - RNA, 19 nt, Artificial Sequence
  Description of Artificial Sequence: Synthetic oligonucleotide
cagagcggcuucugaggcc

SEQ ID NO: 792221 - RNA, 19 nt, Artificial Sequence
  Description of Artificial Sequence: Synthetic oligonucleotide
ggcccgagggaucagcccc

SEQ ID NO: 792222 - RNA, 19 nt, Artificial Sequence
  Description of Artificial Sequence: Synthetic oligonucleotide
ccaagacacgggcacacag

SEQ ID NO: 792223 - RNA, 19 nt, Artificial Sequence
  Description of Artificial Sequence: Synthetic oligonucleotide
ugcacccaggccucguguc

SEQ ID NO: 792224 - RNA, 19 nt, Artificial Sequence
  Description of Artificial Sequence: Synthetic oligonucleotide
uaccgauaacacacugguu

SEQ ID NO: 792225 - RNA, 19 nt, Artificial Sequence
  Description of Artificial Sequence: Synthetic oligonucleotide
gaacgccgaucaucagacc

SEQ ID NO: 792226 - RNA, 19 nt, Artificial Sequence
  Description of Artificial Sequence: Synthetic oligonucleotide
uuagggccuuucugagcug

SEQ ID NO: 792227 - RNA, 19 nt, Artificial Sequence
  Description of Artificial Sequence: Synthetic oligonucleotide
gaacagggcgcacccggca

SEQ ID NO: 792228 - RNA, 19 nt, Artificial Sequence
  Description of Artificial Sequence: Synthetic oligonucleotide
cagcacugauccaacggca

SEQ ID NO: 792229 - RNA, 19 nt, Artificial Sequence
  Description of Artificial Sequence: Synthetic oligonucleotide
acgagguccugucuucuua

SEQ ID NO: 792230 - RNA, 19 nt, Artificial Sequence
  Description of Artificial Sequence: Synthetic oligonucleotide
uugcguccgcacacuggcc

SEQ ID NO: 792231 - RNA, 19 nt, Artificial Sequence
  Description of Artificial Sequence: Synthetic oligonucleotide
acacucgccuugccccuuc

SEQ ID NO: 792232 - RNA, 19 nt, Artificial Sequence
  Description of Artificial Sequence: Synthetic oligonucleotide
ccucguguccguuucuuug

SEQ ID NO: 792233 - RNA, 19 nt, Artificial Sequence
  Description of Artificial Sequence: Synthetic oligonucleotide
ggucgaacgccgaucauca

SEQ ID NO: 792234 - RNA, 19 nt, Artificial Sequence
  Description of Artificial Sequence: Synthetic oligonucleotide
gcuauuaauggacuguguu

SEQ ID NO: 792235 - RNA, 19 nt, Artificial Sequence
  Description of Artificial Sequence: Synthetic oligonucleotide
cgugaaaggcuaaggcggg

SEQ ID NO: 792236 - RNA, 19 nt, Artificial Sequence
  Description of Artificial Sequence: Synthetic oligonucleotide
cuguagguccagcccuggc

SEQ ID NO: 792237 - RNA, 19 nt, Artificial Sequence
  Description of Artificial Sequence: Synthetic oligonucleotide
agaaaucguggcgcguagu

SEQ ID NO: 792238 - RNA, 19 nt, Artificial Sequence
  Description of Artificial Sequence: Synthetic oligonucleotide
cagggucgaacgccgauca

SEQ ID NO: 792239 - RNA, 19 nt, Artificial Sequence
  Description of Artificial Sequence: Synthetic oligonucleotide
gugaauugagagacucaga

SEQ ID NO: 792240 - RNA, 19 nt, Artificial Sequence
  Description of Artificial Sequence: Synthetic oligonucleotide
gagcgacacacugcaggcc

SEQ ID NO: 792241 - RNA, 19 nt, Artificial Sequence
  Description of Artificial Sequence: Synthetic oligonucleotide
cuuccgggucccaguggcc

SEQ ID NO: 792242 - RNA, 19 nt, Artificial Sequence
  Description of Artificial Sequence: Synthetic oligonucleotide
cguugcuuagcagagcggc

SEQ ID NO: 792243 - RNA, 19 nt, Artificial Sequence
  Description of Artificial Sequence: Synthetic oligonucleotide
accuccgauucguugcuua

SEQ ID NO: 792244 - RNA, 19 nt, Artificial Sequence
  Description of Artificial Sequence: Synthetic oligonucleotide
ccaguaaggucaccugggc

SEQ ID NO: 792245 - RNA, 19 nt, Artificial Sequence
  Description of Artificial Sequence: Synthetic oligonucleotide
gggccauuaugaccagucc

SEQ ID NO: 792246 - RNA, 19 nt, Artificial Sequence
  Description of Artificial Sequence: Synthetic oligonucleotide
ugcaaccacgagguccugu

SEQ ID NO: 792247 - RNA, 19 nt, Artificial Sequence
  Description of Artificial Sequence: Synthetic oligonucleotide
uagccguccagugccgacu

SEQ ID NO: 792248 - RNA, 19 nt, Artificial Sequence
  Description of Artificial Sequence: Synthetic oligonucleotide
ccgcacacuggccagcucc

SEQ ID NO: 792249 - RNA, 19 nt, Artificial Sequence
  Description of Artificial Sequence: Synthetic oligonucleotide
gcaaaacguagugaauuga

SEQ ID NO: 792250 - RNA, 19 nt, Artificial Sequence
  Description of Artificial Sequence: Synthetic oligonucleotide
aggcacgugggacuccuua

SEQ ID NO: 792251 - RNA, 19 nt, Artificial Sequence
  Description of Artificial Sequence: Synthetic oligonucleotide
cgauucguugcuuagcaga

SEQ ID NO: 792252 - RNA, 19 nt, Artificial Sequence
  Description of Artificial Sequence: Synthetic oligonucleotide
guagccguccagugccgac

SEQ ID NO: 792253 - RNA, 19 nt, Artificial Sequence
  Description of Artificial Sequence: Synthetic oligonucleotide
gggaaauguucacaaacau

SEQ ID NO: 792254 - RNA, 19 nt, Artificial Sequence
  Description of Artificial Sequence: Synthetic oligonucleotide
aacuugccacaaaacugua

SEQ ID NO: 792255 - RNA, 19 nt, Artificial Sequence
  Description of Artificial Sequence: Synthetic oligonucleotide
ugcggucuucugccgcaga

SEQ ID NO: 792256 - RNA, 19 nt, Artificial Sequence
  Description of Artificial Sequence: Synthetic oligonucleotide
uccagucggguggccaaug

SEQ ID NO: 792257 - RNA, 19 nt, Artificial Sequence
  Description of Artificial Sequence: Synthetic oligonucleotide
accuuggaagcaaaacgua

SEQ ID NO: 792258 - RNA, 19 nt, Artificial Sequence
  Description of Artificial Sequence: Synthetic oligonucleotide
uggagcgggaugugucaau

SEQ ID NO: 792259 - RNA, 19 nt, Artificial Sequence
  Description of Artificial Sequence: Synthetic oligonucleotide
gucgaacgccgaucaucag

SEQ ID NO: 792260 - RNA, 19 nt, Artificial Sequence
  Description of Artificial Sequence: Synthetic oligonucleotide
gguagacagacugcuauua

SEQ ID NO: 792261 - RNA, 19 nt, Artificial Sequence
  Description of Artificial Sequence: Synthetic oligonucleotide
ucuggucagggccccucuu

SEQ ID NO: 792262 - RNA, 19 nt, Artificial Sequence
  Description of Artificial Sequence: Synthetic oligonucleotide
uuguggagucggcggcgcu

SEQ ID NO: 792263 - RNA, 19 nt, Artificial Sequence
  Description of Artificial Sequence: Synthetic oligonucleotide
aucagaccgugaaaggcua

SEQ ID NO: 792264 - RNA, 19 nt, Artificial Sequence
  Description of Artificial Sequence: Synthetic oligonucleotide
guggagucggcggcgcucc

SEQ ID NO: 792265 - RNA, 19 nt, Artificial Sequence
  Description of Artificial Sequence: Synthetic oligonucleotide
ucguggcgcguagugggug

SEQ ID NO: 792266 - RNA, 19 nt, Artificial Sequence
  Description of Artificial Sequence: Synthetic oligonucleotide
ccgauaacacacugguuca

SEQ ID NO: 792267 - RNA, 19 nt, Artificial Sequence
  Description of Artificial Sequence: Synthetic oligonucleotide
cugauccaacggcagugca

SEQ ID NO: 792268 - RNA, 19 nt, Artificial Sequence
  Description of Artificial Sequence: Synthetic oligonucleotide
acgccgaucaucagaccgu

SEQ ID NO: 792269 - RNA, 19 nt, Artificial Sequence
  Description of Artificial Sequence: Synthetic oligonucleotide
cguaacuugccacaaaacu

SEQ ID NO: 792270 - RNA, 19 nt, Artificial Sequence
  Description of Artificial Sequence: Synthetic oligonucleotide
ccaacggcagugcaaccac

SEQ ID NO: 792271 - RNA, 19 nt, Artificial Sequence
  Description of Artificial Sequence: Synthetic oligonucleotide
aggagaaaucguggcgcgu

SEQ ID NO: 792272 - RNA, 19 nt, Artificial Sequence
  Description of Artificial Sequence: Synthetic oligonucleotide
cggcagugcaaccacgagg

SEQ ID NO: 792273 - RNA, 19 nt, Artificial Sequence
  Description of Artificial Sequence: Synthetic oligonucleotide
cucccugaaaggggcgggc

SEQ ID NO: 792274 - RNA, 19 nt, Artificial Sequence
  Description of Artificial Sequence: Synthetic oligonucleotide
gcgggaugugucaauuuug

SEQ ID NO: 792275 - RNA, 19 nt, Artificial Sequence
  Description of Artificial Sequence: Synthetic oligonucleotide
ggcccugcggcugcgacag

SEQ ID NO: 792276 - RNA, 19 nt, Artificial Sequence
  Description of Artificial Sequence: Synthetic oligonucleotide
gugggacuccuuauugcuc

SEQ ID NO: 792277 - RNA, 19 nt, Artificial Sequence
  Description of Artificial Sequence: Synthetic oligonucleotide
ccuccgauucguugcuuag

SEQ ID NO: 792278 - RNA, 19 nt, Artificial Sequence
  Description of Artificial Sequence: Synthetic oligonucleotide
gguguuccgcucugucccc

SEQ ID NO: 792279 - RNA, 19 nt, Artificial Sequence
  Description of Artificial Sequence: Synthetic oligonucleotide
gcuugcguccgcacacugg

SEQ ID NO: 792280 - RNA, 19 nt, Artificial Sequence
  Description of Artificial Sequence: Synthetic oligonucleotide
gggucgaacgccgaucauc

SEQ ID NO: 792281 - RNA, 19 nt, Artificial Sequence
  Description of Artificial Sequence: Synthetic oligonucleotide
guagugggugcaggcgccc

SEQ ID NO: 792282 - RNA, 19 nt, Artificial Sequence
  Description of Artificial Sequence: Synthetic oligonucleotide
acccggauauugcccuuaa

SEQ ID NO: 792283 - RNA, 19 nt, Artificial Sequence
  Description of Artificial Sequence: Synthetic oligonucleotide
gaccagucccaggguagac

SEQ ID NO: 792284 - RNA, 19 nt, Artificial Sequence
  Description of Artificial Sequence: Synthetic oligonucleotide
guaaggcacgugggacucc

SEQ ID NO: 792285 - RNA, 19 nt, Artificial Sequence
  Description of Artificial Sequence: Synthetic oligonucleotide
ccgaucaucagaccgugaa

SEQ ID NO: 792286 - RNA, 19 nt, Artificial Sequence
  Description of Artificial Sequence: Synthetic oligonucleotide
gcgcuccaucucuagcccg

SEQ ID NO: 792287 - RNA, 19 nt, Artificial Sequence
  Description of Artificial Sequence: Synthetic oligonucleotide
caguaaggucaccugggcu

SEQ ID NO: 792288 - RNA, 19 nt, Artificial Sequence
  Description of Artificial Sequence: Synthetic oligonucleotide
ccgcucuuccugcaauucc

SEQ ID NO: 792289 - RNA, 19 nt, Artificial Sequence
  Description of Artificial Sequence: Synthetic oligonucleotide
auacccggauauugcccuu

SEQ ID NO: 792290 - RNA, 19 nt, Artificial Sequence
  Description of Artificial Sequence: Synthetic oligonucleotide
ccgauucguugcuuagcag

SEQ ID NO: 792291 - RNA, 19 nt, Artificial Sequence
  Description of Artificial Sequence: Synthetic oligonucleotide
ggcgcguagugggugcagg

SEQ ID NO: 792292 - RNA, 19 nt, Artificial Sequence
  Description of Artificial Sequence: Synthetic oligonucleotide
gguuaaggggagcgacaca

SEQ ID NO: 792293 - RNA, 19 nt, Artificial Sequence
  Description of Artificial Sequence: Synthetic oligonucleotide
ucgauucuggugggccaaa

SEQ ID NO: 792294 - RNA, 19 nt, Artificial Sequence
  Description of Artificial Sequence: Synthetic oligonucleotide
ucccgaaggcgaucacguu

SEQ ID NO: 792295 - RNA, 19 nt, Artificial Sequence
  Description of Artificial Sequence: Synthetic oligonucleotide
agaugccgcauggcccgag

SEQ ID NO: 792296 - RNA, 19 nt, Artificial Sequence
  Description of Artificial Sequence: Synthetic oligonucleotide
uggcgcguagugggugcag

SEQ ID NO: 792297 - RNA, 19 nt, Artificial Sequence
  Description of Artificial Sequence: Synthetic oligonucleotide
guugcuuagcagagcggcu

SEQ ID NO: 792298 - RNA, 19 nt, Artificial Sequence
  Description of Artificial Sequence: Synthetic oligonucleotide
cacucgccuugccccuucc

SEQ ID NO: 792299 - RNA, 19 nt, Artificial Sequence
  Description of Artificial Sequence: Synthetic oligonucleotide
cuccgcuugcguccgcaca

SEQ ID NO: 792300 - RNA, 19 nt, Artificial Sequence
  Description of Artificial Sequence: Synthetic oligonucleotide
cucgauucuggugggccaa

SEQ ID NO: 792301 - RNA, 19 nt, Artificial Sequence
  Description of Artificial Sequence: Synthetic oligonucleotide
cuugagccugcucccugaa

SEQ ID NO: 792302 - RNA, 19 nt, Artificial Sequence
  Description of Artificial Sequence: Synthetic oligonucleotide
gcgcguagugggugcaggc

SEQ ID NO: 792303 - RNA, 19 nt, Artificial Sequence
  Description of Artificial Sequence: Synthetic oligonucleotide
ccacucaucuccugagcca

SEQ ID NO: 792304 - RNA, 19 nt, Artificial Sequence
  Description of Artificial Sequence: Synthetic oligonucleotide
cuggaccagcauggaaauc

SEQ ID NO: 792305 - RNA, 19 nt, Artificial Sequence
  Description of Artificial Sequence: Synthetic oligonucleotide
agggucgaacgccgaucau

SEQ ID NO: 792306 - RNA, 19 nt, Artificial Sequence
  Description of Artificial Sequence: Synthetic oligonucleotide
ggcgauggaguagguuccc

SEQ ID NO: 792307 - RNA, 19 nt, Artificial Sequence
  Description of Artificial Sequence: Synthetic oligonucleotide
gguagguaagcuugcuguu

SEQ ID NO: 792308 - RNA, 19 nt, Artificial Sequence
  Description of Artificial Sequence: Synthetic oligonucleotide
aucguggcgcguagugggu

SEQ ID NO: 792309 - RNA, 19 nt, Artificial Sequence
  Description of Artificial Sequence: Synthetic oligonucleotide
cggacggucucauuguaga

SEQ ID NO: 792310 - RNA, 19 nt, Artificial Sequence
  Description of Artificial Sequence: Synthetic oligonucleotide
cagcucgauucuggugggc

SEQ ID NO: 792311 - RNA, 19 nt, Artificial Sequence
  Description of Artificial Sequence: Synthetic oligonucleotide
acguuccccagggccuaag

SEQ ID NO: 792312 - RNA, 19 nt, Artificial Sequence
  Description of Artificial Sequence: Synthetic oligonucleotide
agugcgggccacagcucga

SEQ ID NO: 792313 - RNA, 19 nt, Artificial Sequence
  Description of Artificial Sequence: Synthetic oligonucleotide
cucggacggucucauugua

SEQ ID NO: 792314 - RNA, 19 nt, Artificial Sequence
  Description of Artificial Sequence: Synthetic oligonucleotide
guguuucccgaaggcgauc

SEQ ID NO: 792315 - RNA, 19 nt, Artificial Sequence
  Description of Artificial Sequence: Synthetic oligonucleotide
gagcgggaugugucaauuu

SEQ ID NO: 792316 - RNA, 19 nt, Artificial Sequence
  Description of Artificial Sequence: Synthetic oligonucleotide
gggcugcggucuucugccg

SEQ ID NO: 792317 - RNA, 19 nt, Artificial Sequence
  Description of Artificial Sequence: Synthetic oligonucleotide
gguucaccuuggaagcaaa

SEQ ID NO: 792318 - RNA, 19 nt, Artificial Sequence
  Description of Artificial Sequence: Synthetic oligonucleotide
gucagggucgaacgccgau

SEQ ID NO: 792319 - RNA, 19 nt, Artificial Sequence
  Description of Artificial Sequence: Synthetic oligonucleotide
cccggauauugcccuuaag

SEQ ID NO: 792320 - RNA, 19 nt, Artificial Sequence
  Description of Artificial Sequence: Synthetic oligonucleotide
cgagggaucagccccucca

SEQ ID NO: 792321 - RNA, 19 nt, Artificial Sequence
  Description of Artificial Sequence: Synthetic oligonucleotide
ggguagccguccagugccg

SEQ ID NO: 792322 - RNA, 19 nt, Artificial Sequence
  Description of Artificial Sequence: Synthetic oligonucleotide
cugcgacagugagcucagg

SEQ ID NO: 792323 - RNA, 19 nt, Artificial Sequence
  Description of Artificial Sequence: Synthetic oligonucleotide
cagugccgacuggaccagc

SEQ ID NO: 792324 - RNA, 19 nt, Artificial Sequence
  Description of Artificial Sequence: Synthetic oligonucleotide
guguuccgcucugucccca

SEQ ID NO: 792325 - RNA, 19 nt, Artificial Sequence
  Description of Artificial Sequence: Synthetic oligonucleotide
caaccacgagguccugucu

SEQ ID NO: 792326 - RNA, 19 nt, Artificial Sequence
  Description of Artificial Sequence: Synthetic oligonucleotide
gccccgagcagcaugcucu

SEQ ID NO: 792327 - RNA, 19 nt, Artificial Sequence
  Description of Artificial Sequence: Synthetic oligonucleotide
ggcacgugggacuccuuau

SEQ ID NO: 792328 - RNA, 19 nt, Artificial Sequence
  Description of Artificial Sequence: Synthetic oligonucleotide
gcgacacacugcaggcccc

SEQ ID NO: 792329 - RNA, 19 nt, Artificial Sequence
  Description of Artificial Sequence: Synthetic oligonucleotide
cgugggacuccuuauugcu

SEQ ID NO: 792330 - RNA, 19 nt, Artificial Sequence
  Description of Artificial Sequence: Synthetic oligonucleotide
ggacggucucauuguagau

SEQ ID NO: 792331 - RNA, 19 nt, Artificial Sequence
  Description of Artificial Sequence: Synthetic oligonucleotide
gucuagccgcucacuccca

SEQ ID NO: 792332 - RNA, 19 nt, Artificial Sequence
  Description of Artificial Sequence: Synthetic oligonucleotide
cugcacccaggccucgugu

SEQ ID NO: 792333 - RNA, 19 nt, Artificial Sequence
  Description of Artificial Sequence: Synthetic oligonucleotide
gguagccguccagugccga

SEQ ID NO: 792334 - RNA, 19 nt, Artificial Sequence
  Description of Artificial Sequence: Synthetic oligonucleotide
gcagugcaaccacgagguc

SEQ ID NO: 792335 - RNA, 19 nt, Artificial Sequence
  Description of Artificial Sequence: Synthetic oligonucleotide
cgaucaucagaccgugaaa

SEQ ID NO: 792336 - RNA, 19 nt, Artificial Sequence
  Description of Artificial Sequence: Synthetic oligonucleotide
guggcgcguagugggugca

SEQ ID NO: 792337 - RNA, 19 nt, Artificial Sequence
  Description of Artificial Sequence: Synthetic oligonucleotide
gcuccgcuugcguccgcac

SEQ ID NO: 792338 - RNA, 19 nt, Artificial Sequence
  Description of Artificial Sequence: Synthetic oligonucleotide
aaggcacgugggacuccuu

SEQ ID NO: 792339 - RNA, 19 nt, Artificial Sequence
  Description of Artificial Sequence: Synthetic oligonucleotide
gccggucuguccguaggca

SEQ ID NO: 792340 - RNA, 19 nt, Artificial Sequence
  Description of Artificial Sequence: Synthetic oligonucleotide
gcucgacgaaucucacacu

SEQ ID NO: 792341 - RNA, 19 nt, Artificial Sequence
  Description of Artificial Sequence: Synthetic oligonucleotide
ccggucuguccguaggcaa

SEQ ID NO: 792342 - RNA, 19 nt, Artificial Sequence
  Description of Artificial Sequence: Synthetic oligonucleotide
ggagcgggaugugucaauu

SEQ ID NO: 792343 - RNA, 19 nt, Artificial Sequence
  Description of Artificial Sequence: Synthetic oligonucleotide
gacgcuuaccaggccucuu

SEQ ID NO: 792344 - RNA, 19 nt, Artificial Sequence
  Description of Artificial Sequence: Synthetic oligonucleotide
guccgcacacuggccagcu

SEQ ID NO: 792345 - RNA, 19 nt, Artificial Sequence
  Description of Artificial Sequence: Synthetic oligonucleotide
ccguccagugccgacugga

SEQ ID NO: 792346 - RNA, 19 nt, Artificial Sequence
  Description of Artificial Sequence: Synthetic oligonucleotide
cacgagguccugucuucuu

SEQ ID NO: 792347 - RNA, 19 nt, Artificial Sequence
  Description of Artificial Sequence: Synthetic oligonucleotide
cggcagaauacccggauau

SEQ ID NO: 792348 - RNA, 19 nt, Artificial Sequence
  Description of Artificial Sequence: Synthetic oligonucleotide
ggcagaauacccggauauu

SEQ ID NO: 792349 - RNA, 19 nt, Artificial Sequence
  Description of Artificial Sequence: Synthetic oligonucleotide
cgccgaucaucagaccgug

SEQ ID NO: 792350 - RNA, 19 nt, Artificial Sequence
  Description of Artificial Sequence: Synthetic oligonucleotide
aggccccgagcagcaugcu

SEQ ID NO: 792351 - RNA, 19 nt, Artificial Sequence
  Description of Artificial Sequence: Synthetic oligonucleotide
ccggcagaauacccggaua

SEQ ID NO: 792352 - RNA, 19 nt, Artificial Sequence
  Description of Artificial Sequence: Synthetic oligonucleotide
cggucuguccguaggcaaa

SEQ ID NO: 792353 - RNA, 19 nt, Artificial Sequence
  Description of Artificial Sequence: Synthetic oligonucleotide
gcccguggagccggucacc

SEQ ID NO: 792354 - RNA, 19 nt, Artificial Sequence
  Description of Artificial Sequence: Synthetic oligonucleotide
cgcuugcguccgcacacug

SEQ ID NO: 792355 - RNA, 19 nt, Artificial Sequence
  Description of Artificial Sequence: Synthetic oligonucleotide
ccgggucccaguggccagc

SEQ ID NO: 792356 - RNA, 19 nt, Artificial Sequence
  Description of Artificial Sequence: Synthetic oligonucleotide
gccgaucaucagaccguga

SEQ ID NO: 792357 - RNA, 19 nt, Artificial Sequence
  Description of Artificial Sequence: Synthetic oligonucleotide
ggacgcuuaccaggccucu

SEQ ID NO: 792358 - RNA, 19 nt, Artificial Sequence
  Description of Artificial Sequence: Synthetic oligonucleotide
cgcauggcccgagggauca

SEQ ID NO: 792359 - RNA, 19 nt, Artificial Sequence
  Description of Artificial Sequence: Synthetic oligonucleotide
ccgacuggaccagcaugga

SEQ ID NO: 792360 - RNA, 19 nt, Artificial Sequence
  Description of Artificial Sequence: Synthetic oligonucleotide
cacugccggucuguccgua

SEQ ID NO: 792361 - RNA, 19 nt, Artificial Sequence
  Description of Artificial Sequence: Synthetic oligonucleotide
ggcgggcgggaagaggccu

SEQ ID NO: 792362 - RNA, 19 nt, Artificial Sequence
  Description of Artificial Sequence: Synthetic oligonucleotide
cacguuccccagggccuaa

SEQ ID NO: 792363 - RNA, 19 nt, Artificial Sequence
  Description of Artificial Sequence: Synthetic oligonucleotide
cccggcagaauacccggau

SEQ ID NO: 792364 - RNA, 19 nt, Artificial Sequence
  Description of Artificial Sequence: Synthetic oligonucleotide
gcccgagggaucagccccu

SEQ ID NO: 792365 - RNA, 19 nt, Artificial Sequence
  Description of Artificial Sequence: Synthetic oligonucleotide
cacacucgccuugccccuu

SEQ ID NO: 792366 - RNA, 19 nt, Artificial Sequence
  Description of Artificial Sequence: Synthetic oligonucleotide
ccaggccucguguccguuu

SEQ ID NO: 792367 - RNA, 19 nt, Artificial Sequence
  Description of Artificial Sequence: Synthetic oligonucleotide
caccuccgauucguugcuu

SEQ ID NO: 792368 - RNA, 19 nt, Artificial Sequence
  Description of Artificial Sequence: Synthetic oligonucleotide
ccguggagccggucaccuu

SEQ ID NO: 792369 - RNA, 19 nt, Artificial Sequence
  Description of Artificial Sequence: Synthetic oligonucleotide
gcccugcggcugcgacagu

SEQ ID NO: 792370 - RNA, 19 nt, Artificial Sequence
  Description of Artificial Sequence: Synthetic oligonucleotide
cccaggccucguguccguu

SEQ ID NO: 792371 - RNA, 19 nt, Artificial Sequence
  Description of Artificial Sequence: Synthetic oligonucleotide
uguauuucuacauugaggu

SEQ ID NO: 792372 - RNA, 19 nt, Artificial Sequence
  Description of Artificial Sequence: Synthetic oligonucleotide
uguguauuaaagcagaaac

SEQ ID NO: 792373 - RNA, 19 nt, Artificial Sequence
  Description of Artificial Sequence: Synthetic oligonucleotide
uuguauaucccauugaaag

SEQ ID NO: 792374 - RNA, 19 nt, Artificial Sequence
  Description of Artificial Sequence: Synthetic oligonucleotide
uucuauaacuuuuacagag

SEQ ID NO: 792375 - RNA, 19 nt, Artificial Sequence
  Description of Artificial Sequence: Synthetic oligonucleotide
uucuaaucaauaauuauca

SEQ ID NO: 792376 - RNA, 19 nt, Artificial Sequence
  Description of Artificial Sequence: Synthetic oligonucleotide
aaucauuacccuuaagcag

SEQ ID NO: 792377 - RNA, 19 nt, Artificial Sequence
  Description of Artificial Sequence: Synthetic oligonucleotide
aaugacucgaucugggcac

SEQ ID NO: 792378 - RNA, 19 nt, Artificial Sequence
  Description of Artificial Sequence: Synthetic oligonucleotide
ugguuauuauuuaagaaug

SEQ ID NO: 792379 - RNA, 19 nt, Artificial Sequence
  Description of Artificial Sequence: Synthetic oligonucleotide
uuucuaaucaauaauuauc

SEQ ID NO: 792380 - RNA, 19 nt, Artificial Sequence
  Description of Artificial Sequence: Synthetic oligonucleotide
gaaaauuucucacugauaa

SEQ ID NO: 792381 - RNA, 19 nt, Artificial Sequence
  Description of Artificial Sequence: Synthetic oligonucleotide
aaaaguauaaggccagugu

SEQ ID NO: 792382 - RNA, 19 nt, Artificial Sequence
  Description of Artificial Sequence: Synthetic oligonucleotide
ucaauaauuaucaaaucau

SEQ ID NO: 792383 - RNA, 19 nt, Artificial Sequence
  Description of Artificial Sequence: Synthetic oligonucleotide
gaaaugacucuucugacag

SEQ ID NO: 792384 - RNA, 19 nt, Artificial Sequence
  Description of Artificial Sequence: Synthetic oligonucleotide
aaaauaaguucugaaagug

SEQ ID NO: 792385 - RNA, 19 nt, Artificial Sequence
  Description of Artificial Sequence: Synthetic oligonucleotide
auuacccuuaagcagauag

SEQ ID NO: 792386 - RNA, 19 nt, Artificial Sequence
  Description of Artificial Sequence: Synthetic oligonucleotide
acaaagugcagcuuccacc

SEQ ID NO: 792387 - RNA, 19 nt, Artificial Sequence
  Description of Artificial Sequence: Synthetic oligonucleotide
aaagucuggggcuaaguag

SEQ ID NO: 792388 - RNA, 19 nt, Artificial Sequence
  Description of Artificial Sequence: Synthetic oligonucleotide
aauuguauaucccauugaa

SEQ ID NO: 792389 - RNA, 19 nt, Artificial Sequence
  Description of Artificial Sequence: Synthetic oligonucleotide
gauuaaaccggucagacaa

SEQ ID NO: 792390 - RNA, 19 nt, Artificial Sequence
  Description of Artificial Sequence: Synthetic oligonucleotide
uauaaggccaguguaaucc

SEQ ID NO: 792391 - RNA, 19 nt, Artificial Sequence
  Description of Artificial Sequence: Synthetic oligonucleotide
ugcaaaaugauuagggaac

SEQ ID NO: 792392 - RNA, 19 nt, Artificial Sequence
  Description of Artificial Sequence: Synthetic oligonucleotide
aaugacucuucugacaggg

SEQ ID NO: 792393 - RNA, 19 nt, Artificial Sequence
  Description of Artificial Sequence: Synthetic oligonucleotide
uuuaaucagacuaacugaa

SEQ ID NO: 792394 - RNA, 19 nt, Artificial Sequence
  Description of Artificial Sequence: Synthetic oligonucleotide
uugguuauuauuuaagaau

SEQ ID NO: 792395 - RNA, 19 nt, Artificial Sequence
  Description of Artificial Sequence: Synthetic oligonucleotide
ugagugauuaaaccgguca

SEQ ID NO: 792396 - RNA, 19 nt, Artificial Sequence
  Description of Artificial Sequence: Synthetic oligonucleotide
auauuuggacaccuguuac

SEQ ID NO: 792397 - RNA, 19 nt, Artificial Sequence
  Description of Artificial Sequence: Synthetic oligonucleotide
ucaauagugacacuggguu

SEQ ID NO: 792398 - RNA, 19 nt, Artificial Sequence
  Description of Artificial Sequence: Synthetic oligonucleotide
aaccaaauacauuccaaca

SEQ ID NO: 792399 - RNA, 19 nt, Artificial Sequence
  Description of Artificial Sequence: Synthetic oligonucleotide
ucuuaacacaauagcacag

SEQ ID NO: 792400 - RNA, 19 nt, Artificial Sequence
  Description of Artificial Sequence: Synthetic oligonucleotide
aauagcacaggaaucagca

SEQ ID NO: 792401 - RNA, 19 nt, Artificial Sequence
  Description of Artificial Sequence: Synthetic oligonucleotide
aaaguauaaggccagugua

SEQ ID NO: 792402 - RNA, 19 nt, Artificial Sequence
  Description of Artificial Sequence: Synthetic oligonucleotide
uugguuugcgagaauuugg

SEQ ID NO: 792403 - RNA, 19 nt, Artificial Sequence
  Description of Artificial Sequence: Synthetic oligonucleotide
auaugguugaucucugcgg

SEQ ID NO: 792404 - RNA, 19 nt, Artificial Sequence
  Description of Artificial Sequence: Synthetic oligonucleotide
uggaaaaguauacaaaguu

SEQ ID NO: 792405 - RNA, 19 nt, Artificial Sequence
  Description of Artificial Sequence: Synthetic oligonucleotide
ucuacauugaggugaaaac

SEQ ID NO: 792406 - RNA, 19 nt, Artificial Sequence
  Description of Artificial Sequence: Synthetic oligonucleotide
uucguuaaugcccugggcu

SEQ ID NO: 792407 - RNA, 19 nt, Artificial Sequence
  Description of Artificial Sequence: Synthetic oligonucleotide
uuaacaaacggaacuucug

SEQ ID NO: 792408 - RNA, 19 nt, Artificial Sequence
  Description of Artificial Sequence: Synthetic oligonucleotide
aacagaugcgauuuaaaua

SEQ ID NO: 792409 - RNA, 19 nt, Artificial Sequence
  Description of Artificial Sequence: Synthetic oligonucleotide
aacacuugcagaaccgggc

SEQ ID NO: 792410 - RNA, 19 nt, Artificial Sequence
  Description of Artificial Sequence: Synthetic oligonucleotide
aauaauuaucaaaucauua

SEQ ID NO: 792411 - RNA, 19 nt, Artificial Sequence
  Description of Artificial Sequence: Synthetic oligonucleotide
uaucauaugguugaucucu

SEQ ID NO: 792412 - RNA, 19 nt, Artificial Sequence
  Description of Artificial Sequence: Synthetic oligonucleotide
aguaugaaggcugaaagca

SEQ ID NO: 792413 - RNA, 19 nt, Artificial Sequence
  Description of Artificial Sequence: Synthetic oligonucleotide
aaugauguuugguuugcga

SEQ ID NO: 792414 - RNA, 19 nt, Artificial Sequence
  Description of Artificial Sequence: Synthetic oligonucleotide
uaacaaacggaacuucuga

SEQ ID NO: 792415 - RNA, 19 nt, Artificial Sequence
  Description of Artificial Sequence: Synthetic oligonucleotide
uaagcagauagacugaauu

SEQ ID NO: 792416 - RNA, 19 nt, Artificial Sequence
  Description of Artificial Sequence: Synthetic oligonucleotide
uaaccaaauacauuccaac

SEQ ID NO: 792417 - RNA, 19 nt, Artificial Sequence
  Description of Artificial Sequence: Synthetic oligonucleotide
aauaucuccccacccacca

SEQ ID NO: 792418 - RNA, 19 nt, Artificial Sequence
  Description of Artificial Sequence: Synthetic oligonucleotide
ucagacuaacugaauagga

SEQ ID NO: 792419 - RNA, 19 nt, Artificial Sequence
  Description of Artificial Sequence: Synthetic oligonucleotide
uuaacacaauagcacagga

SEQ ID NO: 792420 - RNA, 19 nt, Artificial Sequence
  Description of Artificial Sequence: Synthetic oligonucleotide
aagauuaacagaugcgauu

SEQ ID NO: 792421 - RNA, 19 nt, Artificial Sequence
  Description of Artificial Sequence: Synthetic oligonucleotide
aguguaauccugaagaacu

SEQ ID NO: 792422 - RNA, 19 nt, Artificial Sequence
  Description of Artificial Sequence: Synthetic oligonucleotide
aucagcaauacugaaauga

SEQ ID NO: 792423 - RNA, 19 nt, Artificial Sequence
  Description of Artificial Sequence: Synthetic oligonucleotide
ucagcaauacugaaaugac

SEQ ID NO: 792424 - RNA, 19 nt, Artificial Sequence
  Description of Artificial Sequence: Synthetic oligonucleotide
uaugguugaucucugcgga

SEQ ID NO: 792425 - RNA, 19 nt, Artificial Sequence
  Description of Artificial Sequence: Synthetic oligonucleotide
aucucugcggaccagaagu

SEQ ID NO: 792426 - RNA, 19 nt, Artificial Sequence
  Description of Artificial Sequence: Synthetic oligonucleotide
aaacauguacuguugguua

SEQ ID NO: 792427 - RNA, 19 nt, Artificial Sequence
  Description of Artificial Sequence: Synthetic oligonucleotide
agaaugacucgaucugggc

SEQ ID NO: 792428 - RNA, 19 nt, Artificial Sequence
  Description of Artificial Sequence: Synthetic oligonucleotide
agaaugccuuuauugguac

SEQ ID NO: 792429 - RNA, 19 nt, Artificial Sequence
  Description of Artificial Sequence: Synthetic oligonucleotide
auacccuuuauucaauugu

SEQ ID NO: 792430 - RNA, 19 nt, Artificial Sequence
  Description of Artificial Sequence: Synthetic oligonucleotide
aagauacagucaaauauug

SEQ ID NO: 792431 - RNA, 19 nt, Artificial Sequence
  Description of Artificial Sequence: Synthetic oligonucleotide
cuaaucaauaauuaucaaa

SEQ ID NO: 792432 - RNA, 19 nt, Artificial Sequence
  Description of Artificial Sequence: Synthetic oligonucleotide
uacccggaaacucacucgg

SEQ ID NO: 792433 - RNA, 19 nt, Artificial Sequence
  Description of Artificial Sequence: Synthetic oligonucleotide
ucuauaacuuuuacagagu

SEQ ID NO: 792434 - RNA, 19 nt, Artificial Sequence
  Description of Artificial Sequence: Synthetic oligonucleotide
gacaugguaaaagucuggg

SEQ ID NO: 792435 - RNA, 19 nt, Artificial Sequence
  Description of Artificial Sequence: Synthetic oligonucleotide
augacuaggacuucguuaa

SEQ ID NO: 792436 - RNA, 19 nt, Artificial Sequence
  Description of Artificial Sequence: Synthetic oligonucleotide
ugaugcauaccacagucuc

SEQ ID NO: 792437 - RNA, 19 nt, Artificial Sequence
  Description of Artificial Sequence: Synthetic oligonucleotide
auuccggccgguuaugcac

SEQ ID NO: 792438 - RNA, 19 nt, Artificial Sequence
  Description of Artificial Sequence: Synthetic oligonucleotide
ugguuugcgagaauuuggc

SEQ ID NO: 792439 - RNA, 19 nt, Artificial Sequence
  Description of Artificial Sequence: Synthetic oligonucleotide
gagugauuaaaccggucag

SEQ ID NO: 792440 - RNA, 19 nt, Artificial Sequence
  Description of Artificial Sequence: Synthetic oligonucleotide
uauacccuuuauucaauug

SEQ ID NO: 792441 - RNA, 19 nt, Artificial Sequence
  Description of Artificial Sequence: Synthetic oligonucleotide
acuacccggaaacucacuc

SEQ ID NO: 792442 - RNA, 19 nt, Artificial Sequence
  Description of Artificial Sequence: Synthetic oligonucleotide
gaagaugacuaggacuucg

SEQ ID NO: 792443 - RNA, 19 nt, Artificial Sequence
  Description of Artificial Sequence: Synthetic oligonucleotide
uaacagaugcgauuuaaau

SEQ ID NO: 792444 - RNA, 19 nt, Artificial Sequence
  Description of Artificial Sequence: Synthetic oligonucleotide
aaaugacucuucugacagg

SEQ ID NO: 792445 - RNA, 19 nt, Artificial Sequence
  Description of Artificial Sequence: Synthetic oligonucleotide
auaacuagaguuucuggaa

SEQ ID NO: 792446 - RNA, 19 nt, Artificial Sequence
  Description of Artificial Sequence: Synthetic oligonucleotide
cuuaacacaauagcacagg

SEQ ID NO: 792447 - RNA, 19 nt, Artificial Sequence
  Description of Artificial Sequence: Synthetic oligonucleotide
cauugaggugaaaacagug

SEQ ID NO: 792448 - RNA, 19 nt, Artificial Sequence
  Description of Artificial Sequence: Synthetic oligonucleotide
uccuuuucuaaucaauaau

SEQ ID NO: 792449 - RNA, 19 nt, Artificial Sequence
  Description of Artificial Sequence: Synthetic oligonucleotide
uucacgcuagcuaucauau

SEQ ID NO: 792450 - RNA, 19 nt, Artificial Sequence
  Description of Artificial Sequence: Synthetic oligonucleotide
agcacaggcaaaucuuaac

SEQ ID NO: 792451 - RNA, 19 nt, Artificial Sequence
  Description of Artificial Sequence: Synthetic oligonucleotide
ugucccaucaauacucuaa

SEQ ID NO: 792452 - RNA, 19 nt, Artificial Sequence
  Description of Artificial Sequence: Synthetic oligonucleotide
uuugguuugcgagaauuug

SEQ ID NO: 792453 - RNA, 19 nt, Artificial Sequence
  Description of Artificial Sequence: Synthetic oligonucleotide
cucgaucaacuucugauag

SEQ ID NO: 792454 - RNA, 19 nt, Artificial Sequence
  Description of Artificial Sequence: Synthetic oligonucleotide
ugauguuugguuugcgaga

SEQ ID NO: 792455 - RNA, 19 nt, Artificial Sequence
  Description of Artificial Sequence: Synthetic oligonucleotide
aagacaugguaaaagucug

SEQ ID NO: 792456 - RNA, 19 nt, Artificial Sequence
  Description of Artificial Sequence: Synthetic oligonucleotide
uauuuggacaccuguuaca

SEQ ID NO: 792457 - RNA, 19 nt, Artificial Sequence
  Description of Artificial Sequence: Synthetic oligonucleotide
uccuauacccuuuauucaa

SEQ ID NO: 792458 - RNA, 19 nt, Artificial Sequence
  Description of Artificial Sequence: Synthetic oligonucleotide
acuucguuaaugcccuggg

SEQ ID NO: 792459 - RNA, 19 nt, Artificial Sequence
  Description of Artificial Sequence: Synthetic oligonucleotide
uauucggcauugaugcacc

SEQ ID NO: 792460 - RNA, 19 nt, Artificial Sequence
  Description of Artificial Sequence: Synthetic oligonucleotide
caaggcuaaccccauauug

SEQ ID NO: 792461 - RNA, 19 nt, Artificial Sequence
  Description of Artificial Sequence: Synthetic oligonucleotide
uacggacacggcgagaugg

SEQ ID NO: 792462 - RNA, 19 nt, Artificial Sequence
  Description of Artificial Sequence: Synthetic oligonucleotide
aauaagucuugcuguacuu

SEQ ID NO: 792463 - RNA, 19 nt, Artificial Sequence
  Description of Artificial Sequence: Synthetic oligonucleotide
uuaucaaaucauuacccuu

SEQ ID NO: 792464 - RNA, 19 nt, Artificial Sequence
  Description of Artificial Sequence: Synthetic oligonucleotide
uuugcgagaauuuggccuc

SEQ ID NO: 792465 - RNA, 19 nt, Artificial Sequence
  Description of Artificial Sequence: Synthetic oligonucleotide
ucggcauugaugcacccca

SEQ ID NO: 792466 - RNA, 19 nt, Artificial Sequence
  Description of Artificial Sequence: Synthetic oligonucleotide
ucacggacauuccucagca

SEQ ID NO: 792467 - RNA, 19 nt, Artificial Sequence
  Description of Artificial Sequence: Synthetic oligonucleotide
gaaaaguauaaggccagug

SEQ ID NO: 792468 - RNA, 19 nt, Artificial Sequence
  Description of Artificial Sequence: Synthetic oligonucleotide
uuucgaagcgagucuagca

SEQ ID NO: 792469 - RNA, 19 nt, Artificial Sequence
  Description of Artificial Sequence: Synthetic oligonucleotide
ugugcacucgaucaacuuc

SEQ ID NO: 792470 - RNA, 19 nt, Artificial Sequence
  Description of Artificial Sequence: Synthetic oligonucleotide
agacuaacugaauaggauu

SEQ ID NO: 792471 - RNA, 19 nt, Artificial Sequence
  Description of Artificial Sequence: Synthetic oligonucleotide
aaacccugcggaugccuac

SEQ ID NO: 792472 - RNA, 19 nt, Artificial Sequence
  Description of Artificial Sequence: Synthetic oligonucleotide
gaaugacucgaucugggca

SEQ ID NO: 792473 - RNA, 19 nt, Artificial Sequence
  Description of Artificial Sequence: Synthetic oligonucleotide
uuaaagcagaaaccaguuc

SEQ ID NO: 792474 - RNA, 19 nt, Artificial Sequence
  Description of Artificial Sequence: Synthetic oligonucleotide
uagaaugccuuuauuggua

SEQ ID NO: 792475 - RNA, 19 nt, Artificial Sequence
  Description of Artificial Sequence: Synthetic oligonucleotide
ucaauacucuaauagucuu

SEQ ID NO: 792476 - RNA, 19 nt, Artificial Sequence
  Description of Artificial Sequence: Synthetic oligonucleotide
ucuaaucaauaauuaucaa

SEQ ID NO: 792477 - RNA, 19 nt, Artificial Sequence
  Description of Artificial Sequence: Synthetic oligonucleotide
ucugagugauuaaaccggu

SEQ ID NO: 792478 - RNA, 19 nt, Artificial Sequence
  Description of Artificial Sequence: Synthetic oligonucleotide
aacauguacuguugguuau

SEQ ID NO: 792479 - RNA, 19 nt, Artificial Sequence
  Description of Artificial Sequence: Synthetic oligonucleotide
aaagauuaacagaugcgau

SEQ ID NO: 792480 - RNA, 19 nt, Artificial Sequence
  Description of Artificial Sequence: Synthetic oligonucleotide
uacccuuaagcagauagac

SEQ ID NO: 792481 - RNA, 19 nt, Artificial Sequence
  Description of Artificial Sequence: Synthetic oligonucleotide
uuacccuuaagcagauaga

SEQ ID NO: 792482 - RNA, 19 nt, Artificial Sequence
  Description of Artificial Sequence: Synthetic oligonucleotide
cccaucaauacucuaauag

SEQ ID NO: 792483 - RNA, 19 nt, Artificial Sequence
  Description of Artificial Sequence: Synthetic oligonucleotide
agucguuggaaacccugcg

SEQ ID NO: 792484 - RNA, 19 nt, Artificial Sequence
  Description of Artificial Sequence: Synthetic oligonucleotide
aaacggaacuucugaguga

SEQ ID NO: 792485 - RNA, 19 nt, Artificial Sequence
  Description of Artificial Sequence: Synthetic oligonucleotide
uuuacuguugugacaguuu

SEQ ID NO: 792486 - RNA, 19 nt, Artificial Sequence
  Description of Artificial Sequence: Synthetic oligonucleotide
aaggcuaaccccauauugu

SEQ ID NO: 792487 - RNA, 19 nt, Artificial Sequence
  Description of Artificial Sequence: Synthetic oligonucleotide
agauagacugaauuuuaaa

SEQ ID NO: 792488 - RNA, 19 nt, Artificial Sequence
  Description of Artificial Sequence: Synthetic oligonucleotide
caaugccauagaaacuccg

SEQ ID NO: 792489 - RNA, 19 nt, Artificial Sequence
  Description of Artificial Sequence: Synthetic oligonucleotide
uacaccagcgaccgguacc

SEQ ID NO: 792490 - RNA, 19 nt, Artificial Sequence
  Description of Artificial Sequence: Synthetic oligonucleotide
aaugccauagaaacuccga

SEQ ID NO: 792491 - RNA, 19 nt, Artificial Sequence
  Description of Artificial Sequence: Synthetic oligonucleotide
ucuggggucacuacccgga

SEQ ID NO: 792492 - RNA, 19 nt, Artificial Sequence
  Description of Artificial Sequence: Synthetic oligonucleotide
aaaugauuagggaacuuuu

SEQ ID NO: 792493 - RNA, 19 nt, Artificial Sequence
  Description of Artificial Sequence: Synthetic oligonucleotide
agaaacuccgacuggcagu

SEQ ID NO: 792494 - RNA, 19 nt, Artificial Sequence
  Description of Artificial Sequence: Synthetic oligonucleotide
uggccuacauguuuucuug

SEQ ID NO: 792495 - RNA, 19 nt, Artificial Sequence
  Description of Artificial Sequence: Synthetic oligonucleotide
uuaaucagacuaacugaau

SEQ ID NO: 792496 - RNA, 19 nt, Artificial Sequence
  Description of Artificial Sequence: Synthetic oligonucleotide
ucagacaauuccuccaaau

SEQ ID NO: 792497 - RNA, 19 nt, Artificial Sequence
  Description of Artificial Sequence: Synthetic oligonucleotide
auaaguacagaaagugucu

SEQ ID NO: 792498 - RNA, 19 nt, Artificial Sequence
  Description of Artificial Sequence: Synthetic oligonucleotide
aucaauacucuaauagucu

SEQ ID NO: 792499 - RNA, 19 nt, Artificial Sequence
  Description of Artificial Sequence: Synthetic oligonucleotide
gaacacuugcagaaccggg

SEQ ID NO: 792500 - RNA, 19 nt, Artificial Sequence
  Description of Artificial Sequence: Synthetic oligonucleotide
guuugucccaucaauacuc

SEQ ID NO: 792501 - RNA, 19 nt, Artificial Sequence
  Description of Artificial Sequence: Synthetic oligonucleotide
uccuagguggggaaauggc

SEQ ID NO: 792502 - RNA, 19 nt, Artificial Sequence
  Description of Artificial Sequence: Synthetic oligonucleotide
aagacccaaaaugaaaauu

SEQ ID NO: 792503 - RNA, 19 nt, Artificial Sequence
  Description of Artificial Sequence: Synthetic oligonucleotide
agauuaacagaugcgauuu

SEQ ID NO: 792504 - RNA, 19 nt, Artificial Sequence
  Description of Artificial Sequence: Synthetic oligonucleotide
gaaacuccgacuggcagug

SEQ ID NO: 792505 - RNA, 19 nt, Artificial Sequence
  Description of Artificial Sequence: Synthetic oligonucleotide
aggacaucacacccaggac

SEQ ID NO: 792506 - RNA, 19 nt, Artificial Sequence
  Description of Artificial Sequence: Synthetic oligonucleotide
gaauaggauuacuauauau

SEQ ID NO: 792507 - RNA, 19 nt, Artificial Sequence
  Description of Artificial Sequence: Synthetic oligonucleotide
uacccuuuauucaauugua

SEQ ID NO: 792508 - RNA, 19 nt, Artificial Sequence
  Description of Artificial Sequence: Synthetic oligonucleotide
agaaagugucugugcacuc

SEQ ID NO: 792509 - RNA, 19 nt, Artificial Sequence
  Description of Artificial Sequence: Synthetic oligonucleotide
ucccuaauaucuccccacc

SEQ ID NO: 792510 - RNA, 19 nt, Artificial Sequence
  Description of Artificial Sequence: Synthetic oligonucleotide
cucgggucaaggcuaaccc

SEQ ID NO: 792511 - RNA, 19 nt, Artificial Sequence
  Description of Artificial Sequence: Synthetic oligonucleotide
aaguauaaggccaguguaa

SEQ ID NO: 792512 - RNA, 19 nt, Artificial Sequence
  Description of Artificial Sequence: Synthetic oligonucleotide
cagggcguuuaacaaacgg

SEQ ID NO: 792513 - RNA, 19 nt, Artificial Sequence
  Description of Artificial Sequence: Synthetic oligonucleotide
ugaauaggauuacuauaua

SEQ ID NO: 792514 - RNA, 19 nt, Artificial Sequence
  Description of Artificial Sequence: Synthetic oligonucleotide
aggcuaaccccauauugug

SEQ ID NO: 792515 - RNA, 19 nt, Artificial Sequence
  Description of Artificial Sequence: Synthetic oligonucleotide
aacuaagacuuuccagaau

SEQ ID NO: 792516 - RNA, 19 nt, Artificial Sequence
  Description of Artificial Sequence: Synthetic oligonucleotide
cacacaaagugcagcuucc

SEQ ID NO: 792517 - RNA, 19 nt, Artificial Sequence
  Description of Artificial Sequence: Synthetic oligonucleotide
uauaucccauugaaagaaa

SEQ ID NO: 792518 - RNA, 19 nt, Artificial Sequence
  Description of Artificial Sequence: Synthetic oligonucleotide
guauaucccauugaaagaa

SEQ ID NO: 792519 - RNA, 19 nt, Artificial Sequence
  Description of Artificial Sequence: Synthetic oligonucleotide
uuuucgaagcgagucuagc

SEQ ID NO: 792520 - RNA, 19 nt, Artificial Sequence
  Description of Artificial Sequence: Synthetic oligonucleotide
uuccuagguggggaaaugg

SEQ ID NO: 792521 - RNA, 19 nt, Artificial Sequence
  Description of Artificial Sequence: Synthetic oligonucleotide
gaacuaagacuuuccagaa

SEQ ID NO: 792522 - RNA, 19 nt, Artificial Sequence
  Description of Artificial Sequence: Synthetic oligonucleotide
aacggaacuucugagugau

SEQ ID NO: 792523 - RNA, 19 nt, Artificial Sequence
  Description of Artificial Sequence: Synthetic oligonucleotide
caaaguucaguugguacac

SEQ ID NO: 792524 - RNA, 19 nt, Artificial Sequence
  Description of Artificial Sequence: Synthetic oligonucleotide
gacuucguuaaugcccugg

SEQ ID NO: 792525 - RNA, 19 nt, Artificial Sequence
  Description of Artificial Sequence: Synthetic oligonucleotide
gacagggcguuuaacaaac

SEQ ID NO: 792526 - RNA, 19 nt, Artificial Sequence
  Description of Artificial Sequence: Synthetic oligonucleotide
cugauaacuagaguuucug

SEQ ID NO: 792527 - RNA, 19 nt, Artificial Sequence
  Description of Artificial Sequence: Synthetic oligonucleotide
aguuccuauacccuuuauu

SEQ ID NO: 792528 - RNA, 19 nt, Artificial Sequence
  Description of Artificial Sequence: Synthetic oligonucleotide
guuugcgagaauuuggccu

SEQ ID NO: 792529 - RNA, 19 nt, Artificial Sequence
  Description of Artificial Sequence: Synthetic oligonucleotide
ucugugcacucgaucaacu

SEQ ID NO: 792530 - RNA, 19 nt, Artificial Sequence
  Description of Artificial Sequence: Synthetic oligonucleotide
ugcggaccagaagucaugg

SEQ ID NO: 792531 - RNA, 19 nt, Artificial Sequence
  Description of Artificial Sequence: Synthetic oligonucleotide
augguugaucucugcggac

SEQ ID NO: 792532 - RNA, 19 nt, Artificial Sequence
  Description of Artificial Sequence: Synthetic oligonucleotide
cuacauugaggugaaaaca

SEQ ID NO: 792533 - RNA, 19 nt, Artificial Sequence
  Description of Artificial Sequence: Synthetic oligonucleotide
gacuaggacuucguuaaug

SEQ ID NO: 792534 - RNA, 19 nt, Artificial Sequence
  Description of Artificial Sequence: Synthetic oligonucleotide
uggggcuaaguaguggucc

SEQ ID NO: 792535 - RNA, 19 nt, Artificial Sequence
  Description of Artificial Sequence: Synthetic oligonucleotide
uggguuugucccaucaaua

SEQ ID NO: 792536 - RNA, 19 nt, Artificial Sequence
  Description of Artificial Sequence: Synthetic oligonucleotide
guuagguuguccaccucgg

SEQ ID NO: 792537 - RNA, 19 nt, Artificial Sequence
  Description of Artificial Sequence: Synthetic oligonucleotide
ugcaccccaacuucagagc

SEQ ID NO: 792538 - RNA, 19 nt, Artificial Sequence
  Description of Artificial Sequence: Synthetic oligonucleotide
aaguagugguccucuucca

SEQ ID NO: 792539 - RNA, 19 nt, Artificial Sequence
  Description of Artificial Sequence: Synthetic oligonucleotide
agugauuaaaccggucaga

SEQ ID NO: 792540 - RNA, 19 nt, Artificial Sequence
  Description of Artificial Sequence: Synthetic oligonucleotide
guauuucuacauugaggug

SEQ ID NO: 792541 - RNA, 19 nt, Artificial Sequence
  Description of Artificial Sequence: Synthetic oligonucleotide
aguauaaggccaguguaau

SEQ ID NO: 792542 - RNA, 19 nt, Artificial Sequence
  Description of Artificial Sequence: Synthetic oligonucleotide
ugacagggcguuuaacaaa

SEQ ID NO: 792543 - RNA, 19 nt, Artificial Sequence
  Description of Artificial Sequence: Synthetic oligonucleotide
guauucggcauugaugcac

SEQ ID NO: 792544 - RNA, 19 nt, Artificial Sequence
  Description of Artificial Sequence: Synthetic oligonucleotide
cuuuucgaagcgagucuag

SEQ ID NO: 792545 - RNA, 19 nt, Artificial Sequence
  Description of Artificial Sequence: Synthetic oligonucleotide
ugguacaccagcgaccggu

SEQ ID NO: 792546 - RNA, 19 nt, Artificial Sequence
  Description of Artificial Sequence: Synthetic oligonucleotide
aaacuucuagaaugccuuu

SEQ ID NO: 792547 - RNA, 19 nt, Artificial Sequence
  Description of Artificial Sequence: Synthetic oligonucleotide
gacuaacugaauaggauua

SEQ ID NO: 792548 - RNA, 19 nt, Artificial Sequence
  Description of Artificial Sequence: Synthetic oligonucleotide
uaaaccggucagacaauuc

SEQ ID NO: 792549 - RNA, 19 nt, Artificial Sequence
  Description of Artificial Sequence: Synthetic oligonucleotide
auucggcauugaugcaccc

SEQ ID NO: 792550 - RNA, 19 nt, Artificial Sequence
  Description of Artificial Sequence: Synthetic oligonucleotide
auggucccuaauaucuccc

SEQ ID NO: 792551 - RNA, 19 nt, Artificial Sequence
  Description of Artificial Sequence: Synthetic oligonucleotide
acaauagcacaggaaucag

SEQ ID NO: 792552 - RNA, 19 nt, Artificial Sequence
  Description of Artificial Sequence: Synthetic oligonucleotide
ucgggucaaggcuaacccc

SEQ ID NO: 792553 - RNA, 19 nt, Artificial Sequence
  Description of Artificial Sequence: Synthetic oligonucleotide
caggaaucagcaauacuga

SEQ ID NO: 792554 - RNA, 19 nt, Artificial Sequence
  Description of Artificial Sequence: Synthetic oligonucleotide
ucugcggaccagaagucau

SEQ ID NO: 792555 - RNA, 19 nt, Artificial Sequence
  Description of Artificial Sequence: Synthetic oligonucleotide
aggagucaggguauucggc

SEQ ID NO: 792556 - RNA, 19 nt, Artificial Sequence
  Description of Artificial Sequence: Synthetic oligonucleotide
gaucucugcggaccagaag

SEQ ID NO: 792557 - RNA, 19 nt, Artificial Sequence
  Description of Artificial Sequence: Synthetic oligonucleotide
cuaucauaugguugaucuc

SEQ ID NO: 792558 - RNA, 19 nt, Artificial Sequence
  Description of Artificial Sequence: Synthetic oligonucleotide
agcguuagguuguccaccu

SEQ ID NO: 792559 - RNA, 19 nt, Artificial Sequence
  Description of Artificial Sequence: Synthetic oligonucleotide
agacaugguaaaagucugg

SEQ ID NO: 792560 - RNA, 19 nt, Artificial Sequence
  Description of Artificial Sequence: Synthetic oligonucleotide
ucacuacccggaaacucac

SEQ ID NO: 792561 - RNA, 19 nt, Artificial Sequence
  Description of Artificial Sequence: Synthetic oligonucleotide
aacccugcggaugccuacg

SEQ ID NO: 792562 - RNA, 19 nt, Artificial Sequence
  Description of Artificial Sequence: Synthetic oligonucleotide
cuuuaggucucuggggcag

SEQ ID NO: 792563 - RNA, 19 nt, Artificial Sequence
  Description of Artificial Sequence: Synthetic oligonucleotide
cagccugagguauuccggc

SEQ ID NO: 792564 - RNA, 19 nt, Artificial Sequence
  Description of Artificial Sequence: Synthetic oligonucleotide
uggucccuaauaucucccc

SEQ ID NO: 792565 - RNA, 19 nt, Artificial Sequence
  Description of Artificial Sequence: Synthetic oligonucleotide
uggacaccuguuacaagaa

SEQ ID NO: 792566 - RNA, 19 nt, Artificial Sequence
  Description of Artificial Sequence: Synthetic oligonucleotide
ucguuaaugcccugggcuu

SEQ ID NO: 792567 - RNA, 19 nt, Artificial Sequence
  Description of Artificial Sequence: Synthetic oligonucleotide
guaccgcagcguuagguug

SEQ ID NO: 792568 - RNA, 19 nt, Artificial Sequence
  Description of Artificial Sequence: Synthetic oligonucleotide
gucccuaauaucuccccac

SEQ ID NO: 792569 - RNA, 19 nt, Artificial Sequence
  Description of Artificial Sequence: Synthetic oligonucleotide
aggaaucagcaauacugaa

SEQ ID NO: 792570 - RNA, 19 nt, Artificial Sequence
  Description of Artificial Sequence: Synthetic oligonucleotide
caguguaauccugaagaac

SEQ ID NO: 792571 - RNA, 19 nt, Artificial Sequence
  Description of Artificial Sequence: Synthetic oligonucleotide
uauuccggccgguuaugca

SEQ ID NO: 792572 - RNA, 19 nt, Artificial Sequence
  Description of Artificial Sequence: Synthetic oligonucleotide
gucaaauauugaagagucc

SEQ ID NO: 792573 - RNA, 19 nt, Artificial Sequence
  Description of Artificial Sequence: Synthetic oligonucleotide
cauguaguaugaaggcuga

SEQ ID NO: 792574 - RNA, 19 nt, Artificial Sequence
  Description of Artificial Sequence: Synthetic oligonucleotide
ugcggaugccuacggacac

SEQ ID NO: 792575 - RNA, 19 nt, Artificial Sequence
  Description of Artificial Sequence: Synthetic oligonucleotide
aguccagucccaguuauaa

SEQ ID NO: 792576 - RNA, 19 nt, Artificial Sequence
  Description of Artificial Sequence: Synthetic oligonucleotide
aacuccgacuggcagugua

SEQ ID NO: 792577 - RNA, 19 nt, Artificial Sequence
  Description of Artificial Sequence: Synthetic oligonucleotide
agaguccagucccaguuau

SEQ ID NO: 792578 - RNA, 19 nt, Artificial Sequence
  Description of Artificial Sequence: Synthetic oligonucleotide
uaaccccauauugugcucu

SEQ ID NO: 792579 - RNA, 19 nt, Artificial Sequence
  Description of Artificial Sequence: Synthetic oligonucleotide
caagauacagucaaauauu

SEQ ID NO: 792580 - RNA, 19 nt, Artificial Sequence
  Description of Artificial Sequence: Synthetic oligonucleotide
aacuucuagaaugccuuua

SEQ ID NO: 792581 - RNA, 19 nt, Artificial Sequence
  Description of Artificial Sequence: Synthetic oligonucleotide
aggacuucguuaaugcccu

SEQ ID NO: 792582 - RNA, 19 nt, Artificial Sequence
  Description of Artificial Sequence: Synthetic oligonucleotide
agggcguuuaacaaacgga

SEQ ID NO: 792583 - RNA, 19 nt, Artificial Sequence
  Description of Artificial Sequence: Synthetic oligonucleotide
gagucguuggaaacccugc

SEQ ID NO: 792584 - RNA, 19 nt, Artificial Sequence
  Description of Artificial Sequence: Synthetic oligonucleotide
guaugaaggcugaaagcac

SEQ ID NO: 792585 - RNA, 19 nt, Artificial Sequence
  Description of Artificial Sequence: Synthetic oligonucleotide
ccgguuaugcaccuggacc

SEQ ID NO: 792586 - RNA, 19 nt, Artificial Sequence
  Description of Artificial Sequence: Synthetic oligonucleotide
uaccgcagcguuagguugu

SEQ ID NO: 792587 - RNA, 19 nt, Artificial Sequence
  Description of Artificial Sequence: Synthetic oligonucleotide
ugaucucugcggaccagaa

SEQ ID NO: 792588 - RNA, 19 nt, Artificial Sequence
  Description of Artificial Sequence: Synthetic oligonucleotide
agauacagucaaauauuga

SEQ ID NO: 792589 - RNA, 19 nt, Artificial Sequence
  Description of Artificial Sequence: Synthetic oligonucleotide
uuaaaccggucagacaauu

SEQ ID NO: 792590 - RNA, 19 nt, Artificial Sequence
  Description of Artificial Sequence: Synthetic oligonucleotide
accgguaccgcagcguuag

SEQ ID NO: 792591 - RNA, 19 nt, Artificial Sequence
  Description of Artificial Sequence: Synthetic oligonucleotide
cccauauugugcucugugg

SEQ ID NO: 792592 - RNA, 19 nt, Artificial Sequence
  Description of Artificial Sequence: Synthetic oligonucleotide
cuagaaugccuuuauuggu

SEQ ID NO: 792593 - RNA, 19 nt, Artificial Sequence
  Description of Artificial Sequence: Synthetic oligonucleotide
cauguuuucuugugaugca

SEQ ID NO: 792594 - RNA, 19 nt, Artificial Sequence
  Description of Artificial Sequence: Synthetic oligonucleotide
acuuucuuauuaaccaaau

SEQ ID NO: 792595 - RNA, 19 nt, Artificial Sequence
  Description of Artificial Sequence: Synthetic oligonucleotide
auaaaucauguaguaugaa

SEQ ID NO: 792596 - RNA, 19 nt, Artificial Sequence
  Description of Artificial Sequence: Synthetic oligonucleotide
uucggcauugaugcacccc

SEQ ID NO: 792597 - RNA, 19 nt, Artificial Sequence
  Description of Artificial Sequence: Synthetic oligonucleotide
gucacuacccggaaacuca

SEQ ID NO: 792598 - RNA, 19 nt, Artificial Sequence
  Description of Artificial Sequence: Synthetic oligonucleotide
agaugcgauuuaaauaaaa

SEQ ID NO: 792599 - RNA, 19 nt, Artificial Sequence
  Description of Artificial Sequence: Synthetic oligonucleotide
gagucuagcagcagccuga

SEQ ID NO: 792600 - RNA, 19 nt, Artificial Sequence
  Description of Artificial Sequence: Synthetic oligonucleotide
cucuggggucacuacccgg

SEQ ID NO: 792601 - RNA, 19 nt, Artificial Sequence
  Description of Artificial Sequence: Synthetic oligonucleotide
ggguggauggccuacaugu

SEQ ID NO: 792602 - RNA, 19 nt, Artificial Sequence
  Description of Artificial Sequence: Synthetic oligonucleotide
auaagucuugcuguacuua

SEQ ID NO: 792603 - RNA, 19 nt, Artificial Sequence
  Description of Artificial Sequence: Synthetic oligonucleotide
uccucggagcuugaggaac

SEQ ID NO: 792604 - RNA, 19 nt, Artificial Sequence
  Description of Artificial Sequence: Synthetic oligonucleotide
guucacgcuagcuaucaua

SEQ ID NO: 792605 - RNA, 19 nt, Artificial Sequence
  Description of Artificial Sequence: Synthetic oligonucleotide
gguuugcgagaauuuggcc

SEQ ID NO: 792606 - RNA, 19 nt, Artificial Sequence
  Description of Artificial Sequence: Synthetic oligonucleotide
ucacgcuagcuaucauaug

SEQ ID NO: 792607 - RNA, 19 nt, Artificial Sequence
  Description of Artificial Sequence: Synthetic oligonucleotide
cagaaguucacgcuagcua

SEQ ID NO: 792608 - RNA, 19 nt, Artificial Sequence
  Description of Artificial Sequence: Synthetic oligonucleotide
cguuagguuguccaccucg

SEQ ID NO: 792609 - RNA, 19 nt, Artificial Sequence
  Description of Artificial Sequence: Synthetic oligonucleotide
agaaaauuucucacugaua

SEQ ID NO: 792610 - RNA, 19 nt, Artificial Sequence
  Description of Artificial Sequence: Synthetic oligonucleotide
ugccuacggacacggcgag

SEQ ID NO: 792611 - RNA, 19 nt, Artificial Sequence
  Description of Artificial Sequence: Synthetic oligonucleotide
gacaccuguuacaagaaau

SEQ ID NO: 792612 - RNA, 19 nt, Artificial Sequence
  Description of Artificial Sequence: Synthetic oligonucleotide
gccgucaucacggacauuc

SEQ ID NO: 792613 - RNA, 19 nt, Artificial Sequence
  Description of Artificial Sequence: Synthetic oligonucleotide
cacucgaucaacuucugau

SEQ ID NO: 792614 - RNA, 19 nt, Artificial Sequence
  Description of Artificial Sequence: Synthetic oligonucleotide
gauuaacagaugcgauuua

SEQ ID NO: 792615 - RNA, 19 nt, Artificial Sequence
  Description of Artificial Sequence: Synthetic oligonucleotide
cuuaagcagauagacugaa

SEQ ID NO: 792616 - RNA, 19 nt, Artificial Sequence
  Description of Artificial Sequence: Synthetic oligonucleotide
caucacggacauuccucag

SEQ ID NO: 792617 - RNA, 19 nt, Artificial Sequence
  Description of Artificial Sequence: Synthetic oligonucleotide
gcguuuaacaaacggaacu

SEQ ID NO: 792618 - RNA, 19 nt, Artificial Sequence
  Description of Artificial Sequence: Synthetic oligonucleotide
aggugccgucaucacggac

SEQ ID NO: 792619 - RNA, 19 nt, Artificial Sequence
  Description of Artificial Sequence: Synthetic oligonucleotide
ggaggcgccgagucguugg

SEQ ID NO: 792620 - RNA, 19 nt, Artificial Sequence
  Description of Artificial Sequence: Synthetic oligonucleotide
gaucaaaguucaguuggua

SEQ ID NO: 792621 - RNA, 19 nt, Artificial Sequence
  Description of Artificial Sequence: Synthetic oligonucleotide
cuaaccccauauugugcuc

SEQ ID NO: 792622 - RNA, 19 nt, Artificial Sequence
  Description of Artificial Sequence: Synthetic oligonucleotide
ucccaucaauacucuaaua

SEQ ID NO: 792623 - RNA, 19 nt, Artificial Sequence
  Description of Artificial Sequence: Synthetic oligonucleotide
uugguacaccagcgaccgg

SEQ ID NO: 792624 - RNA, 19 nt, Artificial Sequence
  Description of Artificial Sequence: Synthetic oligonucleotide
gccugagguauuccggccg

SEQ ID NO: 792625 - RNA, 19 nt, Artificial Sequence
  Description of Artificial Sequence: Synthetic oligonucleotide
guacuguugguuauuauuu

SEQ ID NO: 792626 - RNA, 19 nt, Artificial Sequence
  Description of Artificial Sequence: Synthetic oligonucleotide
uuccaacauaaaucaugua

SEQ ID NO: 792627 - RNA, 19 nt, Artificial Sequence
  Description of Artificial Sequence: Synthetic oligonucleotide
cagacuaacugaauaggau

SEQ ID NO: 792628 - RNA, 19 nt, Artificial Sequence
  Description of Artificial Sequence: Synthetic oligonucleotide
agcgaccgguaccgcagcg

SEQ ID NO: 792629 - RNA, 19 nt, Artificial Sequence
  Description of Artificial Sequence: Synthetic oligonucleotide
augccuacggacacggcga

SEQ ID NO: 792630 - RNA, 19 nt, Artificial Sequence
  Description of Artificial Sequence: Synthetic oligonucleotide
accagcgaccgguaccgca

SEQ ID NO: 792631 - RNA, 19 nt, Artificial Sequence
  Description of Artificial Sequence: Synthetic oligonucleotide
cugcggaccagaagucaug

SEQ ID NO: 792632 - RNA, 19 nt, Artificial Sequence
  Description of Artificial Sequence: Synthetic oligonucleotide
ccuaauaucuccccaccca

SEQ ID NO: 792633 - RNA, 19 nt, Artificial Sequence
  Description of Artificial Sequence: Synthetic oligonucleotide
guguaauccugaagaacuc

SEQ ID NO: 792634 - RNA, 19 nt, Artificial Sequence
  Description of Artificial Sequence: Synthetic oligonucleotide
gcagaaaccaguuccuaua

SEQ ID NO: 792635 - RNA, 19 nt, Artificial Sequence
  Description of Artificial Sequence: Synthetic oligonucleotide
acuccgacuggcaguguag

SEQ ID NO: 792636 - RNA, 19 nt, Artificial Sequence
  Description of Artificial Sequence: Synthetic oligonucleotide
ccugcggaugccuacggac

SEQ ID NO: 792637 - RNA, 19 nt, Artificial Sequence
  Description of Artificial Sequence: Synthetic oligonucleotide
guauuccggccgguuaugc

SEQ ID NO: 792638 - RNA, 19 nt, Artificial Sequence
  Description of Artificial Sequence: Synthetic oligonucleotide
gcuaaccccauauugugcu

SEQ ID NO: 792639 - RNA, 19 nt, Artificial Sequence
  Description of Artificial Sequence: Synthetic oligonucleotide
acccugcggaugccuacgg

SEQ ID NO: 792640 - RNA, 19 nt, Artificial Sequence
  Description of Artificial Sequence: Synthetic oligonucleotide
uucugacagggcguuuaac

SEQ ID NO: 792641 - RNA, 19 nt, Artificial Sequence
  Description of Artificial Sequence: Synthetic oligonucleotide
ggaaaaguauacaaaguuu

SEQ ID NO: 792642 - RNA, 19 nt, Artificial Sequence
  Description of Artificial Sequence: Synthetic oligonucleotide
cugcggaugccuacggaca

SEQ ID NO: 792643 - RNA, 19 nt, Artificial Sequence
  Description of Artificial Sequence: Synthetic oligonucleotide
gggcguuuaacaaacggaa

SEQ ID NO: 792644 - RNA, 19 nt, Artificial Sequence
  Description of Artificial Sequence: Synthetic oligonucleotide
gucugugcacucgaucaac

SEQ ID NO: 792645 - RNA, 19 nt, Artificial Sequence
  Description of Artificial Sequence: Synthetic oligonucleotide
acucacucggguacagcug

SEQ ID NO: 792646 - RNA, 19 nt, Artificial Sequence
  Description of Artificial Sequence: Synthetic oligonucleotide
uuuaggucucuggggcagu

SEQ ID NO: 792647 - RNA, 19 nt, Artificial Sequence
  Description of Artificial Sequence: Synthetic oligonucleotide
cuggggcuaaguagugguc

SEQ ID NO: 792648 - RNA, 19 nt, Artificial Sequence
  Description of Artificial Sequence: Synthetic oligonucleotide
cagcaauacugaaaugacu

SEQ ID NO: 792649 - RNA, 19 nt, Artificial Sequence
  Description of Artificial Sequence: Synthetic oligonucleotide
auuaaaccggucagacaau

SEQ ID NO: 792650 - RNA, 19 nt, Artificial Sequence
  Description of Artificial Sequence: Synthetic oligonucleotide
gucaauagugacacugggu

SEQ ID NO: 792651 - RNA, 19 nt, Artificial Sequence
  Description of Artificial Sequence: Synthetic oligonucleotide
cccuaauaucuccccaccc

SEQ ID NO: 792652 - RNA, 19 nt, Artificial Sequence
  Description of Artificial Sequence: Synthetic oligonucleotide
cuaacugaauaggauuacu

SEQ ID NO: 792653 - RNA, 19 nt, Artificial Sequence
  Description of Artificial Sequence: Synthetic oligonucleotide
ccuacauguuuucuuguga

SEQ ID NO: 792654 - RNA, 19 nt, Artificial Sequence
  Description of Artificial Sequence: Synthetic oligonucleotide
gaaccgggcagaaguucac

SEQ ID NO: 792655 - RNA, 19 nt, Artificial Sequence
  Description of Artificial Sequence: Synthetic oligonucleotide
ggcguuuaacaaacggaac

SEQ ID NO: 792656 - RNA, 19 nt, Artificial Sequence
  Description of Artificial Sequence: Synthetic oligonucleotide
ggcuaaccccauauugugc

SEQ ID NO: 792657 - RNA, 19 nt, Artificial Sequence
  Description of Artificial Sequence: Synthetic oligonucleotide
ugagguauuccggccgguu

SEQ ID NO: 792658 - RNA, 19 nt, Artificial Sequence
  Description of Artificial Sequence: Synthetic oligonucleotide
ccagcgaccgguaccgcag

SEQ ID NO: 792659 - RNA, 19 nt, Artificial Sequence
  Description of Artificial Sequence: Synthetic oligonucleotide
ggcgggaaccacaggaggc

SEQ ID NO: 792660 - RNA, 19 nt, Artificial Sequence
  Description of Artificial Sequence: Synthetic oligonucleotide
ggucccuaauaucucccca

SEQ ID NO: 792661 - RNA, 19 nt, Artificial Sequence
  Description of Artificial Sequence: Synthetic oligonucleotide
guacaccagcgaccgguac

SEQ ID NO: 792662 - RNA, 19 nt, Artificial Sequence
  Description of Artificial Sequence: Synthetic oligonucleotide
cauguacuguugguuauua

SEQ ID NO: 792663 - RNA, 19 nt, Artificial Sequence
  Description of Artificial Sequence: Synthetic oligonucleotide
cggaaacucacucggguac

SEQ ID NO: 792664 - RNA, 19 nt, Artificial Sequence
  Description of Artificial Sequence: Synthetic oligonucleotide
ggucacuacccggaaacuc

SEQ ID NO: 792665 - RNA, 19 nt, Artificial Sequence
  Description of Artificial Sequence: Synthetic oligonucleotide
ggcagaaguucacgcuagc

SEQ ID NO: 792666 - RNA, 19 nt, Artificial Sequence
  Description of Artificial Sequence: Synthetic oligonucleotide
cagaugcgauuuaaauaaa

SEQ ID NO: 792667 - RNA, 19 nt, Artificial Sequence
  Description of Artificial Sequence: Synthetic oligonucleotide
ggcaucucgggucaaggcu

SEQ ID NO: 792668 - RNA, 19 nt, Artificial Sequence
  Description of Artificial Sequence: Synthetic oligonucleotide
ccauagaaaauuucucacu

SEQ ID NO: 792669 - RNA, 19 nt, Artificial Sequence
  Description of Artificial Sequence: Synthetic oligonucleotide
gcauugaugcaccccaacu

SEQ ID NO: 792670 - RNA, 19 nt, Artificial Sequence
  Description of Artificial Sequence: Synthetic oligonucleotide
uggaaacccugcggaugcc

SEQ ID NO: 792671 - RNA, 19 nt, Artificial Sequence
  Description of Artificial Sequence: Synthetic oligonucleotide
gggcagaaguucacgcuag

SEQ ID NO: 792672 - RNA, 19 nt, Artificial Sequence
  Description of Artificial Sequence: Synthetic oligonucleotide
acccggaaacucacucggg

SEQ ID NO: 792673 - RNA, 19 nt, Artificial Sequence
  Description of Artificial Sequence: Synthetic oligonucleotide
gcugaauggaaagaacacu

SEQ ID NO: 792674 - RNA, 19 nt, Artificial Sequence
  Description of Artificial Sequence: Synthetic oligonucleotide
ucggagcuugaggaacuaa

SEQ ID NO: 792675 - RNA, 19 nt, Artificial Sequence
  Description of Artificial Sequence: Synthetic oligonucleotide
ccuuaagcagauagacuga

SEQ ID NO: 792676 - RNA, 19 nt, Artificial Sequence
  Description of Artificial Sequence: Synthetic oligonucleotide
cccaguuauaaucaucaua

SEQ ID NO: 792677 - RNA, 19 nt, Artificial Sequence
  Description of Artificial Sequence: Synthetic oligonucleotide
cuaagacuuuccagaauuu

SEQ ID NO: 792678 - RNA, 19 nt, Artificial Sequence
  Description of Artificial Sequence: Synthetic oligonucleotide
gccgagucguuggaaaccc

SEQ ID NO: 792679 - RNA, 19 nt, Artificial Sequence
  Description of Artificial Sequence: Synthetic oligonucleotide
accaguuccuauacccuuu

SEQ ID NO: 792680 - RNA, 19 nt, Artificial Sequence
  Description of Artificial Sequence: Synthetic oligonucleotide
uugcgagaauuuggccucu

SEQ ID NO: 792681 - RNA, 19 nt, Artificial Sequence
  Description of Artificial Sequence: Synthetic oligonucleotide
cuacggacacggcgagaug

SEQ ID NO: 792682 - RNA, 19 nt, Artificial Sequence
  Description of Artificial Sequence: Synthetic oligonucleotide
ccuagggagaggacaucac

SEQ ID NO: 792683 - RNA, 19 nt, Artificial Sequence
  Description of Artificial Sequence: Synthetic oligonucleotide
cgguuaugcaccuggacca

SEQ ID NO: 792684 - RNA, 19 nt, Artificial Sequence
  Description of Artificial Sequence: Synthetic oligonucleotide
guaggucccuagggagagg

SEQ ID NO: 792685 - RNA, 19 nt, Artificial Sequence
  Description of Artificial Sequence: Synthetic oligonucleotide
cgagucguuggaaacccug

SEQ ID NO: 792686 - RNA, 19 nt, Artificial Sequence
  Description of Artificial Sequence: Synthetic oligonucleotide
augacucgaucugggcacu

SEQ ID NO: 792687 - RNA, 19 nt, Artificial Sequence
  Description of Artificial Sequence: Synthetic oligonucleotide
uagcuaucauaugguugau

SEQ ID NO: 792688 - RNA, 19 nt, Artificial Sequence
  Description of Artificial Sequence: Synthetic oligonucleotide
ggaaacucacucggguaca

SEQ ID NO: 792689 - RNA, 19 nt, Artificial Sequence
  Description of Artificial Sequence: Synthetic oligonucleotide
gguauuccggccgguuaug

SEQ ID NO: 792690 - RNA, 19 nt, Artificial Sequence
  Description of Artificial Sequence: Synthetic oligonucleotide
caauagugacacuggguuu

SEQ ID NO: 792691 - RNA, 19 nt, Artificial Sequence
  Description of Artificial Sequence: Synthetic oligonucleotide
gaggcgccgagucguugga

SEQ ID NO: 792692 - RNA, 19 nt, Artificial Sequence
  Description of Artificial Sequence: Synthetic oligonucleotide
gccgguuaugcaccuggac

SEQ ID NO: 792693 - RNA, 19 nt, Artificial Sequence
  Description of Artificial Sequence: Synthetic oligonucleotide
ggacaccuguuacaagaaa

SEQ ID NO: 792694 - RNA, 19 nt, Artificial Sequence
  Description of Artificial Sequence: Synthetic oligonucleotide
cagcgaccgguaccgcagc

SEQ ID NO: 792695 - RNA, 19 nt, Artificial Sequence
  Description of Artificial Sequence: Synthetic oligonucleotide
ggcuuuucgaagcgagucu

SEQ ID NO: 792696 - RNA, 19 nt, Artificial Sequence
  Description of Artificial Sequence: Synthetic oligonucleotide
caucucgggucaaggcuaa

SEQ ID NO: 792697 - RNA, 19 nt, Artificial Sequence
  Description of Artificial Sequence: Synthetic oligonucleotide
aaacuccgacuggcagugu

SEQ ID NO: 792698 - RNA, 19 nt, Artificial Sequence
  Description of Artificial Sequence: Synthetic oligonucleotide
ccaguguaauccugaagaa

SEQ ID NO: 792699 - RNA, 19 nt, Artificial Sequence
  Description of Artificial Sequence: Synthetic oligonucleotide
cuugcagaaccgggcagaa

SEQ ID NO: 792700 - RNA, 19 nt, Artificial Sequence
  Description of Artificial Sequence: Synthetic oligonucleotide
ugcgagaauuuggccucuc

SEQ ID NO: 792701 - RNA, 19 nt, Artificial Sequence
  Description of Artificial Sequence: Synthetic oligonucleotide
gugaugcauaccacagucu

SEQ ID NO: 792702 - RNA, 19 nt, Artificial Sequence
  Description of Artificial Sequence: Synthetic oligonucleotide
gcuuuucgaagcgagucua

SEQ ID NO: 792703 - RNA, 19 nt, Artificial Sequence
  Description of Artificial Sequence: Synthetic oligonucleotide
ggcugccauagaaaauuuc

SEQ ID NO: 792704 - RNA, 19 nt, Artificial Sequence
  Description of Artificial Sequence: Synthetic oligonucleotide
gguaccgcagcguuagguu

SEQ ID NO: 792705 - RNA, 19 nt, Artificial Sequence
  Description of Artificial Sequence: Synthetic oligonucleotide
ugacucgaucugggcacuc

SEQ ID NO: 792706 - RNA, 19 nt, Artificial Sequence
  Description of Artificial Sequence: Synthetic oligonucleotide
cagcagccugagguauucc

SEQ ID NO: 792707 - RNA, 19 nt, Artificial Sequence
  Description of Artificial Sequence: Synthetic oligonucleotide
gaaccacaggaggcgccga

SEQ ID NO: 792708 - RNA, 19 nt, Artificial Sequence
  Description of Artificial Sequence: Synthetic oligonucleotide
gacucgaucugggcacucu

SEQ ID NO: 792709 - RNA, 19 nt, Artificial Sequence
  Description of Artificial Sequence: Synthetic oligonucleotide
gcggaugccuacggacacg

SEQ ID NO: 792710 - RNA, 19 nt, Artificial Sequence
  Description of Artificial Sequence: Synthetic oligonucleotide
cgcagcguuagguugucca

SEQ ID NO: 792711 - RNA, 19 nt, Artificial Sequence
  Description of Artificial Sequence: Synthetic oligonucleotide
ggggcuaaguagugguccu

SEQ ID NO: 792712 - RNA, 19 nt, Artificial Sequence
  Description of Artificial Sequence: Synthetic oligonucleotide
ggcuaaguagugguccucu

SEQ ID NO: 792713 - RNA, 19 nt, Artificial Sequence
  Description of Artificial Sequence: Synthetic oligonucleotide
gaguccagucccaguuaua

SEQ ID NO: 792714 - RNA, 19 nt, Artificial Sequence
  Description of Artificial Sequence: Synthetic oligonucleotide
cugugcacucgaucaacuu

SEQ ID NO: 792715 - RNA, 19 nt, Artificial Sequence
  Description of Artificial Sequence: Synthetic oligonucleotide
caggugccgucaucacgga

SEQ ID NO: 792716 - RNA, 19 nt, Artificial Sequence
  Description of Artificial Sequence: Synthetic oligonucleotide
ccggaaacucacucgggua

SEQ ID NO: 792717 - RNA, 19 nt, Artificial Sequence
  Description of Artificial Sequence: Synthetic oligonucleotide
cgccgagucguuggaaacc

SEQ ID NO: 792718 - RNA, 19 nt, Artificial Sequence
  Description of Artificial Sequence: Synthetic oligonucleotide
ggucaaggcuaaccccaua

SEQ ID NO: 792719 - RNA, 19 nt, Artificial Sequence
  Description of Artificial Sequence: Synthetic oligonucleotide
cacuacccggaaacucacu

SEQ ID NO: 792720 - RNA, 19 nt, Artificial Sequence
  Description of Artificial Sequence: Synthetic oligonucleotide
gcgagaauuuggccucucu

SEQ ID NO: 792721 - RNA, 19 nt, Artificial Sequence
  Description of Artificial Sequence: Synthetic oligonucleotide
ccuauacccuuuauucaau

SEQ ID NO: 792722 - RNA, 19 nt, Artificial Sequence
  Description of Artificial Sequence: Synthetic oligonucleotide
gaccgguaccgcagcguua

SEQ ID NO: 792723 - RNA, 19 nt, Artificial Sequence
  Description of Artificial Sequence: Synthetic oligonucleotide
cccggaaacucacucgggu

SEQ ID NO: 792724 - RNA, 19 nt, Artificial Sequence
  Description of Artificial Sequence: Synthetic oligonucleotide
ccuacggacacggcgagau

SEQ ID NO: 792725 - RNA, 19 nt, Artificial Sequence
  Description of Artificial Sequence: Synthetic oligonucleotide
cucggagcuugaggaacua

SEQ ID NO: 792726 - RNA, 19 nt, Artificial Sequence
  Description of Artificial Sequence: Synthetic oligonucleotide
gcguuagguuguccaccuc

SEQ ID NO: 792727 - RNA, 19 nt, Artificial Sequence
  Description of Artificial Sequence: Synthetic oligonucleotide
gcuaaguagugguccucuu

SEQ ID NO: 792728 - RNA, 19 nt, Artificial Sequence
  Description of Artificial Sequence: Synthetic oligonucleotide
caguuccuauacccuuuau

SEQ ID NO: 792729 - RNA, 19 nt, Artificial Sequence
  Description of Artificial Sequence: Synthetic oligonucleotide
cgggcagaaguucacgcua

SEQ ID NO: 792730 - RNA, 19 nt, Artificial Sequence
  Description of Artificial Sequence: Synthetic oligonucleotide
acggaacuucugagugauu

SEQ ID NO: 792731 - RNA, 19 nt, Artificial Sequence
  Description of Artificial Sequence: Synthetic oligonucleotide
ccucggagcuugaggaacu

SEQ ID NO: 792732 - RNA, 19 nt, Artificial Sequence
  Description of Artificial Sequence: Synthetic oligonucleotide
ggccgguuaugcaccugga

SEQ ID NO: 792733 - RNA, 19 nt, Artificial Sequence
  Description of Artificial Sequence: Synthetic oligonucleotide
ccgggcagaaguucacgcu

SEQ ID NO: 792734 - RNA, 19 nt, Artificial Sequence
  Description of Artificial Sequence: Synthetic oligonucleotide
cacggacauuccucagcau

SEQ ID NO: 792735 - RNA, 19 nt, Artificial Sequence
  Description of Artificial Sequence: Synthetic oligonucleotide
gggucacuacccggaaacu

SEQ ID NO: 792736 - RNA, 19 nt, Artificial Sequence
  Description of Artificial Sequence: Synthetic oligonucleotide
ccgguaccgcagcguuagg

SEQ ID NO: 792737 - RNA, 19 nt, Artificial Sequence
  Description of Artificial Sequence: Synthetic oligonucleotide
cugagguauuccggccggu

SEQ ID NO: 792738 - RNA, 19 nt, Artificial Sequence
  Description of Artificial Sequence: Synthetic oligonucleotide
gcgagucuagcagcagccu

SEQ ID NO: 792739 - RNA, 19 nt, Artificial Sequence
  Description of Artificial Sequence: Synthetic oligonucleotide
gccuacggacacggcgaga

SEQ ID NO: 792740 - RNA, 19 nt, Artificial Sequence
  Description of Artificial Sequence: Synthetic oligonucleotide
ccgcagcguuagguugucc

SEQ ID NO: 792741 - RNA, 19 nt, Artificial Sequence
  Description of Artificial Sequence: Synthetic oligonucleotide
gcgaccgguaccgcagcgu

SEQ ID NO: 792742 - RNA, 19 nt, Artificial Sequence
  Description of Artificial Sequence: Synthetic oligonucleotide
caggaggcgccgagucguu

SEQ ID NO: 792743 - RNA, 19 nt, Artificial Sequence
  Description of Artificial Sequence: Synthetic oligonucleotide
ccgagucguuggaaacccu

SEQ ID NO: 792744 - RNA, 19 nt, Artificial Sequence
  Description of Artificial Sequence: Synthetic oligonucleotide
cgguaccgcagcguuaggu

SEQ ID NO: 792745 - RNA, 19 nt, Artificial Sequence
  Description of Artificial Sequence: Synthetic oligonucleotide
cguuaaugcccugggcuuu

SEQ ID NO: 792746 - RNA, 19 nt, Artificial Sequence
  Description of Artificial Sequence: Synthetic oligonucleotide
cgaccgguaccgcagcguu

SEQ ID NO: 792747 - RNA, 19 nt, Artificial Sequence
  Description of Artificial Sequence: Synthetic oligonucleotide
aauagaaccacauugagaa

SEQ ID NO: 792748 - RNA, 19 nt, Artificial Sequence
  Description of Artificial Sequence: Synthetic oligonucleotide
aauaauuucucugguacac

SEQ ID NO: 792749 - RNA, 19 nt, Artificial Sequence
  Description of Artificial Sequence: Synthetic oligonucleotide
aguguuacuaaauagacau

SEQ ID NO: 792750 - RNA, 19 nt, Artificial Sequence
  Description of Artificial Sequence: Synthetic oligonucleotide
acauugagaagacaaaggg

SEQ ID NO: 792751 - RNA, 19 nt, Artificial Sequence
  Description of Artificial Sequence: Synthetic oligonucleotide
auagcuucgguacaucucc

SEQ ID NO: 792752 - RNA, 19 nt, Artificial Sequence
  Description of Artificial Sequence: Synthetic oligonucleotide
uaauuaacaagauguuugg

SEQ ID NO: 792753 - RNA, 19 nt, Artificial Sequence
  Description of Artificial Sequence: Synthetic oligonucleotide
ucuagcuuuggacagccgg

SEQ ID NO: 792754 - RNA, 19 nt, Artificial Sequence
  Description of Artificial Sequence: Synthetic oligonucleotide
augugugucuuccagggcc

SEQ ID NO: 792755 - RNA, 19 nt, Artificial Sequence
  Description of Artificial Sequence: Synthetic oligonucleotide
ucaacaaccguccuggaac

SEQ ID NO: 792756 - RNA, 19 nt, Artificial Sequence
  Description of Artificial Sequence: Synthetic oligonucleotide
aaggggagccuucucaccc

SEQ ID NO: 792757 - RNA, 19 nt, Artificial Sequence
  Description of Artificial Sequence: Synthetic oligonucleotide
aauuaacaagauguuuggc

SEQ ID NO: 792758 - RNA, 19 nt, Artificial Sequence
  Description of Artificial Sequence: Synthetic oligonucleotide
uuccuauacauuaugguac

SEQ ID NO: 792759 - RNA, 19 nt, Artificial Sequence
  Description of Artificial Sequence: Synthetic oligonucleotide
uuucgcauccccaaaauaa

SEQ ID NO: 792760 - RNA, 19 nt, Artificial Sequence
  Description of Artificial Sequence: Synthetic oligonucleotide
ucaaucuuccgcaugggug

SEQ ID NO: 792761 - RNA, 19 nt, Artificial Sequence
  Description of Artificial Sequence: Synthetic oligonucleotide
uacauuaugguacacggua

SEQ ID NO: 792762 - RNA, 19 nt, Artificial Sequence
  Description of Artificial Sequence: Synthetic oligonucleotide
aagauguuuggccccuccc

SEQ ID NO: 792763 - RNA, 19 nt, Artificial Sequence
  Description of Artificial Sequence: Synthetic oligonucleotide
uuacuaaauagacauuuau

SEQ ID NO: 792764 - RNA, 19 nt, Artificial Sequence
  Description of Artificial Sequence: Synthetic oligonucleotide
caaguguuacuaaauagac

SEQ ID NO: 792765 - RNA, 19 nt, Artificial Sequence
  Description of Artificial Sequence: Synthetic oligonucleotide
uuuccuauacauuauggua

SEQ ID NO: 792766 - RNA, 19 nt, Artificial Sequence
  Description of Artificial Sequence: Synthetic oligonucleotide
uuguggaccguucacuccg

SEQ ID NO: 792767 - RNA, 19 nt, Artificial Sequence
  Description of Artificial Sequence: Synthetic oligonucleotide
caaucuuccgcaugggugg

SEQ ID NO: 792768 - RNA, 19 nt, Artificial Sequence
  Description of Artificial Sequence: Synthetic oligonucleotide
uuuagcaaagguguuggcc

SEQ ID NO: 792769 - RNA, 19 nt, Artificial Sequence
  Description of Artificial Sequence: Synthetic oligonucleotide
ucgaauagcugcucuagcc

SEQ ID NO: 792770 - RNA, 19 nt, Artificial Sequence
  Description of Artificial Sequence: Synthetic oligonucleotide
uguuacuaaauagacauuu

SEQ ID NO: 792771 - RNA, 19 nt, Artificial Sequence
  Description of Artificial Sequence: Synthetic oligonucleotide
uaauccuucuuguugacau

SEQ ID NO: 792772 - RNA, 19 nt, Artificial Sequence
  Description of Artificial Sequence: Synthetic oligonucleotide
aauaguuacugguggcaca

SEQ ID NO: 792773 - RNA, 19 nt, Artificial Sequence
  Description of Artificial Sequence: Synthetic oligonucleotide
agcgagggagcacagaguc

SEQ ID NO: 792774 - RNA, 19 nt, Artificial Sequence
  Description of Artificial Sequence: Synthetic oligonucleotide
uuaugguacacgguagagg

SEQ ID NO: 792775 - RNA, 19 nt, Artificial Sequence
  Description of Artificial Sequence: Synthetic oligonucleotide
aaauagaaccacauugaga

SEQ ID NO: 792776 - RNA, 19 nt, Artificial Sequence
  Description of Artificial Sequence: Synthetic oligonucleotide
ucaucugccgcccacuugu

SEQ ID NO: 792777 - RNA, 19 nt, Artificial Sequence
  Description of Artificial Sequence: Synthetic oligonucleotide
uggaagguacaguucauca

SEQ ID NO: 792778 - RNA, 19 nt, Artificial Sequence
  Description of Artificial Sequence: Synthetic oligonucleotide
guucacuccguaaaggccg

SEQ ID NO: 792779 - RNA, 19 nt, Artificial Sequence
  Description of Artificial Sequence: Synthetic oligonucleotide
gguauguacaauaaauaag

SEQ ID NO: 792780 - RNA, 19 nt, Artificial Sequence
  Description of Artificial Sequence: Synthetic oligonucleotide
acugaaggagucgaauagc

SEQ ID NO: 792781 - RNA, 19 nt, Artificial Sequence
  Description of Artificial Sequence: Synthetic oligonucleotide
aacaccacacgcccuuggg

SEQ ID NO: 792782 - RNA, 19 nt, Artificial Sequence
  Description of Artificial Sequence: Synthetic oligonucleotide
acauagaggcgcugguacc

SEQ ID NO: 792783 - RNA, 19 nt, Artificial Sequence
  Description of Artificial Sequence: Synthetic oligonucleotide
uucagcgccacccucgaug

SEQ ID NO: 792784 - RNA, 19 nt, Artificial Sequence
  Description of Artificial Sequence: Synthetic oligonucleotide
gggucuugcgguuauaggg

SEQ ID NO: 792785 - RNA, 19 nt, Artificial Sequence
  Description of Artificial Sequence: Synthetic oligonucleotide
cucaaguugccccaccucc

SEQ ID NO: 792786 - RNA, 19 nt, Artificial Sequence
  Description of Artificial Sequence: Synthetic oligonucleotide
aggacgaccccuucccucc

SEQ ID NO: 792787 - RNA, 19 nt, Artificial Sequence
  Description of Artificial Sequence: Synthetic oligonucleotide
auaaauaauuucucuggua

SEQ ID NO: 792788 - RNA, 19 nt, Artificial Sequence
  Description of Artificial Sequence: Synthetic oligonucleotide
uuggggagcagcuuuuagc

SEQ ID NO: 792789 - RNA, 19 nt, Artificial Sequence
  Description of Artificial Sequence: Synthetic oligonucleotide
uccuauacauuaugguaca

SEQ ID NO: 792790 - RNA, 19 nt, Artificial Sequence
  Description of Artificial Sequence: Synthetic oligonucleotide
ucaaccacacauagaauuu

SEQ ID NO: 792791 - RNA, 19 nt, Artificial Sequence
  Description of Artificial Sequence: Synthetic oligonucleotide
gaggccgucaaucuuccgc

SEQ ID NO: 792792 - RNA, 19 nt, Artificial Sequence
  Description of Artificial Sequence: Synthetic oligonucleotide
ucaguucucaguucaugga

SEQ ID NO: 792793 - RNA, 19 nt, Artificial Sequence
  Description of Artificial Sequence: Synthetic oligonucleotide
cacugaaggagucgaauag

SEQ ID NO: 792794 - RNA, 19 nt, Artificial Sequence
  Description of Artificial Sequence: Synthetic oligonucleotide
ugaaggagucgaauagcug

SEQ ID NO: 792795 - RNA, 19 nt, Artificial Sequence
  Description of Artificial Sequence: Synthetic oligonucleotide
ggcaaguguuacuaaauag

SEQ ID NO: 792796 - RNA, 19 nt, Artificial Sequence
  Description of Artificial Sequence: Synthetic oligonucleotide
cagagagugauagagggug

SEQ ID NO: 792797 - RNA, 19 nt, Artificial Sequence
  Description of Artificial Sequence: Synthetic oligonucleotide
ugucaguccucaucugccg

SEQ ID NO: 792798 - RNA, 19 nt, Artificial Sequence
  Description of Artificial Sequence: Synthetic oligonucleotide
gaaggugugguacuuguaa

SEQ ID NO: 792799 - RNA, 19 nt, Artificial Sequence
  Description of Artificial Sequence: Synthetic oligonucleotide
ugguacacgguagaggggc

SEQ ID NO: 792800 - RNA, 19 nt, Artificial Sequence
  Description of Artificial Sequence: Synthetic oligonucleotide
uugaucucuggagugaacu

SEQ ID NO: 792801 - RNA, 19 nt, Artificial Sequence
  Description of Artificial Sequence: Synthetic oligonucleotide
cucgcugggagcaccaggg

SEQ ID NO: 792802 - RNA, 19 nt, Artificial Sequence
  Description of Artificial Sequence: Synthetic oligonucleotide
ugguuaagagggguggagg

SEQ ID NO: 792803 - RNA, 19 nt, Artificial Sequence
  Description of Artificial Sequence: Synthetic oligonucleotide
acaaccguccuggaacugc

SEQ ID NO: 792804 - RNA, 19 nt, Artificial Sequence
  Description of Artificial Sequence: Synthetic oligonucleotide
gguuaagagggguggaggg

SEQ ID NO: 792805 - RNA, 19 nt, Artificial Sequence
  Description of Artificial Sequence: Synthetic oligonucleotide
ugcccagaccgucugacug

SEQ ID NO: 792806 - RNA, 19 nt, Artificial Sequence
  Description of Artificial Sequence: Synthetic oligonucleotide
auuaugguacacgguagag

SEQ ID NO: 792807 - RNA, 19 nt, Artificial Sequence
  Description of Artificial Sequence: Synthetic oligonucleotide
cuagguauguacaauaaau

SEQ ID NO: 792808 - RNA, 19 nt, Artificial Sequence
  Description of Artificial Sequence: Synthetic oligonucleotide
caagaggucaaggagagga

SEQ ID NO: 792809 - RNA, 19 nt, Artificial Sequence
  Description of Artificial Sequence: Synthetic oligonucleotide
uguccugcggccaggcucc

SEQ ID NO: 792810 - RNA, 19 nt, Artificial Sequence
  Description of Artificial Sequence: Synthetic oligonucleotide
uuucucugguacacggaug

SEQ ID NO: 792811 - RNA, 19 nt, Artificial Sequence
  Description of Artificial Sequence: Synthetic oligonucleotide
caucaugugugucuuccag

SEQ ID NO: 792812 - RNA, 19 nt, Artificial Sequence
  Description of Artificial Sequence: Synthetic oligonucleotide
cugucaguccucaucugcc

SEQ ID NO: 792813 - RNA, 19 nt, Artificial Sequence
  Description of Artificial Sequence: Synthetic oligonucleotide
gauguuuggccccucccac

SEQ ID NO: 792814 - RNA, 19 nt, Artificial Sequence
  Description of Artificial Sequence: Synthetic oligonucleotide
acacccucggcugaggacg

SEQ ID NO: 792815 - RNA, 19 nt, Artificial Sequence
  Description of Artificial Sequence: Synthetic oligonucleotide
gauagaggguguaguaccc

SEQ ID NO: 792816 - RNA, 19 nt, Artificial Sequence
  Description of Artificial Sequence: Synthetic oligonucleotide
ggugugguacuuguaaugg

SEQ ID NO: 792817 - RNA, 19 nt, Artificial Sequence
  Description of Artificial Sequence: Synthetic oligonucleotide
gagucugaugagcugcccc

SEQ ID NO: 792818 - RNA, 19 nt, Artificial Sequence
  Description of Artificial Sequence: Synthetic oligonucleotide
gacucugagucugaugagc

SEQ ID NO: 792819 - RNA, 19 nt, Artificial Sequence
  Description of Artificial Sequence: Synthetic oligonucleotide
uucaacaaccguccuggaa

SEQ ID NO: 792820 - RNA, 19 nt, Artificial Sequence
  Description of Artificial Sequence: Synthetic oligonucleotide
auggugcagagagugauag

SEQ ID NO: 792821 - RNA, 19 nt, Artificial Sequence
  Description of Artificial Sequence: Synthetic oligonucleotide
ucugccgcccacuugugga

SEQ ID NO: 792822 - RNA, 19 nt, Artificial Sequence
  Description of Artificial Sequence: Synthetic oligonucleotide
acauagcuucgguacaucu

SEQ ID NO: 792823 - RNA, 19 nt, Artificial Sequence
  Description of Artificial Sequence: Synthetic oligonucleotide
cauagaggcgcugguaccg

SEQ ID NO: 792824 - RNA, 19 nt, Artificial Sequence
  Description of Artificial Sequence: Synthetic oligonucleotide
uggaacugcccgcucgucc

SEQ ID NO: 792825 - RNA, 19 nt, Artificial Sequence
  Description of Artificial Sequence: Synthetic oligonucleotide
ggagguuucucagaggugc

SEQ ID NO: 792826 - RNA, 19 nt, Artificial Sequence
  Description of Artificial Sequence: Synthetic oligonucleotide
uuuuagcaaagguguuggc

SEQ ID NO: 792827 - RNA, 19 nt, Artificial Sequence
  Description of Artificial Sequence: Synthetic oligonucleotide
  modified_base (14)..(14): a, c, u, g, unknown or other
aggagcgauggccnuguug

SEQ ID NO: 792828 - RNA, 19 nt, Artificial Sequence
  Description of Artificial Sequence: Synthetic oligonucleotide
uguaguacccugacuucuc

SEQ ID NO: 792829 - RNA, 19 nt, Artificial Sequence
  Description of Artificial Sequence: Synthetic oligonucleotide
uagaggguguaguacccug

SEQ ID NO: 792830 - RNA, 19 nt, Artificial Sequence
  Description of Artificial Sequence: Synthetic oligonucleotide
ugguacuuguaauggugca

SEQ ID NO: 792831 - RNA, 19 nt, Artificial Sequence
  Description of Artificial Sequence: Synthetic oligonucleotide
cauagcuucgguacaucuc

SEQ ID NO: 792832 - RNA, 19 nt, Artificial Sequence
  Description of Artificial Sequence: Synthetic oligonucleotide
ucauugaggaggccgucaa

SEQ ID NO: 792833 - RNA, 19 nt, Artificial Sequence
  Description of Artificial Sequence: Synthetic oligonucleotide
acauuaugguacacgguag

SEQ ID NO: 792834 - RNA, 19 nt, Artificial Sequence
  Description of Artificial Sequence: Synthetic oligonucleotide
accguccuggaacugcccg

SEQ ID NO: 792835 - RNA, 19 nt, Artificial Sequence
  Description of Artificial Sequence: Synthetic oligonucleotide
cucccucaaccacacauag

SEQ ID NO: 792836 - RNA, 19 nt, Artificial Sequence
  Description of Artificial Sequence: Synthetic oligonucleotide
cuugcgguuauagggcucc

SEQ ID NO: 792837 - RNA, 19 nt, Artificial Sequence
  Description of Artificial Sequence: Synthetic oligonucleotide
cuagccauggcugguuccg

SEQ ID NO: 792838 - RNA, 19 nt, Artificial Sequence
  Description of Artificial Sequence: Synthetic oligonucleotide
gaccguucacuccguaaag

SEQ ID NO: 792839 - RNA, 19 nt, Artificial Sequence
  Description of Artificial Sequence: Synthetic oligonucleotide
gucuucaacaaccguccug

SEQ ID NO: 792840 - RNA, 19 nt, Artificial Sequence
  Description of Artificial Sequence: Synthetic oligonucleotide
agagugauagaggguguag

SEQ ID NO: 792841 - RNA, 19 nt, Artificial Sequence
  Description of Artificial Sequence: Synthetic oligonucleotide
uucgguacaucucccgcau

SEQ ID NO: 792842 - RNA, 19 nt, Artificial Sequence
  Description of Artificial Sequence: Synthetic oligonucleotide
accguucacuccguaaagg

SEQ ID NO: 792843 - RNA, 19 nt, Artificial Sequence
  Description of Artificial Sequence: Synthetic oligonucleotide
agguuucucagaggugccc

SEQ ID NO: 792844 - RNA, 19 nt, Artificial Sequence
  Description of Artificial Sequence: Synthetic oligonucleotide
aaggagucgaauagcugcu

SEQ ID NO: 792845 - RNA, 19 nt, Artificial Sequence
  Description of Artificial Sequence: Synthetic oligonucleotide
gagggucuugcgguuauag

SEQ ID NO: 792846 - RNA, 19 nt, Artificial Sequence
  Description of Artificial Sequence: Synthetic oligonucleotide
uccguaaaggccgucuccu

SEQ ID NO: 792847 - RNA, 19 nt, Artificial Sequence
  Description of Artificial Sequence: Synthetic oligonucleotide
gcaaguguuacuaaauaga

SEQ ID NO: 792848 - RNA, 19 nt, Artificial Sequence
  Description of Artificial Sequence: Synthetic oligonucleotide
guaguacccugacuucucc

SEQ ID NO: 792849 - RNA, 19 nt, Artificial Sequence
  Description of Artificial Sequence: Synthetic oligonucleotide
guacuuguaauggugcaga

SEQ ID NO: 792850 - RNA, 19 nt, Artificial Sequence
  Description of Artificial Sequence: Synthetic oligonucleotide
ccaaauaguuacugguggc

SEQ ID NO: 792851 - RNA, 19 nt, Artificial Sequence
  Description of Artificial Sequence: Synthetic oligonucleotide
agcgccacccucgauggcg

SEQ ID NO: 792852 - RNA, 19 nt, Artificial Sequence
  Description of Artificial Sequence: Synthetic oligonucleotide
caagauguuuggccccucc

SEQ ID NO: 792853 - RNA, 19 nt, Artificial Sequence
  Description of Artificial Sequence: Synthetic oligonucleotide
agcgcacacccucacauaa

SEQ ID NO: 792854 - RNA, 19 nt, Artificial Sequence
  Description of Artificial Sequence: Synthetic oligonucleotide
cauuaugguacacgguaga

SEQ ID NO: 792855 - RNA, 19 nt, Artificial Sequence
  Description of Artificial Sequence: Synthetic oligonucleotide
gcagcgagggagcacagag

SEQ ID NO: 792856 - RNA, 19 nt, Artificial Sequence
  Description of Artificial Sequence: Synthetic oligonucleotide
acccaaauaguuacuggug

SEQ ID NO: 792857 - RNA, 19 nt, Artificial Sequence
  Description of Artificial Sequence: Synthetic oligonucleotide
gaggguguaguacccugac

SEQ ID NO: 792858 - RNA, 19 nt, Artificial Sequence
  Description of Artificial Sequence: Synthetic oligonucleotide
caaccguccuggaacugcc

SEQ ID NO: 792859 - RNA, 19 nt, Artificial Sequence
  Description of Artificial Sequence: Synthetic oligonucleotide
acccuagguauguacaaua

SEQ ID NO: 792860 - RNA, 19 nt, Artificial Sequence
  Description of Artificial Sequence: Synthetic oligonucleotide
cuuggggagcagcuuuuag

SEQ ID NO: 792861 - RNA, 19 nt, Artificial Sequence
  Description of Artificial Sequence: Synthetic oligonucleotide
cuccguaaaggccgucucc

SEQ ID NO: 792862 - RNA, 19 nt, Artificial Sequence
  Description of Artificial Sequence: Synthetic oligonucleotide
gagccuucuggacacgcca

SEQ ID NO: 792863 - RNA, 19 nt, Artificial Sequence
  Description of Artificial Sequence: Synthetic oligonucleotide
gguacuuguaauggugcag

SEQ ID NO: 792864 - RNA, 19 nt, Artificial Sequence
  Description of Artificial Sequence: Synthetic oligonucleotide
ugucuucaacaaccguccu

SEQ ID NO: 792865 - RNA, 19 nt, Artificial Sequence
  Description of Artificial Sequence: Synthetic oligonucleotide
ugaucucuggagugaacuu

SEQ ID NO: 792866 - RNA, 19 nt, Artificial Sequence
  Description of Artificial Sequence: Synthetic oligonucleotide
uucacuccguaaaggccgu

SEQ ID NO: 792867 - RNA, 19 nt, Artificial Sequence
  Description of Artificial Sequence: Synthetic oligonucleotide
agguacaguucaucaugug

SEQ ID NO: 792868 - RNA, 19 nt, Artificial Sequence
  Description of Artificial Sequence: Synthetic oligonucleotide
cuuccgcauggguggaagg

SEQ ID NO: 792869 - RNA, 19 nt, Artificial Sequence
  Description of Artificial Sequence: Synthetic oligonucleotide
gauacacccucggcugagg

SEQ ID NO: 792870 - RNA, 19 nt, Artificial Sequence
  Description of Artificial Sequence: Synthetic oligonucleotide
ggcacaaaacugccucugg

SEQ ID NO: 792871 - RNA, 19 nt, Artificial Sequence
  Description of Artificial Sequence: Synthetic oligonucleotide
gaacgugugcagggcaucc

SEQ ID NO: 792872 - RNA, 19 nt, Artificial Sequence
  Description of Artificial Sequence: Synthetic oligonucleotide
  modified_base (12)..(12): a, c, u, g, unknown or other
gagcgauggccnuguuggg

SEQ ID NO: 792873 - RNA, 19 nt, Artificial Sequence
  Description of Artificial Sequence: Synthetic oligonucleotide
auagggcuccccggcaggc

SEQ ID NO: 792874 - RNA, 19 nt, Artificial Sequence
  Description of Artificial Sequence: Synthetic oligonucleotide
ucccgcauggcccgugucu

SEQ ID NO: 792875 - RNA, 19 nt, Artificial Sequence
  Description of Artificial Sequence: Synthetic oligonucleotide
cauggcugguuccgcauac

SEQ ID NO: 792876 - RNA, 19 nt, Artificial Sequence
  Description of Artificial Sequence: Synthetic oligonucleotide
caugugugucuuccagggc

SEQ ID NO: 792877 - RNA, 19 nt, Artificial Sequence
  Description of Artificial Sequence: Synthetic oligonucleotide
gugguuaagagggguggag

SEQ ID NO: 792878 - RNA, 19 nt, Artificial Sequence
  Description of Artificial Sequence: Synthetic oligonucleotide
gucaguccucaucugccgc

SEQ ID NO: 792879 - RNA, 19 nt, Artificial Sequence
  Description of Artificial Sequence: Synthetic oligonucleotide
cuguccugcggccaggcuc

SEQ ID NO: 792880 - RNA, 19 nt, Artificial Sequence
  Description of Artificial Sequence: Synthetic oligonucleotide
gagguagggcccuuggucu

SEQ ID NO: 792881 - RNA, 19 nt, Artificial Sequence
  Description of Artificial Sequence: Synthetic oligonucleotide
guacccugacuucuccagc

SEQ ID NO: 792882 - RNA, 19 nt, Artificial Sequence
  Description of Artificial Sequence: Synthetic oligonucleotide
uuccgcauacacugcugga

SEQ ID NO: 792883 - RNA, 19 nt, Artificial Sequence
  Description of Artificial Sequence: Synthetic oligonucleotide
cacgccagaugggugaggc

SEQ ID NO: 792884 - RNA, 19 nt, Artificial Sequence
  Description of Artificial Sequence: Synthetic oligonucleotide
acgugugcagggcauccug

SEQ ID NO: 792885 - RNA, 19 nt, Artificial Sequence
  Description of Artificial Sequence: Synthetic oligonucleotide
ggucuugcgguuauagggc

SEQ ID NO: 792886 - RNA, 19 nt, Artificial Sequence
  Description of Artificial Sequence: Synthetic oligonucleotide
gcacaaaacugccucuggc

SEQ ID NO: 792887 - RNA, 19 nt, Artificial Sequence
  Description of Artificial Sequence: Synthetic oligonucleotide
ggaagcucgagaggggagg

SEQ ID NO: 792888 - RNA, 19 nt, Artificial Sequence
  Description of Artificial Sequence: Synthetic oligonucleotide
aaccguccuggaacugccc

SEQ ID NO: 792889 - RNA, 19 nt, Artificial Sequence
  Description of Artificial Sequence: Synthetic oligonucleotide
agcaaagguguuggccugg

SEQ ID NO: 792890 - RNA, 19 nt, Artificial Sequence
  Description of Artificial Sequence: Synthetic oligonucleotide
auacauuaugguacacggu

SEQ ID NO: 792891 - RNA, 19 nt, Artificial Sequence
  Description of Artificial Sequence: Synthetic oligonucleotide
gaggacgaccccuucccuc

SEQ ID NO: 792892 - RNA, 19 nt, Artificial Sequence
  Description of Artificial Sequence: Synthetic oligonucleotide
uggaccguucacuccguaa

SEQ ID NO: 792893 - RNA, 19 nt, Artificial Sequence
  Description of Artificial Sequence: Synthetic oligonucleotide
aggaggccgucaaucuucc

SEQ ID NO: 792894 - RNA, 19 nt, Artificial Sequence
  Description of Artificial Sequence: Synthetic oligonucleotide
cuucgguacaucucccgca

SEQ ID NO: 792895 - RNA, 19 nt, Artificial Sequence
  Description of Artificial Sequence: Synthetic oligonucleotide
auagaggcgcugguaccgg

SEQ ID NO: 792896 - RNA, 19 nt, Artificial Sequence
  Description of Artificial Sequence: Synthetic oligonucleotide
gaccgucugacuggcaaug

SEQ ID NO: 792897 - RNA, 19 nt, Artificial Sequence
  Description of Artificial Sequence: Synthetic oligonucleotide
ucucugguacacggauggg

SEQ ID NO: 792898 - RNA, 19 nt, Artificial Sequence
  Description of Artificial Sequence: Synthetic oligonucleotide
guuauagggcuccccggca

SEQ ID NO: 792899 - RNA, 19 nt, Artificial Sequence
  Description of Artificial Sequence: Synthetic oligonucleotide
acgaccccuucccuccugg

SEQ ID NO: 792900 - RNA, 19 nt, Artificial Sequence
  Description of Artificial Sequence: Synthetic oligonucleotide
uacacccucggcugaggac

SEQ ID NO: 792901 - RNA, 19 nt, Artificial Sequence
  Description of Artificial Sequence: Synthetic oligonucleotide
gacagccgggagguggugg

SEQ ID NO: 792902 - RNA, 19 nt, Artificial Sequence
  Description of Artificial Sequence: Synthetic oligonucleotide
guuacuaaauagacauuua

SEQ ID NO: 792903 - RNA, 19 nt, Artificial Sequence
  Description of Artificial Sequence: Synthetic oligonucleotide
ucuugcgguuauagggcuc

SEQ ID NO: 792904 - RNA, 19 nt, Artificial Sequence
  Description of Artificial Sequence: Synthetic oligonucleotide
uggugcagucacccgcagc

SEQ ID NO: 792905 - RNA, 19 nt, Artificial Sequence
  Description of Artificial Sequence: Synthetic oligonucleotide
ugaggacgaccccuucccu

SEQ ID NO: 792906 - RNA, 19 nt, Artificial Sequence
  Description of Artificial Sequence: Synthetic oligonucleotide
uuccgcauggguggaaggu

SEQ ID NO: 792907 - RNA, 19 nt, Artificial Sequence
  Description of Artificial Sequence: Synthetic oligonucleotide
auacacccucggcugagga

SEQ ID NO: 792908 - RNA, 19 nt, Artificial Sequence
  Description of Artificial Sequence: Synthetic oligonucleotide
caccacacgcccuugggga

SEQ ID NO: 792909 - RNA, 19 nt, Artificial Sequence
  Description of Artificial Sequence: Synthetic oligonucleotide
ggacuacuuccucuugucc

SEQ ID NO: 792910 - RNA, 19 nt, Artificial Sequence
  Description of Artificial Sequence: Synthetic oligonucleotide
ccguucacuccguaaaggc

SEQ ID NO: 792911 - RNA, 19 nt, Artificial Sequence
  Description of Artificial Sequence: Synthetic oligonucleotide
ccugucaguccucaucugc

SEQ ID NO: 792912 - RNA, 19 nt, Artificial Sequence
  Description of Artificial Sequence: Synthetic oligonucleotide
cugguuccgcauacacugc

SEQ ID NO: 792913 - RNA, 19 nt, Artificial Sequence
  Description of Artificial Sequence: Synthetic oligonucleotide
gggugguuaagaggggugg

SEQ ID NO: 792914 - RNA, 19 nt, Artificial Sequence
  Description of Artificial Sequence: Synthetic oligonucleotide
gagguuucucagaggugcc

SEQ ID NO: 792915 - RNA, 19 nt, Artificial Sequence
  Description of Artificial Sequence: Synthetic oligonucleotide
ucaccuucgugggucuagc

SEQ ID NO: 792916 - RNA, 19 nt, Artificial Sequence
  Description of Artificial Sequence: Synthetic oligonucleotide
uucggagguggcucagccu

SEQ ID NO: 792917 - RNA, 19 nt, Artificial Sequence
  Description of Artificial Sequence: Synthetic oligonucleotide
uccugggcccgcacaacac

SEQ ID NO: 792918 - RNA, 19 nt, Artificial Sequence
  Description of Artificial Sequence: Synthetic oligonucleotide
cacacccucacauaauccu

SEQ ID NO: 792919 - RNA, 19 nt, Artificial Sequence
  Description of Artificial Sequence: Synthetic oligonucleotide
cgcauccccaaaauaaccc

SEQ ID NO: 792920 - RNA, 19 nt, Artificial Sequence
  Description of Artificial Sequence: Synthetic oligonucleotide
aacaaccguccuggaacug

SEQ ID NO: 792921 - RNA, 19 nt, Artificial Sequence
  Description of Artificial Sequence: Synthetic oligonucleotide
aggguguaguacccugacu

SEQ ID NO: 792922 - RNA, 19 nt, Artificial Sequence
  Description of Artificial Sequence: Synthetic oligonucleotide
uuccgagcgcacacccuca

SEQ ID NO: 792923 - RNA, 19 nt, Artificial Sequence
  Description of Artificial Sequence: Synthetic oligonucleotide
auagaggguguaguacccu

SEQ ID NO: 792924 - RNA, 19 nt, Artificial Sequence
  Description of Artificial Sequence: Synthetic oligonucleotide
aggagucgaauagcugcuc

SEQ ID NO: 792925 - RNA, 19 nt, Artificial Sequence
  Description of Artificial Sequence: Synthetic oligonucleotide
uaaaggccgucuccuucuc

SEQ ID NO: 792926 - RNA, 19 nt, Artificial Sequence
  Description of Artificial Sequence: Synthetic oligonucleotide
gguuucucagaggugcccc

SEQ ID NO: 792927 - RNA, 19 nt, Artificial Sequence
  Description of Artificial Sequence: Synthetic oligonucleotide
gcuguguggauacacccuc

SEQ ID NO: 792928 - RNA, 19 nt, Artificial Sequence
  Description of Artificial Sequence: Synthetic oligonucleotide
uggugcagagagugauaga

SEQ ID NO: 792929 - RNA, 19 nt, Artificial Sequence
  Description of Artificial Sequence: Synthetic oligonucleotide
gguguaguacccugacuuc

SEQ ID NO: 792930 - RNA, 19 nt, Artificial Sequence
  Description of Artificial Sequence: Synthetic oligonucleotide
uguggaccguucacuccgu

SEQ ID NO: 792931 - RNA, 19 nt, Artificial Sequence
  Description of Artificial Sequence: Synthetic oligonucleotide
agggcaaguguuacuaaau

SEQ ID NO: 792932 - RNA, 19 nt, Artificial Sequence
  Description of Artificial Sequence: Synthetic oligonucleotide
aacgugugcagggcauccu

SEQ ID NO: 792933 - RNA, 19 nt, Artificial Sequence
  Description of Artificial Sequence: Synthetic oligonucleotide
ugcggccaggcuccuguca

SEQ ID NO: 792934 - RNA, 19 nt, Artificial Sequence
  Description of Artificial Sequence: Synthetic oligonucleotide
cagggcaaguguuacuaaa

SEQ ID NO: 792935 - RNA, 19 nt, Artificial Sequence
  Description of Artificial Sequence: Synthetic oligonucleotide
cguucacuccguaaaggcc

SEQ ID NO: 792936 - RNA, 19 nt, Artificial Sequence
  Description of Artificial Sequence: Synthetic oligonucleotide
acagggcaaguguuacuaa

SEQ ID NO: 792937 - RNA, 19 nt, Artificial Sequence
  Description of Artificial Sequence: Synthetic oligonucleotide
gaagagccuucuggacacg

SEQ ID NO: 792938 - RNA, 19 nt, Artificial Sequence
  Description of Artificial Sequence: Synthetic oligonucleotide
agaccgucugacuggcaau

SEQ ID NO: 792939 - RNA, 19 nt, Artificial Sequence
  Description of Artificial Sequence: Synthetic oligonucleotide
gacacgccagaugggugag

SEQ ID NO: 792940 - RNA, 19 nt, Artificial Sequence
  Description of Artificial Sequence: Synthetic oligonucleotide
gaccccuucccuccuggca

SEQ ID NO: 792941 - RNA, 19 nt, Artificial Sequence
  Description of Artificial Sequence: Synthetic oligonucleotide
guggaagguacaguucauc

SEQ ID NO: 792942 - RNA, 19 nt, Artificial Sequence
  Description of Artificial Sequence: Synthetic oligonucleotide
ggaccguucacuccguaaa

SEQ ID NO: 792943 - RNA, 19 nt, Artificial Sequence
  Description of Artificial Sequence: Synthetic oligonucleotide
ggacacgccagauggguga

SEQ ID NO: 792944 - RNA, 19 nt, Artificial Sequence
  Description of Artificial Sequence: Synthetic oligonucleotide
cucaucugccgcccacuug

SEQ ID NO: 792945 - RNA, 19 nt, Artificial Sequence
  Description of Artificial Sequence: Synthetic oligonucleotide
agagagugauagagggugu

SEQ ID NO: 792946 - RNA, 19 nt, Artificial Sequence
  Description of Artificial Sequence: Synthetic oligonucleotide
gcaaggggagccuucucac

SEQ ID NO: 792947 - RNA, 19 nt, Artificial Sequence
  Description of Artificial Sequence: Synthetic oligonucleotide
gcucaggugucaguucugg

SEQ ID NO: 792948 - RNA, 19 nt, Artificial Sequence
  Description of Artificial Sequence: Synthetic oligonucleotide
cagaccgucugacuggcaa

SEQ ID NO: 792949 - RNA, 19 nt, Artificial Sequence
  Description of Artificial Sequence: Synthetic oligonucleotide
guaauggugcagagaguga

SEQ ID NO: 792950 - RNA, 19 nt, Artificial Sequence
  Description of Artificial Sequence: Synthetic oligonucleotide
ccgcacaacacuucucuug

SEQ ID NO: 792951 - RNA, 19 nt, Artificial Sequence
  Description of Artificial Sequence: Synthetic oligonucleotide
uccgagcgcacacccucac

SEQ ID NO: 792952 - RNA, 19 nt, Artificial Sequence
  Description of Artificial Sequence: Synthetic oligonucleotide
gcugugggaacgugugcag

SEQ ID NO: 792953 - RNA, 19 nt, Artificial Sequence
  Description of Artificial Sequence: Synthetic oligonucleotide
aggaagcucgagaggggag

SEQ ID NO: 792954 - RNA, 19 nt, Artificial Sequence
  Description of Artificial Sequence: Synthetic oligonucleotide
gcccagaccgucugacugg

SEQ ID NO: 792955 - RNA, 19 nt, Artificial Sequence
  Description of Artificial Sequence: Synthetic oligonucleotide
acaagauguuuggccccuc

SEQ ID NO: 792956 - RNA, 19 nt, Artificial Sequence
  Description of Artificial Sequence: Synthetic oligonucleotide
cucgauggcgagggucugg

SEQ ID NO: 792957 - RNA, 19 nt, Artificial Sequence
  Description of Artificial Sequence: Synthetic oligonucleotide
acuucacauagaggcgcug

SEQ ID NO: 792958 - RNA, 19 nt, Artificial Sequence
  Description of Artificial Sequence: Synthetic oligonucleotide
uccgcauggguggaaggua

SEQ ID NO: 792959 - RNA, 19 nt, Artificial Sequence
  Description of Artificial Sequence: Synthetic oligonucleotide
cauggcccgugucuucaac

SEQ ID NO: 792960 - RNA, 19 nt, Artificial Sequence
  Description of Artificial Sequence: Synthetic oligonucleotide
ugggcccgcacaacacuuc

SEQ ID NO: 792961 - RNA, 19 nt, Artificial Sequence
  Description of Artificial Sequence: Synthetic oligonucleotide
uccucaucugccgcccacu

SEQ ID NO: 792962 - RNA, 19 nt, Artificial Sequence
  Description of Artificial Sequence: Synthetic oligonucleotide
gagagugauagagggugua

SEQ ID NO: 792963 - RNA, 19 nt, Artificial Sequence
  Description of Artificial Sequence: Synthetic oligonucleotide
cucuggccguccuugaucu

SEQ ID NO: 792964 - RNA, 19 nt, Artificial Sequence
  Description of Artificial Sequence: Synthetic oligonucleotide
cugccgcccacuuguggac

SEQ ID NO: 792965 - RNA, 19 nt, Artificial Sequence
  Description of Artificial Sequence: Synthetic oligonucleotide
gggcaaguguuacuaaaua

SEQ ID NO: 792966 - RNA, 19 nt, Artificial Sequence
  Description of Artificial Sequence: Synthetic oligonucleotide
guguaguacccugacuucu

SEQ ID NO: 792967 - RNA, 19 nt, Artificial Sequence
  Description of Artificial Sequence: Synthetic oligonucleotide
uggcgagggucuggucucg

SEQ ID NO: 792968 - RNA, 19 nt, Artificial Sequence
  Description of Artificial Sequence: Synthetic oligonucleotide
gacgaccccuucccuccug

SEQ ID NO: 792969 - RNA, 19 nt, Artificial Sequence
  Description of Artificial Sequence: Synthetic oligonucleotide
agggcaaggggagccuucu

SEQ ID NO: 792970 - RNA, 19 nt, Artificial Sequence
  Description of Artificial Sequence: Synthetic oligonucleotide
gugugguacuuguaauggu

SEQ ID NO: 792971 - RNA, 19 nt, Artificial Sequence
  Description of Artificial Sequence: Synthetic oligonucleotide
ccgucugacuggcaauggg

SEQ ID NO: 792972 - RNA, 19 nt, Artificial Sequence
  Description of Artificial Sequence: Synthetic oligonucleotide
caacaaccguccuggaacu

SEQ ID NO: 792973 - RNA, 19 nt, Artificial Sequence
  Description of Artificial Sequence: Synthetic oligonucleotide
ggauacacccucggcugag

SEQ ID NO: 792974 - RNA, 19 nt, Artificial Sequence
  Description of Artificial Sequence: Synthetic oligonucleotide
ugccgcccacuuguggacc

SEQ ID NO: 792975 - RNA, 19 nt, Artificial Sequence
  Description of Artificial Sequence: Synthetic oligonucleotide
ccuagguauguacaauaaa

SEQ ID NO: 792976 - RNA, 19 nt, Artificial Sequence
  Description of Artificial Sequence: Synthetic oligonucleotide
ccgcauggguggaagguac

SEQ ID NO: 792977 - RNA, 19 nt, Artificial Sequence
  Description of Artificial Sequence: Synthetic oligonucleotide
acgccagaugggugaggcu

SEQ ID NO: 792978 - RNA, 19 nt, Artificial Sequence
  Description of Artificial Sequence: Synthetic oligonucleotide
uugcgguuauagggcuccc

SEQ ID NO: 792979 - RNA, 19 nt, Artificial Sequence
  Description of Artificial Sequence: Synthetic oligonucleotide
ggucaaggagaggagggaa

SEQ ID NO: 792980 - RNA, 19 nt, Artificial Sequence
  Description of Artificial Sequence: Synthetic oligonucleotide
gccgcccacuuguggaccg

SEQ ID NO: 792981 - RNA, 19 nt, Artificial Sequence
  Description of Artificial Sequence: Synthetic oligonucleotide
ccucgcugggagcaccagg

SEQ ID NO: 792982 - RNA, 19 nt, Artificial Sequence
  Description of Artificial Sequence: Synthetic oligonucleotide
aggcucacggccagucugu

SEQ ID NO: 792983 - RNA, 19 nt, Artificial Sequence
  Description of Artificial Sequence: Synthetic oligonucleotide
cccacccuagguauguaca

SEQ ID NO: 792984 - RNA, 19 nt, Artificial Sequence
  Description of Artificial Sequence: Synthetic oligonucleotide
cacccgcagcggcuguggg

SEQ ID NO: 792985 - RNA, 19 nt, Artificial Sequence
  Description of Artificial Sequence: Synthetic oligonucleotide
ggugguuaagaggggugga

SEQ ID NO: 792986 - RNA, 19 nt, Artificial Sequence
  Description of Artificial Sequence: Synthetic oligonucleotide
cagucacccgcagcggcug

SEQ ID NO: 792987 - RNA, 19 nt, Artificial Sequence
  Description of Artificial Sequence: Synthetic oligonucleotide
agucacccgcagcggcugu

SEQ ID NO: 792988 - RNA, 19 nt, Artificial Sequence
  Description of Artificial Sequence: Synthetic oligonucleotide
cgcacacccucacauaauc

SEQ ID NO: 792989 - RNA, 19 nt, Artificial Sequence
  Description of Artificial Sequence: Synthetic oligonucleotide
gggucuagcuuuggacagc

SEQ ID NO: 792990 - RNA, 19 nt, Artificial Sequence
  Description of Artificial Sequence: Synthetic oligonucleotide
cccuagguauguacaauaa

SEQ ID NO: 792991 - RNA, 19 nt, Artificial Sequence
  Description of Artificial Sequence: Synthetic oligonucleotide
ccucuggccguccuugauc

SEQ ID NO: 792992 - RNA, 19 nt, Artificial Sequence
  Description of Artificial Sequence: Synthetic oligonucleotide
ggaggccgucaaucuuccg

SEQ ID NO: 792993 - RNA, 19 nt, Artificial Sequence
  Description of Artificial Sequence: Synthetic oligonucleotide
gguagggcccuuggucugc

SEQ ID NO: 792994 - RNA, 19 nt, Artificial Sequence
  Description of Artificial Sequence: Synthetic oligonucleotide
ggcagggguuccagcaaag

SEQ ID NO: 792995 - RNA, 19 nt, Artificial Sequence
  Description of Artificial Sequence: Synthetic oligonucleotide
guagggcccuuggucugcc

SEQ ID NO: 792996 - RNA, 19 nt, Artificial Sequence
  Description of Artificial Sequence: Synthetic oligonucleotide
ggacagacaaaggcauuaa

SEQ ID NO: 792997 - RNA, 19 nt, Artificial Sequence
  Description of Artificial Sequence: Synthetic oligonucleotide
  modified_base (17)..(17): a, c, u, g, unknown or other
ggcaggagcgauggccnug

SEQ ID NO: 792998 - RNA, 19 nt, Artificial Sequence
  Description of Artificial Sequence: Synthetic oligonucleotide
aggcccgccgccugcugaa

SEQ ID NO: 792999 - RNA, 19 nt, Artificial Sequence
  Description of Artificial Sequence: Synthetic oligonucleotide
ggaacgugugcagggcauc

SEQ ID NO: 793000 - RNA, 19 nt, Artificial Sequence
  Description of Artificial Sequence: Synthetic oligonucleotide
caaccacacauagaauuuu

SEQ ID NO: 793001 - RNA, 19 nt, Artificial Sequence
  Description of Artificial Sequence: Synthetic oligonucleotide
aggcgcugguaccgguuuu

SEQ ID NO: 793002 - RNA, 19 nt, Artificial Sequence
  Description of Artificial Sequence: Synthetic oligonucleotide
cccggcaggccgcagccgc

SEQ ID NO: 793003 - RNA, 19 nt, Artificial Sequence
  Description of Artificial Sequence: Synthetic oligonucleotide
ccacccuagguauguacaa

SEQ ID NO: 793004 - RNA, 19 nt, Artificial Sequence
  Description of Artificial Sequence: Synthetic oligonucleotide
gccguccuugaucucugga

SEQ ID NO: 793005 - RNA, 19 nt, Artificial Sequence
  Description of Artificial Sequence: Synthetic oligonucleotide
ccuucgugggucuagcuuu

SEQ ID NO: 793006 - RNA, 19 nt, Artificial Sequence
  Description of Artificial Sequence: Synthetic oligonucleotide
cacuccguaaaggccgucu

SEQ ID NO: 793007 - RNA, 19 nt, Artificial Sequence
  Description of Artificial Sequence: Synthetic oligonucleotide
gguacacgguagaggggca

SEQ ID NO: 793008 - RNA, 19 nt, Artificial Sequence
  Description of Artificial Sequence: Synthetic oligonucleotide
cacccucggcugaggacga

SEQ ID NO: 793009 - RNA, 19 nt, Artificial Sequence
  Description of Artificial Sequence: Synthetic oligonucleotide
guagaggggcaggagcgau

SEQ ID NO: 793010 - RNA, 19 nt, Artificial Sequence
  Description of Artificial Sequence: Synthetic oligonucleotide
cagcgagggagcacagagu

SEQ ID NO: 793011 - RNA, 19 nt, Artificial Sequence
  Description of Artificial Sequence: Synthetic oligonucleotide
cagcgccacccucgauggc

SEQ ID NO: 793012 - RNA, 19 nt, Artificial Sequence
  Description of Artificial Sequence: Synthetic oligonucleotide
caggcccgccgccugcuga

SEQ ID NO: 793013 - RNA, 19 nt, Artificial Sequence
  Description of Artificial Sequence: Synthetic oligonucleotide
cugcggccaggcuccuguc

SEQ ID NO: 793014 - RNA, 19 nt, Artificial Sequence
  Description of Artificial Sequence: Synthetic oligonucleotide
ggacagggcaaguguuacu

SEQ ID NO: 793015 - RNA, 19 nt, Artificial Sequence
  Description of Artificial Sequence: Synthetic oligonucleotide
ggcgagggucuggucucgg

SEQ ID NO: 793016 - RNA, 19 nt, Artificial Sequence
  Description of Artificial Sequence: Synthetic oligonucleotide
cacacgcccuuggggagca

SEQ ID NO: 793017 - RNA, 19 nt, Artificial Sequence
  Description of Artificial Sequence: Synthetic oligonucleotide
gcaaagguguuggccugga

SEQ ID NO: 793018 - RNA, 19 nt, Artificial Sequence
  Description of Artificial Sequence: Synthetic oligonucleotide
cauugaggaggccgucaau

SEQ ID NO: 793019 - RNA, 19 nt, Artificial Sequence
  Description of Artificial Sequence: Synthetic oligonucleotide
cccucggcugaggacgacc

SEQ ID NO: 793020 - RNA, 19 nt, Artificial Sequence
  Description of Artificial Sequence: Synthetic oligonucleotide
guccucgcugggagcacca

SEQ ID NO: 793021 - RNA, 19 nt, Artificial Sequence
  Description of Artificial Sequence: Synthetic oligonucleotide
ggcugaggacgaccccuuc

SEQ ID NO: 793022 - RNA, 19 nt, Artificial Sequence
  Description of Artificial Sequence: Synthetic oligonucleotide
ccacacgcccuuggggagc

SEQ ID NO: 793023 - RNA, 19 nt, Artificial Sequence
  Description of Artificial Sequence: Synthetic oligonucleotide
guggaccguucacuccgua

SEQ ID NO: 793024 - RNA, 19 nt, Artificial Sequence
  Description of Artificial Sequence: Synthetic oligonucleotide
cugggcccgcacaacacuu

SEQ ID NO: 793025 - RNA, 19 nt, Artificial Sequence
  Description of Artificial Sequence: Synthetic oligonucleotide
cacccuagguauguacaau

SEQ ID NO: 793026 - RNA, 19 nt, Artificial Sequence
  Description of Artificial Sequence: Synthetic oligonucleotide
cugcccagaccgucugacu

SEQ ID NO: 793027 - RNA, 19 nt, Artificial Sequence
  Description of Artificial Sequence: Synthetic oligonucleotide
ccucccauccucucaaguu

SEQ ID NO: 793028 - RNA, 19 nt, Artificial Sequence
  Description of Artificial Sequence: Synthetic oligonucleotide
ccgcauacacugcuggacu

SEQ ID NO: 793029 - RNA, 19 nt, Artificial Sequence
  Description of Artificial Sequence: Synthetic oligonucleotide
gggcccgcacaacacuucu

SEQ ID NO: 793030 - RNA, 19 nt, Artificial Sequence
  Description of Artificial Sequence: Synthetic oligonucleotide
ggcagcgagggagcacaga

SEQ ID NO: 793031 - RNA, 19 nt, Artificial Sequence
  Description of Artificial Sequence: Synthetic oligonucleotide
gggaacgugugcagggcau

SEQ ID NO: 793032 - RNA, 19 nt, Artificial Sequence
  Description of Artificial Sequence: Synthetic oligonucleotide
ggacagccgggagguggug

SEQ ID NO: 793033 - RNA, 19 nt, Artificial Sequence
  Description of Artificial Sequence: Synthetic oligonucleotide
cgcauacacugcuggacua

SEQ ID NO: 793034 - RNA, 19 nt, Artificial Sequence
  Description of Artificial Sequence: Synthetic oligonucleotide
ggcccgcacaacacuucuc

SEQ ID NO: 793035 - RNA, 19 nt, Artificial Sequence
  Description of Artificial Sequence: Synthetic oligonucleotide
cgaccccuucccuccuggc

SEQ ID NO: 793036 - RNA, 19 nt, Artificial Sequence
  Description of Artificial Sequence: Synthetic oligonucleotide
cgagcgcacacccucacau

SEQ ID NO: 793037 - RNA, 19 nt, Artificial Sequence
  Description of Artificial Sequence: Synthetic oligonucleotide
ggagggcuguguggauaca

SEQ ID NO: 793038 - RNA, 19 nt, Artificial Sequence
  Description of Artificial Sequence: Synthetic oligonucleotide
ccgcauggcccgugucuuc

SEQ ID NO: 793039 - RNA, 19 nt, Artificial Sequence
  Description of Artificial Sequence: Synthetic oligonucleotide
cgcauggguggaagguaca

SEQ ID NO: 793040 - RNA, 19 nt, Artificial Sequence
  Description of Artificial Sequence: Synthetic oligonucleotide
ccauggcugguuccgcaua

SEQ ID NO: 793041 - RNA, 19 nt, Artificial Sequence
  Description of Artificial Sequence: Synthetic oligonucleotide
ggaucaugucuggguccaa

SEQ ID NO: 793042 - RNA, 19 nt, Artificial Sequence
  Description of Artificial Sequence: Synthetic oligonucleotide
ccgagcgcacacccucaca

SEQ ID NO: 793043 - RNA, 19 nt, Artificial Sequence
  Description of Artificial Sequence: Synthetic oligonucleotide
ccacauagcuucgguacau

SEQ ID NO: 793044 - RNA, 19 nt, Artificial Sequence
  Description of Artificial Sequence: Synthetic oligonucleotide
ggccgucaaucuuccgcau

SEQ ID NO: 793045 - RNA, 19 nt, Artificial Sequence
  Description of Artificial Sequence: Synthetic oligonucleotide
ggacgaccccuucccuccu

SEQ ID NO: 793046 - RNA, 19 nt, Artificial Sequence
  Description of Artificial Sequence: Synthetic oligonucleotide
ccgugucuucaacaaccgu

SEQ ID NO: 793047 - RNA, 19 nt, Artificial Sequence
  Description of Artificial Sequence: Synthetic oligonucleotide
ccagaccgucugacuggca

SEQ ID NO: 793048 - RNA, 19 nt, Artificial Sequence
  Description of Artificial Sequence: Synthetic oligonucleotide
cagcggcugugggccugug

SEQ ID NO: 793049 - RNA, 19 nt, Artificial Sequence
  Description of Artificial Sequence: Synthetic oligonucleotide
  modified_base (18)..(18): a, c, u, g, unknown or other
gggcaggagcgauggccnu

SEQ ID NO: 793050 - RNA, 19 nt, Artificial Sequence
  Description of Artificial Sequence: Synthetic oligonucleotide
gccucuggccguccuugau

SEQ ID NO: 793051 - RNA, 19 nt, Artificial Sequence
  Description of Artificial Sequence: Synthetic oligonucleotide
ggcucacggccagucugua

SEQ ID NO: 793052 - RNA, 19 nt, Artificial Sequence
  Description of Artificial Sequence: Synthetic oligonucleotide
ccuuggggagcagcuuuua

SEQ ID NO: 793053 - RNA, 19 nt, Artificial Sequence
  Description of Artificial Sequence: Synthetic oligonucleotide
ccggcaggccgcagccgca

SEQ ID NO: 793054 - RNA, 19 nt, Artificial Sequence
  Description of Artificial Sequence: Synthetic oligonucleotide
ccucaucugccgcccacuu

SEQ ID NO: 793055 - RNA, 19 nt, Artificial Sequence
  Description of Artificial Sequence: Synthetic oligonucleotide
ccuucccuccuggcagcga

SEQ ID NO: 793056 - RNA, 19 nt, Artificial Sequence
  Description of Artificial Sequence: Synthetic oligonucleotide
ccguaaaggccgucuccuu

SEQ ID NO: 793057 - RNA, 19 nt, Artificial Sequence
  Description of Artificial Sequence: Synthetic oligonucleotide
cccgcacaacacuucucuu

SEQ ID NO: 793058 - RNA, 19 nt, Artificial Sequence
  Description of Artificial Sequence: Synthetic oligonucleotide
cacccucgauggcgagggu

SEQ ID NO: 793059 - RNA, 19 nt, Artificial Sequence
  Description of Artificial Sequence: Synthetic oligonucleotide
  modified_base (15)..(15): a, c, u, g, unknown or other
caggagcgauggccnuguu

SEQ ID NO: 793060 - RNA, 19 nt, Artificial Sequence
  Description of Artificial Sequence: Synthetic oligonucleotide
cccgcauggcccgugucuu

SEQ ID NO: 793061 - RNA, 19 nt, Artificial Sequence
  Description of Artificial Sequence: Synthetic oligonucleotide
guccugcggccaggcuccu

SEQ ID NO: 793062 - RNA, 19 nt, Artificial Sequence
  Description of Artificial Sequence: Synthetic oligonucleotide
ccgcccacuuguggaccgu

SEQ ID NO: 793063 - RNA, 19 nt, Artificial Sequence
  Description of Artificial Sequence: Synthetic oligonucleotide
aauaacacaggguuugugc

SEQ ID NO: 793064 - RNA, 19 nt, Artificial Sequence
  Description of Artificial Sequence: Synthetic oligonucleotide
cuuaaaagacuccauaucg

SEQ ID NO: 793065 - RNA, 19 nt, Artificial Sequence
  Description of Artificial Sequence: Synthetic oligonucleotide
auguuaaacugucagaggg

SEQ ID NO: 793066 - RNA, 19 nt, Artificial Sequence
  Description of Artificial Sequence: Synthetic oligonucleotide
auugacaaccaccaaaccg

SEQ ID NO: 793067 - RNA, 19 nt, Artificial Sequence
  Description of Artificial Sequence: Synthetic oligonucleotide
uuuaccuugagaacagccg

SEQ ID NO: 793068 - RNA, 19 nt, Artificial Sequence
  Description of Artificial Sequence: Synthetic oligonucleotide
uuaaaagacuccauaucgg

SEQ ID NO: 793069 - RNA, 19 nt, Artificial Sequence
  Description of Artificial Sequence: Synthetic oligonucleotide
ugagcguucacaaacagcu

SEQ ID NO: 793070 - RNA, 19 nt, Artificial Sequence
  Description of Artificial Sequence: Synthetic oligonucleotide
ugucuauugaagcaguugc

SEQ ID NO: 793071 - RNA, 19 nt, Artificial Sequence
  Description of Artificial Sequence: Synthetic oligonucleotide
uauugaagcaguugcaucc

SEQ ID NO: 793072 - RNA, 19 nt, Artificial Sequence
  Description of Artificial Sequence: Synthetic oligonucleotide
uauuauagcuuccacauua

SEQ ID NO: 793073 - RNA, 19 nt, Artificial Sequence
  Description of Artificial Sequence: Synthetic oligonucleotide
aacaacaucuuagaucugg

SEQ ID NO: 793074 - RNA, 19 nt, Artificial Sequence
  Description of Artificial Sequence: Synthetic oligonucleotide
ucuuaagaagcaaagucca

SEQ ID NO: 793075 - RNA, 19 nt, Artificial Sequence
  Description of Artificial Sequence: Synthetic oligonucleotide
uugacaaccaccaaaccga

SEQ ID NO: 793076 - RNA, 19 nt, Artificial Sequence
  Description of Artificial Sequence: Synthetic oligonucleotide
ucagacaguaucuauaggu

SEQ ID NO: 793077 - RNA, 19 nt, Artificial Sequence
  Description of Artificial Sequence: Synthetic oligonucleotide
uuuagcuaagaccucagac

SEQ ID NO: 793078 - RNA, 19 nt, Artificial Sequence
  Description of Artificial Sequence: Synthetic oligonucleotide
aacugauggaauguuuucc

SEQ ID NO: 793079 - RNA, 19 nt, Artificial Sequence
  Description of Artificial Sequence: Synthetic oligonucleotide
uugaacugauuguagagag

SEQ ID NO: 793080 - RNA, 19 nt, Artificial Sequence
  Description of Artificial Sequence: Synthetic oligonucleotide
uuuaaguuugccaucuccu

SEQ ID NO: 793081 - RNA, 19 nt, Artificial Sequence
  Description of Artificial Sequence: Synthetic oligonucleotide
uuagcuaagaccucagacu

SEQ ID NO: 793082 - RNA, 19 nt, Artificial Sequence
  Description of Artificial Sequence: Synthetic oligonucleotide
aguucuaucagcuuuuaaa

SEQ ID NO: 793083 - RNA, 19 nt, Artificial Sequence
  Description of Artificial Sequence: Synthetic oligonucleotide
guauguuaaacugucagag

SEQ ID NO: 793084 - RNA, 19 nt, Artificial Sequence
  Description of Artificial Sequence: Synthetic oligonucleotide
cauuaugcagcaaugugag

SEQ ID NO: 793085 - RNA, 19 nt, Artificial Sequence
  Description of Artificial Sequence: Synthetic oligonucleotide
uauguuaaacugucagagg

SEQ ID NO: 793086 - RNA, 19 nt, Artificial Sequence
  Description of Artificial Sequence: Synthetic oligonucleotide
ucggguaucaucaaacagu

SEQ ID NO: 793087 - RNA, 19 nt, Artificial Sequence
  Description of Artificial Sequence: Synthetic oligonucleotide
auagcuuccacauuaguaa

SEQ ID NO: 793088 - RNA, 19 nt, Artificial Sequence
  Description of Artificial Sequence: Synthetic oligonucleotide
uuuuacuuuggauucaaau

SEQ ID NO: 793089 - RNA, 19 nt, Artificial Sequence
  Description of Artificial Sequence: Synthetic oligonucleotide
acuuguuaguccuggaauc

SEQ ID NO: 793090 - RNA, 19 nt, Artificial Sequence
  Description of Artificial Sequence: Synthetic oligonucleotide
acaaccaccaaaccgaggu

SEQ ID NO: 793091 - RNA, 19 nt, Artificial Sequence
  Description of Artificial Sequence: Synthetic oligonucleotide
uuaccuugagaacagccgc

SEQ ID NO: 793092 - RNA, 19 nt, Artificial Sequence
  Description of Artificial Sequence: Synthetic oligonucleotide
ugcuauugucuauugaagc

SEQ ID NO: 793093 - RNA, 19 nt, Artificial Sequence
  Description of Artificial Sequence: Synthetic oligonucleotide
acaacaauuuaacaucugu

SEQ ID NO: 793094 - RNA, 19 nt, Artificial Sequence
  Description of Artificial Sequence: Synthetic oligonucleotide
agugcugugaggccuaggg

SEQ ID NO: 793095 - RNA, 19 nt, Artificial Sequence
  Description of Artificial Sequence: Synthetic oligonucleotide
gucaccggaauguagagag

SEQ ID NO: 793096 - RNA, 19 nt, Artificial Sequence
  Description of Artificial Sequence: Synthetic oligonucleotide
acauuaguaaucugaagga

SEQ ID NO: 793097 - RNA, 19 nt, Artificial Sequence
  Description of Artificial Sequence: Synthetic oligonucleotide
ucggaaagcagacaggcac

SEQ ID NO: 793098 - RNA, 19 nt, Artificial Sequence
  Description of Artificial Sequence: Synthetic oligonucleotide
uguauguuaaacugucaga

SEQ ID NO: 793099 - RNA, 19 nt, Artificial Sequence
  Description of Artificial Sequence: Synthetic oligonucleotide
ucugaagcgcauuucaaga

SEQ ID NO: 793100 - RNA, 19 nt, Artificial Sequence
  Description of Artificial Sequence: Synthetic oligonucleotide
ugaucauacaaagacacaa

SEQ ID NO: 793101 - RNA, 19 nt, Artificial Sequence
  Description of Artificial Sequence: Synthetic oligonucleotide
uccauuaugcagcaaugug

SEQ ID NO: 793102 - RNA, 19 nt, Artificial Sequence
  Description of Artificial Sequence: Synthetic oligonucleotide
uuuggauucaaaugggaau

SEQ ID NO: 793103 - RNA, 19 nt, Artificial Sequence
  Description of Artificial Sequence: Synthetic oligonucleotide
aaacaagagaaugguauug

SEQ ID NO: 793104 - RNA, 19 nt, Artificial Sequence
  Description of Artificial Sequence: Synthetic oligonucleotide
aaaacaagagaaugguauu

SEQ ID NO: 793105 - RNA, 19 nt, Artificial Sequence
  Description of Artificial Sequence: Synthetic oligonucleotide
cuuuaaguuugccaucucc

SEQ ID NO: 793106 - RNA, 19 nt, Artificial Sequence
  Description of Artificial Sequence: Synthetic oligonucleotide
aucuauagguuucuuaaga

SEQ ID NO: 793107 - RNA, 19 nt, Artificial Sequence
  Description of Artificial Sequence: Synthetic oligonucleotide
caguuuguauguuaaacug

SEQ ID NO: 793108 - RNA, 19 nt, Artificial Sequence
  Description of Artificial Sequence: Synthetic oligonucleotide
agagguuccuaauuuagcu

SEQ ID NO: 793109 - RNA, 19 nt, Artificial Sequence
  Description of Artificial Sequence: Synthetic oligonucleotide
ucuacagauaaaugcauau

SEQ ID NO: 793110 - RNA, 19 nt, Artificial Sequence
  Description of Artificial Sequence: Synthetic oligonucleotide
aagacuccauaucggaaag

SEQ ID NO: 793111 - RNA, 19 nt, Artificial Sequence
  Description of Artificial Sequence: Synthetic oligonucleotide
uuaacugauggaauguuuu

SEQ ID NO: 793112 - RNA, 19 nt, Artificial Sequence
  Description of Artificial Sequence: Synthetic oligonucleotide
aguccaacaccucagagaa

SEQ ID NO: 793113 - RNA, 19 nt, Artificial Sequence
  Description of Artificial Sequence: Synthetic oligonucleotide
caaacagucuccucuggcg

SEQ ID NO: 793114 - RNA, 19 nt, Artificial Sequence
  Description of Artificial Sequence: Synthetic oligonucleotide
cauucuacagauaaaugca

SEQ ID NO: 793115 - RNA, 19 nt, Artificial Sequence
  Description of Artificial Sequence: Synthetic oligonucleotide
uuagcaguuucccaagccu

SEQ ID NO: 793116 - RNA, 19 nt, Artificial Sequence
  Description of Artificial Sequence: Synthetic oligonucleotide
uaucggaaagcagacaggc

SEQ ID NO: 793117 - RNA, 19 nt, Artificial Sequence
  Description of Artificial Sequence: Synthetic oligonucleotide
uaucuauagguuucuuaag

SEQ ID NO: 793118 - RNA, 19 nt, Artificial Sequence
  Description of Artificial Sequence: Synthetic oligonucleotide
guaucuauagguuucuuaa

SEQ ID NO: 793119 - RNA, 19 nt, Artificial Sequence
  Description of Artificial Sequence: Synthetic oligonucleotide
cugauuguagagaguauag

SEQ ID NO: 793120 - RNA, 19 nt, Artificial Sequence
  Description of Artificial Sequence: Synthetic oligonucleotide
auuaguaaucugaaggaug

SEQ ID NO: 793121 - RNA, 19 nt, Artificial Sequence
  Description of Artificial Sequence: Synthetic oligonucleotide
acaucuuagaucugguggu

SEQ ID NO: 793122 - RNA, 19 nt, Artificial Sequence
  Description of Artificial Sequence: Synthetic oligonucleotide
agcaaugugaguuucccau

SEQ ID NO: 793123 - RNA, 19 nt, Artificial Sequence
  Description of Artificial Sequence: Synthetic oligonucleotide
ucacuaucacuccaggagu

SEQ ID NO: 793124 - RNA, 19 nt, Artificial Sequence
  Description of Artificial Sequence: Synthetic oligonucleotide
guaguuuuguaguaaacaa

SEQ ID NO: 793125 - RNA, 19 nt, Artificial Sequence
  Description of Artificial Sequence: Synthetic oligonucleotide
agcguucacaaacagcuug

SEQ ID NO: 793126 - RNA, 19 nt, Artificial Sequence
  Description of Artificial Sequence: Synthetic oligonucleotide
uuuaggucccagaauaauu

SEQ ID NO: 793127 - RNA, 19 nt, Artificial Sequence
  Description of Artificial Sequence: Synthetic oligonucleotide
acaagagaaugguauugag

SEQ ID NO: 793128 - RNA, 19 nt, Artificial Sequence
  Description of Artificial Sequence: Synthetic oligonucleotide
uuuguauguuaaacuguca

SEQ ID NO: 793129 - RNA, 19 nt, Artificial Sequence
  Description of Artificial Sequence: Synthetic oligonucleotide
ugaagcgcauuucaagaac

SEQ ID NO: 793130 - RNA, 19 nt, Artificial Sequence
  Description of Artificial Sequence: Synthetic oligonucleotide
aggccuaggggucaccacc

SEQ ID NO: 793131 - RNA, 19 nt, Artificial Sequence
  Description of Artificial Sequence: Synthetic oligonucleotide
uccaacaccucagagaaaa

SEQ ID NO: 793132 - RNA, 19 nt, Artificial Sequence
  Description of Artificial Sequence: Synthetic oligonucleotide
ggauuagcugccuuaaaag

SEQ ID NO: 793133 - RNA, 19 nt, Artificial Sequence
  Description of Artificial Sequence: Synthetic oligonucleotide
uccauaucggaaagcagac

SEQ ID NO: 793134 - RNA, 19 nt, Artificial Sequence
  Description of Artificial Sequence: Synthetic oligonucleotide
uaccuugagaacagccgcg

SEQ ID NO: 793135 - RNA, 19 nt, Artificial Sequence
  Description of Artificial Sequence: Synthetic oligonucleotide
cuauugucuauugaagcag

SEQ ID NO: 793136 - RNA, 19 nt, Artificial Sequence
  Description of Artificial Sequence: Synthetic oligonucleotide
augcauauagauuucuuuu

SEQ ID NO: 793137 - RNA, 19 nt, Artificial Sequence
  Description of Artificial Sequence: Synthetic oligonucleotide
agaacagccgcgugaauca

SEQ ID NO: 793138 - RNA, 19 nt, Artificial Sequence
  Description of Artificial Sequence: Synthetic oligonucleotide
caaaccgagguccugcagc

SEQ ID NO: 793139 - RNA, 19 nt, Artificial Sequence
  Description of Artificial Sequence: Synthetic oligonucleotide
aaaccgagguccugcagcu

SEQ ID NO: 793140 - RNA, 19 nt, Artificial Sequence
  Description of Artificial Sequence: Synthetic oligonucleotide
uugaucauacaaagacaca

SEQ ID NO: 793141 - RNA, 19 nt, Artificial Sequence
  Description of Artificial Sequence: Synthetic oligonucleotide
ccuaauuuagcuaagaccu

SEQ ID NO: 793142 - RNA, 19 nt, Artificial Sequence
  Description of Artificial Sequence: Synthetic oligonucleotide
aauuuagcuaagaccucag

SEQ ID NO: 793143 - RNA, 19 nt, Artificial Sequence
  Description of Artificial Sequence: Synthetic oligonucleotide
uguuaguccuggaaucaga

SEQ ID NO: 793144 - RNA, 19 nt, Artificial Sequence
  Description of Artificial Sequence: Synthetic oligonucleotide
cuccauaucggaaagcaga

SEQ ID NO: 793145 - RNA, 19 nt, Artificial Sequence
  Description of Artificial Sequence: Synthetic oligonucleotide
ugggaagugcagaacuuug

SEQ ID NO: 793146 - RNA, 19 nt, Artificial Sequence
  Description of Artificial Sequence: Synthetic oligonucleotide
uuguagagaguauagucuu

SEQ ID NO: 793147 - RNA, 19 nt, Artificial Sequence
  Description of Artificial Sequence: Synthetic oligonucleotide
cauuguucaguggugauuc

SEQ ID NO: 793148 - RNA, 19 nt, Artificial Sequence
  Description of Artificial Sequence: Synthetic oligonucleotide
guuuguauguuaaacuguc

SEQ ID NO: 793149 - RNA, 19 nt, Artificial Sequence
  Description of Artificial Sequence: Synthetic oligonucleotide
ucuuagaucugguggucca

SEQ ID NO: 793150 - RNA, 19 nt, Artificial Sequence
  Description of Artificial Sequence: Synthetic oligonucleotide
aguaucuauagguuucuua

SEQ ID NO: 793151 - RNA, 19 nt, Artificial Sequence
  Description of Artificial Sequence: Synthetic oligonucleotide
ucuauugaagcaguugcau

SEQ ID NO: 793152 - RNA, 19 nt, Artificial Sequence
  Description of Artificial Sequence: Synthetic oligonucleotide
uuaaacugucagagggcgc

SEQ ID NO: 793153 - RNA, 19 nt, Artificial Sequence
  Description of Artificial Sequence: Synthetic oligonucleotide
acuaucacuccaggagucc

SEQ ID NO: 793154 - RNA, 19 nt, Artificial Sequence
  Description of Artificial Sequence: Synthetic oligonucleotide
uucuacagauaaaugcaua

SEQ ID NO: 793155 - RNA, 19 nt, Artificial Sequence
  Description of Artificial Sequence: Synthetic oligonucleotide
uugucuauugaagcaguug

SEQ ID NO: 793156 - RNA, 19 nt, Artificial Sequence
  Description of Artificial Sequence: Synthetic oligonucleotide
gacaguaucuauagguuuc

SEQ ID NO: 793157 - RNA, 19 nt, Artificial Sequence
  Description of Artificial Sequence: Synthetic oligonucleotide
cuaggggucaccaccuggc

SEQ ID NO: 793158 - RNA, 19 nt, Artificial Sequence
  Description of Artificial Sequence: Synthetic oligonucleotide
caggaaacaaccuggauua

SEQ ID NO: 793159 - RNA, 19 nt, Artificial Sequence
  Description of Artificial Sequence: Synthetic oligonucleotide
ugacaaccaccaaaccgag

SEQ ID NO: 793160 - RNA, 19 nt, Artificial Sequence
  Description of Artificial Sequence: Synthetic oligonucleotide
acuagaagaaggagguguc

SEQ ID NO: 793161 - RNA, 19 nt, Artificial Sequence
  Description of Artificial Sequence: Synthetic oligonucleotide
cuucaugcgggcaugguga

SEQ ID NO: 793162 - RNA, 19 nt, Artificial Sequence
  Description of Artificial Sequence: Synthetic oligonucleotide
gaucuucagucaugggugc

SEQ ID NO: 793163 - RNA, 19 nt, Artificial Sequence
  Description of Artificial Sequence: Synthetic oligonucleotide
ugauccggccugcaugucc

SEQ ID NO: 793164 - RNA, 19 nt, Artificial Sequence
  Description of Artificial Sequence: Synthetic oligonucleotide
agauuugaacugauuguag

SEQ ID NO: 793165 - RNA, 19 nt, Artificial Sequence
  Description of Artificial Sequence: Synthetic oligonucleotide
aguuuguauguuaaacugu

SEQ ID NO: 793166 - RNA, 19 nt, Artificial Sequence
  Description of Artificial Sequence: Synthetic oligonucleotide
gaguauagucuucacccuc

SEQ ID NO: 793167 - RNA, 19 nt, Artificial Sequence
  Description of Artificial Sequence: Synthetic oligonucleotide
cugagcguucacaaacagc

SEQ ID NO: 793168 - RNA, 19 nt, Artificial Sequence
  Description of Artificial Sequence: Synthetic oligonucleotide
gacuccauaucggaaagca

SEQ ID NO: 793169 - RNA, 19 nt, Artificial Sequence
  Description of Artificial Sequence: Synthetic oligonucleotide
gaaacaaccuggauuagcu

SEQ ID NO: 793170 - RNA, 19 nt, Artificial Sequence
  Description of Artificial Sequence: Synthetic oligonucleotide
cuggaaugggcuaugaucu

SEQ ID NO: 793171 - RNA, 19 nt, Artificial Sequence
  Description of Artificial Sequence: Synthetic oligonucleotide
cuuuggauucaaaugggaa

SEQ ID NO: 793172 - RNA, 19 nt, Artificial Sequence
  Description of Artificial Sequence: Synthetic oligonucleotide
agccgcgugaaucacacaa

SEQ ID NO: 793173 - RNA, 19 nt, Artificial Sequence
  Description of Artificial Sequence: Synthetic oligonucleotide
cacacaaggcaggaggugc

SEQ ID NO: 793174 - RNA, 19 nt, Artificial Sequence
  Description of Artificial Sequence: Synthetic oligonucleotide
caccggaauguagagaggc

SEQ ID NO: 793175 - RNA, 19 nt, Artificial Sequence
  Description of Artificial Sequence: Synthetic oligonucleotide
ugagggagcgggcucgggc

SEQ ID NO: 793176 - RNA, 19 nt, Artificial Sequence
  Description of Artificial Sequence: Synthetic oligonucleotide
gcuauugucuauugaagca

SEQ ID NO: 793177 - RNA, 19 nt, Artificial Sequence
  Description of Artificial Sequence: Synthetic oligonucleotide
gcuggaaugggcuaugauc

SEQ ID NO: 793178 - RNA, 19 nt, Artificial Sequence
  Description of Artificial Sequence: Synthetic oligonucleotide
ucaccggaauguagagagg

SEQ ID NO: 793179 - RNA, 19 nt, Artificial Sequence
  Description of Artificial Sequence: Synthetic oligonucleotide
gaagcgcauuucaagaaca

SEQ ID NO: 793180 - RNA, 19 nt, Artificial Sequence
  Description of Artificial Sequence: Synthetic oligonucleotide
auaucggaaagcagacagg

SEQ ID NO: 793181 - RNA, 19 nt, Artificial Sequence
  Description of Artificial Sequence: Synthetic oligonucleotide
acugauuguagagaguaua

SEQ ID NO: 793182 - RNA, 19 nt, Artificial Sequence
  Description of Artificial Sequence: Synthetic oligonucleotide
cuugagaacagccgcguga

SEQ ID NO: 793183 - RNA, 19 nt, Artificial Sequence
  Description of Artificial Sequence: Synthetic oligonucleotide
gugaguaccaccucacaaa

SEQ ID NO: 793184 - RNA, 19 nt, Artificial Sequence
  Description of Artificial Sequence: Synthetic oligonucleotide
acagccgcgugaaucacac

SEQ ID NO: 793185 - RNA, 19 nt, Artificial Sequence
  Description of Artificial Sequence: Synthetic oligonucleotide
ucuggcgucuugcuggaau

SEQ ID NO: 793186 - RNA, 19 nt, Artificial Sequence
  Description of Artificial Sequence: Synthetic oligonucleotide
ucccagaauaauugacaac

SEQ ID NO: 793187 - RNA, 19 nt, Artificial Sequence
  Description of Artificial Sequence: Synthetic oligonucleotide
gagggcgcagauuugaacu

SEQ ID NO: 793188 - RNA, 19 nt, Artificial Sequence
  Description of Artificial Sequence: Synthetic oligonucleotide
gcgugaaucacacaaggca

SEQ ID NO: 793189 - RNA, 19 nt, Artificial Sequence
  Description of Artificial Sequence: Synthetic oligonucleotide
aggcagaauuuacauuuca

SEQ ID NO: 793190 - RNA, 19 nt, Artificial Sequence
  Description of Artificial Sequence: Synthetic oligonucleotide
guagagaguauagucuuca

SEQ ID NO: 793191 - RNA, 19 nt, Artificial Sequence
  Description of Artificial Sequence: Synthetic oligonucleotide
acacagucgugucugcaca

SEQ ID NO: 793192 - RNA, 19 nt, Artificial Sequence
  Description of Artificial Sequence: Synthetic oligonucleotide
ugggcuuagcaguuuccca

SEQ ID NO: 793193 - RNA, 19 nt, Artificial Sequence
  Description of Artificial Sequence: Synthetic oligonucleotide
ccauaccacuagaagaagg

SEQ ID NO: 793194 - RNA, 19 nt, Artificial Sequence
  Description of Artificial Sequence: Synthetic oligonucleotide
agacuccauaucggaaagc

SEQ ID NO: 793195 - RNA, 19 nt, Artificial Sequence
  Description of Artificial Sequence: Synthetic oligonucleotide
cacacagucgugucugcac

SEQ ID NO: 793196 - RNA, 19 nt, Artificial Sequence
  Description of Artificial Sequence: Synthetic oligonucleotide
uagagaguauagucuucac

SEQ ID NO: 793197 - RNA, 19 nt, Artificial Sequence
  Description of Artificial Sequence: Synthetic oligonucleotide
gaaggaugauuucuuccaa

SEQ ID NO: 793198 - RNA, 19 nt, Artificial Sequence
  Description of Artificial Sequence: Synthetic oligonucleotide
guacaugcgcuguggcagg

SEQ ID NO: 793199 - RNA, 19 nt, Artificial Sequence
  Description of Artificial Sequence: Synthetic oligonucleotide
cauggugaguaccaccuca

SEQ ID NO: 793200 - RNA, 19 nt, Artificial Sequence
  Description of Artificial Sequence: Synthetic oligonucleotide
uuucccaucugaagcgcau

SEQ ID NO: 793201 - RNA, 19 nt, Artificial Sequence
  Description of Artificial Sequence: Synthetic oligonucleotide
uuagaucuggugguccacu

SEQ ID NO: 793202 - RNA, 19 nt, Artificial Sequence
  Description of Artificial Sequence: Synthetic oligonucleotide
cuaucacuccaggaguccc

SEQ ID NO: 793203 - RNA, 19 nt, Artificial Sequence
  Description of Artificial Sequence: Synthetic oligonucleotide
cacuaucacuccaggaguc

SEQ ID NO: 793204 - RNA, 19 nt, Artificial Sequence
  Description of Artificial Sequence: Synthetic oligonucleotide
gaucuucaugcgggcaugg

SEQ ID NO: 793205 - RNA, 19 nt, Artificial Sequence
  Description of Artificial Sequence: Synthetic oligonucleotide
uggaaugggcuaugaucug

SEQ ID NO: 793206 - RNA, 19 nt, Artificial Sequence
  Description of Artificial Sequence: Synthetic oligonucleotide
agggcgcagauuugaacug

SEQ ID NO: 793207 - RNA, 19 nt, Artificial Sequence
  Description of Artificial Sequence: Synthetic oligonucleotide
ccauuaugcagcaauguga

SEQ ID NO: 793208 - RNA, 19 nt, Artificial Sequence
  Description of Artificial Sequence: Synthetic oligonucleotide
cgcagauuugaacugauug

SEQ ID NO: 793209 - RNA, 19 nt, Artificial Sequence
  Description of Artificial Sequence: Synthetic oligonucleotide
cucgggcuauuauagcuuc

SEQ ID NO: 793210 - RNA, 19 nt, Artificial Sequence
  Description of Artificial Sequence: Synthetic oligonucleotide
cacucugcaugcgugcgcg

SEQ ID NO: 793211 - RNA, 19 nt, Artificial Sequence
  Description of Artificial Sequence: Synthetic oligonucleotide
guugcccucagaaugagcu

SEQ ID NO: 793212 - RNA, 19 nt, Artificial Sequence
  Description of Artificial Sequence: Synthetic oligonucleotide
auuaugcagcaaugugagu

SEQ ID NO: 793213 - RNA, 19 nt, Artificial Sequence
  Description of Artificial Sequence: Synthetic oligonucleotide
uggugaguaccaccucaca

SEQ ID NO: 793214 - RNA, 19 nt, Artificial Sequence
  Description of Artificial Sequence: Synthetic oligonucleotide
acaguaucuauagguuucu

SEQ ID NO: 793215 - RNA, 19 nt, Artificial Sequence
  Description of Artificial Sequence: Synthetic oligonucleotide
augagcucccggccuacag

SEQ ID NO: 793216 - RNA, 19 nt, Artificial Sequence
  Description of Artificial Sequence: Synthetic oligonucleotide
ucgggcuauuauagcuucc

SEQ ID NO: 793217 - RNA, 19 nt, Artificial Sequence
  Description of Artificial Sequence: Synthetic oligonucleotide
ggaaacaaccuggauuagc

SEQ ID NO: 793218 - RNA, 19 nt, Artificial Sequence
  Description of Artificial Sequence: Synthetic oligonucleotide
cuggcgucuugcuggaaug

SEQ ID NO: 793219 - RNA, 19 nt, Artificial Sequence
  Description of Artificial Sequence: Synthetic oligonucleotide
gcagagguuccuaauuuag

SEQ ID NO: 793220 - RNA, 19 nt, Artificial Sequence
  Description of Artificial Sequence: Synthetic oligonucleotide
agcugccuuaaaagacucc

SEQ ID NO: 793221 - RNA, 19 nt, Artificial Sequence
  Description of Artificial Sequence: Synthetic oligonucleotide
auuguucaguggugauucu

SEQ ID NO: 793222 - RNA, 19 nt, Artificial Sequence
  Description of Artificial Sequence: Synthetic oligonucleotide
agaaugagcucccggccua

SEQ ID NO: 793223 - RNA, 19 nt, Artificial Sequence
  Description of Artificial Sequence: Synthetic oligonucleotide
ugcuggaaugggcuaugau

SEQ ID NO: 793224 - RNA, 19 nt, Artificial Sequence
  Description of Artificial Sequence: Synthetic oligonucleotide
ggugaguaccaccucacaa

SEQ ID NO: 793225 - RNA, 19 nt, Artificial Sequence
  Description of Artificial Sequence: Synthetic oligonucleotide
agguuucuuaagaagcaaa

SEQ ID NO: 793226 - RNA, 19 nt, Artificial Sequence
  Description of Artificial Sequence: Synthetic oligonucleotide
ucgugucugcacacauucu

SEQ ID NO: 793227 - RNA, 19 nt, Artificial Sequence
  Description of Artificial Sequence: Synthetic oligonucleotide
auuuuaggucccagaauaa

SEQ ID NO: 793228 - RNA, 19 nt, Artificial Sequence
  Description of Artificial Sequence: Synthetic oligonucleotide
guagggcgcaggccgaggc

SEQ ID NO: 793229 - RNA, 19 nt, Artificial Sequence
  Description of Artificial Sequence: Synthetic oligonucleotide
ggaaugggcuaugaucugc

SEQ ID NO: 793230 - RNA, 19 nt, Artificial Sequence
  Description of Artificial Sequence: Synthetic oligonucleotide
gucuauugaagcaguugca

SEQ ID NO: 793231 - RNA, 19 nt, Artificial Sequence
  Description of Artificial Sequence: Synthetic oligonucleotide
accuggauuagcugccuua

SEQ ID NO: 793232 - RNA, 19 nt, Artificial Sequence
  Description of Artificial Sequence: Synthetic oligonucleotide
cuuagaucuggugguccac

SEQ ID NO: 793233 - RNA, 19 nt, Artificial Sequence
  Description of Artificial Sequence: Synthetic oligonucleotide
uacaugcgcuguggcaggg

SEQ ID NO: 793234 - RNA, 19 nt, Artificial Sequence
  Description of Artificial Sequence: Synthetic oligonucleotide
cacagucgugucugcacac

SEQ ID NO: 793235 - RNA, 19 nt, Artificial Sequence
  Description of Artificial Sequence: Synthetic oligonucleotide
cacuagaagaaggaggugu

SEQ ID NO: 793236 - RNA, 19 nt, Artificial Sequence
  Description of Artificial Sequence: Synthetic oligonucleotide
aagcgcauuucaagaacaa

SEQ ID NO: 793237 - RNA, 19 nt, Artificial Sequence
  Description of Artificial Sequence: Synthetic oligonucleotide
ggucccagaauaauugaca

SEQ ID NO: 793238 - RNA, 19 nt, Artificial Sequence
  Description of Artificial Sequence: Synthetic oligonucleotide
gcugccuuaaaagacucca

SEQ ID NO: 793239 - RNA, 19 nt, Artificial Sequence
  Description of Artificial Sequence: Synthetic oligonucleotide
aggaugguccaggccuagc

SEQ ID NO: 793240 - RNA, 19 nt, Artificial Sequence
  Description of Artificial Sequence: Synthetic oligonucleotide
gcugagcguucacaaacag

SEQ ID NO: 793241 - RNA, 19 nt, Artificial Sequence
  Description of Artificial Sequence: Synthetic oligonucleotide
ccgcgugaaucacacaagg

SEQ ID NO: 793242 - RNA, 19 nt, Artificial Sequence
  Description of Artificial Sequence: Synthetic oligonucleotide
uuguucaguggugauucuu

SEQ ID NO: 793243 - RNA, 19 nt, Artificial Sequence
  Description of Artificial Sequence: Synthetic oligonucleotide
caggccgaggcacgguugc

SEQ ID NO: 793244 - RNA, 19 nt, Artificial Sequence
  Description of Artificial Sequence: Synthetic oligonucleotide
gcauauagauuucuuuugu

SEQ ID NO: 793245 - RNA, 19 nt, Artificial Sequence
  Description of Artificial Sequence: Synthetic oligonucleotide
gcucccggccuacaggagg

SEQ ID NO: 793246 - RNA, 19 nt, Artificial Sequence
  Description of Artificial Sequence: Synthetic oligonucleotide
aacagccgcgugaaucaca

SEQ ID NO: 793247 - RNA, 19 nt, Artificial Sequence
  Description of Artificial Sequence: Synthetic oligonucleotide
caucuuagaucuggugguc

SEQ ID NO: 793248 - RNA, 19 nt, Artificial Sequence
  Description of Artificial Sequence: Synthetic oligonucleotide
ugcaugcgugcgcggaggu

SEQ ID NO: 793249 - RNA, 19 nt, Artificial Sequence
  Description of Artificial Sequence: Synthetic oligonucleotide
ugcgggcauggugaguacc

SEQ ID NO: 793250 - RNA, 19 nt, Artificial Sequence
  Description of Artificial Sequence: Synthetic oligonucleotide
agcgcauuucaagaacaaa

SEQ ID NO: 793251 - RNA, 19 nt, Artificial Sequence
  Description of Artificial Sequence: Synthetic oligonucleotide
accuugagaacagccgcgu

SEQ ID NO: 793252 - RNA, 19 nt, Artificial Sequence
  Description of Artificial Sequence: Synthetic oligonucleotide
cauccgguggcuucucaga

SEQ ID NO: 793253 - RNA, 19 nt, Artificial Sequence
  Description of Artificial Sequence: Synthetic oligonucleotide
aggaaacaaccuggauuag

SEQ ID NO: 793254 - RNA, 19 nt, Artificial Sequence
  Description of Artificial Sequence: Synthetic oligonucleotide
aaugagcucccggccuaca

SEQ ID NO: 793255 - RNA, 19 nt, Artificial Sequence
  Description of Artificial Sequence: Synthetic oligonucleotide
agccaguuuguauguuaaa

SEQ ID NO: 793256 - RNA, 19 nt, Artificial Sequence
  Description of Artificial Sequence: Synthetic oligonucleotide
gggcuuagcaguuucccaa

SEQ ID NO: 793257 - RNA, 19 nt, Artificial Sequence
  Description of Artificial Sequence: Synthetic oligonucleotide
gaggccuaggggucaccac

SEQ ID NO: 793258 - RNA, 19 nt, Artificial Sequence
  Description of Artificial Sequence: Synthetic oligonucleotide
cggguaucaucaaacaguc

SEQ ID NO: 793259 - RNA, 19 nt, Artificial Sequence
  Description of Artificial Sequence: Synthetic oligonucleotide
gggucaccggaauguagag

SEQ ID NO: 793260 - RNA, 19 nt, Artificial Sequence
  Description of Artificial Sequence: Synthetic oligonucleotide
caaccaccaaaccgagguc

SEQ ID NO: 793261 - RNA, 19 nt, Artificial Sequence
  Description of Artificial Sequence: Synthetic oligonucleotide
gguuccuggggucaccgga

SEQ ID NO: 793262 - RNA, 19 nt, Artificial Sequence
  Description of Artificial Sequence: Synthetic oligonucleotide
uaguaaucugaaggaugau

SEQ ID NO: 793263 - RNA, 19 nt, Artificial Sequence
  Description of Artificial Sequence: Synthetic oligonucleotide
cagccucucggguaucauc

SEQ ID NO: 793264 - RNA, 19 nt, Artificial Sequence
  Description of Artificial Sequence: Synthetic oligonucleotide
acgguugcccucagaauga

SEQ ID NO: 793265 - RNA, 19 nt, Artificial Sequence
  Description of Artificial Sequence: Synthetic oligonucleotide
gccccuauucacacagucg

SEQ ID NO: 793266 - RNA, 19 nt, Artificial Sequence
  Description of Artificial Sequence: Synthetic oligonucleotide
ccgcugagcguucacaaac

SEQ ID NO: 793267 - RNA, 19 nt, Artificial Sequence
  Description of Artificial Sequence: Synthetic oligonucleotide
ccuaggggucaccaccugg

SEQ ID NO: 793268 - RNA, 19 nt, Artificial Sequence
  Description of Artificial Sequence: Synthetic oligonucleotide
gcuuguggaugauccggcc

SEQ ID NO: 793269 - RNA, 19 nt, Artificial Sequence
  Description of Artificial Sequence: Synthetic oligonucleotide
caguuucccaagccuccac

SEQ ID NO: 793270 - RNA, 19 nt, Artificial Sequence
  Description of Artificial Sequence: Synthetic oligonucleotide
ggugccgagcuagaucugc

SEQ ID NO: 793271 - RNA, 19 nt, Artificial Sequence
  Description of Artificial Sequence: Synthetic oligonucleotide
cauuaguaaucugaaggau

SEQ ID NO: 793272 - RNA, 19 nt, Artificial Sequence
  Description of Artificial Sequence: Synthetic oligonucleotide
gccuuaaaagacuccauau

SEQ ID NO: 793273 - RNA, 19 nt, Artificial Sequence
  Description of Artificial Sequence: Synthetic oligonucleotide
cagcaaugugaguuuccca

SEQ ID NO: 793274 - RNA, 19 nt, Artificial Sequence
  Description of Artificial Sequence: Synthetic oligonucleotide
uugcuggaaugggcuauga

SEQ ID NO: 793275 - RNA, 19 nt, Artificial Sequence
  Description of Artificial Sequence: Synthetic oligonucleotide
ggguugcuauugucuauug

SEQ ID NO: 793276 - RNA, 19 nt, Artificial Sequence
  Description of Artificial Sequence: Synthetic oligonucleotide
caccugcaagucugaaguc

SEQ ID NO: 793277 - RNA, 19 nt, Artificial Sequence
  Description of Artificial Sequence: Synthetic oligonucleotide
ggccccuauucacacaguc

SEQ ID NO: 793278 - RNA, 19 nt, Artificial Sequence
  Description of Artificial Sequence: Synthetic oligonucleotide
agccccagugacugacacu

SEQ ID NO: 793279 - RNA, 19 nt, Artificial Sequence
  Description of Artificial Sequence: Synthetic oligonucleotide
ugccagagaugugccacuc

SEQ ID NO: 793280 - RNA, 19 nt, Artificial Sequence
  Description of Artificial Sequence: Synthetic oligonucleotide
gaacagccgcgugaaucac

SEQ ID NO: 793281 - RNA, 19 nt, Artificial Sequence
  Description of Artificial Sequence: Synthetic oligonucleotide
guaccaccucacaaaaucu

SEQ ID NO: 793282 - RNA, 19 nt, Artificial Sequence
  Description of Artificial Sequence: Synthetic oligonucleotide
gggcuauuauagcuuccac

SEQ ID NO: 793283 - RNA, 19 nt, Artificial Sequence
  Description of Artificial Sequence: Synthetic oligonucleotide
accggaauguagagaggcu

SEQ ID NO: 793284 - RNA, 19 nt, Artificial Sequence
  Description of Artificial Sequence: Synthetic oligonucleotide
gaguagggcgcaggccgag

SEQ ID NO: 793285 - RNA, 19 nt, Artificial Sequence
  Description of Artificial Sequence: Synthetic oligonucleotide
cuacaggaggugggaaguc

SEQ ID NO: 793286 - RNA, 19 nt, Artificial Sequence
  Description of Artificial Sequence: Synthetic oligonucleotide
cgggcucgggcuauuauag

SEQ ID NO: 793287 - RNA, 19 nt, Artificial Sequence
  Description of Artificial Sequence: Synthetic oligonucleotide
ggggucaccggaauguaga

SEQ ID NO: 793288 - RNA, 19 nt, Artificial Sequence
  Description of Artificial Sequence: Synthetic oligonucleotide
caguaucacugaggcauuc

SEQ ID NO: 793289 - RNA, 19 nt, Artificial Sequence
  Description of Artificial Sequence: Synthetic oligonucleotide
ccuugagggagcgggcucg

SEQ ID NO: 793290 - RNA, 19 nt, Artificial Sequence
  Description of Artificial Sequence: Synthetic oligonucleotide
gauccggccugcauguccu

SEQ ID NO: 793291 - RNA, 19 nt, Artificial Sequence
  Description of Artificial Sequence: Synthetic oligonucleotide
cgcgugaaucacacaaggc

SEQ ID NO: 793292 - RNA, 19 nt, Artificial Sequence
  Description of Artificial Sequence: Synthetic oligonucleotide
ccggccuacaggagguggg

SEQ ID NO: 793293 - RNA, 19 nt, Artificial Sequence
  Description of Artificial Sequence: Synthetic oligonucleotide
ccggaauguagagaggcuc

SEQ ID NO: 793294 - RNA, 19 nt, Artificial Sequence
  Description of Artificial Sequence: Synthetic oligonucleotide
ugcgcggaggugugccccu

SEQ ID NO: 793295 - RNA, 19 nt, Artificial Sequence
  Description of Artificial Sequence: Synthetic oligonucleotide
gccuagcuggcuuccaguc

SEQ ID NO: 793296 - RNA, 19 nt, Artificial Sequence
  Description of Artificial Sequence: Synthetic oligonucleotide
cacaggguuugugcaguuc

SEQ ID NO: 793297 - RNA, 19 nt, Artificial Sequence
  Description of Artificial Sequence: Synthetic oligonucleotide
agcgggcucgggcuauuau

SEQ ID NO: 793298 - RNA, 19 nt, Artificial Sequence
  Description of Artificial Sequence: Synthetic oligonucleotide
caugcgugcgcggaggugu

SEQ ID NO: 793299 - RNA, 19 nt, Artificial Sequence
  Description of Artificial Sequence: Synthetic oligonucleotide
cuccauuaugcagcaaugu

SEQ ID NO: 793300 - RNA, 19 nt, Artificial Sequence
  Description of Artificial Sequence: Synthetic oligonucleotide
ggaugguccaggccuagcu

SEQ ID NO: 793301 - RNA, 19 nt, Artificial Sequence
  Description of Artificial Sequence: Synthetic oligonucleotide
gccagagaugugccacucc

SEQ ID NO: 793302 - RNA, 19 nt, Artificial Sequence
  Description of Artificial Sequence: Synthetic oligonucleotide
acacaggguuugugcaguu

SEQ ID NO: 793303 - RNA, 19 nt, Artificial Sequence
  Description of Artificial Sequence: Synthetic oligonucleotide
guugcauccgguggcuucu

SEQ ID NO: 793304 - RNA, 19 nt, Artificial Sequence
  Description of Artificial Sequence: Synthetic oligonucleotide
agcccgcugagcguucaca

SEQ ID NO: 793305 - RNA, 19 nt, Artificial Sequence
  Description of Artificial Sequence: Synthetic oligonucleotide
gugcgcggaggugugcccc

SEQ ID NO: 793306 - RNA, 19 nt, Artificial Sequence
  Description of Artificial Sequence: Synthetic oligonucleotide
gccgcgugaaucacacaag

SEQ ID NO: 793307 - RNA, 19 nt, Artificial Sequence
  Description of Artificial Sequence: Synthetic oligonucleotide
cuauuauagcuuccacauu

SEQ ID NO: 793308 - RNA, 19 nt, Artificial Sequence
  Description of Artificial Sequence: Synthetic oligonucleotide
uugcuggaaugggcuuagc

SEQ ID NO: 793309 - RNA, 19 nt, Artificial Sequence
  Description of Artificial Sequence: Synthetic oligonucleotide
cagagggcgcagauuugaa

SEQ ID NO: 793310 - RNA, 19 nt, Artificial Sequence
  Description of Artificial Sequence: Synthetic oligonucleotide
ccguccuucuggcuuuaag

SEQ ID NO: 793311 - RNA, 19 nt, Artificial Sequence
  Description of Artificial Sequence: Synthetic oligonucleotide
caaagacacaaagccaguu

SEQ ID NO: 793312 - RNA, 19 nt, Artificial Sequence
  Description of Artificial Sequence: Synthetic oligonucleotide
ggucaccggaauguagaga

SEQ ID NO: 793313 - RNA, 19 nt, Artificial Sequence
  Description of Artificial Sequence: Synthetic oligonucleotide
ccuugagaacagccgcgug

SEQ ID NO: 793314 - RNA, 19 nt, Artificial Sequence
  Description of Artificial Sequence: Synthetic oligonucleotide
ccacuuguuaguccuggaa

SEQ ID NO: 793315 - RNA, 19 nt, Artificial Sequence
  Description of Artificial Sequence: Synthetic oligonucleotide
ccuauucacacagucgugu

SEQ ID NO: 793316 - RNA, 19 nt, Artificial Sequence
  Description of Artificial Sequence: Synthetic oligonucleotide
gucuucgggguugggaagu

SEQ ID NO: 793317 - RNA, 19 nt, Artificial Sequence
  Description of Artificial Sequence: Synthetic oligonucleotide
gcggaggugugccccucag

SEQ ID NO: 793318 - RNA, 19 nt, Artificial Sequence
  Description of Artificial Sequence: Synthetic oligonucleotide
cguccuucuggcuuuaagu

SEQ ID NO: 793319 - RNA, 19 nt, Artificial Sequence
  Description of Artificial Sequence: Synthetic oligonucleotide
cucuagcaggcagcugaca

SEQ ID NO: 793320 - RNA, 19 nt, Artificial Sequence
  Description of Artificial Sequence: Synthetic oligonucleotide
gcgggcucgggcuauuaua

SEQ ID NO: 793321 - RNA, 19 nt, Artificial Sequence
  Description of Artificial Sequence: Synthetic oligonucleotide
cccggccuacaggaggugg

SEQ ID NO: 793322 - RNA, 19 nt, Artificial Sequence
  Description of Artificial Sequence: Synthetic oligonucleotide
augcgugcgcggaggugug

SEQ ID NO: 793323 - RNA, 19 nt, Artificial Sequence
  Description of Artificial Sequence: Synthetic oligonucleotide
gcccgcugagcguucacaa

SEQ ID NO: 793324 - RNA, 19 nt, Artificial Sequence
  Description of Artificial Sequence: Synthetic oligonucleotide
ggcagcugacaaaccuuuc

SEQ ID NO: 793325 - RNA, 19 nt, Artificial Sequence
  Description of Artificial Sequence: Synthetic oligonucleotide
ggggaucuucaugcgggca

SEQ ID NO: 793326 - RNA, 19 nt, Artificial Sequence
  Description of Artificial Sequence: Synthetic oligonucleotide
gcgugcgcggaggugugcc

SEQ ID NO: 793327 - RNA, 19 nt, Artificial Sequence
  Description of Artificial Sequence: Synthetic oligonucleotide
gccuaggggucaccaccug

SEQ ID NO: 793328 - RNA, 19 nt, Artificial Sequence
  Description of Artificial Sequence: Synthetic oligonucleotide
ccuacaggaggugggaagu

SEQ ID NO: 793329 - RNA, 19 nt, Artificial Sequence
  Description of Artificial Sequence: Synthetic oligonucleotide
aggccccuauucacacagu

SEQ ID NO: 793330 - RNA, 19 nt, Artificial Sequence
  Description of Artificial Sequence: Synthetic oligonucleotide
gcaugcgugcgcggaggug

SEQ ID NO: 793331 - RNA, 19 nt, Artificial Sequence
  Description of Artificial Sequence: Synthetic oligonucleotide
cagccgcgugaaucacaca

SEQ ID NO: 793332 - RNA, 19 nt, Artificial Sequence
  Description of Artificial Sequence: Synthetic oligonucleotide
ggccuaggggucaccaccu

SEQ ID NO: 793333 - RNA, 19 nt, Artificial Sequence
  Description of Artificial Sequence: Synthetic oligonucleotide
ggguaucaucaaacagucu

SEQ ID NO: 793334 - RNA, 19 nt, Artificial Sequence
  Description of Artificial Sequence: Synthetic oligonucleotide
cagccguccuucuggcuuu

SEQ ID NO: 793335 - RNA, 19 nt, Artificial Sequence
  Description of Artificial Sequence: Synthetic oligonucleotide
cccgcugagcguucacaaa

SEQ ID NO: 793336 - RNA, 19 nt, Artificial Sequence
  Description of Artificial Sequence: Synthetic oligonucleotide
caguaucuauagguuucuu

SEQ ID NO: 793337 - RNA, 19 nt, Artificial Sequence
  Description of Artificial Sequence: Synthetic oligonucleotide
ccccagugacugacacuuc

SEQ ID NO: 793338 - RNA, 19 nt, Artificial Sequence
  Description of Artificial Sequence: Synthetic oligonucleotide
ggcgcagauuugaacugau

SEQ ID NO: 793339 - RNA, 19 nt, Artificial Sequence
  Description of Artificial Sequence: Synthetic oligonucleotide
gagcgggcucgggcuauua

SEQ ID NO: 793340 - RNA, 19 nt, Artificial Sequence
  Description of Artificial Sequence: Synthetic oligonucleotide
cugucagagggcgcagauu

SEQ ID NO: 793341 - RNA, 19 nt, Artificial Sequence
  Description of Artificial Sequence: Synthetic oligonucleotide
cgaggcacgguugcccuca

SEQ ID NO: 793342 - RNA, 19 nt, Artificial Sequence
  Description of Artificial Sequence: Synthetic oligonucleotide
gggcuaugaucugcuuuau

SEQ ID NO: 793343 - RNA, 19 nt, Artificial Sequence
  Description of Artificial Sequence: Synthetic oligonucleotide
cucuggcgucuugcuggaa

SEQ ID NO: 793344 - RNA, 19 nt, Artificial Sequence
  Description of Artificial Sequence: Synthetic oligonucleotide
gcgcagauuugaacugauu

SEQ ID NO: 793345 - RNA, 19 nt, Artificial Sequence
  Description of Artificial Sequence: Synthetic oligonucleotide
caguugcauccgguggcuu

SEQ ID NO: 793346 - RNA, 19 nt, Artificial Sequence
  Description of Artificial Sequence: Synthetic oligonucleotide
cggccuacaggagguggga

SEQ ID NO: 793347 - RNA, 19 nt, Artificial Sequence
  Description of Artificial Sequence: Synthetic oligonucleotide
gcgcggaggugugccccuc

SEQ ID NO: 793348 - RNA, 19 nt, Artificial Sequence
  Description of Artificial Sequence: Synthetic oligonucleotide
cgcggaggugugccccuca

SEQ ID NO: 793349 - RNA, 19 nt, Artificial Sequence
  Description of Artificial Sequence: Synthetic oligonucleotide
ggagcgggcucgggcuauu

SEQ ID NO: 793350 - RNA, 19 nt, Artificial Sequence
  Description of Artificial Sequence: Synthetic oligonucleotide
aaauugacuaaauauuugg

SEQ ID NO: 793351 - RNA, 19 nt, Artificial Sequence
  Description of Artificial Sequence: Synthetic oligonucleotide
auuaaauucaaacugucgg

SEQ ID NO: 793352 - RNA, 19 nt, Artificial Sequence
  Description of Artificial Sequence: Synthetic oligonucleotide
ucuuagacaacuaagaggu

SEQ ID NO: 793353 - RNA, 19 nt, Artificial Sequence
  Description of Artificial Sequence: Synthetic oligonucleotide
aguagcaacaaacauacuc

SEQ ID NO: 793354 - RNA, 19 nt, Artificial Sequence
  Description of Artificial Sequence: Synthetic oligonucleotide
uuuauugcaauauaguacu

SEQ ID NO: 793355 - RNA, 19 nt, Artificial Sequence
  Description of Artificial Sequence: Synthetic oligonucleotide
aauauugcacuguuaagag

SEQ ID NO: 793356 - RNA, 19 nt, Artificial Sequence
  Description of Artificial Sequence: Synthetic oligonucleotide
uuuaaaggauuucugauga

SEQ ID NO: 793357 - RNA, 19 nt, Artificial Sequence
  Description of Artificial Sequence: Synthetic oligonucleotide
uuuagagcuaccauuuagg

SEQ ID NO: 793358 - RNA, 19 nt, Artificial Sequence
  Description of Artificial Sequence: Synthetic oligonucleotide
ucuaauauugcacuguuaa

SEQ ID NO: 793359 - RNA, 19 nt, Artificial Sequence
  Description of Artificial Sequence: Synthetic oligonucleotide
auaguacucauuuaagcac

SEQ ID NO: 793360 - RNA, 19 nt, Artificial Sequence
  Description of Artificial Sequence: Synthetic oligonucleotide
uuucaaaucagcagagccg

SEQ ID NO: 793361 - RNA, 19 nt, Artificial Sequence
  Description of Artificial Sequence: Synthetic oligonucleotide
auugauacuguuuagcucu

SEQ ID NO: 793362 - RNA, 19 nt, Artificial Sequence
  Description of Artificial Sequence: Synthetic oligonucleotide
uauaguacucauuuaagca

SEQ ID NO: 793363 - RNA, 19 nt, Artificial Sequence
  Description of Artificial Sequence: Synthetic oligonucleotide
aacugucggauguuuaugc

SEQ ID NO: 793364 - RNA, 19 nt, Artificial Sequence
  Description of Artificial Sequence: Synthetic oligonucleotide
gauauuacaccauugcuac

SEQ ID NO: 793365 - RNA, 19 nt, Artificial Sequence
  Description of Artificial Sequence: Synthetic oligonucleotide
acugauugaaugcuuacac

SEQ ID NO: 793366 - RNA, 19 nt, Artificial Sequence
  Description of Artificial Sequence: Synthetic oligonucleotide
gacuaaauaagaugaaacc

SEQ ID NO: 793367 - RNA, 19 nt, Artificial Sequence
  Description of Artificial Sequence: Synthetic oligonucleotide
aauguagguagucuuccac

SEQ ID NO: 793368 - RNA, 19 nt, Artificial Sequence
  Description of Artificial Sequence: Synthetic oligonucleotide
uuuacuauggcaauaugau

SEQ ID NO: 793369 - RNA, 19 nt, Artificial Sequence
  Description of Artificial Sequence: Synthetic oligonucleotide
aauugacguacuuuuaaug

SEQ ID NO: 793370 - RNA, 19 nt, Artificial Sequence
  Description of Artificial Sequence: Synthetic oligonucleotide
aacaccaacuucugaauuc

SEQ ID NO: 793371 - RNA, 19 nt, Artificial Sequence
  Description of Artificial Sequence: Synthetic oligonucleotide
uuuuaaaggauuucugaug

SEQ ID NO: 793372 - RNA, 19 nt, Artificial Sequence
  Description of Artificial Sequence: Synthetic oligonucleotide
aaauucaguaauauuuaac

SEQ ID NO: 793373 - RNA, 19 nt, Artificial Sequence
  Description of Artificial Sequence: Synthetic oligonucleotide
agagcuaccauuuaggaaa

SEQ ID NO: 793374 - RNA, 19 nt, Artificial Sequence
  Description of Artificial Sequence: Synthetic oligonucleotide
cacuauuaaauucaaacug

SEQ ID NO: 793375 - RNA, 19 nt, Artificial Sequence
  Description of Artificial Sequence: Synthetic oligonucleotide
uaauauugcacuguuaaga

SEQ ID NO: 793376 - RNA, 19 nt, Artificial Sequence
  Description of Artificial Sequence: Synthetic oligonucleotide
uaaauugacuaaauauuug

SEQ ID NO: 793377 - RNA, 19 nt, Artificial Sequence
  Description of Artificial Sequence: Synthetic oligonucleotide
aauaagaugaaaccauuuu

SEQ ID NO: 793378 - RNA, 19 nt, Artificial Sequence
  Description of Artificial Sequence: Synthetic oligonucleotide
accauguuaaaacaaaacu

SEQ ID NO: 793379 - RNA, 19 nt, Artificial Sequence
  Description of Artificial Sequence: Synthetic oligonucleotide
gucacaaucuuccauuucg

SEQ ID NO: 793380 - RNA, 19 nt, Artificial Sequence
  Description of Artificial Sequence: Synthetic oligonucleotide
ucugaaucgggucaaguug

SEQ ID NO: 793381 - RNA, 19 nt, Artificial Sequence
  Description of Artificial Sequence: Synthetic oligonucleotide
auuugaacgucugaaauuc

SEQ ID NO: 793382 - RNA, 19 nt, Artificial Sequence
  Description of Artificial Sequence: Synthetic oligonucleotide
uuaaauucaaacugucgga

SEQ ID NO: 793383 - RNA, 19 nt, Artificial Sequence
  Description of Artificial Sequence: Synthetic oligonucleotide
uuaggaaaccauuggauga

SEQ ID NO: 793384 - RNA, 19 nt, Artificial Sequence
  Description of Artificial Sequence: Synthetic oligonucleotide
ugaauaugcuagcaaacug

SEQ ID NO: 793385 - RNA, 19 nt, Artificial Sequence
  Description of Artificial Sequence: Synthetic oligonucleotide
uucguggucauguuuagag

SEQ ID NO: 793386 - RNA, 19 nt, Artificial Sequence
  Description of Artificial Sequence: Synthetic oligonucleotide
ugauauuacaccauugcua

SEQ ID NO: 793387 - RNA, 19 nt, Artificial Sequence
  Description of Artificial Sequence: Synthetic oligonucleotide
uaaacuuggguauaacugu

SEQ ID NO: 793388 - RNA, 19 nt, Artificial Sequence
  Description of Artificial Sequence: Synthetic oligonucleotide
caacaguuaaacuugugag

SEQ ID NO: 793389 - RNA, 19 nt, Artificial Sequence
  Description of Artificial Sequence: Synthetic oligonucleotide
uaacucuuagacaacuaag

SEQ ID NO: 793390 - RNA, 19 nt, Artificial Sequence
  Description of Artificial Sequence: Synthetic oligonucleotide
uucaaaucagcagagccgg

SEQ ID NO: 793391 - RNA, 19 nt, Artificial Sequence
  Description of Artificial Sequence: Synthetic oligonucleotide
cauuggaugaaguuucucc

SEQ ID NO: 793392 - RNA, 19 nt, Artificial Sequence
  Description of Artificial Sequence: Synthetic oligonucleotide
aaacuacugggacuaacag

SEQ ID NO: 793393 - RNA, 19 nt, Artificial Sequence
  Description of Artificial Sequence: Synthetic oligonucleotide
aacaggucgggauuguaag

SEQ ID NO: 793394 - RNA, 19 nt, Artificial Sequence
  Description of Artificial Sequence: Synthetic oligonucleotide
uguaccauucaccauuucu

SEQ ID NO: 793395 - RNA, 19 nt, Artificial Sequence
  Description of Artificial Sequence: Synthetic oligonucleotide
uuggacugcuaaaaggccg

SEQ ID NO: 793396 - RNA, 19 nt, Artificial Sequence
  Description of Artificial Sequence: Synthetic oligonucleotide
agauuaaauuaagacacgg

SEQ ID NO: 793397 - RNA, 19 nt, Artificial Sequence
  Description of Artificial Sequence: Synthetic oligonucleotide
uaagacacgguaaauugac

SEQ ID NO: 793398 - RNA, 19 nt, Artificial Sequence
  Description of Artificial Sequence: Synthetic oligonucleotide
aacagcucccaauuuguag

SEQ ID NO: 793399 - RNA, 19 nt, Artificial Sequence
  Description of Artificial Sequence: Synthetic oligonucleotide
uaaacuaggaagcaaugua

SEQ ID NO: 793400 - RNA, 19 nt, Artificial Sequence
  Description of Artificial Sequence: Synthetic oligonucleotide
auagcuuguagcucucggc

SEQ ID NO: 793401 - RNA, 19 nt, Artificial Sequence
  Description of Artificial Sequence: Synthetic oligonucleotide
uuaacucuuagacaacuaa

SEQ ID NO: 793402 - RNA, 19 nt, Artificial Sequence
  Description of Artificial Sequence: Synthetic oligonucleotide
aaguuacacugauugaaug

SEQ ID NO: 793403 - RNA, 19 nt, Artificial Sequence
  Description of Artificial Sequence: Synthetic oligonucleotide
uugauauuacaccauugcu

SEQ ID NO: 793404 - RNA, 19 nt, Artificial Sequence
  Description of Artificial Sequence: Synthetic oligonucleotide
auauugcacuguuaagagc

SEQ ID NO: 793405 - RNA, 19 nt, Artificial Sequence
  Description of Artificial Sequence: Synthetic oligonucleotide
aauggaugcuaauucuucu

SEQ ID NO: 793406 - RNA, 19 nt, Artificial Sequence
  Description of Artificial Sequence: Synthetic oligonucleotide
aaauucaaacugucggaug

SEQ ID NO: 793407 - RNA, 19 nt, Artificial Sequence
  Description of Artificial Sequence: Synthetic oligonucleotide
aaccauuggaugaaguuuc

SEQ ID NO: 793408 - RNA, 19 nt, Artificial Sequence
  Description of Artificial Sequence: Synthetic oligonucleotide
uauuaacuugcugugaucu

SEQ ID NO: 793409 - RNA, 19 nt, Artificial Sequence
  Description of Artificial Sequence: Synthetic oligonucleotide
aauuugaacgucugaaauu

SEQ ID NO: 793410 - RNA, 19 nt, Artificial Sequence
  Description of Artificial Sequence: Synthetic oligonucleotide
ugcuuggacugcuaaaagg

SEQ ID NO: 793411 - RNA, 19 nt, Artificial Sequence
  Description of Artificial Sequence: Synthetic oligonucleotide
guaaacuuggguauaacug

SEQ ID NO: 793412 - RNA, 19 nt, Artificial Sequence
  Description of Artificial Sequence: Synthetic oligonucleotide
uuaagacacgguaaauuga

SEQ ID NO: 793413 - RNA, 19 nt, Artificial Sequence
  Description of Artificial Sequence: Synthetic oligonucleotide
gauugaugugcuuuauuug

SEQ ID NO: 793414 - RNA, 19 nt, Artificial Sequence
  Description of Artificial Sequence: Synthetic oligonucleotide
uguaguuaaacaggaaaca

SEQ ID NO: 793415 - RNA, 19 nt, Artificial Sequence
  Description of Artificial Sequence: Synthetic oligonucleotide
ucuugaagugcauagcuaa

SEQ ID NO: 793416 - RNA, 19 nt, Artificial Sequence
  Description of Artificial Sequence: Synthetic oligonucleotide
aaucuaaauuucaaaucag

SEQ ID NO: 793417 - RNA, 19 nt, Artificial Sequence
  Description of Artificial Sequence: Synthetic oligonucleotide
uuugccuggugcuaaacug

SEQ ID NO: 793418 - RNA, 19 nt, Artificial Sequence
  Description of Artificial Sequence: Synthetic oligonucleotide
uguaaacuaggaagcaaug

SEQ ID NO: 793419 - RNA, 19 nt, Artificial Sequence
  Description of Artificial Sequence: Synthetic oligonucleotide
aacaccgcacuucacuauc

SEQ ID NO: 793420 - RNA, 19 nt, Artificial Sequence
  Description of Artificial Sequence: Synthetic oligonucleotide
aaauugacguacuuuuaau

SEQ ID NO: 793421 - RNA, 19 nt, Artificial Sequence
  Description of Artificial Sequence: Synthetic oligonucleotide
ugacguacuuuuaauguga

SEQ ID NO: 793422 - RNA, 19 nt, Artificial Sequence
  Description of Artificial Sequence: Synthetic oligonucleotide
gauguuuaugcauuuugca

SEQ ID NO: 793423 - RNA, 19 nt, Artificial Sequence
  Description of Artificial Sequence: Synthetic oligonucleotide
uagcucucggccaaagugg

SEQ ID NO: 793424 - RNA, 19 nt, Artificial Sequence
  Description of Artificial Sequence: Synthetic oligonucleotide
ugauugaugugcuuuauuu

SEQ ID NO: 793425 - RNA, 19 nt, Artificial Sequence
  Description of Artificial Sequence: Synthetic oligonucleotide
gaaugcuuacacaggagcg

SEQ ID NO: 793426 - RNA, 19 nt, Artificial Sequence
  Description of Artificial Sequence: Synthetic oligonucleotide
guuuagagcuaccauuuag

SEQ ID NO: 793427 - RNA, 19 nt, Artificial Sequence
  Description of Artificial Sequence: Synthetic oligonucleotide
aggauccaauuccugaucg

SEQ ID NO: 793428 - RNA, 19 nt, Artificial Sequence
  Description of Artificial Sequence: Synthetic oligonucleotide
uauucuuaauggaugcuaa

SEQ ID NO: 793429 - RNA, 19 nt, Artificial Sequence
  Description of Artificial Sequence: Synthetic oligonucleotide
cugaaucgggucaaguugg

SEQ ID NO: 793430 - RNA, 19 nt, Artificial Sequence
  Description of Artificial Sequence: Synthetic oligonucleotide
gagguuaaaagauggaaaa

SEQ ID NO: 793431 - RNA, 19 nt, Artificial Sequence
  Description of Artificial Sequence: Synthetic oligonucleotide
augcuaauucuucuagaac

SEQ ID NO: 793432 - RNA, 19 nt, Artificial Sequence
  Description of Artificial Sequence: Synthetic oligonucleotide
auugacuaaauauuugguu

SEQ ID NO: 793433 - RNA, 19 nt, Artificial Sequence
  Description of Artificial Sequence: Synthetic oligonucleotide
agagcuggcgucuuaacug

SEQ ID NO: 793434 - RNA, 19 nt, Artificial Sequence
  Description of Artificial Sequence: Synthetic oligonucleotide
aaaggccgaggacugacag

SEQ ID NO: 793435 - RNA, 19 nt, Artificial Sequence
  Description of Artificial Sequence: Synthetic oligonucleotide
aacuaagagguuaaaagau

SEQ ID NO: 793436 - RNA, 19 nt, Artificial Sequence
  Description of Artificial Sequence: Synthetic oligonucleotide
uugacguacuuuuaaugug

SEQ ID NO: 793437 - RNA, 19 nt, Artificial Sequence
  Description of Artificial Sequence: Synthetic oligonucleotide
uuagagcuaccauuuagga

SEQ ID NO: 793438 - RNA, 19 nt, Artificial Sequence
  Description of Artificial Sequence: Synthetic oligonucleotide
uuuucuccuaacacuaagu

SEQ ID NO: 793439 - RNA, 19 nt, Artificial Sequence
  Description of Artificial Sequence: Synthetic oligonucleotide
ugguggacuaaauaagaug

SEQ ID NO: 793440 - RNA, 19 nt, Artificial Sequence
  Description of Artificial Sequence: Synthetic oligonucleotide
aacaaaacuacugggacua

SEQ ID NO: 793441 - RNA, 19 nt, Artificial Sequence
  Description of Artificial Sequence: Synthetic oligonucleotide
ugaucaauuugaacgucug

SEQ ID NO: 793442 - RNA, 19 nt, Artificial Sequence
  Description of Artificial Sequence: Synthetic oligonucleotide
acuaggaagcaauguaaag

SEQ ID NO: 793443 - RNA, 19 nt, Artificial Sequence
  Description of Artificial Sequence: Synthetic oligonucleotide
acuauuaaauucaaacugu

SEQ ID NO: 793444 - RNA, 19 nt, Artificial Sequence
  Description of Artificial Sequence: Synthetic oligonucleotide
ucacucauagcuuguagcu

SEQ ID NO: 793445 - RNA, 19 nt, Artificial Sequence
  Description of Artificial Sequence: Synthetic oligonucleotide
aaaucagcagagccggucu

SEQ ID NO: 793446 - RNA, 19 nt, Artificial Sequence
  Description of Artificial Sequence: Synthetic oligonucleotide
aaaacuacugggacuaaca

SEQ ID NO: 793447 - RNA, 19 nt, Artificial Sequence
  Description of Artificial Sequence: Synthetic oligonucleotide
caucaugcuguaaacuagg

SEQ ID NO: 793448 - RNA, 19 nt, Artificial Sequence
  Description of Artificial Sequence: Synthetic oligonucleotide
uacaacuuucaaaaccaga

SEQ ID NO: 793449 - RNA, 19 nt, Artificial Sequence
  Description of Artificial Sequence: Synthetic oligonucleotide
uagcuuguagcucucggcc

SEQ ID NO: 793450 - RNA, 19 nt, Artificial Sequence
  Description of Artificial Sequence: Synthetic oligonucleotide
augcuguaaacuaggaagc

SEQ ID NO: 793451 - RNA, 19 nt, Artificial Sequence
  Description of Artificial Sequence: Synthetic oligonucleotide
uucggccucccaaacaccg

SEQ ID NO: 793452 - RNA, 19 nt, Artificial Sequence
  Description of Artificial Sequence: Synthetic oligonucleotide
uauugcaauauaguacuca

SEQ ID NO: 793453 - RNA, 19 nt, Artificial Sequence
  Description of Artificial Sequence: Synthetic oligonucleotide
cuaauauugcacuguuaag

SEQ ID NO: 793454 - RNA, 19 nt, Artificial Sequence
  Description of Artificial Sequence: Synthetic oligonucleotide
uuuacaucacccacaugcu

SEQ ID NO: 793455 - RNA, 19 nt, Artificial Sequence
  Description of Artificial Sequence: Synthetic oligonucleotide
uggaguagugaucuguuuc

SEQ ID NO: 793456 - RNA, 19 nt, Artificial Sequence
  Description of Artificial Sequence: Synthetic oligonucleotide
uguggguuucuaauauugc

SEQ ID NO: 793457 - RNA, 19 nt, Artificial Sequence
  Description of Artificial Sequence: Synthetic oligonucleotide
gucuauucuuaauggaugc

SEQ ID NO: 793458 - RNA, 19 nt, Artificial Sequence
  Description of Artificial Sequence: Synthetic oligonucleotide
ugcuaaaaggccgaggacu

SEQ ID NO: 793459 - RNA, 19 nt, Artificial Sequence
  Description of Artificial Sequence: Synthetic oligonucleotide
ugaucgagccaucaguccu

SEQ ID NO: 793460 - RNA, 19 nt, Artificial Sequence
  Description of Artificial Sequence: Synthetic oligonucleotide
cucacucauagcuuguagc

SEQ ID NO: 793461 - RNA, 19 nt, Artificial Sequence
  Description of Artificial Sequence: Synthetic oligonucleotide
ucaauuugaacgucugaaa

SEQ ID NO: 793462 - RNA, 19 nt, Artificial Sequence
  Description of Artificial Sequence: Synthetic oligonucleotide
guagcucucggccaaagug

SEQ ID NO: 793463 - RNA, 19 nt, Artificial Sequence
  Description of Artificial Sequence: Synthetic oligonucleotide
aguccuagacauugugugg

SEQ ID NO: 793464 - RNA, 19 nt, Artificial Sequence
  Description of Artificial Sequence: Synthetic oligonucleotide
uuaauggaugcuaauucuu

SEQ ID NO: 793465 - RNA, 19 nt, Artificial Sequence
  Description of Artificial Sequence: Synthetic oligonucleotide
aacgucugaaauucaguaa

SEQ ID NO: 793466 - RNA, 19 nt, Artificial Sequence
  Description of Artificial Sequence: Synthetic oligonucleotide
cuagcaaacugaaugcguc

SEQ ID NO: 793467 - RNA, 19 nt, Artificial Sequence
  Description of Artificial Sequence: Synthetic oligonucleotide
uuuagcucugguacauuca

SEQ ID NO: 793468 - RNA, 19 nt, Artificial Sequence
  Description of Artificial Sequence: Synthetic oligonucleotide
ugcauuuugcaaguuacac

SEQ ID NO: 793469 - RNA, 19 nt, Artificial Sequence
  Description of Artificial Sequence: Synthetic oligonucleotide
uguguuguuucaauggcuu

SEQ ID NO: 793470 - RNA, 19 nt, Artificial Sequence
  Description of Artificial Sequence: Synthetic oligonucleotide
acagcucccaauuuguagu

SEQ ID NO: 793471 - RNA, 19 nt, Artificial Sequence
  Description of Artificial Sequence: Synthetic oligonucleotide
aacuggacuguuccaagga

SEQ ID NO: 793472 - RNA, 19 nt, Artificial Sequence
  Description of Artificial Sequence: Synthetic oligonucleotide
ggagucaacuuccauuucg

SEQ ID NO: 793473 - RNA, 19 nt, Artificial Sequence
  Description of Artificial Sequence: Synthetic oligonucleotide
ugaacgucugaaauucagu

SEQ ID NO: 793474 - RNA, 19 nt, Artificial Sequence
  Description of Artificial Sequence: Synthetic oligonucleotide
aaaccauuggaugaaguuu

SEQ ID NO: 793475 - RNA, 19 nt, Artificial Sequence
  Description of Artificial Sequence: Synthetic oligonucleotide
uagacaacuaagagguuaa

SEQ ID NO: 793476 - RNA, 19 nt, Artificial Sequence
  Description of Artificial Sequence: Synthetic oligonucleotide
acgucugaaauucaguaau

SEQ ID NO: 793477 - RNA, 19 nt, Artificial Sequence
  Description of Artificial Sequence: Synthetic oligonucleotide
uguaagugugagcucuuga

SEQ ID NO: 793478 - RNA, 19 nt, Artificial Sequence
  Description of Artificial Sequence: Synthetic oligonucleotide
aaacuaggaagcaauguaa

SEQ ID NO: 793479 - RNA, 19 nt, Artificial Sequence
  Description of Artificial Sequence: Synthetic oligonucleotide
agugcauagcuaauguagg

SEQ ID NO: 793480 - RNA, 19 nt, Artificial Sequence
  Description of Artificial Sequence: Synthetic oligonucleotide
cauucguccugcuaacacc

SEQ ID NO: 793481 - RNA, 19 nt, Artificial Sequence
  Description of Artificial Sequence: Synthetic oligonucleotide
caguccuagacauugugug

SEQ ID NO: 793482 - RNA, 19 nt, Artificial Sequence
  Description of Artificial Sequence: Synthetic oligonucleotide
ucauuacuggugaaguuau

SEQ ID NO: 793483 - RNA, 19 nt, Artificial Sequence
  Description of Artificial Sequence: Synthetic oligonucleotide
cacagguucucucugaauc

SEQ ID NO: 793484 - RNA, 19 nt, Artificial Sequence
  Description of Artificial Sequence: Synthetic oligonucleotide
cuaauguagguagucuucc

SEQ ID NO: 793485 - RNA, 19 nt, Artificial Sequence
  Description of Artificial Sequence: Synthetic oligonucleotide
augugaaaaggagauuggg

SEQ ID NO: 793486 - RNA, 19 nt, Artificial Sequence
  Description of Artificial Sequence: Synthetic oligonucleotide
uggauacucauuccauggc

SEQ ID NO: 793487 - RNA, 19 nt, Artificial Sequence
  Description of Artificial Sequence: Synthetic oligonucleotide
uuuugccuggugcuaaacu

SEQ ID NO: 793488 - RNA, 19 nt, Artificial Sequence
  Description of Artificial Sequence: Synthetic oligonucleotide
uccugaucgagccaucagu

SEQ ID NO: 793489 - RNA, 19 nt, Artificial Sequence
  Description of Artificial Sequence: Synthetic oligonucleotide
ugcuagcaaacugaaugcg

SEQ ID NO: 793490 - RNA, 19 nt, Artificial Sequence
  Description of Artificial Sequence: Synthetic oligonucleotide
aaacugaaugcguccuuca

SEQ ID NO: 793491 - RNA, 19 nt, Artificial Sequence
  Description of Artificial Sequence: Synthetic oligonucleotide
agcagagccggucuacuuc

SEQ ID NO: 793492 - RNA, 19 nt, Artificial Sequence
  Description of Artificial Sequence: Synthetic oligonucleotide
cauugauacuguuuagcuc

SEQ ID NO: 793493 - RNA, 19 nt, Artificial Sequence
  Description of Artificial Sequence: Synthetic oligonucleotide
uuccauuucguggucaugu

SEQ ID NO: 793494 - RNA, 19 nt, Artificial Sequence
  Description of Artificial Sequence: Synthetic oligonucleotide
gguggacuaaauaagauga

SEQ ID NO: 793495 - RNA, 19 nt, Artificial Sequence
  Description of Artificial Sequence: Synthetic oligonucleotide
cugaaugcguccuucagca

SEQ ID NO: 793496 - RNA, 19 nt, Artificial Sequence
  Description of Artificial Sequence: Synthetic oligonucleotide
aaauaagaugaaaccauuu

SEQ ID NO: 793497 - RNA, 19 nt, Artificial Sequence
  Description of Artificial Sequence: Synthetic oligonucleotide
gaacgucugaaauucagua

SEQ ID NO: 793498 - RNA, 19 nt, Artificial Sequence
  Description of Artificial Sequence: Synthetic oligonucleotide
uuuaacucuuagacaacua

SEQ ID NO: 793499 - RNA, 19 nt, Artificial Sequence
  Description of Artificial Sequence: Synthetic oligonucleotide
uggacuaaauaagaugaaa

SEQ ID NO: 793500 - RNA, 19 nt, Artificial Sequence
  Description of Artificial Sequence: Synthetic oligonucleotide
agacacgguaaauugacua

SEQ ID NO: 793501 - RNA, 19 nt, Artificial Sequence
  Description of Artificial Sequence: Synthetic oligonucleotide
uggacugcuaaaaggccga

SEQ ID NO: 793502 - RNA, 19 nt, Artificial Sequence
  Description of Artificial Sequence: Synthetic oligonucleotide
ggacuaaauaagaugaaac

SEQ ID NO: 793503 - RNA, 19 nt, Artificial Sequence
  Description of Artificial Sequence: Synthetic oligonucleotide
uaacaggucgggauuguaa

SEQ ID NO: 793504 - RNA, 19 nt, Artificial Sequence
  Description of Artificial Sequence: Synthetic oligonucleotide
ucuuaacugacuggaguca

SEQ ID NO: 793505 - RNA, 19 nt, Artificial Sequence
  Description of Artificial Sequence: Synthetic oligonucleotide
uuauuaacuugcugugauc

SEQ ID NO: 793506 - RNA, 19 nt, Artificial Sequence
  Description of Artificial Sequence: Synthetic oligonucleotide
ggaguagugaucuguuucc

SEQ ID NO: 793507 - RNA, 19 nt, Artificial Sequence
  Description of Artificial Sequence: Synthetic oligonucleotide
guaaguagcaacaaacaua

SEQ ID NO: 793508 - RNA, 19 nt, Artificial Sequence
  Description of Artificial Sequence: Synthetic oligonucleotide
ugcaaguuacacugauuga

SEQ ID NO: 793509 - RNA, 19 nt, Artificial Sequence
  Description of Artificial Sequence: Synthetic oligonucleotide
ugucggauguuuaugcauu

SEQ ID NO: 793510 - RNA, 19 nt, Artificial Sequence
  Description of Artificial Sequence: Synthetic oligonucleotide
uccugaguauuucaaguuu

SEQ ID NO: 793511 - RNA, 19 nt, Artificial Sequence
  Description of Artificial Sequence: Synthetic oligonucleotide
agcucuugaagugcauagc

SEQ ID NO: 793512 - RNA, 19 nt, Artificial Sequence
  Description of Artificial Sequence: Synthetic oligonucleotide
caacuggacuguuccaagg

SEQ ID NO: 793513 - RNA, 19 nt, Artificial Sequence
  Description of Artificial Sequence: Synthetic oligonucleotide
auuucguggucauguuuag

SEQ ID NO: 793514 - RNA, 19 nt, Artificial Sequence
  Description of Artificial Sequence: Synthetic oligonucleotide
agagguuaaaagauggaaa

SEQ ID NO: 793515 - RNA, 19 nt, Artificial Sequence
  Description of Artificial Sequence: Synthetic oligonucleotide
auauuuucuccuaacacua

SEQ ID NO: 793516 - RNA, 19 nt, Artificial Sequence
  Description of Artificial Sequence: Synthetic oligonucleotide
aaacucgauaacugguguu

SEQ ID NO: 793517 - RNA, 19 nt, Artificial Sequence
  Description of Artificial Sequence: Synthetic oligonucleotide
guggguuucuaauauugca

SEQ ID NO: 793518 - RNA, 19 nt, Artificial Sequence
  Description of Artificial Sequence: Synthetic oligonucleotide
acuauuugccacaauguaa

SEQ ID NO: 793519 - RNA, 19 nt, Artificial Sequence
  Description of Artificial Sequence: Synthetic oligonucleotide
uaaaggucauaaccacacu

SEQ ID NO: 793520 - RNA, 19 nt, Artificial Sequence
  Description of Artificial Sequence: Synthetic oligonucleotide
guaagugugagcucuugaa

SEQ ID NO: 793521 - RNA, 19 nt, Artificial Sequence
  Description of Artificial Sequence: Synthetic oligonucleotide
aaaaggagauugggauuuc

SEQ ID NO: 793522 - RNA, 19 nt, Artificial Sequence
  Description of Artificial Sequence: Synthetic oligonucleotide
auuacuggugaaguuauua

SEQ ID NO: 793523 - RNA, 19 nt, Artificial Sequence
  Description of Artificial Sequence: Synthetic oligonucleotide
aacucgauaacugguguuu

SEQ ID NO: 793524 - RNA, 19 nt, Artificial Sequence
  Description of Artificial Sequence: Synthetic oligonucleotide
uuacuauggcaauaugauu

SEQ ID NO: 793525 - RNA, 19 nt, Artificial Sequence
  Description of Artificial Sequence: Synthetic oligonucleotide
aacuaggaagcaauguaaa

SEQ ID NO: 793526 - RNA, 19 nt, Artificial Sequence
  Description of Artificial Sequence: Synthetic oligonucleotide
gguacauucaaacucgaua

SEQ ID NO: 793527 - RNA, 19 nt, Artificial Sequence
  Description of Artificial Sequence: Synthetic oligonucleotide
gacacgguaaauugacuaa

SEQ ID NO: 793528 - RNA, 19 nt, Artificial Sequence
  Description of Artificial Sequence: Synthetic oligonucleotide
gaucugaauaugcuagcaa

SEQ ID NO: 793529 - RNA, 19 nt, Artificial Sequence
  Description of Artificial Sequence: Synthetic oligonucleotide
ucguggucauguuuagagc

SEQ ID NO: 793530 - RNA, 19 nt, Artificial Sequence
  Description of Artificial Sequence: Synthetic oligonucleotide
cuuaauggaugcuaauucu

SEQ ID NO: 793531 - RNA, 19 nt, Artificial Sequence
  Description of Artificial Sequence: Synthetic oligonucleotide
ucgauaacugguguuuacu

SEQ ID NO: 793532 - RNA, 19 nt, Artificial Sequence
  Description of Artificial Sequence: Synthetic oligonucleotide
uuggaugaaguuucuccaa

SEQ ID NO: 793533 - RNA, 19 nt, Artificial Sequence
  Description of Artificial Sequence: Synthetic oligonucleotide
aagcaauguaaagcgacaa

SEQ ID NO: 793534 - RNA, 19 nt, Artificial Sequence
  Description of Artificial Sequence: Synthetic oligonucleotide
agcuaauguagguagucuu

SEQ ID NO: 793535 - RNA, 19 nt, Artificial Sequence
  Description of Artificial Sequence: Synthetic oligonucleotide
gcuuggacugcuaaaaggc

SEQ ID NO: 793536 - RNA, 19 nt, Artificial Sequence
  Description of Artificial Sequence: Synthetic oligonucleotide
cugaucgagccaucagucc

SEQ ID NO: 793537 - RNA, 19 nt, Artificial Sequence
  Description of Artificial Sequence: Synthetic oligonucleotide
gcuaacaccaacuucugaa

SEQ ID NO: 793538 - RNA, 19 nt, Artificial Sequence
  Description of Artificial Sequence: Synthetic oligonucleotide
gaagcaauguaaagcgaca

SEQ ID NO: 793539 - RNA, 19 nt, Artificial Sequence
  Description of Artificial Sequence: Synthetic oligonucleotide
uuacaucacccacaugcua

SEQ ID NO: 793540 - RNA, 19 nt, Artificial Sequence
  Description of Artificial Sequence: Synthetic oligonucleotide
uucuaauauugcacuguua

SEQ ID NO: 793541 - RNA, 19 nt, Artificial Sequence
  Description of Artificial Sequence: Synthetic oligonucleotide
guuauuaacuugcugugau

SEQ ID NO: 793542 - RNA, 19 nt, Artificial Sequence
  Description of Artificial Sequence: Synthetic oligonucleotide
cauuucguggucauguuua

SEQ ID NO: 793543 - RNA, 19 nt, Artificial Sequence
  Description of Artificial Sequence: Synthetic oligonucleotide
guccuagacauuguguggc

SEQ ID NO: 793544 - RNA, 19 nt, Artificial Sequence
  Description of Artificial Sequence: Synthetic oligonucleotide
agcaauguaaagcgacaaa

SEQ ID NO: 793545 - RNA, 19 nt, Artificial Sequence
  Description of Artificial Sequence: Synthetic oligonucleotide
ugcuaacaccaacuucuga

SEQ ID NO: 793546 - RNA, 19 nt, Artificial Sequence
  Description of Artificial Sequence: Synthetic oligonucleotide
ugcauagcuaauguaggua

SEQ ID NO: 793547 - RNA, 19 nt, Artificial Sequence
  Description of Artificial Sequence: Synthetic oligonucleotide
uccugcuaacaccaacuuc

SEQ ID NO: 793548 - RNA, 19 nt, Artificial Sequence
  Description of Artificial Sequence: Synthetic oligonucleotide
acgguaaauugacuaaaua

SEQ ID NO: 793549 - RNA, 19 nt, Artificial Sequence
  Description of Artificial Sequence: Synthetic oligonucleotide
agccggucuacuuccaugu

SEQ ID NO: 793550 - RNA, 19 nt, Artificial Sequence
  Description of Artificial Sequence: Synthetic oligonucleotide
ggaagcaauguaaagcgac

SEQ ID NO: 793551 - RNA, 19 nt, Artificial Sequence
  Description of Artificial Sequence: Synthetic oligonucleotide
gaugaucaauuugaacguc

SEQ ID NO: 793552 - RNA, 19 nt, Artificial Sequence
  Description of Artificial Sequence: Synthetic oligonucleotide
gacaacuaagagguuaaaa

SEQ ID NO: 793553 - RNA, 19 nt, Artificial Sequence
  Description of Artificial Sequence: Synthetic oligonucleotide
augaucaauuugaacgucu

SEQ ID NO: 793554 - RNA, 19 nt, Artificial Sequence
  Description of Artificial Sequence: Synthetic oligonucleotide
uccuagacauuguguggcc

SEQ ID NO: 793555 - RNA, 19 nt, Artificial Sequence
  Description of Artificial Sequence: Synthetic oligonucleotide
cucgauaacugguguuuac

SEQ ID NO: 793556 - RNA, 19 nt, Artificial Sequence
  Description of Artificial Sequence: Synthetic oligonucleotide
gaaaccauuggaugaaguu

SEQ ID NO: 793557 - RNA, 19 nt, Artificial Sequence
  Description of Artificial Sequence: Synthetic oligonucleotide
gauaacugguguuuacuau

SEQ ID NO: 793558 - RNA, 19 nt, Artificial Sequence
  Description of Artificial Sequence: Synthetic oligonucleotide
aaaccuguccccaguacau

SEQ ID NO: 793559 - RNA, 19 nt, Artificial Sequence
  Description of Artificial Sequence: Synthetic oligonucleotide
uagcuaauguagguagucu

SEQ ID NO: 793560 - RNA, 19 nt, Artificial Sequence
  Description of Artificial Sequence: Synthetic oligonucleotide
uaggaaaccauuggaugaa

SEQ ID NO: 793561 - RNA, 19 nt, Artificial Sequence
  Description of Artificial Sequence: Synthetic oligonucleotide
gacuaacaggucgggauug

SEQ ID NO: 793562 - RNA, 19 nt, Artificial Sequence
  Description of Artificial Sequence: Synthetic oligonucleotide
uguuuagagcuaccauuua

SEQ ID NO: 793563 - RNA, 19 nt, Artificial Sequence
  Description of Artificial Sequence: Synthetic oligonucleotide
ucuguaccauucaccauuu

SEQ ID NO: 793564 - RNA, 19 nt, Artificial Sequence
  Description of Artificial Sequence: Synthetic oligonucleotide
uggacuucggccucccaaa

SEQ ID NO: 793565 - RNA, 19 nt, Artificial Sequence
  Description of Artificial Sequence: Synthetic oligonucleotide
acaccauugcuacaacuuu

SEQ ID NO: 793566 - RNA, 19 nt, Artificial Sequence
  Description of Artificial Sequence: Synthetic oligonucleotide
acaccaacuucugaauucu

SEQ ID NO: 793567 - RNA, 19 nt, Artificial Sequence
  Description of Artificial Sequence: Synthetic oligonucleotide
aaugcguccuucagcauuu

SEQ ID NO: 793568 - RNA, 19 nt, Artificial Sequence
  Description of Artificial Sequence: Synthetic oligonucleotide
ggguauaacuguuguguug

SEQ ID NO: 793569 - RNA, 19 nt, Artificial Sequence
  Description of Artificial Sequence: Synthetic oligonucleotide
acucauuuaagcacuuaaa

SEQ ID NO: 793570 - RNA, 19 nt, Artificial Sequence
  Description of Artificial Sequence: Synthetic oligonucleotide
aucagcagagccggucuac

SEQ ID NO: 793571 - RNA, 19 nt, Artificial Sequence
  Description of Artificial Sequence: Synthetic oligonucleotide
ugaaucgggucaaguuggu

SEQ ID NO: 793572 - RNA, 19 nt, Artificial Sequence
  Description of Artificial Sequence: Synthetic oligonucleotide
guugacauguaauacuguu

SEQ ID NO: 793573 - RNA, 19 nt, Artificial Sequence
  Description of Artificial Sequence: Synthetic oligonucleotide
agcaaacugaaugcguccu

SEQ ID NO: 793574 - RNA, 19 nt, Artificial Sequence
  Description of Artificial Sequence: Synthetic oligonucleotide
ggucaaguugguuuccaac

SEQ ID NO: 793575 - RNA, 19 nt, Artificial Sequence
  Description of Artificial Sequence: Synthetic oligonucleotide
uaugauugaugugcuuuau

SEQ ID NO: 793576 - RNA, 19 nt, Artificial Sequence
  Description of Artificial Sequence: Synthetic oligonucleotide
uuuggcagauuguggguuu

SEQ ID NO: 793577 - RNA, 19 nt, Artificial Sequence
  Description of Artificial Sequence: Synthetic oligonucleotide
ucauuugcaucaugcugua

SEQ ID NO: 793578 - RNA, 19 nt, Artificial Sequence
  Description of Artificial Sequence: Synthetic oligonucleotide
ugguacauucaaacucgau

SEQ ID NO: 793579 - RNA, 19 nt, Artificial Sequence
  Description of Artificial Sequence: Synthetic oligonucleotide
caauuugaacgucugaaau

SEQ ID NO: 793580 - RNA, 19 nt, Artificial Sequence
  Description of Artificial Sequence: Synthetic oligonucleotide
aagacacgguaaauugacu

SEQ ID NO: 793581 - RNA, 19 nt, Artificial Sequence
  Description of Artificial Sequence: Synthetic oligonucleotide
augauugaugugcuuuauu

SEQ ID NO: 793582 - RNA, 19 nt, Artificial Sequence
  Description of Artificial Sequence: Synthetic oligonucleotide
caaaucagcagagccgguc

SEQ ID NO: 793583 - RNA, 19 nt, Artificial Sequence
  Description of Artificial Sequence: Synthetic oligonucleotide
gcaauguaaagcgacaaaa

SEQ ID NO: 793584 - RNA, 19 nt, Artificial Sequence
  Description of Artificial Sequence: Synthetic oligonucleotide
aaucagcagagccggucua

SEQ ID NO: 793585 - RNA, 19 nt, Artificial Sequence
  Description of Artificial Sequence: Synthetic oligonucleotide
accgcacuucacuaucugu

SEQ ID NO: 793586 - RNA, 19 nt, Artificial Sequence
  Description of Artificial Sequence: Synthetic oligonucleotide
caugcuuggacugcuaaaa

SEQ ID NO: 793587 - RNA, 19 nt, Artificial Sequence
  Description of Artificial Sequence: Synthetic oligonucleotide
cuauucuuaauggaugcua

SEQ ID NO: 793588 - RNA, 19 nt, Artificial Sequence
  Description of Artificial Sequence: Synthetic oligonucleotide
augugcuuuauuugauauu

SEQ ID NO: 793589 - RNA, 19 nt, Artificial Sequence
  Description of Artificial Sequence: Synthetic oligonucleotide
cuguaaacuaggaagcaau

SEQ ID NO: 793590 - RNA, 19 nt, Artificial Sequence
  Description of Artificial Sequence: Synthetic oligonucleotide
gcaucaugcuguaaacuag

SEQ ID NO: 793591 - RNA, 19 nt, Artificial Sequence
  Description of Artificial Sequence: Synthetic oligonucleotide
acacgguaaauugacuaaa

SEQ ID NO: 793592 - RNA, 19 nt, Artificial Sequence
  Description of Artificial Sequence: Synthetic oligonucleotide
uguugacuauuugccacaa

SEQ ID NO: 793593 - RNA, 19 nt, Artificial Sequence
  Description of Artificial Sequence: Synthetic oligonucleotide
caauguaagugugagcucu

SEQ ID NO: 793594 - RNA, 19 nt, Artificial Sequence
  Description of Artificial Sequence: Synthetic oligonucleotide
uuucguggucauguuuaga

SEQ ID NO: 793595 - RNA, 19 nt, Artificial Sequence
  Description of Artificial Sequence: Synthetic oligonucleotide
cuauggcagccugacuucc

SEQ ID NO: 793596 - RNA, 19 nt, Artificial Sequence
  Description of Artificial Sequence: Synthetic oligonucleotide
accauucaccauuucuaua

SEQ ID NO: 793597 - RNA, 19 nt, Artificial Sequence
  Description of Artificial Sequence: Synthetic oligonucleotide
gcuaccauuuaggaaacca

SEQ ID NO: 793598 - RNA, 19 nt, Artificial Sequence
  Description of Artificial Sequence: Synthetic oligonucleotide
ucgggauuguaaguagcaa

SEQ ID NO: 793599 - RNA, 19 nt, Artificial Sequence
  Description of Artificial Sequence: Synthetic oligonucleotide
ucccauucguccugcuaac

SEQ ID NO: 793600 - RNA, 19 nt, Artificial Sequence
  Description of Artificial Sequence: Synthetic oligonucleotide
cacuaaguuagaaaaucau

SEQ ID NO: 793601 - RNA, 19 nt, Artificial Sequence
  Description of Artificial Sequence: Synthetic oligonucleotide
cuagggcaaguggagguug

SEQ ID NO: 793602 - RNA, 19 nt, Artificial Sequence
  Description of Artificial Sequence: Synthetic oligonucleotide
gcagagccggucuacuucc

SEQ ID NO: 793603 - RNA, 19 nt, Artificial Sequence
  Description of Artificial Sequence: Synthetic oligonucleotide
agguucucucugaaucggg

SEQ ID NO: 793604 - RNA, 19 nt, Artificial Sequence
  Description of Artificial Sequence: Synthetic oligonucleotide
ccugaucgagccaucaguc

SEQ ID NO: 793605 - RNA, 19 nt, Artificial Sequence
  Description of Artificial Sequence: Synthetic oligonucleotide
cucccaaacaccgcacuuc

SEQ ID NO: 793606 - RNA, 19 nt, Artificial Sequence
  Description of Artificial Sequence: Synthetic oligonucleotide
gucgggauuguaaguagca

SEQ ID NO: 793607 - RNA, 19 nt, Artificial Sequence
  Description of Artificial Sequence: Synthetic oligonucleotide
uugcugugaucuugacaca

SEQ ID NO: 793608 - RNA, 19 nt, Artificial Sequence
  Description of Artificial Sequence: Synthetic oligonucleotide
acguacuuuuaaugugaaa

SEQ ID NO: 793609 - RNA, 19 nt, Artificial Sequence
  Description of Artificial Sequence: Synthetic oligonucleotide
cacaguacccaugguggac

SEQ ID NO: 793610 - RNA, 19 nt, Artificial Sequence
  Description of Artificial Sequence: Synthetic oligonucleotide
cagauuguggguuucuaau

SEQ ID NO: 793611 - RNA, 19 nt, Artificial Sequence
  Description of Artificial Sequence: Synthetic oligonucleotide
ggcgucuuaacugacugga

SEQ ID NO: 793612 - RNA, 19 nt, Artificial Sequence
  Description of Artificial Sequence: Synthetic oligonucleotide
uccauuucguggucauguu

SEQ ID NO: 793613 - RNA, 19 nt, Artificial Sequence
  Description of Artificial Sequence: Synthetic oligonucleotide
cuaacaccaacuucugaau

SEQ ID NO: 793614 - RNA, 19 nt, Artificial Sequence
  Description of Artificial Sequence: Synthetic oligonucleotide
guuuccaacuggacuguuc

SEQ ID NO: 793615 - RNA, 19 nt, Artificial Sequence
  Description of Artificial Sequence: Synthetic oligonucleotide
cuuaacugacuggagucaa

SEQ ID NO: 793616 - RNA, 19 nt, Artificial Sequence
  Description of Artificial Sequence: Synthetic oligonucleotide
caaacucgauaacuggugu

SEQ ID NO: 793617 - RNA, 19 nt, Artificial Sequence
  Description of Artificial Sequence: Synthetic oligonucleotide
gacguacuuuuaaugugaa

SEQ ID NO: 793618 - RNA, 19 nt, Artificial Sequence
  Description of Artificial Sequence: Synthetic oligonucleotide
guuaagagcugagcacaca

SEQ ID NO: 793619 - RNA, 19 nt, Artificial Sequence
  Description of Artificial Sequence: Synthetic oligonucleotide
ccaacuggacuguuccaag

SEQ ID NO: 793620 - RNA, 19 nt, Artificial Sequence
  Description of Artificial Sequence: Synthetic oligonucleotide
ggauacucauuccauggcu

SEQ ID NO: 793621 - RNA, 19 nt, Artificial Sequence
  Description of Artificial Sequence: Synthetic oligonucleotide
ggaucugaauaugcuagca

SEQ ID NO: 793622 - RNA, 19 nt, Artificial Sequence
  Description of Artificial Sequence: Synthetic oligonucleotide
ccauucguccugcuaacac

SEQ ID NO: 793623 - RNA, 19 nt, Artificial Sequence
  Description of Artificial Sequence: Synthetic oligonucleotide
ugaaugcguccuucagcau

SEQ ID NO: 793624 - RNA, 19 nt, Artificial Sequence
  Description of Artificial Sequence: Synthetic oligonucleotide
cauuggaguagugaucugu

SEQ ID NO: 793625 - RNA, 19 nt, Artificial Sequence
  Description of Artificial Sequence: Synthetic oligonucleotide
cuguggcacaguacccaug

SEQ ID NO: 793626 - RNA, 19 nt, Artificial Sequence
  Description of Artificial Sequence: Synthetic oligonucleotide
gcaauauaguacucauuua

SEQ ID NO: 793627 - RNA, 19 nt, Artificial Sequence
  Description of Artificial Sequence: Synthetic oligonucleotide
caccgcacuucacuaucug

SEQ ID NO: 793628 - RNA, 19 nt, Artificial Sequence
  Description of Artificial Sequence: Synthetic oligonucleotide
ucggccaaaguggaucauu

SEQ ID NO: 793629 - RNA, 19 nt, Artificial Sequence
  Description of Artificial Sequence: Synthetic oligonucleotide
ggucgggauuguaaguagc

SEQ ID NO: 793630 - RNA, 19 nt, Artificial Sequence
  Description of Artificial Sequence: Synthetic oligonucleotide
ucggauguuuaugcauuuu

SEQ ID NO: 793631 - RNA, 19 nt, Artificial Sequence
  Description of Artificial Sequence: Synthetic oligonucleotide
guggacuaaauaagaugaa

SEQ ID NO: 793632 - RNA, 19 nt, Artificial Sequence
  Description of Artificial Sequence: Synthetic oligonucleotide
gucggaacagcucccaauu

SEQ ID NO: 793633 - RNA, 19 nt, Artificial Sequence
  Description of Artificial Sequence: Synthetic oligonucleotide
acucgauaacugguguuua

SEQ ID NO: 793634 - RNA, 19 nt, Artificial Sequence
  Description of Artificial Sequence: Synthetic oligonucleotide
accauuggaugaaguuucu

SEQ ID NO: 793635 - RNA, 19 nt, Artificial Sequence
  Description of Artificial Sequence: Synthetic oligonucleotide
ccggucuacuuccauguug

SEQ ID NO: 793636 - RNA, 19 nt, Artificial Sequence
  Description of Artificial Sequence: Synthetic oligonucleotide
ccauguugacuauuugcca

SEQ ID NO: 793637 - RNA, 19 nt, Artificial Sequence
  Description of Artificial Sequence: Synthetic oligonucleotide
cucugaaucgggucaaguu

SEQ ID NO: 793638 - RNA, 19 nt, Artificial Sequence
  Description of Artificial Sequence: Synthetic oligonucleotide
ggauccaauuccugaucga

SEQ ID NO: 793639 - RNA, 19 nt, Artificial Sequence
  Description of Artificial Sequence: Synthetic oligonucleotide
agacaacuaagagguuaaa

SEQ ID NO: 793640 - RNA, 19 nt, Artificial Sequence
  Description of Artificial Sequence: Synthetic oligonucleotide
cacgguaaauugacuaaau

SEQ ID NO: 793641 - RNA, 19 nt, Artificial Sequence
  Description of Artificial Sequence: Synthetic oligonucleotide
cugucggauguuuaugcau

SEQ ID NO: 793642 - RNA, 19 nt, Artificial Sequence
  Description of Artificial Sequence: Synthetic oligonucleotide
cucucugaaucgggucaag

SEQ ID NO: 793643 - RNA, 19 nt, Artificial Sequence
  Description of Artificial Sequence: Synthetic oligonucleotide
acaccgcacuucacuaucu

SEQ ID NO: 793644 - RNA, 19 nt, Artificial Sequence
  Description of Artificial Sequence: Synthetic oligonucleotide
gcuaaacuguggauacuca

SEQ ID NO: 793645 - RNA, 19 nt, Artificial Sequence
  Description of Artificial Sequence: Synthetic oligonucleotide
gguguuuacuauggcaaua

SEQ ID NO: 793646 - RNA, 19 nt, Artificial Sequence
  Description of Artificial Sequence: Synthetic oligonucleotide
cuaaaaggccgaggacuga

SEQ ID NO: 793647 - RNA, 19 nt, Artificial Sequence
  Description of Artificial Sequence: Synthetic oligonucleotide
ggaacagcucccaauuugu

SEQ ID NO: 793648 - RNA, 19 nt, Artificial Sequence
  Description of Artificial Sequence: Synthetic oligonucleotide
caauuccugaucgagccau

SEQ ID NO: 793649 - RNA, 19 nt, Artificial Sequence
  Description of Artificial Sequence: Synthetic oligonucleotide
acaaaacuacugggacuaa

SEQ ID NO: 793650 - RNA, 19 nt, Artificial Sequence
  Description of Artificial Sequence: Synthetic oligonucleotide
gcuuguagcucucggccaa

SEQ ID NO: 793651 - RNA, 19 nt, Artificial Sequence
  Description of Artificial Sequence: Synthetic oligonucleotide
ccaaggaucugaauaugcu

SEQ ID NO: 793652 - RNA, 19 nt, Artificial Sequence
  Description of Artificial Sequence: Synthetic oligonucleotide
ccaaacaccgcacuucacu

SEQ ID NO: 793653 - RNA, 19 nt, Artificial Sequence
  Description of Artificial Sequence: Synthetic oligonucleotide
ggacuucggccucccaaac

SEQ ID NO: 793654 - RNA, 19 nt, Artificial Sequence
  Description of Artificial Sequence: Synthetic oligonucleotide
gcucugguacauucaaacu

SEQ ID NO: 793655 - RNA, 19 nt, Artificial Sequence
  Description of Artificial Sequence: Synthetic oligonucleotide
ucgagccaucaguccuaga

SEQ ID NO: 793656 - RNA, 19 nt, Artificial Sequence
  Description of Artificial Sequence: Synthetic oligonucleotide
ggucuacuuccauguugac

SEQ ID NO: 793657 - RNA, 19 nt, Artificial Sequence
  Description of Artificial Sequence: Synthetic oligonucleotide
gcgucuuaacugacuggag

SEQ ID NO: 793658 - RNA, 19 nt, Artificial Sequence
  Description of Artificial Sequence: Synthetic oligonucleotide
ggacugcuaaaaggccgag

SEQ ID NO: 793659 - RNA, 19 nt, Artificial Sequence
  Description of Artificial Sequence: Synthetic oligonucleotide
caucacccacaugcuaaca

SEQ ID NO: 793660 - RNA, 19 nt, Artificial Sequence
  Description of Artificial Sequence: Synthetic oligonucleotide
ccgcacuucacuaucugua

SEQ ID NO: 793661 - RNA, 19 nt, Artificial Sequence
  Description of Artificial Sequence: Synthetic oligonucleotide
gucggauguuuaugcauuu

SEQ ID NO: 793662 - RNA, 19 nt, Artificial Sequence
  Description of Artificial Sequence: Synthetic oligonucleotide
cuaacaggucgggauugua

SEQ ID NO: 793663 - RNA, 19 nt, Artificial Sequence
  Description of Artificial Sequence: Synthetic oligonucleotide
cgauaacugguguuuacua

SEQ ID NO: 793664 - RNA, 19 nt, Artificial Sequence
  Description of Artificial Sequence: Synthetic oligonucleotide
guugacuauuugccacaau

SEQ ID NO: 793665 - RNA, 19 nt, Artificial Sequence
  Description of Artificial Sequence: Synthetic oligonucleotide
gguucucucugaaucgggu

SEQ ID NO: 793666 - RNA, 19 nt, Artificial Sequence
  Description of Artificial Sequence: Synthetic oligonucleotide
ggacuaacaggucgggauu

SEQ ID NO: 793667 - RNA, 19 nt, Artificial Sequence
  Description of Artificial Sequence: Synthetic oligonucleotide
ggucggaacagcucccaau

SEQ ID NO: 793668 - RNA, 19 nt, Artificial Sequence
  Description of Artificial Sequence: Synthetic oligonucleotide
gaggacugacaggguaacu

SEQ ID NO: 793669 - RNA, 19 nt, Artificial Sequence
  Description of Artificial Sequence: Synthetic oligonucleotide
ccaugucuacaucauuacu

SEQ ID NO: 793670 - RNA, 19 nt, Artificial Sequence
  Description of Artificial Sequence: Synthetic oligonucleotide
ggcagauuguggguuucua

SEQ ID NO: 793671 - RNA, 19 nt, Artificial Sequence
  Description of Artificial Sequence: Synthetic oligonucleotide
cgucugaaauucaguaaua

SEQ ID NO: 793672 - RNA, 19 nt, Artificial Sequence
  Description of Artificial Sequence: Synthetic oligonucleotide
gcaaacugaaugcguccuu

SEQ ID NO: 793673 - RNA, 19 nt, Artificial Sequence
  Description of Artificial Sequence: Synthetic oligonucleotide
ggggucggaacagcuccca

SEQ ID NO: 793674 - RNA, 19 nt, Artificial Sequence
  Description of Artificial Sequence: Synthetic oligonucleotide
ggccucccaaacaccgcac

SEQ ID NO: 793675 - RNA, 19 nt, Artificial Sequence
  Description of Artificial Sequence: Synthetic oligonucleotide
gggucggaacagcucccaa

SEQ ID NO: 793676 - RNA, 19 nt, Artificial Sequence
  Description of Artificial Sequence: Synthetic oligonucleotide
ccauuucguggucauguuu

SEQ ID NO: 793677 - RNA, 19 nt, Artificial Sequence
  Description of Artificial Sequence: Synthetic oligonucleotide
augcguccuucagcauuuu

SEQ ID NO: 793678 - RNA, 19 nt, Artificial Sequence
  Description of Artificial Sequence: Synthetic oligonucleotide
cggccucccaaacaccgca

SEQ ID NO: 793679 - RNA, 19 nt, Artificial Sequence
  Description of Artificial Sequence: Synthetic oligonucleotide
ccuagacauuguguggccu

SEQ ID NO: 793680 - RNA, 19 nt, Artificial Sequence
  Description of Artificial Sequence: Synthetic oligonucleotide
cccauucguccugcuaaca

SEQ ID NO: 793681 - RNA, 19 nt, Artificial Sequence
  Description of Artificial Sequence: Synthetic oligonucleotide
gcuagggcaaguggagguu

SEQ ID NO: 793682 - RNA, 19 nt, Artificial Sequence
  Description of Artificial Sequence: Synthetic oligonucleotide
gccggucuacuuccauguu

SEQ ID NO: 793683 - RNA, 19 nt, Artificial Sequence
  Description of Artificial Sequence: Synthetic oligonucleotide
aauguaaauaaccagagaa

SEQ ID NO: 793684 - RNA, 19 nt, Artificial Sequence
  Description of Artificial Sequence: Synthetic oligonucleotide
uauauauuauauauaaaag

SEQ ID NO: 793685 - RNA, 19 nt, Artificial Sequence
  Description of Artificial Sequence: Synthetic oligonucleotide
uagaguauaauacagauau

SEQ ID NO: 793686 - RNA, 19 nt, Artificial Sequence
  Description of Artificial Sequence: Synthetic oligonucleotide
auauauauuauauauaaaa

SEQ ID NO: 793687 - RNA, 19 nt, Artificial Sequence
  Description of Artificial Sequence: Synthetic oligonucleotide
acaguuauaauucccaaac

SEQ ID NO: 793688 - RNA, 19 nt, Artificial Sequence
  Description of Artificial Sequence: Synthetic oligonucleotide
uguaacucaaccaauguca

SEQ ID NO: 793689 - RNA, 19 nt, Artificial Sequence
  Description of Artificial Sequence: Synthetic oligonucleotide
auauauauauuauauauaa

SEQ ID NO: 793690 - RNA, 19 nt, Artificial Sequence
  Description of Artificial Sequence: Synthetic oligonucleotide
uucacuauagguaaaagaa

SEQ ID NO: 793691 - RNA, 19 nt, Artificial Sequence
  Description of Artificial Sequence: Synthetic oligonucleotide
aaauccucugaaaugaagc

SEQ ID NO: 793692 - RNA, 19 nt, Artificial Sequence
  Description of Artificial Sequence: Synthetic oligonucleotide
ugguauaacaaacucaucu

SEQ ID NO: 793693 - RNA, 19 nt, Artificial Sequence
  Description of Artificial Sequence: Synthetic oligonucleotide
acauauauauauuauauau

SEQ ID NO: 793694 - RNA, 19 nt, Artificial Sequence
  Description of Artificial Sequence: Synthetic oligonucleotide
auccaaguguauuaaagcc

SEQ ID NO: 793695 - RNA, 19 nt, Artificial Sequence
  Description of Artificial Sequence: Synthetic oligonucleotide
ugauuuaccauuaaauccu

SEQ ID NO: 793696 - RNA, 19 nt, Artificial Sequence
  Description of Artificial Sequence: Synthetic oligonucleotide
uauaacaaacucaucucgg

SEQ ID NO: 793697 - RNA, 19 nt, Artificial Sequence
  Description of Artificial Sequence: Synthetic oligonucleotide
uguaaguuauucaccaagg

SEQ ID NO: 793698 - RNA, 19 nt, Artificial Sequence
  Description of Artificial Sequence: Synthetic oligonucleotide
acuuaaaauaaccucaugu

SEQ ID NO: 793699 - RNA, 19 nt, Artificial Sequence
  Description of Artificial Sequence: Synthetic oligonucleotide
aaugccuagaauccaacag

SEQ ID NO: 793700 - RNA, 19 nt, Artificial Sequence
  Description of Artificial Sequence: Synthetic oligonucleotide
uguauuaaagccaauuuau

SEQ ID NO: 793701 - RNA, 19 nt, Artificial Sequence
  Description of Artificial Sequence: Synthetic oligonucleotide
auuugcgaauaucucaucc

SEQ ID NO: 793702 - RNA, 19 nt, Artificial Sequence
  Description of Artificial Sequence: Synthetic oligonucleotide
aauaauuucacuauaggua

SEQ ID NO: 793703 - RNA, 19 nt, Artificial Sequence
  Description of Artificial Sequence: Synthetic oligonucleotide
uaauuuauguaaauguggu

SEQ ID NO: 793704 - RNA, 19 nt, Artificial Sequence
  Description of Artificial Sequence: Synthetic oligonucleotide
cagcaauugacauugagcc

SEQ ID NO: 793705 - RNA, 19 nt, Artificial Sequence
  Description of Artificial Sequence: Synthetic oligonucleotide
ucuauuaccacaguuauaa

SEQ ID NO: 793706 - RNA, 19 nt, Artificial Sequence
  Description of Artificial Sequence: Synthetic oligonucleotide
aaauguuuuaagucucauc

SEQ ID NO: 793707 - RNA, 19 nt, Artificial Sequence
  Description of Artificial Sequence: Synthetic oligonucleotide
aaauaaauggcuaaaccca

SEQ ID NO: 793708 - RNA, 19 nt, Artificial Sequence
  Description of Artificial Sequence: Synthetic oligonucleotide
uguauuucaacuuggggac

SEQ ID NO: 793709 - RNA, 19 nt, Artificial Sequence
  Description of Artificial Sequence: Synthetic oligonucleotide
uauuguguagaaaggaaug

SEQ ID NO: 793710 - RNA, 19 nt, Artificial Sequence
  Description of Artificial Sequence: Synthetic oligonucleotide
aucauuaucuacuuguugu

SEQ ID NO: 793711 - RNA, 19 nt, Artificial Sequence
  Description of Artificial Sequence: Synthetic oligonucleotide
ugauuauuagcucuucuca

SEQ ID NO: 793712 - RNA, 19 nt, Artificial Sequence
  Description of Artificial Sequence: Synthetic oligonucleotide
aguacaaggagccagucug

SEQ ID NO: 793713 - RNA, 19 nt, Artificial Sequence
  Description of Artificial Sequence: Synthetic oligonucleotide
guauaacaaacucaucucg

SEQ ID NO: 793714 - RNA, 19 nt, Artificial Sequence
  Description of Artificial Sequence: Synthetic oligonucleotide
uauaauucccaaaccaaca

SEQ ID NO: 793715 - RNA, 19 nt, Artificial Sequence
  Description of Artificial Sequence: Synthetic oligonucleotide
  modified_base (2)..(2): a, c, u, g, unknown or other
anagaacacacuaacuuag

SEQ ID NO: 793716 - RNA, 19 nt, Artificial Sequence
  Description of Artificial Sequence: Synthetic oligonucleotide
auaauuucacuauagguaa

SEQ ID NO: 793717 - RNA, 19 nt, Artificial Sequence
  Description of Artificial Sequence: Synthetic oligonucleotide
ucuaguacaaauguuguga

SEQ ID NO: 793718 - RNA, 19 nt, Artificial Sequence
  Description of Artificial Sequence: Synthetic oligonucleotide
ucaaguuucuauuaccaca

SEQ ID NO: 793719 - RNA, 19 nt, Artificial Sequence
  Description of Artificial Sequence: Synthetic oligonucleotide
gauauuugcgaauaucuca

SEQ ID NO: 793720 - RNA, 19 nt, Artificial Sequence
  Description of Artificial Sequence: Synthetic oligonucleotide
ucugauaaccucuguaugc

SEQ ID NO: 793721 - RNA, 19 nt, Artificial Sequence
  Description of Artificial Sequence: Synthetic oligonucleotide
uuaucauggaacuuaaaau

SEQ ID NO: 793722 - RNA, 19 nt, Artificial Sequence
  Description of Artificial Sequence: Synthetic oligonucleotide
uguugugaaauucacccug

SEQ ID NO: 793723 - RNA, 19 nt, Artificial Sequence
  Description of Artificial Sequence: Synthetic oligonucleotide
auaagaacauagaauaggg

SEQ ID NO: 793724 - RNA, 19 nt, Artificial Sequence
  Description of Artificial Sequence: Synthetic oligonucleotide
uuuaccauuaaauccucug

SEQ ID NO: 793725 - RNA, 19 nt, Artificial Sequence
  Description of Artificial Sequence: Synthetic oligonucleotide
aaaauaaccucauguucug

SEQ ID NO: 793726 - RNA, 19 nt, Artificial Sequence
  Description of Artificial Sequence: Synthetic oligonucleotide
ugucauaugcucuaagugu

SEQ ID NO: 793727 - RNA, 19 nt, Artificial Sequence
  Description of Artificial Sequence: Synthetic oligonucleotide
gauuauuagcucuucucag

SEQ ID NO: 793728 - RNA, 19 nt, Artificial Sequence
  Description of Artificial Sequence: Synthetic oligonucleotide
uguagcuuuagugaggacc

SEQ ID NO: 793729 - RNA, 19 nt, Artificial Sequence
  Description of Artificial Sequence: Synthetic oligonucleotide
  modified_base (10)..(10): a, c, u, g, unknown or other
uaauuccuanagaacacac

SEQ ID NO: 793730 - RNA, 19 nt, Artificial Sequence
  Description of Artificial Sequence: Synthetic oligonucleotide
uuucacuauagguaaaaga

SEQ ID NO: 793731 - RNA, 19 nt, Artificial Sequence
  Description of Artificial Sequence: Synthetic oligonucleotide
auuaaauccucugaaauga

SEQ ID NO: 793732 - RNA, 19 nt, Artificial Sequence
  Description of Artificial Sequence: Synthetic oligonucleotide
aauaaccucauguucugga

SEQ ID NO: 793733 - RNA, 19 nt, Artificial Sequence
  Description of Artificial Sequence: Synthetic oligonucleotide
aagaacauaagcucaggaa

SEQ ID NO: 793734 - RNA, 19 nt, Artificial Sequence
  Description of Artificial Sequence: Synthetic oligonucleotide
ucuaagaagccaacuagca

SEQ ID NO: 793735 - RNA, 19 nt, Artificial Sequence
  Description of Artificial Sequence: Synthetic oligonucleotide
auuguguagaaaggaaugc

SEQ ID NO: 793736 - RNA, 19 nt, Artificial Sequence
  Description of Artificial Sequence: Synthetic oligonucleotide
aaagccaauuuauacaaua

SEQ ID NO: 793737 - RNA, 19 nt, Artificial Sequence
  Description of Artificial Sequence: Synthetic oligonucleotide
ugucaguccguaaacaucu

SEQ ID NO: 793738 - RNA, 19 nt, Artificial Sequence
  Description of Artificial Sequence: Synthetic oligonucleotide
aacuguguaacucaaccaa

SEQ ID NO: 793739 - RNA, 19 nt, Artificial Sequence
  Description of Artificial Sequence: Synthetic oligonucleotide
aauguaacacgugaggacu

SEQ ID NO: 793740 - RNA, 19 nt, Artificial Sequence
  Description of Artificial Sequence: Synthetic oligonucleotide
  modified_base (6)..(6): a, c, u, g, unknown or other
uccuanagaacacacuaac

SEQ ID NO: 793741 - RNA, 19 nt, Artificial Sequence
  Description of Artificial Sequence: Synthetic oligonucleotide
aagguagccacuuucaauu

SEQ ID NO: 793742 - RNA, 19 nt, Artificial Sequence
  Description of Artificial Sequence: Synthetic oligonucleotide
auguaaaugugguauaaca

SEQ ID NO: 793743 - RNA, 19 nt, Artificial Sequence
  Description of Artificial Sequence: Synthetic oligonucleotide
uuucgaauccacaauuugu

SEQ ID NO: 793744 - RNA, 19 nt, Artificial Sequence
  Description of Artificial Sequence: Synthetic oligonucleotide
auuuauguaaaugugguau

SEQ ID NO: 793745 - RNA, 19 nt, Artificial Sequence
  Description of Artificial Sequence: Synthetic oligonucleotide
uuuucgaauccacaauuug

SEQ ID NO: 793746 - RNA, 19 nt, Artificial Sequence
  Description of Artificial Sequence: Synthetic oligonucleotide
uuaucuacuuguuguaggc

SEQ ID NO: 793747 - RNA, 19 nt, Artificial Sequence
  Description of Artificial Sequence: Synthetic oligonucleotide
uggauaaaauuauaacaca

SEQ ID NO: 793748 - RNA, 19 nt, Artificial Sequence
  Description of Artificial Sequence: Synthetic oligonucleotide
  modified_base (13)..(13): a, c, u, g, unknown or other
acauaauuccuanagaaca

SEQ ID NO: 793749 - RNA, 19 nt, Artificial Sequence
  Description of Artificial Sequence: Synthetic oligonucleotide
uccaaguguauuaaagcca

SEQ ID NO: 793750 - RNA, 19 nt, Artificial Sequence
  Description of Artificial Sequence: Synthetic oligonucleotide
uauauauauuauauauaaa

SEQ ID NO: 793751 - RNA, 19 nt, Artificial Sequence
  Description of Artificial Sequence: Synthetic oligonucleotide
ugagaaucaucuauaugca

SEQ ID NO: 793752 - RNA, 19 nt, Artificial Sequence
  Description of Artificial Sequence: Synthetic oligonucleotide
  modified_base (3)..(3): a, c, u, g, unknown or other
uanagaacacacuaacuua

SEQ ID NO: 793753 - RNA, 19 nt, Artificial Sequence
  Description of Artificial Sequence: Synthetic oligonucleotide
uguguuacaggaaguaggu

SEQ ID NO: 793754 - RNA, 19 nt, Artificial Sequence
  Description of Artificial Sequence: Synthetic oligonucleotide
ucacucacuaaacuugcag

SEQ ID NO: 793755 - RNA, 19 nt, Artificial Sequence
  Description of Artificial Sequence: Synthetic oligonucleotide
aucuacuuguuguaggcuc

SEQ ID NO: 793756 - RNA, 19 nt, Artificial Sequence
  Description of Artificial Sequence: Synthetic oligonucleotide
acaauuuguaaguuauuca

SEQ ID NO: 793757 - RNA, 19 nt, Artificial Sequence
  Description of Artificial Sequence: Synthetic oligonucleotide
aaguuauucaccaaggcua

SEQ ID NO: 793758 - RNA, 19 nt, Artificial Sequence
  Description of Artificial Sequence: Synthetic oligonucleotide
  modified_base (8)..(8): a, c, u, g, unknown or other
auuccuanagaacacacua

SEQ ID NO: 793759 - RNA, 19 nt, Artificial Sequence
  Description of Artificial Sequence: Synthetic oligonucleotide
  modified_base (12)..(12): a, c, u, g, unknown or other
cauaauuccuanagaacac

SEQ ID NO: 793760 - RNA, 19 nt, Artificial Sequence
  Description of Artificial Sequence: Synthetic oligonucleotide
uuugacacgaaagguagcc

SEQ ID NO: 793761 - RNA, 19 nt, Artificial Sequence
  Description of Artificial Sequence: Synthetic oligonucleotide
aaucaaguuucuauuacca

SEQ ID NO: 793762 - RNA, 19 nt, Artificial Sequence
  Description of Artificial Sequence: Synthetic oligonucleotide
uuguguauuucaacuuggg

SEQ ID NO: 793763 - RNA, 19 nt, Artificial Sequence
  Description of Artificial Sequence: Synthetic oligonucleotide
uccugaauguaacacguga

SEQ ID NO: 793764 - RNA, 19 nt, Artificial Sequence
  Description of Artificial Sequence: Synthetic oligonucleotide
auaaauggggacuguagcu

SEQ ID NO: 793765 - RNA, 19 nt, Artificial Sequence
  Description of Artificial Sequence: Synthetic oligonucleotide
uucaaguacaaggagccag

SEQ ID NO: 793766 - RNA, 19 nt, Artificial Sequence
  Description of Artificial Sequence: Synthetic oligonucleotide
uuccuagaaaguaauguaa

SEQ ID NO: 793767 - RNA, 19 nt, Artificial Sequence
  Description of Artificial Sequence: Synthetic oligonucleotide
ugagcauuuaaaucuagua

SEQ ID NO: 793768 - RNA, 19 nt, Artificial Sequence
  Description of Artificial Sequence: Synthetic oligonucleotide
ucugcauuaggcccgacuc

SEQ ID NO: 793769 - RNA, 19 nt, Artificial Sequence
  Description of Artificial Sequence: Synthetic oligonucleotide
gaauguaacacgugaggac

SEQ ID NO: 793770 - RNA, 19 nt, Artificial Sequence
  Description of Artificial Sequence: Synthetic oligonucleotide
auacauauauauauuauau

SEQ ID NO: 793771 - RNA, 19 nt, Artificial Sequence
  Description of Artificial Sequence: Synthetic oligonucleotide
ucauaugcucuaagugucg

SEQ ID NO: 793772 - RNA, 19 nt, Artificial Sequence
  Description of Artificial Sequence: Synthetic oligonucleotide
ucuuuuaucauggaacuua

SEQ ID NO: 793773 - RNA, 19 nt, Artificial Sequence
  Description of Artificial Sequence: Synthetic oligonucleotide
uucugauaaccucuguaug

SEQ ID NO: 793774 - RNA, 19 nt, Artificial Sequence
  Description of Artificial Sequence: Synthetic oligonucleotide
uccguaaacaucugaggcc

SEQ ID NO: 793775 - RNA, 19 nt, Artificial Sequence
  Description of Artificial Sequence: Synthetic oligonucleotide
ugaaauucacccuggcuac

SEQ ID NO: 793776 - RNA, 19 nt, Artificial Sequence
  Description of Artificial Sequence: Synthetic oligonucleotide
uuugcgaauaucucaucca

SEQ ID NO: 793777 - RNA, 19 nt, Artificial Sequence
  Description of Artificial Sequence: Synthetic oligonucleotide
uguguaacucaaccaaugu

SEQ ID NO: 793778 - RNA, 19 nt, Artificial Sequence
  Description of Artificial Sequence: Synthetic oligonucleotide
acgaaagguagccacuuuc

SEQ ID NO: 793779 - RNA, 19 nt, Artificial Sequence
  Description of Artificial Sequence: Synthetic oligonucleotide
aguccguaaacaucugagg

SEQ ID NO: 793780 - RNA, 19 nt, Artificial Sequence
  Description of Artificial Sequence: Synthetic oligonucleotide
aacucaaccaaugucacuu

SEQ ID NO: 793781 - RNA, 19 nt, Artificial Sequence
  Description of Artificial Sequence: Synthetic oligonucleotide
agugcuauuuccccucagg

SEQ ID NO: 793782 - RNA, 19 nt, Artificial Sequence
  Description of Artificial Sequence: Synthetic oligonucleotide
aauucacccuggcuacuac

SEQ ID NO: 793783 - RNA, 19 nt, Artificial Sequence
  Description of Artificial Sequence: Synthetic oligonucleotide
uuuccuagaaaguaaugua

SEQ ID NO: 793784 - RNA, 19 nt, Artificial Sequence
  Description of Artificial Sequence: Synthetic oligonucleotide
ugcucuaagugucgggagg

SEQ ID NO: 793785 - RNA, 19 nt, Artificial Sequence
  Description of Artificial Sequence: Synthetic oligonucleotide
aguguggacaacaccauac

SEQ ID NO: 793786 - RNA, 19 nt, Artificial Sequence
  Description of Artificial Sequence: Synthetic oligonucleotide
ucuuuucgaauccacaauu

SEQ ID NO: 793787 - RNA, 19 nt, Artificial Sequence
  Description of Artificial Sequence: Synthetic oligonucleotide
ucauggaacuuaaaauaac

SEQ ID NO: 793788 - RNA, 19 nt, Artificial Sequence
  Description of Artificial Sequence: Synthetic oligonucleotide
ucagaaagacuacucaaua

SEQ ID NO: 793789 - RNA, 19 nt, Artificial Sequence
  Description of Artificial Sequence: Synthetic oligonucleotide
uacauauauauauuauaua

SEQ ID NO: 793790 - RNA, 19 nt, Artificial Sequence
  Description of Artificial Sequence: Synthetic oligonucleotide
uucgaauccacaauuugua

SEQ ID NO: 793791 - RNA, 19 nt, Artificial Sequence
  Description of Artificial Sequence: Synthetic oligonucleotide
agaauagggacuugguaca

SEQ ID NO: 793792 - RNA, 19 nt, Artificial Sequence
  Description of Artificial Sequence: Synthetic oligonucleotide
agacagauguuccauguca

SEQ ID NO: 793793 - RNA, 19 nt, Artificial Sequence
  Description of Artificial Sequence: Synthetic oligonucleotide
auaggaugaaaagguaaac

SEQ ID NO: 793794 - RNA, 19 nt, Artificial Sequence
  Description of Artificial Sequence: Synthetic oligonucleotide
guccguaaacaucugaggc

SEQ ID NO: 793795 - RNA, 19 nt, Artificial Sequence
  Description of Artificial Sequence: Synthetic oligonucleotide
acucacuaaacuugcagca

SEQ ID NO: 793796 - RNA, 19 nt, Artificial Sequence
  Description of Artificial Sequence: Synthetic oligonucleotide
cacucacuaaacuugcagc

SEQ ID NO: 793797 - RNA, 19 nt, Artificial Sequence
  Description of Artificial Sequence: Synthetic oligonucleotide
aguguauuaaagccaauuu

SEQ ID NO: 793798 - RNA, 19 nt, Artificial Sequence
  Description of Artificial Sequence: Synthetic oligonucleotide
auguguuacaggaaguagg

SEQ ID NO: 793799 - RNA, 19 nt, Artificial Sequence
  Description of Artificial Sequence: Synthetic oligonucleotide
acauagaauagggacuugg

SEQ ID NO: 793800 - RNA, 19 nt, Artificial Sequence
  Description of Artificial Sequence: Synthetic oligonucleotide
ggcuaaacagcacuuaaag

SEQ ID NO: 793801 - RNA, 19 nt, Artificial Sequence
  Description of Artificial Sequence: Synthetic oligonucleotide
aggagcaugagacagugaa

SEQ ID NO: 793802 - RNA, 19 nt, Artificial Sequence
  Description of Artificial Sequence: Synthetic oligonucleotide
ugagguugucaacuggccc

SEQ ID NO: 793803 - RNA, 19 nt, Artificial Sequence
  Description of Artificial Sequence: Synthetic oligonucleotide
aaagacuacucaauaauuu

SEQ ID NO: 793804 - RNA, 19 nt, Artificial Sequence
  Description of Artificial Sequence: Synthetic oligonucleotide
aaauaaccucauguucugg

SEQ ID NO: 793805 - RNA, 19 nt, Artificial Sequence
  Description of Artificial Sequence: Synthetic oligonucleotide
gugaaauucacccuggcua

SEQ ID NO: 793806 - RNA, 19 nt, Artificial Sequence
  Description of Artificial Sequence: Synthetic oligonucleotide
cacaauuuguaaguuauuc

SEQ ID NO: 793807 - RNA, 19 nt, Artificial Sequence
  Description of Artificial Sequence: Synthetic oligonucleotide
gguacagaucauuaaauca

SEQ ID NO: 793808 - RNA, 19 nt, Artificial Sequence
  Description of Artificial Sequence: Synthetic oligonucleotide
  modified_base (7)..(7): a, c, u, g, unknown or other
uuccuanagaacacacuaa

SEQ ID NO: 793809 - RNA, 19 nt, Artificial Sequence
  Description of Artificial Sequence: Synthetic oligonucleotide
uugagcauuuaaaucuagu

SEQ ID NO: 793810 - RNA, 19 nt, Artificial Sequence
  Description of Artificial Sequence: Synthetic oligonucleotide
uuaccacaguuauaauucc

SEQ ID NO: 793811 - RNA, 19 nt, Artificial Sequence
  Description of Artificial Sequence: Synthetic oligonucleotide
agauauuugcgaauaucuc

SEQ ID NO: 793812 - RNA, 19 nt, Artificial Sequence
  Description of Artificial Sequence: Synthetic oligonucleotide
cacaagaacauaagcucag

SEQ ID NO: 793813 - RNA, 19 nt, Artificial Sequence
  Description of Artificial Sequence: Synthetic oligonucleotide
guagcuuuagugaggaccc

SEQ ID NO: 793814 - RNA, 19 nt, Artificial Sequence
  Description of Artificial Sequence: Synthetic oligonucleotide
ugguacagaucauuaaauc

SEQ ID NO: 793815 - RNA, 19 nt, Artificial Sequence
  Description of Artificial Sequence: Synthetic oligonucleotide
agaacauagaauagggacu

SEQ ID NO: 793816 - RNA, 19 nt, Artificial Sequence
  Description of Artificial Sequence: Synthetic oligonucleotide
ugacacgaaagguagccac

SEQ ID NO: 793817 - RNA, 19 nt, Artificial Sequence
  Description of Artificial Sequence: Synthetic oligonucleotide
cuauagguaaaagaaauaa

SEQ ID NO: 793818 - RNA, 19 nt, Artificial Sequence
  Description of Artificial Sequence: Synthetic oligonucleotide
aaguacaaggagccagucu

SEQ ID NO: 793819 - RNA, 19 nt, Artificial Sequence
  Description of Artificial Sequence: Synthetic oligonucleotide
uguggcauaaauggggacu

SEQ ID NO: 793820 - RNA, 19 nt, Artificial Sequence
  Description of Artificial Sequence: Synthetic oligonucleotide
uuugugucuucacucacua

SEQ ID NO: 793821 - RNA, 19 nt, Artificial Sequence
  Description of Artificial Sequence: Synthetic oligonucleotide
uaugcucuaagugucggga

SEQ ID NO: 793822 - RNA, 19 nt, Artificial Sequence
  Description of Artificial Sequence: Synthetic oligonucleotide
  modified_base (9)..(9): a, c, u, g, unknown or other
aauuccuanagaacacacu

SEQ ID NO: 793823 - RNA, 19 nt, Artificial Sequence
  Description of Artificial Sequence: Synthetic oligonucleotide
caguccguaaacaucugag

SEQ ID NO: 793824 - RNA, 19 nt, Artificial Sequence
  Description of Artificial Sequence: Synthetic oligonucleotide
cauauauauauuauauaua

SEQ ID NO: 793825 - RNA, 19 nt, Artificial Sequence
  Description of Artificial Sequence: Synthetic oligonucleotide
auaugagaaucaucuauau

SEQ ID NO: 793826 - RNA, 19 nt, Artificial Sequence
  Description of Artificial Sequence: Synthetic oligonucleotide
ugucgggaggcuaaacagc

SEQ ID NO: 793827 - RNA, 19 nt, Artificial Sequence
  Description of Artificial Sequence: Synthetic oligonucleotide
uguaauccaaguguauuaa

SEQ ID NO: 793828 - RNA, 19 nt, Artificial Sequence
  Description of Artificial Sequence: Synthetic oligonucleotide
uuuugacacgaaagguagc

SEQ ID NO: 793829 - RNA, 19 nt, Artificial Sequence
  Description of Artificial Sequence: Synthetic oligonucleotide
uugcgaauaucucauccaa

SEQ ID NO: 793830 - RNA, 19 nt, Artificial Sequence
  Description of Artificial Sequence: Synthetic oligonucleotide
aucuaguacaaauguugug

SEQ ID NO: 793831 - RNA, 19 nt, Artificial Sequence
  Description of Artificial Sequence: Synthetic oligonucleotide
cuguguaacucaaccaaug

SEQ ID NO: 793832 - RNA, 19 nt, Artificial Sequence
  Description of Artificial Sequence: Synthetic oligonucleotide
uggagguuuggauaaaauu

SEQ ID NO: 793833 - RNA, 19 nt, Artificial Sequence
  Description of Artificial Sequence: Synthetic oligonucleotide
aacauccuagcagcaguac

SEQ ID NO: 793834 - RNA, 19 nt, Artificial Sequence
  Description of Artificial Sequence: Synthetic oligonucleotide
caauaauuucacuauaggu

SEQ ID NO: 793835 - RNA, 19 nt, Artificial Sequence
  Description of Artificial Sequence: Synthetic oligonucleotide
uagugaggaccccauuucc

SEQ ID NO: 793836 - RNA, 19 nt, Artificial Sequence
  Description of Artificial Sequence: Synthetic oligonucleotide
acauugagccuugaggcuc

SEQ ID NO: 793837 - RNA, 19 nt, Artificial Sequence
  Description of Artificial Sequence: Synthetic oligonucleotide
auaugcucuaagugucggg

SEQ ID NO: 793838 - RNA, 19 nt, Artificial Sequence
  Description of Artificial Sequence: Synthetic oligonucleotide
caguuauaauucccaaacc

SEQ ID NO: 793839 - RNA, 19 nt, Artificial Sequence
  Description of Artificial Sequence: Synthetic oligonucleotide
auagaauagggacuuggua

SEQ ID NO: 793840 - RNA, 19 nt, Artificial Sequence
  Description of Artificial Sequence: Synthetic oligonucleotide
gagguugucaacuggccca

SEQ ID NO: 793841 - RNA, 19 nt, Artificial Sequence
  Description of Artificial Sequence: Synthetic oligonucleotide
uggauugcgauguccaguc

SEQ ID NO: 793842 - RNA, 19 nt, Artificial Sequence
  Description of Artificial Sequence: Synthetic oligonucleotide
ccucuguaugcaaagaugc

SEQ ID NO: 793843 - RNA, 19 nt, Artificial Sequence
  Description of Artificial Sequence: Synthetic oligonucleotide
agugucgggaggcuaaaca

SEQ ID NO: 793844 - RNA, 19 nt, Artificial Sequence
  Description of Artificial Sequence: Synthetic oligonucleotide
cuacucaauaauuucacua

SEQ ID NO: 793845 - RNA, 19 nt, Artificial Sequence
  Description of Artificial Sequence: Synthetic oligonucleotide
gguauaacaaacucaucuc

SEQ ID NO: 793846 - RNA, 19 nt, Artificial Sequence
  Description of Artificial Sequence: Synthetic oligonucleotide
acuacucaauaauuucacu

SEQ ID NO: 793847 - RNA, 19 nt, Artificial Sequence
  Description of Artificial Sequence: Synthetic oligonucleotide
aaacucaucucggaagcga

SEQ ID NO: 793848 - RNA, 19 nt, Artificial Sequence
  Description of Artificial Sequence: Synthetic oligonucleotide
  modified_base (11)..(11): a, c, u, g, unknown or other
auaauuccuanagaacaca

SEQ ID NO: 793849 - RNA, 19 nt, Artificial Sequence
  Description of Artificial Sequence: Synthetic oligonucleotide
gacuacucaauaauuucac

SEQ ID NO: 793850 - RNA, 19 nt, Artificial Sequence
  Description of Artificial Sequence: Synthetic oligonucleotide
cacgugaggacuccugugg

SEQ ID NO: 793851 - RNA, 19 nt, Artificial Sequence
  Description of Artificial Sequence: Synthetic oligonucleotide
ggaaagcuagcuuuccuag

SEQ ID NO: 793852 - RNA, 19 nt, Artificial Sequence
  Description of Artificial Sequence: Synthetic oligonucleotide
gugucgggaggcuaaacag

SEQ ID NO: 793853 - RNA, 19 nt, Artificial Sequence
  Description of Artificial Sequence: Synthetic oligonucleotide
  modified_base (4)..(4): a, c, u, g, unknown or other
cuanagaacacacuaacuu

SEQ ID NO: 793854 - RNA, 19 nt, Artificial Sequence
  Description of Artificial Sequence: Synthetic oligonucleotide
uuaaauccucugaaaugaa

SEQ ID NO: 793855 - RNA, 19 nt, Artificial Sequence
  Description of Artificial Sequence: Synthetic oligonucleotide
acgugaggacuccuguggc

SEQ ID NO: 793856 - RNA, 19 nt, Artificial Sequence
  Description of Artificial Sequence: Synthetic oligonucleotide
auguaauccaaguguauua

SEQ ID NO: 793857 - RNA, 19 nt, Artificial Sequence
  Description of Artificial Sequence: Synthetic oligonucleotide
gaacacacuaacuuagagu

SEQ ID NO: 793858 - RNA, 19 nt, Artificial Sequence
  Description of Artificial Sequence: Synthetic oligonucleotide
acagauacacagcaauaau

SEQ ID NO: 793859 - RNA, 19 nt, Artificial Sequence
  Description of Artificial Sequence: Synthetic oligonucleotide
guguauuaaagccaauuua

SEQ ID NO: 793860 - RNA, 19 nt, Artificial Sequence
  Description of Artificial Sequence: Synthetic oligonucleotide
cuuagaguauaauacagau

SEQ ID NO: 793861 - RNA, 19 nt, Artificial Sequence
  Description of Artificial Sequence: Synthetic oligonucleotide
gaguauaauacagauauuu

SEQ ID NO: 793862 - RNA, 19 nt, Artificial Sequence
  Description of Artificial Sequence: Synthetic oligonucleotide
cauuuugacacgaaaggua

SEQ ID NO: 793863 - RNA, 19 nt, Artificial Sequence
  Description of Artificial Sequence: Synthetic oligonucleotide
aagcagcgucauuacaucu

SEQ ID NO: 793864 - RNA, 19 nt, Artificial Sequence
  Description of Artificial Sequence: Synthetic oligonucleotide
cagauauuugcgaauaucu

SEQ ID NO: 793865 - RNA, 19 nt, Artificial Sequence
  Description of Artificial Sequence: Synthetic oligonucleotide
cuacuacuccucaccaugc

SEQ ID NO: 793866 - RNA, 19 nt, Artificial Sequence
  Description of Artificial Sequence: Synthetic oligonucleotide
uuuccccucagguaaugcu

SEQ ID NO: 793867 - RNA, 19 nt, Artificial Sequence
  Description of Artificial Sequence: Synthetic oligonucleotide
caacuagcagcuuucgauc

SEQ ID NO: 793868 - RNA, 19 nt, Artificial Sequence
  Description of Artificial Sequence: Synthetic oligonucleotide
uuuuaguacuucucagaua

SEQ ID NO: 793869 - RNA, 19 nt, Artificial Sequence
  Description of Artificial Sequence: Synthetic oligonucleotide
auauuugcgaauaucucau

SEQ ID NO: 793870 - RNA, 19 nt, Artificial Sequence
  Description of Artificial Sequence: Synthetic oligonucleotide
uagaauccaacaguucaga

SEQ ID NO: 793871 - RNA, 19 nt, Artificial Sequence
  Description of Artificial Sequence: Synthetic oligonucleotide
ugcaucaacuguguaacuc

SEQ ID NO: 793872 - RNA, 19 nt, Artificial Sequence
  Description of Artificial Sequence: Synthetic oligonucleotide
aacccaagggaaauuauuu

SEQ ID NO: 793873 - RNA, 19 nt, Artificial Sequence
  Description of Artificial Sequence: Synthetic oligonucleotide
auuauaacacaagaacaua

SEQ ID NO: 793874 - RNA, 19 nt, Artificial Sequence
  Description of Artificial Sequence: Synthetic oligonucleotide
guuucuauuaccacaguua

SEQ ID NO: 793875 - RNA, 19 nt, Artificial Sequence
  Description of Artificial Sequence: Synthetic oligonucleotide
aagccaacuagcagcuuuc

SEQ ID NO: 793876 - RNA, 19 nt, Artificial Sequence
  Description of Artificial Sequence: Synthetic oligonucleotide
ugcauuaggcccgacucug

SEQ ID NO: 793877 - RNA, 19 nt, Artificial Sequence
  Description of Artificial Sequence: Synthetic oligonucleotide
uaacacgugaggacuccug

SEQ ID NO: 793878 - RNA, 19 nt, Artificial Sequence
  Description of Artificial Sequence: Synthetic oligonucleotide
gacuguagcuuuagugagg

SEQ ID NO: 793879 - RNA, 19 nt, Artificial Sequence
  Description of Artificial Sequence: Synthetic oligonucleotide
ucggaagcgagguucugca

SEQ ID NO: 793880 - RNA, 19 nt, Artificial Sequence
  Description of Artificial Sequence: Synthetic oligonucleotide
ugccuagaauccaacaguu

SEQ ID NO: 793881 - RNA, 19 nt, Artificial Sequence
  Description of Artificial Sequence: Synthetic oligonucleotide
gaaugccuagaauccaaca

SEQ ID NO: 793882 - RNA, 19 nt, Artificial Sequence
  Description of Artificial Sequence: Synthetic oligonucleotide
cauaugcucuaagugucgg

SEQ ID NO: 793883 - RNA, 19 nt, Artificial Sequence
  Description of Artificial Sequence: Synthetic oligonucleotide
uaauuucacuauagguaaa

SEQ ID NO: 793884 - RNA, 19 nt, Artificial Sequence
  Description of Artificial Sequence: Synthetic oligonucleotide
acauccuagcagcaguaca

SEQ ID NO: 793885 - RNA, 19 nt, Artificial Sequence
  Description of Artificial Sequence: Synthetic oligonucleotide
acuuagaguauaauacaga

SEQ ID NO: 793886 - RNA, 19 nt, Artificial Sequence
  Description of Artificial Sequence: Synthetic oligonucleotide
gggacuguagcuuuaguga

SEQ ID NO: 793887 - RNA, 19 nt, Artificial Sequence
  Description of Artificial Sequence: Synthetic oligonucleotide
ucgaauccacaauuuguaa

SEQ ID NO: 793888 - RNA, 19 nt, Artificial Sequence
  Description of Artificial Sequence: Synthetic oligonucleotide
ggacuguagcuuuagugag

SEQ ID NO: 793889 - RNA, 19 nt, Artificial Sequence
  Description of Artificial Sequence: Synthetic oligonucleotide
ggacaaaugauuauuagcu

SEQ ID NO: 793890 - RNA, 19 nt, Artificial Sequence
  Description of Artificial Sequence: Synthetic oligonucleotide
agcaauugacauugagccu

SEQ ID NO: 793891 - RNA, 19 nt, Artificial Sequence
  Description of Artificial Sequence: Synthetic oligonucleotide
agauaggaugaaaagguaa

SEQ ID NO: 793892 - RNA, 19 nt, Artificial Sequence
  Description of Artificial Sequence: Synthetic oligonucleotide
gcuacuacuccucaccaug

SEQ ID NO: 793893 - RNA, 19 nt, Artificial Sequence
  Description of Artificial Sequence: Synthetic oligonucleotide
gucauaugcucuaaguguc

SEQ ID NO: 793894 - RNA, 19 nt, Artificial Sequence
  Description of Artificial Sequence: Synthetic oligonucleotide
agcgagguucugcauuagg

SEQ ID NO: 793895 - RNA, 19 nt, Artificial Sequence
  Description of Artificial Sequence: Synthetic oligonucleotide
uuggagguuuggauaaaau

SEQ ID NO: 793896 - RNA, 19 nt, Artificial Sequence
  Description of Artificial Sequence: Synthetic oligonucleotide
uguaacacgugaggacucc

SEQ ID NO: 793897 - RNA, 19 nt, Artificial Sequence
  Description of Artificial Sequence: Synthetic oligonucleotide
ggauuuucaaggaagaugu

SEQ ID NO: 793898 - RNA, 19 nt, Artificial Sequence
  Description of Artificial Sequence: Synthetic oligonucleotide
ucaacuggcccauuuuguu

SEQ ID NO: 793899 - RNA, 19 nt, Artificial Sequence
  Description of Artificial Sequence: Synthetic oligonucleotide
ugcgaauaucucauccaaa

SEQ ID NO: 793900 - RNA, 19 nt, Artificial Sequence
  Description of Artificial Sequence: Synthetic oligonucleotide
ggauaaaauuauaacacaa

SEQ ID NO: 793901 - RNA, 19 nt, Artificial Sequence
  Description of Artificial Sequence: Synthetic oligonucleotide
auguuuuaagucucaucau

SEQ ID NO: 793902 - RNA, 19 nt, Artificial Sequence
  Description of Artificial Sequence: Synthetic oligonucleotide
uuccugaauguaacacgug

SEQ ID NO: 793903 - RNA, 19 nt, Artificial Sequence
  Description of Artificial Sequence: Synthetic oligonucleotide
uggcuacuacuccucacca

SEQ ID NO: 793904 - RNA, 19 nt, Artificial Sequence
  Description of Artificial Sequence: Synthetic oligonucleotide
ggagguuuggauaaaauua

SEQ ID NO: 793905 - RNA, 19 nt, Artificial Sequence
  Description of Artificial Sequence: Synthetic oligonucleotide
cauuaggcccgacucugcc

SEQ ID NO: 793906 - RNA, 19 nt, Artificial Sequence
  Description of Artificial Sequence: Synthetic oligonucleotide
augcucuaagugucgggag

SEQ ID NO: 793907 - RNA, 19 nt, Artificial Sequence
  Description of Artificial Sequence: Synthetic oligonucleotide
aauagggacuugguacaga

SEQ ID NO: 793908 - RNA, 19 nt, Artificial Sequence
  Description of Artificial Sequence: Synthetic oligonucleotide
caagaacauaagcucagga

SEQ ID NO: 793909 - RNA, 19 nt, Artificial Sequence
  Description of Artificial Sequence: Synthetic oligonucleotide
agaaaguaauguaauccaa

SEQ ID NO: 793910 - RNA, 19 nt, Artificial Sequence
  Description of Artificial Sequence: Synthetic oligonucleotide
cuaguacaaauguugugaa

SEQ ID NO: 793911 - RNA, 19 nt, Artificial Sequence
  Description of Artificial Sequence: Synthetic oligonucleotide
guaacucaaccaaugucac

SEQ ID NO: 793912 - RNA, 19 nt, Artificial Sequence
  Description of Artificial Sequence: Synthetic oligonucleotide
caccuuaguguuugcuggg

SEQ ID NO: 793913 - RNA, 19 nt, Artificial Sequence
  Description of Artificial Sequence: Synthetic oligonucleotide
uucuauuaccacaguuaua

SEQ ID NO: 793914 - RNA, 19 nt, Artificial Sequence
  Description of Artificial Sequence: Synthetic oligonucleotide
agauggauugcgaugucca

SEQ ID NO: 793915 - RNA, 19 nt, Artificial Sequence
  Description of Artificial Sequence: Synthetic oligonucleotide
uaucuacuuguuguaggcu

SEQ ID NO: 793916 - RNA, 19 nt, Artificial Sequence
  Description of Artificial Sequence: Synthetic oligonucleotide
uuaguguuugcuggggcuc

SEQ ID NO: 793917 - RNA, 19 nt, Artificial Sequence
  Description of Artificial Sequence: Synthetic oligonucleotide
uccccucagguaaugcugu

SEQ ID NO: 793918 - RNA, 19 nt, Artificial Sequence
  Description of Artificial Sequence: Synthetic oligonucleotide
uacuacuccucaccaugcu

SEQ ID NO: 793919 - RNA, 19 nt, Artificial Sequence
  Description of Artificial Sequence: Synthetic oligonucleotide
ucucaggaaugccuagaau

SEQ ID NO: 793920 - RNA, 19 nt, Artificial Sequence
  Description of Artificial Sequence: Synthetic oligonucleotide
gauuuaccauuaaauccuc

SEQ ID NO: 793921 - RNA, 19 nt, Artificial Sequence
  Description of Artificial Sequence: Synthetic oligonucleotide
uauuugcgaauaucucauc

SEQ ID NO: 793922 - RNA, 19 nt, Artificial Sequence
  Description of Artificial Sequence: Synthetic oligonucleotide
caacuguguaacucaacca

SEQ ID NO: 793923 - RNA, 19 nt, Artificial Sequence
  Description of Artificial Sequence: Synthetic oligonucleotide
agcgucauuacaucuucua

SEQ ID NO: 793924 - RNA, 19 nt, Artificial Sequence
  Description of Artificial Sequence: Synthetic oligonucleotide
ugauaaccucuguaugcaa

SEQ ID NO: 793925 - RNA, 19 nt, Artificial Sequence
  Description of Artificial Sequence: Synthetic oligonucleotide
aagugucgggaggcuaaac

SEQ ID NO: 793926 - RNA, 19 nt, Artificial Sequence
  Description of Artificial Sequence: Synthetic oligonucleotide
gaagcgagguucugcauua

SEQ ID NO: 793927 - RNA, 19 nt, Artificial Sequence
  Description of Artificial Sequence: Synthetic oligonucleotide
cuuccugaauguaacacgu

SEQ ID NO: 793928 - RNA, 19 nt, Artificial Sequence
  Description of Artificial Sequence: Synthetic oligonucleotide
auucacccuggcuacuacu

SEQ ID NO: 793929 - RNA, 19 nt, Artificial Sequence
  Description of Artificial Sequence: Synthetic oligonucleotide
caauugacauugagccuug

SEQ ID NO: 793930 - RNA, 19 nt, Artificial Sequence
  Description of Artificial Sequence: Synthetic oligonucleotide
ccguaaacaucugaggccg

SEQ ID NO: 793931 - RNA, 19 nt, Artificial Sequence
  Description of Artificial Sequence: Synthetic oligonucleotide
agccagucugcuugagguc

SEQ ID NO: 793932 - RNA, 19 nt, Artificial Sequence
  Description of Artificial Sequence: Synthetic oligonucleotide
gcgaauaucucauccaaaa

SEQ ID NO: 793933 - RNA, 19 nt, Artificial Sequence
  Description of Artificial Sequence: Synthetic oligonucleotide
agcagccuacaaauuauug

SEQ ID NO: 793934 - RNA, 19 nt, Artificial Sequence
  Description of Artificial Sequence: Synthetic oligonucleotide
acccaagggaaauuauuua

SEQ ID NO: 793935 - RNA, 19 nt, Artificial Sequence
  Description of Artificial Sequence: Synthetic oligonucleotide
accuuaguguuugcugggg

SEQ ID NO: 793936 - RNA, 19 nt, Artificial Sequence
  Description of Artificial Sequence: Synthetic oligonucleotide
uugacacgaaagguagcca

SEQ ID NO: 793937 - RNA, 19 nt, Artificial Sequence
  Description of Artificial Sequence: Synthetic oligonucleotide
guccagucuuuucgaaucc

SEQ ID NO: 793938 - RNA, 19 nt, Artificial Sequence
  Description of Artificial Sequence: Synthetic oligonucleotide
auguaacacgugaggacuc

SEQ ID NO: 793939 - RNA, 19 nt, Artificial Sequence
  Description of Artificial Sequence: Synthetic oligonucleotide
aguuauucaccaaggcuaa

SEQ ID NO: 793940 - RNA, 19 nt, Artificial Sequence
  Description of Artificial Sequence: Synthetic oligonucleotide
cuaagugucgggaggcuaa

SEQ ID NO: 793941 - RNA, 19 nt, Artificial Sequence
  Description of Artificial Sequence: Synthetic oligonucleotide
ccucugaaacacauuggcc

SEQ ID NO: 793942 - RNA, 19 nt, Artificial Sequence
  Description of Artificial Sequence: Synthetic oligonucleotide
cagcacuuaaaggauuuuc

SEQ ID NO: 793943 - RNA, 19 nt, Artificial Sequence
  Description of Artificial Sequence: Synthetic oligonucleotide
agguaaacugcaaaaugua

SEQ ID NO: 793944 - RNA, 19 nt, Artificial Sequence
  Description of Artificial Sequence: Synthetic oligonucleotide
aaacauccuagcagcagua

SEQ ID NO: 793945 - RNA, 19 nt, Artificial Sequence
  Description of Artificial Sequence: Synthetic oligonucleotide
uccagucuuuucgaaucca

SEQ ID NO: 793946 - RNA, 19 nt, Artificial Sequence
  Description of Artificial Sequence: Synthetic oligonucleotide
gaacauagaauagggacuu

SEQ ID NO: 793947 - RNA, 19 nt, Artificial Sequence
  Description of Artificial Sequence: Synthetic oligonucleotide
guguaggaaagcuagcuuu

SEQ ID NO: 793948 - RNA, 19 nt, Artificial Sequence
  Description of Artificial Sequence: Synthetic oligonucleotide
cucggaagcgagguucugc

SEQ ID NO: 793949 - RNA, 19 nt, Artificial Sequence
  Description of Artificial Sequence: Synthetic oligonucleotide
cugaaacacauuggccagc

SEQ ID NO: 793950 - RNA, 19 nt, Artificial Sequence
  Description of Artificial Sequence: Synthetic oligonucleotide
ucuaagugucgggaggcua

SEQ ID NO: 793951 - RNA, 19 nt, Artificial Sequence
  Description of Artificial Sequence: Synthetic oligonucleotide
cauagaauagggacuuggu

SEQ ID NO: 793952 - RNA, 19 nt, Artificial Sequence
  Description of Artificial Sequence: Synthetic oligonucleotide
acuuggggacaaaugauua

SEQ ID NO: 793953 - RNA, 19 nt, Artificial Sequence
  Description of Artificial Sequence: Synthetic oligonucleotide
ggucuugguacugaggguc

SEQ ID NO: 793954 - RNA, 19 nt, Artificial Sequence
  Description of Artificial Sequence: Synthetic oligonucleotide
cuuaguguuugcuggggcu

SEQ ID NO: 793955 - RNA, 19 nt, Artificial Sequence
  Description of Artificial Sequence: Synthetic oligonucleotide
auuuaccauuaaauccucu

SEQ ID NO: 793956 - RNA, 19 nt, Artificial Sequence
  Description of Artificial Sequence: Synthetic oligonucleotide
uucuuuuaucauggaacuu

SEQ ID NO: 793957 - RNA, 19 nt, Artificial Sequence
  Description of Artificial Sequence: Synthetic oligonucleotide
cuguggcauaaauggggac

SEQ ID NO: 793958 - RNA, 19 nt, Artificial Sequence
  Description of Artificial Sequence: Synthetic oligonucleotide
aaagagccaacugcaucuu

SEQ ID NO: 793959 - RNA, 19 nt, Artificial Sequence
  Description of Artificial Sequence: Synthetic oligonucleotide
gauugcgauguccagucuu

SEQ ID NO: 793960 - RNA, 19 nt, Artificial Sequence
  Description of Artificial Sequence: Synthetic oligonucleotide
ucgggaggcuaaacagcac

SEQ ID NO: 793961 - RNA, 19 nt, Artificial Sequence
  Description of Artificial Sequence: Synthetic oligonucleotide
caugucaguccguaaacau

SEQ ID NO: 793962 - RNA, 19 nt, Artificial Sequence
  Description of Artificial Sequence: Synthetic oligonucleotide
guguuacaggaaguaggug

SEQ ID NO: 793963 - RNA, 19 nt, Artificial Sequence
  Description of Artificial Sequence: Synthetic oligonucleotide
uucgauccucuuccugaau

SEQ ID NO: 793964 - RNA, 19 nt, Artificial Sequence
  Description of Artificial Sequence: Synthetic oligonucleotide
auugcgauguccagucuuu

SEQ ID NO: 793965 - RNA, 19 nt, Artificial Sequence
  Description of Artificial Sequence: Synthetic oligonucleotide
acucaaccaaugucacuuu

SEQ ID NO: 793966 - RNA, 19 nt, Artificial Sequence
  Description of Artificial Sequence: Synthetic oligonucleotide
caaguacaaggagccaguc

SEQ ID NO: 793967 - RNA, 19 nt, Artificial Sequence
  Description of Artificial Sequence: Synthetic oligonucleotide
cuccucaccaugcucaagu

SEQ ID NO: 793968 - RNA, 19 nt, Artificial Sequence
  Description of Artificial Sequence: Synthetic oligonucleotide
ccagucuuuucgaauccac

SEQ ID NO: 793969 - RNA, 19 nt, Artificial Sequence
  Description of Artificial Sequence: Synthetic oligonucleotide
gucuuuucgaauccacaau

SEQ ID NO: 793970 - RNA, 19 nt, Artificial Sequence
  Description of Artificial Sequence: Synthetic oligonucleotide
ccuuaguguuugcuggggc

SEQ ID NO: 793971 - RNA, 19 nt, Artificial Sequence
  Description of Artificial Sequence: Synthetic oligonucleotide
cuacuuguuguaggcucug

SEQ ID NO: 793972 - RNA, 19 nt, Artificial Sequence
  Description of Artificial Sequence: Synthetic oligonucleotide
gcugucauaugcucuaagu

SEQ ID NO: 793973 - RNA, 19 nt, Artificial Sequence
  Description of Artificial Sequence: Synthetic oligonucleotide
acacgaaagguagccacuu

SEQ ID NO: 793974 - RNA, 19 nt, Artificial Sequence
  Description of Artificial Sequence: Synthetic oligonucleotide
gcucuaagugucgggaggc

SEQ ID NO: 793975 - RNA, 19 nt, Artificial Sequence
  Description of Artificial Sequence: Synthetic oligonucleotide
gguaaugcugucauaugcu

SEQ ID NO: 793976 - RNA, 19 nt, Artificial Sequence
  Description of Artificial Sequence: Synthetic oligonucleotide
uaagugucgggaggcuaaa

SEQ ID NO: 793977 - RNA, 19 nt, Artificial Sequence
  Description of Artificial Sequence: Synthetic oligonucleotide
guauuucaacuuggggaca

SEQ ID NO: 793978 - RNA, 19 nt, Artificial Sequence
  Description of Artificial Sequence: Synthetic oligonucleotide
ccgacucugccaaauguuc

SEQ ID NO: 793979 - RNA, 19 nt, Artificial Sequence
  Description of Artificial Sequence: Synthetic oligonucleotide
cucacuaaacuugcagcaa

SEQ ID NO: 793980 - RNA, 19 nt, Artificial Sequence
  Description of Artificial Sequence: Synthetic oligonucleotide
uugcaccaaguuccacaaa

SEQ ID NO: 793981 - RNA, 19 nt, Artificial Sequence
  Description of Artificial Sequence: Synthetic oligonucleotide
cucuugggcagucuuauuu

SEQ ID NO: 793982 - RNA, 19 nt, Artificial Sequence
  Description of Artificial Sequence: Synthetic oligonucleotide
agcagcgucauuacaucuu

SEQ ID NO: 793983 - RNA, 19 nt, Artificial Sequence
  Description of Artificial Sequence: Synthetic oligonucleotide
ugaggacuccuguggcaua

SEQ ID NO: 793984 - RNA, 19 nt, Artificial Sequence
  Description of Artificial Sequence: Synthetic oligonucleotide
gcaauugacauugagccuu

SEQ ID NO: 793985 - RNA, 19 nt, Artificial Sequence
  Description of Artificial Sequence: Synthetic oligonucleotide
ccauuaaauccucugaaau

SEQ ID NO: 793986 - RNA, 19 nt, Artificial Sequence
  Description of Artificial Sequence: Synthetic oligonucleotide
gugguauaacaaacucauc

SEQ ID NO: 793987 - RNA, 19 nt, Artificial Sequence
  Description of Artificial Sequence: Synthetic oligonucleotide
  modified_base (5)..(5): a, c, u, g, unknown or other
ccuanagaacacacuaacu

SEQ ID NO: 793988 - RNA, 19 nt, Artificial Sequence
  Description of Artificial Sequence: Synthetic oligonucleotide
guuacaggaaguagguguu

SEQ ID NO: 793989 - RNA, 19 nt, Artificial Sequence
  Description of Artificial Sequence: Synthetic oligonucleotide
uggcauaaauggggacugu

SEQ ID NO: 793990 - RNA, 19 nt, Artificial Sequence
  Description of Artificial Sequence: Synthetic oligonucleotide
cucaucucggaagcgaggu

SEQ ID NO: 793991 - RNA, 19 nt, Artificial Sequence
  Description of Artificial Sequence: Synthetic oligonucleotide
gucaacuggcccauuuugu

SEQ ID NO: 793992 - RNA, 19 nt, Artificial Sequence
  Description of Artificial Sequence: Synthetic oligonucleotide
agguugucaacuggcccau

SEQ ID NO: 793993 - RNA, 19 nt, Artificial Sequence
  Description of Artificial Sequence: Synthetic oligonucleotide
gucaguccguaaacaucug

SEQ ID NO: 793994 - RNA, 19 nt, Artificial Sequence
  Description of Artificial Sequence: Synthetic oligonucleotide
gaaauucacccuggcuacu

SEQ ID NO: 793995 - RNA, 19 nt, Artificial Sequence
  Description of Artificial Sequence: Synthetic oligonucleotide
cauugagccuugaggcucu

SEQ ID NO: 793996 - RNA, 19 nt, Artificial Sequence
  Description of Artificial Sequence: Synthetic oligonucleotide
ggaagcgagguucugcauu

SEQ ID NO: 793997 - RNA, 19 nt, Artificial Sequence
  Description of Artificial Sequence: Synthetic oligonucleotide
ggggcucccuuccugcuuc

SEQ ID NO: 793998 - RNA, 19 nt, Artificial Sequence
  Description of Artificial Sequence: Synthetic oligonucleotide
uugcgauguccagucuuuu

SEQ ID NO: 793999 - RNA, 19 nt, Artificial Sequence
  Description of Artificial Sequence: Synthetic oligonucleotide
cugcauuaggcccgacucu

SEQ ID NO: 794000 - RNA, 19 nt, Artificial Sequence
  Description of Artificial Sequence: Synthetic oligonucleotide
cguaaacaucugaggccgg

SEQ ID NO: 794001 - RNA, 19 nt, Artificial Sequence
  Description of Artificial Sequence: Synthetic oligonucleotide
augcugucauaugcucuaa

SEQ ID NO: 794002 - RNA, 19 nt, Artificial Sequence
  Description of Artificial Sequence: Synthetic oligonucleotide
ggcccgacucugccaaaug

SEQ ID NO: 794003 - RNA, 19 nt, Artificial Sequence
  Description of Artificial Sequence: Synthetic oligonucleotide
gcaaauaucuuuggagguu

SEQ ID NO: 794004 - RNA, 19 nt, Artificial Sequence
  Description of Artificial Sequence: Synthetic oligonucleotide
ggaggcuaaacagcacuua

SEQ ID NO: 794005 - RNA, 19 nt, Artificial Sequence
  Description of Artificial Sequence: Synthetic oligonucleotide
guaacacgugaggacuccu

SEQ ID NO: 794006 - RNA, 19 nt, Artificial Sequence
  Description of Artificial Sequence: Synthetic oligonucleotide
gguccaccuuaguguuugc

SEQ ID NO: 794007 - RNA, 19 nt, Artificial Sequence
  Description of Artificial Sequence: Synthetic oligonucleotide
aggcccgacucugccaaau

SEQ ID NO: 794008 - RNA, 19 nt, Artificial Sequence
  Description of Artificial Sequence: Synthetic oligonucleotide
uaggcccgacucugccaaa

SEQ ID NO: 794009 - RNA, 19 nt, Artificial Sequence
  Description of Artificial Sequence: Synthetic oligonucleotide
caaguguauuaaagccaau

SEQ ID NO: 794010 - RNA, 19 nt, Artificial Sequence
  Description of Artificial Sequence: Synthetic oligonucleotide
gcccgacucugccaaaugu

SEQ ID NO: 794011 - RNA, 19 nt, Artificial Sequence
  Description of Artificial Sequence: Synthetic oligonucleotide
cucuaagugucgggaggcu

SEQ ID NO: 794012 - RNA, 19 nt, Artificial Sequence
  Description of Artificial Sequence: Synthetic oligonucleotide
ggcuacuacuccucaccau

SEQ ID NO: 794013 - RNA, 19 nt, Artificial Sequence
  Description of Artificial Sequence: Synthetic oligonucleotide
cacgaaagguagccacuuu

SEQ ID NO: 794014 - RNA, 19 nt, Artificial Sequence
  Description of Artificial Sequence: Synthetic oligonucleotide
cccucagguaaugcuguca

SEQ ID NO: 794015 - RNA, 19 nt, Artificial Sequence
  Description of Artificial Sequence: Synthetic oligonucleotide
ggauugcgauguccagucu

SEQ ID NO: 794016 - RNA, 19 nt, Artificial Sequence
  Description of Artificial Sequence: Synthetic oligonucleotide
ggaauccccaaagguccua

SEQ ID NO: 794017 - RNA, 19 nt, Artificial Sequence
  Description of Artificial Sequence: Synthetic oligonucleotide
cuggcccauuuuguucaaa

SEQ ID NO: 794018 - RNA, 19 nt, Artificial Sequence
  Description of Artificial Sequence: Synthetic oligonucleotide
cgauccucuuccugaaugu

SEQ ID NO: 794019 - RNA, 19 nt, Artificial Sequence
  Description of Artificial Sequence: Synthetic oligonucleotide
cgacucugccaaauguucu

SEQ ID NO: 794020 - RNA, 19 nt, Artificial Sequence
  Description of Artificial Sequence: Synthetic oligonucleotide
cccgacucugccaaauguu

SEQ ID NO: 794021 - RNA, 19 nt, Artificial Sequence
  Description of Artificial Sequence: Synthetic oligonucleotide
cggaagcgagguucugcau

SEQ ID NO: 794022 - RNA, 19 nt, Artificial Sequence
  Description of Artificial Sequence: Synthetic oligonucleotide
ugaaauuuaaauaauagga

SEQ ID NO: 794023 - RNA, 19 nt, Artificial Sequence
  Description of Artificial Sequence: Synthetic oligonucleotide
ucgacaaggacuaauaagg

SEQ ID NO: 794024 - RNA, 19 nt, Artificial Sequence
  Description of Artificial Sequence: Synthetic oligonucleotide
ugauauucaauauaguugc

SEQ ID NO: 794025 - RNA, 19 nt, Artificial Sequence
  Description of Artificial Sequence: Synthetic oligonucleotide
aacaauaguguccauaaca

SEQ ID NO: 794026 - RNA, 19 nt, Artificial Sequence
  Description of Artificial Sequence: Synthetic oligonucleotide
uauguagucaacaagguuc

SEQ ID NO: 794027 - RNA, 19 nt, Artificial Sequence
  Description of Artificial Sequence: Synthetic oligonucleotide
aacucauuagcccauuacg

SEQ ID NO: 794028 - RNA, 19 nt, Artificial Sequence
  Description of Artificial Sequence: Synthetic oligonucleotide
uuuacaucuauccaaacuc

SEQ ID NO: 794029 - RNA, 19 nt, Artificial Sequence
  Description of Artificial Sequence: Synthetic oligonucleotide
auaaaauugagauacuggu

SEQ ID NO: 794030 - RNA, 19 nt, Artificial Sequence
  Description of Artificial Sequence: Synthetic oligonucleotide
uguauggagaucaauaagu

SEQ ID NO: 794031 - RNA, 19 nt, Artificial Sequence
  Description of Artificial Sequence: Synthetic oligonucleotide
acaaggacuaauaagggcc

SEQ ID NO: 794032 - RNA, 19 nt, Artificial Sequence
  Description of Artificial Sequence: Synthetic oligonucleotide
auugucuaaaauucgagug

SEQ ID NO: 794033 - RNA, 19 nt, Artificial Sequence
  Description of Artificial Sequence: Synthetic oligonucleotide
uaaaauucgagugacaggu

SEQ ID NO: 794034 - RNA, 19 nt, Artificial Sequence
  Description of Artificial Sequence: Synthetic oligonucleotide
uguaauagauaagaaacag

SEQ ID NO: 794035 - RNA, 19 nt, Artificial Sequence
  Description of Artificial Sequence: Synthetic oligonucleotide
uacaguauaggaaguauag

SEQ ID NO: 794036 - RNA, 19 nt, Artificial Sequence
  Description of Artificial Sequence: Synthetic oligonucleotide
uauuguaaagggcuaaggc

SEQ ID NO: 794037 - RNA, 19 nt, Artificial Sequence
  Description of Artificial Sequence: Synthetic oligonucleotide
aaacucauuagcccauuac

SEQ ID NO: 794038 - RNA, 19 nt, Artificial Sequence
  Description of Artificial Sequence: Synthetic oligonucleotide
aaauucgagugacagguag

SEQ ID NO: 794039 - RNA, 19 nt, Artificial Sequence
  Description of Artificial Sequence: Synthetic oligonucleotide
ugcauuugcaauaucuucc

SEQ ID NO: 794040 - RNA, 19 nt, Artificial Sequence
  Description of Artificial Sequence: Synthetic oligonucleotide
ugagauugucuaaaauucg

SEQ ID NO: 794041 - RNA, 19 nt, Artificial Sequence
  Description of Artificial Sequence: Synthetic oligonucleotide
uuuaaguggaaauccagca

SEQ ID NO: 794042 - RNA, 19 nt, Artificial Sequence
  Description of Artificial Sequence: Synthetic oligonucleotide
aaccuuggcaacuuguguc

SEQ ID NO: 794043 - RNA, 19 nt, Artificial Sequence
  Description of Artificial Sequence: Synthetic oligonucleotide
uguuugauauauuguaaag

SEQ ID NO: 794044 - RNA, 19 nt, Artificial Sequence
  Description of Artificial Sequence: Synthetic oligonucleotide
uuuacucuguuuaagugga

SEQ ID NO: 794045 - RNA, 19 nt, Artificial Sequence
  Description of Artificial Sequence: Synthetic oligonucleotide
ucggauaugacaucuagga

SEQ ID NO: 794046 - RNA, 19 nt, Artificial Sequence
  Description of Artificial Sequence: Synthetic oligonucleotide
aagauucuaguucuuguug

SEQ ID NO: 794047 - RNA, 19 nt, Artificial Sequence
  Description of Artificial Sequence: Synthetic oligonucleotide
ucugauauucaauauaguu

SEQ ID NO: 794048 - RNA, 19 nt, Artificial Sequence
  Description of Artificial Sequence: Synthetic oligonucleotide
caguuuacaguauaggaag

SEQ ID NO: 794049 - RNA, 19 nt, Artificial Sequence
  Description of Artificial Sequence: Synthetic oligonucleotide
uuaaauaauaggauucgua

SEQ ID NO: 794050 - RNA, 19 nt, Artificial Sequence
  Description of Artificial Sequence: Synthetic oligonucleotide
ucaguuuacaguauaggaa

SEQ ID NO: 794051 - RNA, 19 nt, Artificial Sequence
  Description of Artificial Sequence: Synthetic oligonucleotide
aauggcacgauacgaaaca

SEQ ID NO: 794052 - RNA, 19 nt, Artificial Sequence
  Description of Artificial Sequence: Synthetic oligonucleotide
cuuagcaguguuaucagag

SEQ ID NO: 794053 - RNA, 19 nt, Artificial Sequence
  Description of Artificial Sequence: Synthetic oligonucleotide
uuuacuucuugaaaucgca

SEQ ID NO: 794054 - RNA, 19 nt, Artificial Sequence
  Description of Artificial Sequence: Synthetic oligonucleotide
uauuuugaucaguuuacag

SEQ ID NO: 794055 - RNA, 19 nt, Artificial Sequence
  Description of Artificial Sequence: Synthetic oligonucleotide
ucuauccaaacucauuagc

SEQ ID NO: 794056 - RNA, 19 nt, Artificial Sequence
  Description of Artificial Sequence: Synthetic oligonucleotide
augagauugucuaaaauuc

SEQ ID NO: 794057 - RNA, 19 nt, Artificial Sequence
  Description of Artificial Sequence: Synthetic oligonucleotide
uaaaucguaggacuucuug

SEQ ID NO: 794058 - RNA, 19 nt, Artificial Sequence
  Description of Artificial Sequence: Synthetic oligonucleotide
uuuucaaggaguucuggca

SEQ ID NO: 794059 - RNA, 19 nt, Artificial Sequence
  Description of Artificial Sequence: Synthetic oligonucleotide
agacccauugguuuagugg

SEQ ID NO: 794060 - RNA, 19 nt, Artificial Sequence
  Description of Artificial Sequence: Synthetic oligonucleotide
acuggaguuaaaucguagg

SEQ ID NO: 794061 - RNA, 19 nt, Artificial Sequence
  Description of Artificial Sequence: Synthetic oligonucleotide
acuaauaagggccuuugga

SEQ ID NO: 794062 - RNA, 19 nt, Artificial Sequence
  Description of Artificial Sequence: Synthetic oligonucleotide
uccaaguugugacagcugc

SEQ ID NO: 794063 - RNA, 19 nt, Artificial Sequence
  Description of Artificial Sequence: Synthetic oligonucleotide
aauaguguccauaacaguu

SEQ ID NO: 794064 - RNA, 19 nt, Artificial Sequence
  Description of Artificial Sequence: Synthetic oligonucleotide
aaaauggaugauucugaca

SEQ ID NO: 794065 - RNA, 19 nt, Artificial Sequence
  Description of Artificial Sequence: Synthetic oligonucleotide
uggauaagagacccauugg

SEQ ID NO: 794066 - RNA, 19 nt, Artificial Sequence
  Description of Artificial Sequence: Synthetic oligonucleotide
aaucagccucaguaggcgc

SEQ ID NO: 794067 - RNA, 19 nt, Artificial Sequence
  Description of Artificial Sequence: Synthetic oligonucleotide
aaauugugacccuguguuc

SEQ ID NO: 794068 - RNA, 19 nt, Artificial Sequence
  Description of Artificial Sequence: Synthetic oligonucleotide
aaaucagccucaguaggcg

SEQ ID NO: 794069 - RNA, 19 nt, Artificial Sequence
  Description of Artificial Sequence: Synthetic oligonucleotide
cuugugcucgguaagauuc

SEQ ID NO: 794070 - RNA, 19 nt, Artificial Sequence
  Description of Artificial Sequence: Synthetic oligonucleotide
cuauuaauggcacgauacg

SEQ ID NO: 794071 - RNA, 19 nt, Artificial Sequence
  Description of Artificial Sequence: Synthetic oligonucleotide
ugaaaucgcagaaaugaaa

SEQ ID NO: 794072 - RNA, 19 nt, Artificial Sequence
  Description of Artificial Sequence: Synthetic oligonucleotide
gaucaguuuacaguauagg

SEQ ID NO: 794073 - RNA, 19 nt, Artificial Sequence
  Description of Artificial Sequence: Synthetic oligonucleotide
acaauaguguccauaacag

SEQ ID NO: 794074 - RNA, 19 nt, Artificial Sequence
  Description of Artificial Sequence: Synthetic oligonucleotide
aaucgcagaaaugaaauuu

SEQ ID NO: 794075 - RNA, 19 nt, Artificial Sequence
  Description of Artificial Sequence: Synthetic oligonucleotide
agccauauaaaauaugcuu

SEQ ID NO: 794076 - RNA, 19 nt, Artificial Sequence
  Description of Artificial Sequence: Synthetic oligonucleotide
acgauacgaaacaagcucc

SEQ ID NO: 794077 - RNA, 19 nt, Artificial Sequence
  Description of Artificial Sequence: Synthetic oligonucleotide
uauuaauggcacgauacga

SEQ ID NO: 794078 - RNA, 19 nt, Artificial Sequence
  Description of Artificial Sequence: Synthetic oligonucleotide
ucgguaagauucuaguucu

SEQ ID NO: 794079 - RNA, 19 nt, Artificial Sequence
  Description of Artificial Sequence: Synthetic oligonucleotide
aauugugacccuguguuca

SEQ ID NO: 794080 - RNA, 19 nt, Artificial Sequence
  Description of Artificial Sequence: Synthetic oligonucleotide
uuacuucuugaaaucgcag

SEQ ID NO: 794081 - RNA, 19 nt, Artificial Sequence
  Description of Artificial Sequence: Synthetic oligonucleotide
uauggagaucaauaagucu

SEQ ID NO: 794082 - RNA, 19 nt, Artificial Sequence
  Description of Artificial Sequence: Synthetic oligonucleotide
gucgacaaggacuaauaag

SEQ ID NO: 794083 - RNA, 19 nt, Artificial Sequence
  Description of Artificial Sequence: Synthetic oligonucleotide
ucagggucggauaugacau

SEQ ID NO: 794084 - RNA, 19 nt, Artificial Sequence
  Description of Artificial Sequence: Synthetic oligonucleotide
ucggaucccgaucugagug

SEQ ID NO: 794085 - RNA, 19 nt, Artificial Sequence
  Description of Artificial Sequence: Synthetic oligonucleotide
aagcuccuuauuuugauua

SEQ ID NO: 794086 - RNA, 19 nt, Artificial Sequence
  Description of Artificial Sequence: Synthetic oligonucleotide
uugggaucaaaauaucuau

SEQ ID NO: 794087 - RNA, 19 nt, Artificial Sequence
  Description of Artificial Sequence: Synthetic oligonucleotide
auaucuauagucaucaguu

SEQ ID NO: 794088 - RNA, 19 nt, Artificial Sequence
  Description of Artificial Sequence: Synthetic oligonucleotide
uacuucuugaaaucgcaga

SEQ ID NO: 794089 - RNA, 19 nt, Artificial Sequence
  Description of Artificial Sequence: Synthetic oligonucleotide
cucgguaagauucuaguuc

SEQ ID NO: 794090 - RNA, 19 nt, Artificial Sequence
  Description of Artificial Sequence: Synthetic oligonucleotide
cacgauacgaaacaagcuc

SEQ ID NO: 794091 - RNA, 19 nt, Artificial Sequence
  Description of Artificial Sequence: Synthetic oligonucleotide
aauagauaagaaacagccu

SEQ ID NO: 794092 - RNA, 19 nt, Artificial Sequence
  Description of Artificial Sequence: Synthetic oligonucleotide
ucuugaaaucgcagaaaug

SEQ ID NO: 794093 - RNA, 19 nt, Artificial Sequence
  Description of Artificial Sequence: Synthetic oligonucleotide
acucauuagcccauuacgg

SEQ ID NO: 794094 - RNA, 19 nt, Artificial Sequence
  Description of Artificial Sequence: Synthetic oligonucleotide
agauucuaguucuuguuga

SEQ ID NO: 794095 - RNA, 19 nt, Artificial Sequence
  Description of Artificial Sequence: Synthetic oligonucleotide
agugcaaaaggagaugcag

SEQ ID NO: 794096 - RNA, 19 nt, Artificial Sequence
  Description of Artificial Sequence: Synthetic oligonucleotide
uuaggacacugcuauggag

SEQ ID NO: 794097 - RNA, 19 nt, Artificial Sequence
  Description of Artificial Sequence: Synthetic oligonucleotide
caaaucagccucaguaggc

SEQ ID NO: 794098 - RNA, 19 nt, Artificial Sequence
  Description of Artificial Sequence: Synthetic oligonucleotide
uuucugucgacaaggacua

SEQ ID NO: 794099 - RNA, 19 nt, Artificial Sequence
  Description of Artificial Sequence: Synthetic oligonucleotide
ugugcacuuauguaauaga

SEQ ID NO: 794100 - RNA, 19 nt, Artificial Sequence
  Description of Artificial Sequence: Synthetic oligonucleotide
aguuaaaucguaggacuuc

SEQ ID NO: 794101 - RNA, 19 nt, Artificial Sequence
  Description of Artificial Sequence: Synthetic oligonucleotide
auaggauucguagagcuga

SEQ ID NO: 794102 - RNA, 19 nt, Artificial Sequence
  Description of Artificial Sequence: Synthetic oligonucleotide
ucguagauuuucccgaagu

SEQ ID NO: 794103 - RNA, 19 nt, Artificial Sequence
  Description of Artificial Sequence: Synthetic oligonucleotide
ccuauuaauggcacgauac

SEQ ID NO: 794104 - RNA, 19 nt, Artificial Sequence
  Description of Artificial Sequence: Synthetic oligonucleotide
cuugagcaucggaugaugg

SEQ ID NO: 794105 - RNA, 19 nt, Artificial Sequence
  Description of Artificial Sequence: Synthetic oligonucleotide
uugcugugcacuuauguaa

SEQ ID NO: 794106 - RNA, 19 nt, Artificial Sequence
  Description of Artificial Sequence: Synthetic oligonucleotide
aaauugagauacuggucaa

SEQ ID NO: 794107 - RNA, 19 nt, Artificial Sequence
  Description of Artificial Sequence: Synthetic oligonucleotide
aauuuaucaacuggaguua

SEQ ID NO: 794108 - RNA, 19 nt, Artificial Sequence
  Description of Artificial Sequence: Synthetic oligonucleotide
agagugauccccaugucuc

SEQ ID NO: 794109 - RNA, 19 nt, Artificial Sequence
  Description of Artificial Sequence: Synthetic oligonucleotide
uggaguuaaaucguaggac

SEQ ID NO: 794110 - RNA, 19 nt, Artificial Sequence
  Description of Artificial Sequence: Synthetic oligonucleotide
uaucaacuggaguuaaauc

SEQ ID NO: 794111 - RNA, 19 nt, Artificial Sequence
  Description of Artificial Sequence: Synthetic oligonucleotide
cuaauaagggccuuuggaa

SEQ ID NO: 794112 - RNA, 19 nt, Artificial Sequence
  Description of Artificial Sequence: Synthetic oligonucleotide
uuauccagaguagucuugc

SEQ ID NO: 794113 - RNA, 19 nt, Artificial Sequence
  Description of Artificial Sequence: Synthetic oligonucleotide
uacgaaacaagcuccuuau

SEQ ID NO: 794114 - RNA, 19 nt, Artificial Sequence
  Description of Artificial Sequence: Synthetic oligonucleotide
uuagcaguguuaucagaga

SEQ ID NO: 794115 - RNA, 19 nt, Artificial Sequence
  Description of Artificial Sequence: Synthetic oligonucleotide
ugucacugcacuagcggcc

SEQ ID NO: 794116 - RNA, 19 nt, Artificial Sequence
  Description of Artificial Sequence: Synthetic oligonucleotide
ugcacuuauguaauagaua

SEQ ID NO: 794117 - RNA, 19 nt, Artificial Sequence
  Description of Artificial Sequence: Synthetic oligonucleotide
gcacuuauguaauagauaa

SEQ ID NO: 794118 - RNA, 19 nt, Artificial Sequence
  Description of Artificial Sequence: Synthetic oligonucleotide
ugcaucucguagauuuucc

SEQ ID NO: 794119 - RNA, 19 nt, Artificial Sequence
  Description of Artificial Sequence: Synthetic oligonucleotide
uucuagucccauaaugcuc

SEQ ID NO: 794120 - RNA, 19 nt, Artificial Sequence
  Description of Artificial Sequence: Synthetic oligonucleotide
agcuccuuauuuugauuac

SEQ ID NO: 794121 - RNA, 19 nt, Artificial Sequence
  Description of Artificial Sequence: Synthetic oligonucleotide
aguuccugcaucagggucg

SEQ ID NO: 794122 - RNA, 19 nt, Artificial Sequence
  Description of Artificial Sequence: Synthetic oligonucleotide
ugagcaucggaugauggga

SEQ ID NO: 794123 - RNA, 19 nt, Artificial Sequence
  Description of Artificial Sequence: Synthetic oligonucleotide
accagcgcuugguaugucc

SEQ ID NO: 794124 - RNA, 19 nt, Artificial Sequence
  Description of Artificial Sequence: Synthetic oligonucleotide
aaaucgcagaaaugaaauu

SEQ ID NO: 794125 - RNA, 19 nt, Artificial Sequence
  Description of Artificial Sequence: Synthetic oligonucleotide
uccacgugugguguaaagg

SEQ ID NO: 794126 - RNA, 19 nt, Artificial Sequence
  Description of Artificial Sequence: Synthetic oligonucleotide
ugccaaaauuuaucaacug

SEQ ID NO: 794127 - RNA, 19 nt, Artificial Sequence
  Description of Artificial Sequence: Synthetic oligonucleotide
auuuguauggagaucaaua

SEQ ID NO: 794128 - RNA, 19 nt, Artificial Sequence
  Description of Artificial Sequence: Synthetic oligonucleotide
aggaguucuggcaaagaac

SEQ ID NO: 794129 - RNA, 19 nt, Artificial Sequence
  Description of Artificial Sequence: Synthetic oligonucleotide
uugguuuagugguugugcu

SEQ ID NO: 794130 - RNA, 19 nt, Artificial Sequence
  Description of Artificial Sequence: Synthetic oligonucleotide
uggggaauuuuccacuccu

SEQ ID NO: 794131 - RNA, 19 nt, Artificial Sequence
  Description of Artificial Sequence: Synthetic oligonucleotide
agauugucuaaaauucgag

SEQ ID NO: 794132 - RNA, 19 nt, Artificial Sequence
  Description of Artificial Sequence: Synthetic oligonucleotide
aauaggauucguagagcug

SEQ ID NO: 794133 - RNA, 19 nt, Artificial Sequence
  Description of Artificial Sequence: Synthetic oligonucleotide
ugcucgguaagauucuagu

SEQ ID NO: 794134 - RNA, 19 nt, Artificial Sequence
  Description of Artificial Sequence: Synthetic oligonucleotide
uggcacgauacgaaacaag

SEQ ID NO: 794135 - RNA, 19 nt, Artificial Sequence
  Description of Artificial Sequence: Synthetic oligonucleotide
ccuuauuuugauuacauaa

SEQ ID NO: 794136 - RNA, 19 nt, Artificial Sequence
  Description of Artificial Sequence: Synthetic oligonucleotide
uccuaccacaaagacaaug

SEQ ID NO: 794137 - RNA, 19 nt, Artificial Sequence
  Description of Artificial Sequence: Synthetic oligonucleotide
ucauuagcccauuacgguu

SEQ ID NO: 794138 - RNA, 19 nt, Artificial Sequence
  Description of Artificial Sequence: Synthetic oligonucleotide
auguaauagauaagaaaca

SEQ ID NO: 794139 - RNA, 19 nt, Artificial Sequence
  Description of Artificial Sequence: Synthetic oligonucleotide
acucuguuuaaguggaaau

SEQ ID NO: 794140 - RNA, 19 nt, Artificial Sequence
  Description of Artificial Sequence: Synthetic oligonucleotide
ugugguguaaaggcgucgc

SEQ ID NO: 794141 - RNA, 19 nt, Artificial Sequence
  Description of Artificial Sequence: Synthetic oligonucleotide
auauacauccaguuuucuu

SEQ ID NO: 794142 - RNA, 19 nt, Artificial Sequence
  Description of Artificial Sequence: Synthetic oligonucleotide
cauuagcccauuacgguuc

SEQ ID NO: 794143 - RNA, 19 nt, Artificial Sequence
  Description of Artificial Sequence: Synthetic oligonucleotide
ugucgacaaggacuaauaa

SEQ ID NO: 794144 - RNA, 19 nt, Artificial Sequence
  Description of Artificial Sequence: Synthetic oligonucleotide
agcuuagcaguguuaucag

SEQ ID NO: 794145 - RNA, 19 nt, Artificial Sequence
  Description of Artificial Sequence: Synthetic oligonucleotide
uguccaaguugugacagcu

SEQ ID NO: 794146 - RNA, 19 nt, Artificial Sequence
  Description of Artificial Sequence: Synthetic oligonucleotide
gagggacuuauccagagua

SEQ ID NO: 794147 - RNA, 19 nt, Artificial Sequence
  Description of Artificial Sequence: Synthetic oligonucleotide
auacgaaacaagcuccuua

SEQ ID NO: 794148 - RNA, 19 nt, Artificial Sequence
  Description of Artificial Sequence: Synthetic oligonucleotide
uacaucuauccaaacucau

SEQ ID NO: 794149 - RNA, 19 nt, Artificial Sequence
  Description of Artificial Sequence: Synthetic oligonucleotide
auuacgguucuucuguguu

SEQ ID NO: 794150 - RNA, 19 nt, Artificial Sequence
  Description of Artificial Sequence: Synthetic oligonucleotide
aaaggcgucgccaaaucaa

SEQ ID NO: 794151 - RNA, 19 nt, Artificial Sequence
  Description of Artificial Sequence: Synthetic oligonucleotide
auuaauggcacgauacgaa

SEQ ID NO: 794152 - RNA, 19 nt, Artificial Sequence
  Description of Artificial Sequence: Synthetic oligonucleotide
ccaaaauuuaucaacugga

SEQ ID NO: 794153 - RNA, 19 nt, Artificial Sequence
  Description of Artificial Sequence: Synthetic oligonucleotide
cacuuauguaauagauaag

SEQ ID NO: 794154 - RNA, 19 nt, Artificial Sequence
  Description of Artificial Sequence: Synthetic oligonucleotide
ucgcagaaaugaaauuuaa

SEQ ID NO: 794155 - RNA, 19 nt, Artificial Sequence
  Description of Artificial Sequence: Synthetic oligonucleotide
cuuauccagaguagucuug

SEQ ID NO: 794156 - RNA, 19 nt, Artificial Sequence
  Description of Artificial Sequence: Synthetic oligonucleotide
gacccauugguuuaguggu

SEQ ID NO: 794157 - RNA, 19 nt, Artificial Sequence
  Description of Artificial Sequence: Synthetic oligonucleotide
cuguuugauauauuguaaa

SEQ ID NO: 794158 - RNA, 19 nt, Artificial Sequence
  Description of Artificial Sequence: Synthetic oligonucleotide
gaaaucgcagaaaugaaau

SEQ ID NO: 794159 - RNA, 19 nt, Artificial Sequence
  Description of Artificial Sequence: Synthetic oligonucleotide
uuuagugguugugcuacca

SEQ ID NO: 794160 - RNA, 19 nt, Artificial Sequence
  Description of Artificial Sequence: Synthetic oligonucleotide
agcaucggaugaugggaac

SEQ ID NO: 794161 - RNA, 19 nt, Artificial Sequence
  Description of Artificial Sequence: Synthetic oligonucleotide
auaucuuggccaaaucugu

SEQ ID NO: 794162 - RNA, 19 nt, Artificial Sequence
  Description of Artificial Sequence: Synthetic oligonucleotide
cuggaguuaaaucguagga

SEQ ID NO: 794163 - RNA, 19 nt, Artificial Sequence
  Description of Artificial Sequence: Synthetic oligonucleotide
aauucgagugacagguaga

SEQ ID NO: 794164 - RNA, 19 nt, Artificial Sequence
  Description of Artificial Sequence: Synthetic oligonucleotide
cuuuaugaacuguguagca

SEQ ID NO: 794165 - RNA, 19 nt, Artificial Sequence
  Description of Artificial Sequence: Synthetic oligonucleotide
gcuuuaugaacuguguagc

SEQ ID NO: 794166 - RNA, 19 nt, Artificial Sequence
  Description of Artificial Sequence: Synthetic oligonucleotide
ugcuaccauagcuggcagg

SEQ ID NO: 794167 - RNA, 19 nt, Artificial Sequence
  Description of Artificial Sequence: Synthetic oligonucleotide
cugugcacuuauguaauag

SEQ ID NO: 794168 - RNA, 19 nt, Artificial Sequence
  Description of Artificial Sequence: Synthetic oligonucleotide
cauaaugcucuuuagucgu

SEQ ID NO: 794169 - RNA, 19 nt, Artificial Sequence
  Description of Artificial Sequence: Synthetic oligonucleotide
gucggauaugacaucuagg

SEQ ID NO: 794170 - RNA, 19 nt, Artificial Sequence
  Description of Artificial Sequence: Synthetic oligonucleotide
gugucacugcacuagcggc

SEQ ID NO: 794171 - RNA, 19 nt, Artificial Sequence
  Description of Artificial Sequence: Synthetic oligonucleotide
gauauauuguaaagggcua

SEQ ID NO: 794172 - RNA, 19 nt, Artificial Sequence
  Description of Artificial Sequence: Synthetic oligonucleotide
guauggagaucaauaaguc

SEQ ID NO: 794173 - RNA, 19 nt, Artificial Sequence
  Description of Artificial Sequence: Synthetic oligonucleotide
acaagcuccuuauuuugau

SEQ ID NO: 794174 - RNA, 19 nt, Artificial Sequence
  Description of Artificial Sequence: Synthetic oligonucleotide
uaucuauagucaucaguuu

SEQ ID NO: 794175 - RNA, 19 nt, Artificial Sequence
  Description of Artificial Sequence: Synthetic oligonucleotide
ugguguaaaggcgucgcca

SEQ ID NO: 794176 - RNA, 19 nt, Artificial Sequence
  Description of Artificial Sequence: Synthetic oligonucleotide
uggagaucaauaagucuuu

SEQ ID NO: 794177 - RNA, 19 nt, Artificial Sequence
  Description of Artificial Sequence: Synthetic oligonucleotide
ccauauaaaauaugcuuuc

SEQ ID NO: 794178 - RNA, 19 nt, Artificial Sequence
  Description of Artificial Sequence: Synthetic oligonucleotide
auuuccgcggcuguuccuc

SEQ ID NO: 794179 - RNA, 19 nt, Artificial Sequence
  Description of Artificial Sequence: Synthetic oligonucleotide
agcugaugugagcuuagca

SEQ ID NO: 794180 - RNA, 19 nt, Artificial Sequence
  Description of Artificial Sequence: Synthetic oligonucleotide
cuauagucaucaguuucag

SEQ ID NO: 794181 - RNA, 19 nt, Artificial Sequence
  Description of Artificial Sequence: Synthetic oligonucleotide
ggucggauaugacaucuag

SEQ ID NO: 794182 - RNA, 19 nt, Artificial Sequence
  Description of Artificial Sequence: Synthetic oligonucleotide
cacaaaguacacugcagga

SEQ ID NO: 794183 - RNA, 19 nt, Artificial Sequence
  Description of Artificial Sequence: Synthetic oligonucleotide
ugguauguccacguguggu

SEQ ID NO: 794184 - RNA, 19 nt, Artificial Sequence
  Description of Artificial Sequence: Synthetic oligonucleotide
gaacuguguagcauuaaaa

SEQ ID NO: 794185 - RNA, 19 nt, Artificial Sequence
  Description of Artificial Sequence: Synthetic oligonucleotide
caaauugugacccuguguu

SEQ ID NO: 794186 - RNA, 19 nt, Artificial Sequence
  Description of Artificial Sequence: Synthetic oligonucleotide
guaagauucuaguucuugu

SEQ ID NO: 794187 - RNA, 19 nt, Artificial Sequence
  Description of Artificial Sequence: Synthetic oligonucleotide
aucugagugcaaaaggaga

SEQ ID NO: 794188 - RNA, 19 nt, Artificial Sequence
  Description of Artificial Sequence: Synthetic oligonucleotide
cugucaacaauagugucca

SEQ ID NO: 794189 - RNA, 19 nt, Artificial Sequence
  Description of Artificial Sequence: Synthetic oligonucleotide
acaucuaggagggacuuau

SEQ ID NO: 794190 - RNA, 19 nt, Artificial Sequence
  Description of Artificial Sequence: Synthetic oligonucleotide
gguuuagugguugugcuac

SEQ ID NO: 794191 - RNA, 19 nt, Artificial Sequence
  Description of Artificial Sequence: Synthetic oligonucleotide
ccacgugugguguaaaggc

SEQ ID NO: 794192 - RNA, 19 nt, Artificial Sequence
  Description of Artificial Sequence: Synthetic oligonucleotide
ggaguuaaaucguaggacu

SEQ ID NO: 794193 - RNA, 19 nt, Artificial Sequence
  Description of Artificial Sequence: Synthetic oligonucleotide
ccaucacaaauugugaccc

SEQ ID NO: 794194 - RNA, 19 nt, Artificial Sequence
  Description of Artificial Sequence: Synthetic oligonucleotide
auguagucaacaagguucu

SEQ ID NO: 794195 - RNA, 19 nt, Artificial Sequence
  Description of Artificial Sequence: Synthetic oligonucleotide
gguauguccacguguggug

SEQ ID NO: 794196 - RNA, 19 nt, Artificial Sequence
  Description of Artificial Sequence: Synthetic oligonucleotide
ucguaggacuucuuguuuu

SEQ ID NO: 794197 - RNA, 19 nt, Artificial Sequence
  Description of Artificial Sequence: Synthetic oligonucleotide
ucaacaagguucugauauu

SEQ ID NO: 794198 - RNA, 19 nt, Artificial Sequence
  Description of Artificial Sequence: Synthetic oligonucleotide
ugugagcuuagcaguguua

SEQ ID NO: 794199 - RNA, 19 nt, Artificial Sequence
  Description of Artificial Sequence: Synthetic oligonucleotide
caucggaugaugggaacag

SEQ ID NO: 794200 - RNA, 19 nt, Artificial Sequence
  Description of Artificial Sequence: Synthetic oligonucleotide
aucggaugaugggaacagc

SEQ ID NO: 794201 - RNA, 19 nt, Artificial Sequence
  Description of Artificial Sequence: Synthetic oligonucleotide
aaguacacugcaggaacau

SEQ ID NO: 794202 - RNA, 19 nt, Artificial Sequence
  Description of Artificial Sequence: Synthetic oligonucleotide
uugugcuaccauagcuggc

SEQ ID NO: 794203 - RNA, 19 nt, Artificial Sequence
  Description of Artificial Sequence: Synthetic oligonucleotide
ucguagagcugauuucgaa

SEQ ID NO: 794204 - RNA, 19 nt, Artificial Sequence
  Description of Artificial Sequence: Synthetic oligonucleotide
guuaggacacugcuaugga

SEQ ID NO: 794205 - RNA, 19 nt, Artificial Sequence
  Description of Artificial Sequence: Synthetic oligonucleotide
ucugucgacaaggacuaau

SEQ ID NO: 794206 - RNA, 19 nt, Artificial Sequence
  Description of Artificial Sequence: Synthetic oligonucleotide
uugugcucgguaagauucu

SEQ ID NO: 794207 - RNA, 19 nt, Artificial Sequence
  Description of Artificial Sequence: Synthetic oligonucleotide
auauucucuucaguuggca

SEQ ID NO: 794208 - RNA, 19 nt, Artificial Sequence
  Description of Artificial Sequence: Synthetic oligonucleotide
cuaaaacagcaguggcaac

SEQ ID NO: 794209 - RNA, 19 nt, Artificial Sequence
  Description of Artificial Sequence: Synthetic oligonucleotide
auucgagugacagguagau

SEQ ID NO: 794210 - RNA, 19 nt, Artificial Sequence
  Description of Artificial Sequence: Synthetic oligonucleotide
agcgcuugguauguccacg

SEQ ID NO: 794211 - RNA, 19 nt, Artificial Sequence
  Description of Artificial Sequence: Synthetic oligonucleotide
gacuuauccagaguagucu

SEQ ID NO: 794212 - RNA, 19 nt, Artificial Sequence
  Description of Artificial Sequence: Synthetic oligonucleotide
gucgccaaaucaauguuuc

SEQ ID NO: 794213 - RNA, 19 nt, Artificial Sequence
  Description of Artificial Sequence: Synthetic oligonucleotide
uuaaaucguaggacuucuu

SEQ ID NO: 794214 - RNA, 19 nt, Artificial Sequence
  Description of Artificial Sequence: Synthetic oligonucleotide
agugauccccaugucucuc

SEQ ID NO: 794215 - RNA, 19 nt, Artificial Sequence
  Description of Artificial Sequence: Synthetic oligonucleotide
cccgaaguuucuuaucuag

SEQ ID NO: 794216 - RNA, 19 nt, Artificial Sequence
  Description of Artificial Sequence: Synthetic oligonucleotide
agcccauuacgguucuucu

SEQ ID NO: 794217 - RNA, 19 nt, Artificial Sequence
  Description of Artificial Sequence: Synthetic oligonucleotide
aguuuacaguauaggaagu

SEQ ID NO: 794218 - RNA, 19 nt, Artificial Sequence
  Description of Artificial Sequence: Synthetic oligonucleotide
guaaaggcgucgccaaauc

SEQ ID NO: 794219 - RNA, 19 nt, Artificial Sequence
  Description of Artificial Sequence: Synthetic oligonucleotide
uuacgguucuucuguguua

SEQ ID NO: 794220 - RNA, 19 nt, Artificial Sequence
  Description of Artificial Sequence: Synthetic oligonucleotide
gucauugcuccgcagcauc

SEQ ID NO: 794221 - RNA, 19 nt, Artificial Sequence
  Description of Artificial Sequence: Synthetic oligonucleotide
ucuugugcucgguaagauu

SEQ ID NO: 794222 - RNA, 19 nt, Artificial Sequence
  Description of Artificial Sequence: Synthetic oligonucleotide
cuccuccuaccacaaagac

SEQ ID NO: 794223 - RNA, 19 nt, Artificial Sequence
  Description of Artificial Sequence: Synthetic oligonucleotide
ggauaagagacccauuggu

SEQ ID NO: 794224 - RNA, 19 nt, Artificial Sequence
  Description of Artificial Sequence: Synthetic oligonucleotide
auuagcccauuacgguucu

SEQ ID NO: 794225 - RNA, 19 nt, Artificial Sequence
  Description of Artificial Sequence: Synthetic oligonucleotide
guuuagugguugugcuacc

SEQ ID NO: 794226 - RNA, 19 nt, Artificial Sequence
  Description of Artificial Sequence: Synthetic oligonucleotide
ucugugauaucuggccuau

SEQ ID NO: 794227 - RNA, 19 nt, Artificial Sequence
  Description of Artificial Sequence: Synthetic oligonucleotide
agggucggauaugacaucu

SEQ ID NO: 794228 - RNA, 19 nt, Artificial Sequence
  Description of Artificial Sequence: Synthetic oligonucleotide
cuucuagucccauaaugcu

SEQ ID NO: 794229 - RNA, 19 nt, Artificial Sequence
  Description of Artificial Sequence: Synthetic oligonucleotide
ugguuuagugguugugcua

SEQ ID NO: 794230 - RNA, 19 nt, Artificial Sequence
  Description of Artificial Sequence: Synthetic oligonucleotide
cucguagauuuucccgaag

SEQ ID NO: 794231 - RNA, 19 nt, Artificial Sequence
  Description of Artificial Sequence: Synthetic oligonucleotide
cuggaaucggaucccgauc

SEQ ID NO: 794232 - RNA, 19 nt, Artificial Sequence
  Description of Artificial Sequence: Synthetic oligonucleotide
cacuagcggccaaugcugc

SEQ ID NO: 794233 - RNA, 19 nt, Artificial Sequence
  Description of Artificial Sequence: Synthetic oligonucleotide
auguaccagcgcuugguau

SEQ ID NO: 794234 - RNA, 19 nt, Artificial Sequence
  Description of Artificial Sequence: Synthetic oligonucleotide
aucgcagaaaugaaauuua

SEQ ID NO: 794235 - RNA, 19 nt, Artificial Sequence
  Description of Artificial Sequence: Synthetic oligonucleotide
ugcugauggcuccuucguc

SEQ ID NO: 794236 - RNA, 19 nt, Artificial Sequence
  Description of Artificial Sequence: Synthetic oligonucleotide
auagcuggcaggaguugag

SEQ ID NO: 794237 - RNA, 19 nt, Artificial Sequence
  Description of Artificial Sequence: Synthetic oligonucleotide
ggcaacuugugucacugca

SEQ ID NO: 794238 - RNA, 19 nt, Artificial Sequence
  Description of Artificial Sequence: Synthetic oligonucleotide
ucgccaaaucaauguuucu

SEQ ID NO: 794239 - RNA, 19 nt, Artificial Sequence
  Description of Artificial Sequence: Synthetic oligonucleotide
cucauuagcccauuacggu

SEQ ID NO: 794240 - RNA, 19 nt, Artificial Sequence
  Description of Artificial Sequence: Synthetic oligonucleotide
uuuagucguuuaaccucau

SEQ ID NO: 794241 - RNA, 19 nt, Artificial Sequence
  Description of Artificial Sequence: Synthetic oligonucleotide
aucggaucccgaucugagu

SEQ ID NO: 794242 - RNA, 19 nt, Artificial Sequence
  Description of Artificial Sequence: Synthetic oligonucleotide
cguagagcugauuucgaag

SEQ ID NO: 794243 - RNA, 19 nt, Artificial Sequence
  Description of Artificial Sequence: Synthetic oligonucleotide
uuacucuguuuaaguggaa

SEQ ID NO: 794244 - RNA, 19 nt, Artificial Sequence
  Description of Artificial Sequence: Synthetic oligonucleotide
aaggcgucgccaaaucaau

SEQ ID NO: 794245 - RNA, 19 nt, Artificial Sequence
  Description of Artificial Sequence: Synthetic oligonucleotide
auugugacccuguguucau

SEQ ID NO: 794246 - RNA, 19 nt, Artificial Sequence
  Description of Artificial Sequence: Synthetic oligonucleotide
guccacgugugguguaaag

SEQ ID NO: 794247 - RNA, 19 nt, Artificial Sequence
  Description of Artificial Sequence: Synthetic oligonucleotide
aggaaguauagaauuuauu

SEQ ID NO: 794248 - RNA, 19 nt, Artificial Sequence
  Description of Artificial Sequence: Synthetic oligonucleotide
uaggauucguagagcugau

SEQ ID NO: 794249 - RNA, 19 nt, Artificial Sequence
  Description of Artificial Sequence: Synthetic oligonucleotide
gugguguaaaggcgucgcc

SEQ ID NO: 794250 - RNA, 19 nt, Artificial Sequence
  Description of Artificial Sequence: Synthetic oligonucleotide
augcagagugauccccaug

SEQ ID NO: 794251 - RNA, 19 nt, Artificial Sequence
  Description of Artificial Sequence: Synthetic oligonucleotide
aaaauucgagugacaggua

SEQ ID NO: 794252 - RNA, 19 nt, Artificial Sequence
  Description of Artificial Sequence: Synthetic oligonucleotide
ggaucaaaauaucuauagu

SEQ ID NO: 794253 - RNA, 19 nt, Artificial Sequence
  Description of Artificial Sequence: Synthetic oligonucleotide
cagaggagagaugauaucu

SEQ ID NO: 794254 - RNA, 19 nt, Artificial Sequence
  Description of Artificial Sequence: Synthetic oligonucleotide
gugugguguaaaggcgucg

SEQ ID NO: 794255 - RNA, 19 nt, Artificial Sequence
  Description of Artificial Sequence: Synthetic oligonucleotide
cugcacuagcggccaaugc

SEQ ID NO: 794256 - RNA, 19 nt, Artificial Sequence
  Description of Artificial Sequence: Synthetic oligonucleotide
cugucgacaaggacuaaua

SEQ ID NO: 794257 - RNA, 19 nt, Artificial Sequence
  Description of Artificial Sequence: Synthetic oligonucleotide
gcaacauuuguauggagau

SEQ ID NO: 794258 - RNA, 19 nt, Artificial Sequence
  Description of Artificial Sequence: Synthetic oligonucleotide
gcuaccauagcuggcagga

SEQ ID NO: 794259 - RNA, 19 nt, Artificial Sequence
  Description of Artificial Sequence: Synthetic oligonucleotide
guagucuugcucauuauuu

SEQ ID NO: 794260 - RNA, 19 nt, Artificial Sequence
  Description of Artificial Sequence: Synthetic oligonucleotide
agucaacaagguucugaua

SEQ ID NO: 794261 - RNA, 19 nt, Artificial Sequence
  Description of Artificial Sequence: Synthetic oligonucleotide
augugagcuuagcaguguu

SEQ ID NO: 794262 - RNA, 19 nt, Artificial Sequence
  Description of Artificial Sequence: Synthetic oligonucleotide
acuagcggccaaugcugca

SEQ ID NO: 794263 - RNA, 19 nt, Artificial Sequence
  Description of Artificial Sequence: Synthetic oligonucleotide
ccaaaucaauguuucuguc

SEQ ID NO: 794264 - RNA, 19 nt, Artificial Sequence
  Description of Artificial Sequence: Synthetic oligonucleotide
ucccgaaguuucuuaucua

SEQ ID NO: 794265 - RNA, 19 nt, Artificial Sequence
  Description of Artificial Sequence: Synthetic oligonucleotide
uucgaagauccuggcacau

SEQ ID NO: 794266 - RNA, 19 nt, Artificial Sequence
  Description of Artificial Sequence: Synthetic oligonucleotide
caaggacuaauaagggccu

SEQ ID NO: 794267 - RNA, 19 nt, Artificial Sequence
  Description of Artificial Sequence: Synthetic oligonucleotide
ggauuugacuucaucucca

SEQ ID NO: 794268 - RNA, 19 nt, Artificial Sequence
  Description of Artificial Sequence: Synthetic oligonucleotide
caguuggcaucacaaagua

SEQ ID NO: 794269 - RNA, 19 nt, Artificial Sequence
  Description of Artificial Sequence: Synthetic oligonucleotide
caauaguguccauaacagu

SEQ ID NO: 794270 - RNA, 19 nt, Artificial Sequence
  Description of Artificial Sequence: Synthetic oligonucleotide
gcggcuguuccucuugagc

SEQ ID NO: 794271 - RNA, 19 nt, Artificial Sequence
  Description of Artificial Sequence: Synthetic oligonucleotide
ggcugucaacaauaguguc

SEQ ID NO: 794272 - RNA, 19 nt, Artificial Sequence
  Description of Artificial Sequence: Synthetic oligonucleotide
gucuaaaauucgagugaca

SEQ ID NO: 794273 - RNA, 19 nt, Artificial Sequence
  Description of Artificial Sequence: Synthetic oligonucleotide
ugugcucgguaagauucua

SEQ ID NO: 794274 - RNA, 19 nt, Artificial Sequence
  Description of Artificial Sequence: Synthetic oligonucleotide
cuaccauagcuggcaggag

SEQ ID NO: 794275 - RNA, 19 nt, Artificial Sequence
  Description of Artificial Sequence: Synthetic oligonucleotide
cagcgcuugguauguccac

SEQ ID NO: 794276 - RNA, 19 nt, Artificial Sequence
  Description of Artificial Sequence: Synthetic oligonucleotide
gaguuaaaucguaggacuu

SEQ ID NO: 794277 - RNA, 19 nt, Artificial Sequence
  Description of Artificial Sequence: Synthetic oligonucleotide
gaugugagcuuagcagugu

SEQ ID NO: 794278 - RNA, 19 nt, Artificial Sequence
  Description of Artificial Sequence: Synthetic oligonucleotide
uccuaggaacugagcuguc

SEQ ID NO: 794279 - RNA, 19 nt, Artificial Sequence
  Description of Artificial Sequence: Synthetic oligonucleotide
gcuuagcaguguuaucaga

SEQ ID NO: 794280 - RNA, 19 nt, Artificial Sequence
  Description of Artificial Sequence: Synthetic oligonucleotide
ggcgucgccaaaucaaugu

SEQ ID NO: 794281 - RNA, 19 nt, Artificial Sequence
  Description of Artificial Sequence: Synthetic oligonucleotide
cacauccugucaauauucu

SEQ ID NO: 794282 - RNA, 19 nt, Artificial Sequence
  Description of Artificial Sequence: Synthetic oligonucleotide
ugucaacaauaguguccau

SEQ ID NO: 794283 - RNA, 19 nt, Artificial Sequence
  Description of Artificial Sequence: Synthetic oligonucleotide
caaacucauuagcccauua

SEQ ID NO: 794284 - RNA, 19 nt, Artificial Sequence
  Description of Artificial Sequence: Synthetic oligonucleotide
cauuacgguucuucugugu

SEQ ID NO: 794285 - RNA, 19 nt, Artificial Sequence
  Description of Artificial Sequence: Synthetic oligonucleotide
cagggucggauaugacauc

SEQ ID NO: 794286 - RNA, 19 nt, Artificial Sequence
  Description of Artificial Sequence: Synthetic oligonucleotide
uucgagugacagguagauu

SEQ ID NO: 794287 - RNA, 19 nt, Artificial Sequence
  Description of Artificial Sequence: Synthetic oligonucleotide
gcuugguauguccacgugu

SEQ ID NO: 794288 - RNA, 19 nt, Artificial Sequence
  Description of Artificial Sequence: Synthetic oligonucleotide
cauguaccagcgcuuggua

SEQ ID NO: 794289 - RNA, 19 nt, Artificial Sequence
  Description of Artificial Sequence: Synthetic oligonucleotide
aaagcucacugcagccaua

SEQ ID NO: 794290 - RNA, 19 nt, Artificial Sequence
  Description of Artificial Sequence: Synthetic oligonucleotide
gcuccuuauuuugauuaca

SEQ ID NO: 794291 - RNA, 19 nt, Artificial Sequence
  Description of Artificial Sequence: Synthetic oligonucleotide
aggcgucgccaaaucaaug

SEQ ID NO: 794292 - RNA, 19 nt, Artificial Sequence
  Description of Artificial Sequence: Synthetic oligonucleotide
uguccacgugugguguaaa

SEQ ID NO: 794293 - RNA, 19 nt, Artificial Sequence
  Description of Artificial Sequence: Synthetic oligonucleotide
ccauuacgguucuucugug

SEQ ID NO: 794294 - RNA, 19 nt, Artificial Sequence
  Description of Artificial Sequence: Synthetic oligonucleotide
aucuggaaucggaucccga

SEQ ID NO: 794295 - RNA, 19 nt, Artificial Sequence
  Description of Artificial Sequence: Synthetic oligonucleotide
auguccacgugugguguaa

SEQ ID NO: 794296 - RNA, 19 nt, Artificial Sequence
  Description of Artificial Sequence: Synthetic oligonucleotide
gcauccugcaucuguuaaa

SEQ ID NO: 794297 - RNA, 19 nt, Artificial Sequence
  Description of Artificial Sequence: Synthetic oligonucleotide
gauacgaaacaagcuccuu

SEQ ID NO: 794298 - RNA, 19 nt, Artificial Sequence
  Description of Artificial Sequence: Synthetic oligonucleotide
cccauuacgguucuucugu

SEQ ID NO: 794299 - RNA, 19 nt, Artificial Sequence
  Description of Artificial Sequence: Synthetic oligonucleotide
gccuauuaauggcacgaua

SEQ ID NO: 794300 - RNA, 19 nt, Artificial Sequence
  Description of Artificial Sequence: Synthetic oligonucleotide
auaugacaucuaggaggga

SEQ ID NO: 794301 - RNA, 19 nt, Artificial Sequence
  Description of Artificial Sequence: Synthetic oligonucleotide
gcaucggaugaugggaaca

SEQ ID NO: 794302 - RNA, 19 nt, Artificial Sequence
  Description of Artificial Sequence: Synthetic oligonucleotide
ggaacaucuggaaucggau

SEQ ID NO: 794303 - RNA, 19 nt, Artificial Sequence
  Description of Artificial Sequence: Synthetic oligonucleotide
caucacaaauugugacccu

SEQ ID NO: 794304 - RNA, 19 nt, Artificial Sequence
  Description of Artificial Sequence: Synthetic oligonucleotide
aggauucguagagcugauu

SEQ ID NO: 794305 - RNA, 19 nt, Artificial Sequence
  Description of Artificial Sequence: Synthetic oligonucleotide
ccagcgcuugguaugucca

SEQ ID NO: 794306 - RNA, 19 nt, Artificial Sequence
  Description of Artificial Sequence: Synthetic oligonucleotide
acacugcuauggagaagga

SEQ ID NO: 794307 - RNA, 19 nt, Artificial Sequence
  Description of Artificial Sequence: Synthetic oligonucleotide
uucugucgacaaggacuaa

SEQ ID NO: 794308 - RNA, 19 nt, Artificial Sequence
  Description of Artificial Sequence: Synthetic oligonucleotide
gcggccaaugcugcauuug

SEQ ID NO: 794309 - RNA, 19 nt, Artificial Sequence
  Description of Artificial Sequence: Synthetic oligonucleotide
cgugugguguaaaggcguc

SEQ ID NO: 794310 - RNA, 19 nt, Artificial Sequence
  Description of Artificial Sequence: Synthetic oligonucleotide
acccauugguuuagugguu

SEQ ID NO: 794311 - RNA, 19 nt, Artificial Sequence
  Description of Artificial Sequence: Synthetic oligonucleotide
ggagggacuuauccagagu

SEQ ID NO: 794312 - RNA, 19 nt, Artificial Sequence
  Description of Artificial Sequence: Synthetic oligonucleotide
uuccgcggcuguuccucuu

SEQ ID NO: 794313 - RNA, 19 nt, Artificial Sequence
  Description of Artificial Sequence: Synthetic oligonucleotide
gcucgguaagauucuaguu

SEQ ID NO: 794314 - RNA, 19 nt, Artificial Sequence
  Description of Artificial Sequence: Synthetic oligonucleotide
cgaaguuucuuaucuaguu

SEQ ID NO: 794315 - RNA, 19 nt, Artificial Sequence
  Description of Artificial Sequence: Synthetic oligonucleotide
cuagcggccaaugcugcau

SEQ ID NO: 794316 - RNA, 19 nt, Artificial Sequence
  Description of Artificial Sequence: Synthetic oligonucleotide
gcugugcacuuauguaaua

SEQ ID NO: 794317 - RNA, 19 nt, Artificial Sequence
  Description of Artificial Sequence: Synthetic oligonucleotide
gaucccgaucugagugcaa

SEQ ID NO: 794318 - RNA, 19 nt, Artificial Sequence
  Description of Artificial Sequence: Synthetic oligonucleotide
ccuuggcaacuugugucac

SEQ ID NO: 794319 - RNA, 19 nt, Artificial Sequence
  Description of Artificial Sequence: Synthetic oligonucleotide
cuaaggcugcauccugcau

SEQ ID NO: 794320 - RNA, 19 nt, Artificial Sequence
  Description of Artificial Sequence: Synthetic oligonucleotide
uaccagcgcuugguauguc

SEQ ID NO: 794321 - RNA, 19 nt, Artificial Sequence
  Description of Artificial Sequence: Synthetic oligonucleotide
cauuuccgcggcuguuccu

SEQ ID NO: 794322 - RNA, 19 nt, Artificial Sequence
  Description of Artificial Sequence: Synthetic oligonucleotide
gcaggaguugaggccaucu

SEQ ID NO: 794323 - RNA, 19 nt, Artificial Sequence
  Description of Artificial Sequence: Synthetic oligonucleotide
ccagucccaagugggucac

SEQ ID NO: 794324 - RNA, 19 nt, Artificial Sequence
  Description of Artificial Sequence: Synthetic oligonucleotide
gcgcuugguauguccacgu

SEQ ID NO: 794325 - RNA, 19 nt, Artificial Sequence
  Description of Artificial Sequence: Synthetic oligonucleotide
ggagaucaauaagucuuuu

SEQ ID NO: 794326 - RNA, 19 nt, Artificial Sequence
  Description of Artificial Sequence: Synthetic oligonucleotide
cgauacgaaacaagcuccu

SEQ ID NO: 794327 - RNA, 19 nt, Artificial Sequence
  Description of Artificial Sequence: Synthetic oligonucleotide
cgcuugguauguccacgug

SEQ ID NO: 794328 - RNA, 19 nt, Artificial Sequence
  Description of Artificial Sequence: Synthetic oligonucleotide
gcgucgccaaaucaauguu

SEQ ID NO: 794329 - RNA, 19 nt, Artificial Sequence
  Description of Artificial Sequence: Synthetic oligonucleotide
gcgcuugcugugcacuuau

SEQ ID NO: 794330 - RNA, 19 nt, Artificial Sequence
  Description of Artificial Sequence: Synthetic oligonucleotide
ggccuauuaauggcacgau

SEQ ID NO: 794331 - RNA, 19 nt, Artificial Sequence
  Description of Artificial Sequence: Synthetic oligonucleotide
cagaguagucuugcucauu

SEQ ID NO: 794332 - RNA, 19 nt, Artificial Sequence
  Description of Artificial Sequence: Synthetic oligonucleotide
ggcgcuugcugugcacuua

SEQ ID NO: 794333 - RNA, 19 nt, Artificial Sequence
  Description of Artificial Sequence: Synthetic oligonucleotide
gggucggauaugacaucua

SEQ ID NO: 794334 - RNA, 19 nt, Artificial Sequence
  Description of Artificial Sequence: Synthetic oligonucleotide
ccgcggcuguuccucuuga

SEQ ID NO: 794335 - RNA, 19 nt, Artificial Sequence
  Description of Artificial Sequence: Synthetic oligonucleotide
cugugauaucuggccuauu

SEQ ID NO: 794336 - RNA, 19 nt, Artificial Sequence
  Description of Artificial Sequence: Synthetic oligonucleotide
aacaggauaauguaggugg

SEQ ID NO: 794337 - RNA, 19 nt, Artificial Sequence
  Description of Artificial Sequence: Synthetic oligonucleotide
auggaguaaagcuugaugc

SEQ ID NO: 794338 - RNA, 19 nt, Artificial Sequence
  Description of Artificial Sequence: Synthetic oligonucleotide
aagacaagggcugugaugc

SEQ ID NO: 794339 - RNA, 19 nt, Artificial Sequence
  Description of Artificial Sequence: Synthetic oligonucleotide
agaauugcugcccacaggc

SEQ ID NO: 794340 - RNA, 19 nt, Artificial Sequence
  Description of Artificial Sequence: Synthetic oligonucleotide
aagucggucaccugaaggc

SEQ ID NO: 794341 - RNA, 19 nt, Artificial Sequence
  Description of Artificial Sequence: Synthetic oligonucleotide
aauugcugcccacaggccc

SEQ ID NO: 794342 - RNA, 19 nt, Artificial Sequence
  Description of Artificial Sequence: Synthetic oligonucleotide
uuagacuugaccaugucga

SEQ ID NO: 794343 - RNA, 19 nt, Artificial Sequence
  Description of Artificial Sequence: Synthetic oligonucleotide
aagccgagcagcuacaauc

SEQ ID NO: 794344 - RNA, 19 nt, Artificial Sequence
  Description of Artificial Sequence: Synthetic oligonucleotide
aaccauuaagccgagcagc

SEQ ID NO: 794345 - RNA, 19 nt, Artificial Sequence
  Description of Artificial Sequence: Synthetic oligonucleotide
agguccaaagaauugcugc

SEQ ID NO: 794346 - RNA, 19 nt, Artificial Sequence
  Description of Artificial Sequence: Synthetic oligonucleotide
aaggagaacugccucgccc

SEQ ID NO: 794347 - RNA, 19 nt, Artificial Sequence
  Description of Artificial Sequence: Synthetic oligonucleotide
guaugggaaaaucucaccg

SEQ ID NO: 794348 - RNA, 19 nt, Artificial Sequence
  Description of Artificial Sequence: Synthetic oligonucleotide
uguauggucaaccugcccu

SEQ ID NO: 794349 - RNA, 19 nt, Artificial Sequence
  Description of Artificial Sequence: Synthetic oligonucleotide
aacacgaguccucuagucg

SEQ ID NO: 794350 - RNA, 19 nt, Artificial Sequence
  Description of Artificial Sequence: Synthetic oligonucleotide
uucucuaacccaauaacca

SEQ ID NO: 794351 - RNA, 19 nt, Artificial Sequence
  Description of Artificial Sequence: Synthetic oligonucleotide
uggauagucccaaugaugu

SEQ ID NO: 794352 - RNA, 19 nt, Artificial Sequence
  Description of Artificial Sequence: Synthetic oligonucleotide
aaagaauugcugcccacag

SEQ ID NO: 794353 - RNA, 19 nt, Artificial Sequence
  Description of Artificial Sequence: Synthetic oligonucleotide
gaauguauggcugacccgg

SEQ ID NO: 794354 - RNA, 19 nt, Artificial Sequence
  Description of Artificial Sequence: Synthetic oligonucleotide
augggaaaaucucaccgcc

SEQ ID NO: 794355 - RNA, 19 nt, Artificial Sequence
  Description of Artificial Sequence: Synthetic oligonucleotide
uagaguauggucuuggcuc

SEQ ID NO: 794356 - RNA, 19 nt, Artificial Sequence
  Description of Artificial Sequence: Synthetic oligonucleotide
auucucuaacccaauaacc

SEQ ID NO: 794357 - RNA, 19 nt, Artificial Sequence
  Description of Artificial Sequence: Synthetic oligonucleotide
uaacccaauaaccaccacc

SEQ ID NO: 794358 - RNA, 19 nt, Artificial Sequence
  Description of Artificial Sequence: Synthetic oligonucleotide
ugcugaauggaguaaagcu

SEQ ID NO: 794359 - RNA, 19 nt, Artificial Sequence
  Description of Artificial Sequence: Synthetic oligonucleotide
acguaggcugcucagaaac

SEQ ID NO: 794360 - RNA, 19 nt, Artificial Sequence
  Description of Artificial Sequence: Synthetic oligonucleotide
gauauugaugaggucaucc

SEQ ID NO: 794361 - RNA, 19 nt, Artificial Sequence
  Description of Artificial Sequence: Synthetic oligonucleotide
cuuagacuugaccaugucg

SEQ ID NO: 794362 - RNA, 19 nt, Artificial Sequence
  Description of Artificial Sequence: Synthetic oligonucleotide
ucaagggaaccauuaagcc

SEQ ID NO: 794363 - RNA, 19 nt, Artificial Sequence
  Description of Artificial Sequence: Synthetic oligonucleotide
aaacuuggcaugguagcgc

SEQ ID NO: 794364 - RNA, 19 nt, Artificial Sequence
  Description of Artificial Sequence: Synthetic oligonucleotide
aauaaccaccaccagguau

SEQ ID NO: 794365 - RNA, 19 nt, Artificial Sequence
  Description of Artificial Sequence: Synthetic oligonucleotide
uuggugagcaccaacacau

SEQ ID NO: 794366 - RNA, 19 nt, Artificial Sequence
  Description of Artificial Sequence: Synthetic oligonucleotide
aguaccagaaucugccggg

SEQ ID NO: 794367 - RNA, 19 nt, Artificial Sequence
  Description of Artificial Sequence: Synthetic oligonucleotide
aaguagacggucuguaaca

SEQ ID NO: 794368 - RNA, 19 nt, Artificial Sequence
  Description of Artificial Sequence: Synthetic oligonucleotide
ucuagguccaaagaauugc

SEQ ID NO: 794369 - RNA, 19 nt, Artificial Sequence
  Description of Artificial Sequence: Synthetic oligonucleotide
cugaauggaguaaagcuug

SEQ ID NO: 794370 - RNA, 19 nt, Artificial Sequence
  Description of Artificial Sequence: Synthetic oligonucleotide
uaugggaaaaucucaccgc

SEQ ID NO: 794371 - RNA, 19 nt, Artificial Sequence
  Description of Artificial Sequence: Synthetic oligonucleotide
cuuguguagaggcucaccc

SEQ ID NO: 794372 - RNA, 19 nt, Artificial Sequence
  Description of Artificial Sequence: Synthetic oligonucleotide
agacucuuagaguaugguc

SEQ ID NO: 794373 - RNA, 19 nt, Artificial Sequence
  Description of Artificial Sequence: Synthetic oligonucleotide
uagacggucuguaacaggu

SEQ ID NO: 794374 - RNA, 19 nt, Artificial Sequence
  Description of Artificial Sequence: Synthetic oligonucleotide
uuacguguggagaaguaga

SEQ ID NO: 794375 - RNA, 19 nt, Artificial Sequence
  Description of Artificial Sequence: Synthetic oligonucleotide
agaagguugucugagauga

SEQ ID NO: 794376 - RNA, 19 nt, Artificial Sequence
  Description of Artificial Sequence: Synthetic oligonucleotide
aagaauugcugcccacagg

SEQ ID NO: 794377 - RNA, 19 nt, Artificial Sequence
  Description of Artificial Sequence: Synthetic oligonucleotide
gauaauguagguggucacg

SEQ ID NO: 794378 - RNA, 19 nt, Artificial Sequence
  Description of Artificial Sequence: Synthetic oligonucleotide
ucuaacccaauaaccacca

SEQ ID NO: 794379 - RNA, 19 nt, Artificial Sequence
  Description of Artificial Sequence: Synthetic oligonucleotide
uuagaguauggucuuggcu

SEQ ID NO: 794380 - RNA, 19 nt, Artificial Sequence
  Description of Artificial Sequence: Synthetic oligonucleotide
uacgagaccguccucuucc

SEQ ID NO: 794381 - RNA, 19 nt, Artificial Sequence
  Description of Artificial Sequence: Synthetic oligonucleotide
acacgaguccucuagucgg

SEQ ID NO: 794382 - RNA, 19 nt, Artificial Sequence
  Description of Artificial Sequence: Synthetic oligonucleotide
aacccaauaaccaccacca

SEQ ID NO: 794383 - RNA, 19 nt, Artificial Sequence
  Description of Artificial Sequence: Synthetic oligonucleotide
uuaggucccaaaaggacac

SEQ ID NO: 794384 - RNA, 19 nt, Artificial Sequence
  Description of Artificial Sequence: Synthetic oligonucleotide
uugugguuagcucuugucu

SEQ ID NO: 794385 - RNA, 19 nt, Artificial Sequence
  Description of Artificial Sequence: Synthetic oligonucleotide
cauucucuaacccaauaac

SEQ ID NO: 794386 - RNA, 19 nt, Artificial Sequence
  Description of Artificial Sequence: Synthetic oligonucleotide
ucuuagaguauggucuugg

SEQ ID NO: 794387 - RNA, 19 nt, Artificial Sequence
  Description of Artificial Sequence: Synthetic oligonucleotide
ucaaccugcccucagucca

SEQ ID NO: 794388 - RNA, 19 nt, Artificial Sequence
  Description of Artificial Sequence: Synthetic oligonucleotide
ucggaagacucuuagagua

SEQ ID NO: 794389 - RNA, 19 nt, Artificial Sequence
  Description of Artificial Sequence: Synthetic oligonucleotide
uggaguaaagcuugaugcc

SEQ ID NO: 794390 - RNA, 19 nt, Artificial Sequence
  Description of Artificial Sequence: Synthetic oligonucleotide
ucccagauauugaugaggu

SEQ ID NO: 794391 - RNA, 19 nt, Artificial Sequence
  Description of Artificial Sequence: Synthetic oligonucleotide
ugacaccuaagcuugcacc

SEQ ID NO: 794392 - RNA, 19 nt, Artificial Sequence
  Description of Artificial Sequence: Synthetic oligonucleotide
gaagucauagccagagucc

SEQ ID NO: 794393 - RNA, 19 nt, Artificial Sequence
  Description of Artificial Sequence: Synthetic oligonucleotide
gaaucugccgggcaggcug

SEQ ID NO: 794394 - RNA, 19 nt, Artificial Sequence
  Description of Artificial Sequence: Synthetic oligonucleotide
ugugugagucagauggcag

SEQ ID NO: 794395 - RNA, 19 nt, Artificial Sequence
  Description of Artificial Sequence: Synthetic oligonucleotide
aaacaggauaauguaggug

SEQ ID NO: 794396 - RNA, 19 nt, Artificial Sequence
  Description of Artificial Sequence: Synthetic oligonucleotide
cauuaagccgagcagcuac

SEQ ID NO: 794397 - RNA, 19 nt, Artificial Sequence
  Description of Artificial Sequence: Synthetic oligonucleotide
cauggaaucgcucccaguc

SEQ ID NO: 794398 - RNA, 19 nt, Artificial Sequence
  Description of Artificial Sequence: Synthetic oligonucleotide
gauagucccaaugauguca

SEQ ID NO: 794399 - RNA, 19 nt, Artificial Sequence
  Description of Artificial Sequence: Synthetic oligonucleotide
aggacacacaucccuggcc

SEQ ID NO: 794400 - RNA, 19 nt, Artificial Sequence
  Description of Artificial Sequence: Synthetic oligonucleotide
ggaggugacaucuccacgg

SEQ ID NO: 794401 - RNA, 19 nt, Artificial Sequence
  Description of Artificial Sequence: Synthetic oligonucleotide
gucagcauggaaucgcucc

SEQ ID NO: 794402 - RNA, 19 nt, Artificial Sequence
  Description of Artificial Sequence: Synthetic oligonucleotide
agucccaaugaugucaggg

SEQ ID NO: 794403 - RNA, 19 nt, Artificial Sequence
  Description of Artificial Sequence: Synthetic oligonucleotide
gacggucuguaacaggucc

SEQ ID NO: 794404 - RNA, 19 nt, Artificial Sequence
  Description of Artificial Sequence: Synthetic oligonucleotide
gcaaacaggauaauguagg

SEQ ID NO: 794405 - RNA, 19 nt, Artificial Sequence
  Description of Artificial Sequence: Synthetic oligonucleotide
acggugagcgaauguaugg

SEQ ID NO: 794406 - RNA, 19 nt, Artificial Sequence
  Description of Artificial Sequence: Synthetic oligonucleotide
ugagucagauggcaggcca

SEQ ID NO: 794407 - RNA, 19 nt, Artificial Sequence
  Description of Artificial Sequence: Synthetic oligonucleotide
uccucuuugaagugcacgu

SEQ ID NO: 794408 - RNA, 19 nt, Artificial Sequence
  Description of Artificial Sequence: Synthetic oligonucleotide
uguaacagguccccguagu

SEQ ID NO: 794409 - RNA, 19 nt, Artificial Sequence
  Description of Artificial Sequence: Synthetic oligonucleotide
ucuugagaagccuggggca

SEQ ID NO: 794410 - RNA, 19 nt, Artificial Sequence
  Description of Artificial Sequence: Synthetic oligonucleotide
aaucucaccgccauugagu

SEQ ID NO: 794411 - RNA, 19 nt, Artificial Sequence
  Description of Artificial Sequence: Synthetic oligonucleotide
caaguagacggucuguaac

SEQ ID NO: 794412 - RNA, 19 nt, Artificial Sequence
  Description of Artificial Sequence: Synthetic oligonucleotide
caagucggucaccugaagg

SEQ ID NO: 794413 - RNA, 19 nt, Artificial Sequence
  Description of Artificial Sequence: Synthetic oligonucleotide
augucgaucuuacgugugg

SEQ ID NO: 794414 - RNA, 19 nt, Artificial Sequence
  Description of Artificial Sequence: Synthetic oligonucleotide
gugugagucagauggcagg

SEQ ID NO: 794415 - RNA, 19 nt, Artificial Sequence
  Description of Artificial Sequence: Synthetic oligonucleotide
uccucuagucggaagacuc

SEQ ID NO: 794416 - RNA, 19 nt, Artificial Sequence
  Description of Artificial Sequence: Synthetic oligonucleotide
aaaggcaacacgaguccuc

SEQ ID NO: 794417 - RNA, 19 nt, Artificial Sequence
  Description of Artificial Sequence: Synthetic oligonucleotide
cuagucggaagacucuuag

SEQ ID NO: 794418 - RNA, 19 nt, Artificial Sequence
  Description of Artificial Sequence: Synthetic oligonucleotide
ugagcaccaacacauucuc

SEQ ID NO: 794419 - RNA, 19 nt, Artificial Sequence
  Description of Artificial Sequence: Synthetic oligonucleotide
ugagcgaauguauggcuga

SEQ ID NO: 794420 - RNA, 19 nt, Artificial Sequence
  Description of Artificial Sequence: Synthetic oligonucleotide
gaagacucuuagaguaugg

SEQ ID NO: 794421 - RNA, 19 nt, Artificial Sequence
  Description of Artificial Sequence: Synthetic oligonucleotide
gacaccuaagcuugcacca

SEQ ID NO: 794422 - RNA, 19 nt, Artificial Sequence
  Description of Artificial Sequence: Synthetic oligonucleotide
aucucaccgccauugagug

SEQ ID NO: 794423 - RNA, 19 nt, Artificial Sequence
  Description of Artificial Sequence: Synthetic oligonucleotide
ugguguacgagaccguccu

SEQ ID NO: 794424 - RNA, 19 nt, Artificial Sequence
  Description of Artificial Sequence: Synthetic oligonucleotide
ucauucugccagaaguuuc

SEQ ID NO: 794425 - RNA, 19 nt, Artificial Sequence
  Description of Artificial Sequence: Synthetic oligonucleotide
aagaccagggugauggugu

SEQ ID NO: 794426 - RNA, 19 nt, Artificial Sequence
  Description of Artificial Sequence: Synthetic oligonucleotide
uuagcucuugucuccaguc

SEQ ID NO: 794427 - RNA, 19 nt, Artificial Sequence
  Description of Artificial Sequence: Synthetic oligonucleotide
agcaccaacacauucucua

SEQ ID NO: 794428 - RNA, 19 nt, Artificial Sequence
  Description of Artificial Sequence: Synthetic oligonucleotide
uccagucuagguccaaaga

SEQ ID NO: 794429 - RNA, 19 nt, Artificial Sequence
  Description of Artificial Sequence: Synthetic oligonucleotide
agguaugggaaaaucucac

SEQ ID NO: 794430 - RNA, 19 nt, Artificial Sequence
  Description of Artificial Sequence: Synthetic oligonucleotide
uuuggugugcgcagggcac

SEQ ID NO: 794431 - RNA, 19 nt, Artificial Sequence
  Description of Artificial Sequence: Synthetic oligonucleotide
ugcacguggaccagguucu

SEQ ID NO: 794432 - RNA, 19 nt, Artificial Sequence
  Description of Artificial Sequence: Synthetic oligonucleotide
cuuagaguauggucuuggc

SEQ ID NO: 794433 - RNA, 19 nt, Artificial Sequence
  Description of Artificial Sequence: Synthetic oligonucleotide
auacacuaggcugagcuca

SEQ ID NO: 794434 - RNA, 19 nt, Artificial Sequence
  Description of Artificial Sequence: Synthetic oligonucleotide
ucguccaaccacgaugagg

SEQ ID NO: 794435 - RNA, 19 nt, Artificial Sequence
  Description of Artificial Sequence: Synthetic oligonucleotide
gcuaccugugaguacaucc

SEQ ID NO: 794436 - RNA, 19 nt, Artificial Sequence
  Description of Artificial Sequence: Synthetic oligonucleotide
agggucagcauggaaucgc

SEQ ID NO: 794437 - RNA, 19 nt, Artificial Sequence
  Description of Artificial Sequence: Synthetic oligonucleotide
agguugucugagaugacac

SEQ ID NO: 794438 - RNA, 19 nt, Artificial Sequence
  Description of Artificial Sequence: Synthetic oligonucleotide
aagacucuuagaguauggu

SEQ ID NO: 794439 - RNA, 19 nt, Artificial Sequence
  Description of Artificial Sequence: Synthetic oligonucleotide
ugaguguggcugaugucug

SEQ ID NO: 794440 - RNA, 19 nt, Artificial Sequence
  Description of Artificial Sequence: Synthetic oligonucleotide
caggaagugguacagguga

SEQ ID NO: 794441 - RNA, 19 nt, Artificial Sequence
  Description of Artificial Sequence: Synthetic oligonucleotide
accacgaugagguugccuu

SEQ ID NO: 794442 - RNA, 19 nt, Artificial Sequence
  Description of Artificial Sequence: Synthetic oligonucleotide
ucccaaugaugucaggguc

SEQ ID NO: 794443 - RNA, 19 nt, Artificial Sequence
  Description of Artificial Sequence: Synthetic oligonucleotide
uucggaguuuccugagucc

SEQ ID NO: 794444 - RNA, 19 nt, Artificial Sequence
  Description of Artificial Sequence: Synthetic oligonucleotide
ugagcucacugccaaaguu

SEQ ID NO: 794445 - RNA, 19 nt, Artificial Sequence
  Description of Artificial Sequence: Synthetic oligonucleotide
aaaaggcaacacgaguccu

SEQ ID NO: 794446 - RNA, 19 nt, Artificial Sequence
  Description of Artificial Sequence: Synthetic oligonucleotide
ucgaucuuacguguggaga

SEQ ID NO: 794447 - RNA, 19 nt, Artificial Sequence
  Description of Artificial Sequence: Synthetic oligonucleotide
agccgagcagcuacaaucc

SEQ ID NO: 794448 - RNA, 19 nt, Artificial Sequence
  Description of Artificial Sequence: Synthetic oligonucleotide
gaccaugucgaucuuacgu

SEQ ID NO: 794449 - RNA, 19 nt, Artificial Sequence
  Description of Artificial Sequence: Synthetic oligonucleotide
uccccacuuagacuugacc

SEQ ID NO: 794450 - RNA, 19 nt, Artificial Sequence
  Description of Artificial Sequence: Synthetic oligonucleotide
uccucguugcugcagcaga

SEQ ID NO: 794451 - RNA, 19 nt, Artificial Sequence
  Description of Artificial Sequence: Synthetic oligonucleotide
ugggaaaaucucaccgcca

SEQ ID NO: 794452 - RNA, 19 nt, Artificial Sequence
  Description of Artificial Sequence: Synthetic oligonucleotide
guaggcaaacaggauaaug

SEQ ID NO: 794453 - RNA, 19 nt, Artificial Sequence
  Description of Artificial Sequence: Synthetic oligonucleotide
ugacccggcuaccugugag

SEQ ID NO: 794454 - RNA, 19 nt, Artificial Sequence
  Description of Artificial Sequence: Synthetic oligonucleotide
gaguaaagcuugaugccug

SEQ ID NO: 794455 - RNA, 19 nt, Artificial Sequence
  Description of Artificial Sequence: Synthetic oligonucleotide
guagacggucuguaacagg

SEQ ID NO: 794456 - RNA, 19 nt, Artificial Sequence
  Description of Artificial Sequence: Synthetic oligonucleotide
gcgaauguauggcugaccc

SEQ ID NO: 794457 - RNA, 19 nt, Artificial Sequence
  Description of Artificial Sequence: Synthetic oligonucleotide
ggcggcugaagucauagcc

SEQ ID NO: 794458 - RNA, 19 nt, Artificial Sequence
  Description of Artificial Sequence: Synthetic oligonucleotide
uacguguggagaaguagau

SEQ ID NO: 794459 - RNA, 19 nt, Artificial Sequence
  Description of Artificial Sequence: Synthetic oligonucleotide
gcucucagggcugugaugg

SEQ ID NO: 794460 - RNA, 19 nt, Artificial Sequence
  Description of Artificial Sequence: Synthetic oligonucleotide
auggauagucccaaugaug

SEQ ID NO: 794461 - RNA, 19 nt, Artificial Sequence
  Description of Artificial Sequence: Synthetic oligonucleotide
aguagacggucuguaacag

SEQ ID NO: 794462 - RNA, 19 nt, Artificial Sequence
  Description of Artificial Sequence: Synthetic oligonucleotide
uggguuguauggucaaccu

SEQ ID NO: 794463 - RNA, 19 nt, Artificial Sequence
  Description of Artificial Sequence: Synthetic oligonucleotide
augguagcgcuggaagacc

SEQ ID NO: 794464 - RNA, 19 nt, Artificial Sequence
  Description of Artificial Sequence: Synthetic oligonucleotide
gcuucguccaaccacgaug

SEQ ID NO: 794465 - RNA, 19 nt, Artificial Sequence
  Description of Artificial Sequence: Synthetic oligonucleotide
aguuuccugaguccuggca

SEQ ID NO: 794466 - RNA, 19 nt, Artificial Sequence
  Description of Artificial Sequence: Synthetic oligonucleotide
ugaccaugucgaucuuacg

SEQ ID NO: 794467 - RNA, 19 nt, Artificial Sequence
  Description of Artificial Sequence: Synthetic oligonucleotide
cccaauaaccaccaccagg

SEQ ID NO: 794468 - RNA, 19 nt, Artificial Sequence
  Description of Artificial Sequence: Synthetic oligonucleotide
gguaugggaaaaucucacc

SEQ ID NO: 794469 - RNA, 19 nt, Artificial Sequence
  Description of Artificial Sequence: Synthetic oligonucleotide
agcgaauguauggcugacc

SEQ ID NO: 794470 - RNA, 19 nt, Artificial Sequence
  Description of Artificial Sequence: Synthetic oligonucleotide
uuguauggucaaccugccc

SEQ ID NO: 794471 - RNA, 19 nt, Artificial Sequence
  Description of Artificial Sequence: Synthetic oligonucleotide
agcguuguccaguaccaga

SEQ ID NO: 794472 - RNA, 19 nt, Artificial Sequence
  Description of Artificial Sequence: Synthetic oligonucleotide
agacuugaccaugucgauc

SEQ ID NO: 794473 - RNA, 19 nt, Artificial Sequence
  Description of Artificial Sequence: Synthetic oligonucleotide
gaucuuacguguggagaag

SEQ ID NO: 794474 - RNA, 19 nt, Artificial Sequence
  Description of Artificial Sequence: Synthetic oligonucleotide
ggcaacacgaguccucuag

SEQ ID NO: 794475 - RNA, 19 nt, Artificial Sequence
  Description of Artificial Sequence: Synthetic oligonucleotide
cuacaauccuccuguccag

SEQ ID NO: 794476 - RNA, 19 nt, Artificial Sequence
  Description of Artificial Sequence: Synthetic oligonucleotide
uguauggcugacccggcua

SEQ ID NO: 794477 - RNA, 19 nt, Artificial Sequence
  Description of Artificial Sequence: Synthetic oligonucleotide
uggaaucgcucccagucau

SEQ ID NO: 794478 - RNA, 19 nt, Artificial Sequence
  Description of Artificial Sequence: Synthetic oligonucleotide
gggcacauacacuaggcug

SEQ ID NO: 794479 - RNA, 19 nt, Artificial Sequence
  Description of Artificial Sequence: Synthetic oligonucleotide
cuuugaagugcacguggac

SEQ ID NO: 794480 - RNA, 19 nt, Artificial Sequence
  Description of Artificial Sequence: Synthetic oligonucleotide
aguccucuagucggaagac

SEQ ID NO: 794481 - RNA, 19 nt, Artificial Sequence
  Description of Artificial Sequence: Synthetic oligonucleotide
auagucccaaugaugucag

SEQ ID NO: 794482 - RNA, 19 nt, Artificial Sequence
  Description of Artificial Sequence: Synthetic oligonucleotide
augguguacgagaccgucc

SEQ ID NO: 794483 - RNA, 19 nt, Artificial Sequence
  Description of Artificial Sequence: Synthetic oligonucleotide
cuccuccugguacacacgc

SEQ ID NO: 794484 - RNA, 19 nt, Artificial Sequence
  Description of Artificial Sequence: Synthetic oligonucleotide
ugcccaaguagacggucug

SEQ ID NO: 794485 - RNA, 19 nt, Artificial Sequence
  Description of Artificial Sequence: Synthetic oligonucleotide
gucgaucuuacguguggag

SEQ ID NO: 794486 - RNA, 19 nt, Artificial Sequence
  Description of Artificial Sequence: Synthetic oligonucleotide
gaagaccagggugauggug

SEQ ID NO: 794487 - RNA, 19 nt, Artificial Sequence
  Description of Artificial Sequence: Synthetic oligonucleotide
cucaugcugauggauaguc

SEQ ID NO: 794488 - RNA, 19 nt, Artificial Sequence
  Description of Artificial Sequence: Synthetic oligonucleotide
uggucugaucaauguacac

SEQ ID NO: 794489 - RNA, 19 nt, Artificial Sequence
  Description of Artificial Sequence: Synthetic oligonucleotide
cuugaugccugugcugcgg

SEQ ID NO: 794490 - RNA, 19 nt, Artificial Sequence
  Description of Artificial Sequence: Synthetic oligonucleotide
auguaggcaaacaggauaa

SEQ ID NO: 794491 - RNA, 19 nt, Artificial Sequence
  Description of Artificial Sequence: Synthetic oligonucleotide
ucggaguuuccugaguccu

SEQ ID NO: 794492 - RNA, 19 nt, Artificial Sequence
  Description of Artificial Sequence: Synthetic oligonucleotide
cauacacuaggcugagcuc

SEQ ID NO: 794493 - RNA, 19 nt, Artificial Sequence
  Description of Artificial Sequence: Synthetic oligonucleotide
cugcugaauggaguaaagc

SEQ ID NO: 794494 - RNA, 19 nt, Artificial Sequence
  Description of Artificial Sequence: Synthetic oligonucleotide
caugagccgggcacguagg

SEQ ID NO: 794495 - RNA, 19 nt, Artificial Sequence
  Description of Artificial Sequence: Synthetic oligonucleotide
uugcccaaguagacggucu

SEQ ID NO: 794496 - RNA, 19 nt, Artificial Sequence
  Description of Artificial Sequence: Synthetic oligonucleotide
agcauggaaucgcucccag

SEQ ID NO: 794497 - RNA, 19 nt, Artificial Sequence
  Description of Artificial Sequence: Synthetic oligonucleotide
cacggugagcgaauguaug

SEQ ID NO: 794498 - RNA, 19 nt, Artificial Sequence
  Description of Artificial Sequence: Synthetic oligonucleotide
caugucgaucuuacgugug

SEQ ID NO: 794499 - RNA, 19 nt, Artificial Sequence
  Description of Artificial Sequence: Synthetic oligonucleotide
gcugcuucguccaaccacg

SEQ ID NO: 794500 - RNA, 19 nt, Artificial Sequence
  Description of Artificial Sequence: Synthetic oligonucleotide
agggcacauacacuaggcu

SEQ ID NO: 794501 - RNA, 19 nt, Artificial Sequence
  Description of Artificial Sequence: Synthetic oligonucleotide
uagucggaagacucuuaga

SEQ ID NO: 794502 - RNA, 19 nt, Artificial Sequence
  Description of Artificial Sequence: Synthetic oligonucleotide
agagagugcagagccccac

SEQ ID NO: 794503 - RNA, 19 nt, Artificial Sequence
  Description of Artificial Sequence: Synthetic oligonucleotide
caacacgaguccucuaguc

SEQ ID NO: 794504 - RNA, 19 nt, Artificial Sequence
  Description of Artificial Sequence: Synthetic oligonucleotide
acggucuguaacagguccc

SEQ ID NO: 794505 - RNA, 19 nt, Artificial Sequence
  Description of Artificial Sequence: Synthetic oligonucleotide
ccaaccacgaugagguugc

SEQ ID NO: 794506 - RNA, 19 nt, Artificial Sequence
  Description of Artificial Sequence: Synthetic oligonucleotide
guccaaagaauugcugccc

SEQ ID NO: 794507 - RNA, 19 nt, Artificial Sequence
  Description of Artificial Sequence: Synthetic oligonucleotide
cauagccagagucccuggc

SEQ ID NO: 794508 - RNA, 19 nt, Artificial Sequence
  Description of Artificial Sequence: Synthetic oligonucleotide
cagucauucugccagaagu

SEQ ID NO: 794509 - RNA, 19 nt, Artificial Sequence
  Description of Artificial Sequence: Synthetic oligonucleotide
ugucgaucuuacgugugga

SEQ ID NO: 794510 - RNA, 19 nt, Artificial Sequence
  Description of Artificial Sequence: Synthetic oligonucleotide
acaccuaagcuugcaccac

SEQ ID NO: 794511 - RNA, 19 nt, Artificial Sequence
  Description of Artificial Sequence: Synthetic oligonucleotide
cucaccccacuguacuucc

SEQ ID NO: 794512 - RNA, 19 nt, Artificial Sequence
  Description of Artificial Sequence: Synthetic oligonucleotide
ucuagucggaagacucuua

SEQ ID NO: 794513 - RNA, 19 nt, Artificial Sequence
  Description of Artificial Sequence: Synthetic oligonucleotide
aaccacugcuaaugacaca

SEQ ID NO: 794514 - RNA, 19 nt, Artificial Sequence
  Description of Artificial Sequence: Synthetic oligonucleotide
gucuagguccaaagaauug

SEQ ID NO: 794515 - RNA, 19 nt, Artificial Sequence
  Description of Artificial Sequence: Synthetic oligonucleotide
gaugagcuccgcaaugcca

SEQ ID NO: 794516 - RNA, 19 nt, Artificial Sequence
  Description of Artificial Sequence: Synthetic oligonucleotide
guauggcugacccggcuac

SEQ ID NO: 794517 - RNA, 19 nt, Artificial Sequence
  Description of Artificial Sequence: Synthetic oligonucleotide
agauauugaugaggucauc

SEQ ID NO: 794518 - RNA, 19 nt, Artificial Sequence
  Description of Artificial Sequence: Synthetic oligonucleotide
gggcgaguggguuguaugg

SEQ ID NO: 794519 - RNA, 19 nt, Artificial Sequence
  Description of Artificial Sequence: Synthetic oligonucleotide
guuguauggucaaccugcc

SEQ ID NO: 794520 - RNA, 19 nt, Artificial Sequence
  Description of Artificial Sequence: Synthetic oligonucleotide
aggcucaccccacuguacu

SEQ ID NO: 794521 - RNA, 19 nt, Artificial Sequence
  Description of Artificial Sequence: Synthetic oligonucleotide
guagaggcucaccccacug

SEQ ID NO: 794522 - RNA, 19 nt, Artificial Sequence
  Description of Artificial Sequence: Synthetic oligonucleotide
ugaguacaucccagaggca

SEQ ID NO: 794523 - RNA, 19 nt, Artificial Sequence
  Description of Artificial Sequence: Synthetic oligonucleotide
gugagcgaauguauggcug

SEQ ID NO: 794524 - RNA, 19 nt, Artificial Sequence
  Description of Artificial Sequence: Synthetic oligonucleotide
cacuaggcugagcucacug

SEQ ID NO: 794525 - RNA, 19 nt, Artificial Sequence
  Description of Artificial Sequence: Synthetic oligonucleotide
ccaacacauucucuaaccc

SEQ ID NO: 794526 - RNA, 19 nt, Artificial Sequence
  Description of Artificial Sequence: Synthetic oligonucleotide
uccccguaguuuagguccc

SEQ ID NO: 794527 - RNA, 19 nt, Artificial Sequence
  Description of Artificial Sequence: Synthetic oligonucleotide
uagacuugaccaugucgau

SEQ ID NO: 794528 - RNA, 19 nt, Artificial Sequence
  Description of Artificial Sequence: Synthetic oligonucleotide
accauuaagccgagcagcu

SEQ ID NO: 794529 - RNA, 19 nt, Artificial Sequence
  Description of Artificial Sequence: Synthetic oligonucleotide
gacacacaucccuggccgc

SEQ ID NO: 794530 - RNA, 19 nt, Artificial Sequence
  Description of Artificial Sequence: Synthetic oligonucleotide
caaagaauugcugcccaca

SEQ ID NO: 794531 - RNA, 19 nt, Artificial Sequence
  Description of Artificial Sequence: Synthetic oligonucleotide
gaugacaccuaagcuugca

SEQ ID NO: 794532 - RNA, 19 nt, Artificial Sequence
  Description of Artificial Sequence: Synthetic oligonucleotide
gaauugcugcccacaggcc

SEQ ID NO: 794533 - RNA, 19 nt, Artificial Sequence
  Description of Artificial Sequence: Synthetic oligonucleotide
aggcggcugaagucauagc

SEQ ID NO: 794534 - RNA, 19 nt, Artificial Sequence
  Description of Artificial Sequence: Synthetic oligonucleotide
ggucugaucaauguacaca

SEQ ID NO: 794535 - RNA, 19 nt, Artificial Sequence
  Description of Artificial Sequence: Synthetic oligonucleotide
cuagggugcaggagcauga

SEQ ID NO: 794536 - RNA, 19 nt, Artificial Sequence
  Description of Artificial Sequence: Synthetic oligonucleotide
uccugcugaauggaguaaa

SEQ ID NO: 794537 - RNA, 19 nt, Artificial Sequence
  Description of Artificial Sequence: Synthetic oligonucleotide
uaagccgagcagcuacaau

SEQ ID NO: 794538 - RNA, 19 nt, Artificial Sequence
  Description of Artificial Sequence: Synthetic oligonucleotide
cuguaacagguccccguag

SEQ ID NO: 794539 - RNA, 19 nt, Artificial Sequence
  Description of Artificial Sequence: Synthetic oligonucleotide
acccaauaaccaccaccag

SEQ ID NO: 794540 - RNA, 19 nt, Artificial Sequence
  Description of Artificial Sequence: Synthetic oligonucleotide
agucuagguccaaagaauu

SEQ ID NO: 794541 - RNA, 19 nt, Artificial Sequence
  Description of Artificial Sequence: Synthetic oligonucleotide
cacgaugagguugccuugc

SEQ ID NO: 794542 - RNA, 19 nt, Artificial Sequence
  Description of Artificial Sequence: Synthetic oligonucleotide
agaugacaccuaagcuugc

SEQ ID NO: 794543 - RNA, 19 nt, Artificial Sequence
  Description of Artificial Sequence: Synthetic oligonucleotide
ucuuugaguguggcugaug

SEQ ID NO: 794544 - RNA, 19 nt, Artificial Sequence
  Description of Artificial Sequence: Synthetic oligonucleotide
gguuucggaguuuccugag

SEQ ID NO: 794545 - RNA, 19 nt, Artificial Sequence
  Description of Artificial Sequence: Synthetic oligonucleotide
ggugagcaccaacacauuc

SEQ ID NO: 794546 - RNA, 19 nt, Artificial Sequence
  Description of Artificial Sequence: Synthetic oligonucleotide
ugcugauggauagucccaa

SEQ ID NO: 794547 - RNA, 19 nt, Artificial Sequence
  Description of Artificial Sequence: Synthetic oligonucleotide
auggucaaccugcccucag

SEQ ID NO: 794548 - RNA, 19 nt, Artificial Sequence
  Description of Artificial Sequence: Synthetic oligonucleotide
aucuuacguguggagaagu

SEQ ID NO: 794549 - RNA, 19 nt, Artificial Sequence
  Description of Artificial Sequence: Synthetic oligonucleotide
gcugcggucccagauauug

SEQ ID NO: 794550 - RNA, 19 nt, Artificial Sequence
  Description of Artificial Sequence: Synthetic oligonucleotide
ggaagacucuuagaguaug

SEQ ID NO: 794551 - RNA, 19 nt, Artificial Sequence
  Description of Artificial Sequence: Synthetic oligonucleotide
ucggucaccugaaggcaaa

SEQ ID NO: 794552 - RNA, 19 nt, Artificial Sequence
  Description of Artificial Sequence: Synthetic oligonucleotide
ugguacaggugagggaggu

SEQ ID NO: 794553 - RNA, 19 nt, Artificial Sequence
  Description of Artificial Sequence: Synthetic oligonucleotide
ggcgaguccccacuuagac

SEQ ID NO: 794554 - RNA, 19 nt, Artificial Sequence
  Description of Artificial Sequence: Synthetic oligonucleotide
aggugacaucuccacggug

SEQ ID NO: 794555 - RNA, 19 nt, Artificial Sequence
  Description of Artificial Sequence: Synthetic oligonucleotide
accgccauugagugugggu

SEQ ID NO: 794556 - RNA, 19 nt, Artificial Sequence
  Description of Artificial Sequence: Synthetic oligonucleotide
uggcgucccacaccuccag

SEQ ID NO: 794557 - RNA, 19 nt, Artificial Sequence
  Description of Artificial Sequence: Synthetic oligonucleotide
uguacgagaccguccucuu

SEQ ID NO: 794558 - RNA, 19 nt, Artificial Sequence
  Description of Artificial Sequence: Synthetic oligonucleotide
uuaagccgagcagcuacaa

SEQ ID NO: 794559 - RNA, 19 nt, Artificial Sequence
  Description of Artificial Sequence: Synthetic oligonucleotide
auuaagccgagcagcuaca

SEQ ID NO: 794560 - RNA, 19 nt, Artificial Sequence
  Description of Artificial Sequence: Synthetic oligonucleotide
caaacaggauaauguaggu

SEQ ID NO: 794561 - RNA, 19 nt, Artificial Sequence
  Description of Artificial Sequence: Synthetic oligonucleotide
agucauucugccagaaguu

SEQ ID NO: 794562 - RNA, 19 nt, Artificial Sequence
  Description of Artificial Sequence: Synthetic oligonucleotide
cuguacuucccaggcacac

SEQ ID NO: 794563 - RNA, 19 nt, Artificial Sequence
  Description of Artificial Sequence: Synthetic oligonucleotide
ccccacuuagacuugacca

SEQ ID NO: 794564 - RNA, 19 nt, Artificial Sequence
  Description of Artificial Sequence: Synthetic oligonucleotide
acaggauaauguagguggu

SEQ ID NO: 794565 - RNA, 19 nt, Artificial Sequence
  Description of Artificial Sequence: Synthetic oligonucleotide
ggguuguauggucaaccug

SEQ ID NO: 794566 - RNA, 19 nt, Artificial Sequence
  Description of Artificial Sequence: Synthetic oligonucleotide
aggaagugguacaggugag

SEQ ID NO: 794567 - RNA, 19 nt, Artificial Sequence
  Description of Artificial Sequence: Synthetic oligonucleotide
agaaaucaagggaaccauu

SEQ ID NO: 794568 - RNA, 19 nt, Artificial Sequence
  Description of Artificial Sequence: Synthetic oligonucleotide
agguccccguaguuuaggu

SEQ ID NO: 794569 - RNA, 19 nt, Artificial Sequence
  Description of Artificial Sequence: Synthetic oligonucleotide
ugugggugucaggccaaag

SEQ ID NO: 794570 - RNA, 19 nt, Artificial Sequence
  Description of Artificial Sequence: Synthetic oligonucleotide
ccaaaaggacacacauccc

SEQ ID NO: 794571 - RNA, 19 nt, Artificial Sequence
  Description of Artificial Sequence: Synthetic oligonucleotide
uggcugacccggcuaccug

SEQ ID NO: 794572 - RNA, 19 nt, Artificial Sequence
  Description of Artificial Sequence: Synthetic oligonucleotide
guauggucuuggcucccug

SEQ ID NO: 794573 - RNA, 19 nt, Artificial Sequence
  Description of Artificial Sequence: Synthetic oligonucleotide
guucucggcccgaaggcug

SEQ ID NO: 794574 - RNA, 19 nt, Artificial Sequence
  Description of Artificial Sequence: Synthetic oligonucleotide
cucguugcugcagcagagc

SEQ ID NO: 794575 - RNA, 19 nt, Artificial Sequence
  Description of Artificial Sequence: Synthetic oligonucleotide
cuggccgccagucaccaga

SEQ ID NO: 794576 - RNA, 19 nt, Artificial Sequence
  Description of Artificial Sequence: Synthetic oligonucleotide
gucccaaugaugucagggu

SEQ ID NO: 794577 - RNA, 19 nt, Artificial Sequence
  Description of Artificial Sequence: Synthetic oligonucleotide
caggauaauguaggugguc

SEQ ID NO: 794578 - RNA, 19 nt, Artificial Sequence
  Description of Artificial Sequence: Synthetic oligonucleotide
ggagcaugagccgggcacg

SEQ ID NO: 794579 - RNA, 19 nt, Artificial Sequence
  Description of Artificial Sequence: Synthetic oligonucleotide
ucccuggccgccagucacc

SEQ ID NO: 794580 - RNA, 19 nt, Artificial Sequence
  Description of Artificial Sequence: Synthetic oligonucleotide
ugcuucguccaaccacgau

SEQ ID NO: 794581 - RNA, 19 nt, Artificial Sequence
  Description of Artificial Sequence: Synthetic oligonucleotide
gucggaagacucuuagagu

SEQ ID NO: 794582 - RNA, 19 nt, Artificial Sequence
  Description of Artificial Sequence: Synthetic oligonucleotide
agacggucuguaacagguc

SEQ ID NO: 794583 - RNA, 19 nt, Artificial Sequence
  Description of Artificial Sequence: Synthetic oligonucleotide
ccaaaccacugcuaaugac

SEQ ID NO: 794584 - RNA, 19 nt, Artificial Sequence
  Description of Artificial Sequence: Synthetic oligonucleotide
ucggcccgaaggcugcagu

SEQ ID NO: 794585 - RNA, 19 nt, Artificial Sequence
  Description of Artificial Sequence: Synthetic oligonucleotide
ccaguaccagaaucugccg

SEQ ID NO: 794586 - RNA, 19 nt, Artificial Sequence
  Description of Artificial Sequence: Synthetic oligonucleotide
aggcagauggcuccaucuu

SEQ ID NO: 794587 - RNA, 19 nt, Artificial Sequence
  Description of Artificial Sequence: Synthetic oligonucleotide
cacguggaccagguucucg

SEQ ID NO: 794588 - RNA, 19 nt, Artificial Sequence
  Description of Artificial Sequence: Synthetic oligonucleotide
ggucaaccugcccucaguc

SEQ ID NO: 794589 - RNA, 19 nt, Artificial Sequence
  Description of Artificial Sequence: Synthetic oligonucleotide
cagauauugaugaggucau

SEQ ID NO: 794590 - RNA, 19 nt, Artificial Sequence
  Description of Artificial Sequence: Synthetic oligonucleotide
cagucuagguccaaagaau

SEQ ID NO: 794591 - RNA, 19 nt, Artificial Sequence
  Description of Artificial Sequence: Synthetic oligonucleotide
guuagcucuugucuccagu

SEQ ID NO: 794592 - RNA, 19 nt, Artificial Sequence
  Description of Artificial Sequence: Synthetic oligonucleotide
ggcgcggccgacuugguga

SEQ ID NO: 794593 - RNA, 19 nt, Artificial Sequence
  Description of Artificial Sequence: Synthetic oligonucleotide
aguauggucuuggcucccu

SEQ ID NO: 794594 - RNA, 19 nt, Artificial Sequence
  Description of Artificial Sequence: Synthetic oligonucleotide
ggggaugagcuccgcaaug

SEQ ID NO: 794595 - RNA, 19 nt, Artificial Sequence
  Description of Artificial Sequence: Synthetic oligonucleotide
ucucaccgccauugagugu

SEQ ID NO: 794596 - RNA, 19 nt, Artificial Sequence
  Description of Artificial Sequence: Synthetic oligonucleotide
cucugaacugcagagggcu

SEQ ID NO: 794597 - RNA, 19 nt, Artificial Sequence
  Description of Artificial Sequence: Synthetic oligonucleotide
gugagcaccaacacauucu

SEQ ID NO: 794598 - RNA, 19 nt, Artificial Sequence
  Description of Artificial Sequence: Synthetic oligonucleotide
gucuguaacagguccccgu

SEQ ID NO: 794599 - RNA, 19 nt, Artificial Sequence
  Description of Artificial Sequence: Synthetic oligonucleotide
gagcgaauguauggcugac

SEQ ID NO: 794600 - RNA, 19 nt, Artificial Sequence
  Description of Artificial Sequence: Synthetic oligonucleotide
gugagucagauggcaggcc

SEQ ID NO: 794601 - RNA, 19 nt, Artificial Sequence
  Description of Artificial Sequence: Synthetic oligonucleotide
gcgcuggaagaccagggug

SEQ ID NO: 794602 - RNA, 19 nt, Artificial Sequence
  Description of Artificial Sequence: Synthetic oligonucleotide
ggucuuugaguguggcuga

SEQ ID NO: 794603 - RNA, 19 nt, Artificial Sequence
  Description of Artificial Sequence: Synthetic oligonucleotide
cagauggcuccaucuuguc

SEQ ID NO: 794604 - RNA, 19 nt, Artificial Sequence
  Description of Artificial Sequence: Synthetic oligonucleotide
gaagguugucugagaugac

SEQ ID NO: 794605 - RNA, 19 nt, Artificial Sequence
  Description of Artificial Sequence: Synthetic oligonucleotide
ggggcgaguggguuguaug

SEQ ID NO: 794606 - RNA, 19 nt, Artificial Sequence
  Description of Artificial Sequence: Synthetic oligonucleotide
gaggcucaccccacuguac

SEQ ID NO: 794607 - RNA, 19 nt, Artificial Sequence
  Description of Artificial Sequence: Synthetic oligonucleotide
ggaguaaagcuugaugccu

SEQ ID NO: 794608 - RNA, 19 nt, Artificial Sequence
  Description of Artificial Sequence: Synthetic oligonucleotide
cagguccccguaguuuagg

SEQ ID NO: 794609 - RNA, 19 nt, Artificial Sequence
  Description of Artificial Sequence: Synthetic oligonucleotide
cgaauguauggcugacccg

SEQ ID NO: 794610 - RNA, 19 nt, Artificial Sequence
  Description of Artificial Sequence: Synthetic oligonucleotide
auggcugacccggcuaccu

SEQ ID NO: 794611 - RNA, 19 nt, Artificial Sequence
  Description of Artificial Sequence: Synthetic oligonucleotide
caugcgcacagcggccagg

SEQ ID NO: 794612 - RNA, 19 nt, Artificial Sequence
  Description of Artificial Sequence: Synthetic oligonucleotide
guacgagaccguccucuuc

SEQ ID NO: 794613 - RNA, 19 nt, Artificial Sequence
  Description of Artificial Sequence: Synthetic oligonucleotide
acgagaccguccucuuccu

SEQ ID NO: 794614 - RNA, 19 nt, Artificial Sequence
  Description of Artificial Sequence: Synthetic oligonucleotide
uggugagcaccaacacauu

SEQ ID NO: 794615 - RNA, 19 nt, Artificial Sequence
  Description of Artificial Sequence: Synthetic oligonucleotide
ggaccagguucucggcccg

SEQ ID NO: 794616 - RNA, 19 nt, Artificial Sequence
  Description of Artificial Sequence: Synthetic oligonucleotide
gcccgaggagaccuccucg

SEQ ID NO: 794617 - RNA, 19 nt, Artificial Sequence
  Description of Artificial Sequence: Synthetic oligonucleotide
uggccgccagucaccagaa

SEQ ID NO: 794618 - RNA, 19 nt, Artificial Sequence
  Description of Artificial Sequence: Synthetic oligonucleotide
gcuagggugcaggagcaug

SEQ ID NO: 794619 - RNA, 19 nt, Artificial Sequence
  Description of Artificial Sequence: Synthetic oligonucleotide
ggugagggaggugacaucu

SEQ ID NO: 794620 - RNA, 19 nt, Artificial Sequence
  Description of Artificial Sequence: Synthetic oligonucleotide
ugcccugaguggcccugca

SEQ ID NO: 794621 - RNA, 19 nt, Artificial Sequence
  Description of Artificial Sequence: Synthetic oligonucleotide
ggucuguaacagguccccg

SEQ ID NO: 794622 - RNA, 19 nt, Artificial Sequence
  Description of Artificial Sequence: Synthetic oligonucleotide
guguacgagaccguccucu

SEQ ID NO: 794623 - RNA, 19 nt, Artificial Sequence
  Description of Artificial Sequence: Synthetic oligonucleotide
ccucguugcugcagcagag

SEQ ID NO: 794624 - RNA, 19 nt, Artificial Sequence
  Description of Artificial Sequence: Synthetic oligonucleotide
ggugagcgaauguauggcu

SEQ ID NO: 794625 - RNA, 19 nt, Artificial Sequence
  Description of Artificial Sequence: Synthetic oligonucleotide
cacgaguccucuagucgga

SEQ ID NO: 794626 - RNA, 19 nt, Artificial Sequence
  Description of Artificial Sequence: Synthetic oligonucleotide
uggugugcgcagggcacug

SEQ ID NO: 794627 - RNA, 19 nt, Artificial Sequence
  Description of Artificial Sequence: Synthetic oligonucleotide
ggccggcaugcgcacagcg

SEQ ID NO: 794628 - RNA, 19 nt, Artificial Sequence
  Description of Artificial Sequence: Synthetic oligonucleotide
uggcaugguagcgcuggaa

SEQ ID NO: 794629 - RNA, 19 nt, Artificial Sequence
  Description of Artificial Sequence: Synthetic oligonucleotide
gccgcugcuucguccaacc

SEQ ID NO: 794630 - RNA, 19 nt, Artificial Sequence
  Description of Artificial Sequence: Synthetic oligonucleotide
ccacuuagacuugaccaug

SEQ ID NO: 794631 - RNA, 19 nt, Artificial Sequence
  Description of Artificial Sequence: Synthetic oligonucleotide
ccuggcgcggccgacuugg

SEQ ID NO: 794632 - RNA, 19 nt, Artificial Sequence
  Description of Artificial Sequence: Synthetic oligonucleotide
ccagucauucugccagaag

SEQ ID NO: 794633 - RNA, 19 nt, Artificial Sequence
  Description of Artificial Sequence: Synthetic oligonucleotide
gcgaguggguuguaugguc

SEQ ID NO: 794634 - RNA, 19 nt, Artificial Sequence
  Description of Artificial Sequence: Synthetic oligonucleotide
gguccccguaguuuagguc

SEQ ID NO: 794635 - RNA, 19 nt, Artificial Sequence
  Description of Artificial Sequence: Synthetic oligonucleotide
ggagaacugccucgcccug

SEQ ID NO: 794636 - RNA, 19 nt, Artificial Sequence
  Description of Artificial Sequence: Synthetic oligonucleotide
gcugaauggaguaaagcuu

SEQ ID NO: 794637 - RNA, 19 nt, Artificial Sequence
  Description of Artificial Sequence: Synthetic oligonucleotide
ccucaauggcgucccacac

SEQ ID NO: 794638 - RNA, 19 nt, Artificial Sequence
  Description of Artificial Sequence: Synthetic oligonucleotide
gggcacguaggcugcucag

SEQ ID NO: 794639 - RNA, 19 nt, Artificial Sequence
  Description of Artificial Sequence: Synthetic oligonucleotide
cagcguuguccaguaccag

SEQ ID NO: 794640 - RNA, 19 nt, Artificial Sequence
  Description of Artificial Sequence: Synthetic oligonucleotide
cagcuacaauccuccuguc

SEQ ID NO: 794641 - RNA, 19 nt, Artificial Sequence
  Description of Artificial Sequence: Synthetic oligonucleotide
guaacagguccccguaguu

SEQ ID NO: 794642 - RNA, 19 nt, Artificial Sequence
  Description of Artificial Sequence: Synthetic oligonucleotide
gcacguaggcugcucagaa

SEQ ID NO: 794643 - RNA, 19 nt, Artificial Sequence
  Description of Artificial Sequence: Synthetic oligonucleotide
gcggcugaagucauagcca

SEQ ID NO: 794644 - RNA, 19 nt, Artificial Sequence
  Description of Artificial Sequence: Synthetic oligonucleotide
auccugcugaauggaguaa

SEQ ID NO: 794645 - RNA, 19 nt, Artificial Sequence
  Description of Artificial Sequence: Synthetic oligonucleotide
uugcccugaguggcccugc

SEQ ID NO: 794646 - RNA, 19 nt, Artificial Sequence
  Description of Artificial Sequence: Synthetic oligonucleotide
ggucccaaaaggacacaca

SEQ ID NO: 794647 - RNA, 19 nt, Artificial Sequence
  Description of Artificial Sequence: Synthetic oligonucleotide
cacguaggcugcucagaaa

SEQ ID NO: 794648 - RNA, 19 nt, Artificial Sequence
  Description of Artificial Sequence: Synthetic oligonucleotide
agggaaccauuaagccgag

SEQ ID NO: 794649 - RNA, 19 nt, Artificial Sequence
  Description of Artificial Sequence: Synthetic oligonucleotide
gucauucugccagaaguuu

SEQ ID NO: 794650 - RNA, 19 nt, Artificial Sequence
  Description of Artificial Sequence: Synthetic oligonucleotide
ccucuuugaagugcacgug

SEQ ID NO: 794651 - RNA, 19 nt, Artificial Sequence
  Description of Artificial Sequence: Synthetic oligonucleotide
uggcagcguuguccaguac

SEQ ID NO: 794652 - RNA, 19 nt, Artificial Sequence
  Description of Artificial Sequence: Synthetic oligonucleotide
caucuccacggugagcgaa

SEQ ID NO: 794653 - RNA, 19 nt, Artificial Sequence
  Description of Artificial Sequence: Synthetic oligonucleotide
ccuggggucccucugaacu

SEQ ID NO: 794654 - RNA, 19 nt, Artificial Sequence
  Description of Artificial Sequence: Synthetic oligonucleotide
gcguuguccaguaccagaa

SEQ ID NO: 794655 - RNA, 19 nt, Artificial Sequence
  Description of Artificial Sequence: Synthetic oligonucleotide
ccacgaugagguugccuug

SEQ ID NO: 794656 - RNA, 19 nt, Artificial Sequence
  Description of Artificial Sequence: Synthetic oligonucleotide
gccggcaugcgcacagcgg

SEQ ID NO: 794657 - RNA, 19 nt, Artificial Sequence
  Description of Artificial Sequence: Synthetic oligonucleotide
cagcauggaaucgcuccca

SEQ ID NO: 794658 - RNA, 19 nt, Artificial Sequence
  Description of Artificial Sequence: Synthetic oligonucleotide
acccggcuaccugugagua

SEQ ID NO: 794659 - RNA, 19 nt, Artificial Sequence
  Description of Artificial Sequence: Synthetic oligonucleotide
ugcagaguuuugggcucau

SEQ ID NO: 794660 - RNA, 19 nt, Artificial Sequence
  Description of Artificial Sequence: Synthetic oligonucleotide
caccgccauugaguguggg

SEQ ID NO: 794661 - RNA, 19 nt, Artificial Sequence
  Description of Artificial Sequence: Synthetic oligonucleotide
gauugcccugaguggcccu

SEQ ID NO: 794662 - RNA, 19 nt, Artificial Sequence
  Description of Artificial Sequence: Synthetic oligonucleotide
cccagauauugaugagguc

SEQ ID NO: 794663 - RNA, 19 nt, Artificial Sequence
  Description of Artificial Sequence: Synthetic oligonucleotide
ccaaguagacggucuguaa

SEQ ID NO: 794664 - RNA, 19 nt, Artificial Sequence
  Description of Artificial Sequence: Synthetic oligonucleotide
cggugagcgaauguauggc

SEQ ID NO: 794665 - RNA, 19 nt, Artificial Sequence
  Description of Artificial Sequence: Synthetic oligonucleotide
cugcuucguccaaccacga

SEQ ID NO: 794666 - RNA, 19 nt, Artificial Sequence
  Description of Artificial Sequence: Synthetic oligonucleotide
cugcaguuggggcuagggu

SEQ ID NO: 794667 - RNA, 19 nt, Artificial Sequence
  Description of Artificial Sequence: Synthetic oligonucleotide
guuuugggcucaugcugau

SEQ ID NO: 794668 - RNA, 19 nt, Artificial Sequence
  Description of Artificial Sequence: Synthetic oligonucleotide
caucccuggccgccaguca

SEQ ID NO: 794669 - RNA, 19 nt, Artificial Sequence
  Description of Artificial Sequence: Synthetic oligonucleotide
ccagccggccgcugcuucg

SEQ ID NO: 794670 - RNA, 19 nt, Artificial Sequence
  Description of Artificial Sequence: Synthetic oligonucleotide
acgaguccucuagucggaa

SEQ ID NO: 794671 - RNA, 19 nt, Artificial Sequence
  Description of Artificial Sequence: Synthetic oligonucleotide
caauggcgucccacaccuc

SEQ ID NO: 794672 - RNA, 19 nt, Artificial Sequence
  Description of Artificial Sequence: Synthetic oligonucleotide
aucugccgggcaggcuggg

SEQ ID NO: 794673 - RNA, 19 nt, Artificial Sequence
  Description of Artificial Sequence: Synthetic oligonucleotide
ggcgucccacaccuccagc

SEQ ID NO: 794674 - RNA, 19 nt, Artificial Sequence
  Description of Artificial Sequence: Synthetic oligonucleotide
caggugagggaggugacau

SEQ ID NO: 794675 - RNA, 19 nt, Artificial Sequence
  Description of Artificial Sequence: Synthetic oligonucleotide
gcagauggcuccaucuugu

SEQ ID NO: 794676 - RNA, 19 nt, Artificial Sequence
  Description of Artificial Sequence: Synthetic oligonucleotide
caaccacgaugagguugcc

SEQ ID NO: 794677 - RNA, 19 nt, Artificial Sequence
  Description of Artificial Sequence: Synthetic oligonucleotide
gguguacgagaccguccuc

SEQ ID NO: 794678 - RNA, 19 nt, Artificial Sequence
  Description of Artificial Sequence: Synthetic oligonucleotide
aggcaacacgaguccucua

SEQ ID NO: 794679 - RNA, 19 nt, Artificial Sequence
  Description of Artificial Sequence: Synthetic oligonucleotide
gcaugcgcacagcggccag

SEQ ID NO: 794680 - RNA, 19 nt, Artificial Sequence
  Description of Artificial Sequence: Synthetic oligonucleotide
gagcagcuacaauccuccu

SEQ ID NO: 794681 - RNA, 19 nt, Artificial Sequence
  Description of Artificial Sequence: Synthetic oligonucleotide
cucggcccgaaggcugcag

SEQ ID NO: 794682 - RNA, 19 nt, Artificial Sequence
  Description of Artificial Sequence: Synthetic oligonucleotide
gcaacacgaguccucuagu

SEQ ID NO: 794683 - RNA, 19 nt, Artificial Sequence
  Description of Artificial Sequence: Synthetic oligonucleotide
cggucuguaacaggucccc

SEQ ID NO: 794684 - RNA, 19 nt, Artificial Sequence
  Description of Artificial Sequence: Synthetic oligonucleotide
cguggaccagguucucggc

SEQ ID NO: 794685 - RNA, 19 nt, Artificial Sequence
  Description of Artificial Sequence: Synthetic oligonucleotide
cgaguccccacuuagacuu

SEQ ID NO: 794686 - RNA, 19 nt, Artificial Sequence
  Description of Artificial Sequence: Synthetic oligonucleotide
ccaugucgaucuuacgugu

SEQ ID NO: 794687 - RNA, 19 nt, Artificial Sequence
  Description of Artificial Sequence: Synthetic oligonucleotide
gccauugaguguggguguc

SEQ ID NO: 794688 - RNA, 19 nt, Artificial Sequence
  Description of Artificial Sequence: Synthetic oligonucleotide
ggucagcauggaaucgcuc

SEQ ID NO: 794689 - RNA, 19 nt, Artificial Sequence
  Description of Artificial Sequence: Synthetic oligonucleotide
guccucuagucggaagacu

SEQ ID NO: 794690 - RNA, 19 nt, Artificial Sequence
  Description of Artificial Sequence: Synthetic oligonucleotide
ggcugacccggcuaccugu

SEQ ID NO: 794691 - RNA, 19 nt, Artificial Sequence
  Description of Artificial Sequence: Synthetic oligonucleotide
gaaguagguuucggaguuu

SEQ ID NO: 794692 - RNA, 19 nt, Artificial Sequence
  Description of Artificial Sequence: Synthetic oligonucleotide
cccacuuagacuugaccau

SEQ ID NO: 794693 - RNA, 19 nt, Artificial Sequence
  Description of Artificial Sequence: Synthetic oligonucleotide
gcggccgacuuggugagca

SEQ ID NO: 794694 - RNA, 19 nt, Artificial Sequence
  Description of Artificial Sequence: Synthetic oligonucleotide
aguggcccugcaggguaaa

SEQ ID NO: 794695 - RNA, 19 nt, Artificial Sequence
  Description of Artificial Sequence: Synthetic oligonucleotide
cucuagucggaagacucuu

SEQ ID NO: 794696 - RNA, 19 nt, Artificial Sequence
  Description of Artificial Sequence: Synthetic oligonucleotide
gggucccucugaacugcag

SEQ ID NO: 794697 - RNA, 19 nt, Artificial Sequence
  Description of Artificial Sequence: Synthetic oligonucleotide
gcgaguccccacuuagacu

SEQ ID NO: 794698 - RNA, 19 nt, Artificial Sequence
  Description of Artificial Sequence: Synthetic oligonucleotide
ggaaaaucucaccgccauu

SEQ ID NO: 794699 - RNA, 19 nt, Artificial Sequence
  Description of Artificial Sequence: Synthetic oligonucleotide
gggaaccauuaagccgagc

SEQ ID NO: 794700 - RNA, 19 nt, Artificial Sequence
  Description of Artificial Sequence: Synthetic oligonucleotide
ccagagucccuggcgcggc

SEQ ID NO: 794701 - RNA, 19 nt, Artificial Sequence
  Description of Artificial Sequence: Synthetic oligonucleotide
ggucaccugaaggcaaacu

SEQ ID NO: 794702 - RNA, 19 nt, Artificial Sequence
  Description of Artificial Sequence: Synthetic oligonucleotide
cccggcuaccugugaguac

SEQ ID NO: 794703 - RNA, 19 nt, Artificial Sequence
  Description of Artificial Sequence: Synthetic oligonucleotide
ccguaguuuaggucccaaa

SEQ ID NO: 794704 - RNA, 19 nt, Artificial Sequence
  Description of Artificial Sequence: Synthetic oligonucleotide
gcauggaaucgcucccagu

SEQ ID NO: 794705 - RNA, 19 nt, Artificial Sequence
  Description of Artificial Sequence: Synthetic oligonucleotide
ccucuagucggaagacucu

SEQ ID NO: 794706 - RNA, 19 nt, Artificial Sequence
  Description of Artificial Sequence: Synthetic oligonucleotide
gugucaggccaaagagagu

SEQ ID NO: 794707 - RNA, 19 nt, Artificial Sequence
  Description of Artificial Sequence: Synthetic oligonucleotide
ggcgcagggccggcaugcg

SEQ ID NO: 794708 - RNA, 19 nt, Artificial Sequence
  Description of Artificial Sequence: Synthetic oligonucleotide
cagggcgaguccccacuua

SEQ ID NO: 794709 - RNA, 19 nt, Artificial Sequence
  Description of Artificial Sequence: Synthetic oligonucleotide
cccaaguagacggucugua

SEQ ID NO: 794710 - RNA, 19 nt, Artificial Sequence
  Description of Artificial Sequence: Synthetic oligonucleotide
ccccucaauggcgucccac

SEQ ID NO: 794711 - RNA, 19 nt, Artificial Sequence
  Description of Artificial Sequence: Synthetic oligonucleotide
ccggccgcugcuucgucca

SEQ ID NO: 794712 - RNA, 19 nt, Artificial Sequence
  Description of Artificial Sequence: Synthetic oligonucleotide
ggccgcugcuucguccaac

SEQ ID NO: 794713 - RNA, 19 nt, Artificial Sequence
  Description of Artificial Sequence: Synthetic oligonucleotide
ccauugaguguggguguca

SEQ ID NO: 794714 - RNA, 19 nt, Artificial Sequence
  Description of Artificial Sequence: Synthetic oligonucleotide
ccacggugagcgaauguau

SEQ ID NO: 794715 - RNA, 19 nt, Artificial Sequence
  Description of Artificial Sequence: Synthetic oligonucleotide
guggcccugcaggguaaaa

SEQ ID NO: 794716 - RNA, 19 nt, Artificial Sequence
  Description of Artificial Sequence: Synthetic oligonucleotide
cccgaggagaccuccucgu

SEQ ID NO: 794717 - RNA, 19 nt, Artificial Sequence
  Description of Artificial Sequence: Synthetic oligonucleotide
ccuggccgccagucaccag

SEQ ID NO: 794718 - RNA, 19 nt, Artificial Sequence
  Description of Artificial Sequence: Synthetic oligonucleotide
ggggucccucugaacugca

SEQ ID NO: 794719 - RNA, 19 nt, Artificial Sequence
  Description of Artificial Sequence: Synthetic oligonucleotide
ccauuaagccgagcagcua

SEQ ID NO: 794720 - RNA, 19 nt, Artificial Sequence
  Description of Artificial Sequence: Synthetic oligonucleotide
gcccaaguagacggucugu

SEQ ID NO: 794721 - RNA, 19 nt, Artificial Sequence
  Description of Artificial Sequence: Synthetic oligonucleotide
gggccggcaugcgcacagc

SEQ ID NO: 794722 - RNA, 19 nt, Artificial Sequence
  Description of Artificial Sequence: Synthetic oligonucleotide
cggucaccugaaggcaaac

SEQ ID NO: 794723 - RNA, 19 nt, Artificial Sequence
  Description of Artificial Sequence: Synthetic oligonucleotide
ggaaucgcucccagucauu

SEQ ID NO: 794724 - RNA, 19 nt, Artificial Sequence
  Description of Artificial Sequence: Synthetic oligonucleotide
cccguaguuuaggucccaa

SEQ ID NO: 794725 - RNA, 19 nt, Artificial Sequence
  Description of Artificial Sequence: Synthetic oligonucleotide
ccgcugcuucguccaacca

SEQ ID NO: 794726 - RNA, 19 nt, Artificial Sequence
  Description of Artificial Sequence: Synthetic oligonucleotide
cagccggccgcugcuucgu

SEQ ID NO: 794727 - RNA, 19 nt, Artificial Sequence
  Description of Artificial Sequence: Synthetic oligonucleotide
cccuggcgcggccgacuug

SEQ ID NO: 794728 - RNA, 19 nt, Artificial Sequence
  Description of Artificial Sequence: Synthetic oligonucleotide
ccgacuuggugagcaccaa

SEQ ID NO: 794729 - RNA, 19 nt, Artificial Sequence
  Description of Artificial Sequence: Synthetic oligonucleotide
cuggcgcggccgacuuggu

SEQ ID NO: 794730 - RNA, 19 nt, Artificial Sequence
  Description of Artificial Sequence: Synthetic oligonucleotide
ggcuagggugcaggagcau

SEQ ID NO: 794731 - RNA, 19 nt, Artificial Sequence
  Description of Artificial Sequence: Synthetic oligonucleotide
ccgaggagaccuccucguu

SEQ ID NO: 794732 - RNA, 19 nt, Artificial Sequence
  Description of Artificial Sequence: Synthetic oligonucleotide
ccagggcgaguccccacuu

SEQ ID NO: 794733 - RNA, 19 nt, Artificial Sequence
  Description of Artificial Sequence: Synthetic oligonucleotide
cuccagccggccgcugcuu

SEQ ID NO: 794734 - RNA, 19 nt, Artificial Sequence
  Description of Artificial Sequence: Synthetic oligonucleotide
cgcggccgacuuggugagc

SEQ ID NO: 794735 - RNA, 19 nt, Artificial Sequence
  Description of Artificial Sequence: Synthetic oligonucleotide
  modified_base (7)..(7): a, c, u, g, unknown or other
aaaguunuuaaacuuaugc

SEQ ID NO: 794736 - RNA, 19 nt, Artificial Sequence
  Description of Artificial Sequence: Synthetic oligonucleotide
uuuauaaguaaauaaacag

SEQ ID NO: 794737 - RNA, 19 nt, Artificial Sequence
  Description of Artificial Sequence: Synthetic oligonucleotide
aauucuaucaaaguagauc

SEQ ID NO: 794738 - RNA, 19 nt, Artificial Sequence
  Description of Artificial Sequence: Synthetic oligonucleotide
uucacuauaucauacacug

SEQ ID NO: 794739 - RNA, 19 nt, Artificial Sequence
  Description of Artificial Sequence: Synthetic oligonucleotide
gaaugauuaauauaacaag

SEQ ID NO: 794740 - RNA, 19 nt, Artificial Sequence
  Description of Artificial Sequence: Synthetic oligonucleotide
uguaauauacuccaauaug

SEQ ID NO: 794741 - RNA, 19 nt, Artificial Sequence
  Description of Artificial Sequence: Synthetic oligonucleotide
auuuguguuaaugacaugg

SEQ ID NO: 794742 - RNA, 19 nt, Artificial Sequence
  Description of Artificial Sequence: Synthetic oligonucleotide
aucaauuugaucaaacagc

SEQ ID NO: 794743 - RNA, 19 nt, Artificial Sequence
  Description of Artificial Sequence: Synthetic oligonucleotide
  modified_base (6)..(6): a, c, u, g, unknown or other
aaguunuuaaacuuaugcu

SEQ ID NO: 794744 - RNA, 19 nt, Artificial Sequence
  Description of Artificial Sequence: Synthetic oligonucleotide
gauuaauauaacaagaauc

SEQ ID NO: 794745 - RNA, 19 nt, Artificial Sequence
  Description of Artificial Sequence: Synthetic oligonucleotide
uaaguuuuacuaaaggacu

SEQ ID NO: 794746 - RNA, 19 nt, Artificial Sequence
  Description of Artificial Sequence: Synthetic oligonucleotide
uauaggaugugaugaaugg

SEQ ID NO: 794747 - RNA, 19 nt, Artificial Sequence
  Description of Artificial Sequence: Synthetic oligonucleotide
aaugauuaauauaacaaga

SEQ ID NO: 794748 - RNA, 19 nt, Artificial Sequence
  Description of Artificial Sequence: Synthetic oligonucleotide
aauaugucccucuucuauc

SEQ ID NO: 794749 - RNA, 19 nt, Artificial Sequence
  Description of Artificial Sequence: Synthetic oligonucleotide
uauuuagcaagacugaaau

SEQ ID NO: 794750 - RNA, 19 nt, Artificial Sequence
  Description of Artificial Sequence: Synthetic oligonucleotide
uaaccuauuauucauggaa

SEQ ID NO: 794751 - RNA, 19 nt, Artificial Sequence
  Description of Artificial Sequence: Synthetic oligonucleotide
uaucauacacugcauuugg

SEQ ID NO: 794752 - RNA, 19 nt, Artificial Sequence
  Description of Artificial Sequence: Synthetic oligonucleotide
auaaaggcucacuaaugcc

SEQ ID NO: 794753 - RNA, 19 nt, Artificial Sequence
  Description of Artificial Sequence: Synthetic oligonucleotide
cauggaaugauuaauauaa

SEQ ID NO: 794754 - RNA, 19 nt, Artificial Sequence
  Description of Artificial Sequence: Synthetic oligonucleotide
acaaacauugaccauauau

SEQ ID NO: 794755 - RNA, 19 nt, Artificial Sequence
  Description of Artificial Sequence: Synthetic oligonucleotide
uguacagacuuauaggaug

SEQ ID NO: 794756 - RNA, 19 nt, Artificial Sequence
  Description of Artificial Sequence: Synthetic oligonucleotide
ugagugagaaauauuuacc

SEQ ID NO: 794757 - RNA, 19 nt, Artificial Sequence
  Description of Artificial Sequence: Synthetic oligonucleotide
  modified_base (5)..(5): a, c, u, g, unknown or other
aguunuuaaacuuaugcuu

SEQ ID NO: 794758 - RNA, 19 nt, Artificial Sequence
  Description of Artificial Sequence: Synthetic oligonucleotide
uccauaaacauguugggga

SEQ ID NO: 794759 - RNA, 19 nt, Artificial Sequence
  Description of Artificial Sequence: Synthetic oligonucleotide
uuuagcaagacugaaauua

SEQ ID NO: 794760 - RNA, 19 nt, Artificial Sequence
  Description of Artificial Sequence: Synthetic oligonucleotide
uuugggaccaggaaguuca

SEQ ID NO: 794761 - RNA, 19 nt, Artificial Sequence
  Description of Artificial Sequence: Synthetic oligonucleotide
uuuguguuaaugacauggg

SEQ ID NO: 794762 - RNA, 19 nt, Artificial Sequence
  Description of Artificial Sequence: Synthetic oligonucleotide
uuacaaacaaguuacuuau

SEQ ID NO: 794763 - RNA, 19 nt, Artificial Sequence
  Description of Artificial Sequence: Synthetic oligonucleotide
agagaugcacaaaagaaac

SEQ ID NO: 794764 - RNA, 19 nt, Artificial Sequence
  Description of Artificial Sequence: Synthetic oligonucleotide
gauaccaacaucuacugaa

SEQ ID NO: 794765 - RNA, 19 nt, Artificial Sequence
  Description of Artificial Sequence: Synthetic oligonucleotide
aacagcucgauguagacuu

SEQ ID NO: 794766 - RNA, 19 nt, Artificial Sequence
  Description of Artificial Sequence: Synthetic oligonucleotide
uaugacuauucaaucacca

SEQ ID NO: 794767 - RNA, 19 nt, Artificial Sequence
  Description of Artificial Sequence: Synthetic oligonucleotide
ugauuaauauaacaagaau

SEQ ID NO: 794768 - RNA, 19 nt, Artificial Sequence
  Description of Artificial Sequence: Synthetic oligonucleotide
gauugccucagguauauug

SEQ ID NO: 794769 - RNA, 19 nt, Artificial Sequence
  Description of Artificial Sequence: Synthetic oligonucleotide
  modified_base (3)..(3): a, c, u, g, unknown or other
uunuuaaacuuaugcuucc

SEQ ID NO: 794770 - RNA, 19 nt, Artificial Sequence
  Description of Artificial Sequence: Synthetic oligonucleotide
auaguucuucacuauauca

SEQ ID NO: 794771 - RNA, 19 nt, Artificial Sequence
  Description of Artificial Sequence: Synthetic oligonucleotide
aaguagaucaucacaccac

SEQ ID NO: 794772 - RNA, 19 nt, Artificial Sequence
  Description of Artificial Sequence: Synthetic oligonucleotide
uuugauagaaguucucuau

SEQ ID NO: 794773 - RNA, 19 nt, Artificial Sequence
  Description of Artificial Sequence: Synthetic oligonucleotide
ucacaugagaccuuuugug

SEQ ID NO: 794774 - RNA, 19 nt, Artificial Sequence
  Description of Artificial Sequence: Synthetic oligonucleotide
ucuuuguucaauuauccuu

SEQ ID NO: 794775 - RNA, 19 nt, Artificial Sequence
  Description of Artificial Sequence: Synthetic oligonucleotide
auauuuaccaagguggcug

SEQ ID NO: 794776 - RNA, 19 nt, Artificial Sequence
  Description of Artificial Sequence: Synthetic oligonucleotide
uuaugcuuccuuacaaaca

SEQ ID NO: 794777 - RNA, 19 nt, Artificial Sequence
  Description of Artificial Sequence: Synthetic oligonucleotide
  modified_base (4)..(4): a, c, u, g, unknown or other
guunuuaaacuuaugcuuc

SEQ ID NO: 794778 - RNA, 19 nt, Artificial Sequence
  Description of Artificial Sequence: Synthetic oligonucleotide
gagugagaaauauuuacca

SEQ ID NO: 794779 - RNA, 19 nt, Artificial Sequence
  Description of Artificial Sequence: Synthetic oligonucleotide
guauauugggcuuugucac

SEQ ID NO: 794780 - RNA, 19 nt, Artificial Sequence
  Description of Artificial Sequence: Synthetic oligonucleotide
uagucugcaguauaguucu

SEQ ID NO: 794781 - RNA, 19 nt, Artificial Sequence
  Description of Artificial Sequence: Synthetic oligonucleotide
uggaguuauuaacccaagg

SEQ ID NO: 794782 - RNA, 19 nt, Artificial Sequence
  Description of Artificial Sequence: Synthetic oligonucleotide
aaacuuaugcuuccuuaca

SEQ ID NO: 794783 - RNA, 19 nt, Artificial Sequence
  Description of Artificial Sequence: Synthetic oligonucleotide
cuuccuuacaaacauugac

SEQ ID NO: 794784 - RNA, 19 nt, Artificial Sequence
  Description of Artificial Sequence: Synthetic oligonucleotide
ucuaagcugaaacccagcu

SEQ ID NO: 794785 - RNA, 19 nt, Artificial Sequence
  Description of Artificial Sequence: Synthetic oligonucleotide
uuauuuagcaagacugaaa

SEQ ID NO: 794786 - RNA, 19 nt, Artificial Sequence
  Description of Artificial Sequence: Synthetic oligonucleotide
uauaucauacacugcauuu

SEQ ID NO: 794787 - RNA, 19 nt, Artificial Sequence
  Description of Artificial Sequence: Synthetic oligonucleotide
caucagugaaccuguaucc

SEQ ID NO: 794788 - RNA, 19 nt, Artificial Sequence
  Description of Artificial Sequence: Synthetic oligonucleotide
gugagugagaaauauuuac

SEQ ID NO: 794789 - RNA, 19 nt, Artificial Sequence
  Description of Artificial Sequence: Synthetic oligonucleotide
cuuaugcuuccuuacaaac

SEQ ID NO: 794790 - RNA, 19 nt, Artificial Sequence
  Description of Artificial Sequence: Synthetic oligonucleotide
uuuuacuaaaggacuauuu

SEQ ID NO: 794791 - RNA, 19 nt, Artificial Sequence
  Description of Artificial Sequence: Synthetic oligonucleotide
ucacguuucacaucuuuca

SEQ ID NO: 794792 - RNA, 19 nt, Artificial Sequence
  Description of Artificial Sequence: Synthetic oligonucleotide
aaggacuauuuuauuuagc

SEQ ID NO: 794793 - RNA, 19 nt, Artificial Sequence
  Description of Artificial Sequence: Synthetic oligonucleotide
aguucucuauauaaauagc

SEQ ID NO: 794794 - RNA, 19 nt, Artificial Sequence
  Description of Artificial Sequence: Synthetic oligonucleotide
agguaauuaaccuauuauu

SEQ ID NO: 794795 - RNA, 19 nt, Artificial Sequence
  Description of Artificial Sequence: Synthetic oligonucleotide
ucauaguuccugcggauug

SEQ ID NO: 794796 - RNA, 19 nt, Artificial Sequence
  Description of Artificial Sequence: Synthetic oligonucleotide
ugagauggaagccggggcc

SEQ ID NO: 794797 - RNA, 19 nt, Artificial Sequence
  Description of Artificial Sequence: Synthetic oligonucleotide
ugcuaugacuauucaauca

SEQ ID NO: 794798 - RNA, 19 nt, Artificial Sequence
  Description of Artificial Sequence: Synthetic oligonucleotide
ugacaugggaacauucaca

SEQ ID NO: 794799 - RNA, 19 nt, Artificial Sequence
  Description of Artificial Sequence: Synthetic oligonucleotide
aauuauccuuuguggucac

SEQ ID NO: 794800 - RNA, 19 nt, Artificial Sequence
  Description of Artificial Sequence: Synthetic oligonucleotide
auugcuaugacuauucaau

SEQ ID NO: 794801 - RNA, 19 nt, Artificial Sequence
  Description of Artificial Sequence: Synthetic oligonucleotide
ucuguuuggagaguggucu

SEQ ID NO: 794802 - RNA, 19 nt, Artificial Sequence
  Description of Artificial Sequence: Synthetic oligonucleotide
aacuuaugcuuccuuacaa

SEQ ID NO: 794803 - RNA, 19 nt, Artificial Sequence
  Description of Artificial Sequence: Synthetic oligonucleotide
auucacaugagaccuuuug

SEQ ID NO: 794804 - RNA, 19 nt, Artificial Sequence
  Description of Artificial Sequence: Synthetic oligonucleotide
caucuucuaagcugaaacc

SEQ ID NO: 794805 - RNA, 19 nt, Artificial Sequence
  Description of Artificial Sequence: Synthetic oligonucleotide
gacuuauaggaugugauga

SEQ ID NO: 794806 - RNA, 19 nt, Artificial Sequence
  Description of Artificial Sequence: Synthetic oligonucleotide
ugauagaaguucucuauau

SEQ ID NO: 794807 - RNA, 19 nt, Artificial Sequence
  Description of Artificial Sequence: Synthetic oligonucleotide
aaacccacugaagacaacu

SEQ ID NO: 794808 - RNA, 19 nt, Artificial Sequence
  Description of Artificial Sequence: Synthetic oligonucleotide
uuagcaagacugaaauuaa

SEQ ID NO: 794809 - RNA, 19 nt, Artificial Sequence
  Description of Artificial Sequence: Synthetic oligonucleotide
uuauucauggaaugauuaa

SEQ ID NO: 794810 - RNA, 19 nt, Artificial Sequence
  Description of Artificial Sequence: Synthetic oligonucleotide
cugaaacccagcuugucag

SEQ ID NO: 794811 - RNA, 19 nt, Artificial Sequence
  Description of Artificial Sequence: Synthetic oligonucleotide
gaagaguccauaaacaugu

SEQ ID NO: 794812 - RNA, 19 nt, Artificial Sequence
  Description of Artificial Sequence: Synthetic oligonucleotide
ugcuguuggaagcaauggc

SEQ ID NO: 794813 - RNA, 19 nt, Artificial Sequence
  Description of Artificial Sequence: Synthetic oligonucleotide
aaauugcuaugacuauuca

SEQ ID NO: 794814 - RNA, 19 nt, Artificial Sequence
  Description of Artificial Sequence: Synthetic oligonucleotide
aguuauuaacccaagguaa

SEQ ID NO: 794815 - RNA, 19 nt, Artificial Sequence
  Description of Artificial Sequence: Synthetic oligonucleotide
uuuauuuagcaagacugaa

SEQ ID NO: 794816 - RNA, 19 nt, Artificial Sequence
  Description of Artificial Sequence: Synthetic oligonucleotide
aggggcucaucuucuaagc

SEQ ID NO: 794817 - RNA, 19 nt, Artificial Sequence
  Description of Artificial Sequence: Synthetic oligonucleotide
ugagcuuauuugcuucugc

SEQ ID NO: 794818 - RNA, 19 nt, Artificial Sequence
  Description of Artificial Sequence: Synthetic oligonucleotide
agacuuauaggaugugaug

SEQ ID NO: 794819 - RNA, 19 nt, Artificial Sequence
  Description of Artificial Sequence: Synthetic oligonucleotide
accuauuauucauggaaug

SEQ ID NO: 794820 - RNA, 19 nt, Artificial Sequence
  Description of Artificial Sequence: Synthetic oligonucleotide
cuaugacuauucaaucacc

SEQ ID NO: 794821 - RNA, 19 nt, Artificial Sequence
  Description of Artificial Sequence: Synthetic oligonucleotide
ugcggauugccucagguau

SEQ ID NO: 794822 - RNA, 19 nt, Artificial Sequence
  Description of Artificial Sequence: Synthetic oligonucleotide
acaugguacauucuucacu

SEQ ID NO: 794823 - RNA, 19 nt, Artificial Sequence
  Description of Artificial Sequence: Synthetic oligonucleotide
aauauuuaccaagguggcu

SEQ ID NO: 794824 - RNA, 19 nt, Artificial Sequence
  Description of Artificial Sequence: Synthetic oligonucleotide
acucguacagccuggauaa

SEQ ID NO: 794825 - RNA, 19 nt, Artificial Sequence
  Description of Artificial Sequence: Synthetic oligonucleotide
ucuaucaaaguagaucauc

SEQ ID NO: 794826 - RNA, 19 nt, Artificial Sequence
  Description of Artificial Sequence: Synthetic oligonucleotide
ucuacugaauuuguguuaa

SEQ ID NO: 794827 - RNA, 19 nt, Artificial Sequence
  Description of Artificial Sequence: Synthetic oligonucleotide
uauaaauagcagccaugac

SEQ ID NO: 794828 - RNA, 19 nt, Artificial Sequence
  Description of Artificial Sequence: Synthetic oligonucleotide
uuaccaagguggcugugcc

SEQ ID NO: 794829 - RNA, 19 nt, Artificial Sequence
  Description of Artificial Sequence: Synthetic oligonucleotide
  modified_base (8)..(8): a, c, u, g, unknown or other
aaaaguunuuaaacuuaug

SEQ ID NO: 794830 - RNA, 19 nt, Artificial Sequence
  Description of Artificial Sequence: Synthetic oligonucleotide
cuucuaagcugaaacccag

SEQ ID NO: 794831 - RNA, 19 nt, Artificial Sequence
  Description of Artificial Sequence: Synthetic oligonucleotide
auugaccauauauuggaaa

SEQ ID NO: 794832 - RNA, 19 nt, Artificial Sequence
  Description of Artificial Sequence: Synthetic oligonucleotide
augaaugggagcaugagau

SEQ ID NO: 794833 - RNA, 19 nt, Artificial Sequence
  Description of Artificial Sequence: Synthetic oligonucleotide
ccauauauuggaaagcgac

SEQ ID NO: 794834 - RNA, 19 nt, Artificial Sequence
  Description of Artificial Sequence: Synthetic oligonucleotide
auaggaugugaugaauggg

SEQ ID NO: 794835 - RNA, 19 nt, Artificial Sequence
  Description of Artificial Sequence: Synthetic oligonucleotide
uuaaccuauuauucaugga

SEQ ID NO: 794836 - RNA, 19 nt, Artificial Sequence
  Description of Artificial Sequence: Synthetic oligonucleotide
uugauagaaguucucuaua

SEQ ID NO: 794837 - RNA, 19 nt, Artificial Sequence
  Description of Artificial Sequence: Synthetic oligonucleotide
uuuacggaggcucuuuguu

SEQ ID NO: 794838 - RNA, 19 nt, Artificial Sequence
  Description of Artificial Sequence: Synthetic oligonucleotide
aguuuacacacaaguauag

SEQ ID NO: 794839 - RNA, 19 nt, Artificial Sequence
  Description of Artificial Sequence: Synthetic oligonucleotide
augauuaauauaacaagaa

SEQ ID NO: 794840 - RNA, 19 nt, Artificial Sequence
  Description of Artificial Sequence: Synthetic oligonucleotide
gagcaugagauggaagccg

SEQ ID NO: 794841 - RNA, 19 nt, Artificial Sequence
  Description of Artificial Sequence: Synthetic oligonucleotide
aguguaugcacgcugcaaa

SEQ ID NO: 794842 - RNA, 19 nt, Artificial Sequence
  Description of Artificial Sequence: Synthetic oligonucleotide
gggagcaugagauggaagc

SEQ ID NO: 794843 - RNA, 19 nt, Artificial Sequence
  Description of Artificial Sequence: Synthetic oligonucleotide
uacggaggcucuuuguuca

SEQ ID NO: 794844 - RNA, 19 nt, Artificial Sequence
  Description of Artificial Sequence: Synthetic oligonucleotide
auaugucccucuucuaucu

SEQ ID NO: 794845 - RNA, 19 nt, Artificial Sequence
  Description of Artificial Sequence: Synthetic oligonucleotide
ugaccauauauuggaaagc

SEQ ID NO: 794846 - RNA, 19 nt, Artificial Sequence
  Description of Artificial Sequence: Synthetic oligonucleotide
aggaauggaaguaaagaca

SEQ ID NO: 794847 - RNA, 19 nt, Artificial Sequence
  Description of Artificial Sequence: Synthetic oligonucleotide
cagugaaccuguauccagg

SEQ ID NO: 794848 - RNA, 19 nt, Artificial Sequence
  Description of Artificial Sequence: Synthetic oligonucleotide
gaucaucacaccaccacug

SEQ ID NO: 794849 - RNA, 19 nt, Artificial Sequence
  Description of Artificial Sequence: Synthetic oligonucleotide
uuauccuuuguggucaccu

SEQ ID NO: 794850 - RNA, 19 nt, Artificial Sequence
  Description of Artificial Sequence: Synthetic oligonucleotide
ugacauucaaaggugggaa

SEQ ID NO: 794851 - RNA, 19 nt, Artificial Sequence
  Description of Artificial Sequence: Synthetic oligonucleotide
aguauaguucuucacuaua

SEQ ID NO: 794852 - RNA, 19 nt, Artificial Sequence
  Description of Artificial Sequence: Synthetic oligonucleotide
cagauaccaacaucuacug

SEQ ID NO: 794853 - RNA, 19 nt, Artificial Sequence
  Description of Artificial Sequence: Synthetic oligonucleotide
gcuaugacuauucaaucac

SEQ ID NO: 794854 - RNA, 19 nt, Artificial Sequence
  Description of Artificial Sequence: Synthetic oligonucleotide
auauauuggaaagcgacua

SEQ ID NO: 794855 - RNA, 19 nt, Artificial Sequence
  Description of Artificial Sequence: Synthetic oligonucleotide
ucacuauaucauacacugc

SEQ ID NO: 794856 - RNA, 19 nt, Artificial Sequence
  Description of Artificial Sequence: Synthetic oligonucleotide
ugaauaggaauugcuucug

SEQ ID NO: 794857 - RNA, 19 nt, Artificial Sequence
  Description of Artificial Sequence: Synthetic oligonucleotide
aggaauugcuucugugaag

SEQ ID NO: 794858 - RNA, 19 nt, Artificial Sequence
  Description of Artificial Sequence: Synthetic oligonucleotide
aaagucauacagacagaug

SEQ ID NO: 794859 - RNA, 19 nt, Artificial Sequence
  Description of Artificial Sequence: Synthetic oligonucleotide
uauauugggcuuugucacu

SEQ ID NO: 794860 - RNA, 19 nt, Artificial Sequence
  Description of Artificial Sequence: Synthetic oligonucleotide
cauaggugauuucugcaac

SEQ ID NO: 794861 - RNA, 19 nt, Artificial Sequence
  Description of Artificial Sequence: Synthetic oligonucleotide
ucagcuauaaaggcucacu

SEQ ID NO: 794862 - RNA, 19 nt, Artificial Sequence
  Description of Artificial Sequence: Synthetic oligonucleotide
ugucacucguacagccugg

SEQ ID NO: 794863 - RNA, 19 nt, Artificial Sequence
  Description of Artificial Sequence: Synthetic oligonucleotide
guccauaaacauguugggg

SEQ ID NO: 794864 - RNA, 19 nt, Artificial Sequence
  Description of Artificial Sequence: Synthetic oligonucleotide
cagauuuucuaguauuaca

SEQ ID NO: 794865 - RNA, 19 nt, Artificial Sequence
  Description of Artificial Sequence: Synthetic oligonucleotide
acuuauaggaugugaugaa

SEQ ID NO: 794866 - RNA, 19 nt, Artificial Sequence
  Description of Artificial Sequence: Synthetic oligonucleotide
guauauucacaugagaccu

SEQ ID NO: 794867 - RNA, 19 nt, Artificial Sequence
  Description of Artificial Sequence: Synthetic oligonucleotide
caucacaccaccacugguc

SEQ ID NO: 794868 - RNA, 19 nt, Artificial Sequence
  Description of Artificial Sequence: Synthetic oligonucleotide
ugugaaguuuagugaguga

SEQ ID NO: 794869 - RNA, 19 nt, Artificial Sequence
  Description of Artificial Sequence: Synthetic oligonucleotide
uucuaagcugaaacccagc

SEQ ID NO: 794870 - RNA, 19 nt, Artificial Sequence
  Description of Artificial Sequence: Synthetic oligonucleotide
uauuuaccaagguggcugu

SEQ ID NO: 794871 - RNA, 19 nt, Artificial Sequence
  Description of Artificial Sequence: Synthetic oligonucleotide
ucgauguagacuuccugaa

SEQ ID NO: 794872 - RNA, 19 nt, Artificial Sequence
  Description of Artificial Sequence: Synthetic oligonucleotide
uugcuaugacuauucaauc

SEQ ID NO: 794873 - RNA, 19 nt, Artificial Sequence
  Description of Artificial Sequence: Synthetic oligonucleotide
uucgucuucucgcuuucca

SEQ ID NO: 794874 - RNA, 19 nt, Artificial Sequence
  Description of Artificial Sequence: Synthetic oligonucleotide
agcuauaaaggcucacuaa

SEQ ID NO: 794875 - RNA, 19 nt, Artificial Sequence
  Description of Artificial Sequence: Synthetic oligonucleotide
uucucgcuuuccaucagcu

SEQ ID NO: 794876 - RNA, 19 nt, Artificial Sequence
  Description of Artificial Sequence: Synthetic oligonucleotide
auggaaugauuaauauaac

SEQ ID NO: 794877 - RNA, 19 nt, Artificial Sequence
  Description of Artificial Sequence: Synthetic oligonucleotide
  modified_base (2)..(2): a, c, u, g, unknown or other
unuuaaacuuaugcuuccu

SEQ ID NO: 794878 - RNA, 19 nt, Artificial Sequence
  Description of Artificial Sequence: Synthetic oligonucleotide
ugggcuacgugucccauuc

SEQ ID NO: 794879 - RNA, 19 nt, Artificial Sequence
  Description of Artificial Sequence: Synthetic oligonucleotide
cugcagauauucuggaguc

SEQ ID NO: 794880 - RNA, 19 nt, Artificial Sequence
  Description of Artificial Sequence: Synthetic oligonucleotide
acuuaugcuuccuuacaaa

SEQ ID NO: 794881 - RNA, 19 nt, Artificial Sequence
  Description of Artificial Sequence: Synthetic oligonucleotide
uacuccaauaugucccucu

SEQ ID NO: 794882 - RNA, 19 nt, Artificial Sequence
  Description of Artificial Sequence: Synthetic oligonucleotide
aucacguuucacaucuuuc

SEQ ID NO: 794883 - RNA, 19 nt, Artificial Sequence
  Description of Artificial Sequence: Synthetic oligonucleotide
uaucacguuucacaucuuu

SEQ ID NO: 794884 - RNA, 19 nt, Artificial Sequence
  Description of Artificial Sequence: Synthetic oligonucleotide
ugagggcuuugucauaguc

SEQ ID NO: 794885 - RNA, 19 nt, Artificial Sequence
  Description of Artificial Sequence: Synthetic oligonucleotide
uaauuccuggaguuauuaa

SEQ ID NO: 794886 - RNA, 19 nt, Artificial Sequence
  Description of Artificial Sequence: Synthetic oligonucleotide
aaguuuuacuaaaggacua

SEQ ID NO: 794887 - RNA, 19 nt, Artificial Sequence
  Description of Artificial Sequence: Synthetic oligonucleotide
aacugcuugcccagucuac

SEQ ID NO: 794888 - RNA, 19 nt, Artificial Sequence
  Description of Artificial Sequence: Synthetic oligonucleotide
uuacggaggcucuuuguuc

SEQ ID NO: 794889 - RNA, 19 nt, Artificial Sequence
  Description of Artificial Sequence: Synthetic oligonucleotide
caccaccucuguaauauac

SEQ ID NO: 794890 - RNA, 19 nt, Artificial Sequence
  Description of Artificial Sequence: Synthetic oligonucleotide
agcaugagauggaagccgg

SEQ ID NO: 794891 - RNA, 19 nt, Artificial Sequence
  Description of Artificial Sequence: Synthetic oligonucleotide
caauuauccuuugugguca

SEQ ID NO: 794892 - RNA, 19 nt, Artificial Sequence
  Description of Artificial Sequence: Synthetic oligonucleotide
acaugagaccuuuuguguu

SEQ ID NO: 794893 - RNA, 19 nt, Artificial Sequence
  Description of Artificial Sequence: Synthetic oligonucleotide
uacgugucccauucuaaaa

SEQ ID NO: 794894 - RNA, 19 nt, Artificial Sequence
  Description of Artificial Sequence: Synthetic oligonucleotide
uuuacugcugggacagaua

SEQ ID NO: 794895 - RNA, 19 nt, Artificial Sequence
  Description of Artificial Sequence: Synthetic oligonucleotide
ugggagcaugagauggaag

SEQ ID NO: 794896 - RNA, 19 nt, Artificial Sequence
  Description of Artificial Sequence: Synthetic oligonucleotide
ucccacaugguacauucuu

SEQ ID NO: 794897 - RNA, 19 nt, Artificial Sequence
  Description of Artificial Sequence: Synthetic oligonucleotide
cuugugcacagaagagaag

SEQ ID NO: 794898 - RNA, 19 nt, Artificial Sequence
  Description of Artificial Sequence: Synthetic oligonucleotide
ugucccuccaggcgcuccg

SEQ ID NO: 794899 - RNA, 19 nt, Artificial Sequence
  Description of Artificial Sequence: Synthetic oligonucleotide
ggaguuauuaacccaaggu

SEQ ID NO: 794900 - RNA, 19 nt, Artificial Sequence
  Description of Artificial Sequence: Synthetic oligonucleotide
uauauucacaugagaccuu

SEQ ID NO: 794901 - RNA, 19 nt, Artificial Sequence
  Description of Artificial Sequence: Synthetic oligonucleotide
uucuaucaaaguagaucau

SEQ ID NO: 794902 - RNA, 19 nt, Artificial Sequence
  Description of Artificial Sequence: Synthetic oligonucleotide
uuauuaacccaagguaauu

SEQ ID NO: 794903 - RNA, 19 nt, Artificial Sequence
  Description of Artificial Sequence: Synthetic oligonucleotide
ucguacagccuggauaaca

SEQ ID NO: 794904 - RNA, 19 nt, Artificial Sequence
  Description of Artificial Sequence: Synthetic oligonucleotide
uaggugauuucugcaaccu

SEQ ID NO: 794905 - RNA, 19 nt, Artificial Sequence
  Description of Artificial Sequence: Synthetic oligonucleotide
cuggaguuauuaacccaag

SEQ ID NO: 794906 - RNA, 19 nt, Artificial Sequence
  Description of Artificial Sequence: Synthetic oligonucleotide
aguuuuacuaaaggacuau

SEQ ID NO: 794907 - RNA, 19 nt, Artificial Sequence
  Description of Artificial Sequence: Synthetic oligonucleotide
agauaccaacaucuacuga

SEQ ID NO: 794908 - RNA, 19 nt, Artificial Sequence
  Description of Artificial Sequence: Synthetic oligonucleotide
auuuagcaagacugaaauu

SEQ ID NO: 794909 - RNA, 19 nt, Artificial Sequence
  Description of Artificial Sequence: Synthetic oligonucleotide
auuauccuuuguggucacc

SEQ ID NO: 794910 - RNA, 19 nt, Artificial Sequence
  Description of Artificial Sequence: Synthetic oligonucleotide
cuucucgcuuuccaucagc

SEQ ID NO: 794911 - RNA, 19 nt, Artificial Sequence
  Description of Artificial Sequence: Synthetic oligonucleotide
ucagguauauugggcuuug

SEQ ID NO: 794912 - RNA, 19 nt, Artificial Sequence
  Description of Artificial Sequence: Synthetic oligonucleotide
augguacauucuucacuuc

SEQ ID NO: 794913 - RNA, 19 nt, Artificial Sequence
  Description of Artificial Sequence: Synthetic oligonucleotide
cacaugguacauucuucac

SEQ ID NO: 794914 - RNA, 19 nt, Artificial Sequence
  Description of Artificial Sequence: Synthetic oligonucleotide
aggugauuucugcaaccug

SEQ ID NO: 794915 - RNA, 19 nt, Artificial Sequence
  Description of Artificial Sequence: Synthetic oligonucleotide
ugucucggccuccuuuucu

SEQ ID NO: 794916 - RNA, 19 nt, Artificial Sequence
  Description of Artificial Sequence: Synthetic oligonucleotide
cauauauuggaaagcgacu

SEQ ID NO: 794917 - RNA, 19 nt, Artificial Sequence
  Description of Artificial Sequence: Synthetic oligonucleotide
ggugauuucugcaaccuga

SEQ ID NO: 794918 - RNA, 19 nt, Artificial Sequence
  Description of Artificial Sequence: Synthetic oligonucleotide
cauaguuccugcggauugc

SEQ ID NO: 794919 - RNA, 19 nt, Artificial Sequence
  Description of Artificial Sequence: Synthetic oligonucleotide
aaguguaugcacgcugcaa

SEQ ID NO: 794920 - RNA, 19 nt, Artificial Sequence
  Description of Artificial Sequence: Synthetic oligonucleotide
acaugggaacauucacaug

SEQ ID NO: 794921 - RNA, 19 nt, Artificial Sequence
  Description of Artificial Sequence: Synthetic oligonucleotide
gaaguguaugcacgcugca

SEQ ID NO: 794922 - RNA, 19 nt, Artificial Sequence
  Description of Artificial Sequence: Synthetic oligonucleotide
acccaagguaauuaaccua

SEQ ID NO: 794923 - RNA, 19 nt, Artificial Sequence
  Description of Artificial Sequence: Synthetic oligonucleotide
caugguacauucuucacuu

SEQ ID NO: 794924 - RNA, 19 nt, Artificial Sequence
  Description of Artificial Sequence: Synthetic oligonucleotide
cuucacuauaucauacacu

SEQ ID NO: 794925 - RNA, 19 nt, Artificial Sequence
  Description of Artificial Sequence: Synthetic oligonucleotide
guaugcacgcugcaaaacu

SEQ ID NO: 794926 - RNA, 19 nt, Artificial Sequence
  Description of Artificial Sequence: Synthetic oligonucleotide
gugacauucaaagguggga

SEQ ID NO: 794927 - RNA, 19 nt, Artificial Sequence
  Description of Artificial Sequence: Synthetic oligonucleotide
aggcgcuccguacacgucu

SEQ ID NO: 794928 - RNA, 19 nt, Artificial Sequence
  Description of Artificial Sequence: Synthetic oligonucleotide
ccagucuaccugaagaguc

SEQ ID NO: 794929 - RNA, 19 nt, Artificial Sequence
  Description of Artificial Sequence: Synthetic oligonucleotide
ucgcuuuccaucagcucau

SEQ ID NO: 794930 - RNA, 19 nt, Artificial Sequence
  Description of Artificial Sequence: Synthetic oligonucleotide
uacagacagaugggcuacg

SEQ ID NO: 794931 - RNA, 19 nt, Artificial Sequence
  Description of Artificial Sequence: Synthetic oligonucleotide
acuauaucauacacugcau

SEQ ID NO: 794932 - RNA, 19 nt, Artificial Sequence
  Description of Artificial Sequence: Synthetic oligonucleotide
uacagacuuauaggaugug

SEQ ID NO: 794933 - RNA, 19 nt, Artificial Sequence
  Description of Artificial Sequence: Synthetic oligonucleotide
ugccugcuuaucacguuuc

SEQ ID NO: 794934 - RNA, 19 nt, Artificial Sequence
  Description of Artificial Sequence: Synthetic oligonucleotide
gcuauaaaggcucacuaau

SEQ ID NO: 794935 - RNA, 19 nt, Artificial Sequence
  Description of Artificial Sequence: Synthetic oligonucleotide
agugagugagaaauauuua

SEQ ID NO: 794936 - RNA, 19 nt, Artificial Sequence
  Description of Artificial Sequence: Synthetic oligonucleotide
ucaccacuucaauucuauc

SEQ ID NO: 794937 - RNA, 19 nt, Artificial Sequence
  Description of Artificial Sequence: Synthetic oligonucleotide
accauauauuggaaagcga

SEQ ID NO: 794938 - RNA, 19 nt, Artificial Sequence
  Description of Artificial Sequence: Synthetic oligonucleotide
agccuggauaacaagcccu

SEQ ID NO: 794939 - RNA, 19 nt, Artificial Sequence
  Description of Artificial Sequence: Synthetic oligonucleotide
cacaugagaccuuuugugu

SEQ ID NO: 794940 - RNA, 19 nt, Artificial Sequence
  Description of Artificial Sequence: Synthetic oligonucleotide
cacuaaugcccuuggggca

SEQ ID NO: 794941 - RNA, 19 nt, Artificial Sequence
  Description of Artificial Sequence: Synthetic oligonucleotide
cuacgugucccauucuaaa

SEQ ID NO: 794942 - RNA, 19 nt, Artificial Sequence
  Description of Artificial Sequence: Synthetic oligonucleotide
acuccaauaugucccucuu

SEQ ID NO: 794943 - RNA, 19 nt, Artificial Sequence
  Description of Artificial Sequence: Synthetic oligonucleotide
agcugaaacccagcuuguc

SEQ ID NO: 794944 - RNA, 19 nt, Artificial Sequence
  Description of Artificial Sequence: Synthetic oligonucleotide
uguauccaggcugucccuc

SEQ ID NO: 794945 - RNA, 19 nt, Artificial Sequence
  Description of Artificial Sequence: Synthetic oligonucleotide
ggagcaugagauggaagcc

SEQ ID NO: 794946 - RNA, 19 nt, Artificial Sequence
  Description of Artificial Sequence: Synthetic oligonucleotide
cacucguacagccuggaua

SEQ ID NO: 794947 - RNA, 19 nt, Artificial Sequence
  Description of Artificial Sequence: Synthetic oligonucleotide
guuauuaacccaagguaau

SEQ ID NO: 794948 - RNA, 19 nt, Artificial Sequence
  Description of Artificial Sequence: Synthetic oligonucleotide
cauugaccauauauuggaa

SEQ ID NO: 794949 - RNA, 19 nt, Artificial Sequence
  Description of Artificial Sequence: Synthetic oligonucleotide
cagacuuauaggaugugau

SEQ ID NO: 794950 - RNA, 19 nt, Artificial Sequence
  Description of Artificial Sequence: Synthetic oligonucleotide
guauaguucuucacuauau

SEQ ID NO: 794951 - RNA, 19 nt, Artificial Sequence
  Description of Artificial Sequence: Synthetic oligonucleotide
ggcucacuaaugcccuugg

SEQ ID NO: 794952 - RNA, 19 nt, Artificial Sequence
  Description of Artificial Sequence: Synthetic oligonucleotide
agucuaccugaagagucca

SEQ ID NO: 794953 - RNA, 19 nt, Artificial Sequence
  Description of Artificial Sequence: Synthetic oligonucleotide
aagcugaaacccagcuugu

SEQ ID NO: 794954 - RNA, 19 nt, Artificial Sequence
  Description of Artificial Sequence: Synthetic oligonucleotide
auacuccaauaugucccuc

SEQ ID NO: 794955 - RNA, 19 nt, Artificial Sequence
  Description of Artificial Sequence: Synthetic oligonucleotide
ucuaggggcucaucuucua

SEQ ID NO: 794956 - RNA, 19 nt, Artificial Sequence
  Description of Artificial Sequence: Synthetic oligonucleotide
guguaugcacgcugcaaaa

SEQ ID NO: 794957 - RNA, 19 nt, Artificial Sequence
  Description of Artificial Sequence: Synthetic oligonucleotide
cacucagcaucagccuucg

SEQ ID NO: 794958 - RNA, 19 nt, Artificial Sequence
  Description of Artificial Sequence: Synthetic oligonucleotide
ggcucuuuguucaauuauc

SEQ ID NO: 794959 - RNA, 19 nt, Artificial Sequence
  Description of Artificial Sequence: Synthetic oligonucleotide
cagcuauaaaggcucacua

SEQ ID NO: 794960 - RNA, 19 nt, Artificial Sequence
  Description of Artificial Sequence: Synthetic oligonucleotide
cagcucgauguagacuucc

SEQ ID NO: 794961 - RNA, 19 nt, Artificial Sequence
  Description of Artificial Sequence: Synthetic oligonucleotide
augagaccuuuuguguugu

SEQ ID NO: 794962 - RNA, 19 nt, Artificial Sequence
  Description of Artificial Sequence: Synthetic oligonucleotide
uccugcggauugccucagg

SEQ ID NO: 794963 - RNA, 19 nt, Artificial Sequence
  Description of Artificial Sequence: Synthetic oligonucleotide
uaccaagguggcugugccu

SEQ ID NO: 794964 - RNA, 19 nt, Artificial Sequence
  Description of Artificial Sequence: Synthetic oligonucleotide
guacagacuuauaggaugu

SEQ ID NO: 794965 - RNA, 19 nt, Artificial Sequence
  Description of Artificial Sequence: Synthetic oligonucleotide
cacguuucacaucuuucaa

SEQ ID NO: 794966 - RNA, 19 nt, Artificial Sequence
  Description of Artificial Sequence: Synthetic oligonucleotide
ccuauuauucauggaauga

SEQ ID NO: 794967 - RNA, 19 nt, Artificial Sequence
  Description of Artificial Sequence: Synthetic oligonucleotide
ucacucguacagccuggau

SEQ ID NO: 794968 - RNA, 19 nt, Artificial Sequence
  Description of Artificial Sequence: Synthetic oligonucleotide
ggcuagaaacccacugaag

SEQ ID NO: 794969 - RNA, 19 nt, Artificial Sequence
  Description of Artificial Sequence: Synthetic oligonucleotide
aaggcucacuaaugcccuu

SEQ ID NO: 794970 - RNA, 19 nt, Artificial Sequence
  Description of Artificial Sequence: Synthetic oligonucleotide
gcucacuaaugcccuuggg

SEQ ID NO: 794971 - RNA, 19 nt, Artificial Sequence
  Description of Artificial Sequence: Synthetic oligonucleotide
gguccuguugcaaagccaa

SEQ ID NO: 794972 - RNA, 19 nt, Artificial Sequence
  Description of Artificial Sequence: Synthetic oligonucleotide
uuaucacguuucacaucuu

SEQ ID NO: 794973 - RNA, 19 nt, Artificial Sequence
  Description of Artificial Sequence: Synthetic oligonucleotide
caaucagauuuucuaguau

SEQ ID NO: 794974 - RNA, 19 nt, Artificial Sequence
  Description of Artificial Sequence: Synthetic oligonucleotide
gaaacccacugaagacaac

SEQ ID NO: 794975 - RNA, 19 nt, Artificial Sequence
  Description of Artificial Sequence: Synthetic oligonucleotide
gcuccguacacgucugaac

SEQ ID NO: 794976 - RNA, 19 nt, Artificial Sequence
  Description of Artificial Sequence: Synthetic oligonucleotide
agcucaugauggaucuugu

SEQ ID NO: 794977 - RNA, 19 nt, Artificial Sequence
  Description of Artificial Sequence: Synthetic oligonucleotide
agaugagggcuuugucaua

SEQ ID NO: 794978 - RNA, 19 nt, Artificial Sequence
  Description of Artificial Sequence: Synthetic oligonucleotide
acagcucgauguagacuuc

SEQ ID NO: 794979 - RNA, 19 nt, Artificial Sequence
  Description of Artificial Sequence: Synthetic oligonucleotide
cuuuacggaggcucuuugu

SEQ ID NO: 794980 - RNA, 19 nt, Artificial Sequence
  Description of Artificial Sequence: Synthetic oligonucleotide
gcccuuuacagcuuuuaua

SEQ ID NO: 794981 - RNA, 19 nt, Artificial Sequence
  Description of Artificial Sequence: Synthetic oligonucleotide
cuaggggcucaucuucuaa

SEQ ID NO: 794982 - RNA, 19 nt, Artificial Sequence
  Description of Artificial Sequence: Synthetic oligonucleotide
cuccaggcgcuccguacac

SEQ ID NO: 794983 - RNA, 19 nt, Artificial Sequence
  Description of Artificial Sequence: Synthetic oligonucleotide
caauaagggccuucuuccu

SEQ ID NO: 794984 - RNA, 19 nt, Artificial Sequence
  Description of Artificial Sequence: Synthetic oligonucleotide
agccaugacuucacugccu

SEQ ID NO: 794985 - RNA, 19 nt, Artificial Sequence
  Description of Artificial Sequence: Synthetic oligonucleotide
guuuuacuaaaggacuauu

SEQ ID NO: 794986 - RNA, 19 nt, Artificial Sequence
  Description of Artificial Sequence: Synthetic oligonucleotide
cccaagguaauuaaccuau

SEQ ID NO: 794987 - RNA, 19 nt, Artificial Sequence
  Description of Artificial Sequence: Synthetic oligonucleotide
caucuguuuggagaguggu

SEQ ID NO: 794988 - RNA, 19 nt, Artificial Sequence
  Description of Artificial Sequence: Synthetic oligonucleotide
uuccugcggauugccucag

SEQ ID NO: 794989 - RNA, 19 nt, Artificial Sequence
  Description of Artificial Sequence: Synthetic oligonucleotide
cuaagcugaaacccagcuu

SEQ ID NO: 794990 - RNA, 19 nt, Artificial Sequence
  Description of Artificial Sequence: Synthetic oligonucleotide
ggcuacgugucccauucua

SEQ ID NO: 794991 - RNA, 19 nt, Artificial Sequence
  Description of Artificial Sequence: Synthetic oligonucleotide
gcuuccuuacaaacauuga

SEQ ID NO: 794992 - RNA, 19 nt, Artificial Sequence
  Description of Artificial Sequence: Synthetic oligonucleotide
cucuaggggcucaucuucu

SEQ ID NO: 794993 - RNA, 19 nt, Artificial Sequence
  Description of Artificial Sequence: Synthetic oligonucleotide
aacaagcccuggggccaug

SEQ ID NO: 794994 - RNA, 19 nt, Artificial Sequence
  Description of Artificial Sequence: Synthetic oligonucleotide
acggaggcucuuuguucaa

SEQ ID NO: 794995 - RNA, 19 nt, Artificial Sequence
  Description of Artificial Sequence: Synthetic oligonucleotide
gggaacauucacauguuuu

SEQ ID NO: 794996 - RNA, 19 nt, Artificial Sequence
  Description of Artificial Sequence: Synthetic oligonucleotide
gucacucguacagccugga

SEQ ID NO: 794997 - RNA, 19 nt, Artificial Sequence
  Description of Artificial Sequence: Synthetic oligonucleotide
guguagcacucagcaucag

SEQ ID NO: 794998 - RNA, 19 nt, Artificial Sequence
  Description of Artificial Sequence: Synthetic oligonucleotide
gguacauucuucacuucau

SEQ ID NO: 794999 - RNA, 19 nt, Artificial Sequence
  Description of Artificial Sequence: Synthetic oligonucleotide
gcuacgugucccauucuaa

SEQ ID NO: 795000 - RNA, 19 nt, Artificial Sequence
  Description of Artificial Sequence: Synthetic oligonucleotide
gcacucagcaucagccuuc

SEQ ID NO: 795001 - RNA, 19 nt, Artificial Sequence
  Description of Artificial Sequence: Synthetic oligonucleotide
gacuuuacggaggcucuuu

SEQ ID NO: 795002 - RNA, 19 nt, Artificial Sequence
  Description of Artificial Sequence: Synthetic oligonucleotide
cucguacagccuggauaac

SEQ ID NO: 795003 - RNA, 19 nt, Artificial Sequence
  Description of Artificial Sequence: Synthetic oligonucleotide
cugcuugcccagucuaccu

SEQ ID NO: 795004 - RNA, 19 nt, Artificial Sequence
  Description of Artificial Sequence: Synthetic oligonucleotide
ccauaaacauguuggggau

SEQ ID NO: 795005 - RNA, 19 nt, Artificial Sequence
  Description of Artificial Sequence: Synthetic oligonucleotide
gccugcuuaucacguuuca

SEQ ID NO: 795006 - RNA, 19 nt, Artificial Sequence
  Description of Artificial Sequence: Synthetic oligonucleotide
ccacuucaauucuaucaaa

SEQ ID NO: 795007 - RNA, 19 nt, Artificial Sequence
  Description of Artificial Sequence: Synthetic oligonucleotide
ggacagauaccaacaucua

SEQ ID NO: 795008 - RNA, 19 nt, Artificial Sequence
  Description of Artificial Sequence: Synthetic oligonucleotide
gaugggcuacgugucccau

SEQ ID NO: 795009 - RNA, 19 nt, Artificial Sequence
  Description of Artificial Sequence: Synthetic oligonucleotide
ggcgcuccguacacgucug

SEQ ID NO: 795010 - RNA, 19 nt, Artificial Sequence
  Description of Artificial Sequence: Synthetic oligonucleotide
gcucauaguuccugcggau

SEQ ID NO: 795011 - RNA, 19 nt, Artificial Sequence
  Description of Artificial Sequence: Synthetic oligonucleotide
caguggcuagaaacccacu

SEQ ID NO: 795012 - RNA, 19 nt, Artificial Sequence
  Description of Artificial Sequence: Synthetic oligonucleotide
ccuuacaaacauugaccau

SEQ ID NO: 795013 - RNA, 19 nt, Artificial Sequence
  Description of Artificial Sequence: Synthetic oligonucleotide
cugcucccaacugagccau

SEQ ID NO: 795014 - RNA, 19 nt, Artificial Sequence
  Description of Artificial Sequence: Synthetic oligonucleotide
gucuaccugaagaguccau

SEQ ID NO: 795015 - RNA, 19 nt, Artificial Sequence
  Description of Artificial Sequence: Synthetic oligonucleotide
gucccacaugguacauucu

SEQ ID NO: 795016 - RNA, 19 nt, Artificial Sequence
  Description of Artificial Sequence: Synthetic oligonucleotide
gcggauugccucagguaua

SEQ ID NO: 795017 - RNA, 19 nt, Artificial Sequence
  Description of Artificial Sequence: Synthetic oligonucleotide
ccugaaguguaugcacgcu

SEQ ID NO: 795018 - RNA, 19 nt, Artificial Sequence
  Description of Artificial Sequence: Synthetic oligonucleotide
cccagucuaccugaagagu

SEQ ID NO: 795019 - RNA, 19 nt, Artificial Sequence
  Description of Artificial Sequence: Synthetic oligonucleotide
ccaagguaauuaaccuauu

SEQ ID NO: 795020 - RNA, 19 nt, Artificial Sequence
  Description of Artificial Sequence: Synthetic oligonucleotide
gcgcuccguacacgucuga

SEQ ID NO: 795021 - RNA, 19 nt, Artificial Sequence
  Description of Artificial Sequence: Synthetic oligonucleotide
ggacuuuacggaggcucuu

SEQ ID NO: 795022 - RNA, 19 nt, Artificial Sequence
  Description of Artificial Sequence: Synthetic oligonucleotide
gggcuacgugucccauucu

SEQ ID NO: 795023 - RNA, 19 nt, Artificial Sequence
  Description of Artificial Sequence: Synthetic oligonucleotide
cgcuccguacacgucugaa

SEQ ID NO: 795024 - RNA, 19 nt, Artificial Sequence
  Description of Artificial Sequence: Synthetic oligonucleotide
ggauugccucagguauauu

SEQ ID NO: 795025 - RNA, 19 nt, Artificial Sequence
  Description of Artificial Sequence: Synthetic oligonucleotide
  modified_base (1)..(1): a, c, u, g, unknown or other
nuuaaacuuaugcuuccuu

SEQ ID NO: 795026 - RNA, 19 nt, Artificial Sequence
  Description of Artificial Sequence: Synthetic oligonucleotide
uauagggauauccugaucg

SEQ ID NO: 795027 - RNA, 19 nt, Artificial Sequence
  Description of Artificial Sequence: Synthetic oligonucleotide
aauagcaagaguguggccc

SEQ ID NO: 795028 - RNA, 19 nt, Artificial Sequence
  Description of Artificial Sequence: Synthetic oligonucleotide
auaauuagaauuuaaauuu

SEQ ID NO: 795029 - RNA, 19 nt, Artificial Sequence
  Description of Artificial Sequence: Synthetic oligonucleotide
agauagacaaguuaauuuc

SEQ ID NO: 795030 - RNA, 19 nt, Artificial Sequence
  Description of Artificial Sequence: Synthetic oligonucleotide
ugaaccgagagucaaaugc

SEQ ID NO: 795031 - RNA, 19 nt, Artificial Sequence
  Description of Artificial Sequence: Synthetic oligonucleotide
guccaaguaacuuauaggg

SEQ ID NO: 795032 - RNA, 19 nt, Artificial Sequence
  Description of Artificial Sequence: Synthetic oligonucleotide
aaagaaaauugcccgcccc

SEQ ID NO: 795033 - RNA, 19 nt, Artificial Sequence
  Description of Artificial Sequence: Synthetic oligonucleotide
agagguagcauucauacug

SEQ ID NO: 795034 - RNA, 19 nt, Artificial Sequence
  Description of Artificial Sequence: Synthetic oligonucleotide
gauggauuaaagcaguaug

SEQ ID NO: 795035 - RNA, 19 nt, Artificial Sequence
  Description of Artificial Sequence: Synthetic oligonucleotide
aaagacgagaauccuuccg

SEQ ID NO: 795036 - RNA, 19 nt, Artificial Sequence
  Description of Artificial Sequence: Synthetic oligonucleotide
gaaaccagguuccaugugg

SEQ ID NO: 795037 - RNA, 19 nt, Artificial Sequence
  Description of Artificial Sequence: Synthetic oligonucleotide
agagacaugggcaaaagac

SEQ ID NO: 795038 - RNA, 19 nt, Artificial Sequence
  Description of Artificial Sequence: Synthetic oligonucleotide
aaaagacgagaauccuucc

SEQ ID NO: 795039 - RNA, 19 nt, Artificial Sequence
  Description of Artificial Sequence: Synthetic oligonucleotide
agaaacuccauauuccaag

SEQ ID NO: 795040 - RNA, 19 nt, Artificial Sequence
  Description of Artificial Sequence: Synthetic oligonucleotide
uguccaaguaacuuauagg

SEQ ID NO: 795041 - RNA, 19 nt, Artificial Sequence
  Description of Artificial Sequence: Synthetic oligonucleotide
cacagcuaggccuauaugg

SEQ ID NO: 795042 - RNA, 19 nt, Artificial Sequence
  Description of Artificial Sequence: Synthetic oligonucleotide
gacugcaugaccccuaacg

SEQ ID NO: 795043 - RNA, 19 nt, Artificial Sequence
  Description of Artificial Sequence: Synthetic oligonucleotide
caaguuuccgcuuggauag

SEQ ID NO: 795044 - RNA, 19 nt, Artificial Sequence
  Description of Artificial Sequence: Synthetic oligonucleotide
aguuagcaaauucuaguac

SEQ ID NO: 795045 - RNA, 19 nt, Artificial Sequence
  Description of Artificial Sequence: Synthetic oligonucleotide
acugcaugaccccuaacgc

SEQ ID NO: 795046 - RNA, 19 nt, Artificial Sequence
  Description of Artificial Sequence: Synthetic oligonucleotide
aacuuauagggauauccug

SEQ ID NO: 795047 - RNA, 19 nt, Artificial Sequence
  Description of Artificial Sequence: Synthetic oligonucleotide
uggcucauuccucaaagcg

SEQ ID NO: 795048 - RNA, 19 nt, Artificial Sequence
  Description of Artificial Sequence: Synthetic oligonucleotide
  modified_base (3)..(3): a, c, u, g, unknown or other
uunuuagcauggaagguga

SEQ ID NO: 795049 - RNA, 19 nt, Artificial Sequence
  Description of Artificial Sequence: Synthetic oligonucleotide
acgagaauccuuccgaggg

SEQ ID NO: 795050 - RNA, 19 nt, Artificial Sequence
  Description of Artificial Sequence: Synthetic oligonucleotide
ugaccaauguccaaguaac

SEQ ID NO: 795051 - RNA, 19 nt, Artificial Sequence
  Description of Artificial Sequence: Synthetic oligonucleotide
guagagguagcauucauac

SEQ ID NO: 795052 - RNA, 19 nt, Artificial Sequence
  Description of Artificial Sequence: Synthetic oligonucleotide
ugugguucagugcaagugc

SEQ ID NO: 795053 - RNA, 19 nt, Artificial Sequence
  Description of Artificial Sequence: Synthetic oligonucleotide
gacaagauggaguguagag

SEQ ID NO: 795054 - RNA, 19 nt, Artificial Sequence
  Description of Artificial Sequence: Synthetic oligonucleotide
agcaagaucugugacaccg

SEQ ID NO: 795055 - RNA, 19 nt, Artificial Sequence
  Description of Artificial Sequence: Synthetic oligonucleotide
caagguaccgagcauagag

SEQ ID NO: 795056 - RNA, 19 nt, Artificial Sequence
  Description of Artificial Sequence: Synthetic oligonucleotide
aucacauuggucaaggaag

SEQ ID NO: 795057 - RNA, 19 nt, Artificial Sequence
  Description of Artificial Sequence: Synthetic oligonucleotide
gaaccggagauucugcccg

SEQ ID NO: 795058 - RNA, 19 nt, Artificial Sequence
  Description of Artificial Sequence: Synthetic oligonucleotide
aagacgagaauccuuccga

SEQ ID NO: 795059 - RNA, 19 nt, Artificial Sequence
  Description of Artificial Sequence: Synthetic oligonucleotide
caaaagacgagaauccuuc

SEQ ID NO: 795060 - RNA, 19 nt, Artificial Sequence
  Description of Artificial Sequence: Synthetic oligonucleotide
  modified_base (4)..(4): a, c, u, g, unknown or other
guunuuagcauggaaggug

SEQ ID NO: 795061 - RNA, 19 nt, Artificial Sequence
  Description of Artificial Sequence: Synthetic oligonucleotide
uuagcaagaucugugacac

SEQ ID NO: 795062 - RNA, 19 nt, Artificial Sequence
  Description of Artificial Sequence: Synthetic oligonucleotide
ugggacauaggguaugucc

SEQ ID NO: 795063 - RNA, 19 nt, Artificial Sequence
  Description of Artificial Sequence: Synthetic oligonucleotide
uaccacaugaggcacggag

SEQ ID NO: 795064 - RNA, 19 nt, Artificial Sequence
  Description of Artificial Sequence: Synthetic oligonucleotide
uggcuaacgguccugaaca

SEQ ID NO: 795065 - RNA, 19 nt, Artificial Sequence
  Description of Artificial Sequence: Synthetic oligonucleotide
aaguuagcaaauucuagua

SEQ ID NO: 795066 - RNA, 19 nt, Artificial Sequence
  Description of Artificial Sequence: Synthetic oligonucleotide
acauaggguauguccaccc

SEQ ID NO: 795067 - RNA, 19 nt, Artificial Sequence
  Description of Artificial Sequence: Synthetic oligonucleotide
uaacuuauagggauauccu

SEQ ID NO: 795068 - RNA, 19 nt, Artificial Sequence
  Description of Artificial Sequence: Synthetic oligonucleotide
ccugcuaauagcaagagug

SEQ ID NO: 795069 - RNA, 19 nt, Artificial Sequence
  Description of Artificial Sequence: Synthetic oligonucleotide
uuucauggguucaaucuug

SEQ ID NO: 795070 - RNA, 19 nt, Artificial Sequence
  Description of Artificial Sequence: Synthetic oligonucleotide
cuaacgguccugaacacag

SEQ ID NO: 795071 - RNA, 19 nt, Artificial Sequence
  Description of Artificial Sequence: Synthetic oligonucleotide
uuuauccaaugcauguuca

SEQ ID NO: 795072 - RNA, 19 nt, Artificial Sequence
  Description of Artificial Sequence: Synthetic oligonucleotide
accccuaacgcucccaggc

SEQ ID NO: 795073 - RNA, 19 nt, Artificial Sequence
  Description of Artificial Sequence: Synthetic oligonucleotide
cucaguaaagagacgcugg

SEQ ID NO: 795074 - RNA, 19 nt, Artificial Sequence
  Description of Artificial Sequence: Synthetic oligonucleotide
guaaagagacgcuggaacc

SEQ ID NO: 795075 - RNA, 19 nt, Artificial Sequence
  Description of Artificial Sequence: Synthetic oligonucleotide
ugugacaccgucauaucac

SEQ ID NO: 795076 - RNA, 19 nt, Artificial Sequence
  Description of Artificial Sequence: Synthetic oligonucleotide
ugaucgaccaaagaaacuc

SEQ ID NO: 795077 - RNA, 19 nt, Artificial Sequence
  Description of Artificial Sequence: Synthetic oligonucleotide
aagaaaauugcccgccccu

SEQ ID NO: 795078 - RNA, 19 nt, Artificial Sequence
  Description of Artificial Sequence: Synthetic oligonucleotide
ucaaguuuccgcuuggaua

SEQ ID NO: 795079 - RNA, 19 nt, Artificial Sequence
  Description of Artificial Sequence: Synthetic oligonucleotide
auucacaagguaccgagca

SEQ ID NO: 795080 - RNA, 19 nt, Artificial Sequence
  Description of Artificial Sequence: Synthetic oligonucleotide
ucauaucacuuccugacaa

SEQ ID NO: 795081 - RNA, 19 nt, Artificial Sequence
  Description of Artificial Sequence: Synthetic oligonucleotide
uggguucaaucuuggaugg

SEQ ID NO: 795082 - RNA, 19 nt, Artificial Sequence
  Description of Artificial Sequence: Synthetic oligonucleotide
  modified_base (6)..(6): a, c, u, g, unknown or other
ggguunuuagcauggaagg

SEQ ID NO: 795083 - RNA, 19 nt, Artificial Sequence
  Description of Artificial Sequence: Synthetic oligonucleotide
ucuagguaugccaguguag

SEQ ID NO: 795084 - RNA, 19 nt, Artificial Sequence
  Description of Artificial Sequence: Synthetic oligonucleotide
uucauggguucaaucuugg

SEQ ID NO: 795085 - RNA, 19 nt, Artificial Sequence
  Description of Artificial Sequence: Synthetic oligonucleotide
ugucauaauuagaauuuaa

SEQ ID NO: 795086 - RNA, 19 nt, Artificial Sequence
  Description of Artificial Sequence: Synthetic oligonucleotide
uccaaguaacuuauaggga

SEQ ID NO: 795087 - RNA, 19 nt, Artificial Sequence
  Description of Artificial Sequence: Synthetic oligonucleotide
ucgguauucaaacccuuca

SEQ ID NO: 795088 - RNA, 19 nt, Artificial Sequence
  Description of Artificial Sequence: Synthetic oligonucleotide
ucaguaaagagacgcugga

SEQ ID NO: 795089 - RNA, 19 nt, Artificial Sequence
  Description of Artificial Sequence: Synthetic oligonucleotide
ugggcaaaagacgagaauc

SEQ ID NO: 795090 - RNA, 19 nt, Artificial Sequence
  Description of Artificial Sequence: Synthetic oligonucleotide
gugaacaucccaaacagac

SEQ ID NO: 795091 - RNA, 19 nt, Artificial Sequence
  Description of Artificial Sequence: Synthetic oligonucleotide
aacgguccugaacacagca

SEQ ID NO: 795092 - RNA, 19 nt, Artificial Sequence
  Description of Artificial Sequence: Synthetic oligonucleotide
uguuagcaagaucugugac

SEQ ID NO: 795093 - RNA, 19 nt, Artificial Sequence
  Description of Artificial Sequence: Synthetic oligonucleotide
guagcugucauaauuagaa

SEQ ID NO: 795094 - RNA, 19 nt, Artificial Sequence
  Description of Artificial Sequence: Synthetic oligonucleotide
agaagagccgggcagcuug

SEQ ID NO: 795095 - RNA, 19 nt, Artificial Sequence
  Description of Artificial Sequence: Synthetic oligonucleotide
cucagaagauugcugcugg

SEQ ID NO: 795096 - RNA, 19 nt, Artificial Sequence
  Description of Artificial Sequence: Synthetic oligonucleotide
uuuccgcuuggauagugag

SEQ ID NO: 795097 - RNA, 19 nt, Artificial Sequence
  Description of Artificial Sequence: Synthetic oligonucleotide
ucucacaaauggcucauuc

SEQ ID NO: 795098 - RNA, 19 nt, Artificial Sequence
  Description of Artificial Sequence: Synthetic oligonucleotide
uuuccuacaagugaccaau

SEQ ID NO: 795099 - RNA, 19 nt, Artificial Sequence
  Description of Artificial Sequence: Synthetic oligonucleotide
gacgagaauccuuccgagg

SEQ ID NO: 795100 - RNA, 19 nt, Artificial Sequence
  Description of Artificial Sequence: Synthetic oligonucleotide
ugucagaacagcuuugcuu

SEQ ID NO: 795101 - RNA, 19 nt, Artificial Sequence
  Description of Artificial Sequence: Synthetic oligonucleotide
ucggagucgguauucaaac

SEQ ID NO: 795102 - RNA, 19 nt, Artificial Sequence
  Description of Artificial Sequence: Synthetic oligonucleotide
auccuugcauauuucucgg

SEQ ID NO: 795103 - RNA, 19 nt, Artificial Sequence
  Description of Artificial Sequence: Synthetic oligonucleotide
gaucacauuggucaaggaa

SEQ ID NO: 795104 - RNA, 19 nt, Artificial Sequence
  Description of Artificial Sequence: Synthetic oligonucleotide
guuagcaagaucugugaca

SEQ ID NO: 795105 - RNA, 19 nt, Artificial Sequence
  Description of Artificial Sequence: Synthetic oligonucleotide
ugcaugaccccuaacgcuc

SEQ ID NO: 795106 - RNA, 19 nt, Artificial Sequence
  Description of Artificial Sequence: Synthetic oligonucleotide
  modified_base (7)..(7): a, c, u, g, unknown or other
gggguunuuagcauggaag

SEQ ID NO: 795107 - RNA, 19 nt, Artificial Sequence
  Description of Artificial Sequence: Synthetic oligonucleotide
gauagacaaguuaauuuca

SEQ ID NO: 795108 - RNA, 19 nt, Artificial Sequence
  Description of Artificial Sequence: Synthetic oligonucleotide
aguuaauuucaguacuaau

SEQ ID NO: 795109 - RNA, 19 nt, Artificial Sequence
  Description of Artificial Sequence: Synthetic oligonucleotide
gagaauccuuccgagggcg

SEQ ID NO: 795110 - RNA, 19 nt, Artificial Sequence
  Description of Artificial Sequence: Synthetic oligonucleotide
gacagacucgccuguaggc

SEQ ID NO: 795111 - RNA, 19 nt, Artificial Sequence
  Description of Artificial Sequence: Synthetic oligonucleotide
uaccucaagcucaaguuuc

SEQ ID NO: 795112 - RNA, 19 nt, Artificial Sequence
  Description of Artificial Sequence: Synthetic oligonucleotide
acuuauagggauauccuga

SEQ ID NO: 795113 - RNA, 19 nt, Artificial Sequence
  Description of Artificial Sequence: Synthetic oligonucleotide
acagacucgccuguaggcc

SEQ ID NO: 795114 - RNA, 19 nt, Artificial Sequence
  Description of Artificial Sequence: Synthetic oligonucleotide
auagacaaguuaauuucag

SEQ ID NO: 795115 - RNA, 19 nt, Artificial Sequence
  Description of Artificial Sequence: Synthetic oligonucleotide
uucaaacccuucauucaca

SEQ ID NO: 795116 - RNA, 19 nt, Artificial Sequence
  Description of Artificial Sequence: Synthetic oligonucleotide
uuccgcuuggauagugagg

SEQ ID NO: 795117 - RNA, 19 nt, Artificial Sequence
  Description of Artificial Sequence: Synthetic oligonucleotide
ugugucagaacagcuuugc

SEQ ID NO: 795118 - RNA, 19 nt, Artificial Sequence
  Description of Artificial Sequence: Synthetic oligonucleotide
cugagcucaagacaggcuc

SEQ ID NO: 795119 - RNA, 19 nt, Artificial Sequence
  Description of Artificial Sequence: Synthetic oligonucleotide
aauaguccaugugucagaa

SEQ ID NO: 795120 - RNA, 19 nt, Artificial Sequence
  Description of Artificial Sequence: Synthetic oligonucleotide
aaguuaauuucaguacuaa

SEQ ID NO: 795121 - RNA, 19 nt, Artificial Sequence
  Description of Artificial Sequence: Synthetic oligonucleotide
acuccauauuccaaguuag

SEQ ID NO: 795122 - RNA, 19 nt, Artificial Sequence
  Description of Artificial Sequence: Synthetic oligonucleotide
cuuuuggaaucaucccagg

SEQ ID NO: 795123 - RNA, 19 nt, Artificial Sequence
  Description of Artificial Sequence: Synthetic oligonucleotide
agggcgaccuuucuucuuc

SEQ ID NO: 795124 - RNA, 19 nt, Artificial Sequence
  Description of Artificial Sequence: Synthetic oligonucleotide
agguaccgagcauagagga

SEQ ID NO: 795125 - RNA, 19 nt, Artificial Sequence
  Description of Artificial Sequence: Synthetic oligonucleotide
uuggauagugaggagggcu

SEQ ID NO: 795126 - RNA, 19 nt, Artificial Sequence
  Description of Artificial Sequence: Synthetic oligonucleotide
uauuucucggagucgguau

SEQ ID NO: 795127 - RNA, 19 nt, Artificial Sequence
  Description of Artificial Sequence: Synthetic oligonucleotide
gagggcuugaccaagugga

SEQ ID NO: 795128 - RNA, 19 nt, Artificial Sequence
  Description of Artificial Sequence: Synthetic oligonucleotide
gcuaauagcaagagugugg

SEQ ID NO: 795129 - RNA, 19 nt, Artificial Sequence
  Description of Artificial Sequence: Synthetic oligonucleotide
aaaauugcccgccccuuuu

SEQ ID NO: 795130 - RNA, 19 nt, Artificial Sequence
  Description of Artificial Sequence: Synthetic oligonucleotide
agacgagaauccuuccgag

SEQ ID NO: 795131 - RNA, 19 nt, Artificial Sequence
  Description of Artificial Sequence: Synthetic oligonucleotide
ucauuccucaaagcggaag

SEQ ID NO: 795132 - RNA, 19 nt, Artificial Sequence
  Description of Artificial Sequence: Synthetic oligonucleotide
auuuuacacuuagaaaaga

SEQ ID NO: 795133 - RNA, 19 nt, Artificial Sequence
  Description of Artificial Sequence: Synthetic oligonucleotide
cuugacugcaggguaagug

SEQ ID NO: 795134 - RNA, 19 nt, Artificial Sequence
  Description of Artificial Sequence: Synthetic oligonucleotide
cuaccacccugacaggugg

SEQ ID NO: 795135 - RNA, 19 nt, Artificial Sequence
  Description of Artificial Sequence: Synthetic oligonucleotide
aagcaguaugcuuucccau

SEQ ID NO: 795136 - RNA, 19 nt, Artificial Sequence
  Description of Artificial Sequence: Synthetic oligonucleotide
gaucgaccaaagaaacucc

SEQ ID NO: 795137 - RNA, 19 nt, Artificial Sequence
  Description of Artificial Sequence: Synthetic oligonucleotide
aacgcucccaggcucuugu

SEQ ID NO: 795138 - RNA, 19 nt, Artificial Sequence
  Description of Artificial Sequence: Synthetic oligonucleotide
ucgccuguaggccuggcac

SEQ ID NO: 795139 - RNA, 19 nt, Artificial Sequence
  Description of Artificial Sequence: Synthetic oligonucleotide
ccugaauuauggcuaacgg

SEQ ID NO: 795140 - RNA, 19 nt, Artificial Sequence
  Description of Artificial Sequence: Synthetic oligonucleotide
caaguugucuuuccacuac

SEQ ID NO: 795141 - RNA, 19 nt, Artificial Sequence
  Description of Artificial Sequence: Synthetic oligonucleotide
uucagugcaagugcuggug

SEQ ID NO: 795142 - RNA, 19 nt, Artificial Sequence
  Description of Artificial Sequence: Synthetic oligonucleotide
acucaguaaagagacgcug

SEQ ID NO: 795143 - RNA, 19 nt, Artificial Sequence
  Description of Artificial Sequence: Synthetic oligonucleotide
accaaguggaccuucucau

SEQ ID NO: 795144 - RNA, 19 nt, Artificial Sequence
  Description of Artificial Sequence: Synthetic oligonucleotide
  modified_base (19)..(19): a, c, u, g, unknown or other
ucaaucuuggaugggguun

SEQ ID NO: 795145 - RNA, 19 nt, Artificial Sequence
  Description of Artificial Sequence: Synthetic oligonucleotide
uggaaccggagauucugcc

SEQ ID NO: 795146 - RNA, 19 nt, Artificial Sequence
  Description of Artificial Sequence: Synthetic oligonucleotide
agguaugccaguguagucu

SEQ ID NO: 795147 - RNA, 19 nt, Artificial Sequence
  Description of Artificial Sequence: Synthetic oligonucleotide
agcuaggccuauauggagg

SEQ ID NO: 795148 - RNA, 19 nt, Artificial Sequence
  Description of Artificial Sequence: Synthetic oligonucleotide
aggguauguccacccaggg

SEQ ID NO: 795149 - RNA, 19 nt, Artificial Sequence
  Description of Artificial Sequence: Synthetic oligonucleotide
uaggccuauauggagggac

SEQ ID NO: 795150 - RNA, 19 nt, Artificial Sequence
  Description of Artificial Sequence: Synthetic oligonucleotide
uuauagggauauccugauc

SEQ ID NO: 795151 - RNA, 19 nt, Artificial Sequence
  Description of Artificial Sequence: Synthetic oligonucleotide
ucagaagauugcugcuggc

SEQ ID NO: 795152 - RNA, 19 nt, Artificial Sequence
  Description of Artificial Sequence: Synthetic oligonucleotide
ucuuccgcagacccacuac

SEQ ID NO: 795153 - RNA, 19 nt, Artificial Sequence
  Description of Artificial Sequence: Synthetic oligonucleotide
  modified_base (2)..(2): a, c, u, g, unknown or other
unuuagcauggaaggugac

SEQ ID NO: 795154 - RNA, 19 nt, Artificial Sequence
  Description of Artificial Sequence: Synthetic oligonucleotide
  modified_base (8)..(8): a, c, u, g, unknown or other
ugggguunuuagcauggaa

SEQ ID NO: 795155 - RNA, 19 nt, Artificial Sequence
  Description of Artificial Sequence: Synthetic oligonucleotide
gcuaggccuauauggaggg

SEQ ID NO: 795156 - RNA, 19 nt, Artificial Sequence
  Description of Artificial Sequence: Synthetic oligonucleotide
ccuauauggagggacaagc

SEQ ID NO: 795157 - RNA, 19 nt, Artificial Sequence
  Description of Artificial Sequence: Synthetic oligonucleotide
uggauagugaggagggcuu

SEQ ID NO: 795158 - RNA, 19 nt, Artificial Sequence
  Description of Artificial Sequence: Synthetic oligonucleotide
gcuuggauagugaggaggg

SEQ ID NO: 795159 - RNA, 19 nt, Artificial Sequence
  Description of Artificial Sequence: Synthetic oligonucleotide
aguaacuuauagggauauc

SEQ ID NO: 795160 - RNA, 19 nt, Artificial Sequence
  Description of Artificial Sequence: Synthetic oligonucleotide
gaaacuccauauuccaagu

SEQ ID NO: 795161 - RNA, 19 nt, Artificial Sequence
  Description of Artificial Sequence: Synthetic oligonucleotide
uccgcagacccacuacugu

SEQ ID NO: 795162 - RNA, 19 nt, Artificial Sequence
  Description of Artificial Sequence: Synthetic oligonucleotide
gacauaggguauguccacc

SEQ ID NO: 795163 - RNA, 19 nt, Artificial Sequence
  Description of Artificial Sequence: Synthetic oligonucleotide
ucgaccaaagaaacuccau

SEQ ID NO: 795164 - RNA, 19 nt, Artificial Sequence
  Description of Artificial Sequence: Synthetic oligonucleotide
uguuuauccaaugcauguu

SEQ ID NO: 795165 - RNA, 19 nt, Artificial Sequence
  Description of Artificial Sequence: Synthetic oligonucleotide
gcacucaguaaagagacgc

SEQ ID NO: 795166 - RNA, 19 nt, Artificial Sequence
  Description of Artificial Sequence: Synthetic oligonucleotide
agcggaagcagcacagcac

SEQ ID NO: 795167 - RNA, 19 nt, Artificial Sequence
  Description of Artificial Sequence: Synthetic oligonucleotide
uagagguagcauucauacu

SEQ ID NO: 795168 - RNA, 19 nt, Artificial Sequence
  Description of Artificial Sequence: Synthetic oligonucleotide
uucaaucuuggaugggguu

SEQ ID NO: 795169 - RNA, 19 nt, Artificial Sequence
  Description of Artificial Sequence: Synthetic oligonucleotide
gugacaaugcagcaggagu

SEQ ID NO: 795170 - RNA, 19 nt, Artificial Sequence
  Description of Artificial Sequence: Synthetic oligonucleotide
ccugaucgaccaaagaaac

SEQ ID NO: 795171 - RNA, 19 nt, Artificial Sequence
  Description of Artificial Sequence: Synthetic oligonucleotide
cuguaccacaugaggcacg

SEQ ID NO: 795172 - RNA, 19 nt, Artificial Sequence
  Description of Artificial Sequence: Synthetic oligonucleotide
uuccaguggagcagugaac

SEQ ID NO: 795173 - RNA, 19 nt, Artificial Sequence
  Description of Artificial Sequence: Synthetic oligonucleotide
cugaauuauggcuaacggu

SEQ ID NO: 795174 - RNA, 19 nt, Artificial Sequence
  Description of Artificial Sequence: Synthetic oligonucleotide
accaauguccaaguaacuu

SEQ ID NO: 795175 - RNA, 19 nt, Artificial Sequence
  Description of Artificial Sequence: Synthetic oligonucleotide
cacaguacaccuucugcca

SEQ ID NO: 795176 - RNA, 19 nt, Artificial Sequence
  Description of Artificial Sequence: Synthetic oligonucleotide
acagcuaggccuauaugga

SEQ ID NO: 795177 - RNA, 19 nt, Artificial Sequence
  Description of Artificial Sequence: Synthetic oligonucleotide
guugacucccacuggcuuc

SEQ ID NO: 795178 - RNA, 19 nt, Artificial Sequence
  Description of Artificial Sequence: Synthetic oligonucleotide
cuggaaccggagauucugc

SEQ ID NO: 795179 - RNA, 19 nt, Artificial Sequence
  Description of Artificial Sequence: Synthetic oligonucleotide
uaccgagcauagaggagga

SEQ ID NO: 795180 - RNA, 19 nt, Artificial Sequence
  Description of Artificial Sequence: Synthetic oligonucleotide
cgucauaucacuuccugac

SEQ ID NO: 795181 - RNA, 19 nt, Artificial Sequence
  Description of Artificial Sequence: Synthetic oligonucleotide
ucauggguucaaucuugga

SEQ ID NO: 795182 - RNA, 19 nt, Artificial Sequence
  Description of Artificial Sequence: Synthetic oligonucleotide
auauccugaucgaccaaag

SEQ ID NO: 795183 - RNA, 19 nt, Artificial Sequence
  Description of Artificial Sequence: Synthetic oligonucleotide
gugacagacucgccuguag

SEQ ID NO: 795184 - RNA, 19 nt, Artificial Sequence
  Description of Artificial Sequence: Synthetic oligonucleotide
uaacgguccugaacacagc

SEQ ID NO: 795185 - RNA, 19 nt, Artificial Sequence
  Description of Artificial Sequence: Synthetic oligonucleotide
gucauaucacuuccugaca

SEQ ID NO: 795186 - RNA, 19 nt, Artificial Sequence
  Description of Artificial Sequence: Synthetic oligonucleotide
cagugaaucuugcuuguca

SEQ ID NO: 795187 - RNA, 19 nt, Artificial Sequence
  Description of Artificial Sequence: Synthetic oligonucleotide
cauagaggaggagccaaug

SEQ ID NO: 795188 - RNA, 19 nt, Artificial Sequence
  Description of Artificial Sequence: Synthetic oligonucleotide
ggcuacuugucucucagga

SEQ ID NO: 795189 - RNA, 19 nt, Artificial Sequence
  Description of Artificial Sequence: Synthetic oligonucleotide
acgcuggaaccggagauuc

SEQ ID NO: 795190 - RNA, 19 nt, Artificial Sequence
  Description of Artificial Sequence: Synthetic oligonucleotide
  modified_base (12)..(12): a, c, u, g, unknown or other
uggaugggguunuuagcau

SEQ ID NO: 795191 - RNA, 19 nt, Artificial Sequence
  Description of Artificial Sequence: Synthetic oligonucleotide
  modified_base (11)..(11): a, c, u, g, unknown or other
ggaugggguunuuagcaug

SEQ ID NO: 795192 - RNA, 19 nt, Artificial Sequence
  Description of Artificial Sequence: Synthetic oligonucleotide
uagggauauccugaucgac

SEQ ID NO: 795193 - RNA, 19 nt, Artificial Sequence
  Description of Artificial Sequence: Synthetic oligonucleotide
cugcccagaucagacacgc

SEQ ID NO: 795194 - RNA, 19 nt, Artificial Sequence
  Description of Artificial Sequence: Synthetic oligonucleotide
gggcaaaagacgagaaucc

SEQ ID NO: 795195 - RNA, 19 nt, Artificial Sequence
  Description of Artificial Sequence: Synthetic oligonucleotide
gggauauccugaucgacca

SEQ ID NO: 795196 - RNA, 19 nt, Artificial Sequence
  Description of Artificial Sequence: Synthetic oligonucleotide
augggcaaaagacgagaau

SEQ ID NO: 795197 - RNA, 19 nt, Artificial Sequence
  Description of Artificial Sequence: Synthetic oligonucleotide
uagguaugccaguguaguc

SEQ ID NO: 795198 - RNA, 19 nt, Artificial Sequence
  Description of Artificial Sequence: Synthetic oligonucleotide
uaccacccugacagguggg

SEQ ID NO: 795199 - RNA, 19 nt, Artificial Sequence
  Description of Artificial Sequence: Synthetic oligonucleotide
ccuacaagugaccaauguc

SEQ ID NO: 795200 - RNA, 19 nt, Artificial Sequence
  Description of Artificial Sequence: Synthetic oligonucleotide
ggaaucaucccaggccugg

SEQ ID NO: 795201 - RNA, 19 nt, Artificial Sequence
  Description of Artificial Sequence: Synthetic oligonucleotide
uccuugcauauuucucgga

SEQ ID NO: 795202 - RNA, 19 nt, Artificial Sequence
  Description of Artificial Sequence: Synthetic oligonucleotide
auuucucggagucgguauu

SEQ ID NO: 795203 - RNA, 19 nt, Artificial Sequence
  Description of Artificial Sequence: Synthetic oligonucleotide
uccgugaaccgagagucaa

SEQ ID NO: 795204 - RNA, 19 nt, Artificial Sequence
  Description of Artificial Sequence: Synthetic oligonucleotide
cauggguucaaucuuggau

SEQ ID NO: 795205 - RNA, 19 nt, Artificial Sequence
  Description of Artificial Sequence: Synthetic oligonucleotide
cugugacaccgucauauca

SEQ ID NO: 795206 - RNA, 19 nt, Artificial Sequence
  Description of Artificial Sequence: Synthetic oligonucleotide
ugggccagugaaucuugcu

SEQ ID NO: 795207 - RNA, 19 nt, Artificial Sequence
  Description of Artificial Sequence: Synthetic oligonucleotide
aucgaccaaagaaacucca

SEQ ID NO: 795208 - RNA, 19 nt, Artificial Sequence
  Description of Artificial Sequence: Synthetic oligonucleotide
uuucucggagucgguauuc

SEQ ID NO: 795209 - RNA, 19 nt, Artificial Sequence
  Description of Artificial Sequence: Synthetic oligonucleotide
agugucuaccuuggggcug

SEQ ID NO: 795210 - RNA, 19 nt, Artificial Sequence
  Description of Artificial Sequence: Synthetic oligonucleotide
cuuggauagugaggagggc

SEQ ID NO: 795211 - RNA, 19 nt, Artificial Sequence
  Description of Artificial Sequence: Synthetic oligonucleotide
cuaccuuggggcugagcuc

SEQ ID NO: 795212 - RNA, 19 nt, Artificial Sequence
  Description of Artificial Sequence: Synthetic oligonucleotide
auauuucucggagucggua

SEQ ID NO: 795213 - RNA, 19 nt, Artificial Sequence
  Description of Artificial Sequence: Synthetic oligonucleotide
aaccggagauucugcccga

SEQ ID NO: 795214 - RNA, 19 nt, Artificial Sequence
  Description of Artificial Sequence: Synthetic oligonucleotide
gaaccgagagucaaaugcu

SEQ ID NO: 795215 - RNA, 19 nt, Artificial Sequence
  Description of Artificial Sequence: Synthetic oligonucleotide
aguuuccgcuuggauagug

SEQ ID NO: 795216 - RNA, 19 nt, Artificial Sequence
  Description of Artificial Sequence: Synthetic oligonucleotide
gcauguucauuuauuuuac

SEQ ID NO: 795217 - RNA, 19 nt, Artificial Sequence
  Description of Artificial Sequence: Synthetic oligonucleotide
cucggagucgguauucaaa

SEQ ID NO: 795218 - RNA, 19 nt, Artificial Sequence
  Description of Artificial Sequence: Synthetic oligonucleotide
caugggcaaaagacgagaa

SEQ ID NO: 795219 - RNA, 19 nt, Artificial Sequence
  Description of Artificial Sequence: Synthetic oligonucleotide
gaauccuuccgagggcgac

SEQ ID NO: 795220 - RNA, 19 nt, Artificial Sequence
  Description of Artificial Sequence: Synthetic oligonucleotide
ugucagaaaccagguucca

SEQ ID NO: 795221 - RNA, 19 nt, Artificial Sequence
  Description of Artificial Sequence: Synthetic oligonucleotide
ugcggcccugaauuauggc

SEQ ID NO: 795222 - RNA, 19 nt, Artificial Sequence
  Description of Artificial Sequence: Synthetic oligonucleotide
cccugaauuauggcuaacg

SEQ ID NO: 795223 - RNA, 19 nt, Artificial Sequence
  Description of Artificial Sequence: Synthetic oligonucleotide
ccauauuccaaguuagcaa

SEQ ID NO: 795224 - RNA, 19 nt, Artificial Sequence
  Description of Artificial Sequence: Synthetic oligonucleotide
gcuccgugaaccgagaguc

SEQ ID NO: 795225 - RNA, 19 nt, Artificial Sequence
  Description of Artificial Sequence: Synthetic oligonucleotide
cuuauagggauauccugau

SEQ ID NO: 795226 - RNA, 19 nt, Artificial Sequence
  Description of Artificial Sequence: Synthetic oligonucleotide
ggugacaaugcagcaggag

SEQ ID NO: 795227 - RNA, 19 nt, Artificial Sequence
  Description of Artificial Sequence: Synthetic oligonucleotide
gaccgcuccgugaaccgag

SEQ ID NO: 795228 - RNA, 19 nt, Artificial Sequence
  Description of Artificial Sequence: Synthetic oligonucleotide
aaccgagagucaaaugcuu

SEQ ID NO: 795229 - RNA, 19 nt, Artificial Sequence
  Description of Artificial Sequence: Synthetic oligonucleotide
agggcuugaccaaguggac

SEQ ID NO: 795230 - RNA, 19 nt, Artificial Sequence
  Description of Artificial Sequence: Synthetic oligonucleotide
ucucggagucgguauucaa

SEQ ID NO: 795231 - RNA, 19 nt, Artificial Sequence
  Description of Artificial Sequence: Synthetic oligonucleotide
gggacauaggguaugucca

SEQ ID NO: 795232 - RNA, 19 nt, Artificial Sequence
  Description of Artificial Sequence: Synthetic oligonucleotide
ugacaccgucauaucacuu

SEQ ID NO: 795233 - RNA, 19 nt, Artificial Sequence
  Description of Artificial Sequence: Synthetic oligonucleotide
cuagguaugccaguguagu

SEQ ID NO: 795234 - RNA, 19 nt, Artificial Sequence
  Description of Artificial Sequence: Synthetic oligonucleotide
cuuccgagggcgaccuuuc

SEQ ID NO: 795235 - RNA, 19 nt, Artificial Sequence
  Description of Artificial Sequence: Synthetic oligonucleotide
caccugccgaagcuggggc

SEQ ID NO: 795236 - RNA, 19 nt, Artificial Sequence
  Description of Artificial Sequence: Synthetic oligonucleotide
uagcaagaucugugacacc

SEQ ID NO: 795237 - RNA, 19 nt, Artificial Sequence
  Description of Artificial Sequence: Synthetic oligonucleotide
agaaaauugcccgccccuu

SEQ ID NO: 795238 - RNA, 19 nt, Artificial Sequence
  Description of Artificial Sequence: Synthetic oligonucleotide
ccgagcauagaggaggagc

SEQ ID NO: 795239 - RNA, 19 nt, Artificial Sequence
  Description of Artificial Sequence: Synthetic oligonucleotide
guucugaucuuucaaccuu

SEQ ID NO: 795240 - RNA, 19 nt, Artificial Sequence
  Description of Artificial Sequence: Synthetic oligonucleotide
cauaggguauguccaccca

SEQ ID NO: 795241 - RNA, 19 nt, Artificial Sequence
  Description of Artificial Sequence: Synthetic oligonucleotide
augugucagaacagcuuug

SEQ ID NO: 795242 - RNA, 19 nt, Artificial Sequence
  Description of Artificial Sequence: Synthetic oligonucleotide
cugcccgaugacuggcagc

SEQ ID NO: 795243 - RNA, 19 nt, Artificial Sequence
  Description of Artificial Sequence: Synthetic oligonucleotide
uggcaccugcuaauagcaa

SEQ ID NO: 795244 - RNA, 19 nt, Artificial Sequence
  Description of Artificial Sequence: Synthetic oligonucleotide
gugcggcccugaauuaugg

SEQ ID NO: 795245 - RNA, 19 nt, Artificial Sequence
  Description of Artificial Sequence: Synthetic oligonucleotide
gucgguauucaaacccuuc

SEQ ID NO: 795246 - RNA, 19 nt, Artificial Sequence
  Description of Artificial Sequence: Synthetic oligonucleotide
ugcggcaaccugguucucu

SEQ ID NO: 795247 - RNA, 19 nt, Artificial Sequence
  Description of Artificial Sequence: Synthetic oligonucleotide
guuccauguggagagagau

SEQ ID NO: 795248 - RNA, 19 nt, Artificial Sequence
  Description of Artificial Sequence: Synthetic oligonucleotide
ggcuugaccaaguggaccu

SEQ ID NO: 795249 - RNA, 19 nt, Artificial Sequence
  Description of Artificial Sequence: Synthetic oligonucleotide
ccgagagucaaaugcuuuc

SEQ ID NO: 795250 - RNA, 19 nt, Artificial Sequence
  Description of Artificial Sequence: Synthetic oligonucleotide
caugaccccuaacgcuccc

SEQ ID NO: 795251 - RNA, 19 nt, Artificial Sequence
  Description of Artificial Sequence: Synthetic oligonucleotide
gagucgguauucaaacccu

SEQ ID NO: 795252 - RNA, 19 nt, Artificial Sequence
  Description of Artificial Sequence: Synthetic oligonucleotide
cuggugcagcacaguacac

SEQ ID NO: 795253 - RNA, 19 nt, Artificial Sequence
  Description of Artificial Sequence: Synthetic oligonucleotide
guauguccacccagggaac

SEQ ID NO: 795254 - RNA, 19 nt, Artificial Sequence
  Description of Artificial Sequence: Synthetic oligonucleotide
auggaguguagagacucuu

SEQ ID NO: 795255 - RNA, 19 nt, Artificial Sequence
  Description of Artificial Sequence: Synthetic oligonucleotide
guuuccgcuuggauaguga

SEQ ID NO: 795256 - RNA, 19 nt, Artificial Sequence
  Description of Artificial Sequence: Synthetic oligonucleotide
gaaaauugcccgccccuuu

SEQ ID NO: 795257 - RNA, 19 nt, Artificial Sequence
  Description of Artificial Sequence: Synthetic oligonucleotide
ucucuuccgcagacccacu

SEQ ID NO: 795258 - RNA, 19 nt, Artificial Sequence
  Description of Artificial Sequence: Synthetic oligonucleotide
aggccuauauggagggaca

SEQ ID NO: 795259 - RNA, 19 nt, Artificial Sequence
  Description of Artificial Sequence: Synthetic oligonucleotide
cugcaugaccccuaacgcu

SEQ ID NO: 795260 - RNA, 19 nt, Artificial Sequence
  Description of Artificial Sequence: Synthetic oligonucleotide
ccgagggcgaccuuucuuc

SEQ ID NO: 795261 - RNA, 19 nt, Artificial Sequence
  Description of Artificial Sequence: Synthetic oligonucleotide
auccuuccgagggcgaccu

SEQ ID NO: 795262 - RNA, 19 nt, Artificial Sequence
  Description of Artificial Sequence: Synthetic oligonucleotide
uagcaagaguguggcccag

SEQ ID NO: 795263 - RNA, 19 nt, Artificial Sequence
  Description of Artificial Sequence: Synthetic oligonucleotide
cacuggcuuccaguggagc

SEQ ID NO: 795264 - RNA, 19 nt, Artificial Sequence
  Description of Artificial Sequence: Synthetic oligonucleotide
ggaggugcggcccugaauu

SEQ ID NO: 795265 - RNA, 19 nt, Artificial Sequence
  Description of Artificial Sequence: Synthetic oligonucleotide
acaagguaccgagcauaga

SEQ ID NO: 795266 - RNA, 19 nt, Artificial Sequence
  Description of Artificial Sequence: Synthetic oligonucleotide
cugaucgaccaaagaaacu

SEQ ID NO: 795267 - RNA, 19 nt, Artificial Sequence
  Description of Artificial Sequence: Synthetic oligonucleotide
  modified_base (9)..(9): a, c, u, g, unknown or other
augggguunuuagcaugga

SEQ ID NO: 795268 - RNA, 19 nt, Artificial Sequence
  Description of Artificial Sequence: Synthetic oligonucleotide
guguagucuccugcuguac

SEQ ID NO: 795269 - RNA, 19 nt, Artificial Sequence
  Description of Artificial Sequence: Synthetic oligonucleotide
  modified_base (5)..(5): a, c, u, g, unknown or other
gguunuuagcauggaaggu

SEQ ID NO: 795270 - RNA, 19 nt, Artificial Sequence
  Description of Artificial Sequence: Synthetic oligonucleotide
ggguauguccacccaggga

SEQ ID NO: 795271 - RNA, 19 nt, Artificial Sequence
  Description of Artificial Sequence: Synthetic oligonucleotide
gccuauauggagggacaag

SEQ ID NO: 795272 - RNA, 19 nt, Artificial Sequence
  Description of Artificial Sequence: Synthetic oligonucleotide
cacucaguaaagagacgcu

SEQ ID NO: 795273 - RNA, 19 nt, Artificial Sequence
  Description of Artificial Sequence: Synthetic oligonucleotide
ggcucuuguucucacaaau

SEQ ID NO: 795274 - RNA, 19 nt, Artificial Sequence
  Description of Artificial Sequence: Synthetic oligonucleotide
guaagugcugcggcaaccu

SEQ ID NO: 795275 - RNA, 19 nt, Artificial Sequence
  Description of Artificial Sequence: Synthetic oligonucleotide
cuuccgcagacccacuacu

SEQ ID NO: 795276 - RNA, 19 nt, Artificial Sequence
  Description of Artificial Sequence: Synthetic oligonucleotide
gugucuaccuuggggcuga

SEQ ID NO: 795277 - RNA, 19 nt, Artificial Sequence
  Description of Artificial Sequence: Synthetic oligonucleotide
gacucgccuguaggccugg

SEQ ID NO: 795278 - RNA, 19 nt, Artificial Sequence
  Description of Artificial Sequence: Synthetic oligonucleotide
agucgguauucaaacccuu

SEQ ID NO: 795279 - RNA, 19 nt, Artificial Sequence
  Description of Artificial Sequence: Synthetic oligonucleotide
agaauccuuccgagggcga

SEQ ID NO: 795280 - RNA, 19 nt, Artificial Sequence
  Description of Artificial Sequence: Synthetic oligonucleotide
ggcuaacgguccugaacac

SEQ ID NO: 795281 - RNA, 19 nt, Artificial Sequence
  Description of Artificial Sequence: Synthetic oligonucleotide
ggguucaaucuuggauggg

SEQ ID NO: 795282 - RNA, 19 nt, Artificial Sequence
  Description of Artificial Sequence: Synthetic oligonucleotide
agugacagacucgccugua

SEQ ID NO: 795283 - RNA, 19 nt, Artificial Sequence
  Description of Artificial Sequence: Synthetic oligonucleotide
accgagcauagaggaggag

SEQ ID NO: 795284 - RNA, 19 nt, Artificial Sequence
  Description of Artificial Sequence: Synthetic oligonucleotide
gaucugugacaccgucaua

SEQ ID NO: 795285 - RNA, 19 nt, Artificial Sequence
  Description of Artificial Sequence: Synthetic oligonucleotide
ggaucacauuggucaagga

SEQ ID NO: 795286 - RNA, 19 nt, Artificial Sequence
  Description of Artificial Sequence: Synthetic oligonucleotide
cgagaauccuuccgagggc

SEQ ID NO: 795287 - RNA, 19 nt, Artificial Sequence
  Description of Artificial Sequence: Synthetic oligonucleotide
cagacucgccuguaggccu

SEQ ID NO: 795288 - RNA, 19 nt, Artificial Sequence
  Description of Artificial Sequence: Synthetic oligonucleotide
guggagagagauggauuaa

SEQ ID NO: 795289 - RNA, 19 nt, Artificial Sequence
  Description of Artificial Sequence: Synthetic oligonucleotide
cuccgugaaccgagaguca

SEQ ID NO: 795290 - RNA, 19 nt, Artificial Sequence
  Description of Artificial Sequence: Synthetic oligonucleotide
gcuaacgguccugaacaca

SEQ ID NO: 795291 - RNA, 19 nt, Artificial Sequence
  Description of Artificial Sequence: Synthetic oligonucleotide
cgcagacccacuacuguug

SEQ ID NO: 795292 - RNA, 19 nt, Artificial Sequence
  Description of Artificial Sequence: Synthetic oligonucleotide
cggagauucugcccgauga

SEQ ID NO: 795293 - RNA, 19 nt, Artificial Sequence
  Description of Artificial Sequence: Synthetic oligonucleotide
cggagucgguauucaaacc

SEQ ID NO: 795294 - RNA, 19 nt, Artificial Sequence
  Description of Artificial Sequence: Synthetic oligonucleotide
cucauuccucaaagcggaa

SEQ ID NO: 795295 - RNA, 19 nt, Artificial Sequence
  Description of Artificial Sequence: Synthetic oligonucleotide
cugggacauaggguauguc

SEQ ID NO: 795296 - RNA, 19 nt, Artificial Sequence
  Description of Artificial Sequence: Synthetic oligonucleotide
  modified_base (18)..(18): a, c, u, g, unknown or other
caaucuuggaugggguunu

SEQ ID NO: 795297 - RNA, 19 nt, Artificial Sequence
  Description of Artificial Sequence: Synthetic oligonucleotide
acgguccugaacacagcau

SEQ ID NO: 795298 - RNA, 19 nt, Artificial Sequence
  Description of Artificial Sequence: Synthetic oligonucleotide
ccgucauaucacuuccuga

SEQ ID NO: 795299 - RNA, 19 nt, Artificial Sequence
  Description of Artificial Sequence: Synthetic oligonucleotide
ccacagcuaggccuauaug

SEQ ID NO: 795300 - RNA, 19 nt, Artificial Sequence
  Description of Artificial Sequence: Synthetic oligonucleotide
gcaugaccccuaacgcucc

SEQ ID NO: 795301 - RNA, 19 nt, Artificial Sequence
  Description of Artificial Sequence: Synthetic oligonucleotide
cccuaacgcucccaggcuc

SEQ ID NO: 795302 - RNA, 19 nt, Artificial Sequence
  Description of Artificial Sequence: Synthetic oligonucleotide
gcuacuugucucucaggau

SEQ ID NO: 795303 - RNA, 19 nt, Artificial Sequence
  Description of Artificial Sequence: Synthetic oligonucleotide
cuaggccuauauggaggga

SEQ ID NO: 795304 - RNA, 19 nt, Artificial Sequence
  Description of Artificial Sequence: Synthetic oligonucleotide
gccagugaaucuugcuugu

SEQ ID NO: 795305 - RNA, 19 nt, Artificial Sequence
  Description of Artificial Sequence: Synthetic oligonucleotide
gccgaagcuggggcaagcc

SEQ ID NO: 795306 - RNA, 19 nt, Artificial Sequence
  Description of Artificial Sequence: Synthetic oligonucleotide
ggccuauauggagggacaa

SEQ ID NO: 795307 - RNA, 19 nt, Artificial Sequence
  Description of Artificial Sequence: Synthetic oligonucleotide
accggagauucugcccgau

SEQ ID NO: 795308 - RNA, 19 nt, Artificial Sequence
  Description of Artificial Sequence: Synthetic oligonucleotide
ccggagauucugcccgaug

SEQ ID NO: 795309 - RNA, 19 nt, Artificial Sequence
  Description of Artificial Sequence: Synthetic oligonucleotide
caccgucauaucacuuccu

SEQ ID NO: 795310 - RNA, 19 nt, Artificial Sequence
  Description of Artificial Sequence: Synthetic oligonucleotide
gcggcaaccugguucucua

SEQ ID NO: 795311 - RNA, 19 nt, Artificial Sequence
  Description of Artificial Sequence: Synthetic oligonucleotide
accgcuccgugaaccgaga

SEQ ID NO: 795312 - RNA, 19 nt, Artificial Sequence
  Description of Artificial Sequence: Synthetic oligonucleotide
ccagugaaucuugcuuguc

SEQ ID NO: 795313 - RNA, 19 nt, Artificial Sequence
  Description of Artificial Sequence: Synthetic oligonucleotide
ccgcuuggauagugaggag

SEQ ID NO: 795314 - RNA, 19 nt, Artificial Sequence
  Description of Artificial Sequence: Synthetic oligonucleotide
ggcaggcuacuugucucuc

SEQ ID NO: 795315 - RNA, 19 nt, Artificial Sequence
  Description of Artificial Sequence: Synthetic oligonucleotide
ccuaacgcucccaggcucu

SEQ ID NO: 795316 - RNA, 19 nt, Artificial Sequence
  Description of Artificial Sequence: Synthetic oligonucleotide
cccaaacagacaguguggu

SEQ ID NO: 795317 - RNA, 19 nt, Artificial Sequence
  Description of Artificial Sequence: Synthetic oligonucleotide
gcgguacucauggcuugac

SEQ ID NO: 795318 - RNA, 19 nt, Artificial Sequence
  Description of Artificial Sequence: Synthetic oligonucleotide
ccgcuccgugaaccgagag

SEQ ID NO: 795319 - RNA, 19 nt, Artificial Sequence
  Description of Artificial Sequence: Synthetic oligonucleotide
ggaccgcuccgugaaccga

SEQ ID NO: 795320 - RNA, 19 nt, Artificial Sequence
  Description of Artificial Sequence: Synthetic oligonucleotide
gcuggccccaaggcaguga

SEQ ID NO: 795321 - RNA, 19 nt, Artificial Sequence
  Description of Artificial Sequence: Synthetic oligonucleotide
ccaaacagacagugugguu

SEQ ID NO: 795322 - RNA, 19 nt, Artificial Sequence
  Description of Artificial Sequence: Synthetic oligonucleotide
gcccgaugacuggcagcag

SEQ ID NO: 795323 - RNA, 19 nt, Artificial Sequence
  Description of Artificial Sequence: Synthetic oligonucleotide
ccugggacauaggguaugu

SEQ ID NO: 795324 - RNA, 19 nt, Artificial Sequence
  Description of Artificial Sequence: Synthetic oligonucleotide
gcuugacugcaggguaagu

SEQ ID NO: 795325 - RNA, 19 nt, Artificial Sequence
  Description of Artificial Sequence: Synthetic oligonucleotide
ccgcagacccacuacuguu

SEQ ID NO: 795326 - RNA, 19 nt, Artificial Sequence
  Description of Artificial Sequence: Synthetic oligonucleotide
ccccuaacgcucccaggcu

SEQ ID NO: 795327 - RNA, 19 nt, Artificial Sequence
  Description of Artificial Sequence: Synthetic oligonucleotide
cgcuccgugaaccgagagu

SEQ ID NO: 795328 - RNA, 19 nt, Artificial Sequence
  Description of Artificial Sequence: Synthetic oligonucleotide
cgcuggaaccggagauucu

SEQ ID NO: 795329 - RNA, 19 nt, Artificial Sequence
  Description of Artificial Sequence: Synthetic oligonucleotide
cccgggccucagcucuuuu

SEQ ID NO: 795330 - RNA, 19 nt, Artificial Sequence
  Description of Artificial Sequence: Synthetic oligonucleotide
aaauagaccauauuaauag

SEQ ID NO: 795331 - RNA, 19 nt, Artificial Sequence
  Description of Artificial Sequence: Synthetic oligonucleotide
auuaauaggaacuauuuag

SEQ ID NO: 795332 - RNA, 19 nt, Artificial Sequence
  Description of Artificial Sequence: Synthetic oligonucleotide
aaaauguacgugcucaggg

SEQ ID NO: 795333 - RNA, 19 nt, Artificial Sequence
  Description of Artificial Sequence: Synthetic oligonucleotide
uacaucuuuagaaugacag

SEQ ID NO: 795334 - RNA, 19 nt, Artificial Sequence
  Description of Artificial Sequence: Synthetic oligonucleotide
uguaauuggagucacugcc

SEQ ID NO: 795335 - RNA, 19 nt, Artificial Sequence
  Description of Artificial Sequence: Synthetic oligonucleotide
aaaaggauuguagagacug

SEQ ID NO: 795336 - RNA, 19 nt, Artificial Sequence
  Description of Artificial Sequence: Synthetic oligonucleotide
accucaauaauuucuuucc

SEQ ID NO: 795337 - RNA, 19 nt, Artificial Sequence
  Description of Artificial Sequence: Synthetic oligonucleotide
agaaacaucaagguaaaac

SEQ ID NO: 795338 - RNA, 19 nt, Artificial Sequence
  Description of Artificial Sequence: Synthetic oligonucleotide
aauagaccauauuaauagg

SEQ ID NO: 795339 - RNA, 19 nt, Artificial Sequence
  Description of Artificial Sequence: Synthetic oligonucleotide
uugaaaaccccuuaaggag

SEQ ID NO: 795340 - RNA, 19 nt, Artificial Sequence
  Description of Artificial Sequence: Synthetic oligonucleotide
ugguuagugguauagacag

SEQ ID NO: 795341 - RNA, 19 nt, Artificial Sequence
  Description of Artificial Sequence: Synthetic oligonucleotide
uucauaauuagcaggguug

SEQ ID NO: 795342 - RNA, 19 nt, Artificial Sequence
  Description of Artificial Sequence: Synthetic oligonucleotide
auugguuagugguauagac

SEQ ID NO: 795343 - RNA, 19 nt, Artificial Sequence
  Description of Artificial Sequence: Synthetic oligonucleotide
aauguacgugcucagggac

SEQ ID NO: 795344 - RNA, 19 nt, Artificial Sequence
  Description of Artificial Sequence: Synthetic oligonucleotide
cauaacauaucuuuucgcc

SEQ ID NO: 795345 - RNA, 19 nt, Artificial Sequence
  Description of Artificial Sequence: Synthetic oligonucleotide
uuauaguucucauucuggg

SEQ ID NO: 795346 - RNA, 19 nt, Artificial Sequence
  Description of Artificial Sequence: Synthetic oligonucleotide
agaaacaggaacuaguaga

SEQ ID NO: 795347 - RNA, 19 nt, Artificial Sequence
  Description of Artificial Sequence: Synthetic oligonucleotide
ugaaaaccccuuaaggagg

SEQ ID NO: 795348 - RNA, 19 nt, Artificial Sequence
  Description of Artificial Sequence: Synthetic oligonucleotide
aauaaagugaacaaugcau

SEQ ID NO: 795349 - RNA, 19 nt, Artificial Sequence
  Description of Artificial Sequence: Synthetic oligonucleotide
uuuuauaguucucauucug

SEQ ID NO: 795350 - RNA, 19 nt, Artificial Sequence
  Description of Artificial Sequence: Synthetic oligonucleotide
aauacaucuuuagaaugac

SEQ ID NO: 795351 - RNA, 19 nt, Artificial Sequence
  Description of Artificial Sequence: Synthetic oligonucleotide
agcauaacauaucuuuucg

SEQ ID NO: 795352 - RNA, 19 nt, Artificial Sequence
  Description of Artificial Sequence: Synthetic oligonucleotide
ucaagguaaaacaggaacu

SEQ ID NO: 795353 - RNA, 19 nt, Artificial Sequence
  Description of Artificial Sequence: Synthetic oligonucleotide
uuaugaauagcucgagcag

SEQ ID NO: 795354 - RNA, 19 nt, Artificial Sequence
  Description of Artificial Sequence: Synthetic oligonucleotide
ucuaagaggaccugaagcu

SEQ ID NO: 795355 - RNA, 19 nt, Artificial Sequence
  Description of Artificial Sequence: Synthetic oligonucleotide
agaccauauuaauaggaac

SEQ ID NO: 795356 - RNA, 19 nt, Artificial Sequence
  Description of Artificial Sequence: Synthetic oligonucleotide
aaaguaauugguccuuuga

SEQ ID NO: 795357 - RNA, 19 nt, Artificial Sequence
  Description of Artificial Sequence: Synthetic oligonucleotide
ucugaaacaaagacuuacc

SEQ ID NO: 795358 - RNA, 19 nt, Artificial Sequence
  Description of Artificial Sequence: Synthetic oligonucleotide
guuaugaauagcucgagca

SEQ ID NO: 795359 - RNA, 19 nt, Artificial Sequence
  Description of Artificial Sequence: Synthetic oligonucleotide
auuauucccgguuuuccac

SEQ ID NO: 795360 - RNA, 19 nt, Artificial Sequence
  Description of Artificial Sequence: Synthetic oligonucleotide
ugcuuaacaguacagucug

SEQ ID NO: 795361 - RNA, 19 nt, Artificial Sequence
  Description of Artificial Sequence: Synthetic oligonucleotide
ucuaaugaaagaugcuuca

SEQ ID NO: 795362 - RNA, 19 nt, Artificial Sequence
  Description of Artificial Sequence: Synthetic oligonucleotide
agcuucuaaugaaagaugc

SEQ ID NO: 795363 - RNA, 19 nt, Artificial Sequence
  Description of Artificial Sequence: Synthetic oligonucleotide
aaaagcagccacucuaaga

SEQ ID NO: 795364 - RNA, 19 nt, Artificial Sequence
  Description of Artificial Sequence: Synthetic oligonucleotide
cucuaagaggaccugaagc

SEQ ID NO: 795365 - RNA, 19 nt, Artificial Sequence
  Description of Artificial Sequence: Synthetic oligonucleotide
ucauaauuagcaggguugg

SEQ ID NO: 795366 - RNA, 19 nt, Artificial Sequence
  Description of Artificial Sequence: Synthetic oligonucleotide
guaaucugaugacaaagcc

SEQ ID NO: 795367 - RNA, 19 nt, Artificial Sequence
  Description of Artificial Sequence: Synthetic oligonucleotide
gggucuaucaaccucagag

SEQ ID NO: 795368 - RNA, 19 nt, Artificial Sequence
  Description of Artificial Sequence: Synthetic oligonucleotide
gaaggucuggcucagaaga

SEQ ID NO: 795369 - RNA, 19 nt, Artificial Sequence
  Description of Artificial Sequence: Synthetic oligonucleotide
uauuaauaggaacuauuua

SEQ ID NO: 795370 - RNA, 19 nt, Artificial Sequence
  Description of Artificial Sequence: Synthetic oligonucleotide
uuuacggugaauagccaca

SEQ ID NO: 795371 - RNA, 19 nt, Artificial Sequence
  Description of Artificial Sequence: Synthetic oligonucleotide
uucuaaugaaagaugcuuc

SEQ ID NO: 795372 - RNA, 19 nt, Artificial Sequence
  Description of Artificial Sequence: Synthetic oligonucleotide
ucugaaaguaauugguccu

SEQ ID NO: 795373 - RNA, 19 nt, Artificial Sequence
  Description of Artificial Sequence: Synthetic oligonucleotide
aaaccgaacgaugaacauc

SEQ ID NO: 795374 - RNA, 19 nt, Artificial Sequence
  Description of Artificial Sequence: Synthetic oligonucleotide
ugacugguaaccaucagau

SEQ ID NO: 795375 - RNA, 19 nt, Artificial Sequence
  Description of Artificial Sequence: Synthetic oligonucleotide
auaacauaucuuuucgccu

SEQ ID NO: 795376 - RNA, 19 nt, Artificial Sequence
  Description of Artificial Sequence: Synthetic oligonucleotide
uguuaugaauagcucgagc

SEQ ID NO: 795377 - RNA, 19 nt, Artificial Sequence
  Description of Artificial Sequence: Synthetic oligonucleotide
gauguuguuuuauugcaca

SEQ ID NO: 795378 - RNA, 19 nt, Artificial Sequence
  Description of Artificial Sequence: Synthetic oligonucleotide
guaauugguccuuugagga

SEQ ID NO: 795379 - RNA, 19 nt, Artificial Sequence
  Description of Artificial Sequence: Synthetic oligonucleotide
aaccgaacgaugaacaucu

SEQ ID NO: 795380 - RNA, 19 nt, Artificial Sequence
  Description of Artificial Sequence: Synthetic oligonucleotide
uaugaauagcucgagcagc

SEQ ID NO: 795381 - RNA, 19 nt, Artificial Sequence
  Description of Artificial Sequence: Synthetic oligonucleotide
uugaucguuuaacaguaca

SEQ ID NO: 795382 - RNA, 19 nt, Artificial Sequence
  Description of Artificial Sequence: Synthetic oligonucleotide
uugguuagugguauagaca

SEQ ID NO: 795383 - RNA, 19 nt, Artificial Sequence
  Description of Artificial Sequence: Synthetic oligonucleotide
uccgucauucggaagaugu

SEQ ID NO: 795384 - RNA, 19 nt, Artificial Sequence
  Description of Artificial Sequence: Synthetic oligonucleotide
ucugguugaucguuuaaca

SEQ ID NO: 795385 - RNA, 19 nt, Artificial Sequence
  Description of Artificial Sequence: Synthetic oligonucleotide
ucucauugcuucauaaauc

SEQ ID NO: 795386 - RNA, 19 nt, Artificial Sequence
  Description of Artificial Sequence: Synthetic oligonucleotide
ugguugaucguuuaacagu

SEQ ID NO: 795387 - RNA, 19 nt, Artificial Sequence
  Description of Artificial Sequence: Synthetic oligonucleotide
auauccacucuucguauuc

SEQ ID NO: 795388 - RNA, 19 nt, Artificial Sequence
  Description of Artificial Sequence: Synthetic oligonucleotide
ucguuuaacaguacauacu

SEQ ID NO: 795389 - RNA, 19 nt, Artificial Sequence
  Description of Artificial Sequence: Synthetic oligonucleotide
uagaccauauuaauaggaa

SEQ ID NO: 795390 - RNA, 19 nt, Artificial Sequence
  Description of Artificial Sequence: Synthetic oligonucleotide
aagguaaaacaggaacuuc

SEQ ID NO: 795391 - RNA, 19 nt, Artificial Sequence
  Description of Artificial Sequence: Synthetic oligonucleotide
cauucugggugcuuaacag

SEQ ID NO: 795392 - RNA, 19 nt, Artificial Sequence
  Description of Artificial Sequence: Synthetic oligonucleotide
uuucccuaaagcuuguaau

SEQ ID NO: 795393 - RNA, 19 nt, Artificial Sequence
  Description of Artificial Sequence: Synthetic oligonucleotide
ucauucugggugcuuaaca

SEQ ID NO: 795394 - RNA, 19 nt, Artificial Sequence
  Description of Artificial Sequence: Synthetic oligonucleotide
acauacuuuccaucauugg

SEQ ID NO: 795395 - RNA, 19 nt, Artificial Sequence
  Description of Artificial Sequence: Synthetic oligonucleotide
agaucuggaagcaguaucg

SEQ ID NO: 795396 - RNA, 19 nt, Artificial Sequence
  Description of Artificial Sequence: Synthetic oligonucleotide
ucuucguauuccuuucugc

SEQ ID NO: 795397 - RNA, 19 nt, Artificial Sequence
  Description of Artificial Sequence: Synthetic oligonucleotide
ugaucguuuaacaguacau

SEQ ID NO: 795398 - RNA, 19 nt, Artificial Sequence
  Description of Artificial Sequence: Synthetic oligonucleotide
ugagccucaagugaguucu

SEQ ID NO: 795399 - RNA, 19 nt, Artificial Sequence
  Description of Artificial Sequence: Synthetic oligonucleotide
aguguggucugucuuaacu

SEQ ID NO: 795400 - RNA, 19 nt, Artificial Sequence
  Description of Artificial Sequence: Synthetic oligonucleotide
gaugggauuccgucauucg

SEQ ID NO: 795401 - RNA, 19 nt, Artificial Sequence
  Description of Artificial Sequence: Synthetic oligonucleotide
ugaaccucaauaauuucuu

SEQ ID NO: 795402 - RNA, 19 nt, Artificial Sequence
  Description of Artificial Sequence: Synthetic oligonucleotide
auaauuagcaggguuggca

SEQ ID NO: 795403 - RNA, 19 nt, Artificial Sequence
  Description of Artificial Sequence: Synthetic oligonucleotide
gaaaucaggucagugugcc

SEQ ID NO: 795404 - RNA, 19 nt, Artificial Sequence
  Description of Artificial Sequence: Synthetic oligonucleotide
augaauagcucgagcagcc

SEQ ID NO: 795405 - RNA, 19 nt, Artificial Sequence
  Description of Artificial Sequence: Synthetic oligonucleotide
gacuccgguaaucugauga

SEQ ID NO: 795406 - RNA, 19 nt, Artificial Sequence
  Description of Artificial Sequence: Synthetic oligonucleotide
gaauagcucgagcagccag

SEQ ID NO: 795407 - RNA, 19 nt, Artificial Sequence
  Description of Artificial Sequence: Synthetic oligonucleotide
gcaaaagagaaucuucugc

SEQ ID NO: 795408 - RNA, 19 nt, Artificial Sequence
  Description of Artificial Sequence: Synthetic oligonucleotide
caaauuaauagcauaacau

SEQ ID NO: 795409 - RNA, 19 nt, Artificial Sequence
  Description of Artificial Sequence: Synthetic oligonucleotide
aguaucgucggucuucaca

SEQ ID NO: 795410 - RNA, 19 nt, Artificial Sequence
  Description of Artificial Sequence: Synthetic oligonucleotide
uuguaauuggagucacugc

SEQ ID NO: 795411 - RNA, 19 nt, Artificial Sequence
  Description of Artificial Sequence: Synthetic oligonucleotide
cuaucaaccucagaguuug

SEQ ID NO: 795412 - RNA, 19 nt, Artificial Sequence
  Description of Artificial Sequence: Synthetic oligonucleotide
uccugaaucaagccuccag

SEQ ID NO: 795413 - RNA, 19 nt, Artificial Sequence
  Description of Artificial Sequence: Synthetic oligonucleotide
uaauuagcaggguuggcaa

SEQ ID NO: 795414 - RNA, 19 nt, Artificial Sequence
  Description of Artificial Sequence: Synthetic oligonucleotide
aguacagccucucccaugu

SEQ ID NO: 795415 - RNA, 19 nt, Artificial Sequence
  Description of Artificial Sequence: Synthetic oligonucleotide
cuuuacggugaauagccac

SEQ ID NO: 795416 - RNA, 19 nt, Artificial Sequence
  Description of Artificial Sequence: Synthetic oligonucleotide
aacuaguagagcugucccu

SEQ ID NO: 795417 - RNA, 19 nt, Artificial Sequence
  Description of Artificial Sequence: Synthetic oligonucleotide
ugggauuccgucauucgga

SEQ ID NO: 795418 - RNA, 19 nt, Artificial Sequence
  Description of Artificial Sequence: Synthetic oligonucleotide
aaaaccgaacgaugaacau

SEQ ID NO: 795419 - RNA, 19 nt, Artificial Sequence
  Description of Artificial Sequence: Synthetic oligonucleotide
acgucagagaaguugaaaa

SEQ ID NO: 795420 - RNA, 19 nt, Artificial Sequence
  Description of Artificial Sequence: Synthetic oligonucleotide
cugguugaucguuuaacag

SEQ ID NO: 795421 - RNA, 19 nt, Artificial Sequence
  Description of Artificial Sequence: Synthetic oligonucleotide
guaaaacaggaacuucacc

SEQ ID NO: 795422 - RNA, 19 nt, Artificial Sequence
  Description of Artificial Sequence: Synthetic oligonucleotide
uuaauugagccagugcuuc

SEQ ID NO: 795423 - RNA, 19 nt, Artificial Sequence
  Description of Artificial Sequence: Synthetic oligonucleotide
cauuaauugagccagugcu

SEQ ID NO: 795424 - RNA, 19 nt, Artificial Sequence
  Description of Artificial Sequence: Synthetic oligonucleotide
gaacgaugaacaucugcug

SEQ ID NO: 795425 - RNA, 19 nt, Artificial Sequence
  Description of Artificial Sequence: Synthetic oligonucleotide
guuagugguauagacagca

SEQ ID NO: 795426 - RNA, 19 nt, Artificial Sequence
  Description of Artificial Sequence: Synthetic oligonucleotide
uccgguaaucugaugacaa

SEQ ID NO: 795427 - RNA, 19 nt, Artificial Sequence
  Description of Artificial Sequence: Synthetic oligonucleotide
acggugaauagccacaaaa

SEQ ID NO: 795428 - RNA, 19 nt, Artificial Sequence
  Description of Artificial Sequence: Synthetic oligonucleotide
agcucgagcagccaguacu

SEQ ID NO: 795429 - RNA, 19 nt, Artificial Sequence
  Description of Artificial Sequence: Synthetic oligonucleotide
uauugcacauauccacucu

SEQ ID NO: 795430 - RNA, 19 nt, Artificial Sequence
  Description of Artificial Sequence: Synthetic oligonucleotide
auagaccauauuaauagga

SEQ ID NO: 795431 - RNA, 19 nt, Artificial Sequence
  Description of Artificial Sequence: Synthetic oligonucleotide
ucgucggucuucacaaucc

SEQ ID NO: 795432 - RNA, 19 nt, Artificial Sequence
  Description of Artificial Sequence: Synthetic oligonucleotide
aguuugacugguaaccauc

SEQ ID NO: 795433 - RNA, 19 nt, Artificial Sequence
  Description of Artificial Sequence: Synthetic oligonucleotide
cuucuuuacggugaauagc

SEQ ID NO: 795434 - RNA, 19 nt, Artificial Sequence
  Description of Artificial Sequence: Synthetic oligonucleotide
augcccaagugaguuaugc

SEQ ID NO: 795435 - RNA, 19 nt, Artificial Sequence
  Description of Artificial Sequence: Synthetic oligonucleotide
acugaagugaugucaucca

SEQ ID NO: 795436 - RNA, 19 nt, Artificial Sequence
  Description of Artificial Sequence: Synthetic oligonucleotide
aaccccuuaaggagguggc

SEQ ID NO: 795437 - RNA, 19 nt, Artificial Sequence
  Description of Artificial Sequence: Synthetic oligonucleotide
ugagauucgaggguagcca

SEQ ID NO: 795438 - RNA, 19 nt, Artificial Sequence
  Description of Artificial Sequence: Synthetic oligonucleotide
aucgucggucuucacaauc

SEQ ID NO: 795439 - RNA, 19 nt, Artificial Sequence
  Description of Artificial Sequence: Synthetic oligonucleotide
uccaucucgccaaaagggu

SEQ ID NO: 795440 - RNA, 19 nt, Artificial Sequence
  Description of Artificial Sequence: Synthetic oligonucleotide
uuugacugguaaccaucag

SEQ ID NO: 795441 - RNA, 19 nt, Artificial Sequence
  Description of Artificial Sequence: Synthetic oligonucleotide
ucccuaaagcuuguaauug

SEQ ID NO: 795442 - RNA, 19 nt, Artificial Sequence
  Description of Artificial Sequence: Synthetic oligonucleotide
gugucaaggcauccaaggg

SEQ ID NO: 795443 - RNA, 19 nt, Artificial Sequence
  Description of Artificial Sequence: Synthetic oligonucleotide
uucggaagauguuaugaau

SEQ ID NO: 795444 - RNA, 19 nt, Artificial Sequence
  Description of Artificial Sequence: Synthetic oligonucleotide
ugccugaagagccgucugg

SEQ ID NO: 795445 - RNA, 19 nt, Artificial Sequence
  Description of Artificial Sequence: Synthetic oligonucleotide
agauaagugguuauaaaua

SEQ ID NO: 795446 - RNA, 19 nt, Artificial Sequence
  Description of Artificial Sequence: Synthetic oligonucleotide
gucugaaacaaagacuuac

SEQ ID NO: 795447 - RNA, 19 nt, Artificial Sequence
  Description of Artificial Sequence: Synthetic oligonucleotide
uucccgguuuuccacuggg

SEQ ID NO: 795448 - RNA, 19 nt, Artificial Sequence
  Description of Artificial Sequence: Synthetic oligonucleotide
uuugaaccucaauaauuuc

SEQ ID NO: 795449 - RNA, 19 nt, Artificial Sequence
  Description of Artificial Sequence: Synthetic oligonucleotide
aagcuucuaaugaaagaug

SEQ ID NO: 795450 - RNA, 19 nt, Artificial Sequence
  Description of Artificial Sequence: Synthetic oligonucleotide
ucuuuucgccuucugaguu

SEQ ID NO: 795451 - RNA, 19 nt, Artificial Sequence
  Description of Artificial Sequence: Synthetic oligonucleotide
agguaaaacaggaacuuca

SEQ ID NO: 795452 - RNA, 19 nt, Artificial Sequence
  Description of Artificial Sequence: Synthetic oligonucleotide
uggcacaugagguucccgc

SEQ ID NO: 795453 - RNA, 19 nt, Artificial Sequence
  Description of Artificial Sequence: Synthetic oligonucleotide
ucagugugccuguacguca

SEQ ID NO: 795454 - RNA, 19 nt, Artificial Sequence
  Description of Artificial Sequence: Synthetic oligonucleotide
uucccuaaagcuuguaauu

SEQ ID NO: 795455 - RNA, 19 nt, Artificial Sequence
  Description of Artificial Sequence: Synthetic oligonucleotide
auucggaagauguuaugaa

SEQ ID NO: 795456 - RNA, 19 nt, Artificial Sequence
  Description of Artificial Sequence: Synthetic oligonucleotide
cugaaacaaagacuuacca

SEQ ID NO: 795457 - RNA, 19 nt, Artificial Sequence
  Description of Artificial Sequence: Synthetic oligonucleotide
aauuggagucacugccuga

SEQ ID NO: 795458 - RNA, 19 nt, Artificial Sequence
  Description of Artificial Sequence: Synthetic oligonucleotide
agagccgucugguucagcu

SEQ ID NO: 795459 - RNA, 19 nt, Artificial Sequence
  Description of Artificial Sequence: Synthetic oligonucleotide
agggaaugacucauccucc

SEQ ID NO: 795460 - RNA, 19 nt, Artificial Sequence
  Description of Artificial Sequence: Synthetic oligonucleotide
aaggauuguagagacugaa

SEQ ID NO: 795461 - RNA, 19 nt, Artificial Sequence
  Description of Artificial Sequence: Synthetic oligonucleotide
acucuaagaggaccugaag

SEQ ID NO: 795462 - RNA, 19 nt, Artificial Sequence
  Description of Artificial Sequence: Synthetic oligonucleotide
uuauucccgguuuuccacu

SEQ ID NO: 795463 - RNA, 19 nt, Artificial Sequence
  Description of Artificial Sequence: Synthetic oligonucleotide
guaucgucggucuucacaa

SEQ ID NO: 795464 - RNA, 19 nt, Artificial Sequence
  Description of Artificial Sequence: Synthetic oligonucleotide
aggguuuuaccauuuuaaa

SEQ ID NO: 795465 - RNA, 19 nt, Artificial Sequence
  Description of Artificial Sequence: Synthetic oligonucleotide
caucucgccaaaaggguug

SEQ ID NO: 795466 - RNA, 19 nt, Artificial Sequence
  Description of Artificial Sequence: Synthetic oligonucleotide
gagcugucccuucuuuacg

SEQ ID NO: 795467 - RNA, 19 nt, Artificial Sequence
  Description of Artificial Sequence: Synthetic oligonucleotide
ugugacugucagcauucug

SEQ ID NO: 795468 - RNA, 19 nt, Artificial Sequence
  Description of Artificial Sequence: Synthetic oligonucleotide
ucauucggaagauguuaug

SEQ ID NO: 795469 - RNA, 19 nt, Artificial Sequence
  Description of Artificial Sequence: Synthetic oligonucleotide
agcaguaucgucggucuuc

SEQ ID NO: 795470 - RNA, 19 nt, Artificial Sequence
  Description of Artificial Sequence: Synthetic oligonucleotide
uaauagcauaacauaucuu

SEQ ID NO: 795471 - RNA, 19 nt, Artificial Sequence
  Description of Artificial Sequence: Synthetic oligonucleotide
agagaaguugaaaaccccu

SEQ ID NO: 795472 - RNA, 19 nt, Artificial Sequence
  Description of Artificial Sequence: Synthetic oligonucleotide
aauagcucgagcagccagu

SEQ ID NO: 795473 - RNA, 19 nt, Artificial Sequence
  Description of Artificial Sequence: Synthetic oligonucleotide
guuuuauugcacauaucca

SEQ ID NO: 795474 - RNA, 19 nt, Artificial Sequence
  Description of Artificial Sequence: Synthetic oligonucleotide
ugacugucagcauucugaa

SEQ ID NO: 795475 - RNA, 19 nt, Artificial Sequence
  Description of Artificial Sequence: Synthetic oligonucleotide
agcaaacugugugacacug

SEQ ID NO: 795476 - RNA, 19 nt, Artificial Sequence
  Description of Artificial Sequence: Synthetic oligonucleotide
aguuaugcuucagauucug

SEQ ID NO: 795477 - RNA, 19 nt, Artificial Sequence
  Description of Artificial Sequence: Synthetic oligonucleotide
uaauugguccuuugaggaa

SEQ ID NO: 795478 - RNA, 19 nt, Artificial Sequence
  Description of Artificial Sequence: Synthetic oligonucleotide
ucgcauuuguagcuguguc

SEQ ID NO: 795479 - RNA, 19 nt, Artificial Sequence
  Description of Artificial Sequence: Synthetic oligonucleotide
aucacuucuguaguguggu

SEQ ID NO: 795480 - RNA, 19 nt, Artificial Sequence
  Description of Artificial Sequence: Synthetic oligonucleotide
acaugugacugucagcauu

SEQ ID NO: 795481 - RNA, 19 nt, Artificial Sequence
  Description of Artificial Sequence: Synthetic oligonucleotide
acauauccacucuucguau

SEQ ID NO: 795482 - RNA, 19 nt, Artificial Sequence
  Description of Artificial Sequence: Synthetic oligonucleotide
agcauuaauugagccagug

SEQ ID NO: 795483 - RNA, 19 nt, Artificial Sequence
  Description of Artificial Sequence: Synthetic oligonucleotide
uauucccgguuuuccacug

SEQ ID NO: 795484 - RNA, 19 nt, Artificial Sequence
  Description of Artificial Sequence: Synthetic oligonucleotide
caaggguacauuccacaug

SEQ ID NO: 795485 - RNA, 19 nt, Artificial Sequence
  Description of Artificial Sequence: Synthetic oligonucleotide
caugugguggugaccaguc

SEQ ID NO: 795486 - RNA, 19 nt, Artificial Sequence
  Description of Artificial Sequence: Synthetic oligonucleotide
gaucguuuaacaguacaua

SEQ ID NO: 795487 - RNA, 19 nt, Artificial Sequence
  Description of Artificial Sequence: Synthetic oligonucleotide
cuuuucgccuucugaguug

SEQ ID NO: 795488 - RNA, 19 nt, Artificial Sequence
  Description of Artificial Sequence: Synthetic oligonucleotide
cauucggaagauguuauga

SEQ ID NO: 795489 - RNA, 19 nt, Artificial Sequence
  Description of Artificial Sequence: Synthetic oligonucleotide
gcauaacauaucuuuucgc

SEQ ID NO: 795490 - RNA, 19 nt, Artificial Sequence
  Description of Artificial Sequence: Synthetic oligonucleotide
ugccuguacgucagagaag

SEQ ID NO: 795491 - RNA, 19 nt, Artificial Sequence
  Description of Artificial Sequence: Synthetic oligonucleotide
ggaacuaguagagcugucc

SEQ ID NO: 795492 - RNA, 19 nt, Artificial Sequence
  Description of Artificial Sequence: Synthetic oligonucleotide
ugaagaaguacagccucuc

SEQ ID NO: 795493 - RNA, 19 nt, Artificial Sequence
  Description of Artificial Sequence: Synthetic oligonucleotide
gaagcaguaucgucggucu

SEQ ID NO: 795494 - RNA, 19 nt, Artificial Sequence
  Description of Artificial Sequence: Synthetic oligonucleotide
auguuaugaauagcucgag

SEQ ID NO: 795495 - RNA, 19 nt, Artificial Sequence
  Description of Artificial Sequence: Synthetic oligonucleotide
guaaccaucagaugggauu

SEQ ID NO: 795496 - RNA, 19 nt, Artificial Sequence
  Description of Artificial Sequence: Synthetic oligonucleotide
aggauuguagagacugaag

SEQ ID NO: 795497 - RNA, 19 nt, Artificial Sequence
  Description of Artificial Sequence: Synthetic oligonucleotide
cacauauccacucuucgua

SEQ ID NO: 795498 - RNA, 19 nt, Artificial Sequence
  Description of Artificial Sequence: Synthetic oligonucleotide
gcauuaauugagccagugc

SEQ ID NO: 795499 - RNA, 19 nt, Artificial Sequence
  Description of Artificial Sequence: Synthetic oligonucleotide
cccuaaagcuuguaauugg

SEQ ID NO: 795500 - RNA, 19 nt, Artificial Sequence
  Description of Artificial Sequence: Synthetic oligonucleotide
uuagcaggguuggcaauug

SEQ ID NO: 795501 - RNA, 19 nt, Artificial Sequence
  Description of Artificial Sequence: Synthetic oligonucleotide
accaucagaugggauuccg

SEQ ID NO: 795502 - RNA, 19 nt, Artificial Sequence
  Description of Artificial Sequence: Synthetic oligonucleotide
cuguugaucuguggugugg

SEQ ID NO: 795503 - RNA, 19 nt, Artificial Sequence
  Description of Artificial Sequence: Synthetic oligonucleotide
cauaauuagcaggguuggc

SEQ ID NO: 795504 - RNA, 19 nt, Artificial Sequence
  Description of Artificial Sequence: Synthetic oligonucleotide
ccuucuuuacggugaauag

SEQ ID NO: 795505 - RNA, 19 nt, Artificial Sequence
  Description of Artificial Sequence: Synthetic oligonucleotide
uguacgugcucagggacuc

SEQ ID NO: 795506 - RNA, 19 nt, Artificial Sequence
  Description of Artificial Sequence: Synthetic oligonucleotide
auucccgguuuuccacugg

SEQ ID NO: 795507 - RNA, 19 nt, Artificial Sequence
  Description of Artificial Sequence: Synthetic oligonucleotide
acuaguagagcugucccuu

SEQ ID NO: 795508 - RNA, 19 nt, Artificial Sequence
  Description of Artificial Sequence: Synthetic oligonucleotide
uggacuccgguaaucugau

SEQ ID NO: 795509 - RNA, 19 nt, Artificial Sequence
  Description of Artificial Sequence: Synthetic oligonucleotide
uacgucagagaaguugaaa

SEQ ID NO: 795510 - RNA, 19 nt, Artificial Sequence
  Description of Artificial Sequence: Synthetic oligonucleotide
auuaauugagccagugcuu

SEQ ID NO: 795511 - RNA, 19 nt, Artificial Sequence
  Description of Artificial Sequence: Synthetic oligonucleotide
ucacuuggacugccgccag

SEQ ID NO: 795512 - RNA, 19 nt, Artificial Sequence
  Description of Artificial Sequence: Synthetic oligonucleotide
ugugugacacugguaaguu

SEQ ID NO: 795513 - RNA, 19 nt, Artificial Sequence
  Description of Artificial Sequence: Synthetic oligonucleotide
uuaaggagguggcucucuu

SEQ ID NO: 795514 - RNA, 19 nt, Artificial Sequence
  Description of Artificial Sequence: Synthetic oligonucleotide
gagucugagggucuaucaa

SEQ ID NO: 795515 - RNA, 19 nt, Artificial Sequence
  Description of Artificial Sequence: Synthetic oligonucleotide
guugguacgccugcugccc

SEQ ID NO: 795516 - RNA, 19 nt, Artificial Sequence
  Description of Artificial Sequence: Synthetic oligonucleotide
  modified_base (9)..(9): a, c, u, g, unknown or other
agccacggnuccccugggc

SEQ ID NO: 795517 - RNA, 19 nt, Artificial Sequence
  Description of Artificial Sequence: Synthetic oligonucleotide
uuacggugaauagccacaa

SEQ ID NO: 795518 - RNA, 19 nt, Artificial Sequence
  Description of Artificial Sequence: Synthetic oligonucleotide
ugccgccagugucaucugg

SEQ ID NO: 795519 - RNA, 19 nt, Artificial Sequence
  Description of Artificial Sequence: Synthetic oligonucleotide
guuucugagauucgagggu

SEQ ID NO: 795520 - RNA, 19 nt, Artificial Sequence
  Description of Artificial Sequence: Synthetic oligonucleotide
ugcaaucaguuccucuguu

SEQ ID NO: 795521 - RNA, 19 nt, Artificial Sequence
  Description of Artificial Sequence: Synthetic oligonucleotide
cagugugccuguacgucag

SEQ ID NO: 795522 - RNA, 19 nt, Artificial Sequence
  Description of Artificial Sequence: Synthetic oligonucleotide
uucucauucugggugcuua

SEQ ID NO: 795523 - RNA, 19 nt, Artificial Sequence
  Description of Artificial Sequence: Synthetic oligonucleotide
ucucauucugggugcuuaa

SEQ ID NO: 795524 - RNA, 19 nt, Artificial Sequence
  Description of Artificial Sequence: Synthetic oligonucleotide
uggugaccagucccggucu

SEQ ID NO: 795525 - RNA, 19 nt, Artificial Sequence
  Description of Artificial Sequence: Synthetic oligonucleotide
uagucgcauuuguagcugu

SEQ ID NO: 795526 - RNA, 19 nt, Artificial Sequence
  Description of Artificial Sequence: Synthetic oligonucleotide
gccuggagaauuauucccg

SEQ ID NO: 795527 - RNA, 19 nt, Artificial Sequence
  Description of Artificial Sequence: Synthetic oligonucleotide
guagucgcauuuguagcug

SEQ ID NO: 795528 - RNA, 19 nt, Artificial Sequence
  Description of Artificial Sequence: Synthetic oligonucleotide
auacaucuuuagaaugaca

SEQ ID NO: 795529 - RNA, 19 nt, Artificial Sequence
  Description of Artificial Sequence: Synthetic oligonucleotide
uuguagcugugucccauuu

SEQ ID NO: 795530 - RNA, 19 nt, Artificial Sequence
  Description of Artificial Sequence: Synthetic oligonucleotide
aucucgccaaaaggguugg

SEQ ID NO: 795531 - RNA, 19 nt, Artificial Sequence
  Description of Artificial Sequence: Synthetic oligonucleotide
ugaauagcucgagcagcca

SEQ ID NO: 795532 - RNA, 19 nt, Artificial Sequence
  Description of Artificial Sequence: Synthetic oligonucleotide
uguucuggucaaggaauuc

SEQ ID NO: 795533 - RNA, 19 nt, Artificial Sequence
  Description of Artificial Sequence: Synthetic oligonucleotide
uuuguagcugugucccauu

SEQ ID NO: 795534 - RNA, 19 nt, Artificial Sequence
  Description of Artificial Sequence: Synthetic oligonucleotide
aaugggugucccaggugca

SEQ ID NO: 795535 - RNA, 19 nt, Artificial Sequence
  Description of Artificial Sequence: Synthetic oligonucleotide
acuuaccacaauagcauuu

SEQ ID NO: 795536 - RNA, 19 nt, Artificial Sequence
  Description of Artificial Sequence: Synthetic oligonucleotide
gguauagacagcauuaauu

SEQ ID NO: 795537 - RNA, 19 nt, Artificial Sequence
  Description of Artificial Sequence: Synthetic oligonucleotide
gucacuuggacugccgcca

SEQ ID NO: 795538 - RNA, 19 nt, Artificial Sequence
  Description of Artificial Sequence: Synthetic oligonucleotide
gucuaucaaccucagaguu

SEQ ID NO: 795539 - RNA, 19 nt, Artificial Sequence
  Description of Artificial Sequence: Synthetic oligonucleotide
aagagccgucugguucagc

SEQ ID NO: 795540 - RNA, 19 nt, Artificial Sequence
  Description of Artificial Sequence: Synthetic oligonucleotide
gguugaucguuuaacagua

SEQ ID NO: 795541 - RNA, 19 nt, Artificial Sequence
  Description of Artificial Sequence: Synthetic oligonucleotide
caucaagguaaaacaggaa

SEQ ID NO: 795542 - RNA, 19 nt, Artificial Sequence
  Description of Artificial Sequence: Synthetic oligonucleotide
agcaggguuggcaauuggu

SEQ ID NO: 795543 - RNA, 19 nt, Artificial Sequence
  Description of Artificial Sequence: Synthetic oligonucleotide
aaaaccccuuaaggaggug

SEQ ID NO: 795544 - RNA, 19 nt, Artificial Sequence
  Description of Artificial Sequence: Synthetic oligonucleotide
ggcacaugagguucccgcc

SEQ ID NO: 795545 - RNA, 19 nt, Artificial Sequence
  Description of Artificial Sequence: Synthetic oligonucleotide
ggguugguacgccugcugc

SEQ ID NO: 795546 - RNA, 19 nt, Artificial Sequence
  Description of Artificial Sequence: Synthetic oligonucleotide
caagugaguucugaaagua

SEQ ID NO: 795547 - RNA, 19 nt, Artificial Sequence
  Description of Artificial Sequence: Synthetic oligonucleotide
cacucuaagaggaccugaa

SEQ ID NO: 795548 - RNA, 19 nt, Artificial Sequence
  Description of Artificial Sequence: Synthetic oligonucleotide
  modified_base (6)..(6): a, c, u, g, unknown or other
cacggnuccccugggcugg

SEQ ID NO: 795549 - RNA, 19 nt, Artificial Sequence
  Description of Artificial Sequence: Synthetic oligonucleotide
ccacaugugacugucagca

SEQ ID NO: 795550 - RNA, 19 nt, Artificial Sequence
  Description of Artificial Sequence: Synthetic oligonucleotide
ccgaacgaugaacaucugc

SEQ ID NO: 795551 - RNA, 19 nt, Artificial Sequence
  Description of Artificial Sequence: Synthetic oligonucleotide
  modified_base (2)..(2): a, c, u, g, unknown or other
gnuccccugggcuggcaca

SEQ ID NO: 795552 - RNA, 19 nt, Artificial Sequence
  Description of Artificial Sequence: Synthetic oligonucleotide
uacggugaauagccacaaa

SEQ ID NO: 795553 - RNA, 19 nt, Artificial Sequence
  Description of Artificial Sequence: Synthetic oligonucleotide
gccaaaaggguugguacgc

SEQ ID NO: 795554 - RNA, 19 nt, Artificial Sequence
  Description of Artificial Sequence: Synthetic oligonucleotide
ggaagcaguaucgucgguc

SEQ ID NO: 795555 - RNA, 19 nt, Artificial Sequence
  Description of Artificial Sequence: Synthetic oligonucleotide
gugcuuaacaguacagucu

SEQ ID NO: 795556 - RNA, 19 nt, Artificial Sequence
  Description of Artificial Sequence: Synthetic oligonucleotide
gagggucuaucaaccucag

SEQ ID NO: 795557 - RNA, 19 nt, Artificial Sequence
  Description of Artificial Sequence: Synthetic oligonucleotide
ugcgccucuguugucacuu

SEQ ID NO: 795558 - RNA, 19 nt, Artificial Sequence
  Description of Artificial Sequence: Synthetic oligonucleotide
gaaaaccccuuaaggaggu

SEQ ID NO: 795559 - RNA, 19 nt, Artificial Sequence
  Description of Artificial Sequence: Synthetic oligonucleotide
cauucucugugucugaauu

SEQ ID NO: 795560 - RNA, 19 nt, Artificial Sequence
  Description of Artificial Sequence: Synthetic oligonucleotide
guacauacuuuccaucauu

SEQ ID NO: 795561 - RNA, 19 nt, Artificial Sequence
  Description of Artificial Sequence: Synthetic oligonucleotide
aucauugguuagugguaua

SEQ ID NO: 795562 - RNA, 19 nt, Artificial Sequence
  Description of Artificial Sequence: Synthetic oligonucleotide
cauuuguagucgcauuugu

SEQ ID NO: 795563 - RNA, 19 nt, Artificial Sequence
  Description of Artificial Sequence: Synthetic oligonucleotide
ugacacugguaaguucaaa

SEQ ID NO: 795564 - RNA, 19 nt, Artificial Sequence
  Description of Artificial Sequence: Synthetic oligonucleotide
guaauuggagucacugccu

SEQ ID NO: 795565 - RNA, 19 nt, Artificial Sequence
  Description of Artificial Sequence: Synthetic oligonucleotide
ccccaaauuaauagcauaa

SEQ ID NO: 795566 - RNA, 19 nt, Artificial Sequence
  Description of Artificial Sequence: Synthetic oligonucleotide
aagcaguaucgucggucuu

SEQ ID NO: 795567 - RNA, 19 nt, Artificial Sequence
  Description of Artificial Sequence: Synthetic oligonucleotide
auguacgugcucagggacu

SEQ ID NO: 795568 - RNA, 19 nt, Artificial Sequence
  Description of Artificial Sequence: Synthetic oligonucleotide
guugaucguuuaacaguac

SEQ ID NO: 795569 - RNA, 19 nt, Artificial Sequence
  Description of Artificial Sequence: Synthetic oligonucleotide
ggucuaucaaccucagagu

SEQ ID NO: 795570 - RNA, 19 nt, Artificial Sequence
  Description of Artificial Sequence: Synthetic oligonucleotide
gaguuugacugguaaccau

SEQ ID NO: 795571 - RNA, 19 nt, Artificial Sequence
  Description of Artificial Sequence: Synthetic oligonucleotide
uccaggcagauaagugguu

SEQ ID NO: 795572 - RNA, 19 nt, Artificial Sequence
  Description of Artificial Sequence: Synthetic oligonucleotide
aggaacuaguagagcuguc

SEQ ID NO: 795573 - RNA, 19 nt, Artificial Sequence
  Description of Artificial Sequence: Synthetic oligonucleotide
ggcagauaagugguuauaa

SEQ ID NO: 795574 - RNA, 19 nt, Artificial Sequence
  Description of Artificial Sequence: Synthetic oligonucleotide
ggucuggcucagaagaaac

SEQ ID NO: 795575 - RNA, 19 nt, Artificial Sequence
  Description of Artificial Sequence: Synthetic oligonucleotide
aggaacuauuuaguauuua

SEQ ID NO: 795576 - RNA, 19 nt, Artificial Sequence
  Description of Artificial Sequence: Synthetic oligonucleotide
agccaaccagucuuuuguu

SEQ ID NO: 795577 - RNA, 19 nt, Artificial Sequence
  Description of Artificial Sequence: Synthetic oligonucleotide
ggcaauuggucugggacuc

SEQ ID NO: 795578 - RNA, 19 nt, Artificial Sequence
  Description of Artificial Sequence: Synthetic oligonucleotide
uaucgucggucuucacaau

SEQ ID NO: 795579 - RNA, 19 nt, Artificial Sequence
  Description of Artificial Sequence: Synthetic oligonucleotide
auuccgucauucggaagau

SEQ ID NO: 795580 - RNA, 19 nt, Artificial Sequence
  Description of Artificial Sequence: Synthetic oligonucleotide
gaagagccgucugguucag

SEQ ID NO: 795581 - RNA, 19 nt, Artificial Sequence
  Description of Artificial Sequence: Synthetic oligonucleotide
agucgcauuuguagcugug

SEQ ID NO: 795582 - RNA, 19 nt, Artificial Sequence
  Description of Artificial Sequence: Synthetic oligonucleotide
ggauuccgucauucggaag

SEQ ID NO: 795583 - RNA, 19 nt, Artificial Sequence
  Description of Artificial Sequence: Synthetic oligonucleotide
agggucuaucaaccucaga

SEQ ID NO: 795584 - RNA, 19 nt, Artificial Sequence
  Description of Artificial Sequence: Synthetic oligonucleotide
caaaaggguugguacgccu

SEQ ID NO: 795585 - RNA, 19 nt, Artificial Sequence
  Description of Artificial Sequence: Synthetic oligonucleotide
caaggcauccaaggguaca

SEQ ID NO: 795586 - RNA, 19 nt, Artificial Sequence
  Description of Artificial Sequence: Synthetic oligonucleotide
cgaacgaugaacaucugcu

SEQ ID NO: 795587 - RNA, 19 nt, Artificial Sequence
  Description of Artificial Sequence: Synthetic oligonucleotide
caguacagucugaaacaaa

SEQ ID NO: 795588 - RNA, 19 nt, Artificial Sequence
  Description of Artificial Sequence: Synthetic oligonucleotide
guugugcacagcagugcca

SEQ ID NO: 795589 - RNA, 19 nt, Artificial Sequence
  Description of Artificial Sequence: Synthetic oligonucleotide
auagcucgagcagccagua

SEQ ID NO: 795590 - RNA, 19 nt, Artificial Sequence
  Description of Artificial Sequence: Synthetic oligonucleotide
gguuagugguauagacagc

SEQ ID NO: 795591 - RNA, 19 nt, Artificial Sequence
  Description of Artificial Sequence: Synthetic oligonucleotide
agugugccuguacgucaga

SEQ ID NO: 795592 - RNA, 19 nt, Artificial Sequence
  Description of Artificial Sequence: Synthetic oligonucleotide
cacuucuguaguguggucu

SEQ ID NO: 795593 - RNA, 19 nt, Artificial Sequence
  Description of Artificial Sequence: Synthetic oligonucleotide
aggcagauaagugguuaua

SEQ ID NO: 795594 - RNA, 19 nt, Artificial Sequence
  Description of Artificial Sequence: Synthetic oligonucleotide
guccaggcagauaaguggu

SEQ ID NO: 795595 - RNA, 19 nt, Artificial Sequence
  Description of Artificial Sequence: Synthetic oligonucleotide
gucauucggaagauguuau

SEQ ID NO: 795596 - RNA, 19 nt, Artificial Sequence
  Description of Artificial Sequence: Synthetic oligonucleotide
cugugugacacugguaagu

SEQ ID NO: 795597 - RNA, 19 nt, Artificial Sequence
  Description of Artificial Sequence: Synthetic oligonucleotide
  modified_base (7)..(7): a, c, u, g, unknown or other
ccacggnuccccugggcug

SEQ ID NO: 795598 - RNA, 19 nt, Artificial Sequence
  Description of Artificial Sequence: Synthetic oligonucleotide
gccuguacgucagagaagu

SEQ ID NO: 795599 - RNA, 19 nt, Artificial Sequence
  Description of Artificial Sequence: Synthetic oligonucleotide
caucauugguuagugguau

SEQ ID NO: 795600 - RNA, 19 nt, Artificial Sequence
  Description of Artificial Sequence: Synthetic oligonucleotide
gggauuccgucauucggaa

SEQ ID NO: 795601 - RNA, 19 nt, Artificial Sequence
  Description of Artificial Sequence: Synthetic oligonucleotide
agucugaaacaaagacuua

SEQ ID NO: 795602 - RNA, 19 nt, Artificial Sequence
  Description of Artificial Sequence: Synthetic oligonucleotide
cugugucccauuucuuacu

SEQ ID NO: 795603 - RNA, 19 nt, Artificial Sequence
  Description of Artificial Sequence: Synthetic oligonucleotide
  modified_base (3)..(3): a, c, u, g, unknown or other
ggnuccccugggcuggcac

SEQ ID NO: 795604 - RNA, 19 nt, Artificial Sequence
  Description of Artificial Sequence: Synthetic oligonucleotide
gucgcauuuguagcugugu

SEQ ID NO: 795605 - RNA, 19 nt, Artificial Sequence
  Description of Artificial Sequence: Synthetic oligonucleotide
ggacucuaggaaccagaaa

SEQ ID NO: 795606 - RNA, 19 nt, Artificial Sequence
  Description of Artificial Sequence: Synthetic oligonucleotide
cauauccacucuucguauu

SEQ ID NO: 795607 - RNA, 19 nt, Artificial Sequence
  Description of Artificial Sequence: Synthetic oligonucleotide
gcaguaucgucggucuuca

SEQ ID NO: 795608 - RNA, 19 nt, Artificial Sequence
  Description of Artificial Sequence: Synthetic oligonucleotide
gagccucaagugaguucug

SEQ ID NO: 795609 - RNA, 19 nt, Artificial Sequence
  Description of Artificial Sequence: Synthetic oligonucleotide
caggcagauaagugguuau

SEQ ID NO: 795610 - RNA, 19 nt, Artificial Sequence
  Description of Artificial Sequence: Synthetic oligonucleotide
acaugagguucccgcccuu

SEQ ID NO: 795611 - RNA, 19 nt, Artificial Sequence
  Description of Artificial Sequence: Synthetic oligonucleotide
cacaugagguucccgcccu

SEQ ID NO: 795612 - RNA, 19 nt, Artificial Sequence
  Description of Artificial Sequence: Synthetic oligonucleotide
caguaucgucggucuucac

SEQ ID NO: 795613 - RNA, 19 nt, Artificial Sequence
  Description of Artificial Sequence: Synthetic oligonucleotide
ggucagugugccuguacgu

SEQ ID NO: 795614 - RNA, 19 nt, Artificial Sequence
  Description of Artificial Sequence: Synthetic oligonucleotide
gugacacugguaaguucaa

SEQ ID NO: 795615 - RNA, 19 nt, Artificial Sequence
  Description of Artificial Sequence: Synthetic oligonucleotide
caauuggucugggacucua

SEQ ID NO: 795616 - RNA, 19 nt, Artificial Sequence
  Description of Artificial Sequence: Synthetic oligonucleotide
cccuucuuuacggugaaua

SEQ ID NO: 795617 - RNA, 19 nt, Artificial Sequence
  Description of Artificial Sequence: Synthetic oligonucleotide
ccccuuaaggagguggcuc

SEQ ID NO: 795618 - RNA, 19 nt, Artificial Sequence
  Description of Artificial Sequence: Synthetic oligonucleotide
gggugcuuaacaguacagu

SEQ ID NO: 795619 - RNA, 19 nt, Artificial Sequence
  Description of Artificial Sequence: Synthetic oligonucleotide
caggugcaaucaguuccuc

SEQ ID NO: 795620 - RNA, 19 nt, Artificial Sequence
  Description of Artificial Sequence: Synthetic oligonucleotide
ggacuccgguaaucugaug

SEQ ID NO: 795621 - RNA, 19 nt, Artificial Sequence
  Description of Artificial Sequence: Synthetic oligonucleotide
accgaacgaugaacaucug

SEQ ID NO: 795622 - RNA, 19 nt, Artificial Sequence
  Description of Artificial Sequence: Synthetic oligonucleotide
cagcaaacugugugacacu

SEQ ID NO: 795623 - RNA, 19 nt, Artificial Sequence
  Description of Artificial Sequence: Synthetic oligonucleotide
cgccucuguugucacuugg

SEQ ID NO: 795624 - RNA, 19 nt, Artificial Sequence
  Description of Artificial Sequence: Synthetic oligonucleotide
  modified_base (8)..(8): a, c, u, g, unknown or other
gccacggnuccccugggcu

SEQ ID NO: 795625 - RNA, 19 nt, Artificial Sequence
  Description of Artificial Sequence: Synthetic oligonucleotide
gucaucugguugaucguuu

SEQ ID NO: 795626 - RNA, 19 nt, Artificial Sequence
  Description of Artificial Sequence: Synthetic oligonucleotide
ccgguuuuccacugggugu

SEQ ID NO: 795627 - RNA, 19 nt, Artificial Sequence
  Description of Artificial Sequence: Synthetic oligonucleotide
ccgguaaucugaugacaaa

SEQ ID NO: 795628 - RNA, 19 nt, Artificial Sequence
  Description of Artificial Sequence: Synthetic oligonucleotide
uucccgcccuugggugaag

SEQ ID NO: 795629 - RNA, 19 nt, Artificial Sequence
  Description of Artificial Sequence: Synthetic oligonucleotide
gagccgucugguucagcuu

SEQ ID NO: 795630 - RNA, 19 nt, Artificial Sequence
  Description of Artificial Sequence: Synthetic oligonucleotide
guucccgcccuugggugaa

SEQ ID NO: 795631 - RNA, 19 nt, Artificial Sequence
  Description of Artificial Sequence: Synthetic oligonucleotide
cacaugugacugucagcau

SEQ ID NO: 795632 - RNA, 19 nt, Artificial Sequence
  Description of Artificial Sequence: Synthetic oligonucleotide
cccaugugguggugaccag

SEQ ID NO: 795633 - RNA, 19 nt, Artificial Sequence
  Description of Artificial Sequence: Synthetic oligonucleotide
ccacucuaagaggaccuga

SEQ ID NO: 795634 - RNA, 19 nt, Artificial Sequence
  Description of Artificial Sequence: Synthetic oligonucleotide
gguggugaccagucccggu

SEQ ID NO: 795635 - RNA, 19 nt, Artificial Sequence
  Description of Artificial Sequence: Synthetic oligonucleotide
gccaaccagucuuuuguuu

SEQ ID NO: 795636 - RNA, 19 nt, Artificial Sequence
  Description of Artificial Sequence: Synthetic oligonucleotide
ggagaucuggaagcaguau

SEQ ID NO: 795637 - RNA, 19 nt, Artificial Sequence
  Description of Artificial Sequence: Synthetic oligonucleotide
gcgccucuguugucacuug

SEQ ID NO: 795638 - RNA, 19 nt, Artificial Sequence
  Description of Artificial Sequence: Synthetic oligonucleotide
gguaaccaucagaugggau

SEQ ID NO: 795639 - RNA, 19 nt, Artificial Sequence
  Description of Artificial Sequence: Synthetic oligonucleotide
cccggucuuguuucugaga

SEQ ID NO: 795640 - RNA, 19 nt, Artificial Sequence
  Description of Artificial Sequence: Synthetic oligonucleotide
gcuuguaauuggagucacu

SEQ ID NO: 795641 - RNA, 19 nt, Artificial Sequence
  Description of Artificial Sequence: Synthetic oligonucleotide
ccaucucgccaaaaggguu

SEQ ID NO: 795642 - RNA, 19 nt, Artificial Sequence
  Description of Artificial Sequence: Synthetic oligonucleotide
gccgucugguucagcuuga

SEQ ID NO: 795643 - RNA, 19 nt, Artificial Sequence
  Description of Artificial Sequence: Synthetic oligonucleotide
cccgaugcccaagugaguu

SEQ ID NO: 795644 - RNA, 19 nt, Artificial Sequence
  Description of Artificial Sequence: Synthetic oligonucleotide
cuacugccucuggguuguc

SEQ ID NO: 795645 - RNA, 19 nt, Artificial Sequence
  Description of Artificial Sequence: Synthetic oligonucleotide
ccaugugguggugaccagu

SEQ ID NO: 795646 - RNA, 19 nt, Artificial Sequence
  Description of Artificial Sequence: Synthetic oligonucleotide
cugcgccucuguugucacu

SEQ ID NO: 795647 - RNA, 19 nt, Artificial Sequence
  Description of Artificial Sequence: Synthetic oligonucleotide
ccgucauucggaagauguu

SEQ ID NO: 795648 - RNA, 19 nt, Artificial Sequence
  Description of Artificial Sequence: Synthetic oligonucleotide
ggacugccgccagugucau

SEQ ID NO: 795649 - RNA, 19 nt, Artificial Sequence
  Description of Artificial Sequence: Synthetic oligonucleotide
ccccgaugcccaagugagu

SEQ ID NO: 795650 - RNA, 19 nt, Artificial Sequence
  Description of Artificial Sequence: Synthetic oligonucleotide
ccgucugguucagcuugau

SEQ ID NO: 795651 - RNA, 19 nt, Artificial Sequence
  Description of Artificial Sequence: Synthetic oligonucleotide
  modified_base (4)..(4): a, c, u, g, unknown or other
cggnuccccugggcuggca

SEQ ID NO: 795652 - RNA, 19 nt, Artificial Sequence
  Description of Artificial Sequence: Synthetic oligonucleotide
uuaacgucaacauuguuag

SEQ ID NO: 795653 - RNA, 19 nt, Artificial Sequence
  Description of Artificial Sequence: Synthetic oligonucleotide
ugaauaaaacugaagacca

SEQ ID NO: 795654 - RNA, 19 nt, Artificial Sequence
  Description of Artificial Sequence: Synthetic oligonucleotide
ugauaaaccgacuaaagga

SEQ ID NO: 795655 - RNA, 19 nt, Artificial Sequence
  Description of Artificial Sequence: Synthetic oligonucleotide
uccaucauccauaagacgc

SEQ ID NO: 795656 - RNA, 19 nt, Artificial Sequence
  Description of Artificial Sequence: Synthetic oligonucleotide
agaaacaacacauaguggu

SEQ ID NO: 795657 - RNA, 19 nt, Artificial Sequence
  Description of Artificial Sequence: Synthetic oligonucleotide
agaaccagcaacuaaugac

SEQ ID NO: 795658 - RNA, 19 nt, Artificial Sequence
  Description of Artificial Sequence: Synthetic oligonucleotide
ucuuuuaggauacuaauuc

SEQ ID NO: 795659 - RNA, 19 nt, Artificial Sequence
  Description of Artificial Sequence: Synthetic oligonucleotide
uaaaaguacugccauauca

SEQ ID NO: 795660 - RNA, 19 nt, Artificial Sequence
  Description of Artificial Sequence: Synthetic oligonucleotide
uuacauauggaaacuggcg

SEQ ID NO: 795661 - RNA, 19 nt, Artificial Sequence
  Description of Artificial Sequence: Synthetic oligonucleotide
aaaguacacacugaagggc

SEQ ID NO: 795662 - RNA, 19 nt, Artificial Sequence
  Description of Artificial Sequence: Synthetic oligonucleotide
agucagacagucuagcggc

SEQ ID NO: 795663 - RNA, 19 nt, Artificial Sequence
  Description of Artificial Sequence: Synthetic oligonucleotide
aagucagacagucuagcgg

SEQ ID NO: 795664 - RNA, 19 nt, Artificial Sequence
  Description of Artificial Sequence: Synthetic oligonucleotide
guacacguuagauagaugc

SEQ ID NO: 795665 - RNA, 19 nt, Artificial Sequence
  Description of Artificial Sequence: Synthetic oligonucleotide
uacuaauuccaccugaugu

SEQ ID NO: 795666 - RNA, 19 nt, Artificial Sequence
  Description of Artificial Sequence: Synthetic oligonucleotide
auuacagggagcaauuucc

SEQ ID NO: 795667 - RNA, 19 nt, Artificial Sequence
  Description of Artificial Sequence: Synthetic oligonucleotide
uggauuuuggagaacuggg

SEQ ID NO: 795668 - RNA, 19 nt, Artificial Sequence
  Description of Artificial Sequence: Synthetic oligonucleotide
uguaaauugucacuguuau

SEQ ID NO: 795669 - RNA, 19 nt, Artificial Sequence
  Description of Artificial Sequence: Synthetic oligonucleotide
ugcagcuaagcccuaaggg

SEQ ID NO: 795670 - RNA, 19 nt, Artificial Sequence
  Description of Artificial Sequence: Synthetic oligonucleotide
aguacagacuagaugaacc

SEQ ID NO: 795671 - RNA, 19 nt, Artificial Sequence
  Description of Artificial Sequence: Synthetic oligonucleotide
uuugucagugguuugcuag

SEQ ID NO: 795672 - RNA, 19 nt, Artificial Sequence
  Description of Artificial Sequence: Synthetic oligonucleotide
uuaugcuauguucuguuag

SEQ ID NO: 795673 - RNA, 19 nt, Artificial Sequence
  Description of Artificial Sequence: Synthetic oligonucleotide
uaugcuauguucuguuagg

SEQ ID NO: 795674 - RNA, 19 nt, Artificial Sequence
  Description of Artificial Sequence: Synthetic oligonucleotide
uucaaaucagucacaagca

SEQ ID NO: 795675 - RNA, 19 nt, Artificial Sequence
  Description of Artificial Sequence: Synthetic oligonucleotide
aguacugccauaucaaaca

SEQ ID NO: 795676 - RNA, 19 nt, Artificial Sequence
  Description of Artificial Sequence: Synthetic oligonucleotide
gauuacauauggaaacugg

SEQ ID NO: 795677 - RNA, 19 nt, Artificial Sequence
  Description of Artificial Sequence: Synthetic oligonucleotide
gacuagaugaaccauguga

SEQ ID NO: 795678 - RNA, 19 nt, Artificial Sequence
  Description of Artificial Sequence: Synthetic oligonucleotide
caagcugaagccaucaagc

SEQ ID NO: 795679 - RNA, 19 nt, Artificial Sequence
  Description of Artificial Sequence: Synthetic oligonucleotide
uaggauacuaauuccaccu

SEQ ID NO: 795680 - RNA, 19 nt, Artificial Sequence
  Description of Artificial Sequence: Synthetic oligonucleotide
uauacaaugcugaggagaa

SEQ ID NO: 795681 - RNA, 19 nt, Artificial Sequence
  Description of Artificial Sequence: Synthetic oligonucleotide
uuuaggauacuaauuccac

SEQ ID NO: 795682 - RNA, 19 nt, Artificial Sequence
  Description of Artificial Sequence: Synthetic oligonucleotide
agcaacuaaugacaaacuc

SEQ ID NO: 795683 - RNA, 19 nt, Artificial Sequence
  Description of Artificial Sequence: Synthetic oligonucleotide
uauugcauauaauacuggu

SEQ ID NO: 795684 - RNA, 19 nt, Artificial Sequence
  Description of Artificial Sequence: Synthetic oligonucleotide
uacacguuagauagaugcg

SEQ ID NO: 795685 - RNA, 19 nt, Artificial Sequence
  Description of Artificial Sequence: Synthetic oligonucleotide
acguuuuagguaaauaaac

SEQ ID NO: 795686 - RNA, 19 nt, Artificial Sequence
  Description of Artificial Sequence: Synthetic oligonucleotide
agguaggugauaaaagacc

SEQ ID NO: 795687 - RNA, 19 nt, Artificial Sequence
  Description of Artificial Sequence: Synthetic oligonucleotide
uagcuguggacauuuaaag

SEQ ID NO: 795688 - RNA, 19 nt, Artificial Sequence
  Description of Artificial Sequence: Synthetic oligonucleotide
ucuucguugagcacuggcc

SEQ ID NO: 795689 - RNA, 19 nt, Artificial Sequence
  Description of Artificial Sequence: Synthetic oligonucleotide
uaggugauaaaagaccaag

SEQ ID NO: 795690 - RNA, 19 nt, Artificial Sequence
  Description of Artificial Sequence: Synthetic oligonucleotide
uaaaccgacuaaaggaaga

SEQ ID NO: 795691 - RNA, 19 nt, Artificial Sequence
  Description of Artificial Sequence: Synthetic oligonucleotide
agcuguggacauuuaaagg

SEQ ID NO: 795692 - RNA, 19 nt, Artificial Sequence
  Description of Artificial Sequence: Synthetic oligonucleotide
uuuuaguuuccccacgguc

SEQ ID NO: 795693 - RNA, 19 nt, Artificial Sequence
  Description of Artificial Sequence: Synthetic oligonucleotide
ugucacuguuauuuaaacc

SEQ ID NO: 795694 - RNA, 19 nt, Artificial Sequence
  Description of Artificial Sequence: Synthetic oligonucleotide
uucggagcuuuaaugauga

SEQ ID NO: 795695 - RNA, 19 nt, Artificial Sequence
  Description of Artificial Sequence: Synthetic oligonucleotide
aauagaaaguuuccaucau

SEQ ID NO: 795696 - RNA, 19 nt, Artificial Sequence
  Description of Artificial Sequence: Synthetic oligonucleotide
gcuacuagcacguuuuagg

SEQ ID NO: 795697 - RNA, 19 nt, Artificial Sequence
  Description of Artificial Sequence: Synthetic oligonucleotide
aacauuguuaggaaccugu

SEQ ID NO: 795698 - RNA, 19 nt, Artificial Sequence
  Description of Artificial Sequence: Synthetic oligonucleotide
cagcuaagcccuaagggcg

SEQ ID NO: 795699 - RNA, 19 nt, Artificial Sequence
  Description of Artificial Sequence: Synthetic oligonucleotide
aaaucagucacaagcacau

SEQ ID NO: 795700 - RNA, 19 nt, Artificial Sequence
  Description of Artificial Sequence: Synthetic oligonucleotide
aaaaguacugccauaucaa

SEQ ID NO: 795701 - RNA, 19 nt, Artificial Sequence
  Description of Artificial Sequence: Synthetic oligonucleotide
uuuuagcugcagaugguca

SEQ ID NO: 795702 - RNA, 19 nt, Artificial Sequence
  Description of Artificial Sequence: Synthetic oligonucleotide
agucuagcggcgcugcagc

SEQ ID NO: 795703 - RNA, 19 nt, Artificial Sequence
  Description of Artificial Sequence: Synthetic oligonucleotide
acgguugaaguccucuucg

SEQ ID NO: 795704 - RNA, 19 nt, Artificial Sequence
  Description of Artificial Sequence: Synthetic oligonucleotide
aaaccgacuaaaggaagag

SEQ ID NO: 795705 - RNA, 19 nt, Artificial Sequence
  Description of Artificial Sequence: Synthetic oligonucleotide
cacuuaauuccaaugaaga

SEQ ID NO: 795706 - RNA, 19 nt, Artificial Sequence
  Description of Artificial Sequence: Synthetic oligonucleotide
uucccgaauacaccaaucu

SEQ ID NO: 795707 - RNA, 19 nt, Artificial Sequence
  Description of Artificial Sequence: Synthetic oligonucleotide
cugauucggagcuuuaaug

SEQ ID NO: 795708 - RNA, 19 nt, Artificial Sequence
  Description of Artificial Sequence: Synthetic oligonucleotide
ucacuguuauuuaaaccac

SEQ ID NO: 795709 - RNA, 19 nt, Artificial Sequence
  Description of Artificial Sequence: Synthetic oligonucleotide
gaccaguacuaguuuaugc

SEQ ID NO: 795710 - RNA, 19 nt, Artificial Sequence
  Description of Artificial Sequence: Synthetic oligonucleotide
aagaguagaaguauacaau

SEQ ID NO: 795711 - RNA, 19 nt, Artificial Sequence
  Description of Artificial Sequence: Synthetic oligonucleotide
uucuuuuaggauacuaauu

SEQ ID NO: 795712 - RNA, 19 nt, Artificial Sequence
  Description of Artificial Sequence: Synthetic oligonucleotide
uguuaggaucuuuuagaca

SEQ ID NO: 795713 - RNA, 19 nt, Artificial Sequence
  Description of Artificial Sequence: Synthetic oligonucleotide
uuguaaauugucacuguua

SEQ ID NO: 795714 - RNA, 19 nt, Artificial Sequence
  Description of Artificial Sequence: Synthetic oligonucleotide
gauaaaccgacuaaaggaa

SEQ ID NO: 795715 - RNA, 19 nt, Artificial Sequence
  Description of Artificial Sequence: Synthetic oligonucleotide
caaucuucccgaauacacc

SEQ ID NO: 795716 - RNA, 19 nt, Artificial Sequence
  Description of Artificial Sequence: Synthetic oligonucleotide
gaagcaaucuucccgaaua

SEQ ID NO: 795717 - RNA, 19 nt, Artificial Sequence
  Description of Artificial Sequence: Synthetic oligonucleotide
cuucguugagcacuggccc

SEQ ID NO: 795718 - RNA, 19 nt, Artificial Sequence
  Description of Artificial Sequence: Synthetic oligonucleotide
aacuaugaggucauuucug

SEQ ID NO: 795719 - RNA, 19 nt, Artificial Sequence
  Description of Artificial Sequence: Synthetic oligonucleotide
ucugagugaucugaauuag

SEQ ID NO: 795720 - RNA, 19 nt, Artificial Sequence
  Description of Artificial Sequence: Synthetic oligonucleotide
auuggcaacuuggggaggc

SEQ ID NO: 795721 - RNA, 19 nt, Artificial Sequence
  Description of Artificial Sequence: Synthetic oligonucleotide
cuggauuuuggagaacugg

SEQ ID NO: 795722 - RNA, 19 nt, Artificial Sequence
  Description of Artificial Sequence: Synthetic oligonucleotide
uuccccacgguccaauuca

SEQ ID NO: 795723 - RNA, 19 nt, Artificial Sequence
  Description of Artificial Sequence: Synthetic oligonucleotide
auaauucacagaaaauaga

SEQ ID NO: 795724 - RNA, 19 nt, Artificial Sequence
  Description of Artificial Sequence: Synthetic oligonucleotide
ggaucuuuuagacaaacaa

SEQ ID NO: 795725 - RNA, 19 nt, Artificial Sequence
  Description of Artificial Sequence: Synthetic oligonucleotide
ucugauucggagcuuuaau

SEQ ID NO: 795726 - RNA, 19 nt, Artificial Sequence
  Description of Artificial Sequence: Synthetic oligonucleotide
uaccaugauaaaccgacua

SEQ ID NO: 795727 - RNA, 19 nt, Artificial Sequence
  Description of Artificial Sequence: Synthetic oligonucleotide
agcucgagagaauguguac

SEQ ID NO: 795728 - RNA, 19 nt, Artificial Sequence
  Description of Artificial Sequence: Synthetic oligonucleotide
gguguaaauaaaccagcag

SEQ ID NO: 795729 - RNA, 19 nt, Artificial Sequence
  Description of Artificial Sequence: Synthetic oligonucleotide
gaucuuuuagacaaacaaa

SEQ ID NO: 795730 - RNA, 19 nt, Artificial Sequence
  Description of Artificial Sequence: Synthetic oligonucleotide
uuacagggagcaauuucca

SEQ ID NO: 795731 - RNA, 19 nt, Artificial Sequence
  Description of Artificial Sequence: Synthetic oligonucleotide
guuaacgucaacauuguua

SEQ ID NO: 795732 - RNA, 19 nt, Artificial Sequence
  Description of Artificial Sequence: Synthetic oligonucleotide
auacuaauuccaccugaug

SEQ ID NO: 795733 - RNA, 19 nt, Artificial Sequence
  Description of Artificial Sequence: Synthetic oligonucleotide
guuaggaaccuguugcuga

SEQ ID NO: 795734 - RNA, 19 nt, Artificial Sequence
  Description of Artificial Sequence: Synthetic oligonucleotide
acuagaugaaccaugugau

SEQ ID NO: 795735 - RNA, 19 nt, Artificial Sequence
  Description of Artificial Sequence: Synthetic oligonucleotide
acgugaguucucaauauuc

SEQ ID NO: 795736 - RNA, 19 nt, Artificial Sequence
  Description of Artificial Sequence: Synthetic oligonucleotide
ugcuuuaugggugggcaag

SEQ ID NO: 795737 - RNA, 19 nt, Artificial Sequence
  Description of Artificial Sequence: Synthetic oligonucleotide
acgguccaauucaagaagc

SEQ ID NO: 795738 - RNA, 19 nt, Artificial Sequence
  Description of Artificial Sequence: Synthetic oligonucleotide
uucgggaccuucucuacug

SEQ ID NO: 795739 - RNA, 19 nt, Artificial Sequence
  Description of Artificial Sequence: Synthetic oligonucleotide
ucguuguuaacgucaacau

SEQ ID NO: 795740 - RNA, 19 nt, Artificial Sequence
  Description of Artificial Sequence: Synthetic oligonucleotide
ugugacauguguccuuaaa

SEQ ID NO: 795741 - RNA, 19 nt, Artificial Sequence
  Description of Artificial Sequence: Synthetic oligonucleotide
ucuuuuagcugcagauggu

SEQ ID NO: 795742 - RNA, 19 nt, Artificial Sequence
  Description of Artificial Sequence: Synthetic oligonucleotide
gugaguucucaauauucug

SEQ ID NO: 795743 - RNA, 19 nt, Artificial Sequence
  Description of Artificial Sequence: Synthetic oligonucleotide
uacagggagcaauuuccag

SEQ ID NO: 795744 - RNA, 19 nt, Artificial Sequence
  Description of Artificial Sequence: Synthetic oligonucleotide
cucgagagaauguguacac

SEQ ID NO: 795745 - RNA, 19 nt, Artificial Sequence
  Description of Artificial Sequence: Synthetic oligonucleotide
gcagcuaagcccuaagggc

SEQ ID NO: 795746 - RNA, 19 nt, Artificial Sequence
  Description of Artificial Sequence: Synthetic oligonucleotide
cuuguggaaggguacgcug

SEQ ID NO: 795747 - RNA, 19 nt, Artificial Sequence
  Description of Artificial Sequence: Synthetic oligonucleotide
ugguauuagugaaguaaaa

SEQ ID NO: 795748 - RNA, 19 nt, Artificial Sequence
  Description of Artificial Sequence: Synthetic oligonucleotide
cacgguccaauucaagaag

SEQ ID NO: 795749 - RNA, 19 nt, Artificial Sequence
  Description of Artificial Sequence: Synthetic oligonucleotide
ucuagauuguuugcauucu

SEQ ID NO: 795750 - RNA, 19 nt, Artificial Sequence
  Description of Artificial Sequence: Synthetic oligonucleotide
uggcgcuggauuuuggaga

SEQ ID NO: 795751 - RNA, 19 nt, Artificial Sequence
  Description of Artificial Sequence: Synthetic oligonucleotide
auaaaccgacuaaaggaag

SEQ ID NO: 795752 - RNA, 19 nt, Artificial Sequence
  Description of Artificial Sequence: Synthetic oligonucleotide
aggucuaauuggcaacuug

SEQ ID NO: 795753 - RNA, 19 nt, Artificial Sequence
  Description of Artificial Sequence: Synthetic oligonucleotide
auaaaagaccaagcugaag

SEQ ID NO: 795754 - RNA, 19 nt, Artificial Sequence
  Description of Artificial Sequence: Synthetic oligonucleotide
aauagucuggucacuguau

SEQ ID NO: 795755 - RNA, 19 nt, Artificial Sequence
  Description of Artificial Sequence: Synthetic oligonucleotide
agucuagccagucacgguu

SEQ ID NO: 795756 - RNA, 19 nt, Artificial Sequence
  Description of Artificial Sequence: Synthetic oligonucleotide
ggcggcacggcugagaugg

SEQ ID NO: 795757 - RNA, 19 nt, Artificial Sequence
  Description of Artificial Sequence: Synthetic oligonucleotide
aggauacuaauuccaccug

SEQ ID NO: 795758 - RNA, 19 nt, Artificial Sequence
  Description of Artificial Sequence: Synthetic oligonucleotide
uccauaagacgcuccauuu

SEQ ID NO: 795759 - RNA, 19 nt, Artificial Sequence
  Description of Artificial Sequence: Synthetic oligonucleotide
guauuucugauucggagcu

SEQ ID NO: 795760 - RNA, 19 nt, Artificial Sequence
  Description of Artificial Sequence: Synthetic oligonucleotide
cuagauuguuugcauucug

SEQ ID NO: 795761 - RNA, 19 nt, Artificial Sequence
  Description of Artificial Sequence: Synthetic oligonucleotide
ugcagcucgagagaaugug

SEQ ID NO: 795762 - RNA, 19 nt, Artificial Sequence
  Description of Artificial Sequence: Synthetic oligonucleotide
cacguuuuagguaaauaaa

SEQ ID NO: 795763 - RNA, 19 nt, Artificial Sequence
  Description of Artificial Sequence: Synthetic oligonucleotide
ucccgaauacaccaaucuc

SEQ ID NO: 795764 - RNA, 19 nt, Artificial Sequence
  Description of Artificial Sequence: Synthetic oligonucleotide
ucaggucuaauuggcaacu

SEQ ID NO: 795765 - RNA, 19 nt, Artificial Sequence
  Description of Artificial Sequence: Synthetic oligonucleotide
uuaccaugauaaaccgacu

SEQ ID NO: 795766 - RNA, 19 nt, Artificial Sequence
  Description of Artificial Sequence: Synthetic oligonucleotide
acacguuagauagaugcgu

SEQ ID NO: 795767 - RNA, 19 nt, Artificial Sequence
  Description of Artificial Sequence: Synthetic oligonucleotide
uuuaugcuauguucuguua

SEQ ID NO: 795768 - RNA, 19 nt, Artificial Sequence
  Description of Artificial Sequence: Synthetic oligonucleotide
uaggaucuuuuagacaaac

SEQ ID NO: 795769 - RNA, 19 nt, Artificial Sequence
  Description of Artificial Sequence: Synthetic oligonucleotide
cuagcuguggacauuuaaa

SEQ ID NO: 795770 - RNA, 19 nt, Artificial Sequence
  Description of Artificial Sequence: Synthetic oligonucleotide
guguacacccagucuagcc

SEQ ID NO: 795771 - RNA, 19 nt, Artificial Sequence
  Description of Artificial Sequence: Synthetic oligonucleotide
cugguauuagugaaguaaa

SEQ ID NO: 795772 - RNA, 19 nt, Artificial Sequence
  Description of Artificial Sequence: Synthetic oligonucleotide
uaacgucaacauuguuagg

SEQ ID NO: 795773 - RNA, 19 nt, Artificial Sequence
  Description of Artificial Sequence: Synthetic oligonucleotide
aagcccuaagggcggcacg

SEQ ID NO: 795774 - RNA, 19 nt, Artificial Sequence
  Description of Artificial Sequence: Synthetic oligonucleotide
aauuggcaacuuggggagg

SEQ ID NO: 795775 - RNA, 19 nt, Artificial Sequence
  Description of Artificial Sequence: Synthetic oligonucleotide
auccauaagacgcuccauu

SEQ ID NO: 795776 - RNA, 19 nt, Artificial Sequence
  Description of Artificial Sequence: Synthetic oligonucleotide
ugcuacuagcacguuuuag

SEQ ID NO: 795777 - RNA, 19 nt, Artificial Sequence
  Description of Artificial Sequence: Synthetic oligonucleotide
uucguugagcacuggccca

SEQ ID NO: 795778 - RNA, 19 nt, Artificial Sequence
  Description of Artificial Sequence: Synthetic oligonucleotide
uggugagcauacaucugcu

SEQ ID NO: 795779 - RNA, 19 nt, Artificial Sequence
  Description of Artificial Sequence: Synthetic oligonucleotide
aguuuaugcuauguucugu

SEQ ID NO: 795780 - RNA, 19 nt, Artificial Sequence
  Description of Artificial Sequence: Synthetic oligonucleotide
agacgugaguucucaauau

SEQ ID NO: 795781 - RNA, 19 nt, Artificial Sequence
  Description of Artificial Sequence: Synthetic oligonucleotide
ugcuauguucuguuaggau

SEQ ID NO: 795782 - RNA, 19 nt, Artificial Sequence
  Description of Artificial Sequence: Synthetic oligonucleotide
ucgggaccuucucuacugg

SEQ ID NO: 795783 - RNA, 19 nt, Artificial Sequence
  Description of Artificial Sequence: Synthetic oligonucleotide
uggaaggguacgcugccuc

SEQ ID NO: 795784 - RNA, 19 nt, Artificial Sequence
  Description of Artificial Sequence: Synthetic oligonucleotide
auucggagcuuuaaugaug

SEQ ID NO: 795785 - RNA, 19 nt, Artificial Sequence
  Description of Artificial Sequence: Synthetic oligonucleotide
ucaagccgggccuuugaac

SEQ ID NO: 795786 - RNA, 19 nt, Artificial Sequence
  Description of Artificial Sequence: Synthetic oligonucleotide
cuggcgcuggauuuuggag

SEQ ID NO: 795787 - RNA, 19 nt, Artificial Sequence
  Description of Artificial Sequence: Synthetic oligonucleotide
accgacuaaaggaagagua

SEQ ID NO: 795788 - RNA, 19 nt, Artificial Sequence
  Description of Artificial Sequence: Synthetic oligonucleotide
gcacguuuuagguaaauaa

SEQ ID NO: 795789 - RNA, 19 nt, Artificial Sequence
  Description of Artificial Sequence: Synthetic oligonucleotide
aauuagaaauggagcugga

SEQ ID NO: 795790 - RNA, 19 nt, Artificial Sequence
  Description of Artificial Sequence: Synthetic oligonucleotide
cgagagaauguguacaccc

SEQ ID NO: 795791 - RNA, 19 nt, Artificial Sequence
  Description of Artificial Sequence: Synthetic oligonucleotide
ucucaauauucuggguuca

SEQ ID NO: 795792 - RNA, 19 nt, Artificial Sequence
  Description of Artificial Sequence: Synthetic oligonucleotide
auugucacuguuauuuaaa

SEQ ID NO: 795793 - RNA, 19 nt, Artificial Sequence
  Description of Artificial Sequence: Synthetic oligonucleotide
cagggagcaauuuccagca

SEQ ID NO: 795794 - RNA, 19 nt, Artificial Sequence
  Description of Artificial Sequence: Synthetic oligonucleotide
aaccgacuaaaggaagagu

SEQ ID NO: 795795 - RNA, 19 nt, Artificial Sequence
  Description of Artificial Sequence: Synthetic oligonucleotide
gcuguggacauuuaaaggu

SEQ ID NO: 795796 - RNA, 19 nt, Artificial Sequence
  Description of Artificial Sequence: Synthetic oligonucleotide
aaauuacagggagcaauuu

SEQ ID NO: 795797 - RNA, 19 nt, Artificial Sequence
  Description of Artificial Sequence: Synthetic oligonucleotide
aggguacgcugccucaguc

SEQ ID NO: 795798 - RNA, 19 nt, Artificial Sequence
  Description of Artificial Sequence: Synthetic oligonucleotide
gcucccauuaccaugauaa

SEQ ID NO: 795799 - RNA, 19 nt, Artificial Sequence
  Description of Artificial Sequence: Synthetic oligonucleotide
uuuccccacgguccaauuc

SEQ ID NO: 795800 - RNA, 19 nt, Artificial Sequence
  Description of Artificial Sequence: Synthetic oligonucleotide
cauaagacgcuccauuucu

SEQ ID NO: 795801 - RNA, 19 nt, Artificial Sequence
  Description of Artificial Sequence: Synthetic oligonucleotide
ucgagagaauguguacacc

SEQ ID NO: 795802 - RNA, 19 nt, Artificial Sequence
  Description of Artificial Sequence: Synthetic oligonucleotide
acacauaauugaaaugaau

SEQ ID NO: 795803 - RNA, 19 nt, Artificial Sequence
  Description of Artificial Sequence: Synthetic oligonucleotide
aaggguacgcugccucagu

SEQ ID NO: 795804 - RNA, 19 nt, Artificial Sequence
  Description of Artificial Sequence: Synthetic oligonucleotide
ugccugaaagggaaccauc

SEQ ID NO: 795805 - RNA, 19 nt, Artificial Sequence
  Description of Artificial Sequence: Synthetic oligonucleotide
agacuagaugaaccaugug

SEQ ID NO: 795806 - RNA, 19 nt, Artificial Sequence
  Description of Artificial Sequence: Synthetic oligonucleotide
aacuggugguccacauuuc

SEQ ID NO: 795807 - RNA, 19 nt, Artificial Sequence
  Description of Artificial Sequence: Synthetic oligonucleotide
cacucucgucuucaagucc

SEQ ID NO: 795808 - RNA, 19 nt, Artificial Sequence
  Description of Artificial Sequence: Synthetic oligonucleotide
ggauacuaauuccaccuga

SEQ ID NO: 795809 - RNA, 19 nt, Artificial Sequence
  Description of Artificial Sequence: Synthetic oligonucleotide
acucucgucuucaagucca

SEQ ID NO: 795810 - RNA, 19 nt, Artificial Sequence
  Description of Artificial Sequence: Synthetic oligonucleotide
gaaggguacgcugccucag

SEQ ID NO: 795811 - RNA, 19 nt, Artificial Sequence
  Description of Artificial Sequence: Synthetic oligonucleotide
acuggcgcuggauuuugga

SEQ ID NO: 795812 - RNA, 19 nt, Artificial Sequence
  Description of Artificial Sequence: Synthetic oligonucleotide
aggauaauucacagaaaau

SEQ ID NO: 795813 - RNA, 19 nt, Artificial Sequence
  Description of Artificial Sequence: Synthetic oligonucleotide
gggcccauuuucuugggcc

SEQ ID NO: 795814 - RNA, 19 nt, Artificial Sequence
  Description of Artificial Sequence: Synthetic oligonucleotide
uguuaacgucaacauuguu

SEQ ID NO: 795815 - RNA, 19 nt, Artificial Sequence
  Description of Artificial Sequence: Synthetic oligonucleotide
agcccuaagggcggcacgg

SEQ ID NO: 795816 - RNA, 19 nt, Artificial Sequence
  Description of Artificial Sequence: Synthetic oligonucleotide
gauucggagcuuuaaugau

SEQ ID NO: 795817 - RNA, 19 nt, Artificial Sequence
  Description of Artificial Sequence: Synthetic oligonucleotide
uacuggcgcuggauuuugg

SEQ ID NO: 795818 - RNA, 19 nt, Artificial Sequence
  Description of Artificial Sequence: Synthetic oligonucleotide
gguucaaaucagucacaag

SEQ ID NO: 795819 - RNA, 19 nt, Artificial Sequence
  Description of Artificial Sequence: Synthetic oligonucleotide
acuagguugggagcuggug

SEQ ID NO: 795820 - RNA, 19 nt, Artificial Sequence
  Description of Artificial Sequence: Synthetic oligonucleotide
gaugcuacuagcacguuuu

SEQ ID NO: 795821 - RNA, 19 nt, Artificial Sequence
  Description of Artificial Sequence: Synthetic oligonucleotide
ccagucacgguugaagucc

SEQ ID NO: 795822 - RNA, 19 nt, Artificial Sequence
  Description of Artificial Sequence: Synthetic oligonucleotide
gcuaauagucuggucacug

SEQ ID NO: 795823 - RNA, 19 nt, Artificial Sequence
  Description of Artificial Sequence: Synthetic oligonucleotide
caguacagacuagaugaac

SEQ ID NO: 795824 - RNA, 19 nt, Artificial Sequence
  Description of Artificial Sequence: Synthetic oligonucleotide
ccgacuaaaggaagaguag

SEQ ID NO: 795825 - RNA, 19 nt, Artificial Sequence
  Description of Artificial Sequence: Synthetic oligonucleotide
agaccaguacuaguuuaug

SEQ ID NO: 795826 - RNA, 19 nt, Artificial Sequence
  Description of Artificial Sequence: Synthetic oligonucleotide
ccgaauacaccaaucucug

SEQ ID NO: 795827 - RNA, 19 nt, Artificial Sequence
  Description of Artificial Sequence: Synthetic oligonucleotide
aaccagcaacuaaugacaa

SEQ ID NO: 795828 - RNA, 19 nt, Artificial Sequence
  Description of Artificial Sequence: Synthetic oligonucleotide
gccugguguaaauaaacca

SEQ ID NO: 795829 - RNA, 19 nt, Artificial Sequence
  Description of Artificial Sequence: Synthetic oligonucleotide
agugguuugcuaggguaca

SEQ ID NO: 795830 - RNA, 19 nt, Artificial Sequence
  Description of Artificial Sequence: Synthetic oligonucleotide
agcuaagcccuaagggcgg

SEQ ID NO: 795831 - RNA, 19 nt, Artificial Sequence
  Description of Artificial Sequence: Synthetic oligonucleotide
gccucaguccuucugaaga

SEQ ID NO: 795832 - RNA, 19 nt, Artificial Sequence
  Description of Artificial Sequence: Synthetic oligonucleotide
agcggcgcugcagcuaagc

SEQ ID NO: 795833 - RNA, 19 nt, Artificial Sequence
  Description of Artificial Sequence: Synthetic oligonucleotide
augcuauguucuguuagga

SEQ ID NO: 795834 - RNA, 19 nt, Artificial Sequence
  Description of Artificial Sequence: Synthetic oligonucleotide
gacagucuagcggcgcugc

SEQ ID NO: 795835 - RNA, 19 nt, Artificial Sequence
  Description of Artificial Sequence: Synthetic oligonucleotide
gaugugacauguguccuua

SEQ ID NO: 795836 - RNA, 19 nt, Artificial Sequence
  Description of Artificial Sequence: Synthetic oligonucleotide
auagugguucugcuuggua

SEQ ID NO: 795837 - RNA, 19 nt, Artificial Sequence
  Description of Artificial Sequence: Synthetic oligonucleotide
ggaaccauccagccuggug

SEQ ID NO: 795838 - RNA, 19 nt, Artificial Sequence
  Description of Artificial Sequence: Synthetic oligonucleotide
acguuagauagaugcguuu

SEQ ID NO: 795839 - RNA, 19 nt, Artificial Sequence
  Description of Artificial Sequence: Synthetic oligonucleotide
aaccuguugcugaccaccu

SEQ ID NO: 795840 - RNA, 19 nt, Artificial Sequence
  Description of Artificial Sequence: Synthetic oligonucleotide
gauacuaauuccaccugau

SEQ ID NO: 795841 - RNA, 19 nt, Artificial Sequence
  Description of Artificial Sequence: Synthetic oligonucleotide
ccaaauucagagacgguga

SEQ ID NO: 795842 - RNA, 19 nt, Artificial Sequence
  Description of Artificial Sequence: Synthetic oligonucleotide
cagacgugaguucucaaua

SEQ ID NO: 795843 - RNA, 19 nt, Artificial Sequence
  Description of Artificial Sequence: Synthetic oligonucleotide
uaagcccuaagggcggcac

SEQ ID NO: 795844 - RNA, 19 nt, Artificial Sequence
  Description of Artificial Sequence: Synthetic oligonucleotide
ggugagcauacaucugcug

SEQ ID NO: 795845 - RNA, 19 nt, Artificial Sequence
  Description of Artificial Sequence: Synthetic oligonucleotide
cuccgagcaguacagacua

SEQ ID NO: 795846 - RNA, 19 nt, Artificial Sequence
  Description of Artificial Sequence: Synthetic oligonucleotide
ccacucugguccauggugc

SEQ ID NO: 795847 - RNA, 19 nt, Artificial Sequence
  Description of Artificial Sequence: Synthetic oligonucleotide
ucacgguugaaguccucuu

SEQ ID NO: 795848 - RNA, 19 nt, Artificial Sequence
  Description of Artificial Sequence: Synthetic oligonucleotide
ucggagcuuuaaugaugag

SEQ ID NO: 795849 - RNA, 19 nt, Artificial Sequence
  Description of Artificial Sequence: Synthetic oligonucleotide
aucaagccgggccuuugaa

SEQ ID NO: 795850 - RNA, 19 nt, Artificial Sequence
  Description of Artificial Sequence: Synthetic oligonucleotide
cuagaugaaccaugugaua

SEQ ID NO: 795851 - RNA, 19 nt, Artificial Sequence
  Description of Artificial Sequence: Synthetic oligonucleotide
acggaguuguugaaucuga

SEQ ID NO: 795852 - RNA, 19 nt, Artificial Sequence
  Description of Artificial Sequence: Synthetic oligonucleotide
ugaggucauuucuguuuaa

SEQ ID NO: 795853 - RNA, 19 nt, Artificial Sequence
  Description of Artificial Sequence: Synthetic oligonucleotide
gaaucugagugaucugaau

SEQ ID NO: 795854 - RNA, 19 nt, Artificial Sequence
  Description of Artificial Sequence: Synthetic oligonucleotide
gaccaagcugaagccauca

SEQ ID NO: 795855 - RNA, 19 nt, Artificial Sequence
  Description of Artificial Sequence: Synthetic oligonucleotide
caacauuguuaggaaccug

SEQ ID NO: 795856 - RNA, 19 nt, Artificial Sequence
  Description of Artificial Sequence: Synthetic oligonucleotide
uggccgucuagcuguggac

SEQ ID NO: 795857 - RNA, 19 nt, Artificial Sequence
  Description of Artificial Sequence: Synthetic oligonucleotide
acuggugagcauacaucug

SEQ ID NO: 795858 - RNA, 19 nt, Artificial Sequence
  Description of Artificial Sequence: Synthetic oligonucleotide
ucguugagcacuggcccac

SEQ ID NO: 795859 - RNA, 19 nt, Artificial Sequence
  Description of Artificial Sequence: Synthetic oligonucleotide
caggguacacugggaaccc

SEQ ID NO: 795860 - RNA, 19 nt, Artificial Sequence
  Description of Artificial Sequence: Synthetic oligonucleotide
cuaagggcggcacggcuga

SEQ ID NO: 795861 - RNA, 19 nt, Artificial Sequence
  Description of Artificial Sequence: Synthetic oligonucleotide
cagucuagcggcgcugcag

SEQ ID NO: 795862 - RNA, 19 nt, Artificial Sequence
  Description of Artificial Sequence: Synthetic oligonucleotide
cacuguuauuuaaaccacu

SEQ ID NO: 795863 - RNA, 19 nt, Artificial Sequence
  Description of Artificial Sequence: Synthetic oligonucleotide
agcuaauagucuggucacu

SEQ ID NO: 795864 - RNA, 19 nt, Artificial Sequence
  Description of Artificial Sequence: Synthetic oligonucleotide
uuggcaacuuggggaggcc

SEQ ID NO: 795865 - RNA, 19 nt, Artificial Sequence
  Description of Artificial Sequence: Synthetic oligonucleotide
accaagcugaagccaucaa

SEQ ID NO: 795866 - RNA, 19 nt, Artificial Sequence
  Description of Artificial Sequence: Synthetic oligonucleotide
caaguccaucauccauaag

SEQ ID NO: 795867 - RNA, 19 nt, Artificial Sequence
  Description of Artificial Sequence: Synthetic oligonucleotide
guaggugauaaaagaccaa

SEQ ID NO: 795868 - RNA, 19 nt, Artificial Sequence
  Description of Artificial Sequence: Synthetic oligonucleotide
ccauaagacgcuccauuuc

SEQ ID NO: 795869 - RNA, 19 nt, Artificial Sequence
  Description of Artificial Sequence: Synthetic oligonucleotide
agacagucuagcggcgcug

SEQ ID NO: 795870 - RNA, 19 nt, Artificial Sequence
  Description of Artificial Sequence: Synthetic oligonucleotide
cccgaauacaccaaucucu

SEQ ID NO: 795871 - RNA, 19 nt, Artificial Sequence
  Description of Artificial Sequence: Synthetic oligonucleotide
uccccacgguccaauucaa

SEQ ID NO: 795872 - RNA, 19 nt, Artificial Sequence
  Description of Artificial Sequence: Synthetic oligonucleotide
gcucgagagaauguguaca

SEQ ID NO: 795873 - RNA, 19 nt, Artificial Sequence
  Description of Artificial Sequence: Synthetic oligonucleotide
gguuugcuaggguacacgu

SEQ ID NO: 795874 - RNA, 19 nt, Artificial Sequence
  Description of Artificial Sequence: Synthetic oligonucleotide
cagcucgagagaaugugua

SEQ ID NO: 795875 - RNA, 19 nt, Artificial Sequence
  Description of Artificial Sequence: Synthetic oligonucleotide
cuagcggcgcugcagcuaa

SEQ ID NO: 795876 - RNA, 19 nt, Artificial Sequence
  Description of Artificial Sequence: Synthetic oligonucleotide
gagcuuuaaugaugagagu

SEQ ID NO: 795877 - RNA, 19 nt, Artificial Sequence
  Description of Artificial Sequence: Synthetic oligonucleotide
ccuaagggcggcacggcug

SEQ ID NO: 795878 - RNA, 19 nt, Artificial Sequence
  Description of Artificial Sequence: Synthetic oligonucleotide
cuacuggcgcuggauuuug

SEQ ID NO: 795879 - RNA, 19 nt, Artificial Sequence
  Description of Artificial Sequence: Synthetic oligonucleotide
ucuagcggcgcugcagcua

SEQ ID NO: 795880 - RNA, 19 nt, Artificial Sequence
  Description of Artificial Sequence: Synthetic oligonucleotide
gacgugaguucucaauauu

SEQ ID NO: 795881 - RNA, 19 nt, Artificial Sequence
  Description of Artificial Sequence: Synthetic oligonucleotide
cauauggaaacuggcgacu

SEQ ID NO: 795882 - RNA, 19 nt, Artificial Sequence
  Description of Artificial Sequence: Synthetic oligonucleotide
cuggccgucuagcugugga

SEQ ID NO: 795883 - RNA, 19 nt, Artificial Sequence
  Description of Artificial Sequence: Synthetic oligonucleotide
gugguucugcuugguaaac

SEQ ID NO: 795884 - RNA, 19 nt, Artificial Sequence
  Description of Artificial Sequence: Synthetic oligonucleotide
acagucuagcggcgcugca

SEQ ID NO: 795885 - RNA, 19 nt, Artificial Sequence
  Description of Artificial Sequence: Synthetic oligonucleotide
gggagcaauuuccagcaua

SEQ ID NO: 795886 - RNA, 19 nt, Artificial Sequence
  Description of Artificial Sequence: Synthetic oligonucleotide
ggcgcuggauuuuggagaa

SEQ ID NO: 795887 - RNA, 19 nt, Artificial Sequence
  Description of Artificial Sequence: Synthetic oligonucleotide
auaagacgcuccauuucuu

SEQ ID NO: 795888 - RNA, 19 nt, Artificial Sequence
  Description of Artificial Sequence: Synthetic oligonucleotide
guaaauugucacuguuauu

SEQ ID NO: 795889 - RNA, 19 nt, Artificial Sequence
  Description of Artificial Sequence: Synthetic oligonucleotide
ccacucucgucuucaaguc

SEQ ID NO: 795890 - RNA, 19 nt, Artificial Sequence
  Description of Artificial Sequence: Synthetic oligonucleotide
ggaaggguacgcugccuca

SEQ ID NO: 795891 - RNA, 19 nt, Artificial Sequence
  Description of Artificial Sequence: Synthetic oligonucleotide
uagcacguuuuagguaaau

SEQ ID NO: 795892 - RNA, 19 nt, Artificial Sequence
  Description of Artificial Sequence: Synthetic oligonucleotide
caucaagccgggccuuuga

SEQ ID NO: 795893 - RNA, 19 nt, Artificial Sequence
  Description of Artificial Sequence: Synthetic oligonucleotide
ggcccauuuucuugggcca

SEQ ID NO: 795894 - RNA, 19 nt, Artificial Sequence
  Description of Artificial Sequence: Synthetic oligonucleotide
ggguucaaaucagucacaa

SEQ ID NO: 795895 - RNA, 19 nt, Artificial Sequence
  Description of Artificial Sequence: Synthetic oligonucleotide
cucccauuaccaugauaaa

SEQ ID NO: 795896 - RNA, 19 nt, Artificial Sequence
  Description of Artificial Sequence: Synthetic oligonucleotide
gcuggauuuuggagaacug

SEQ ID NO: 795897 - RNA, 19 nt, Artificial Sequence
  Description of Artificial Sequence: Synthetic oligonucleotide
augugacauguguccuuaa

SEQ ID NO: 795898 - RNA, 19 nt, Artificial Sequence
  Description of Artificial Sequence: Synthetic oligonucleotide
gguacacguuagauagaug

SEQ ID NO: 795899 - RNA, 19 nt, Artificial Sequence
  Description of Artificial Sequence: Synthetic oligonucleotide
aagaugcuacuagcacguu

SEQ ID NO: 795900 - RNA, 19 nt, Artificial Sequence
  Description of Artificial Sequence: Synthetic oligonucleotide
cacguuagauagaugcguu

SEQ ID NO: 795901 - RNA, 19 nt, Artificial Sequence
  Description of Artificial Sequence: Synthetic oligonucleotide
gcuucgggaccuucucuac

SEQ ID NO: 795902 - RNA, 19 nt, Artificial Sequence
  Description of Artificial Sequence: Synthetic oligonucleotide
cagagacggugaugcagca

SEQ ID NO: 795903 - RNA, 19 nt, Artificial Sequence
  Description of Artificial Sequence: Synthetic oligonucleotide
gcagcuugauauugcauau

SEQ ID NO: 795904 - RNA, 19 nt, Artificial Sequence
  Description of Artificial Sequence: Synthetic oligonucleotide
gggcaagaugcuacuagca

SEQ ID NO: 795905 - RNA, 19 nt, Artificial Sequence
  Description of Artificial Sequence: Synthetic oligonucleotide
cucaauauucuggguucaa

SEQ ID NO: 795906 - RNA, 19 nt, Artificial Sequence
  Description of Artificial Sequence: Synthetic oligonucleotide
ggacagacgugaguucuca

SEQ ID NO: 795907 - RNA, 19 nt, Artificial Sequence
  Description of Artificial Sequence: Synthetic oligonucleotide
gucagugguuugcuagggu

SEQ ID NO: 795908 - RNA, 19 nt, Artificial Sequence
  Description of Artificial Sequence: Synthetic oligonucleotide
agucacgguugaaguccuc

SEQ ID NO: 795909 - RNA, 19 nt, Artificial Sequence
  Description of Artificial Sequence: Synthetic oligonucleotide
cucugguauuagugaagua

SEQ ID NO: 795910 - RNA, 19 nt, Artificial Sequence
  Description of Artificial Sequence: Synthetic oligonucleotide
aggguacacguuagauaga

SEQ ID NO: 795911 - RNA, 19 nt, Artificial Sequence
  Description of Artificial Sequence: Synthetic oligonucleotide
cuaugaggucauuucuguu

SEQ ID NO: 795912 - RNA, 19 nt, Artificial Sequence
  Description of Artificial Sequence: Synthetic oligonucleotide
ggguacacguuagauagau

SEQ ID NO: 795913 - RNA, 19 nt, Artificial Sequence
  Description of Artificial Sequence: Synthetic oligonucleotide
cuucgggaccuucucuacu

SEQ ID NO: 795914 - RNA, 19 nt, Artificial Sequence
  Description of Artificial Sequence: Synthetic oligonucleotide
ggccgucuagcuguggaca

SEQ ID NO: 795915 - RNA, 19 nt, Artificial Sequence
  Description of Artificial Sequence: Synthetic oligonucleotide
gcuuuaugggugggcaaga

SEQ ID NO: 795916 - RNA, 19 nt, Artificial Sequence
  Description of Artificial Sequence: Synthetic oligonucleotide
cccugugcauucauuugga

SEQ ID NO: 795917 - RNA, 19 nt, Artificial Sequence
  Description of Artificial Sequence: Synthetic oligonucleotide
gacucugggcuggaucagu

SEQ ID NO: 795918 - RNA, 19 nt, Artificial Sequence
  Description of Artificial Sequence: Synthetic oligonucleotide
ggggacagacgugaguucu

SEQ ID NO: 795919 - RNA, 19 nt, Artificial Sequence
  Description of Artificial Sequence: Synthetic oligonucleotide
ggaagcaaucuucccgaau

SEQ ID NO: 795920 - RNA, 19 nt, Artificial Sequence
  Description of Artificial Sequence: Synthetic oligonucleotide
cagucuagccagucacggu

SEQ ID NO: 795921 - RNA, 19 nt, Artificial Sequence
  Description of Artificial Sequence: Synthetic oligonucleotide
cagucacgguugaaguccu

SEQ ID NO: 795922 - RNA, 19 nt, Artificial Sequence
  Description of Artificial Sequence: Synthetic oligonucleotide
gcuaagcccuaagggcggc

SEQ ID NO: 795923 - RNA, 19 nt, Artificial Sequence
  Description of Artificial Sequence: Synthetic oligonucleotide
cuuuaugggugggcaagau

SEQ ID NO: 795924 - RNA, 19 nt, Artificial Sequence
  Description of Artificial Sequence: Synthetic oligonucleotide
cauagugguucugcuuggu

SEQ ID NO: 795925 - RNA, 19 nt, Artificial Sequence
  Description of Artificial Sequence: Synthetic oligonucleotide
cagcuugauauugcauaua

SEQ ID NO: 795926 - RNA, 19 nt, Artificial Sequence
  Description of Artificial Sequence: Synthetic oligonucleotide
gcccaucguuguuaacguc

SEQ ID NO: 795927 - RNA, 19 nt, Artificial Sequence
  Description of Artificial Sequence: Synthetic oligonucleotide
ccccacgguccaauucaag

SEQ ID NO: 795928 - RNA, 19 nt, Artificial Sequence
  Description of Artificial Sequence: Synthetic oligonucleotide
cgguccaauucaagaagca

SEQ ID NO: 795929 - RNA, 19 nt, Artificial Sequence
  Description of Artificial Sequence: Synthetic oligonucleotide
gucuagcggcgcugcagcu

SEQ ID NO: 795930 - RNA, 19 nt, Artificial Sequence
  Description of Artificial Sequence: Synthetic oligonucleotide
gcuuguggaaggguacgcu

SEQ ID NO: 795931 - RNA, 19 nt, Artificial Sequence
  Description of Artificial Sequence: Synthetic oligonucleotide
agccaucaagccgggccuu

SEQ ID NO: 795932 - RNA, 19 nt, Artificial Sequence
  Description of Artificial Sequence: Synthetic oligonucleotide
ggcucccauuaccaugaua

SEQ ID NO: 795933 - RNA, 19 nt, Artificial Sequence
  Description of Artificial Sequence: Synthetic oligonucleotide
ccaucaagccgggccuuug

SEQ ID NO: 795934 - RNA, 19 nt, Artificial Sequence
  Description of Artificial Sequence: Synthetic oligonucleotide
ggugggcaagaugcuacua

SEQ ID NO: 795935 - RNA, 19 nt, Artificial Sequence
  Description of Artificial Sequence: Synthetic oligonucleotide
gcccuaagggcggcacggc

SEQ ID NO: 795936 - RNA, 19 nt, Artificial Sequence
  Description of Artificial Sequence: Synthetic oligonucleotide
gccgucuagcuguggacau

SEQ ID NO: 795937 - RNA, 19 nt, Artificial Sequence
  Description of Artificial Sequence: Synthetic oligonucleotide
cguuagauagaugcguuuu

SEQ ID NO: 795938 - RNA, 19 nt, Artificial Sequence
  Description of Artificial Sequence: Synthetic oligonucleotide
cguuguuaacgucaacauu

SEQ ID NO: 795939 - RNA, 19 nt, Artificial Sequence
  Description of Artificial Sequence: Synthetic oligonucleotide
cgcuggauuuuggagaacu

SEQ ID NO: 795940 - RNA, 19 nt, Artificial Sequence
  Description of Artificial Sequence: Synthetic oligonucleotide
ggaggccccucugguauua

SEQ ID NO: 795941 - RNA, 19 nt, Artificial Sequence
  Description of Artificial Sequence: Synthetic oligonucleotide
caggucuaauuggcaacuu

SEQ ID NO: 795942 - RNA, 19 nt, Artificial Sequence
  Description of Artificial Sequence: Synthetic oligonucleotide
gcggcacggcugagauggg

SEQ ID NO: 795943 - RNA, 19 nt, Artificial Sequence
  Description of Artificial Sequence: Synthetic oligonucleotide
ggcuggacuggcacuugau

SEQ ID NO: 795944 - RNA, 19 nt, Artificial Sequence
  Description of Artificial Sequence: Synthetic oligonucleotide
gggaaccauccagccuggu

SEQ ID NO: 795945 - RNA, 19 nt, Artificial Sequence
  Description of Artificial Sequence: Synthetic oligonucleotide
gccaucaagccgggccuuu

SEQ ID NO: 795946 - RNA, 19 nt, Artificial Sequence
  Description of Artificial Sequence: Synthetic oligonucleotide
ccgucuagcuguggacauu

SEQ ID NO: 795947 - RNA, 19 nt, Artificial Sequence
  Description of Artificial Sequence: Synthetic oligonucleotide
gcgcugcagcuaagcccua

SEQ ID NO: 795948 - RNA, 19 nt, Artificial Sequence
  Description of Artificial Sequence: Synthetic oligonucleotide
uauuuaauaauucagggcc

SEQ ID NO: 795949 - RNA, 19 nt, Artificial Sequence
  Description of Artificial Sequence: Synthetic oligonucleotide
aauucuguaucucagaauc

SEQ ID NO: 795950 - RNA, 19 nt, Artificial Sequence
  Description of Artificial Sequence: Synthetic oligonucleotide
uaaaauuuaguccagacuc

SEQ ID NO: 795951 - RNA, 19 nt, Artificial Sequence
  Description of Artificial Sequence: Synthetic oligonucleotide
ucuaauaucuucuagggca

SEQ ID NO: 795952 - RNA, 19 nt, Artificial Sequence
  Description of Artificial Sequence: Synthetic oligonucleotide
auauuuaauaauucagggc

SEQ ID NO: 795953 - RNA, 19 nt, Artificial Sequence
  Description of Artificial Sequence: Synthetic oligonucleotide
acggauauaaaauuuaguc

SEQ ID NO: 795954 - RNA, 19 nt, Artificial Sequence
  Description of Artificial Sequence: Synthetic oligonucleotide
aauauugccauuaugagcu

SEQ ID NO: 795955 - RNA, 19 nt, Artificial Sequence
  Description of Artificial Sequence: Synthetic oligonucleotide
gauccaacgagucuggucg

SEQ ID NO: 795956 - RNA, 19 nt, Artificial Sequence
  Description of Artificial Sequence: Synthetic oligonucleotide
aaugcauaguccuugcauc

SEQ ID NO: 795957 - RNA, 19 nt, Artificial Sequence
  Description of Artificial Sequence: Synthetic oligonucleotide
cuuagcaaccucaagagcc

SEQ ID NO: 795958 - RNA, 19 nt, Artificial Sequence
  Description of Artificial Sequence: Synthetic oligonucleotide
uuuaacucaaugcauaguc

SEQ ID NO: 795959 - RNA, 19 nt, Artificial Sequence
  Description of Artificial Sequence: Synthetic oligonucleotide
auagcaauuacaacgaagg

SEQ ID NO: 795960 - RNA, 19 nt, Artificial Sequence
  Description of Artificial Sequence: Synthetic oligonucleotide
aaaauaucacacagggugc

SEQ ID NO: 795961 - RNA, 19 nt, Artificial Sequence
  Description of Artificial Sequence: Synthetic oligonucleotide
uuuacaucuucacccagcg

SEQ ID NO: 795962 - RNA, 19 nt, Artificial Sequence
  Description of Artificial Sequence: Synthetic oligonucleotide
aagaguguuuuguccaggc

SEQ ID NO: 795963 - RNA, 19 nt, Artificial Sequence
  Description of Artificial Sequence: Synthetic oligonucleotide
acauaaagcaucuacuuca

SEQ ID NO: 795964 - RNA, 19 nt, Artificial Sequence
  Description of Artificial Sequence: Synthetic oligonucleotide
uaauucagggccuuuuacg

SEQ ID NO: 795965 - RNA, 19 nt, Artificial Sequence
  Description of Artificial Sequence: Synthetic oligonucleotide
uucagaucauccaugcagg

SEQ ID NO: 795966 - RNA, 19 nt, Artificial Sequence
  Description of Artificial Sequence: Synthetic oligonucleotide
aaaucucugagcuuuugcu

SEQ ID NO: 795967 - RNA, 19 nt, Artificial Sequence
  Description of Artificial Sequence: Synthetic oligonucleotide
uuacggauauaaaauuuag

SEQ ID NO: 795968 - RNA, 19 nt, Artificial Sequence
  Description of Artificial Sequence: Synthetic oligonucleotide
agcuuggucaaauaaaucu

SEQ ID NO: 795969 - RNA, 19 nt, Artificial Sequence
  Description of Artificial Sequence: Synthetic oligonucleotide
auuacaacgaaggucauug

SEQ ID NO: 795970 - RNA, 19 nt, Artificial Sequence
  Description of Artificial Sequence: Synthetic oligonucleotide
ugucaaugaaccauccucc

SEQ ID NO: 795971 - RNA, 19 nt, Artificial Sequence
  Description of Artificial Sequence: Synthetic oligonucleotide
ucuccgaggacauaaagca

SEQ ID NO: 795972 - RNA, 19 nt, Artificial Sequence
  Description of Artificial Sequence: Synthetic oligonucleotide
ugauccuuugcugauauag

SEQ ID NO: 795973 - RNA, 19 nt, Artificial Sequence
  Description of Artificial Sequence: Synthetic oligonucleotide
ggauauaaaauuuagucca

SEQ ID NO: 795974 - RNA, 19 nt, Artificial Sequence
  Description of Artificial Sequence: Synthetic oligonucleotide
aacaacuagcacucgagcu

SEQ ID NO: 795975 - RNA, 19 nt, Artificial Sequence
  Description of Artificial Sequence: Synthetic oligonucleotide
ucuucaauggcauggaguc

SEQ ID NO: 795976 - RNA, 19 nt, Artificial Sequence
  Description of Artificial Sequence: Synthetic oligonucleotide
uuagggacaguuacaaagc

SEQ ID NO: 795977 - RNA, 19 nt, Artificial Sequence
  Description of Artificial Sequence: Synthetic oligonucleotide
ugugauagucuuuaauaug

SEQ ID NO: 795978 - RNA, 19 nt, Artificial Sequence
  Description of Artificial Sequence: Synthetic oligonucleotide
uuaacucaaugcauagucc

SEQ ID NO: 795979 - RNA, 19 nt, Artificial Sequence
  Description of Artificial Sequence: Synthetic oligonucleotide
uuuccauuacccuuuggcc

SEQ ID NO: 795980 - RNA, 19 nt, Artificial Sequence
  Description of Artificial Sequence: Synthetic oligonucleotide
auauuucucggucaaaccu

SEQ ID NO: 795981 - RNA, 19 nt, Artificial Sequence
  Description of Artificial Sequence: Synthetic oligonucleotide
uuugcuagcagaguuuucc

SEQ ID NO: 795982 - RNA, 19 nt, Artificial Sequence
  Description of Artificial Sequence: Synthetic oligonucleotide
ucacauuagggacaguuac

SEQ ID NO: 795983 - RNA, 19 nt, Artificial Sequence
  Description of Artificial Sequence: Synthetic oligonucleotide
ccguauagcaauuacaacg

SEQ ID NO: 795984 - RNA, 19 nt, Artificial Sequence
  Description of Artificial Sequence: Synthetic oligonucleotide
auggaguccauuuuagaag

SEQ ID NO: 795985 - RNA, 19 nt, Artificial Sequence
  Description of Artificial Sequence: Synthetic oligonucleotide
gucauuucuugucucaggg

SEQ ID NO: 795986 - RNA, 19 nt, Artificial Sequence
  Description of Artificial Sequence: Synthetic oligonucleotide
uagggcaccaauaucggcc

SEQ ID NO: 795987 - RNA, 19 nt, Artificial Sequence
  Description of Artificial Sequence: Synthetic oligonucleotide
uacccuuuggccuacuucc

SEQ ID NO: 795988 - RNA, 19 nt, Artificial Sequence
  Description of Artificial Sequence: Synthetic oligonucleotide
agcuccaacaacuagcacu

SEQ ID NO: 795989 - RNA, 19 nt, Artificial Sequence
  Description of Artificial Sequence: Synthetic oligonucleotide
gucaaauaaaucucugagc

SEQ ID NO: 795990 - RNA, 19 nt, Artificial Sequence
  Description of Artificial Sequence: Synthetic oligonucleotide
uuuuacggauauaaaauuu

SEQ ID NO: 795991 - RNA, 19 nt, Artificial Sequence
  Description of Artificial Sequence: Synthetic oligonucleotide
gaggacauaaagcaucuac

SEQ ID NO: 795992 - RNA, 19 nt, Artificial Sequence
  Description of Artificial Sequence: Synthetic oligonucleotide
ugagaggggaucuuggucu

SEQ ID NO: 795993 - RNA, 19 nt, Artificial Sequence
  Description of Artificial Sequence: Synthetic oligonucleotide
uacaacgaaggucauuggc

SEQ ID NO: 795994 - RNA, 19 nt, Artificial Sequence
  Description of Artificial Sequence: Synthetic oligonucleotide
acuagcaccuguuucucgg

SEQ ID NO: 795995 - RNA, 19 nt, Artificial Sequence
  Description of Artificial Sequence: Synthetic oligonucleotide
uaaaucucugagcuuuugc

SEQ ID NO: 795996 - RNA, 19 nt, Artificial Sequence
  Description of Artificial Sequence: Synthetic oligonucleotide
caucaagacucuauugacg

SEQ ID NO: 795997 - RNA, 19 nt, Artificial Sequence
  Description of Artificial Sequence: Synthetic oligonucleotide
uuaauauggcaacacgguc

SEQ ID NO: 795998 - RNA, 19 nt, Artificial Sequence
  Description of Artificial Sequence: Synthetic oligonucleotide
gacgguuuuacuuuucuga

SEQ ID NO: 795999 - RNA, 19 nt, Artificial Sequence
  Description of Artificial Sequence: Synthetic oligonucleotide
agagaagaaucuuuuaaau

SEQ ID NO: 796000 - RNA, 19 nt, Artificial Sequence
  Description of Artificial Sequence: Synthetic oligonucleotide
uaguccuugcaucuguucc

SEQ ID NO: 796001 - RNA, 19 nt, Artificial Sequence
  Description of Artificial Sequence: Synthetic oligonucleotide
guggcaaaccuacaaagag

SEQ ID NO: 796002 - RNA, 19 nt, Artificial Sequence
  Description of Artificial Sequence: Synthetic oligonucleotide
aagugugauucuugguggg

SEQ ID NO: 796003 - RNA, 19 nt, Artificial Sequence
  Description of Artificial Sequence: Synthetic oligonucleotide
ucccguauagcaauuacaa

SEQ ID NO: 796004 - RNA, 19 nt, Artificial Sequence
  Description of Artificial Sequence: Synthetic oligonucleotide
aauggcauggaguccauuu

SEQ ID NO: 796005 - RNA, 19 nt, Artificial Sequence
  Description of Artificial Sequence: Synthetic oligonucleotide
accaauaucggcccauguc

SEQ ID NO: 796006 - RNA, 19 nt, Artificial Sequence
  Description of Artificial Sequence: Synthetic oligonucleotide
auugacggcacacauggcu

SEQ ID NO: 796007 - RNA, 19 nt, Artificial Sequence
  Description of Artificial Sequence: Synthetic oligonucleotide
agcacguucacuuucucca

SEQ ID NO: 796008 - RNA, 19 nt, Artificial Sequence
  Description of Artificial Sequence: Synthetic oligonucleotide
ucuagggcaccaauaucgg

SEQ ID NO: 796009 - RNA, 19 nt, Artificial Sequence
  Description of Artificial Sequence: Synthetic oligonucleotide
uccaaauuuacaucuucac

SEQ ID NO: 796010 - RNA, 19 nt, Artificial Sequence
  Description of Artificial Sequence: Synthetic oligonucleotide
aaaugcuuauggcugacuu

SEQ ID NO: 796011 - RNA, 19 nt, Artificial Sequence
  Description of Artificial Sequence: Synthetic oligonucleotide
uuuugucaaugaaccaucc

SEQ ID NO: 796012 - RNA, 19 nt, Artificial Sequence
  Description of Artificial Sequence: Synthetic oligonucleotide
acaguuacaaagccuucuc

SEQ ID NO: 796013 - RNA, 19 nt, Artificial Sequence
  Description of Artificial Sequence: Synthetic oligonucleotide
ucaguuuccggcacaaagu

SEQ ID NO: 796014 - RNA, 19 nt, Artificial Sequence
  Description of Artificial Sequence: Synthetic oligonucleotide
ucacuuuccagaagagaag

SEQ ID NO: 796015 - RNA, 19 nt, Artificial Sequence
  Description of Artificial Sequence: Synthetic oligonucleotide
aacgagucuggucgguugg

SEQ ID NO: 796016 - RNA, 19 nt, Artificial Sequence
  Description of Artificial Sequence: Synthetic oligonucleotide
ucuauugacggcacacaug

SEQ ID NO: 796017 - RNA, 19 nt, Artificial Sequence
  Description of Artificial Sequence: Synthetic oligonucleotide
uggaguccauuuuagaagu

SEQ ID NO: 796018 - RNA, 19 nt, Artificial Sequence
  Description of Artificial Sequence: Synthetic oligonucleotide
ugggguuuugucaaugaac

SEQ ID NO: 796019 - RNA, 19 nt, Artificial Sequence
  Description of Artificial Sequence: Synthetic oligonucleotide
uuucagaauuggcaaguca

SEQ ID NO: 796020 - RNA, 19 nt, Artificial Sequence
  Description of Artificial Sequence: Synthetic oligonucleotide
aaguauucuuucucuagaa

SEQ ID NO: 796021 - RNA, 19 nt, Artificial Sequence
  Description of Artificial Sequence: Synthetic oligonucleotide
ccuuugcugauauagacgg

SEQ ID NO: 796022 - RNA, 19 nt, Artificial Sequence
  Description of Artificial Sequence: Synthetic oligonucleotide
uacggauauaaaauuuagu

SEQ ID NO: 796023 - RNA, 19 nt, Artificial Sequence
  Description of Artificial Sequence: Synthetic oligonucleotide
guagcugccacauuauuca

SEQ ID NO: 796024 - RNA, 19 nt, Artificial Sequence
  Description of Artificial Sequence: Synthetic oligonucleotide
ugauagucuuuaauauggc

SEQ ID NO: 796025 - RNA, 19 nt, Artificial Sequence
  Description of Artificial Sequence: Synthetic oligonucleotide
gacauaaagcaucuacuuc

SEQ ID NO: 796026 - RNA, 19 nt, Artificial Sequence
  Description of Artificial Sequence: Synthetic oligonucleotide
uccggcacaaaguuugaag

SEQ ID NO: 796027 - RNA, 19 nt, Artificial Sequence
  Description of Artificial Sequence: Synthetic oligonucleotide
cuugucucagggcacagag

SEQ ID NO: 796028 - RNA, 19 nt, Artificial Sequence
  Description of Artificial Sequence: Synthetic oligonucleotide
aucuccgaggacauaaagc

SEQ ID NO: 796029 - RNA, 19 nt, Artificial Sequence
  Description of Artificial Sequence: Synthetic oligonucleotide
cucguaccaaagcagagag

SEQ ID NO: 796030 - RNA, 19 nt, Artificial Sequence
  Description of Artificial Sequence: Synthetic oligonucleotide
auauagacgguuuuacuuu

SEQ ID NO: 796031 - RNA, 19 nt, Artificial Sequence
  Description of Artificial Sequence: Synthetic oligonucleotide
acagagagaagcuucucgu

SEQ ID NO: 796032 - RNA, 19 nt, Artificial Sequence
  Description of Artificial Sequence: Synthetic oligonucleotide
ucuuagcaaccucaagagc

SEQ ID NO: 796033 - RNA, 19 nt, Artificial Sequence
  Description of Artificial Sequence: Synthetic oligonucleotide
ugggcuacaauucuucuuu

SEQ ID NO: 796034 - RNA, 19 nt, Artificial Sequence
  Description of Artificial Sequence: Synthetic oligonucleotide
cacagagagaagcuucucg

SEQ ID NO: 796035 - RNA, 19 nt, Artificial Sequence
  Description of Artificial Sequence: Synthetic oligonucleotide
aaagaguguuuuguccagg

SEQ ID NO: 796036 - RNA, 19 nt, Artificial Sequence
  Description of Artificial Sequence: Synthetic oligonucleotide
ugauauagacgguuuuacu

SEQ ID NO: 796037 - RNA, 19 nt, Artificial Sequence
  Description of Artificial Sequence: Synthetic oligonucleotide
agggcaccaauaucggccc

SEQ ID NO: 796038 - RNA, 19 nt, Artificial Sequence
  Description of Artificial Sequence: Synthetic oligonucleotide
guuuccggcacaaaguuug

SEQ ID NO: 796039 - RNA, 19 nt, Artificial Sequence
  Description of Artificial Sequence: Synthetic oligonucleotide
gagagaagcuucucguacc

SEQ ID NO: 796040 - RNA, 19 nt, Artificial Sequence
  Description of Artificial Sequence: Synthetic oligonucleotide
ucuuaucacuuuccagaag

SEQ ID NO: 796041 - RNA, 19 nt, Artificial Sequence
  Description of Artificial Sequence: Synthetic oligonucleotide
uuagcaaccucaagagccu

SEQ ID NO: 796042 - RNA, 19 nt, Artificial Sequence
  Description of Artificial Sequence: Synthetic oligonucleotide
uugacggcacacauggcug

SEQ ID NO: 796043 - RNA, 19 nt, Artificial Sequence
  Description of Artificial Sequence: Synthetic oligonucleotide
uggcaaaccuacaaagagu

SEQ ID NO: 796044 - RNA, 19 nt, Artificial Sequence
  Description of Artificial Sequence: Synthetic oligonucleotide
gauauagacgguuuuacuu

SEQ ID NO: 796045 - RNA, 19 nt, Artificial Sequence
  Description of Artificial Sequence: Synthetic oligonucleotide
uccaacaacuagcacucga

SEQ ID NO: 796046 - RNA, 19 nt, Artificial Sequence
  Description of Artificial Sequence: Synthetic oligonucleotide
ucagaugugcuaagugaca

SEQ ID NO: 796047 - RNA, 19 nt, Artificial Sequence
  Description of Artificial Sequence: Synthetic oligonucleotide
ggagucaccaaaccaagag

SEQ ID NO: 796048 - RNA, 19 nt, Artificial Sequence
  Description of Artificial Sequence: Synthetic oligonucleotide
uauuucucggucaaaccuu

SEQ ID NO: 796049 - RNA, 19 nt, Artificial Sequence
  Description of Artificial Sequence: Synthetic oligonucleotide
uucucguaccaaagcagag

SEQ ID NO: 796050 - RNA, 19 nt, Artificial Sequence
  Description of Artificial Sequence: Synthetic oligonucleotide
aaauaucacacagggugcu

SEQ ID NO: 796051 - RNA, 19 nt, Artificial Sequence
  Description of Artificial Sequence: Synthetic oligonucleotide
cauccaugcagguuagaag

SEQ ID NO: 796052 - RNA, 19 nt, Artificial Sequence
  Description of Artificial Sequence: Synthetic oligonucleotide
gguaauagcaucgauuuca

SEQ ID NO: 796053 - RNA, 19 nt, Artificial Sequence
  Description of Artificial Sequence: Synthetic oligonucleotide
cucuaauaucuucuagggc

SEQ ID NO: 796054 - RNA, 19 nt, Artificial Sequence
  Description of Artificial Sequence: Synthetic oligonucleotide
cuuugagcucaccugcucc

SEQ ID NO: 796055 - RNA, 19 nt, Artificial Sequence
  Description of Artificial Sequence: Synthetic oligonucleotide
gaucuccgaggacauaaag

SEQ ID NO: 796056 - RNA, 19 nt, Artificial Sequence
  Description of Artificial Sequence: Synthetic oligonucleotide
uuacaacgaaggucauugg

SEQ ID NO: 796057 - RNA, 19 nt, Artificial Sequence
  Description of Artificial Sequence: Synthetic oligonucleotide
acuggucuggguugcguac

SEQ ID NO: 796058 - RNA, 19 nt, Artificial Sequence
  Description of Artificial Sequence: Synthetic oligonucleotide
gagggagcgcugcagagcc

SEQ ID NO: 796059 - RNA, 19 nt, Artificial Sequence
  Description of Artificial Sequence: Synthetic oligonucleotide
aauaucggcccaugucaca

SEQ ID NO: 796060 - RNA, 19 nt, Artificial Sequence
  Description of Artificial Sequence: Synthetic oligonucleotide
aaaacuugcugacguguuu

SEQ ID NO: 796061 - RNA, 19 nt, Artificial Sequence
  Description of Artificial Sequence: Synthetic oligonucleotide
uuugagcucaccugcucca

SEQ ID NO: 796062 - RNA, 19 nt, Artificial Sequence
  Description of Artificial Sequence: Synthetic oligonucleotide
uguuucagaagugggcuca

SEQ ID NO: 796063 - RNA, 19 nt, Artificial Sequence
  Description of Artificial Sequence: Synthetic oligonucleotide
uagacgguuuuacuuuucu

SEQ ID NO: 796064 - RNA, 19 nt, Artificial Sequence
  Description of Artificial Sequence: Synthetic oligonucleotide
gugccaucagaucagcacc

SEQ ID NO: 796065 - RNA, 19 nt, Artificial Sequence
  Description of Artificial Sequence: Synthetic oligonucleotide
aagacucuauugacggcac

SEQ ID NO: 796066 - RNA, 19 nt, Artificial Sequence
  Description of Artificial Sequence: Synthetic oligonucleotide
uauucagaucauccaugca

SEQ ID NO: 796067 - RNA, 19 nt, Artificial Sequence
  Description of Artificial Sequence: Synthetic oligonucleotide
gggguuuugucaaugaacc

SEQ ID NO: 796068 - RNA, 19 nt, Artificial Sequence
  Description of Artificial Sequence: Synthetic oligonucleotide
agugugauucuuggugggc

SEQ ID NO: 796069 - RNA, 19 nt, Artificial Sequence
  Description of Artificial Sequence: Synthetic oligonucleotide
ugguagcuccaacaacuag

SEQ ID NO: 796070 - RNA, 19 nt, Artificial Sequence
  Description of Artificial Sequence: Synthetic oligonucleotide
acuuugagcucaccugcuc

SEQ ID NO: 796071 - RNA, 19 nt, Artificial Sequence
  Description of Artificial Sequence: Synthetic oligonucleotide
acaacgaaggucauuggca

SEQ ID NO: 796072 - RNA, 19 nt, Artificial Sequence
  Description of Artificial Sequence: Synthetic oligonucleotide
acucauuugccacagccuu

SEQ ID NO: 796073 - RNA, 19 nt, Artificial Sequence
  Description of Artificial Sequence: Synthetic oligonucleotide
ucucggucugaucuccgag

SEQ ID NO: 796074 - RNA, 19 nt, Artificial Sequence
  Description of Artificial Sequence: Synthetic oligonucleotide
ucagacuccccugaaacuc

SEQ ID NO: 796075 - RNA, 19 nt, Artificial Sequence
  Description of Artificial Sequence: Synthetic oligonucleotide
uuggccuacuuccuuuucu

SEQ ID NO: 796076 - RNA, 19 nt, Artificial Sequence
  Description of Artificial Sequence: Synthetic oligonucleotide
caacaacuagcacucgagc

SEQ ID NO: 796077 - RNA, 19 nt, Artificial Sequence
  Description of Artificial Sequence: Synthetic oligonucleotide
cuggcaggggucuucaaug

SEQ ID NO: 796078 - RNA, 19 nt, Artificial Sequence
  Description of Artificial Sequence: Synthetic oligonucleotide
uggcaagucaagucuuuug

SEQ ID NO: 796079 - RNA, 19 nt, Artificial Sequence
  Description of Artificial Sequence: Synthetic oligonucleotide
aucagaucagcaccaacaa

SEQ ID NO: 796080 - RNA, 19 nt, Artificial Sequence
  Description of Artificial Sequence: Synthetic oligonucleotide
gagucuggucgguugguag

SEQ ID NO: 796081 - RNA, 19 nt, Artificial Sequence
  Description of Artificial Sequence: Synthetic oligonucleotide
ggugcagccacuuucagaa

SEQ ID NO: 796082 - RNA, 19 nt, Artificial Sequence
  Description of Artificial Sequence: Synthetic oligonucleotide
uucaccacacggacacuag

SEQ ID NO: 796083 - RNA, 19 nt, Artificial Sequence
  Description of Artificial Sequence: Synthetic oligonucleotide
cucggucugaucuccgagg

SEQ ID NO: 796084 - RNA, 19 nt, Artificial Sequence
  Description of Artificial Sequence: Synthetic oligonucleotide
ucguaccaaagcagagagg

SEQ ID NO: 796085 - RNA, 19 nt, Artificial Sequence
  Description of Artificial Sequence: Synthetic oligonucleotide
ccaauauugccauuaugag

SEQ ID NO: 796086 - RNA, 19 nt, Artificial Sequence
  Description of Artificial Sequence: Synthetic oligonucleotide
ucuggguugcguacuggug

SEQ ID NO: 796087 - RNA, 19 nt, Artificial Sequence
  Description of Artificial Sequence: Synthetic oligonucleotide
gggcguuugacacagcuug

SEQ ID NO: 796088 - RNA, 19 nt, Artificial Sequence
  Description of Artificial Sequence: Synthetic oligonucleotide
gguagcuccaacaacuagc

SEQ ID NO: 796089 - RNA, 19 nt, Artificial Sequence
  Description of Artificial Sequence: Synthetic oligonucleotide
uguuuccauuacccuuugg

SEQ ID NO: 796090 - RNA, 19 nt, Artificial Sequence
  Description of Artificial Sequence: Synthetic oligonucleotide
uagcacucgagcuguagcu

SEQ ID NO: 796091 - RNA, 19 nt, Artificial Sequence
  Description of Artificial Sequence: Synthetic oligonucleotide
ugcuuauaauugcuuuggu

SEQ ID NO: 796092 - RNA, 19 nt, Artificial Sequence
  Description of Artificial Sequence: Synthetic oligonucleotide
gucaaugaaccauccuccc

SEQ ID NO: 796093 - RNA, 19 nt, Artificial Sequence
  Description of Artificial Sequence: Synthetic oligonucleotide
ucggucugaucuccgagga

SEQ ID NO: 796094 - RNA, 19 nt, Artificial Sequence
  Description of Artificial Sequence: Synthetic oligonucleotide
ucaagacucuauugacggc

SEQ ID NO: 796095 - RNA, 19 nt, Artificial Sequence
  Description of Artificial Sequence: Synthetic oligonucleotide
aauaucacacagggugcug

SEQ ID NO: 796096 - RNA, 19 nt, Artificial Sequence
  Description of Artificial Sequence: Synthetic oligonucleotide
aggacauaaagcaucuacu

SEQ ID NO: 796097 - RNA, 19 nt, Artificial Sequence
  Description of Artificial Sequence: Synthetic oligonucleotide
acgguuuuacuuuucugaa

SEQ ID NO: 796098 - RNA, 19 nt, Artificial Sequence
  Description of Artificial Sequence: Synthetic oligonucleotide
gaagccucaucugggauac

SEQ ID NO: 796099 - RNA, 19 nt, Artificial Sequence
  Description of Artificial Sequence: Synthetic oligonucleotide
ucauccaugcagguuagaa

SEQ ID NO: 796100 - RNA, 19 nt, Artificial Sequence
  Description of Artificial Sequence: Synthetic oligonucleotide
uugcuagcagaguuuuccc

SEQ ID NO: 796101 - RNA, 19 nt, Artificial Sequence
  Description of Artificial Sequence: Synthetic oligonucleotide
uuucucggucugaucuccg

SEQ ID NO: 796102 - RNA, 19 nt, Artificial Sequence
  Description of Artificial Sequence: Synthetic oligonucleotide
ucucguaccaaagcagaga

SEQ ID NO: 796103 - RNA, 19 nt, Artificial Sequence
  Description of Artificial Sequence: Synthetic oligonucleotide
caugucacauuagggacag

SEQ ID NO: 796104 - RNA, 19 nt, Artificial Sequence
  Description of Artificial Sequence: Synthetic oligonucleotide
caauugcuuccaaauuuac

SEQ ID NO: 796105 - RNA, 19 nt, Artificial Sequence
  Description of Artificial Sequence: Synthetic oligonucleotide
uauagacgguuuuacuuuu

SEQ ID NO: 796106 - RNA, 19 nt, Artificial Sequence
  Description of Artificial Sequence: Synthetic oligonucleotide
ucaccacacggacacuagc

SEQ ID NO: 796107 - RNA, 19 nt, Artificial Sequence
  Description of Artificial Sequence: Synthetic oligonucleotide
caacaaugaagucauuuaa

SEQ ID NO: 796108 - RNA, 19 nt, Artificial Sequence
  Description of Artificial Sequence: Synthetic oligonucleotide
uuaugagcucuucucuaau

SEQ ID NO: 796109 - RNA, 19 nt, Artificial Sequence
  Description of Artificial Sequence: Synthetic oligonucleotide
caauaucggcccaugucac

SEQ ID NO: 796110 - RNA, 19 nt, Artificial Sequence
  Description of Artificial Sequence: Synthetic oligonucleotide
aaaccuacaaagaguguuu

SEQ ID NO: 796111 - RNA, 19 nt, Artificial Sequence
  Description of Artificial Sequence: Synthetic oligonucleotide
ugacguguuuccaacccau

SEQ ID NO: 796112 - RNA, 19 nt, Artificial Sequence
  Description of Artificial Sequence: Synthetic oligonucleotide
uccauuacccuuuggccua

SEQ ID NO: 796113 - RNA, 19 nt, Artificial Sequence
  Description of Artificial Sequence: Synthetic oligonucleotide
ggguggcaaaccuacaaag

SEQ ID NO: 796114 - RNA, 19 nt, Artificial Sequence
  Description of Artificial Sequence: Synthetic oligonucleotide
aggaccggcuaguaggaug

SEQ ID NO: 796115 - RNA, 19 nt, Artificial Sequence
  Description of Artificial Sequence: Synthetic oligonucleotide
uauuaguggcagccaaaau

SEQ ID NO: 796116 - RNA, 19 nt, Artificial Sequence
  Description of Artificial Sequence: Synthetic oligonucleotide
cuucucguaccaaagcaga

SEQ ID NO: 796117 - RNA, 19 nt, Artificial Sequence
  Description of Artificial Sequence: Synthetic oligonucleotide
gagaagaaucuuuuaaauu

SEQ ID NO: 796118 - RNA, 19 nt, Artificial Sequence
  Description of Artificial Sequence: Synthetic oligonucleotide
acccaggcauauuucucgg

SEQ ID NO: 796119 - RNA, 19 nt, Artificial Sequence
  Description of Artificial Sequence: Synthetic oligonucleotide
accuacaaagaguguuuug

SEQ ID NO: 796120 - RNA, 19 nt, Artificial Sequence
  Description of Artificial Sequence: Synthetic oligonucleotide
cguacuggugccaauauug

SEQ ID NO: 796121 - RNA, 19 nt, Artificial Sequence
  Description of Artificial Sequence: Synthetic oligonucleotide
gcugcuuauaauugcuuug

SEQ ID NO: 796122 - RNA, 19 nt, Artificial Sequence
  Description of Artificial Sequence: Synthetic oligonucleotide
ucagaucauccaugcaggu

SEQ ID NO: 796123 - RNA, 19 nt, Artificial Sequence
  Description of Artificial Sequence: Synthetic oligonucleotide
cucaggacucugcugcugc

SEQ ID NO: 796124 - RNA, 19 nt, Artificial Sequence
  Description of Artificial Sequence: Synthetic oligonucleotide
uggguugcguacuggugcc

SEQ ID NO: 796125 - RNA, 19 nt, Artificial Sequence
  Description of Artificial Sequence: Synthetic oligonucleotide
aauuacaacgaaggucauu

SEQ ID NO: 796126 - RNA, 19 nt, Artificial Sequence
  Description of Artificial Sequence: Synthetic oligonucleotide
cuagggcaccaauaucggc

SEQ ID NO: 796127 - RNA, 19 nt, Artificial Sequence
  Description of Artificial Sequence: Synthetic oligonucleotide
auauugccauuaugagcuc

SEQ ID NO: 796128 - RNA, 19 nt, Artificial Sequence
  Description of Artificial Sequence: Synthetic oligonucleotide
uggcauggaguccauuuua

SEQ ID NO: 796129 - RNA, 19 nt, Artificial Sequence
  Description of Artificial Sequence: Synthetic oligonucleotide
ugccucccggcaaagugcc

SEQ ID NO: 796130 - RNA, 19 nt, Artificial Sequence
  Description of Artificial Sequence: Synthetic oligonucleotide
aacgaaggucauuggcaau

SEQ ID NO: 796131 - RNA, 19 nt, Artificial Sequence
  Description of Artificial Sequence: Synthetic oligonucleotide
guuuuguccaggcggccug

SEQ ID NO: 796132 - RNA, 19 nt, Artificial Sequence
  Description of Artificial Sequence: Synthetic oligonucleotide
gcuaguaggaugccagcag

SEQ ID NO: 796133 - RNA, 19 nt, Artificial Sequence
  Description of Artificial Sequence: Synthetic oligonucleotide
agccaggcgucagaugugc

SEQ ID NO: 796134 - RNA, 19 nt, Artificial Sequence
  Description of Artificial Sequence: Synthetic oligonucleotide
agaagccucaucugggaua

SEQ ID NO: 796135 - RNA, 19 nt, Artificial Sequence
  Description of Artificial Sequence: Synthetic oligonucleotide
uguuucucggucugaucuc

SEQ ID NO: 796136 - RNA, 19 nt, Artificial Sequence
  Description of Artificial Sequence: Synthetic oligonucleotide
agucuuuaauauggcaaca

SEQ ID NO: 796137 - RNA, 19 nt, Artificial Sequence
  Description of Artificial Sequence: Synthetic oligonucleotide
ccaacaacuagcacucgag

SEQ ID NO: 796138 - RNA, 19 nt, Artificial Sequence
  Description of Artificial Sequence: Synthetic oligonucleotide
guagcuccaacaacuagca

SEQ ID NO: 796139 - RNA, 19 nt, Artificial Sequence
  Description of Artificial Sequence: Synthetic oligonucleotide
ugcugauauagacgguuuu

SEQ ID NO: 796140 - RNA, 19 nt, Artificial Sequence
  Description of Artificial Sequence: Synthetic oligonucleotide
cugccucccggcaaagugc

SEQ ID NO: 796141 - RNA, 19 nt, Artificial Sequence
  Description of Artificial Sequence: Synthetic oligonucleotide
aacuggucuggguugcgua

SEQ ID NO: 796142 - RNA, 19 nt, Artificial Sequence
  Description of Artificial Sequence: Synthetic oligonucleotide
ugcagguuagaagcugggc

SEQ ID NO: 796143 - RNA, 19 nt, Artificial Sequence
  Description of Artificial Sequence: Synthetic oligonucleotide
agcaagugugauucuuggu

SEQ ID NO: 796144 - RNA, 19 nt, Artificial Sequence
  Description of Artificial Sequence: Synthetic oligonucleotide
uguuuccaacccauccauc

SEQ ID NO: 796145 - RNA, 19 nt, Artificial Sequence
  Description of Artificial Sequence: Synthetic oligonucleotide
gcaccaacaaagccaggcg

SEQ ID NO: 796146 - RNA, 19 nt, Artificial Sequence
  Description of Artificial Sequence: Synthetic oligonucleotide
gucaaugauaucuggccua

SEQ ID NO: 796147 - RNA, 19 nt, Artificial Sequence
  Description of Artificial Sequence: Synthetic oligonucleotide
aaccauccucccucagaug

SEQ ID NO: 796148 - RNA, 19 nt, Artificial Sequence
  Description of Artificial Sequence: Synthetic oligonucleotide
uagaagccucaucugggau

SEQ ID NO: 796149 - RNA, 19 nt, Artificial Sequence
  Description of Artificial Sequence: Synthetic oligonucleotide
guacuggugccaauauugc

SEQ ID NO: 796150 - RNA, 19 nt, Artificial Sequence
  Description of Artificial Sequence: Synthetic oligonucleotide
cuggucgguugguagcucc

SEQ ID NO: 796151 - RNA, 19 nt, Artificial Sequence
  Description of Artificial Sequence: Synthetic oligonucleotide
ccaacuguggucuucuguc

SEQ ID NO: 796152 - RNA, 19 nt, Artificial Sequence
  Description of Artificial Sequence: Synthetic oligonucleotide
gaucuuggucucuuagcaa

SEQ ID NO: 796153 - RNA, 19 nt, Artificial Sequence
  Description of Artificial Sequence: Synthetic oligonucleotide
auccaacgagucuggucgg

SEQ ID NO: 796154 - RNA, 19 nt, Artificial Sequence
  Description of Artificial Sequence: Synthetic oligonucleotide
cuuuuacggauauaaaauu

SEQ ID NO: 796155 - RNA, 19 nt, Artificial Sequence
  Description of Artificial Sequence: Synthetic oligonucleotide
cacuagcaccuguuucucg

SEQ ID NO: 796156 - RNA, 19 nt, Artificial Sequence
  Description of Artificial Sequence: Synthetic oligonucleotide
caacgagucuggucgguug

SEQ ID NO: 796157 - RNA, 19 nt, Artificial Sequence
  Description of Artificial Sequence: Synthetic oligonucleotide
ccucauacaucauuugauc

SEQ ID NO: 796158 - RNA, 19 nt, Artificial Sequence
  Description of Artificial Sequence: Synthetic oligonucleotide
auggcagggucaaugauau

SEQ ID NO: 796159 - RNA, 19 nt, Artificial Sequence
  Description of Artificial Sequence: Synthetic oligonucleotide
ugagggagcgcugcagagc

SEQ ID NO: 796160 - RNA, 19 nt, Artificial Sequence
  Description of Artificial Sequence: Synthetic oligonucleotide
ugaucuccgaggacauaaa

SEQ ID NO: 796161 - RNA, 19 nt, Artificial Sequence
  Description of Artificial Sequence: Synthetic oligonucleotide
ccaauaucggcccauguca

SEQ ID NO: 796162 - RNA, 19 nt, Artificial Sequence
  Description of Artificial Sequence: Synthetic oligonucleotide
cacgccucagagcaggauc

SEQ ID NO: 796163 - RNA, 19 nt, Artificial Sequence
  Description of Artificial Sequence: Synthetic oligonucleotide
caacgaaggucauuggcaa

SEQ ID NO: 796164 - RNA, 19 nt, Artificial Sequence
  Description of Artificial Sequence: Synthetic oligonucleotide
cucccguauagcaauuaca

SEQ ID NO: 796165 - RNA, 19 nt, Artificial Sequence
  Description of Artificial Sequence: Synthetic oligonucleotide
cuugcugacguguuuccaa

SEQ ID NO: 796166 - RNA, 19 nt, Artificial Sequence
  Description of Artificial Sequence: Synthetic oligonucleotide
agagcaggauccaacgagu

SEQ ID NO: 796167 - RNA, 19 nt, Artificial Sequence
  Description of Artificial Sequence: Synthetic oligonucleotide
cauuaugagcucuucucua

SEQ ID NO: 796168 - RNA, 19 nt, Artificial Sequence
  Description of Artificial Sequence: Synthetic oligonucleotide
aggcauauuucucggucaa

SEQ ID NO: 796169 - RNA, 19 nt, Artificial Sequence
  Description of Artificial Sequence: Synthetic oligonucleotide
ugggcgcagaauggcaggg

SEQ ID NO: 796170 - RNA, 19 nt, Artificial Sequence
  Description of Artificial Sequence: Synthetic oligonucleotide
uauggcugacuuugagcuc

SEQ ID NO: 796171 - RNA, 19 nt, Artificial Sequence
  Description of Artificial Sequence: Synthetic oligonucleotide
agccuuugcaagucauccu

SEQ ID NO: 796172 - RNA, 19 nt, Artificial Sequence
  Description of Artificial Sequence: Synthetic oligonucleotide
auagacgguuuuacuuuuc

SEQ ID NO: 796173 - RNA, 19 nt, Artificial Sequence
  Description of Artificial Sequence: Synthetic oligonucleotide
ugagcucaccugcuccaac

SEQ ID NO: 796174 - RNA, 19 nt, Artificial Sequence
  Description of Artificial Sequence: Synthetic oligonucleotide
uuggucucuuagcaaccuc

SEQ ID NO: 796175 - RNA, 19 nt, Artificial Sequence
  Description of Artificial Sequence: Synthetic oligonucleotide
ugcucagacuccccugaaa

SEQ ID NO: 796176 - RNA, 19 nt, Artificial Sequence
  Description of Artificial Sequence: Synthetic oligonucleotide
auaucggcccaugucacau

SEQ ID NO: 796177 - RNA, 19 nt, Artificial Sequence
  Description of Artificial Sequence: Synthetic oligonucleotide
cacauggcugccucccggc

SEQ ID NO: 796178 - RNA, 19 nt, Artificial Sequence
  Description of Artificial Sequence: Synthetic oligonucleotide
caggcauauuucucgguca

SEQ ID NO: 796179 - RNA, 19 nt, Artificial Sequence
  Description of Artificial Sequence: Synthetic oligonucleotide
cauaucuuuugaagcaacu

SEQ ID NO: 796180 - RNA, 19 nt, Artificial Sequence
  Description of Artificial Sequence: Synthetic oligonucleotide
gcaggcgucacugacugag

SEQ ID NO: 796181 - RNA, 19 nt, Artificial Sequence
  Description of Artificial Sequence: Synthetic oligonucleotide
auggcauggaguccauuuu

SEQ ID NO: 796182 - RNA, 19 nt, Artificial Sequence
  Description of Artificial Sequence: Synthetic oligonucleotide
acucuauugacggcacaca

SEQ ID NO: 796183 - RNA, 19 nt, Artificial Sequence
  Description of Artificial Sequence: Synthetic oligonucleotide
ugacacagcuuggucaaau

SEQ ID NO: 796184 - RNA, 19 nt, Artificial Sequence
  Description of Artificial Sequence: Synthetic oligonucleotide
cuuucagaauuggcaaguc

SEQ ID NO: 796185 - RNA, 19 nt, Artificial Sequence
  Description of Artificial Sequence: Synthetic oligonucleotide
gcuucucguaccaaagcag

SEQ ID NO: 796186 - RNA, 19 nt, Artificial Sequence
  Description of Artificial Sequence: Synthetic oligonucleotide
cugaacuggucuggguugc

SEQ ID NO: 796187 - RNA, 19 nt, Artificial Sequence
  Description of Artificial Sequence: Synthetic oligonucleotide
cguauagcaauuacaacga

SEQ ID NO: 796188 - RNA, 19 nt, Artificial Sequence
  Description of Artificial Sequence: Synthetic oligonucleotide
cagguuagaagcugggcua

SEQ ID NO: 796189 - RNA, 19 nt, Artificial Sequence
  Description of Artificial Sequence: Synthetic oligonucleotide
ggucugaucuccgaggaca

SEQ ID NO: 796190 - RNA, 19 nt, Artificial Sequence
  Description of Artificial Sequence: Synthetic oligonucleotide
acgaaggucauuggcaauu

SEQ ID NO: 796191 - RNA, 19 nt, Artificial Sequence
  Description of Artificial Sequence: Synthetic oligonucleotide
gcuuggucaaauaaaucuc

SEQ ID NO: 796192 - RNA, 19 nt, Artificial Sequence
  Description of Artificial Sequence: Synthetic oligonucleotide
cugcacgccucagagcagg

SEQ ID NO: 796193 - RNA, 19 nt, Artificial Sequence
  Description of Artificial Sequence: Synthetic oligonucleotide
cacugcaggcgucacugac

SEQ ID NO: 796194 - RNA, 19 nt, Artificial Sequence
  Description of Artificial Sequence: Synthetic oligonucleotide
cugaucuccgaggacauaa

SEQ ID NO: 796195 - RNA, 19 nt, Artificial Sequence
  Description of Artificial Sequence: Synthetic oligonucleotide
ucggcccaugucacauuag

SEQ ID NO: 796196 - RNA, 19 nt, Artificial Sequence
  Description of Artificial Sequence: Synthetic oligonucleotide
aaccuuccugcacgccuca

SEQ ID NO: 796197 - RNA, 19 nt, Artificial Sequence
  Description of Artificial Sequence: Synthetic oligonucleotide
gggguaauagcaucgauuu

SEQ ID NO: 796198 - RNA, 19 nt, Artificial Sequence
  Description of Artificial Sequence: Synthetic oligonucleotide
ucuugucucagggcacaga

SEQ ID NO: 796199 - RNA, 19 nt, Artificial Sequence
  Description of Artificial Sequence: Synthetic oligonucleotide
guauagcaauuacaacgaa

SEQ ID NO: 796200 - RNA, 19 nt, Artificial Sequence
  Description of Artificial Sequence: Synthetic oligonucleotide
ccuuuuacggauauaaaau

SEQ ID NO: 796201 - RNA, 19 nt, Artificial Sequence
  Description of Artificial Sequence: Synthetic oligonucleotide
ggcauggaguccauuuuag

SEQ ID NO: 796202 - RNA, 19 nt, Artificial Sequence
  Description of Artificial Sequence: Synthetic oligonucleotide
cacacauggcugccucccg

SEQ ID NO: 796203 - RNA, 19 nt, Artificial Sequence
  Description of Artificial Sequence: Synthetic oligonucleotide
aucggcccaugucacauua

SEQ ID NO: 796204 - RNA, 19 nt, Artificial Sequence
  Description of Artificial Sequence: Synthetic oligonucleotide
ggacacuagcaccuguuuc

SEQ ID NO: 796205 - RNA, 19 nt, Artificial Sequence
  Description of Artificial Sequence: Synthetic oligonucleotide
ggaccggcuaguaggaugc

SEQ ID NO: 796206 - RNA, 19 nt, Artificial Sequence
  Description of Artificial Sequence: Synthetic oligonucleotide
caggcgucacugacugagg

SEQ ID NO: 796207 - RNA, 19 nt, Artificial Sequence
  Description of Artificial Sequence: Synthetic oligonucleotide
caaccucaagagccuuugc

SEQ ID NO: 796208 - RNA, 19 nt, Artificial Sequence
  Description of Artificial Sequence: Synthetic oligonucleotide
caaugcauaguccuugcau

SEQ ID NO: 796209 - RNA, 19 nt, Artificial Sequence
  Description of Artificial Sequence: Synthetic oligonucleotide
cacacggacacuagcaccu

SEQ ID NO: 796210 - RNA, 19 nt, Artificial Sequence
  Description of Artificial Sequence: Synthetic oligonucleotide
ggcaagucaagucuuuugu

SEQ ID NO: 796211 - RNA, 19 nt, Artificial Sequence
  Description of Artificial Sequence: Synthetic oligonucleotide
agacucuauugacggcaca

SEQ ID NO: 796212 - RNA, 19 nt, Artificial Sequence
  Description of Artificial Sequence: Synthetic oligonucleotide
ccggcuaguaggaugccag

SEQ ID NO: 796213 - RNA, 19 nt, Artificial Sequence
  Description of Artificial Sequence: Synthetic oligonucleotide
gucaccaaaccaagaguuc

SEQ ID NO: 796214 - RNA, 19 nt, Artificial Sequence
  Description of Artificial Sequence: Synthetic oligonucleotide
agagaggucugcucccgua

SEQ ID NO: 796215 - RNA, 19 nt, Artificial Sequence
  Description of Artificial Sequence: Synthetic oligonucleotide
aaccugucgcacagcacgu

SEQ ID NO: 796216 - RNA, 19 nt, Artificial Sequence
  Description of Artificial Sequence: Synthetic oligonucleotide
ccacacggacacuagcacc

SEQ ID NO: 796217 - RNA, 19 nt, Artificial Sequence
  Description of Artificial Sequence: Synthetic oligonucleotide
ggauccaacgagucugguc

SEQ ID NO: 796218 - RNA, 19 nt, Artificial Sequence
  Description of Artificial Sequence: Synthetic oligonucleotide
gcagguuagaagcugggcu

SEQ ID NO: 796219 - RNA, 19 nt, Artificial Sequence
  Description of Artificial Sequence: Synthetic oligonucleotide
caaaccuuccugcacgccu

SEQ ID NO: 796220 - RNA, 19 nt, Artificial Sequence
  Description of Artificial Sequence: Synthetic oligonucleotide
uugcguacuggugccaaua

SEQ ID NO: 796221 - RNA, 19 nt, Artificial Sequence
  Description of Artificial Sequence: Synthetic oligonucleotide
gcgucagaugugcuaagug

SEQ ID NO: 796222 - RNA, 19 nt, Artificial Sequence
  Description of Artificial Sequence: Synthetic oligonucleotide
auuacccuuuggccuacuu

SEQ ID NO: 796223 - RNA, 19 nt, Artificial Sequence
  Description of Artificial Sequence: Synthetic oligonucleotide
ccaggcauauuucucgguc

SEQ ID NO: 796224 - RNA, 19 nt, Artificial Sequence
  Description of Artificial Sequence: Synthetic oligonucleotide
gguggcaaaccuacaaaga

SEQ ID NO: 796225 - RNA, 19 nt, Artificial Sequence
  Description of Artificial Sequence: Synthetic oligonucleotide
auuugauccuuugcugaua

SEQ ID NO: 796226 - RNA, 19 nt, Artificial Sequence
  Description of Artificial Sequence: Synthetic oligonucleotide
cagaugugcuaagugacaa

SEQ ID NO: 796227 - RNA, 19 nt, Artificial Sequence
  Description of Artificial Sequence: Synthetic oligonucleotide
gggccuuuuacggauauaa

SEQ ID NO: 796228 - RNA, 19 nt, Artificial Sequence
  Description of Artificial Sequence: Synthetic oligonucleotide
ggacauaaagcaucuacuu

SEQ ID NO: 796229 - RNA, 19 nt, Artificial Sequence
  Description of Artificial Sequence: Synthetic oligonucleotide
gcaggagucaccaaaccaa

SEQ ID NO: 796230 - RNA, 19 nt, Artificial Sequence
  Description of Artificial Sequence: Synthetic oligonucleotide
cucgagcuguagcugccac

SEQ ID NO: 796231 - RNA, 19 nt, Artificial Sequence
  Description of Artificial Sequence: Synthetic oligonucleotide
gacucauuugccacagccu

SEQ ID NO: 796232 - RNA, 19 nt, Artificial Sequence
  Description of Artificial Sequence: Synthetic oligonucleotide
uugcucagacuccccugaa

SEQ ID NO: 796233 - RNA, 19 nt, Artificial Sequence
  Description of Artificial Sequence: Synthetic oligonucleotide
aggcgucagaugugcuaag

SEQ ID NO: 796234 - RNA, 19 nt, Artificial Sequence
  Description of Artificial Sequence: Synthetic oligonucleotide
cauuagggacaguuacaaa

SEQ ID NO: 796235 - RNA, 19 nt, Artificial Sequence
  Description of Artificial Sequence: Synthetic oligonucleotide
agaggucugcucccguaua

SEQ ID NO: 796236 - RNA, 19 nt, Artificial Sequence
  Description of Artificial Sequence: Synthetic oligonucleotide
cccguauagcaauuacaac

SEQ ID NO: 796237 - RNA, 19 nt, Artificial Sequence
  Description of Artificial Sequence: Synthetic oligonucleotide
ucccggcaaagugccauca

SEQ ID NO: 796238 - RNA, 19 nt, Artificial Sequence
  Description of Artificial Sequence: Synthetic oligonucleotide
gcaaccucaagagccuuug

SEQ ID NO: 796239 - RNA, 19 nt, Artificial Sequence
  Description of Artificial Sequence: Synthetic oligonucleotide
gucacauuagggacaguua

SEQ ID NO: 796240 - RNA, 19 nt, Artificial Sequence
  Description of Artificial Sequence: Synthetic oligonucleotide
ccugggcgcagaauggcag

SEQ ID NO: 796241 - RNA, 19 nt, Artificial Sequence
  Description of Artificial Sequence: Synthetic oligonucleotide
cagagagaagcuucucgua

SEQ ID NO: 796242 - RNA, 19 nt, Artificial Sequence
  Description of Artificial Sequence: Synthetic oligonucleotide
cauuugauccuuugcugau

SEQ ID NO: 796243 - RNA, 19 nt, Artificial Sequence
  Description of Artificial Sequence: Synthetic oligonucleotide
gcucccguauagcaauuac

SEQ ID NO: 796244 - RNA, 19 nt, Artificial Sequence
  Description of Artificial Sequence: Synthetic oligonucleotide
aggagucaccaaaccaaga

SEQ ID NO: 796245 - RNA, 19 nt, Artificial Sequence
  Description of Artificial Sequence: Synthetic oligonucleotide
cagaauuggcaagucaagu

SEQ ID NO: 796246 - RNA, 19 nt, Artificial Sequence
  Description of Artificial Sequence: Synthetic oligonucleotide
cugggguuuugucaaugaa

SEQ ID NO: 796247 - RNA, 19 nt, Artificial Sequence
  Description of Artificial Sequence: Synthetic oligonucleotide
ggcguuugacacagcuugg

SEQ ID NO: 796248 - RNA, 19 nt, Artificial Sequence
  Description of Artificial Sequence: Synthetic oligonucleotide
accaggaggaccggcuagu

SEQ ID NO: 796249 - RNA, 19 nt, Artificial Sequence
  Description of Artificial Sequence: Synthetic oligonucleotide
guugcuucaucaagacucu

SEQ ID NO: 796250 - RNA, 19 nt, Artificial Sequence
  Description of Artificial Sequence: Synthetic oligonucleotide
caguuacaaagccuucucu

SEQ ID NO: 796251 - RNA, 19 nt, Artificial Sequence
  Description of Artificial Sequence: Synthetic oligonucleotide
cucuauugacggcacacau

SEQ ID NO: 796252 - RNA, 19 nt, Artificial Sequence
  Description of Artificial Sequence: Synthetic oligonucleotide
ggcgcagaauggcaggguc

SEQ ID NO: 796253 - RNA, 19 nt, Artificial Sequence
  Description of Artificial Sequence: Synthetic oligonucleotide
uuccggcacaaaguuugaa

SEQ ID NO: 796254 - RNA, 19 nt, Artificial Sequence
  Description of Artificial Sequence: Synthetic oligonucleotide
ccagcggcggcuuggugcc

SEQ ID NO: 796255 - RNA, 19 nt, Artificial Sequence
  Description of Artificial Sequence: Synthetic oligonucleotide
ggguaauagcaucgauuuc

SEQ ID NO: 796256 - RNA, 19 nt, Artificial Sequence
  Description of Artificial Sequence: Synthetic oligonucleotide
uucuuuccaccugggguuu

SEQ ID NO: 796257 - RNA, 19 nt, Artificial Sequence
  Description of Artificial Sequence: Synthetic oligonucleotide
ccaugucacauuagggaca

SEQ ID NO: 796258 - RNA, 19 nt, Artificial Sequence
  Description of Artificial Sequence: Synthetic oligonucleotide
ccugucauuucuugucuca

SEQ ID NO: 796259 - RNA, 19 nt, Artificial Sequence
  Description of Artificial Sequence: Synthetic oligonucleotide
caggcgucagaugugcuaa

SEQ ID NO: 796260 - RNA, 19 nt, Artificial Sequence
  Description of Artificial Sequence: Synthetic oligonucleotide
ggcuaguaggaugccagca

SEQ ID NO: 796261 - RNA, 19 nt, Artificial Sequence
  Description of Artificial Sequence: Synthetic oligonucleotide
gccuauuaguggcagccaa

SEQ ID NO: 796262 - RNA, 19 nt, Artificial Sequence
  Description of Artificial Sequence: Synthetic oligonucleotide
uaucggcccaugucacauu

SEQ ID NO: 796263 - RNA, 19 nt, Artificial Sequence
  Description of Artificial Sequence: Synthetic oligonucleotide
cacagcacguucacuuucu

SEQ ID NO: 796264 - RNA, 19 nt, Artificial Sequence
  Description of Artificial Sequence: Synthetic oligonucleotide
gggguggcaaaccuacaaa

SEQ ID NO: 796265 - RNA, 19 nt, Artificial Sequence
  Description of Artificial Sequence: Synthetic oligonucleotide
cuuuuagcagaaggcugaa

SEQ ID NO: 796266 - RNA, 19 nt, Artificial Sequence
  Description of Artificial Sequence: Synthetic oligonucleotide
ucugaucuccgaggacaua

SEQ ID NO: 796267 - RNA, 19 nt, Artificial Sequence
  Description of Artificial Sequence: Synthetic oligonucleotide
ccaucagaucagcaccaac

SEQ ID NO: 796268 - RNA, 19 nt, Artificial Sequence
  Description of Artificial Sequence: Synthetic oligonucleotide
ggcgucacugacugaggga

SEQ ID NO: 796269 - RNA, 19 nt, Artificial Sequence
  Description of Artificial Sequence: Synthetic oligonucleotide
caguuuccggcacaaaguu

SEQ ID NO: 796270 - RNA, 19 nt, Artificial Sequence
  Description of Artificial Sequence: Synthetic oligonucleotide
acacggacacuagcaccug

SEQ ID NO: 796271 - RNA, 19 nt, Artificial Sequence
  Description of Artificial Sequence: Synthetic oligonucleotide
agacuccccugaaacuccu

SEQ ID NO: 796272 - RNA, 19 nt, Artificial Sequence
  Description of Artificial Sequence: Synthetic oligonucleotide
gacuccccugaaacuccug

SEQ ID NO: 796273 - RNA, 19 nt, Artificial Sequence
  Description of Artificial Sequence: Synthetic oligonucleotide
ccggcacaaaguuugaagu

SEQ ID NO: 796274 - RNA, 19 nt, Artificial Sequence
  Description of Artificial Sequence: Synthetic oligonucleotide
cuuugcugauauagacggu

SEQ ID NO: 796275 - RNA, 19 nt, Artificial Sequence
  Description of Artificial Sequence: Synthetic oligonucleotide
ccaugcagguuagaagcug

SEQ ID NO: 796276 - RNA, 19 nt, Artificial Sequence
  Description of Artificial Sequence: Synthetic oligonucleotide
ccugucgcacagcacguuc

SEQ ID NO: 796277 - RNA, 19 nt, Artificial Sequence
  Description of Artificial Sequence: Synthetic oligonucleotide
uugcuucaucaagacucua

SEQ ID NO: 796278 - RNA, 19 nt, Artificial Sequence
  Description of Artificial Sequence: Synthetic oligonucleotide
acgagucuggucgguuggu

SEQ ID NO: 796279 - RNA, 19 nt, Artificial Sequence
  Description of Artificial Sequence: Synthetic oligonucleotide
agcaaccucaagagccuuu

SEQ ID NO: 796280 - RNA, 19 nt, Artificial Sequence
  Description of Artificial Sequence: Synthetic oligonucleotide
ggacaguuacaaagccuuc

SEQ ID NO: 796281 - RNA, 19 nt, Artificial Sequence
  Description of Artificial Sequence: Synthetic oligonucleotide
gaacuggucuggguugcgu

SEQ ID NO: 796282 - RNA, 19 nt, Artificial Sequence
  Description of Artificial Sequence: Synthetic oligonucleotide
gaccggcuaguaggaugcc

SEQ ID NO: 796283 - RNA, 19 nt, Artificial Sequence
  Description of Artificial Sequence: Synthetic oligonucleotide
caaccaggaggaccggcua

SEQ ID NO: 796284 - RNA, 19 nt, Artificial Sequence
  Description of Artificial Sequence: Synthetic oligonucleotide
ggucucuuagcaaccucaa

SEQ ID NO: 796285 - RNA, 19 nt, Artificial Sequence
  Description of Artificial Sequence: Synthetic oligonucleotide
gugccaauauugccauuau

SEQ ID NO: 796286 - RNA, 19 nt, Artificial Sequence
  Description of Artificial Sequence: Synthetic oligonucleotide
gccucauacaucauuugau

SEQ ID NO: 796287 - RNA, 19 nt, Artificial Sequence
  Description of Artificial Sequence: Synthetic oligonucleotide
gcaccaauaucggcccaug

SEQ ID NO: 796288 - RNA, 19 nt, Artificial Sequence
  Description of Artificial Sequence: Synthetic oligonucleotide
cauaguccuugcaucuguu

SEQ ID NO: 796289 - RNA, 19 nt, Artificial Sequence
  Description of Artificial Sequence: Synthetic oligonucleotide
uggugccaauauugccauu

SEQ ID NO: 796290 - RNA, 19 nt, Artificial Sequence
  Description of Artificial Sequence: Synthetic oligonucleotide
acccagcggcggcuuggug

SEQ ID NO: 796291 - RNA, 19 nt, Artificial Sequence
  Description of Artificial Sequence: Synthetic oligonucleotide
caccaauaucggcccaugu

SEQ ID NO: 796292 - RNA, 19 nt, Artificial Sequence
  Description of Artificial Sequence: Synthetic oligonucleotide
ggccuuuuacggauauaaa

SEQ ID NO: 796293 - RNA, 19 nt, Artificial Sequence
  Description of Artificial Sequence: Synthetic oligonucleotide
cccggcaaagugccaucag

SEQ ID NO: 796294 - RNA, 19 nt, Artificial Sequence
  Description of Artificial Sequence: Synthetic oligonucleotide
gauucaccacacggacacu

SEQ ID NO: 796295 - RNA, 19 nt, Artificial Sequence
  Description of Artificial Sequence: Synthetic oligonucleotide
guugcguacuggugccaau

SEQ ID NO: 796296 - RNA, 19 nt, Artificial Sequence
  Description of Artificial Sequence: Synthetic oligonucleotide
ccugcacgccucagagcag

SEQ ID NO: 796297 - RNA, 19 nt, Artificial Sequence
  Description of Artificial Sequence: Synthetic oligonucleotide
gcgcagaauggcaggguca

SEQ ID NO: 796298 - RNA, 19 nt, Artificial Sequence
  Description of Artificial Sequence: Synthetic oligonucleotide
ggccuauuaguggcagcca

SEQ ID NO: 796299 - RNA, 19 nt, Artificial Sequence
  Description of Artificial Sequence: Synthetic oligonucleotide
cggcuaguaggaugccagc

SEQ ID NO: 796300 - RNA, 19 nt, Artificial Sequence
  Description of Artificial Sequence: Synthetic oligonucleotide
ggcauauuucucggucaaa

SEQ ID NO: 796301 - RNA, 19 nt, Artificial Sequence
  Description of Artificial Sequence: Synthetic oligonucleotide
agggccuuuuacggauaua

SEQ ID NO: 796302 - RNA, 19 nt, Artificial Sequence
  Description of Artificial Sequence: Synthetic oligonucleotide
cagaucauccaugcagguu

SEQ ID NO: 796303 - RNA, 19 nt, Artificial Sequence
  Description of Artificial Sequence: Synthetic oligonucleotide
accugucgcacagcacguu

SEQ ID NO: 796304 - RNA, 19 nt, Artificial Sequence
  Description of Artificial Sequence: Synthetic oligonucleotide
ccaggcgucagaugugcua

SEQ ID NO: 796305 - RNA, 19 nt, Artificial Sequence
  Description of Artificial Sequence: Synthetic oligonucleotide
agcggcggcuuggugccau

SEQ ID NO: 796306 - RNA, 19 nt, Artificial Sequence
  Description of Artificial Sequence: Synthetic oligonucleotide
cuguggucuucuguccugu

SEQ ID NO: 796307 - RNA, 19 nt, Artificial Sequence
  Description of Artificial Sequence: Synthetic oligonucleotide
augucacauuagggacagu

SEQ ID NO: 796308 - RNA, 19 nt, Artificial Sequence
  Description of Artificial Sequence: Synthetic oligonucleotide
gcaaaccuacaaagagugu

SEQ ID NO: 796309 - RNA, 19 nt, Artificial Sequence
  Description of Artificial Sequence: Synthetic oligonucleotide
ggcgucagaugugcuaagu

SEQ ID NO: 796310 - RNA, 19 nt, Artificial Sequence
  Description of Artificial Sequence: Synthetic oligonucleotide
cagagaggucugcucccgu

SEQ ID NO: 796311 - RNA, 19 nt, Artificial Sequence
  Description of Artificial Sequence: Synthetic oligonucleotide
gggcaccaauaucggccca

SEQ ID NO: 796312 - RNA, 19 nt, Artificial Sequence
  Description of Artificial Sequence: Synthetic oligonucleotide
gccaucagaucagcaccaa

SEQ ID NO: 796313 - RNA, 19 nt, Artificial Sequence
  Description of Artificial Sequence: Synthetic oligonucleotide
ggcaccaauaucggcccau

SEQ ID NO: 796314 - RNA, 19 nt, Artificial Sequence
  Description of Artificial Sequence: Synthetic oligonucleotide
gagcuguagcugccacauu

SEQ ID NO: 796315 - RNA, 19 nt, Artificial Sequence
  Description of Artificial Sequence: Synthetic oligonucleotide
cgcagaauggcagggucaa

SEQ ID NO: 796316 - RNA, 19 nt, Artificial Sequence
  Description of Artificial Sequence: Synthetic oligonucleotide
gcguacuggugccaauauu

SEQ ID NO: 796317 - RNA, 19 nt, Artificial Sequence
  Description of Artificial Sequence: Synthetic oligonucleotide
cugcucccguauagcaauu

SEQ ID NO: 796318 - RNA, 19 nt, Artificial Sequence
  Description of Artificial Sequence: Synthetic oligonucleotide
ggcggcuuggugccauuuu

SEQ ID NO: 796319 - RNA, 19 nt, Artificial Sequence
  Description of Artificial Sequence: Synthetic oligonucleotide
caaugauaucuggccuauu

SEQ ID NO: 796320 - RNA, 19 nt, Artificial Sequence
  Description of Artificial Sequence: Synthetic oligonucleotide
cccaggcauauuucucggu

SEQ ID NO: 796321 - RNA, 19 nt, Artificial Sequence
  Description of Artificial Sequence: Synthetic oligonucleotide
caauggcauggaguccauu

SEQ ID NO: 796322 - RNA, 19 nt, Artificial Sequence
  Description of Artificial Sequence: Synthetic oligonucleotide
gggcgcagaauggcagggu

SEQ ID NO: 796323 - RNA, 19 nt, Artificial Sequence
  Description of Artificial Sequence: Synthetic oligonucleotide
ccucccggcaaagugccau

SEQ ID NO: 796324 - RNA, 19 nt, Artificial Sequence
  Description of Artificial Sequence: Synthetic oligonucleotide
ccaacccauccaucuccgu

SEQ ID NO: 796325 - RNA, 19 nt, Artificial Sequence
  Description of Artificial Sequence: Synthetic oligonucleotide
cacccagcggcggcuuggu

SEQ ID NO: 796326 - RNA, 19 nt, Artificial Sequence
  Description of Artificial Sequence: Synthetic oligonucleotide
gcacgccucagagcaggau

SEQ ID NO: 796327 - RNA, 19 nt, Artificial Sequence
  Description of Artificial Sequence: Synthetic oligonucleotide
gccaggcgucagaugugcu

SEQ ID NO: 796328 - RNA, 19 nt, Artificial Sequence
  Description of Artificial Sequence: Synthetic oligonucleotide
ccaacgagucuggucgguu

SEQ ID NO: 796329 - RNA, 19 nt, Artificial Sequence
  Description of Artificial Sequence: Synthetic oligonucleotide
cggacacuagcaccuguuu

SEQ ID NO: 796330 - RNA, 19 nt, Artificial Sequence
  Description of Artificial Sequence: Synthetic oligonucleotide
cgaggacauaaagcaucua

SEQ ID NO: 796331 - RNA, 19 nt, Artificial Sequence
  Description of Artificial Sequence: Synthetic oligonucleotide
gcggcggcuuggugccauu

SEQ ID NO: 796332 - RNA, 19 nt, Artificial Sequence
  Description of Artificial Sequence: Synthetic oligonucleotide
aacucuauaaacgucacgc

SEQ ID NO: 796333 - RNA, 19 nt, Artificial Sequence
  Description of Artificial Sequence: Synthetic oligonucleotide
uuuacuuaguguaucaggg

SEQ ID NO: 796334 - RNA, 19 nt, Artificial Sequence
  Description of Artificial Sequence: Synthetic oligonucleotide
uuauaaacaucucuccucg

SEQ ID NO: 796335 - RNA, 19 nt, Artificial Sequence
  Description of Artificial Sequence: Synthetic oligonucleotide
aaguuuauugcaaugcccc

SEQ ID NO: 796336 - RNA, 19 nt, Artificial Sequence
  Description of Artificial Sequence: Synthetic oligonucleotide
uacacuaucgcuuaagaca

SEQ ID NO: 796337 - RNA, 19 nt, Artificial Sequence
  Description of Artificial Sequence: Synthetic oligonucleotide
ugaauauaaaaccacugga

SEQ ID NO: 796338 - RNA, 19 nt, Artificial Sequence
  Description of Artificial Sequence: Synthetic oligonucleotide
aguucugaguaauauacac

SEQ ID NO: 796339 - RNA, 19 nt, Artificial Sequence
  Description of Artificial Sequence: Synthetic oligonucleotide
uaucgcuuaagacaaacag

SEQ ID NO: 796340 - RNA, 19 nt, Artificial Sequence
  Description of Artificial Sequence: Synthetic oligonucleotide
uuuuacuuaguguaucagg

SEQ ID NO: 796341 - RNA, 19 nt, Artificial Sequence
  Description of Artificial Sequence: Synthetic oligonucleotide
aaauguaagagccccaacu

SEQ ID NO: 796342 - RNA, 19 nt, Artificial Sequence
  Description of Artificial Sequence: Synthetic oligonucleotide
auaaacgucacgcugaaca

SEQ ID NO: 796343 - RNA, 19 nt, Artificial Sequence
  Description of Artificial Sequence: Synthetic oligonucleotide
aaaccuaaguagcugaucu

SEQ ID NO: 796344 - RNA, 19 nt, Artificial Sequence
  Description of Artificial Sequence: Synthetic oligonucleotide
uacauuacucggaaaacgg

SEQ ID NO: 796345 - RNA, 19 nt, Artificial Sequence
  Description of Artificial Sequence: Synthetic oligonucleotide
aagugagcaccguauauac

SEQ ID NO: 796346 - RNA, 19 nt, Artificial Sequence
  Description of Artificial Sequence: Synthetic oligonucleotide
ugaguaauauacacuaacc

SEQ ID NO: 796347 - RNA, 19 nt, Artificial Sequence
  Description of Artificial Sequence: Synthetic oligonucleotide
caguauaucacuuuauuac

SEQ ID NO: 796348 - RNA, 19 nt, Artificial Sequence
  Description of Artificial Sequence: Synthetic oligonucleotide
guuuauguacccaaaaggg

SEQ ID NO: 796349 - RNA, 19 nt, Artificial Sequence
  Description of Artificial Sequence: Synthetic oligonucleotide
aauguaagagccccaacug

SEQ ID NO: 796350 - RNA, 19 nt, Artificial Sequence
  Description of Artificial Sequence: Synthetic oligonucleotide
gaguaauauacacuaaccc

SEQ ID NO: 796351 - RNA, 19 nt, Artificial Sequence
  Description of Artificial Sequence: Synthetic oligonucleotide
aguaucuuaaguuucauuu

SEQ ID NO: 796352 - RNA, 19 nt, Artificial Sequence
  Description of Artificial Sequence: Synthetic oligonucleotide
uguagcuuaaagcacgagc

SEQ ID NO: 796353 - RNA, 19 nt, Artificial Sequence
  Description of Artificial Sequence: Synthetic oligonucleotide
agaguauguacauuacucg

SEQ ID NO: 796354 - RNA, 19 nt, Artificial Sequence
  Description of Artificial Sequence: Synthetic oligonucleotide
uuagccuaggucuagggag

SEQ ID NO: 796355 - RNA, 19 nt, Artificial Sequence
  Description of Artificial Sequence: Synthetic oligonucleotide
ugaucuaaagugagcaccg

SEQ ID NO: 796356 - RNA, 19 nt, Artificial Sequence
  Description of Artificial Sequence: Synthetic oligonucleotide
uucaacucuauaaacguca

SEQ ID NO: 796357 - RNA, 19 nt, Artificial Sequence
  Description of Artificial Sequence: Synthetic oligonucleotide
gaauauaaaaccacuggag

SEQ ID NO: 796358 - RNA, 19 nt, Artificial Sequence
  Description of Artificial Sequence: Synthetic oligonucleotide
aauaaggcuaugauacagc

SEQ ID NO: 796359 - RNA, 19 nt, Artificial Sequence
  Description of Artificial Sequence: Synthetic oligonucleotide
ucuauaaacgucacgcuga

SEQ ID NO: 796360 - RNA, 19 nt, Artificial Sequence
  Description of Artificial Sequence: Synthetic oligonucleotide
aauauacuuggcgccaugc

SEQ ID NO: 796361 - RNA, 19 nt, Artificial Sequence
  Description of Artificial Sequence: Synthetic oligonucleotide
ucgcuuaagacaaacaggu

SEQ ID NO: 796362 - RNA, 19 nt, Artificial Sequence
  Description of Artificial Sequence: Synthetic oligonucleotide
uuuucuauugcugaacacc

SEQ ID NO: 796363 - RNA, 19 nt, Artificial Sequence
  Description of Artificial Sequence: Synthetic oligonucleotide
gaguauguacauuacucgg

SEQ ID NO: 796364 - RNA, 19 nt, Artificial Sequence
  Description of Artificial Sequence: Synthetic oligonucleotide
guagcuuaaagcacgagcg

SEQ ID NO: 796365 - RNA, 19 nt, Artificial Sequence
  Description of Artificial Sequence: Synthetic oligonucleotide
uaaagcacgagcguuagcc

SEQ ID NO: 796366 - RNA, 19 nt, Artificial Sequence
  Description of Artificial Sequence: Synthetic oligonucleotide
uauacuuggcgccaugcag

SEQ ID NO: 796367 - RNA, 19 nt, Artificial Sequence
  Description of Artificial Sequence: Synthetic oligonucleotide
uuuauguacccaaaagggu

SEQ ID NO: 796368 - RNA, 19 nt, Artificial Sequence
  Description of Artificial Sequence: Synthetic oligonucleotide
uuauuacuggguuacuucc

SEQ ID NO: 796369 - RNA, 19 nt, Artificial Sequence
  Description of Artificial Sequence: Synthetic oligonucleotide
ugcuuaagaauuucaagca

SEQ ID NO: 796370 - RNA, 19 nt, Artificial Sequence
  Description of Artificial Sequence: Synthetic oligonucleotide
acuucaaacaagaaaaucu

SEQ ID NO: 796371 - RNA, 19 nt, Artificial Sequence
  Description of Artificial Sequence: Synthetic oligonucleotide
ugcaaugccccuuauaaac

SEQ ID NO: 796372 - RNA, 19 nt, Artificial Sequence
  Description of Artificial Sequence: Synthetic oligonucleotide
auugcaaugccccuuauaa

SEQ ID NO: 796373 - RNA, 19 nt, Artificial Sequence
  Description of Artificial Sequence: Synthetic oligonucleotide
cuuauaaacaucucuccuc

SEQ ID NO: 796374 - RNA, 19 nt, Artificial Sequence
  Description of Artificial Sequence: Synthetic oligonucleotide
cacguuauugcuuugguuc

SEQ ID NO: 796375 - RNA, 19 nt, Artificial Sequence
  Description of Artificial Sequence: Synthetic oligonucleotide
uuuacacuaucgcuuaaga

SEQ ID NO: 796376 - RNA, 19 nt, Artificial Sequence
  Description of Artificial Sequence: Synthetic oligonucleotide
uaauaaggcuaugauacag

SEQ ID NO: 796377 - RNA, 19 nt, Artificial Sequence
  Description of Artificial Sequence: Synthetic oligonucleotide
uuuauuacuggguuacuuc

SEQ ID NO: 796378 - RNA, 19 nt, Artificial Sequence
  Description of Artificial Sequence: Synthetic oligonucleotide
aucgcuuucaacucuauaa

SEQ ID NO: 796379 - RNA, 19 nt, Artificial Sequence
  Description of Artificial Sequence: Synthetic oligonucleotide
uucagacagacacacuaag

SEQ ID NO: 796380 - RNA, 19 nt, Artificial Sequence
  Description of Artificial Sequence: Synthetic oligonucleotide
ugcgacaaaguuuauugca

SEQ ID NO: 796381 - RNA, 19 nt, Artificial Sequence
  Description of Artificial Sequence: Synthetic oligonucleotide
cugaguaauauacacuaac

SEQ ID NO: 796382 - RNA, 19 nt, Artificial Sequence
  Description of Artificial Sequence: Synthetic oligonucleotide
aucggugugccucagagca

SEQ ID NO: 796383 - RNA, 19 nt, Artificial Sequence
  Description of Artificial Sequence: Synthetic oligonucleotide
ucuagggaguaucuuaagu

SEQ ID NO: 796384 - RNA, 19 nt, Artificial Sequence
  Description of Artificial Sequence: Synthetic oligonucleotide
acaagaguucaccucauca

SEQ ID NO: 796385 - RNA, 19 nt, Artificial Sequence
  Description of Artificial Sequence: Synthetic oligonucleotide
acguuuauguacccaaaag

SEQ ID NO: 796386 - RNA, 19 nt, Artificial Sequence
  Description of Artificial Sequence: Synthetic oligonucleotide
accgguggggcguugauac

SEQ ID NO: 796387 - RNA, 19 nt, Artificial Sequence
  Description of Artificial Sequence: Synthetic oligonucleotide
acccuaaaguagcagagag

SEQ ID NO: 796388 - RNA, 19 nt, Artificial Sequence
  Description of Artificial Sequence: Synthetic oligonucleotide
cauuacucggaaaacggac

SEQ ID NO: 796389 - RNA, 19 nt, Artificial Sequence
  Description of Artificial Sequence: Synthetic oligonucleotide
gugagcaccguauauacac

SEQ ID NO: 796390 - RNA, 19 nt, Artificial Sequence
  Description of Artificial Sequence: Synthetic oligonucleotide
guacauuacucggaaaacg

SEQ ID NO: 796391 - RNA, 19 nt, Artificial Sequence
  Description of Artificial Sequence: Synthetic oligonucleotide
auaaggcuaugauacagcu

SEQ ID NO: 796392 - RNA, 19 nt, Artificial Sequence
  Description of Artificial Sequence: Synthetic oligonucleotide
guuacuucccaucugucac

SEQ ID NO: 796393 - RNA, 19 nt, Artificial Sequence
  Description of Artificial Sequence: Synthetic oligonucleotide
cacuaaguaguuaagacaa

SEQ ID NO: 796394 - RNA, 19 nt, Artificial Sequence
  Description of Artificial Sequence: Synthetic oligonucleotide
caugucgaacucaucgucg

SEQ ID NO: 796395 - RNA, 19 nt, Artificial Sequence
  Description of Artificial Sequence: Synthetic oligonucleotide
cugaucuaaagugagcacc

SEQ ID NO: 796396 - RNA, 19 nt, Artificial Sequence
  Description of Artificial Sequence: Synthetic oligonucleotide
aaccuaaguagcugaucuc

SEQ ID NO: 796397 - RNA, 19 nt, Artificial Sequence
  Description of Artificial Sequence: Synthetic oligonucleotide
uuacucggaaaacggacug

SEQ ID NO: 796398 - RNA, 19 nt, Artificial Sequence
  Description of Artificial Sequence: Synthetic oligonucleotide
acgucaggcgguuagugac

SEQ ID NO: 796399 - RNA, 19 nt, Artificial Sequence
  Description of Artificial Sequence: Synthetic oligonucleotide
uagacgugaccacacaaga

SEQ ID NO: 796400 - RNA, 19 nt, Artificial Sequence
  Description of Artificial Sequence: Synthetic oligonucleotide
acuaucgcuuaagacaaac

SEQ ID NO: 796401 - RNA, 19 nt, Artificial Sequence
  Description of Artificial Sequence: Synthetic oligonucleotide
uauuacuggguuacuuccc

SEQ ID NO: 796402 - RNA, 19 nt, Artificial Sequence
  Description of Artificial Sequence: Synthetic oligonucleotide
ucggaaaacggacugcgac

SEQ ID NO: 796403 - RNA, 19 nt, Artificial Sequence
  Description of Artificial Sequence: Synthetic oligonucleotide
gaaugacauggucagcugc

SEQ ID NO: 796404 - RNA, 19 nt, Artificial Sequence
  Description of Artificial Sequence: Synthetic oligonucleotide
agacacacuaaguaguuaa

SEQ ID NO: 796405 - RNA, 19 nt, Artificial Sequence
  Description of Artificial Sequence: Synthetic oligonucleotide
uuacacuaucgcuuaagac

SEQ ID NO: 796406 - RNA, 19 nt, Artificial Sequence
  Description of Artificial Sequence: Synthetic oligonucleotide
agaccaaacgcacacggcu

SEQ ID NO: 796407 - RNA, 19 nt, Artificial Sequence
  Description of Artificial Sequence: Synthetic oligonucleotide
aucgcuuaagacaaacagg

SEQ ID NO: 796408 - RNA, 19 nt, Artificial Sequence
  Description of Artificial Sequence: Synthetic oligonucleotide
aaagggucaccaaccacac

SEQ ID NO: 796409 - RNA, 19 nt, Artificial Sequence
  Description of Artificial Sequence: Synthetic oligonucleotide
cuagacgugaccacacaag

SEQ ID NO: 796410 - RNA, 19 nt, Artificial Sequence
  Description of Artificial Sequence: Synthetic oligonucleotide
cucuauaaacgucacgcug

SEQ ID NO: 796411 - RNA, 19 nt, Artificial Sequence
  Description of Artificial Sequence: Synthetic oligonucleotide
ccuaaaguagcagagagag

SEQ ID NO: 796412 - RNA, 19 nt, Artificial Sequence
  Description of Artificial Sequence: Synthetic oligonucleotide
acaacuaauaaggcuauga

SEQ ID NO: 796413 - RNA, 19 nt, Artificial Sequence
  Description of Artificial Sequence: Synthetic oligonucleotide
ccuacuucaaacaagaaaa

SEQ ID NO: 796414 - RNA, 19 nt, Artificial Sequence
  Description of Artificial Sequence: Synthetic oligonucleotide
gcuuucaacucuauaaacg

SEQ ID NO: 796415 - RNA, 19 nt, Artificial Sequence
  Description of Artificial Sequence: Synthetic oligonucleotide
cuuggcgccaugcagcugc

SEQ ID NO: 796416 - RNA, 19 nt, Artificial Sequence
  Description of Artificial Sequence: Synthetic oligonucleotide
uggguuacuucccaucugu

SEQ ID NO: 796417 - RNA, 19 nt, Artificial Sequence
  Description of Artificial Sequence: Synthetic oligonucleotide
augucgaacucaucgucgg

SEQ ID NO: 796418 - RNA, 19 nt, Artificial Sequence
  Description of Artificial Sequence: Synthetic oligonucleotide
ugaccgacggcuuccggcg

SEQ ID NO: 796419 - RNA, 19 nt, Artificial Sequence
  Description of Artificial Sequence: Synthetic oligonucleotide
ggugugggcgcucaaaccg

SEQ ID NO: 796420 - RNA, 19 nt, Artificial Sequence
  Description of Artificial Sequence: Synthetic oligonucleotide
ucgcccucuucaaagaucu

SEQ ID NO: 796421 - RNA, 19 nt, Artificial Sequence
  Description of Artificial Sequence: Synthetic oligonucleotide
acgagcguuagccuagguc

SEQ ID NO: 796422 - RNA, 19 nt, Artificial Sequence
  Description of Artificial Sequence: Synthetic oligonucleotide
uguacauuacucggaaaac

SEQ ID NO: 796423 - RNA, 19 nt, Artificial Sequence
  Description of Artificial Sequence: Synthetic oligonucleotide
ucaacucuauaaacgucac

SEQ ID NO: 796424 - RNA, 19 nt, Artificial Sequence
  Description of Artificial Sequence: Synthetic oligonucleotide
ucgcuuucaacucuauaaa

SEQ ID NO: 796425 - RNA, 19 nt, Artificial Sequence
  Description of Artificial Sequence: Synthetic oligonucleotide
acucuuucgagacgucagg

SEQ ID NO: 796426 - RNA, 19 nt, Artificial Sequence
  Description of Artificial Sequence: Synthetic oligonucleotide
auuacuggguuacuuccca

SEQ ID NO: 796427 - RNA, 19 nt, Artificial Sequence
  Description of Artificial Sequence: Synthetic oligonucleotide
aaagcacgagcguuagccu

SEQ ID NO: 796428 - RNA, 19 nt, Artificial Sequence
  Description of Artificial Sequence: Synthetic oligonucleotide
uuacuuaguguaucagggu

SEQ ID NO: 796429 - RNA, 19 nt, Artificial Sequence
  Description of Artificial Sequence: Synthetic oligonucleotide
gucaauguuaacacaagga

SEQ ID NO: 796430 - RNA, 19 nt, Artificial Sequence
  Description of Artificial Sequence: Synthetic oligonucleotide
cguuuauguacccaaaagg

SEQ ID NO: 796431 - RNA, 19 nt, Artificial Sequence
  Description of Artificial Sequence: Synthetic oligonucleotide
cacuuuauuacuggguuac

SEQ ID NO: 796432 - RNA, 19 nt, Artificial Sequence
  Description of Artificial Sequence: Synthetic oligonucleotide
aggugugggcgcucaaacc

SEQ ID NO: 796433 - RNA, 19 nt, Artificial Sequence
  Description of Artificial Sequence: Synthetic oligonucleotide
ugaauggggugacuggccu

SEQ ID NO: 796434 - RNA, 19 nt, Artificial Sequence
  Description of Artificial Sequence: Synthetic oligonucleotide
auucuacaggggaagcugc

SEQ ID NO: 796435 - RNA, 19 nt, Artificial Sequence
  Description of Artificial Sequence: Synthetic oligonucleotide
aaagugagcaccguauaua

SEQ ID NO: 796436 - RNA, 19 nt, Artificial Sequence
  Description of Artificial Sequence: Synthetic oligonucleotide
ucaaaccguggcuagguuc

SEQ ID NO: 796437 - RNA, 19 nt, Artificial Sequence
  Description of Artificial Sequence: Synthetic oligonucleotide
aaacgucacgcugaacaag

SEQ ID NO: 796438 - RNA, 19 nt, Artificial Sequence
  Description of Artificial Sequence: Synthetic oligonucleotide
uguguucuauggcuucacc

SEQ ID NO: 796439 - RNA, 19 nt, Artificial Sequence
  Description of Artificial Sequence: Synthetic oligonucleotide
uuucccuaucaccgguggg

SEQ ID NO: 796440 - RNA, 19 nt, Artificial Sequence
  Description of Artificial Sequence: Synthetic oligonucleotide
acucggaaaacggacugcg

SEQ ID NO: 796441 - RNA, 19 nt, Artificial Sequence
  Description of Artificial Sequence: Synthetic oligonucleotide
ucugaggcuagacgugacc

SEQ ID NO: 796442 - RNA, 19 nt, Artificial Sequence
  Description of Artificial Sequence: Synthetic oligonucleotide
ugagcaccguauauacacc

SEQ ID NO: 796443 - RNA, 19 nt, Artificial Sequence
  Description of Artificial Sequence: Synthetic oligonucleotide
uaagcaaagccgccguccu

SEQ ID NO: 796444 - RNA, 19 nt, Artificial Sequence
  Description of Artificial Sequence: Synthetic oligonucleotide
aacgucacgcugaacaaga

SEQ ID NO: 796445 - RNA, 19 nt, Artificial Sequence
  Description of Artificial Sequence: Synthetic oligonucleotide
uaaacgucacgcugaacaa

SEQ ID NO: 796446 - RNA, 19 nt, Artificial Sequence
  Description of Artificial Sequence: Synthetic oligonucleotide
guacagacguuuauguacc

SEQ ID NO: 796447 - RNA, 19 nt, Artificial Sequence
  Description of Artificial Sequence: Synthetic oligonucleotide
uaguguaucagggucuacu

SEQ ID NO: 796448 - RNA, 19 nt, Artificial Sequence
  Description of Artificial Sequence: Synthetic oligonucleotide
guuucccuaucaccggugg

SEQ ID NO: 796449 - RNA, 19 nt, Artificial Sequence
  Description of Artificial Sequence: Synthetic oligonucleotide
uauaaacaucucuccucgc

SEQ ID NO: 796450 - RNA, 19 nt, Artificial Sequence
  Description of Artificial Sequence: Synthetic oligonucleotide
cuuucaacucuauaaacgu

SEQ ID NO: 796451 - RNA, 19 nt, Artificial Sequence
  Description of Artificial Sequence: Synthetic oligonucleotide
acugcugaucuaaagugag

SEQ ID NO: 796452 - RNA, 19 nt, Artificial Sequence
  Description of Artificial Sequence: Synthetic oligonucleotide
agagucgucaucacugguc

SEQ ID NO: 796453 - RNA, 19 nt, Artificial Sequence
  Description of Artificial Sequence: Synthetic oligonucleotide
cacucuuucgagacgucag

SEQ ID NO: 796454 - RNA, 19 nt, Artificial Sequence
  Description of Artificial Sequence: Synthetic oligonucleotide
aguaagcaaagccgccguc

SEQ ID NO: 796455 - RNA, 19 nt, Artificial Sequence
  Description of Artificial Sequence: Synthetic oligonucleotide
cuaaaguagcagagagagc

SEQ ID NO: 796456 - RNA, 19 nt, Artificial Sequence
  Description of Artificial Sequence: Synthetic oligonucleotide
uccaugucgaacucaucgu

SEQ ID NO: 796457 - RNA, 19 nt, Artificial Sequence
  Description of Artificial Sequence: Synthetic oligonucleotide
uugugcaccgugcccggcg

SEQ ID NO: 796458 - RNA, 19 nt, Artificial Sequence
  Description of Artificial Sequence: Synthetic oligonucleotide
acguuauugcuuugguucu

SEQ ID NO: 796459 - RNA, 19 nt, Artificial Sequence
  Description of Artificial Sequence: Synthetic oligonucleotide
auauacuuggcgccaugca

SEQ ID NO: 796460 - RNA, 19 nt, Artificial Sequence
  Description of Artificial Sequence: Synthetic oligonucleotide
gacgugaccacacaagagu

SEQ ID NO: 796461 - RNA, 19 nt, Artificial Sequence
  Description of Artificial Sequence: Synthetic oligonucleotide
aguauguacauuacucgga

SEQ ID NO: 796462 - RNA, 19 nt, Artificial Sequence
  Description of Artificial Sequence: Synthetic oligonucleotide
agagcauggaguuucccua

SEQ ID NO: 796463 - RNA, 19 nt, Artificial Sequence
  Description of Artificial Sequence: Synthetic oligonucleotide
uagcuuaaagcacgagcgu

SEQ ID NO: 796464 - RNA, 19 nt, Artificial Sequence
  Description of Artificial Sequence: Synthetic oligonucleotide
aacggacugcgacaaaguu

SEQ ID NO: 796465 - RNA, 19 nt, Artificial Sequence
  Description of Artificial Sequence: Synthetic oligonucleotide
auggccaacacugcugauc

SEQ ID NO: 796466 - RNA, 19 nt, Artificial Sequence
  Description of Artificial Sequence: Synthetic oligonucleotide
uuagugaccgacggcuucc

SEQ ID NO: 796467 - RNA, 19 nt, Artificial Sequence
  Description of Artificial Sequence: Synthetic oligonucleotide
ccagaauauacuuggcgcc

SEQ ID NO: 796468 - RNA, 19 nt, Artificial Sequence
  Description of Artificial Sequence: Synthetic oligonucleotide
ccugaauauaaaaccacug

SEQ ID NO: 796469 - RNA, 19 nt, Artificial Sequence
  Description of Artificial Sequence: Synthetic oligonucleotide
cuuaaagcacgagcguuag

SEQ ID NO: 796470 - RNA, 19 nt, Artificial Sequence
  Description of Artificial Sequence: Synthetic oligonucleotide
uuucgagacgucaggcggu

SEQ ID NO: 796471 - RNA, 19 nt, Artificial Sequence
  Description of Artificial Sequence: Synthetic oligonucleotide
guauguacauuacucggaa

SEQ ID NO: 796472 - RNA, 19 nt, Artificial Sequence
  Description of Artificial Sequence: Synthetic oligonucleotide
caacucuauaaacgucacg

SEQ ID NO: 796473 - RNA, 19 nt, Artificial Sequence
  Description of Artificial Sequence: Synthetic oligonucleotide
uaaggcuaugauacagcuc

SEQ ID NO: 796474 - RNA, 19 nt, Artificial Sequence
  Description of Artificial Sequence: Synthetic oligonucleotide
cuagucugaggcuagacgu

SEQ ID NO: 796475 - RNA, 19 nt, Artificial Sequence
  Description of Artificial Sequence: Synthetic oligonucleotide
acuaacccuaaaguagcag

SEQ ID NO: 796476 - RNA, 19 nt, Artificial Sequence
  Description of Artificial Sequence: Synthetic oligonucleotide
acacuaucgcuuaagacaa

SEQ ID NO: 796477 - RNA, 19 nt, Artificial Sequence
  Description of Artificial Sequence: Synthetic oligonucleotide
gaauauacuuggcgccaug

SEQ ID NO: 796478 - RNA, 19 nt, Artificial Sequence
  Description of Artificial Sequence: Synthetic oligonucleotide
auuacucggaaaacggacu

SEQ ID NO: 796479 - RNA, 19 nt, Artificial Sequence
  Description of Artificial Sequence: Synthetic oligonucleotide
uuaaagcacgagcguuagc

SEQ ID NO: 796480 - RNA, 19 nt, Artificial Sequence
  Description of Artificial Sequence: Synthetic oligonucleotide
uauugcaaugccccuuaua

SEQ ID NO: 796481 - RNA, 19 nt, Artificial Sequence
  Description of Artificial Sequence: Synthetic oligonucleotide
uucuacccugaagagacac

SEQ ID NO: 796482 - RNA, 19 nt, Artificial Sequence
  Description of Artificial Sequence: Synthetic oligonucleotide
cuaggcuugcucuggccgc

SEQ ID NO: 796483 - RNA, 19 nt, Artificial Sequence
  Description of Artificial Sequence: Synthetic oligonucleotide
uauguacauuacucggaaa

SEQ ID NO: 796484 - RNA, 19 nt, Artificial Sequence
  Description of Artificial Sequence: Synthetic oligonucleotide
ucuacccugaagagacacu

SEQ ID NO: 796485 - RNA, 19 nt, Artificial Sequence
  Description of Artificial Sequence: Synthetic oligonucleotide
ucgaacucaucgucggacu

SEQ ID NO: 796486 - RNA, 19 nt, Artificial Sequence
  Description of Artificial Sequence: Synthetic oligonucleotide
ugguuucuggcccuuugaa

SEQ ID NO: 796487 - RNA, 19 nt, Artificial Sequence
  Description of Artificial Sequence: Synthetic oligonucleotide
aacccuaaaguagcagaga

SEQ ID NO: 796488 - RNA, 19 nt, Artificial Sequence
  Description of Artificial Sequence: Synthetic oligonucleotide
accugaauauaaaaccacu

SEQ ID NO: 796489 - RNA, 19 nt, Artificial Sequence
  Description of Artificial Sequence: Synthetic oligonucleotide
ucugacggggucccgccug

SEQ ID NO: 796490 - RNA, 19 nt, Artificial Sequence
  Description of Artificial Sequence: Synthetic oligonucleotide
uucaucgcuuucaacucua

SEQ ID NO: 796491 - RNA, 19 nt, Artificial Sequence
  Description of Artificial Sequence: Synthetic oligonucleotide
ucguccaugucgaacucau

SEQ ID NO: 796492 - RNA, 19 nt, Artificial Sequence
  Description of Artificial Sequence: Synthetic oligonucleotide
aagcacgagcguuagccua

SEQ ID NO: 796493 - RNA, 19 nt, Artificial Sequence
  Description of Artificial Sequence: Synthetic oligonucleotide
gguuucuggcccuuugaag

SEQ ID NO: 796494 - RNA, 19 nt, Artificial Sequence
  Description of Artificial Sequence: Synthetic oligonucleotide
caaaagggucaccaaccac

SEQ ID NO: 796495 - RNA, 19 nt, Artificial Sequence
  Description of Artificial Sequence: Synthetic oligonucleotide
agcauggaguuucccuauc

SEQ ID NO: 796496 - RNA, 19 nt, Artificial Sequence
  Description of Artificial Sequence: Synthetic oligonucleotide
ucacgcugaacaagacugu

SEQ ID NO: 796497 - RNA, 19 nt, Artificial Sequence
  Description of Artificial Sequence: Synthetic oligonucleotide
gugaccgacggcuuccggc

SEQ ID NO: 796498 - RNA, 19 nt, Artificial Sequence
  Description of Artificial Sequence: Synthetic oligonucleotide
uuuccugcggugguagcgc

SEQ ID NO: 796499 - RNA, 19 nt, Artificial Sequence
  Description of Artificial Sequence: Synthetic oligonucleotide
uugcaaugccccuuauaaa

SEQ ID NO: 796500 - RNA, 19 nt, Artificial Sequence
  Description of Artificial Sequence: Synthetic oligonucleotide
cccuuauaaacaucucucc

SEQ ID NO: 796501 - RNA, 19 nt, Artificial Sequence
  Description of Artificial Sequence: Synthetic oligonucleotide
uacagacguuuauguaccc

SEQ ID NO: 796502 - RNA, 19 nt, Artificial Sequence
  Description of Artificial Sequence: Synthetic oligonucleotide
accacguuauugcuuuggu

SEQ ID NO: 796503 - RNA, 19 nt, Artificial Sequence
  Description of Artificial Sequence: Synthetic oligonucleotide
uccucuagggguguacaga

SEQ ID NO: 796504 - RNA, 19 nt, Artificial Sequence
  Description of Artificial Sequence: Synthetic oligonucleotide
uuucuggcccuuugaagau

SEQ ID NO: 796505 - RNA, 19 nt, Artificial Sequence
  Description of Artificial Sequence: Synthetic oligonucleotide
ugaggcuagacgugaccac

SEQ ID NO: 796506 - RNA, 19 nt, Artificial Sequence
  Description of Artificial Sequence: Synthetic oligonucleotide
accguauauacaccugaau

SEQ ID NO: 796507 - RNA, 19 nt, Artificial Sequence
  Description of Artificial Sequence: Synthetic oligonucleotide
cucuuucgagacgucaggc

SEQ ID NO: 796508 - RNA, 19 nt, Artificial Sequence
  Description of Artificial Sequence: Synthetic oligonucleotide
accuucacgcuggagaaca

SEQ ID NO: 796509 - RNA, 19 nt, Artificial Sequence
  Description of Artificial Sequence: Synthetic oligonucleotide
ggcgguuagugaccgacgg

SEQ ID NO: 796510 - RNA, 19 nt, Artificial Sequence
  Description of Artificial Sequence: Synthetic oligonucleotide
guacccaaaagggucacca

SEQ ID NO: 796511 - RNA, 19 nt, Artificial Sequence
  Description of Artificial Sequence: Synthetic oligonucleotide
cuucaaacaagaaaaucuu

SEQ ID NO: 796512 - RNA, 19 nt, Artificial Sequence
  Description of Artificial Sequence: Synthetic oligonucleotide
uaagagccccaacuguuuu

SEQ ID NO: 796513 - RNA, 19 nt, Artificial Sequence
  Description of Artificial Sequence: Synthetic oligonucleotide
uggagaccaaacgcacacg

SEQ ID NO: 796514 - RNA, 19 nt, Artificial Sequence
  Description of Artificial Sequence: Synthetic oligonucleotide
cucuagggguguacagacg

SEQ ID NO: 796515 - RNA, 19 nt, Artificial Sequence
  Description of Artificial Sequence: Synthetic oligonucleotide
auauacaccugaauauaaa

SEQ ID NO: 796516 - RNA, 19 nt, Artificial Sequence
  Description of Artificial Sequence: Synthetic oligonucleotide
ggacucgcccucuucaaag

SEQ ID NO: 796517 - RNA, 19 nt, Artificial Sequence
  Description of Artificial Sequence: Synthetic oligonucleotide
gaccaaacgcacacggcug

SEQ ID NO: 796518 - RNA, 19 nt, Artificial Sequence
  Description of Artificial Sequence: Synthetic oligonucleotide
cuaucgcuuaagacaaaca

SEQ ID NO: 796519 - RNA, 19 nt, Artificial Sequence
  Description of Artificial Sequence: Synthetic oligonucleotide
agacugguagcuugcuccu

SEQ ID NO: 796520 - RNA, 19 nt, Artificial Sequence
  Description of Artificial Sequence: Synthetic oligonucleotide
cagacguuuauguacccaa

SEQ ID NO: 796521 - RNA, 19 nt, Artificial Sequence
  Description of Artificial Sequence: Synthetic oligonucleotide
gucuagggaguaucuuaag

SEQ ID NO: 796522 - RNA, 19 nt, Artificial Sequence
  Description of Artificial Sequence: Synthetic oligonucleotide
acauuacucggaaaacgga

SEQ ID NO: 796523 - RNA, 19 nt, Artificial Sequence
  Description of Artificial Sequence: Synthetic oligonucleotide
uacucggaaaacggacugc

SEQ ID NO: 796524 - RNA, 19 nt, Artificial Sequence
  Description of Artificial Sequence: Synthetic oligonucleotide
agacgugaccacacaagag

SEQ ID NO: 796525 - RNA, 19 nt, Artificial Sequence
  Description of Artificial Sequence: Synthetic oligonucleotide
ugucacgccggugccauga

SEQ ID NO: 796526 - RNA, 19 nt, Artificial Sequence
  Description of Artificial Sequence: Synthetic oligonucleotide
gacgucaggcgguuaguga

SEQ ID NO: 796527 - RNA, 19 nt, Artificial Sequence
  Description of Artificial Sequence: Synthetic oligonucleotide
ggggcguugauacacaucu

SEQ ID NO: 796528 - RNA, 19 nt, Artificial Sequence
  Description of Artificial Sequence: Synthetic oligonucleotide
cuacaggggaagcugccuc

SEQ ID NO: 796529 - RNA, 19 nt, Artificial Sequence
  Description of Artificial Sequence: Synthetic oligonucleotide
caccacguuauugcuuugg

SEQ ID NO: 796530 - RNA, 19 nt, Artificial Sequence
  Description of Artificial Sequence: Synthetic oligonucleotide
ucccgccugagccacucug

SEQ ID NO: 796531 - RNA, 19 nt, Artificial Sequence
  Description of Artificial Sequence: Synthetic oligonucleotide
ugcuaggcuugcucuggcc

SEQ ID NO: 796532 - RNA, 19 nt, Artificial Sequence
  Description of Artificial Sequence: Synthetic oligonucleotide
agcuuaaagcacgagcguu

SEQ ID NO: 796533 - RNA, 19 nt, Artificial Sequence
  Description of Artificial Sequence: Synthetic oligonucleotide
uucugcggguccagaauau

SEQ ID NO: 796534 - RNA, 19 nt, Artificial Sequence
  Description of Artificial Sequence: Synthetic oligonucleotide
ugcccgcucugaaugacau

SEQ ID NO: 796535 - RNA, 19 nt, Artificial Sequence
  Description of Artificial Sequence: Synthetic oligonucleotide
ggcgaagcaauguucaucu

SEQ ID NO: 796536 - RNA, 19 nt, Artificial Sequence
  Description of Artificial Sequence: Synthetic oligonucleotide
cucgcccucuucaaagauc

SEQ ID NO: 796537 - RNA, 19 nt, Artificial Sequence
  Description of Artificial Sequence: Synthetic oligonucleotide
acagacguuuauguaccca

SEQ ID NO: 796538 - RNA, 19 nt, Artificial Sequence
  Description of Artificial Sequence: Synthetic oligonucleotide
caaaccguggcuagguucu

SEQ ID NO: 796539 - RNA, 19 nt, Artificial Sequence
  Description of Artificial Sequence: Synthetic oligonucleotide
gcuaugauacagcucugca

SEQ ID NO: 796540 - RNA, 19 nt, Artificial Sequence
  Description of Artificial Sequence: Synthetic oligonucleotide
acgcugaacaagacuguag

SEQ ID NO: 796541 - RNA, 19 nt, Artificial Sequence
  Description of Artificial Sequence: Synthetic oligonucleotide
agcacgagcguuagccuag

SEQ ID NO: 796542 - RNA, 19 nt, Artificial Sequence
  Description of Artificial Sequence: Synthetic oligonucleotide
agugaccgacggcuuccgg

SEQ ID NO: 796543 - RNA, 19 nt, Artificial Sequence
  Description of Artificial Sequence: Synthetic oligonucleotide
acauaccugucaauguuaa

SEQ ID NO: 796544 - RNA, 19 nt, Artificial Sequence
  Description of Artificial Sequence: Synthetic oligonucleotide
caggcgguuagugaccgac

SEQ ID NO: 796545 - RNA, 19 nt, Artificial Sequence
  Description of Artificial Sequence: Synthetic oligonucleotide
gacucgcccucuucaaaga

SEQ ID NO: 796546 - RNA, 19 nt, Artificial Sequence
  Description of Artificial Sequence: Synthetic oligonucleotide
uagggguguacagacguuu

SEQ ID NO: 796547 - RNA, 19 nt, Artificial Sequence
  Description of Artificial Sequence: Synthetic oligonucleotide
ccucuagggguguacagac

SEQ ID NO: 796548 - RNA, 19 nt, Artificial Sequence
  Description of Artificial Sequence: Synthetic oligonucleotide
cuauaaacgucacgcugaa

SEQ ID NO: 796549 - RNA, 19 nt, Artificial Sequence
  Description of Artificial Sequence: Synthetic oligonucleotide
agccuaggcacaggcuuac

SEQ ID NO: 796550 - RNA, 19 nt, Artificial Sequence
  Description of Artificial Sequence: Synthetic oligonucleotide
caccucaucaccucacaaa

SEQ ID NO: 796551 - RNA, 19 nt, Artificial Sequence
  Description of Artificial Sequence: Synthetic oligonucleotide
cuuccggcgcagcaccacc

SEQ ID NO: 796552 - RNA, 19 nt, Artificial Sequence
  Description of Artificial Sequence: Synthetic oligonucleotide
uauaaacgucacgcugaac

SEQ ID NO: 796553 - RNA, 19 nt, Artificial Sequence
  Description of Artificial Sequence: Synthetic oligonucleotide
caacuaauaaggcuaugau

SEQ ID NO: 796554 - RNA, 19 nt, Artificial Sequence
  Description of Artificial Sequence: Synthetic oligonucleotide
cuggguuacuucccaucug

SEQ ID NO: 796555 - RNA, 19 nt, Artificial Sequence
  Description of Artificial Sequence: Synthetic oligonucleotide
cugaggcuagacgugacca

SEQ ID NO: 796556 - RNA, 19 nt, Artificial Sequence
  Description of Artificial Sequence: Synthetic oligonucleotide
gcugaucuaaagugagcac

SEQ ID NO: 796557 - RNA, 19 nt, Artificial Sequence
  Description of Artificial Sequence: Synthetic oligonucleotide
cacauaccugucaauguua

SEQ ID NO: 796558 - RNA, 19 nt, Artificial Sequence
  Description of Artificial Sequence: Synthetic oligonucleotide
ucaucgcuuucaacucuau

SEQ ID NO: 796559 - RNA, 19 nt, Artificial Sequence
  Description of Artificial Sequence: Synthetic oligonucleotide
uuggcgccaugcagcugcg

SEQ ID NO: 796560 - RNA, 19 nt, Artificial Sequence
  Description of Artificial Sequence: Synthetic oligonucleotide
gaguaagcaaagccgccgu

SEQ ID NO: 796561 - RNA, 19 nt, Artificial Sequence
  Description of Artificial Sequence: Synthetic oligonucleotide
ugccccuuauaaacaucuc

SEQ ID NO: 796562 - RNA, 19 nt, Artificial Sequence
  Description of Artificial Sequence: Synthetic oligonucleotide
acacaacuaauaaggcuau

SEQ ID NO: 796563 - RNA, 19 nt, Artificial Sequence
  Description of Artificial Sequence: Synthetic oligonucleotide
ccguauauacaccugaaua

SEQ ID NO: 796564 - RNA, 19 nt, Artificial Sequence
  Description of Artificial Sequence: Synthetic oligonucleotide
uggcccuuugaagaucccu

SEQ ID NO: 796565 - RNA, 19 nt, Artificial Sequence
  Description of Artificial Sequence: Synthetic oligonucleotide
acuuuauuacuggguuacu

SEQ ID NO: 796566 - RNA, 19 nt, Artificial Sequence
  Description of Artificial Sequence: Synthetic oligonucleotide
ucucgggcaucggugugcc

SEQ ID NO: 796567 - RNA, 19 nt, Artificial Sequence
  Description of Artificial Sequence: Synthetic oligonucleotide
agcguuagccuaggucuag

SEQ ID NO: 796568 - RNA, 19 nt, Artificial Sequence
  Description of Artificial Sequence: Synthetic oligonucleotide
uaaaaccacuggagaccaa

SEQ ID NO: 796569 - RNA, 19 nt, Artificial Sequence
  Description of Artificial Sequence: Synthetic oligonucleotide
cugagagccacacugguuu

SEQ ID NO: 796570 - RNA, 19 nt, Artificial Sequence
  Description of Artificial Sequence: Synthetic oligonucleotide
acucgcccucuucaaagau

SEQ ID NO: 796571 - RNA, 19 nt, Artificial Sequence
  Description of Artificial Sequence: Synthetic oligonucleotide
acaaaccuaaguagcugau

SEQ ID NO: 796572 - RNA, 19 nt, Artificial Sequence
  Description of Artificial Sequence: Synthetic oligonucleotide
agcuccgcgccacggggag

SEQ ID NO: 796573 - RNA, 19 nt, Artificial Sequence
  Description of Artificial Sequence: Synthetic oligonucleotide
ggcuaugauacagcucugc

SEQ ID NO: 796574 - RNA, 19 nt, Artificial Sequence
  Description of Artificial Sequence: Synthetic oligonucleotide
ugcccggcgaagcaauguu

SEQ ID NO: 796575 - RNA, 19 nt, Artificial Sequence
  Description of Artificial Sequence: Synthetic oligonucleotide
aggagccugccgcaucuga

SEQ ID NO: 796576 - RNA, 19 nt, Artificial Sequence
  Description of Artificial Sequence: Synthetic oligonucleotide
cuucugcggguccagaaua

SEQ ID NO: 796577 - RNA, 19 nt, Artificial Sequence
  Description of Artificial Sequence: Synthetic oligonucleotide
ggcccuuugaagaucccug

SEQ ID NO: 796578 - RNA, 19 nt, Artificial Sequence
  Description of Artificial Sequence: Synthetic oligonucleotide
ccauguggacuucuccugc

SEQ ID NO: 796579 - RNA, 19 nt, Artificial Sequence
  Description of Artificial Sequence: Synthetic oligonucleotide
gacggggucccgccugagc

SEQ ID NO: 796580 - RNA, 19 nt, Artificial Sequence
  Description of Artificial Sequence: Synthetic oligonucleotide
gcccuuugaagaucccugc

SEQ ID NO: 796581 - RNA, 19 nt, Artificial Sequence
  Description of Artificial Sequence: Synthetic oligonucleotide
agugagcaccguauauaca

SEQ ID NO: 796582 - RNA, 19 nt, Artificial Sequence
  Description of Artificial Sequence: Synthetic oligonucleotide
uuaguguaucagggucuac

SEQ ID NO: 796583 - RNA, 19 nt, Artificial Sequence
  Description of Artificial Sequence: Synthetic oligonucleotide
cacuugcggccacuggcag

SEQ ID NO: 796584 - RNA, 19 nt, Artificial Sequence
  Description of Artificial Sequence: Synthetic oligonucleotide
guaucagggucuacuggga

SEQ ID NO: 796585 - RNA, 19 nt, Artificial Sequence
  Description of Artificial Sequence: Synthetic oligonucleotide
gaacaagacuguagcuuaa

SEQ ID NO: 796586 - RNA, 19 nt, Artificial Sequence
  Description of Artificial Sequence: Synthetic oligonucleotide
cuguagcuuaaagcacgag

SEQ ID NO: 796587 - RNA, 19 nt, Artificial Sequence
  Description of Artificial Sequence: Synthetic oligonucleotide
acgucacgcugaacaagac

SEQ ID NO: 796588 - RNA, 19 nt, Artificial Sequence
  Description of Artificial Sequence: Synthetic oligonucleotide
ucacgccggugccaugagu

SEQ ID NO: 796589 - RNA, 19 nt, Artificial Sequence
  Description of Artificial Sequence: Synthetic oligonucleotide
gcggugguagcgcuugugc

SEQ ID NO: 796590 - RNA, 19 nt, Artificial Sequence
  Description of Artificial Sequence: Synthetic oligonucleotide
cgcuuucaacucuauaaac

SEQ ID NO: 796591 - RNA, 19 nt, Artificial Sequence
  Description of Artificial Sequence: Synthetic oligonucleotide
ggugcuagucugaggcuag

SEQ ID NO: 796592 - RNA, 19 nt, Artificial Sequence
  Description of Artificial Sequence: Synthetic oligonucleotide
aggugcuagucugaggcua

SEQ ID NO: 796593 - RNA, 19 nt, Artificial Sequence
  Description of Artificial Sequence: Synthetic oligonucleotide
auguuaacacaaggagaaa

SEQ ID NO: 796594 - RNA, 19 nt, Artificial Sequence
  Description of Artificial Sequence: Synthetic oligonucleotide
cuaggucuagggaguaucu

SEQ ID NO: 796595 - RNA, 19 nt, Artificial Sequence
  Description of Artificial Sequence: Synthetic oligonucleotide
uaggucuagggaguaucuu

SEQ ID NO: 796596 - RNA, 19 nt, Artificial Sequence
  Description of Artificial Sequence: Synthetic oligonucleotide
aggcgguuagugaccgacg

SEQ ID NO: 796597 - RNA, 19 nt, Artificial Sequence
  Description of Artificial Sequence: Synthetic oligonucleotide
cuuaguguaucagggucua

SEQ ID NO: 796598 - RNA, 19 nt, Artificial Sequence
  Description of Artificial Sequence: Synthetic oligonucleotide
uuccugcggugguagcgcu

SEQ ID NO: 796599 - RNA, 19 nt, Artificial Sequence
  Description of Artificial Sequence: Synthetic oligonucleotide
acgugaccacacaagagua

SEQ ID NO: 796600 - RNA, 19 nt, Artificial Sequence
  Description of Artificial Sequence: Synthetic oligonucleotide
gcuagacgugaccacacaa

SEQ ID NO: 796601 - RNA, 19 nt, Artificial Sequence
  Description of Artificial Sequence: Synthetic oligonucleotide
agacguuuauguacccaaa

SEQ ID NO: 796602 - RNA, 19 nt, Artificial Sequence
  Description of Artificial Sequence: Synthetic oligonucleotide
gccugcggcucucagaguc

SEQ ID NO: 796603 - RNA, 19 nt, Artificial Sequence
  Description of Artificial Sequence: Synthetic oligonucleotide
ccgccugcggcucucagag

SEQ ID NO: 796604 - RNA, 19 nt, Artificial Sequence
  Description of Artificial Sequence: Synthetic oligonucleotide
ccacuggagaccaaacgca

SEQ ID NO: 796605 - RNA, 19 nt, Artificial Sequence
  Description of Artificial Sequence: Synthetic oligonucleotide
cucggaaaacggacugcga

SEQ ID NO: 796606 - RNA, 19 nt, Artificial Sequence
  Description of Artificial Sequence: Synthetic oligonucleotide
cuuuauuacuggguuacuu

SEQ ID NO: 796607 - RNA, 19 nt, Artificial Sequence
  Description of Artificial Sequence: Synthetic oligonucleotide
ggucuagggaguaucuuaa

SEQ ID NO: 796608 - RNA, 19 nt, Artificial Sequence
  Description of Artificial Sequence: Synthetic oligonucleotide
ucugcggguccagaauaua

SEQ ID NO: 796609 - RNA, 19 nt, Artificial Sequence
  Description of Artificial Sequence: Synthetic oligonucleotide
gaaagacugguagcuugcu

SEQ ID NO: 796610 - RNA, 19 nt, Artificial Sequence
  Description of Artificial Sequence: Synthetic oligonucleotide
ccuuauaaacaucucuccu

SEQ ID NO: 796611 - RNA, 19 nt, Artificial Sequence
  Description of Artificial Sequence: Synthetic oligonucleotide
ccuaggucuagggaguauc

SEQ ID NO: 796612 - RNA, 19 nt, Artificial Sequence
  Description of Artificial Sequence: Synthetic oligonucleotide
cgagcguuagccuaggucu

SEQ ID NO: 796613 - RNA, 19 nt, Artificial Sequence
  Description of Artificial Sequence: Synthetic oligonucleotide
cggacugcgacaaaguuua

SEQ ID NO: 796614 - RNA, 19 nt, Artificial Sequence
  Description of Artificial Sequence: Synthetic oligonucleotide
acugcccgguggccccucg

SEQ ID NO: 796615 - RNA, 19 nt, Artificial Sequence
  Description of Artificial Sequence: Synthetic oligonucleotide
cuugggcggcagguucucg

SEQ ID NO: 796616 - RNA, 19 nt, Artificial Sequence
  Description of Artificial Sequence: Synthetic oligonucleotide
gaccgacggcuuccggcgc

SEQ ID NO: 796617 - RNA, 19 nt, Artificial Sequence
  Description of Artificial Sequence: Synthetic oligonucleotide
gcuagguucuuggugcaca

SEQ ID NO: 796618 - RNA, 19 nt, Artificial Sequence
  Description of Artificial Sequence: Synthetic oligonucleotide
ucgcccucacugcccggug

SEQ ID NO: 796619 - RNA, 19 nt, Artificial Sequence
  Description of Artificial Sequence: Synthetic oligonucleotide
uucgagacgucaggcgguu

SEQ ID NO: 796620 - RNA, 19 nt, Artificial Sequence
  Description of Artificial Sequence: Synthetic oligonucleotide
gucacgccggugccaugag

SEQ ID NO: 796621 - RNA, 19 nt, Artificial Sequence
  Description of Artificial Sequence: Synthetic oligonucleotide
ugcugucacgccggugcca

SEQ ID NO: 796622 - RNA, 19 nt, Artificial Sequence
  Description of Artificial Sequence: Synthetic oligonucleotide
gggugacuggccugugccc

SEQ ID NO: 796623 - RNA, 19 nt, Artificial Sequence
  Description of Artificial Sequence: Synthetic oligonucleotide
gaucuaaagugagcaccgu

SEQ ID NO: 796624 - RNA, 19 nt, Artificial Sequence
  Description of Artificial Sequence: Synthetic oligonucleotide
cuucuacccugaagagaca

SEQ ID NO: 796625 - RNA, 19 nt, Artificial Sequence
  Description of Artificial Sequence: Synthetic oligonucleotide
cuugcucuggccgccgcca

SEQ ID NO: 796626 - RNA, 19 nt, Artificial Sequence
  Description of Artificial Sequence: Synthetic oligonucleotide
gcuuaaagcacgagcguua

SEQ ID NO: 796627 - RNA, 19 nt, Artificial Sequence
  Description of Artificial Sequence: Synthetic oligonucleotide
gcgguuagugaccgacggc

SEQ ID NO: 796628 - RNA, 19 nt, Artificial Sequence
  Description of Artificial Sequence: Synthetic oligonucleotide
gggucuacugggaaguucu

SEQ ID NO: 796629 - RNA, 19 nt, Artificial Sequence
  Description of Artificial Sequence: Synthetic oligonucleotide
aagcuccgcgccacgggga

SEQ ID NO: 796630 - RNA, 19 nt, Artificial Sequence
  Description of Artificial Sequence: Synthetic oligonucleotide
caucgcuuucaacucuaua

SEQ ID NO: 796631 - RNA, 19 nt, Artificial Sequence
  Description of Artificial Sequence: Synthetic oligonucleotide
cccgccugagccacucugg

SEQ ID NO: 796632 - RNA, 19 nt, Artificial Sequence
  Description of Artificial Sequence: Synthetic oligonucleotide
acgccggugccaugaguaa

SEQ ID NO: 796633 - RNA, 19 nt, Artificial Sequence
  Description of Artificial Sequence: Synthetic oligonucleotide
gcgcucaaaccguggcuag

SEQ ID NO: 796634 - RNA, 19 nt, Artificial Sequence
  Description of Artificial Sequence: Synthetic oligonucleotide
cccuaaaguagcagagaga

SEQ ID NO: 796635 - RNA, 19 nt, Artificial Sequence
  Description of Artificial Sequence: Synthetic oligonucleotide
cccugcuuaagaauuucaa

SEQ ID NO: 796636 - RNA, 19 nt, Artificial Sequence
  Description of Artificial Sequence: Synthetic oligonucleotide
caccuacuucaaacaagaa

SEQ ID NO: 796637 - RNA, 19 nt, Artificial Sequence
  Description of Artificial Sequence: Synthetic oligonucleotide
gcugcgagccuaggcacag

SEQ ID NO: 796638 - RNA, 19 nt, Artificial Sequence
  Description of Artificial Sequence: Synthetic oligonucleotide
cugccucacaaaccuaagu

SEQ ID NO: 796639 - RNA, 19 nt, Artificial Sequence
  Description of Artificial Sequence: Synthetic oligonucleotide
caucgcccucacugcccgg

SEQ ID NO: 796640 - RNA, 19 nt, Artificial Sequence
  Description of Artificial Sequence: Synthetic oligonucleotide
cccggcgaagcaauguuca

SEQ ID NO: 796641 - RNA, 19 nt, Artificial Sequence
  Description of Artificial Sequence: Synthetic oligonucleotide
uugcucuggccgccgccau

SEQ ID NO: 796642 - RNA, 19 nt, Artificial Sequence
  Description of Artificial Sequence: Synthetic oligonucleotide
cugcccgcucugaaugaca

SEQ ID NO: 796643 - RNA, 19 nt, Artificial Sequence
  Description of Artificial Sequence: Synthetic oligonucleotide
gacugcgacaaaguuuauu

SEQ ID NO: 796644 - RNA, 19 nt, Artificial Sequence
  Description of Artificial Sequence: Synthetic oligonucleotide
cucguccaugucgaacuca

SEQ ID NO: 796645 - RNA, 19 nt, Artificial Sequence
  Description of Artificial Sequence: Synthetic oligonucleotide
gcguuagccuaggucuagg

SEQ ID NO: 796646 - RNA, 19 nt, Artificial Sequence
  Description of Artificial Sequence: Synthetic oligonucleotide
agggguguacagacguuua

SEQ ID NO: 796647 - RNA, 19 nt, Artificial Sequence
  Description of Artificial Sequence: Synthetic oligonucleotide
gagcguuagccuaggucua

SEQ ID NO: 796648 - RNA, 19 nt, Artificial Sequence
  Description of Artificial Sequence: Synthetic oligonucleotide
ggcuagacgugaccacaca

SEQ ID NO: 796649 - RNA, 19 nt, Artificial Sequence
  Description of Artificial Sequence: Synthetic oligonucleotide
gccgcaucugacggggucc

SEQ ID NO: 796650 - RNA, 19 nt, Artificial Sequence
  Description of Artificial Sequence: Synthetic oligonucleotide
agcugcgagccuaggcaca

SEQ ID NO: 796651 - RNA, 19 nt, Artificial Sequence
  Description of Artificial Sequence: Synthetic oligonucleotide
gcacucuuucgagacguca

SEQ ID NO: 796652 - RNA, 19 nt, Artificial Sequence
  Description of Artificial Sequence: Synthetic oligonucleotide
cccuaucaccgguggggcg

SEQ ID NO: 796653 - RNA, 19 nt, Artificial Sequence
  Description of Artificial Sequence: Synthetic oligonucleotide
aaaccguggcuagguucuu

SEQ ID NO: 796654 - RNA, 19 nt, Artificial Sequence
  Description of Artificial Sequence: Synthetic oligonucleotide
guagcugaucucaccuacu

SEQ ID NO: 796655 - RNA, 19 nt, Artificial Sequence
  Description of Artificial Sequence: Synthetic oligonucleotide
uccugcggugguagcgcuu

SEQ ID NO: 796656 - RNA, 19 nt, Artificial Sequence
  Description of Artificial Sequence: Synthetic oligonucleotide
guaagagccccaacuguuu

SEQ ID NO: 796657 - RNA, 19 nt, Artificial Sequence
  Description of Artificial Sequence: Synthetic oligonucleotide
ugacggggucccgccugag

SEQ ID NO: 796658 - RNA, 19 nt, Artificial Sequence
  Description of Artificial Sequence: Synthetic oligonucleotide
aucgucggacucgcccucu

SEQ ID NO: 796659 - RNA, 19 nt, Artificial Sequence
  Description of Artificial Sequence: Synthetic oligonucleotide
cagacacacuaaguaguua

SEQ ID NO: 796660 - RNA, 19 nt, Artificial Sequence
  Description of Artificial Sequence: Synthetic oligonucleotide
gccugccgcaucugacggg

SEQ ID NO: 796661 - RNA, 19 nt, Artificial Sequence
  Description of Artificial Sequence: Synthetic oligonucleotide
ucgucggacucgcccucuu

SEQ ID NO: 796662 - RNA, 19 nt, Artificial Sequence
  Description of Artificial Sequence: Synthetic oligonucleotide
cacaaaagauugucuccuu

SEQ ID NO: 796663 - RNA, 19 nt, Artificial Sequence
  Description of Artificial Sequence: Synthetic oligonucleotide
acuucccaucugucacaua

SEQ ID NO: 796664 - RNA, 19 nt, Artificial Sequence
  Description of Artificial Sequence: Synthetic oligonucleotide
gagacgucaggcgguuagu

SEQ ID NO: 796665 - RNA, 19 nt, Artificial Sequence
  Description of Artificial Sequence: Synthetic oligonucleotide
ccgccaucgcccucacugc

SEQ ID NO: 796666 - RNA, 19 nt, Artificial Sequence
  Description of Artificial Sequence: Synthetic oligonucleotide
cacuaucgcuuaagacaaa

SEQ ID NO: 796667 - RNA, 19 nt, Artificial Sequence
  Description of Artificial Sequence: Synthetic oligonucleotide
cugacggggucccgccuga

SEQ ID NO: 796668 - RNA, 19 nt, Artificial Sequence
  Description of Artificial Sequence: Synthetic oligonucleotide
ggguuacuucccaucuguc

SEQ ID NO: 796669 - RNA, 19 nt, Artificial Sequence
  Description of Artificial Sequence: Synthetic oligonucleotide
cugcccgguggccccucgc

SEQ ID NO: 796670 - RNA, 19 nt, Artificial Sequence
  Description of Artificial Sequence: Synthetic oligonucleotide
ccccucgcugcugucacgc

SEQ ID NO: 796671 - RNA, 19 nt, Artificial Sequence
  Description of Artificial Sequence: Synthetic oligonucleotide
gguggggcguugauacaca

SEQ ID NO: 796672 - RNA, 19 nt, Artificial Sequence
  Description of Artificial Sequence: Synthetic oligonucleotide
gcacgagcguuagccuagg

SEQ ID NO: 796673 - RNA, 19 nt, Artificial Sequence
  Description of Artificial Sequence: Synthetic oligonucleotide
gccgccguccuuguccagc

SEQ ID NO: 796674 - RNA, 19 nt, Artificial Sequence
  Description of Artificial Sequence: Synthetic oligonucleotide
cugucacauaccugucaau

SEQ ID NO: 796675 - RNA, 19 nt, Artificial Sequence
  Description of Artificial Sequence: Synthetic oligonucleotide
gcucaaaccguggcuaggu

SEQ ID NO: 796676 - RNA, 19 nt, Artificial Sequence
  Description of Artificial Sequence: Synthetic oligonucleotide
cugucacgccggugccaug

SEQ ID NO: 796677 - RNA, 19 nt, Artificial Sequence
  Description of Artificial Sequence: Synthetic oligonucleotide
caccgugcccggcgaagca

SEQ ID NO: 796678 - RNA, 19 nt, Artificial Sequence
  Description of Artificial Sequence: Synthetic oligonucleotide
gcggguccagaauauacuu

SEQ ID NO: 796679 - RNA, 19 nt, Artificial Sequence
  Description of Artificial Sequence: Synthetic oligonucleotide
gugcuagucugaggcuaga

SEQ ID NO: 796680 - RNA, 19 nt, Artificial Sequence
  Description of Artificial Sequence: Synthetic oligonucleotide
guggggcguugauacacau

SEQ ID NO: 796681 - RNA, 19 nt, Artificial Sequence
  Description of Artificial Sequence: Synthetic oligonucleotide
gcaccgugcccggcgaagc

SEQ ID NO: 796682 - RNA, 19 nt, Artificial Sequence
  Description of Artificial Sequence: Synthetic oligonucleotide
cggggagcggcggaggccg

SEQ ID NO: 796683 - RNA, 19 nt, Artificial Sequence
  Description of Artificial Sequence: Synthetic oligonucleotide
ucgagacgucaggcgguua

SEQ ID NO: 796684 - RNA, 19 nt, Artificial Sequence
  Description of Artificial Sequence: Synthetic oligonucleotide
cgguggggcguugauacac

SEQ ID NO: 796685 - RNA, 19 nt, Artificial Sequence
  Description of Artificial Sequence: Synthetic oligonucleotide
gggguguacagacguuuau

SEQ ID NO: 796686 - RNA, 19 nt, Artificial Sequence
  Description of Artificial Sequence: Synthetic oligonucleotide
gguucucguccaugucgaa

SEQ ID NO: 796687 - RNA, 19 nt, Artificial Sequence
  Description of Artificial Sequence: Synthetic oligonucleotide
cggcgaagcaauguucauc

SEQ ID NO: 796688 - RNA, 19 nt, Artificial Sequence
  Description of Artificial Sequence: Synthetic oligonucleotide
ccugcccgcucugaaugac

SEQ ID NO: 796689 - RNA, 19 nt, Artificial Sequence
  Description of Artificial Sequence: Synthetic oligonucleotide
cucaaaccguggcuagguu

SEQ ID NO: 796690 - RNA, 19 nt, Artificial Sequence
  Description of Artificial Sequence: Synthetic oligonucleotide
ccgcaucugacgggguccc

SEQ ID NO: 796691 - RNA, 19 nt, Artificial Sequence
  Description of Artificial Sequence: Synthetic oligonucleotide
gcccggcgaagcaauguuc

SEQ ID NO: 796692 - RNA, 19 nt, Artificial Sequence
  Description of Artificial Sequence: Synthetic oligonucleotide
cgguuagugaccgacggcu

SEQ ID NO: 796693 - RNA, 19 nt, Artificial Sequence
  Description of Artificial Sequence: Synthetic oligonucleotide
ccuaucaccgguggggcgu

SEQ ID NO: 796694 - RNA, 19 nt, Artificial Sequence
  Description of Artificial Sequence: Synthetic oligonucleotide
caccaccgcugcuaggcuu

SEQ ID NO: 796695 - RNA, 19 nt, Artificial Sequence
  Description of Artificial Sequence: Synthetic oligonucleotide
cgccggugccaugaguaag

SEQ ID NO: 796696 - RNA, 19 nt, Artificial Sequence
  Description of Artificial Sequence: Synthetic oligonucleotide
gugcaccgugcccggcgaa

SEQ ID NO: 796697 - RNA, 19 nt, Artificial Sequence
  Description of Artificial Sequence: Synthetic oligonucleotide
cgagccuaggcacaggcuu

SEQ ID NO: 796698 - RNA, 19 nt, Artificial Sequence
  Description of Artificial Sequence: Synthetic oligonucleotide
ccacguuauugcuuugguu

SEQ ID NO: 796699 - RNA, 19 nt, Artificial Sequence
  Description of Artificial Sequence: Synthetic oligonucleotide
cgucacgcugaacaagacu

SEQ ID NO: 796700 - RNA, 19 nt, Artificial Sequence
  Description of Artificial Sequence: Synthetic oligonucleotide
cgccucgaggagccugccg

SEQ ID NO: 796701 - RNA, 19 nt, Artificial Sequence
  Description of Artificial Sequence: Synthetic oligonucleotide
gcugucacgccggugccau

SEQ ID NO: 796702 - RNA, 19 nt, Artificial Sequence
  Description of Artificial Sequence: Synthetic oligonucleotide
gguuagugaccgacggcuu

SEQ ID NO: 796703 - RNA, 19 nt, Artificial Sequence
  Description of Artificial Sequence: Synthetic oligonucleotide
caccgcccgugcccugcuc

SEQ ID NO: 796704 - RNA, 19 nt, Artificial Sequence
  Description of Artificial Sequence: Synthetic oligonucleotide
ccuucacgcuggagaacaa

SEQ ID NO: 796705 - RNA, 19 nt, Artificial Sequence
  Description of Artificial Sequence: Synthetic oligonucleotide
ccgcugcuaggcuugcucu

SEQ ID NO: 796706 - RNA, 19 nt, Artificial Sequence
  Description of Artificial Sequence: Synthetic oligonucleotide
cccugcccgcucugaauga

SEQ ID NO: 796707 - RNA, 19 nt, Artificial Sequence
  Description of Artificial Sequence: Synthetic oligonucleotide
cacgagcguuagccuaggu

SEQ ID NO: 796708 - RNA, 19 nt, Artificial Sequence
  Description of Artificial Sequence: Synthetic oligonucleotide
ccgacggcuuccggcgcag

SEQ ID NO: 796709 - RNA, 19 nt, Artificial Sequence
  Description of Artificial Sequence: Synthetic oligonucleotide
gcuccgcgccacggggagc

SEQ ID NO: 796710 - RNA, 19 nt, Artificial Sequence
  Description of Artificial Sequence: Synthetic oligonucleotide
ccgguggggcguugauaca

SEQ ID NO: 796711 - RNA, 19 nt, Artificial Sequence
  Description of Artificial Sequence: Synthetic oligonucleotide
gucccgccugagccacucu

SEQ ID NO: 796712 - RNA, 19 nt, Artificial Sequence
  Description of Artificial Sequence: Synthetic oligonucleotide
gcccgugcccugcucgccu

SEQ ID NO: 796713 - RNA, 19 nt, Artificial Sequence
  Description of Artificial Sequence: Synthetic oligonucleotide
cuaucaccgguggggcguu

SEQ ID NO: 796714 - RNA, 19 nt, Artificial Sequence
  Description of Artificial Sequence: Synthetic oligonucleotide
gcgaagcaauguucaucuu

SEQ ID NO: 796715 - RNA, 19 nt, Artificial Sequence
  Description of Artificial Sequence: Synthetic oligonucleotide
ccgcucugaaugacauggu

SEQ ID NO: 796716 - RNA, 19 nt, Artificial Sequence
  Description of Artificial Sequence: Synthetic oligonucleotide
cugcggugguagcgcuugu

SEQ ID NO: 796717 - RNA, 19 nt, Artificial Sequence
  Description of Artificial Sequence: Synthetic oligonucleotide
cucgggcaucggugugccu

SEQ ID NO: 796718 - RNA, 19 nt, Artificial Sequence
  Description of Artificial Sequence: Synthetic oligonucleotide
ccggcgaagcaauguucau

SEQ ID NO: 796719 - RNA, 19 nt, Artificial Sequence
  Description of Artificial Sequence: Synthetic oligonucleotide
ccgugcccggcgaagcaau

SEQ ID NO: 796720 - RNA, 19 nt, Artificial Sequence
  Description of Artificial Sequence: Synthetic oligonucleotide
gggcguugauacacaucuu

SEQ ID NO: 796721 - RNA, 19 nt, Artificial Sequence
  Description of Artificial Sequence: Synthetic oligonucleotide
ggacugcgacaaaguuuau

SEQ ID NO: 796722 - RNA, 19 nt, Artificial Sequence
  Description of Artificial Sequence: Synthetic oligonucleotide
ggccugugcccugcccgcu

SEQ ID NO: 796723 - RNA, 19 nt, Artificial Sequence
  Description of Artificial Sequence: Synthetic oligonucleotide
cgacggcuuccggcgcagc

SEQ ID NO: 796724 - RNA, 19 nt, Artificial Sequence
  Description of Artificial Sequence: Synthetic oligonucleotide
ccgguggccccucgcugcu

SEQ ID NO: 796725 - RNA, 19 nt, Artificial Sequence
  Description of Artificial Sequence: Synthetic oligonucleotide
gggucccgccugagccacu

SEQ ID NO: 796726 - RNA, 19 nt, Artificial Sequence
  Description of Artificial Sequence: Synthetic oligonucleotide
aacaaauucacucugagau

SEQ ID NO: 796727 - RNA, 19 nt, Artificial Sequence
  Description of Artificial Sequence: Synthetic oligonucleotide
aguaauuugaugcaucugg

SEQ ID NO: 796728 - RNA, 19 nt, Artificial Sequence
  Description of Artificial Sequence: Synthetic oligonucleotide
uuuucgaacaaucacuugc

SEQ ID NO: 796729 - RNA, 19 nt, Artificial Sequence
  Description of Artificial Sequence: Synthetic oligonucleotide
auauguagugaauauuugc

SEQ ID NO: 796730 - RNA, 19 nt, Artificial Sequence
  Description of Artificial Sequence: Synthetic oligonucleotide
auagagaagaucacgaucc

SEQ ID NO: 796731 - RNA, 19 nt, Artificial Sequence
  Description of Artificial Sequence: Synthetic oligonucleotide
auuuaugucauuguugagc

SEQ ID NO: 796732 - RNA, 19 nt, Artificial Sequence
  Description of Artificial Sequence: Synthetic oligonucleotide
uaaauugcaagaagguugg

SEQ ID NO: 796733 - RNA, 19 nt, Artificial Sequence
  Description of Artificial Sequence: Synthetic oligonucleotide
uuuguagcaagcaucaggc

SEQ ID NO: 796734 - RNA, 19 nt, Artificial Sequence
  Description of Artificial Sequence: Synthetic oligonucleotide
cuaaauugcaagaagguug

SEQ ID NO: 796735 - RNA, 19 nt, Artificial Sequence
  Description of Artificial Sequence: Synthetic oligonucleotide
uuuaagacuuuccaacggg

SEQ ID NO: 796736 - RNA, 19 nt, Artificial Sequence
  Description of Artificial Sequence: Synthetic oligonucleotide
agugauuaauuccagagug

SEQ ID NO: 796737 - RNA, 19 nt, Artificial Sequence
  Description of Artificial Sequence: Synthetic oligonucleotide
aucaauaacagucacagaa

SEQ ID NO: 796738 - RNA, 19 nt, Artificial Sequence
  Description of Artificial Sequence: Synthetic oligonucleotide
agugaauauuugcacaggc

SEQ ID NO: 796739 - RNA, 19 nt, Artificial Sequence
  Description of Artificial Sequence: Synthetic oligonucleotide
uugauauuaacuuggcaag

SEQ ID NO: 796740 - RNA, 19 nt, Artificial Sequence
  Description of Artificial Sequence: Synthetic oligonucleotide
aagauaaugagagugugug

SEQ ID NO: 796741 - RNA, 19 nt, Artificial Sequence
  Description of Artificial Sequence: Synthetic oligonucleotide
gauaaugagagugugugag

SEQ ID NO: 796742 - RNA, 19 nt, Artificial Sequence
  Description of Artificial Sequence: Synthetic oligonucleotide
aagaucacgauccucagaa

SEQ ID NO: 796743 - RNA, 19 nt, Artificial Sequence
  Description of Artificial Sequence: Synthetic oligonucleotide
uauuuauguaggcagucag

SEQ ID NO: 796744 - RNA, 19 nt, Artificial Sequence
  Description of Artificial Sequence: Synthetic oligonucleotide
uuaguaucugcagagagcc

SEQ ID NO: 796745 - RNA, 19 nt, Artificial Sequence
  Description of Artificial Sequence: Synthetic oligonucleotide
aacuuagugucuccgacag

SEQ ID NO: 796746 - RNA, 19 nt, Artificial Sequence
  Description of Artificial Sequence: Synthetic oligonucleotide
ucaauaacagucacagaag

SEQ ID NO: 796747 - RNA, 19 nt, Artificial Sequence
  Description of Artificial Sequence: Synthetic oligonucleotide
gagaguuugagguacuugc

SEQ ID NO: 796748 - RNA, 19 nt, Artificial Sequence
  Description of Artificial Sequence: Synthetic oligonucleotide
uuaugaaugcaagagaaac

SEQ ID NO: 796749 - RNA, 19 nt, Artificial Sequence
  Description of Artificial Sequence: Synthetic oligonucleotide
agauuuauccuuccuacag

SEQ ID NO: 796750 - RNA, 19 nt, Artificial Sequence
  Description of Artificial Sequence: Synthetic oligonucleotide
uuuaguaucugcagagagc

SEQ ID NO: 796751 - RNA, 19 nt, Artificial Sequence
  Description of Artificial Sequence: Synthetic oligonucleotide
ucucucaauuccaauuugg

SEQ ID NO: 796752 - RNA, 19 nt, Artificial Sequence
  Description of Artificial Sequence: Synthetic oligonucleotide
auugcaagaagguuggcug

SEQ ID NO: 796753 - RNA, 19 nt, Artificial Sequence
  Description of Artificial Sequence: Synthetic oligonucleotide
uuuccaacggguuuguagc

SEQ ID NO: 796754 - RNA, 19 nt, Artificial Sequence
  Description of Artificial Sequence: Synthetic oligonucleotide
uguagugaauauuugcaca

SEQ ID NO: 796755 - RNA, 19 nt, Artificial Sequence
  Description of Artificial Sequence: Synthetic oligonucleotide
gauuuauccuuccuacagg

SEQ ID NO: 796756 - RNA, 19 nt, Artificial Sequence
  Description of Artificial Sequence: Synthetic oligonucleotide
cuuuggauggaacaaauuc

SEQ ID NO: 796757 - RNA, 19 nt, Artificial Sequence
  Description of Artificial Sequence: Synthetic oligonucleotide
uugaaguuauagaugugag

SEQ ID NO: 796758 - RNA, 19 nt, Artificial Sequence
  Description of Artificial Sequence: Synthetic oligonucleotide
acaagggcaaaguugcugg

SEQ ID NO: 796759 - RNA, 19 nt, Artificial Sequence
  Description of Artificial Sequence: Synthetic oligonucleotide
uauagagaagaucacgauc

SEQ ID NO: 796760 - RNA, 19 nt, Artificial Sequence
  Description of Artificial Sequence: Synthetic oligonucleotide
aauggcaggugauagaauu

SEQ ID NO: 796761 - RNA, 19 nt, Artificial Sequence
  Description of Artificial Sequence: Synthetic oligonucleotide
aaucugaugcgccuaauaa

SEQ ID NO: 796762 - RNA, 19 nt, Artificial Sequence
  Description of Artificial Sequence: Synthetic oligonucleotide
aacacuuaugaaugcaaga

SEQ ID NO: 796763 - RNA, 19 nt, Artificial Sequence
  Description of Artificial Sequence: Synthetic oligonucleotide
uaggcagucagucauaaau

SEQ ID NO: 796764 - RNA, 19 nt, Artificial Sequence
  Description of Artificial Sequence: Synthetic oligonucleotide
agauaugaccuuccaaagg

SEQ ID NO: 796765 - RNA, 19 nt, Artificial Sequence
  Description of Artificial Sequence: Synthetic oligonucleotide
ugacugacccuuuggaugg

SEQ ID NO: 796766 - RNA, 19 nt, Artificial Sequence
  Description of Artificial Sequence: Synthetic oligonucleotide
uucuaaauugcaagaaggu

SEQ ID NO: 796767 - RNA, 19 nt, Artificial Sequence
  Description of Artificial Sequence: Synthetic oligonucleotide
gauacaauuggccagauuu

SEQ ID NO: 796768 - RNA, 19 nt, Artificial Sequence
  Description of Artificial Sequence: Synthetic oligonucleotide
guagugaauauuugcacag

SEQ ID NO: 796769 - RNA, 19 nt, Artificial Sequence
  Description of Artificial Sequence: Synthetic oligonucleotide
aaucagaagaagucuuucu

SEQ ID NO: 796770 - RNA, 19 nt, Artificial Sequence
  Description of Artificial Sequence: Synthetic oligonucleotide
uuugggugaagaaauuaca

SEQ ID NO: 796771 - RNA, 19 nt, Artificial Sequence
  Description of Artificial Sequence: Synthetic oligonucleotide
uaugaaugcaagagaaacu

SEQ ID NO: 796772 - RNA, 19 nt, Artificial Sequence
  Description of Artificial Sequence: Synthetic oligonucleotide
gaaauauaauggcagguga

SEQ ID NO: 796773 - RNA, 19 nt, Artificial Sequence
  Description of Artificial Sequence: Synthetic oligonucleotide
uuugagaccuauaugcauc

SEQ ID NO: 796774 - RNA, 19 nt, Artificial Sequence
  Description of Artificial Sequence: Synthetic oligonucleotide
augcuuaagaaguucccac

SEQ ID NO: 796775 - RNA, 19 nt, Artificial Sequence
  Description of Artificial Sequence: Synthetic oligonucleotide
caguuuaagacuuuccaac

SEQ ID NO: 796776 - RNA, 19 nt, Artificial Sequence
  Description of Artificial Sequence: Synthetic oligonucleotide
aucaaugcuauagagaaga

SEQ ID NO: 796777 - RNA, 19 nt, Artificial Sequence
  Description of Artificial Sequence: Synthetic oligonucleotide
aguuauagaugugagaagu

SEQ ID NO: 796778 - RNA, 19 nt, Artificial Sequence
  Description of Artificial Sequence: Synthetic oligonucleotide
uggaguaauagccuuggac

SEQ ID NO: 796779 - RNA, 19 nt, Artificial Sequence
  Description of Artificial Sequence: Synthetic oligonucleotide
uauguaggcagucagucau

SEQ ID NO: 796780 - RNA, 19 nt, Artificial Sequence
  Description of Artificial Sequence: Synthetic oligonucleotide
cucagcucgaggaacacgg

SEQ ID NO: 796781 - RNA, 19 nt, Artificial Sequence
  Description of Artificial Sequence: Synthetic oligonucleotide
auucuuucgccucucauca

SEQ ID NO: 796782 - RNA, 19 nt, Artificial Sequence
  Description of Artificial Sequence: Synthetic oligonucleotide
ugauagaucacugucugcu

SEQ ID NO: 796783 - RNA, 19 nt, Artificial Sequence
  Description of Artificial Sequence: Synthetic oligonucleotide
uuuggaguaauagccuugg

SEQ ID NO: 796784 - RNA, 19 nt, Artificial Sequence
  Description of Artificial Sequence: Synthetic oligonucleotide
agaacuaaugcugucacca

SEQ ID NO: 796785 - RNA, 19 nt, Artificial Sequence
  Description of Artificial Sequence: Synthetic oligonucleotide
gaggcgaauaucaacaaug

SEQ ID NO: 796786 - RNA, 19 nt, Artificial Sequence
  Description of Artificial Sequence: Synthetic oligonucleotide
agagcgucaccauuaagag

SEQ ID NO: 796787 - RNA, 19 nt, Artificial Sequence
  Description of Artificial Sequence: Synthetic oligonucleotide
uuaagagaguuugagguac

SEQ ID NO: 796788 - RNA, 19 nt, Artificial Sequence
  Description of Artificial Sequence: Synthetic oligonucleotide
auuugggugaagaaauuac

SEQ ID NO: 796789 - RNA, 19 nt, Artificial Sequence
  Description of Artificial Sequence: Synthetic oligonucleotide
auuuauccuuccuacagga

SEQ ID NO: 796790 - RNA, 19 nt, Artificial Sequence
  Description of Artificial Sequence: Synthetic oligonucleotide
augaaaguaucaauaacag

SEQ ID NO: 796791 - RNA, 19 nt, Artificial Sequence
  Description of Artificial Sequence: Synthetic oligonucleotide
cuuuccaacggguuuguag

SEQ ID NO: 796792 - RNA, 19 nt, Artificial Sequence
  Description of Artificial Sequence: Synthetic oligonucleotide
uuucgaacaaucacuugcu

SEQ ID NO: 796793 - RNA, 19 nt, Artificial Sequence
  Description of Artificial Sequence: Synthetic oligonucleotide
ugcaagagaaacugguuga

SEQ ID NO: 796794 - RNA, 19 nt, Artificial Sequence
  Description of Artificial Sequence: Synthetic oligonucleotide
ugaaguuauagaugugaga

SEQ ID NO: 796795 - RNA, 19 nt, Artificial Sequence
  Description of Artificial Sequence: Synthetic oligonucleotide
aaacacuuaugaaugcaag

SEQ ID NO: 796796 - RNA, 19 nt, Artificial Sequence
  Description of Artificial Sequence: Synthetic oligonucleotide
aaacuuagugucuccgaca

SEQ ID NO: 796797 - RNA, 19 nt, Artificial Sequence
  Description of Artificial Sequence: Synthetic oligonucleotide
accuauaugcaucaaugcu

SEQ ID NO: 796798 - RNA, 19 nt, Artificial Sequence
  Description of Artificial Sequence: Synthetic oligonucleotide
aguaagaaauauaauggca

SEQ ID NO: 796799 - RNA, 19 nt, Artificial Sequence
  Description of Artificial Sequence: Synthetic oligonucleotide
ugcgucuugcacaaaauuc

SEQ ID NO: 796800 - RNA, 19 nt, Artificial Sequence
  Description of Artificial Sequence: Synthetic oligonucleotide
uuuauguaggcagucaguc

SEQ ID NO: 796801 - RNA, 19 nt, Artificial Sequence
  Description of Artificial Sequence: Synthetic oligonucleotide
ucggacagugauuaauucc

SEQ ID NO: 796802 - RNA, 19 nt, Artificial Sequence
  Description of Artificial Sequence: Synthetic oligonucleotide
ugacgaaucuuucuuuugu

SEQ ID NO: 796803 - RNA, 19 nt, Artificial Sequence
  Description of Artificial Sequence: Synthetic oligonucleotide
ugaauaauauguagugaau

SEQ ID NO: 796804 - RNA, 19 nt, Artificial Sequence
  Description of Artificial Sequence: Synthetic oligonucleotide
agaugaguaagaaauauaa

SEQ ID NO: 796805 - RNA, 19 nt, Artificial Sequence
  Description of Artificial Sequence: Synthetic oligonucleotide
gcgaauaucaacaaugacc

SEQ ID NO: 796806 - RNA, 19 nt, Artificial Sequence
  Description of Artificial Sequence: Synthetic oligonucleotide
auauaauggcaggugauag

SEQ ID NO: 796807 - RNA, 19 nt, Artificial Sequence
  Description of Artificial Sequence: Synthetic oligonucleotide
uaugaccuuccaaaggaga

SEQ ID NO: 796808 - RNA, 19 nt, Artificial Sequence
  Description of Artificial Sequence: Synthetic oligonucleotide
agugugucccugcauuggc

SEQ ID NO: 796809 - RNA, 19 nt, Artificial Sequence
  Description of Artificial Sequence: Synthetic oligonucleotide
uauccuuccuacaggauuc

SEQ ID NO: 796810 - RNA, 19 nt, Artificial Sequence
  Description of Artificial Sequence: Synthetic oligonucleotide
uuauccuuccuacaggauu

SEQ ID NO: 796811 - RNA, 19 nt, Artificial Sequence
  Description of Artificial Sequence: Synthetic oligonucleotide
aaaugucagagcgucacca

SEQ ID NO: 796812 - RNA, 19 nt, Artificial Sequence
  Description of Artificial Sequence: Synthetic oligonucleotide
uggccauaacugaagaaug

SEQ ID NO: 796813 - RNA, 19 nt, Artificial Sequence
  Description of Artificial Sequence: Synthetic oligonucleotide
gaccuauaugcaucaaugc

SEQ ID NO: 796814 - RNA, 19 nt, Artificial Sequence
  Description of Artificial Sequence: Synthetic oligonucleotide
aagagucucucggucgucc

SEQ ID NO: 796815 - RNA, 19 nt, Artificial Sequence
  Description of Artificial Sequence: Synthetic oligonucleotide
ugguguggcgaccauaugu

SEQ ID NO: 796816 - RNA, 19 nt, Artificial Sequence
  Description of Artificial Sequence: Synthetic oligonucleotide
cugaugacugauacaauug

SEQ ID NO: 796817 - RNA, 19 nt, Artificial Sequence
  Description of Artificial Sequence: Synthetic oligonucleotide
aggaacacggguucucugg

SEQ ID NO: 796818 - RNA, 19 nt, Artificial Sequence
  Description of Artificial Sequence: Synthetic oligonucleotide
agagaacacaccaucuucg

SEQ ID NO: 796819 - RNA, 19 nt, Artificial Sequence
  Description of Artificial Sequence: Synthetic oligonucleotide
uguggcgaccauauguuca

SEQ ID NO: 796820 - RNA, 19 nt, Artificial Sequence
  Description of Artificial Sequence: Synthetic oligonucleotide
ucuccgacagaagauaaug

SEQ ID NO: 796821 - RNA, 19 nt, Artificial Sequence
  Description of Artificial Sequence: Synthetic oligonucleotide
gugacugacccuuuggaug

SEQ ID NO: 796822 - RNA, 19 nt, Artificial Sequence
  Description of Artificial Sequence: Synthetic oligonucleotide
gggugaagaaauuacauuc

SEQ ID NO: 796823 - RNA, 19 nt, Artificial Sequence
  Description of Artificial Sequence: Synthetic oligonucleotide
ccaacaagggcaaaguugc

SEQ ID NO: 796824 - RNA, 19 nt, Artificial Sequence
  Description of Artificial Sequence: Synthetic oligonucleotide
aacagauaugaccuuccaa

SEQ ID NO: 796825 - RNA, 19 nt, Artificial Sequence
  Description of Artificial Sequence: Synthetic oligonucleotide
gagaagaucacgauccuca

SEQ ID NO: 796826 - RNA, 19 nt, Artificial Sequence
  Description of Artificial Sequence: Synthetic oligonucleotide
gugugugagauccaacaag

SEQ ID NO: 796827 - RNA, 19 nt, Artificial Sequence
  Description of Artificial Sequence: Synthetic oligonucleotide
aauaugguuaggaagccuu

SEQ ID NO: 796828 - RNA, 19 nt, Artificial Sequence
  Description of Artificial Sequence: Synthetic oligonucleotide
cuuccuacaggauucuuuc

SEQ ID NO: 796829 - RNA, 19 nt, Artificial Sequence
  Description of Artificial Sequence: Synthetic oligonucleotide
gagugugugagauccaaca

SEQ ID NO: 796830 - RNA, 19 nt, Artificial Sequence
  Description of Artificial Sequence: Synthetic oligonucleotide
aacaagggcaaaguugcug

SEQ ID NO: 796831 - RNA, 19 nt, Artificial Sequence
  Description of Artificial Sequence: Synthetic oligonucleotide
aaacagauaugaccuucca

SEQ ID NO: 796832 - RNA, 19 nt, Artificial Sequence
  Description of Artificial Sequence: Synthetic oligonucleotide
acuuaugaaugcaagagaa

SEQ ID NO: 796833 - RNA, 19 nt, Artificial Sequence
  Description of Artificial Sequence: Synthetic oligonucleotide
agaccuauaugcaucaaug

SEQ ID NO: 796834 - RNA, 19 nt, Artificial Sequence
  Description of Artificial Sequence: Synthetic oligonucleotide
uuagcauaauuaaguagua

SEQ ID NO: 796835 - RNA, 19 nt, Artificial Sequence
  Description of Artificial Sequence: Synthetic oligonucleotide
auagaugaguaagaaauau

SEQ ID NO: 796836 - RNA, 19 nt, Artificial Sequence
  Description of Artificial Sequence: Synthetic oligonucleotide
uguugcgucuugcacaaaa

SEQ ID NO: 796837 - RNA, 19 nt, Artificial Sequence
  Description of Artificial Sequence: Synthetic oligonucleotide
uuauuuauguaggcaguca

SEQ ID NO: 796838 - RNA, 19 nt, Artificial Sequence
  Description of Artificial Sequence: Synthetic oligonucleotide
ugucucucaauuccaauuu

SEQ ID NO: 796839 - RNA, 19 nt, Artificial Sequence
  Description of Artificial Sequence: Synthetic oligonucleotide
cuccucaacacuugaauuc

SEQ ID NO: 796840 - RNA, 19 nt, Artificial Sequence
  Description of Artificial Sequence: Synthetic oligonucleotide
gcuagugucucucaauucc

SEQ ID NO: 796841 - RNA, 19 nt, Artificial Sequence
  Description of Artificial Sequence: Synthetic oligonucleotide
cagagcgucaccauuaaga

SEQ ID NO: 796842 - RNA, 19 nt, Artificial Sequence
  Description of Artificial Sequence: Synthetic oligonucleotide
uagaugaguaagaaauaua

SEQ ID NO: 796843 - RNA, 19 nt, Artificial Sequence
  Description of Artificial Sequence: Synthetic oligonucleotide
ucuaaauugcaagaagguu

SEQ ID NO: 796844 - RNA, 19 nt, Artificial Sequence
  Description of Artificial Sequence: Synthetic oligonucleotide
aaaucugaugcgccuaaua

SEQ ID NO: 796845 - RNA, 19 nt, Artificial Sequence
  Description of Artificial Sequence: Synthetic oligonucleotide
uuugagguacuugcuaaug

SEQ ID NO: 796846 - RNA, 19 nt, Artificial Sequence
  Description of Artificial Sequence: Synthetic oligonucleotide
ugacccuuuggauggaaca

SEQ ID NO: 796847 - RNA, 19 nt, Artificial Sequence
  Description of Artificial Sequence: Synthetic oligonucleotide
uagcauaauuaaguaguag

SEQ ID NO: 796848 - RNA, 19 nt, Artificial Sequence
  Description of Artificial Sequence: Synthetic oligonucleotide
guaaaugucagagcgucac

SEQ ID NO: 796849 - RNA, 19 nt, Artificial Sequence
  Description of Artificial Sequence: Synthetic oligonucleotide
ugcugguacgcacagcacu

SEQ ID NO: 796850 - RNA, 19 nt, Artificial Sequence
  Description of Artificial Sequence: Synthetic oligonucleotide
ugagauccaacaagggcaa

SEQ ID NO: 796851 - RNA, 19 nt, Artificial Sequence
  Description of Artificial Sequence: Synthetic oligonucleotide
ugcauuggcugacaagagu

SEQ ID NO: 796852 - RNA, 19 nt, Artificial Sequence
  Description of Artificial Sequence: Synthetic oligonucleotide
caaaguugcugguacgcac

SEQ ID NO: 796853 - RNA, 19 nt, Artificial Sequence
  Description of Artificial Sequence: Synthetic oligonucleotide
aaguugcugguacgcacag

SEQ ID NO: 796854 - RNA, 19 nt, Artificial Sequence
  Description of Artificial Sequence: Synthetic oligonucleotide
auuaagagaguuugaggua

SEQ ID NO: 796855 - RNA, 19 nt, Artificial Sequence
  Description of Artificial Sequence: Synthetic oligonucleotide
gaacaaauucacucugaga

SEQ ID NO: 796856 - RNA, 19 nt, Artificial Sequence
  Description of Artificial Sequence: Synthetic oligonucleotide
auaauggcaggugauagaa

SEQ ID NO: 796857 - RNA, 19 nt, Artificial Sequence
  Description of Artificial Sequence: Synthetic oligonucleotide
uagugaauauuugcacagg

SEQ ID NO: 796858 - RNA, 19 nt, Artificial Sequence
  Description of Artificial Sequence: Synthetic oligonucleotide
uaacugaagaaugaagguu

SEQ ID NO: 796859 - RNA, 19 nt, Artificial Sequence
  Description of Artificial Sequence: Synthetic oligonucleotide
ucauuggaaacgucaugca

SEQ ID NO: 796860 - RNA, 19 nt, Artificial Sequence
  Description of Artificial Sequence: Synthetic oligonucleotide
gaguguugcgucuugcaca

SEQ ID NO: 796861 - RNA, 19 nt, Artificial Sequence
  Description of Artificial Sequence: Synthetic oligonucleotide
ucuuucgccucucaucauc

SEQ ID NO: 796862 - RNA, 19 nt, Artificial Sequence
  Description of Artificial Sequence: Synthetic oligonucleotide
ugucagagcgucaccauua

SEQ ID NO: 796863 - RNA, 19 nt, Artificial Sequence
  Description of Artificial Sequence: Synthetic oligonucleotide
auaaugagagugugugaga

SEQ ID NO: 796864 - RNA, 19 nt, Artificial Sequence
  Description of Artificial Sequence: Synthetic oligonucleotide
acgcacagcacugagaccu

SEQ ID NO: 796865 - RNA, 19 nt, Artificial Sequence
  Description of Artificial Sequence: Synthetic oligonucleotide
ucgaacaaucacuugcuuu

SEQ ID NO: 796866 - RNA, 19 nt, Artificial Sequence
  Description of Artificial Sequence: Synthetic oligonucleotide
uuccuacaggauucuuucg

SEQ ID NO: 796867 - RNA, 19 nt, Artificial Sequence
  Description of Artificial Sequence: Synthetic oligonucleotide
agauccaacaagggcaaag

SEQ ID NO: 796868 - RNA, 19 nt, Artificial Sequence
  Description of Artificial Sequence: Synthetic oligonucleotide
aaccacauauagaugagua

SEQ ID NO: 796869 - RNA, 19 nt, Artificial Sequence
  Description of Artificial Sequence: Synthetic oligonucleotide
gcaagcaucaggcugccag

SEQ ID NO: 796870 - RNA, 19 nt, Artificial Sequence
  Description of Artificial Sequence: Synthetic oligonucleotide
aguugcaaucagaagaagu

SEQ ID NO: 796871 - RNA, 19 nt, Artificial Sequence
  Description of Artificial Sequence: Synthetic oligonucleotide
aaaguugcugguacgcaca

SEQ ID NO: 796872 - RNA, 19 nt, Artificial Sequence
  Description of Artificial Sequence: Synthetic oligonucleotide
agauaaugagaguguguga

SEQ ID NO: 796873 - RNA, 19 nt, Artificial Sequence
  Description of Artificial Sequence: Synthetic oligonucleotide
gaucacgauccucagaacu

SEQ ID NO: 796874 - RNA, 19 nt, Artificial Sequence
  Description of Artificial Sequence: Synthetic oligonucleotide
uguggucggacagugauua

SEQ ID NO: 796875 - RNA, 19 nt, Artificial Sequence
  Description of Artificial Sequence: Synthetic oligonucleotide
cacauauagaugaguaaga

SEQ ID NO: 796876 - RNA, 19 nt, Artificial Sequence
  Description of Artificial Sequence: Synthetic oligonucleotide
aucugaugcgccuaauaau

SEQ ID NO: 796877 - RNA, 19 nt, Artificial Sequence
  Description of Artificial Sequence: Synthetic oligonucleotide
ccauuaagagaguuugagg

SEQ ID NO: 796878 - RNA, 19 nt, Artificial Sequence
  Description of Artificial Sequence: Synthetic oligonucleotide
uggauggaacaaauucacu

SEQ ID NO: 796879 - RNA, 19 nt, Artificial Sequence
  Description of Artificial Sequence: Synthetic oligonucleotide
cacccaauuuugaagcaac

SEQ ID NO: 796880 - RNA, 19 nt, Artificial Sequence
  Description of Artificial Sequence: Synthetic oligonucleotide
acagcuagcaaagccucuc

SEQ ID NO: 796881 - RNA, 19 nt, Artificial Sequence
  Description of Artificial Sequence: Synthetic oligonucleotide
aguaaauguagugguaaau

SEQ ID NO: 796882 - RNA, 19 nt, Artificial Sequence
  Description of Artificial Sequence: Synthetic oligonucleotide
uucugagcggugcugcaga

SEQ ID NO: 796883 - RNA, 19 nt, Artificial Sequence
  Description of Artificial Sequence: Synthetic oligonucleotide
agaucacgauccucagaac

SEQ ID NO: 796884 - RNA, 19 nt, Artificial Sequence
  Description of Artificial Sequence: Synthetic oligonucleotide
uuuauggaagggcgcucug

SEQ ID NO: 796885 - RNA, 19 nt, Artificial Sequence
  Description of Artificial Sequence: Synthetic oligonucleotide
acgucaugcagaguaaaug

SEQ ID NO: 796886 - RNA, 19 nt, Artificial Sequence
  Description of Artificial Sequence: Synthetic oligonucleotide
uaucaauaacagucacaga

SEQ ID NO: 796887 - RNA, 19 nt, Artificial Sequence
  Description of Artificial Sequence: Synthetic oligonucleotide
ucuugguaacacagagugu

SEQ ID NO: 796888 - RNA, 19 nt, Artificial Sequence
  Description of Artificial Sequence: Synthetic oligonucleotide
ccagauuuauccuuccuac

SEQ ID NO: 796889 - RNA, 19 nt, Artificial Sequence
  Description of Artificial Sequence: Synthetic oligonucleotide
accacauauagaugaguaa

SEQ ID NO: 796890 - RNA, 19 nt, Artificial Sequence
  Description of Artificial Sequence: Synthetic oligonucleotide
ugaugcgccuaauaauguc

SEQ ID NO: 796891 - RNA, 19 nt, Artificial Sequence
  Description of Artificial Sequence: Synthetic oligonucleotide
agagugugucccugcauug

SEQ ID NO: 796892 - RNA, 19 nt, Artificial Sequence
  Description of Artificial Sequence: Synthetic oligonucleotide
agugugugagauccaacaa

SEQ ID NO: 796893 - RNA, 19 nt, Artificial Sequence
  Description of Artificial Sequence: Synthetic oligonucleotide
uugcaaaucugaugcgccu

SEQ ID NO: 796894 - RNA, 19 nt, Artificial Sequence
  Description of Artificial Sequence: Synthetic oligonucleotide
ugucuccgacagaagauaa

SEQ ID NO: 796895 - RNA, 19 nt, Artificial Sequence
  Description of Artificial Sequence: Synthetic oligonucleotide
uaagagaguuugagguacu

SEQ ID NO: 796896 - RNA, 19 nt, Artificial Sequence
  Description of Artificial Sequence: Synthetic oligonucleotide
ugcuuucagaggcaagcaa

SEQ ID NO: 796897 - RNA, 19 nt, Artificial Sequence
  Description of Artificial Sequence: Synthetic oligonucleotide
uuugaugcaucugguuucu

SEQ ID NO: 796898 - RNA, 19 nt, Artificial Sequence
  Description of Artificial Sequence: Synthetic oligonucleotide
ccauaacugaagaaugaag

SEQ ID NO: 796899 - RNA, 19 nt, Artificial Sequence
  Description of Artificial Sequence: Synthetic oligonucleotide
guggcgaccauauguucag

SEQ ID NO: 796900 - RNA, 19 nt, Artificial Sequence
  Description of Artificial Sequence: Synthetic oligonucleotide
uugcaagaagguuggcugu

SEQ ID NO: 796901 - RNA, 19 nt, Artificial Sequence
  Description of Artificial Sequence: Synthetic oligonucleotide
ucagagcgucaccauuaag

SEQ ID NO: 796902 - RNA, 19 nt, Artificial Sequence
  Description of Artificial Sequence: Synthetic oligonucleotide
cugacgaaucuuucuuuug

SEQ ID NO: 796903 - RNA, 19 nt, Artificial Sequence
  Description of Artificial Sequence: Synthetic oligonucleotide
cugauagaucacugucugc

SEQ ID NO: 796904 - RNA, 19 nt, Artificial Sequence
  Description of Artificial Sequence: Synthetic oligonucleotide
gucucucaauuccaauuug

SEQ ID NO: 796905 - RNA, 19 nt, Artificial Sequence
  Description of Artificial Sequence: Synthetic oligonucleotide
auuuauguaggcagucagu

SEQ ID NO: 796906 - RNA, 19 nt, Artificial Sequence
  Description of Artificial Sequence: Synthetic oligonucleotide
agagaguuugagguacuug

SEQ ID NO: 796907 - RNA, 19 nt, Artificial Sequence
  Description of Artificial Sequence: Synthetic oligonucleotide
auuccagaguguugcgucu

SEQ ID NO: 796908 - RNA, 19 nt, Artificial Sequence
  Description of Artificial Sequence: Synthetic oligonucleotide
aucuucgaugccaggcacc

SEQ ID NO: 796909 - RNA, 19 nt, Artificial Sequence
  Description of Artificial Sequence: Synthetic oligonucleotide
ucacuugacagcugauuuu

SEQ ID NO: 796910 - RNA, 19 nt, Artificial Sequence
  Description of Artificial Sequence: Synthetic oligonucleotide
caaagugacugacccuuug

SEQ ID NO: 796911 - RNA, 19 nt, Artificial Sequence
  Description of Artificial Sequence: Synthetic oligonucleotide
ucaaugcuauagagaagau

SEQ ID NO: 796912 - RNA, 19 nt, Artificial Sequence
  Description of Artificial Sequence: Synthetic oligonucleotide
gcuauagagaagaucacga

SEQ ID NO: 796913 - RNA, 19 nt, Artificial Sequence
  Description of Artificial Sequence: Synthetic oligonucleotide
gccacuaacaucuucaaau

SEQ ID NO: 796914 - RNA, 19 nt, Artificial Sequence
  Description of Artificial Sequence: Synthetic oligonucleotide
uagugucucucaauuccaa

SEQ ID NO: 796915 - RNA, 19 nt, Artificial Sequence
  Description of Artificial Sequence: Synthetic oligonucleotide
acuugggcuagugucucuc

SEQ ID NO: 796916 - RNA, 19 nt, Artificial Sequence
  Description of Artificial Sequence: Synthetic oligonucleotide
agaggcgaauaucaacaau

SEQ ID NO: 796917 - RNA, 19 nt, Artificial Sequence
  Description of Artificial Sequence: Synthetic oligonucleotide
aaacgucaugcagaguaaa

SEQ ID NO: 796918 - RNA, 19 nt, Artificial Sequence
  Description of Artificial Sequence: Synthetic oligonucleotide
uuaucagggccugacgaau

SEQ ID NO: 796919 - RNA, 19 nt, Artificial Sequence
  Description of Artificial Sequence: Synthetic oligonucleotide
cuagugucucucaauucca

SEQ ID NO: 796920 - RNA, 19 nt, Artificial Sequence
  Description of Artificial Sequence: Synthetic oligonucleotide
uuccaacggguuuguagca

SEQ ID NO: 796921 - RNA, 19 nt, Artificial Sequence
  Description of Artificial Sequence: Synthetic oligonucleotide
gaccuuccaaaggagauaa

SEQ ID NO: 796922 - RNA, 19 nt, Artificial Sequence
  Description of Artificial Sequence: Synthetic oligonucleotide
agugucucucaauuccaau

SEQ ID NO: 796923 - RNA, 19 nt, Artificial Sequence
  Description of Artificial Sequence: Synthetic oligonucleotide
agccuuauucuuccucuga

SEQ ID NO: 796924 - RNA, 19 nt, Artificial Sequence
  Description of Artificial Sequence: Synthetic oligonucleotide
ccugauagaucacugucug

SEQ ID NO: 796925 - RNA, 19 nt, Artificial Sequence
  Description of Artificial Sequence: Synthetic oligonucleotide
caacggguuuguagcaagc

SEQ ID NO: 796926 - RNA, 19 nt, Artificial Sequence
  Description of Artificial Sequence: Synthetic oligonucleotide
auuugcacaggcccuuuua

SEQ ID NO: 796927 - RNA, 19 nt, Artificial Sequence
  Description of Artificial Sequence: Synthetic oligonucleotide
ggcugucaaacacuuauga

SEQ ID NO: 796928 - RNA, 19 nt, Artificial Sequence
  Description of Artificial Sequence: Synthetic oligonucleotide
guaccaagcuguaaacuuc

SEQ ID NO: 796929 - RNA, 19 nt, Artificial Sequence
  Description of Artificial Sequence: Synthetic oligonucleotide
gacgaaucuuucuuuugua

SEQ ID NO: 796930 - RNA, 19 nt, Artificial Sequence
  Description of Artificial Sequence: Synthetic oligonucleotide
ccuacaggauucuuucgcc

SEQ ID NO: 796931 - RNA, 19 nt, Artificial Sequence
  Description of Artificial Sequence: Synthetic oligonucleotide
aacgucaugcagaguaaau

SEQ ID NO: 796932 - RNA, 19 nt, Artificial Sequence
  Description of Artificial Sequence: Synthetic oligonucleotide
ucacccaauuuugaagcaa

SEQ ID NO: 796933 - RNA, 19 nt, Artificial Sequence
  Description of Artificial Sequence: Synthetic oligonucleotide
aggcgaauaucaacaauga

SEQ ID NO: 796934 - RNA, 19 nt, Artificial Sequence
  Description of Artificial Sequence: Synthetic oligonucleotide
gucggacagugauuaauuc

SEQ ID NO: 796935 - RNA, 19 nt, Artificial Sequence
  Description of Artificial Sequence: Synthetic oligonucleotide
acgauccucagaacuaaug

SEQ ID NO: 796936 - RNA, 19 nt, Artificial Sequence
  Description of Artificial Sequence: Synthetic oligonucleotide
uucuaccugaugacugaua

SEQ ID NO: 796937 - RNA, 19 nt, Artificial Sequence
  Description of Artificial Sequence: Synthetic oligonucleotide
cagauuuauccuuccuaca

SEQ ID NO: 796938 - RNA, 19 nt, Artificial Sequence
  Description of Artificial Sequence: Synthetic oligonucleotide
ggguaaguccaguaggaga

SEQ ID NO: 796939 - RNA, 19 nt, Artificial Sequence
  Description of Artificial Sequence: Synthetic oligonucleotide
cuccgacagaagauaauga

SEQ ID NO: 796940 - RNA, 19 nt, Artificial Sequence
  Description of Artificial Sequence: Synthetic oligonucleotide
ccuauaugcaucaaugcua

SEQ ID NO: 796941 - RNA, 19 nt, Artificial Sequence
  Description of Artificial Sequence: Synthetic oligonucleotide
uggucggacagugauuaau

SEQ ID NO: 796942 - RNA, 19 nt, Artificial Sequence
  Description of Artificial Sequence: Synthetic oligonucleotide
gagcgucaccauuaagaga

SEQ ID NO: 796943 - RNA, 19 nt, Artificial Sequence
  Description of Artificial Sequence: Synthetic oligonucleotide
cagcuagcaaagccucucc

SEQ ID NO: 796944 - RNA, 19 nt, Artificial Sequence
  Description of Artificial Sequence: Synthetic oligonucleotide
ucccgcuccucuuuaguau

SEQ ID NO: 796945 - RNA, 19 nt, Artificial Sequence
  Description of Artificial Sequence: Synthetic oligonucleotide
agcacuugggcuagugucu

SEQ ID NO: 796946 - RNA, 19 nt, Artificial Sequence
  Description of Artificial Sequence: Synthetic oligonucleotide
agccaugcauuucaauauu

SEQ ID NO: 796947 - RNA, 19 nt, Artificial Sequence
  Description of Artificial Sequence: Synthetic oligonucleotide
agaucccgcuccucuuuag

SEQ ID NO: 796948 - RNA, 19 nt, Artificial Sequence
  Description of Artificial Sequence: Synthetic oligonucleotide
acaacaguucagggccugg

SEQ ID NO: 796949 - RNA, 19 nt, Artificial Sequence
  Description of Artificial Sequence: Synthetic oligonucleotide
ucggucguccucucuuugu

SEQ ID NO: 796950 - RNA, 19 nt, Artificial Sequence
  Description of Artificial Sequence: Synthetic oligonucleotide
caccagacucagcucgagg

SEQ ID NO: 796951 - RNA, 19 nt, Artificial Sequence
  Description of Artificial Sequence: Synthetic oligonucleotide
gcagaguaaauguaguggu

SEQ ID NO: 796952 - RNA, 19 nt, Artificial Sequence
  Description of Artificial Sequence: Synthetic oligonucleotide
ccaugcuuaagaaguuccc

SEQ ID NO: 796953 - RNA, 19 nt, Artificial Sequence
  Description of Artificial Sequence: Synthetic oligonucleotide
ugcaaaucugaugcgccua

SEQ ID NO: 796954 - RNA, 19 nt, Artificial Sequence
  Description of Artificial Sequence: Synthetic oligonucleotide
gauccaacaagggcaaagu

SEQ ID NO: 796955 - RNA, 19 nt, Artificial Sequence
  Description of Artificial Sequence: Synthetic oligonucleotide
ggcgaauaucaacaaugac

SEQ ID NO: 796956 - RNA, 19 nt, Artificial Sequence
  Description of Artificial Sequence: Synthetic oligonucleotide
gagaccuauaugcaucaau

SEQ ID NO: 796957 - RNA, 19 nt, Artificial Sequence
  Description of Artificial Sequence: Synthetic oligonucleotide
agauaugacagcagccuua

SEQ ID NO: 796958 - RNA, 19 nt, Artificial Sequence
  Description of Artificial Sequence: Synthetic oligonucleotide
uauuugcacaggcccuuuu

SEQ ID NO: 796959 - RNA, 19 nt, Artificial Sequence
  Description of Artificial Sequence: Synthetic oligonucleotide
ugcaagaagguuggcuguc

SEQ ID NO: 796960 - RNA, 19 nt, Artificial Sequence
  Description of Artificial Sequence: Synthetic oligonucleotide
ugaccuuccaaaggagaua

SEQ ID NO: 796961 - RNA, 19 nt, Artificial Sequence
  Description of Artificial Sequence: Synthetic oligonucleotide
augucagagcgucaccauu

SEQ ID NO: 796962 - RNA, 19 nt, Artificial Sequence
  Description of Artificial Sequence: Synthetic oligonucleotide
aagagaguuugagguacuu

SEQ ID NO: 796963 - RNA, 19 nt, Artificial Sequence
  Description of Artificial Sequence: Synthetic oligonucleotide
auacaauuggccagauuua

SEQ ID NO: 796964 - RNA, 19 nt, Artificial Sequence
  Description of Artificial Sequence: Synthetic oligonucleotide
ugcgccuaauaaugucuuc

SEQ ID NO: 796965 - RNA, 19 nt, Artificial Sequence
  Description of Artificial Sequence: Synthetic oligonucleotide
aucacgauccucagaacua

SEQ ID NO: 796966 - RNA, 19 nt, Artificial Sequence
  Description of Artificial Sequence: Synthetic oligonucleotide
cuuugagaccuauaugcau

SEQ ID NO: 796967 - RNA, 19 nt, Artificial Sequence
  Description of Artificial Sequence: Synthetic oligonucleotide
ugcuaaugguguggcgacc

SEQ ID NO: 796968 - RNA, 19 nt, Artificial Sequence
  Description of Artificial Sequence: Synthetic oligonucleotide
gacccuuuggauggaacaa

SEQ ID NO: 796969 - RNA, 19 nt, Artificial Sequence
  Description of Artificial Sequence: Synthetic oligonucleotide
cuaccugaugacugauaca

SEQ ID NO: 796970 - RNA, 19 nt, Artificial Sequence
  Description of Artificial Sequence: Synthetic oligonucleotide
ccaagcuguaaacuucaac

SEQ ID NO: 796971 - RNA, 19 nt, Artificial Sequence
  Description of Artificial Sequence: Synthetic oligonucleotide
gccagaggcgaauaucaac

SEQ ID NO: 796972 - RNA, 19 nt, Artificial Sequence
  Description of Artificial Sequence: Synthetic oligonucleotide
ggguuuguagcaagcauca

SEQ ID NO: 796973 - RNA, 19 nt, Artificial Sequence
  Description of Artificial Sequence: Synthetic oligonucleotide
uccaacggguuuguagcaa

SEQ ID NO: 796974 - RNA, 19 nt, Artificial Sequence
  Description of Artificial Sequence: Synthetic oligonucleotide
cuauagagaagaucacgau

SEQ ID NO: 796975 - RNA, 19 nt, Artificial Sequence
  Description of Artificial Sequence: Synthetic oligonucleotide
acuuagugucuccgacaga

SEQ ID NO: 796976 - RNA, 19 nt, Artificial Sequence
  Description of Artificial Sequence: Synthetic oligonucleotide
ccgacagaagauaaugaga

SEQ ID NO: 796977 - RNA, 19 nt, Artificial Sequence
  Description of Artificial Sequence: Synthetic oligonucleotide
gcaucugguuucugagcgg

SEQ ID NO: 796978 - RNA, 19 nt, Artificial Sequence
  Description of Artificial Sequence: Synthetic oligonucleotide
ugucccugcauuggcugac

SEQ ID NO: 796979 - RNA, 19 nt, Artificial Sequence
  Description of Artificial Sequence: Synthetic oligonucleotide
cagaguaaauguaguggua

SEQ ID NO: 796980 - RNA, 19 nt, Artificial Sequence
  Description of Artificial Sequence: Synthetic oligonucleotide
ccaacggguuuguagcaag

SEQ ID NO: 796981 - RNA, 19 nt, Artificial Sequence
  Description of Artificial Sequence: Synthetic oligonucleotide
caacaaugaccugguugag

SEQ ID NO: 796982 - RNA, 19 nt, Artificial Sequence
  Description of Artificial Sequence: Synthetic oligonucleotide
gagauaugacagcagccuu

SEQ ID NO: 796983 - RNA, 19 nt, Artificial Sequence
  Description of Artificial Sequence: Synthetic oligonucleotide
acccaauuuugaagcaaca

SEQ ID NO: 796984 - RNA, 19 nt, Artificial Sequence
  Description of Artificial Sequence: Synthetic oligonucleotide
ggcaggugauagaauuuag

SEQ ID NO: 796985 - RNA, 19 nt, Artificial Sequence
  Description of Artificial Sequence: Synthetic oligonucleotide
gcugguacgcacagcacug

SEQ ID NO: 796986 - RNA, 19 nt, Artificial Sequence
  Description of Artificial Sequence: Synthetic oligonucleotide
ucgaggaacacggguucuc

SEQ ID NO: 796987 - RNA, 19 nt, Artificial Sequence
  Description of Artificial Sequence: Synthetic oligonucleotide
cgaacaaucacuugcuuua

SEQ ID NO: 796988 - RNA, 19 nt, Artificial Sequence
  Description of Artificial Sequence: Synthetic oligonucleotide
augguguggcgaccauaug

SEQ ID NO: 796989 - RNA, 19 nt, Artificial Sequence
  Description of Artificial Sequence: Synthetic oligonucleotide
cuuucgccucucaucaucu

SEQ ID NO: 796990 - RNA, 19 nt, Artificial Sequence
  Description of Artificial Sequence: Synthetic oligonucleotide
ucucggucguccucucuuu

SEQ ID NO: 796991 - RNA, 19 nt, Artificial Sequence
  Description of Artificial Sequence: Synthetic oligonucleotide
acccuuuggauggaacaaa

SEQ ID NO: 796992 - RNA, 19 nt, Artificial Sequence
  Description of Artificial Sequence: Synthetic oligonucleotide
auaugguuaggaagccuuu

SEQ ID NO: 796993 - RNA, 19 nt, Artificial Sequence
  Description of Artificial Sequence: Synthetic oligonucleotide
guguggcgaccauauguuc

SEQ ID NO: 796994 - RNA, 19 nt, Artificial Sequence
  Description of Artificial Sequence: Synthetic oligonucleotide
uucuuucgccucucaucau

SEQ ID NO: 796995 - RNA, 19 nt, Artificial Sequence
  Description of Artificial Sequence: Synthetic oligonucleotide
ggaacacggguucucugga

SEQ ID NO: 796996 - RNA, 19 nt, Artificial Sequence
  Description of Artificial Sequence: Synthetic oligonucleotide
cuugggcuagugucucuca

SEQ ID NO: 796997 - RNA, 19 nt, Artificial Sequence
  Description of Artificial Sequence: Synthetic oligonucleotide
ggcuagugucucucaauuc

SEQ ID NO: 796998 - RNA, 19 nt, Artificial Sequence
  Description of Artificial Sequence: Synthetic oligonucleotide
cagaggcgaauaucaacaa

SEQ ID NO: 796999 - RNA, 19 nt, Artificial Sequence
  Description of Artificial Sequence: Synthetic oligonucleotide
cucggucguccucucuuug

SEQ ID NO: 797000 - RNA, 19 nt, Artificial Sequence
  Description of Artificial Sequence: Synthetic oligonucleotide
ugagaccuauaugcaucaa

SEQ ID NO: 797001 - RNA, 19 nt, Artificial Sequence
  Description of Artificial Sequence: Synthetic oligonucleotide
cauuggcugacaagagucu

SEQ ID NO: 797002 - RNA, 19 nt, Artificial Sequence
  Description of Artificial Sequence: Synthetic oligonucleotide
gucagagcgucaccauuaa

SEQ ID NO: 797003 - RNA, 19 nt, Artificial Sequence
  Description of Artificial Sequence: Synthetic oligonucleotide
ggccauaacugaagaauga

SEQ ID NO: 797004 - RNA, 19 nt, Artificial Sequence
  Description of Artificial Sequence: Synthetic oligonucleotide
uugaugcaucugguuucug

SEQ ID NO: 797005 - RNA, 19 nt, Artificial Sequence
  Description of Artificial Sequence: Synthetic oligonucleotide
gcuaaugguguggcgacca

SEQ ID NO: 797006 - RNA, 19 nt, Artificial Sequence
  Description of Artificial Sequence: Synthetic oligonucleotide
gaucccgcuccucuuuagu

SEQ ID NO: 797007 - RNA, 19 nt, Artificial Sequence
  Description of Artificial Sequence: Synthetic oligonucleotide
caucuggguaaguccagua

SEQ ID NO: 797008 - RNA, 19 nt, Artificial Sequence
  Description of Artificial Sequence: Synthetic oligonucleotide
auggcaggugauagaauuu

SEQ ID NO: 797009 - RNA, 19 nt, Artificial Sequence
  Description of Artificial Sequence: Synthetic oligonucleotide
gagaucccgcuccucuuua

SEQ ID NO: 797010 - RNA, 19 nt, Artificial Sequence
  Description of Artificial Sequence: Synthetic oligonucleotide
gcaaaucugaugcgccuaa

SEQ ID NO: 797011 - RNA, 19 nt, Artificial Sequence
  Description of Artificial Sequence: Synthetic oligonucleotide
gcgucuugcacaaaauucu

SEQ ID NO: 797012 - RNA, 19 nt, Artificial Sequence
  Description of Artificial Sequence: Synthetic oligonucleotide
gccuaauaaugucuucuua

SEQ ID NO: 797013 - RNA, 19 nt, Artificial Sequence
  Description of Artificial Sequence: Synthetic oligonucleotide
cuguuggcugguucuaccu

SEQ ID NO: 797014 - RNA, 19 nt, Artificial Sequence
  Description of Artificial Sequence: Synthetic oligonucleotide
augcgccuaauaaugucuu

SEQ ID NO: 797015 - RNA, 19 nt, Artificial Sequence
  Description of Artificial Sequence: Synthetic oligonucleotide
gguaaaugucagagcguca

SEQ ID NO: 797016 - RNA, 19 nt, Artificial Sequence
  Description of Artificial Sequence: Synthetic oligonucleotide
guaggcagucagucauaaa

SEQ ID NO: 797017 - RNA, 19 nt, Artificial Sequence
  Description of Artificial Sequence: Synthetic oligonucleotide
gguacgcacagcacugaga

SEQ ID NO: 797018 - RNA, 19 nt, Artificial Sequence
  Description of Artificial Sequence: Synthetic oligonucleotide
auaugacagcagccuuauu

SEQ ID NO: 797019 - RNA, 19 nt, Artificial Sequence
  Description of Artificial Sequence: Synthetic oligonucleotide
caauuugggugaagaaauu

SEQ ID NO: 797020 - RNA, 19 nt, Artificial Sequence
  Description of Artificial Sequence: Synthetic oligonucleotide
ggcgaccauauguucagcu

SEQ ID NO: 797021 - RNA, 19 nt, Artificial Sequence
  Description of Artificial Sequence: Synthetic oligonucleotide
cgucaugcagaguaaaugu

SEQ ID NO: 797022 - RNA, 19 nt, Artificial Sequence
  Description of Artificial Sequence: Synthetic oligonucleotide
acaaagugacugacccuuu

SEQ ID NO: 797023 - RNA, 19 nt, Artificial Sequence
  Description of Artificial Sequence: Synthetic oligonucleotide
caagagucucucggucguc

SEQ ID NO: 797024 - RNA, 19 nt, Artificial Sequence
  Description of Artificial Sequence: Synthetic oligonucleotide
cccgcuccucuuuaguauc

SEQ ID NO: 797025 - RNA, 19 nt, Artificial Sequence
  Description of Artificial Sequence: Synthetic oligonucleotide
ggcgcucugucucuuugaa

SEQ ID NO: 797026 - RNA, 19 nt, Artificial Sequence
  Description of Artificial Sequence: Synthetic oligonucleotide
gcaggugauagaauuuagu

SEQ ID NO: 797027 - RNA, 19 nt, Artificial Sequence
  Description of Artificial Sequence: Synthetic oligonucleotide
guugcgucuugcacaaaau

SEQ ID NO: 797028 - RNA, 19 nt, Artificial Sequence
  Description of Artificial Sequence: Synthetic oligonucleotide
gguguggaacuugcagcac

SEQ ID NO: 797029 - RNA, 19 nt, Artificial Sequence
  Description of Artificial Sequence: Synthetic oligonucleotide
caagggcaaaguugcuggu

SEQ ID NO: 797030 - RNA, 19 nt, Artificial Sequence
  Description of Artificial Sequence: Synthetic oligonucleotide
cacagcuagcaaagccucu

SEQ ID NO: 797031 - RNA, 19 nt, Artificial Sequence
  Description of Artificial Sequence: Synthetic oligonucleotide
cagcucgaggaacacgggu

SEQ ID NO: 797032 - RNA, 19 nt, Artificial Sequence
  Description of Artificial Sequence: Synthetic oligonucleotide
gggcuagugucucucaauu

SEQ ID NO: 797033 - RNA, 19 nt, Artificial Sequence
  Description of Artificial Sequence: Synthetic oligonucleotide
gagauccaacaagggcaaa

SEQ ID NO: 797034 - RNA, 19 nt, Artificial Sequence
  Description of Artificial Sequence: Synthetic oligonucleotide
caacaagggcaaaguugcu

SEQ ID NO: 797035 - RNA, 19 nt, Artificial Sequence
  Description of Artificial Sequence: Synthetic oligonucleotide
acaggcccuuuuaucuuua

SEQ ID NO: 797036 - RNA, 19 nt, Artificial Sequence
  Description of Artificial Sequence: Synthetic oligonucleotide
gguguggcgaccauauguu

SEQ ID NO: 797037 - RNA, 19 nt, Artificial Sequence
  Description of Artificial Sequence: Synthetic oligonucleotide
gacugacccuuuggaugga

SEQ ID NO: 797038 - RNA, 19 nt, Artificial Sequence
  Description of Artificial Sequence: Synthetic oligonucleotide
guuggcugucaaacacuua

SEQ ID NO: 797039 - RNA, 19 nt, Artificial Sequence
  Description of Artificial Sequence: Synthetic oligonucleotide
gggccugacgaaucuuucu

SEQ ID NO: 797040 - RNA, 19 nt, Artificial Sequence
  Description of Artificial Sequence: Synthetic oligonucleotide
acuuuccaacggguuugua

SEQ ID NO: 797041 - RNA, 19 nt, Artificial Sequence
  Description of Artificial Sequence: Synthetic oligonucleotide
ggucggacagugauuaauu

SEQ ID NO: 797042 - RNA, 19 nt, Artificial Sequence
  Description of Artificial Sequence: Synthetic oligonucleotide
agcaagcaucaggcugcca

SEQ ID NO: 797043 - RNA, 19 nt, Artificial Sequence
  Description of Artificial Sequence: Synthetic oligonucleotide
gcagcacuugggcuagugu

SEQ ID NO: 797044 - RNA, 19 nt, Artificial Sequence
  Description of Artificial Sequence: Synthetic oligonucleotide
ccugacgaaucuuucuuuu

SEQ ID NO: 797045 - RNA, 19 nt, Artificial Sequence
  Description of Artificial Sequence: Synthetic oligonucleotide
cuaaugguguggcgaccau

SEQ ID NO: 797046 - RNA, 19 nt, Artificial Sequence
  Description of Artificial Sequence: Synthetic oligonucleotide
gucuccgacagaagauaau

SEQ ID NO: 797047 - RNA, 19 nt, Artificial Sequence
  Description of Artificial Sequence: Synthetic oligonucleotide
cacgauccucagaacuaau

SEQ ID NO: 797048 - RNA, 19 nt, Artificial Sequence
  Description of Artificial Sequence: Synthetic oligonucleotide
caaugaccugguugaguuu

SEQ ID NO: 797049 - RNA, 19 nt, Artificial Sequence
  Description of Artificial Sequence: Synthetic oligonucleotide
cucgaggaacacggguucu

SEQ ID NO: 797050 - RNA, 19 nt, Artificial Sequence
  Description of Artificial Sequence: Synthetic oligonucleotide
cacggguucucuggaauuu

SEQ ID NO: 797051 - RNA, 19 nt, Artificial Sequence
  Description of Artificial Sequence: Synthetic oligonucleotide
caaaucugaugcgccuaau

SEQ ID NO: 797052 - RNA, 19 nt, Artificial Sequence
  Description of Artificial Sequence: Synthetic oligonucleotide
cuucgaugccaggcaccaa

SEQ ID NO: 797053 - RNA, 19 nt, Artificial Sequence
  Description of Artificial Sequence: Synthetic oligonucleotide
gaagggcgcucugucucuu

SEQ ID NO: 797054 - RNA, 19 nt, Artificial Sequence
  Description of Artificial Sequence: Synthetic oligonucleotide
guguugcgucuugcacaaa

SEQ ID NO: 797055 - RNA, 19 nt, Artificial Sequence
  Description of Artificial Sequence: Synthetic oligonucleotide
  modified_base (6)..(6): a, c, u, g, unknown or other
aauacnuuaaaacaaauuc

SEQ ID NO: 797056 - RNA, 19 nt, Artificial Sequence
  Description of Artificial Sequence: Synthetic oligonucleotide
aaugaaacuacucagaugu

SEQ ID NO: 797057 - RNA, 19 nt, Artificial Sequence
  Description of Artificial Sequence: Synthetic oligonucleotide
aaucuauagggauagaauc

SEQ ID NO: 797058 - RNA, 19 nt, Artificial Sequence
  Description of Artificial Sequence: Synthetic oligonucleotide
aacucuaacaaugugauag

SEQ ID NO: 797059 - RNA, 19 nt, Artificial Sequence
  Description of Artificial Sequence: Synthetic oligonucleotide
uguauuacuuuucuaauag

SEQ ID NO: 797060 - RNA, 19 nt, Artificial Sequence
  Description of Artificial Sequence: Synthetic oligonucleotide
aauaaaaggucuuuugaug

SEQ ID NO: 797061 - RNA, 19 nt, Artificial Sequence
  Description of Artificial Sequence: Synthetic oligonucleotide
uauacuaauaauuuacuac

SEQ ID NO: 797062 - RNA, 19 nt, Artificial Sequence
  Description of Artificial Sequence: Synthetic oligonucleotide
  modified_base (16)..(16): a, c, u, g, unknown or other
uaagguaacaaauacnuua

SEQ ID NO: 797063 - RNA, 19 nt, Artificial Sequence
  Description of Artificial Sequence: Synthetic oligonucleotide
aaugugauaggugucacac

SEQ ID NO: 797064 - RNA, 19 nt, Artificial Sequence
  Description of Artificial Sequence: Synthetic oligonucleotide
  modified_base (4)..(4): a, c, u, g, unknown or other
uacnuuaaaacaaauuccu

SEQ ID NO: 797065 - RNA, 19 nt, Artificial Sequence
  Description of Artificial Sequence: Synthetic oligonucleotide
  modified_base (18)..(18): a, c, u, g, unknown or other
uguaagguaacaaauacnu

SEQ ID NO: 797066 - RNA, 19 nt, Artificial Sequence
  Description of Artificial Sequence: Synthetic oligonucleotide
uuauucuuggaaacuaugg

SEQ ID NO: 797067 - RNA, 19 nt, Artificial Sequence
  Description of Artificial Sequence: Synthetic oligonucleotide
  modified_base (5)..(5): a, c, u, g, unknown or other
auacnuuaaaacaaauucc

SEQ ID NO: 797068 - RNA, 19 nt, Artificial Sequence
  Description of Artificial Sequence: Synthetic oligonucleotide
uguuuuaugauguacacau

SEQ ID NO: 797069 - RNA, 19 nt, Artificial Sequence
  Description of Artificial Sequence: Synthetic oligonucleotide
aaucacuaaacucacaaau

SEQ ID NO: 797070 - RNA, 19 nt, Artificial Sequence
  Description of Artificial Sequence: Synthetic oligonucleotide
uuaugugugaaaauuacaa

SEQ ID NO: 797071 - RNA, 19 nt, Artificial Sequence
  Description of Artificial Sequence: Synthetic oligonucleotide
uaguauacuaauaauuuac

SEQ ID NO: 797072 - RNA, 19 nt, Artificial Sequence
  Description of Artificial Sequence: Synthetic oligonucleotide
aauucagauaaacagcuau

SEQ ID NO: 797073 - RNA, 19 nt, Artificial Sequence
  Description of Artificial Sequence: Synthetic oligonucleotide
uauuguauggguauauucu

SEQ ID NO: 797074 - RNA, 19 nt, Artificial Sequence
  Description of Artificial Sequence: Synthetic oligonucleotide
uaugugugaaugaaaauac

SEQ ID NO: 797075 - RNA, 19 nt, Artificial Sequence
  Description of Artificial Sequence: Synthetic oligonucleotide
auugugaucaauaaaaggu

SEQ ID NO: 797076 - RNA, 19 nt, Artificial Sequence
  Description of Artificial Sequence: Synthetic oligonucleotide
uucacuaugcauauaaaau

SEQ ID NO: 797077 - RNA, 19 nt, Artificial Sequence
  Description of Artificial Sequence: Synthetic oligonucleotide
uguacacauaaucuauagg

SEQ ID NO: 797078 - RNA, 19 nt, Artificial Sequence
  Description of Artificial Sequence: Synthetic oligonucleotide
gauaaacagcuauuuaaag

SEQ ID NO: 797079 - RNA, 19 nt, Artificial Sequence
  Description of Artificial Sequence: Synthetic oligonucleotide
gaaucacugaccuuucagg

SEQ ID NO: 797080 - RNA, 19 nt, Artificial Sequence
  Description of Artificial Sequence: Synthetic oligonucleotide
aacucuagugccuacaaau

SEQ ID NO: 797081 - RNA, 19 nt, Artificial Sequence
  Description of Artificial Sequence: Synthetic oligonucleotide
uacaaucuaaucuaaggac

SEQ ID NO: 797082 - RNA, 19 nt, Artificial Sequence
  Description of Artificial Sequence: Synthetic oligonucleotide
ucauaguauacuaauaauu

SEQ ID NO: 797083 - RNA, 19 nt, Artificial Sequence
  Description of Artificial Sequence: Synthetic oligonucleotide
auuguauggguauauucuc

SEQ ID NO: 797084 - RNA, 19 nt, Artificial Sequence
  Description of Artificial Sequence: Synthetic oligonucleotide
aaaugaaacuacucagaug

SEQ ID NO: 797085 - RNA, 19 nt, Artificial Sequence
  Description of Artificial Sequence: Synthetic oligonucleotide
auuucagccaaacauaaaa

SEQ ID NO: 797086 - RNA, 19 nt, Artificial Sequence
  Description of Artificial Sequence: Synthetic oligonucleotide
ucugguuguuuuaugaugu

SEQ ID NO: 797087 - RNA, 19 nt, Artificial Sequence
  Description of Artificial Sequence: Synthetic oligonucleotide
gaauaaaggcagaugaaag

SEQ ID NO: 797088 - RNA, 19 nt, Artificial Sequence
  Description of Artificial Sequence: Synthetic oligonucleotide
ucuaacaaugugauaggug

SEQ ID NO: 797089 - RNA, 19 nt, Artificial Sequence
  Description of Artificial Sequence: Synthetic oligonucleotide
ugucacacaaaacauuaga

SEQ ID NO: 797090 - RNA, 19 nt, Artificial Sequence
  Description of Artificial Sequence: Synthetic oligonucleotide
gaucauaguauacuaauaa

SEQ ID NO: 797091 - RNA, 19 nt, Artificial Sequence
  Description of Artificial Sequence: Synthetic oligonucleotide
ucuagugccuacaaauagc

SEQ ID NO: 797092 - RNA, 19 nt, Artificial Sequence
  Description of Artificial Sequence: Synthetic oligonucleotide
gauacuuguuggcuggagg

SEQ ID NO: 797093 - RNA, 19 nt, Artificial Sequence
  Description of Artificial Sequence: Synthetic oligonucleotide
uuuuauaguaacacggguu

SEQ ID NO: 797094 - RNA, 19 nt, Artificial Sequence
  Description of Artificial Sequence: Synthetic oligonucleotide
acguuuauugaacucuaac

SEQ ID NO: 797095 - RNA, 19 nt, Artificial Sequence
  Description of Artificial Sequence: Synthetic oligonucleotide
ugacuaaccauauucacua

SEQ ID NO: 797096 - RNA, 19 nt, Artificial Sequence
  Description of Artificial Sequence: Synthetic oligonucleotide
ugaauuucagccaaacaua

SEQ ID NO: 797097 - RNA, 19 nt, Artificial Sequence
  Description of Artificial Sequence: Synthetic oligonucleotide
ucacugaccuuucaggcag

SEQ ID NO: 797098 - RNA, 19 nt, Artificial Sequence
  Description of Artificial Sequence: Synthetic oligonucleotide
aguaacacggguuuucuga

SEQ ID NO: 797099 - RNA, 19 nt, Artificial Sequence
  Description of Artificial Sequence: Synthetic oligonucleotide
uaaucuauagggauagaau

SEQ ID NO: 797100 - RNA, 19 nt, Artificial Sequence
  Description of Artificial Sequence: Synthetic oligonucleotide
ucuaauaguuuuauagcau

SEQ ID NO: 797101 - RNA, 19 nt, Artificial Sequence
  Description of Artificial Sequence: Synthetic oligonucleotide
uuaucuacauucuccauau

SEQ ID NO: 797102 - RNA, 19 nt, Artificial Sequence
  Description of Artificial Sequence: Synthetic oligonucleotide
uggaauaauauaccucaug

SEQ ID NO: 797103 - RNA, 19 nt, Artificial Sequence
  Description of Artificial Sequence: Synthetic oligonucleotide
uuccuuauaugggaaaagg

SEQ ID NO: 797104 - RNA, 19 nt, Artificial Sequence
  Description of Artificial Sequence: Synthetic oligonucleotide
uauggguauauucucauuu

SEQ ID NO: 797105 - RNA, 19 nt, Artificial Sequence
  Description of Artificial Sequence: Synthetic oligonucleotide
caagaauacagauucuuuc

SEQ ID NO: 797106 - RNA, 19 nt, Artificial Sequence
  Description of Artificial Sequence: Synthetic oligonucleotide
uccaaagugcccuuuauuc

SEQ ID NO: 797107 - RNA, 19 nt, Artificial Sequence
  Description of Artificial Sequence: Synthetic oligonucleotide
aaccauauucacuaugcau

SEQ ID NO: 797108 - RNA, 19 nt, Artificial Sequence
  Description of Artificial Sequence: Synthetic oligonucleotide
  modified_base (7)..(7): a, c, u, g, unknown or other
aaauacnuuaaaacaaauu

SEQ ID NO: 797109 - RNA, 19 nt, Artificial Sequence
  Description of Artificial Sequence: Synthetic oligonucleotide
uugaucauaguauacuaau

SEQ ID NO: 797110 - RNA, 19 nt, Artificial Sequence
  Description of Artificial Sequence: Synthetic oligonucleotide
ucuaaggacacaaaucauu

SEQ ID NO: 797111 - RNA, 19 nt, Artificial Sequence
  Description of Artificial Sequence: Synthetic oligonucleotide
uuaggaccuagaaaugcag

SEQ ID NO: 797112 - RNA, 19 nt, Artificial Sequence
  Description of Artificial Sequence: Synthetic oligonucleotide
auuuuauaguaacacgggu

SEQ ID NO: 797113 - RNA, 19 nt, Artificial Sequence
  Description of Artificial Sequence: Synthetic oligonucleotide
ugauguacacauaaucuau

SEQ ID NO: 797114 - RNA, 19 nt, Artificial Sequence
  Description of Artificial Sequence: Synthetic oligonucleotide
uacccaguaaauuucacuc

SEQ ID NO: 797115 - RNA, 19 nt, Artificial Sequence
  Description of Artificial Sequence: Synthetic oligonucleotide
auguacacauaaucuauag

SEQ ID NO: 797116 - RNA, 19 nt, Artificial Sequence
  Description of Artificial Sequence: Synthetic oligonucleotide
ucauguguaaauugaauuu

SEQ ID NO: 797117 - RNA, 19 nt, Artificial Sequence
  Description of Artificial Sequence: Synthetic oligonucleotide
uuuagaagacuucuuugaa

SEQ ID NO: 797118 - RNA, 19 nt, Artificial Sequence
  Description of Artificial Sequence: Synthetic oligonucleotide
guaaauugaauuucagcca

SEQ ID NO: 797119 - RNA, 19 nt, Artificial Sequence
  Description of Artificial Sequence: Synthetic oligonucleotide
acccaguaaauuucacucc

SEQ ID NO: 797120 - RNA, 19 nt, Artificial Sequence
  Description of Artificial Sequence: Synthetic oligonucleotide
uaggauacuuguuggcugg

SEQ ID NO: 797121 - RNA, 19 nt, Artificial Sequence
  Description of Artificial Sequence: Synthetic oligonucleotide
agggauagaaucacuaaac

SEQ ID NO: 797122 - RNA, 19 nt, Artificial Sequence
  Description of Artificial Sequence: Synthetic oligonucleotide
acauaaucuauagggauag

SEQ ID NO: 797123 - RNA, 19 nt, Artificial Sequence
  Description of Artificial Sequence: Synthetic oligonucleotide
aagucguguuucuuguguc

SEQ ID NO: 797124 - RNA, 19 nt, Artificial Sequence
  Description of Artificial Sequence: Synthetic oligonucleotide
uguaccuacaaucccgagu

SEQ ID NO: 797125 - RNA, 19 nt, Artificial Sequence
  Description of Artificial Sequence: Synthetic oligonucleotide
auauaccucauguucucuc

SEQ ID NO: 797126 - RNA, 19 nt, Artificial Sequence
  Description of Artificial Sequence: Synthetic oligonucleotide
uucugguuguuuuaugaug

SEQ ID NO: 797127 - RNA, 19 nt, Artificial Sequence
  Description of Artificial Sequence: Synthetic oligonucleotide
uccaauuuaaaauguuauc

SEQ ID NO: 797128 - RNA, 19 nt, Artificial Sequence
  Description of Artificial Sequence: Synthetic oligonucleotide
aaaacauuagacacaguau

SEQ ID NO: 797129 - RNA, 19 nt, Artificial Sequence
  Description of Artificial Sequence: Synthetic oligonucleotide
uacucuuuaucuuucacuu

SEQ ID NO: 797130 - RNA, 19 nt, Artificial Sequence
  Description of Artificial Sequence: Synthetic oligonucleotide
aaaccagaguucaaaacug

SEQ ID NO: 797131 - RNA, 19 nt, Artificial Sequence
  Description of Artificial Sequence: Synthetic oligonucleotide
aaggucuuuugauggaugu

SEQ ID NO: 797132 - RNA, 19 nt, Artificial Sequence
  Description of Artificial Sequence: Synthetic oligonucleotide
caguaaauuucacuccugg

SEQ ID NO: 797133 - RNA, 19 nt, Artificial Sequence
  Description of Artificial Sequence: Synthetic oligonucleotide
ugugaaaauuacaacucua

SEQ ID NO: 797134 - RNA, 19 nt, Artificial Sequence
  Description of Artificial Sequence: Synthetic oligonucleotide
caaucuaaucuaaggacac

SEQ ID NO: 797135 - RNA, 19 nt, Artificial Sequence
  Description of Artificial Sequence: Synthetic oligonucleotide
uccuuauaugggaaaaggu

SEQ ID NO: 797136 - RNA, 19 nt, Artificial Sequence
  Description of Artificial Sequence: Synthetic oligonucleotide
auaaaaccugauguggcac

SEQ ID NO: 797137 - RNA, 19 nt, Artificial Sequence
  Description of Artificial Sequence: Synthetic oligonucleotide
acucuaacaaugugauagg

SEQ ID NO: 797138 - RNA, 19 nt, Artificial Sequence
  Description of Artificial Sequence: Synthetic oligonucleotide
auaggauacuuguuggcug

SEQ ID NO: 797139 - RNA, 19 nt, Artificial Sequence
  Description of Artificial Sequence: Synthetic oligonucleotide
ugugacuaaccauauucac

SEQ ID NO: 797140 - RNA, 19 nt, Artificial Sequence
  Description of Artificial Sequence: Synthetic oligonucleotide
uuuaugauguacacauaau

SEQ ID NO: 797141 - RNA, 19 nt, Artificial Sequence
  Description of Artificial Sequence: Synthetic oligonucleotide
cuaacaaugugauaggugu

SEQ ID NO: 797142 - RNA, 19 nt, Artificial Sequence
  Description of Artificial Sequence: Synthetic oligonucleotide
acuaaccauauucacuaug

SEQ ID NO: 797143 - RNA, 19 nt, Artificial Sequence
  Description of Artificial Sequence: Synthetic oligonucleotide
cuuuaggaccuagaaaugc

SEQ ID NO: 797144 - RNA, 19 nt, Artificial Sequence
  Description of Artificial Sequence: Synthetic oligonucleotide
uuuaaauucucagucuuua

SEQ ID NO: 797145 - RNA, 19 nt, Artificial Sequence
  Description of Artificial Sequence: Synthetic oligonucleotide
uaaaaccugauguggcacc

SEQ ID NO: 797146 - RNA, 19 nt, Artificial Sequence
  Description of Artificial Sequence: Synthetic oligonucleotide
ugugaaugugaccauggau

SEQ ID NO: 797147 - RNA, 19 nt, Artificial Sequence
  Description of Artificial Sequence: Synthetic oligonucleotide
auaguauacuaauaauuua

SEQ ID NO: 797148 - RNA, 19 nt, Artificial Sequence
  Description of Artificial Sequence: Synthetic oligonucleotide
auaagaauaaaggcagaug

SEQ ID NO: 797149 - RNA, 19 nt, Artificial Sequence
  Description of Artificial Sequence: Synthetic oligonucleotide
aacacggguuuucugagaa

SEQ ID NO: 797150 - RNA, 19 nt, Artificial Sequence
  Description of Artificial Sequence: Synthetic oligonucleotide
aucauaguauacuaauaau

SEQ ID NO: 797151 - RNA, 19 nt, Artificial Sequence
  Description of Artificial Sequence: Synthetic oligonucleotide
ucuauagggauagaaucac

SEQ ID NO: 797152 - RNA, 19 nt, Artificial Sequence
  Description of Artificial Sequence: Synthetic oligonucleotide
uccuuuagugauucauucc

SEQ ID NO: 797153 - RNA, 19 nt, Artificial Sequence
  Description of Artificial Sequence: Synthetic oligonucleotide
cuuauaugggaaaaggucu

SEQ ID NO: 797154 - RNA, 19 nt, Artificial Sequence
  Description of Artificial Sequence: Synthetic oligonucleotide
acaaucuaaucuaaggaca

SEQ ID NO: 797155 - RNA, 19 nt, Artificial Sequence
  Description of Artificial Sequence: Synthetic oligonucleotide
auugaauuucagccaaaca

SEQ ID NO: 797156 - RNA, 19 nt, Artificial Sequence
  Description of Artificial Sequence: Synthetic oligonucleotide
cucuagugccuacaaauag

SEQ ID NO: 797157 - RNA, 19 nt, Artificial Sequence
  Description of Artificial Sequence: Synthetic oligonucleotide
gaaacuacucagaugugac

SEQ ID NO: 797158 - RNA, 19 nt, Artificial Sequence
  Description of Artificial Sequence: Synthetic oligonucleotide
gggaaauugaaguugagaa

SEQ ID NO: 797159 - RNA, 19 nt, Artificial Sequence
  Description of Artificial Sequence: Synthetic oligonucleotide
accgcuguaccuacaaucc

SEQ ID NO: 797160 - RNA, 19 nt, Artificial Sequence
  Description of Artificial Sequence: Synthetic oligonucleotide
acugguauuguauggguau

SEQ ID NO: 797161 - RNA, 19 nt, Artificial Sequence
  Description of Artificial Sequence: Synthetic oligonucleotide
ucucaaggaggaaauguaa

SEQ ID NO: 797162 - RNA, 19 nt, Artificial Sequence
  Description of Artificial Sequence: Synthetic oligonucleotide
uuagugauucauuccuugu

SEQ ID NO: 797163 - RNA, 19 nt, Artificial Sequence
  Description of Artificial Sequence: Synthetic oligonucleotide
ugaucauaguauacuaaua

SEQ ID NO: 797164 - RNA, 19 nt, Artificial Sequence
  Description of Artificial Sequence: Synthetic oligonucleotide
cugcucauguuauucuugg

SEQ ID NO: 797165 - RNA, 19 nt, Artificial Sequence
  Description of Artificial Sequence: Synthetic oligonucleotide
uguuauucuuggaaacuau

SEQ ID NO: 797166 - RNA, 19 nt, Artificial Sequence
  Description of Artificial Sequence: Synthetic oligonucleotide
uaauauaccucauguucuc

SEQ ID NO: 797167 - RNA, 19 nt, Artificial Sequence
  Description of Artificial Sequence: Synthetic oligonucleotide
uaaccauauucacuaugca

SEQ ID NO: 797168 - RNA, 19 nt, Artificial Sequence
  Description of Artificial Sequence: Synthetic oligonucleotide
aaccagaguucaaaacugg

SEQ ID NO: 797169 - RNA, 19 nt, Artificial Sequence
  Description of Artificial Sequence: Synthetic oligonucleotide
auaaucuauagggauagaa

SEQ ID NO: 797170 - RNA, 19 nt, Artificial Sequence
  Description of Artificial Sequence: Synthetic oligonucleotide
aauuacaacucuagugccu

SEQ ID NO: 797171 - RNA, 19 nt, Artificial Sequence
  Description of Artificial Sequence: Synthetic oligonucleotide
augaugcucacaagaauac

SEQ ID NO: 797172 - RNA, 19 nt, Artificial Sequence
  Description of Artificial Sequence: Synthetic oligonucleotide
caaagugcccuuuauucuc

SEQ ID NO: 797173 - RNA, 19 nt, Artificial Sequence
  Description of Artificial Sequence: Synthetic oligonucleotide
aguauacuaauaauuuacu

SEQ ID NO: 797174 - RNA, 19 nt, Artificial Sequence
  Description of Artificial Sequence: Synthetic oligonucleotide
uccguuuugagccuccuuu

SEQ ID NO: 797175 - RNA, 19 nt, Artificial Sequence
  Description of Artificial Sequence: Synthetic oligonucleotide
uucuacucuaucaccuucu

SEQ ID NO: 797176 - RNA, 19 nt, Artificial Sequence
  Description of Artificial Sequence: Synthetic oligonucleotide
agugauucauuccuuguua

SEQ ID NO: 797177 - RNA, 19 nt, Artificial Sequence
  Description of Artificial Sequence: Synthetic oligonucleotide
  modified_base (9)..(9): a, c, u, g, unknown or other
acaaauacnuuaaaacaaa

SEQ ID NO: 797178 - RNA, 19 nt, Artificial Sequence
  Description of Artificial Sequence: Synthetic oligonucleotide
uacuaauaauuuacuacuu

SEQ ID NO: 797179 - RNA, 19 nt, Artificial Sequence
  Description of Artificial Sequence: Synthetic oligonucleotide
guaugugugaaugaaaaua

SEQ ID NO: 797180 - RNA, 19 nt, Artificial Sequence
  Description of Artificial Sequence: Synthetic oligonucleotide
uacaaucccgaguucuuca

SEQ ID NO: 797181 - RNA, 19 nt, Artificial Sequence
  Description of Artificial Sequence: Synthetic oligonucleotide
cacuaugcauauaaaauaa

SEQ ID NO: 797182 - RNA, 19 nt, Artificial Sequence
  Description of Artificial Sequence: Synthetic oligonucleotide
ccuuauaugggaaaagguc

SEQ ID NO: 797183 - RNA, 19 nt, Artificial Sequence
  Description of Artificial Sequence: Synthetic oligonucleotide
guaacacggguuuucugag

SEQ ID NO: 797184 - RNA, 19 nt, Artificial Sequence
  Description of Artificial Sequence: Synthetic oligonucleotide
aaaauagugucaggagcca

SEQ ID NO: 797185 - RNA, 19 nt, Artificial Sequence
  Description of Artificial Sequence: Synthetic oligonucleotide
cacaguaucugcccaguag

SEQ ID NO: 797186 - RNA, 19 nt, Artificial Sequence
  Description of Artificial Sequence: Synthetic oligonucleotide
cauaguauacuaauaauuu

SEQ ID NO: 797187 - RNA, 19 nt, Artificial Sequence
  Description of Artificial Sequence: Synthetic oligonucleotide
aguaucugcccaguaggcg

SEQ ID NO: 797188 - RNA, 19 nt, Artificial Sequence
  Description of Artificial Sequence: Synthetic oligonucleotide
uaccgcuguaccuacaauc

SEQ ID NO: 797189 - RNA, 19 nt, Artificial Sequence
  Description of Artificial Sequence: Synthetic oligonucleotide
ggauagaaucacuaaacuc

SEQ ID NO: 797190 - RNA, 19 nt, Artificial Sequence
  Description of Artificial Sequence: Synthetic oligonucleotide
auugcacauauuaugugug

SEQ ID NO: 797191 - RNA, 19 nt, Artificial Sequence
  Description of Artificial Sequence: Synthetic oligonucleotide
uguaugugugaaugaaaau

SEQ ID NO: 797192 - RNA, 19 nt, Artificial Sequence
  Description of Artificial Sequence: Synthetic oligonucleotide
ugcuaugccuguauuacuu

SEQ ID NO: 797193 - RNA, 19 nt, Artificial Sequence
  Description of Artificial Sequence: Synthetic oligonucleotide
aaguaccuuuuaaagauaa

SEQ ID NO: 797194 - RNA, 19 nt, Artificial Sequence
  Description of Artificial Sequence: Synthetic oligonucleotide
acauuagacacaguaucug

SEQ ID NO: 797195 - RNA, 19 nt, Artificial Sequence
  Description of Artificial Sequence: Synthetic oligonucleotide
guauacuaauaauuuacua

SEQ ID NO: 797196 - RNA, 19 nt, Artificial Sequence
  Description of Artificial Sequence: Synthetic oligonucleotide
aaaaggucuuuugauggau

SEQ ID NO: 797197 - RNA, 19 nt, Artificial Sequence
  Description of Artificial Sequence: Synthetic oligonucleotide
aaccugauguggcacccug

SEQ ID NO: 797198 - RNA, 19 nt, Artificial Sequence
  Description of Artificial Sequence: Synthetic oligonucleotide
aucuauagggauagaauca

SEQ ID NO: 797199 - RNA, 19 nt, Artificial Sequence
  Description of Artificial Sequence: Synthetic oligonucleotide
uugaacguuuauugaacuc

SEQ ID NO: 797200 - RNA, 19 nt, Artificial Sequence
  Description of Artificial Sequence: Synthetic oligonucleotide
ggcuugucuacacaaauac

SEQ ID NO: 797201 - RNA, 19 nt, Artificial Sequence
  Description of Artificial Sequence: Synthetic oligonucleotide
aauguagacuuggaguuua

SEQ ID NO: 797202 - RNA, 19 nt, Artificial Sequence
  Description of Artificial Sequence: Synthetic oligonucleotide
  modified_base (2)..(2): a, c, u, g, unknown or other
cnuuaaaacaaauuccuuu

SEQ ID NO: 797203 - RNA, 19 nt, Artificial Sequence
  Description of Artificial Sequence: Synthetic oligonucleotide
  modified_base (6)..(6): a, c, u, g, unknown or other
ucagcncuuggccuaccgc

SEQ ID NO: 797204 - RNA, 19 nt, Artificial Sequence
  Description of Artificial Sequence: Synthetic oligonucleotide
aaucuaaucuaaggacaca

SEQ ID NO: 797205 - RNA, 19 nt, Artificial Sequence
  Description of Artificial Sequence: Synthetic oligonucleotide
uugcacauauuauguguga

SEQ ID NO: 797206 - RNA, 19 nt, Artificial Sequence
  Description of Artificial Sequence: Synthetic oligonucleotide
uguccacaaccgcagcucc

SEQ ID NO: 797207 - RNA, 19 nt, Artificial Sequence
  Description of Artificial Sequence: Synthetic oligonucleotide
ugguacccaguaaauuuca

SEQ ID NO: 797208 - RNA, 19 nt, Artificial Sequence
  Description of Artificial Sequence: Synthetic oligonucleotide
uguucagaguucccagacu

SEQ ID NO: 797209 - RNA, 19 nt, Artificial Sequence
  Description of Artificial Sequence: Synthetic oligonucleotide
aucuaaucuaaggacacaa

SEQ ID NO: 797210 - RNA, 19 nt, Artificial Sequence
  Description of Artificial Sequence: Synthetic oligonucleotide
cuuuugauggaugucauua

SEQ ID NO: 797211 - RNA, 19 nt, Artificial Sequence
  Description of Artificial Sequence: Synthetic oligonucleotide
gugauucauuccuuguuac

SEQ ID NO: 797212 - RNA, 19 nt, Artificial Sequence
  Description of Artificial Sequence: Synthetic oligonucleotide
aggcguacaaucuaaucua

SEQ ID NO: 797213 - RNA, 19 nt, Artificial Sequence
  Description of Artificial Sequence: Synthetic oligonucleotide
aggucuuuaggaccuagaa

SEQ ID NO: 797214 - RNA, 19 nt, Artificial Sequence
  Description of Artificial Sequence: Synthetic oligonucleotide
cugguacccaguaaauuuc

SEQ ID NO: 797215 - RNA, 19 nt, Artificial Sequence
  Description of Artificial Sequence: Synthetic oligonucleotide
uuuuccguuuugagccucc

SEQ ID NO: 797216 - RNA, 19 nt, Artificial Sequence
  Description of Artificial Sequence: Synthetic oligonucleotide
auacuuggaacugcccuuc

SEQ ID NO: 797217 - RNA, 19 nt, Artificial Sequence
  Description of Artificial Sequence: Synthetic oligonucleotide
ucuaguccagaagaaaauu

SEQ ID NO: 797218 - RNA, 19 nt, Artificial Sequence
  Description of Artificial Sequence: Synthetic oligonucleotide
auauuaugugugaaaauua

SEQ ID NO: 797219 - RNA, 19 nt, Artificial Sequence
  Description of Artificial Sequence: Synthetic oligonucleotide
ucacaagaauacagauucu

SEQ ID NO: 797220 - RNA, 19 nt, Artificial Sequence
  Description of Artificial Sequence: Synthetic oligonucleotide
uaauucagauaaacagcua

SEQ ID NO: 797221 - RNA, 19 nt, Artificial Sequence
  Description of Artificial Sequence: Synthetic oligonucleotide
aggaccuagaaaugcaguu

SEQ ID NO: 797222 - RNA, 19 nt, Artificial Sequence
  Description of Artificial Sequence: Synthetic oligonucleotide
ggaacugcccuucaccagc

SEQ ID NO: 797223 - RNA, 19 nt, Artificial Sequence
  Description of Artificial Sequence: Synthetic oligonucleotide
uacugguauuguaugggua

SEQ ID NO: 797224 - RNA, 19 nt, Artificial Sequence
  Description of Artificial Sequence: Synthetic oligonucleotide
ugcacauauuaugugugaa

SEQ ID NO: 797225 - RNA, 19 nt, Artificial Sequence
  Description of Artificial Sequence: Synthetic oligonucleotide
uuacauggaacugguguuc

SEQ ID NO: 797226 - RNA, 19 nt, Artificial Sequence
  Description of Artificial Sequence: Synthetic oligonucleotide
gauaggugucacacaaaac

SEQ ID NO: 797227 - RNA, 19 nt, Artificial Sequence
  Description of Artificial Sequence: Synthetic oligonucleotide
  modified_base (7)..(7): a, c, u, g, unknown or other
cucagcncuuggccuaccg

SEQ ID NO: 797228 - RNA, 19 nt, Artificial Sequence
  Description of Artificial Sequence: Synthetic oligonucleotide
ggaguuuacauuuuauagu

SEQ ID NO: 797229 - RNA, 19 nt, Artificial Sequence
  Description of Artificial Sequence: Synthetic oligonucleotide
ugugucauugccggcgucu

SEQ ID NO: 797230 - RNA, 19 nt, Artificial Sequence
  Description of Artificial Sequence: Synthetic oligonucleotide
gaagucguguuucuugugu

SEQ ID NO: 797231 - RNA, 19 nt, Artificial Sequence
  Description of Artificial Sequence: Synthetic oligonucleotide
acaacucuagugccuacaa

SEQ ID NO: 797232 - RNA, 19 nt, Artificial Sequence
  Description of Artificial Sequence: Synthetic oligonucleotide
auggguauauucucauuuu

SEQ ID NO: 797233 - RNA, 19 nt, Artificial Sequence
  Description of Artificial Sequence: Synthetic oligonucleotide
ugaugcucacaagaauaca

SEQ ID NO: 797234 - RNA, 19 nt, Artificial Sequence
  Description of Artificial Sequence: Synthetic oligonucleotide
gaauaauauaccucauguu

SEQ ID NO: 797235 - RNA, 19 nt, Artificial Sequence
  Description of Artificial Sequence: Synthetic oligonucleotide
auuuccgggacuguuuaga

SEQ ID NO: 797236 - RNA, 19 nt, Artificial Sequence
  Description of Artificial Sequence: Synthetic oligonucleotide
aaagugcccuuuauucuca

SEQ ID NO: 797237 - RNA, 19 nt, Artificial Sequence
  Description of Artificial Sequence: Synthetic oligonucleotide
uaauguugccaugaccuua

SEQ ID NO: 797238 - RNA, 19 nt, Artificial Sequence
  Description of Artificial Sequence: Synthetic oligonucleotide
augugacuaaccauauuca

SEQ ID NO: 797239 - RNA, 19 nt, Artificial Sequence
  Description of Artificial Sequence: Synthetic oligonucleotide
uacaacucuagugccuaca

SEQ ID NO: 797240 - RNA, 19 nt, Artificial Sequence
  Description of Artificial Sequence: Synthetic oligonucleotide
caauaaaaggucuuuugau

SEQ ID NO: 797241 - RNA, 19 nt, Artificial Sequence
  Description of Artificial Sequence: Synthetic oligonucleotide
ggaaauugaaguugagaaa

SEQ ID NO: 797242 - RNA, 19 nt, Artificial Sequence
  Description of Artificial Sequence: Synthetic oligonucleotide
uuaauccugcuaugccugu

SEQ ID NO: 797243 - RNA, 19 nt, Artificial Sequence
  Description of Artificial Sequence: Synthetic oligonucleotide
acuacuuauuacauuuaaa

SEQ ID NO: 797244 - RNA, 19 nt, Artificial Sequence
  Description of Artificial Sequence: Synthetic oligonucleotide
cacauaaucuauagggaua

SEQ ID NO: 797245 - RNA, 19 nt, Artificial Sequence
  Description of Artificial Sequence: Synthetic oligonucleotide
gccuguauuacuuuucuaa

SEQ ID NO: 797246 - RNA, 19 nt, Artificial Sequence
  Description of Artificial Sequence: Synthetic oligonucleotide
ugaccuuacuguucaugaa

SEQ ID NO: 797247 - RNA, 19 nt, Artificial Sequence
  Description of Artificial Sequence: Synthetic oligonucleotide
auuuaaaguaggaccuaga

SEQ ID NO: 797248 - RNA, 19 nt, Artificial Sequence
  Description of Artificial Sequence: Synthetic oligonucleotide
agauuuccgggacuguuua

SEQ ID NO: 797249 - RNA, 19 nt, Artificial Sequence
  Description of Artificial Sequence: Synthetic oligonucleotide
guaccuacaaucccgaguu

SEQ ID NO: 797250 - RNA, 19 nt, Artificial Sequence
  Description of Artificial Sequence: Synthetic oligonucleotide
acuacucagaugugacuaa

SEQ ID NO: 797251 - RNA, 19 nt, Artificial Sequence
  Description of Artificial Sequence: Synthetic oligonucleotide
ggcgucuccgcccucagag

SEQ ID NO: 797252 - RNA, 19 nt, Artificial Sequence
  Description of Artificial Sequence: Synthetic oligonucleotide
uuggccuaccgcuguaccu

SEQ ID NO: 797253 - RNA, 19 nt, Artificial Sequence
  Description of Artificial Sequence: Synthetic oligonucleotide
guugaacguuuauugaacu

SEQ ID NO: 797254 - RNA, 19 nt, Artificial Sequence
  Description of Artificial Sequence: Synthetic oligonucleotide
auguuauucuuggaaacua

SEQ ID NO: 797255 - RNA, 19 nt, Artificial Sequence
  Description of Artificial Sequence: Synthetic oligonucleotide
ugacaaaaccagaguucaa

SEQ ID NO: 797256 - RNA, 19 nt, Artificial Sequence
  Description of Artificial Sequence: Synthetic oligonucleotide
cuuggccuaccgcuguacc

SEQ ID NO: 797257 - RNA, 19 nt, Artificial Sequence
  Description of Artificial Sequence: Synthetic oligonucleotide
ugccaugaccuuacuguuc

SEQ ID NO: 797258 - RNA, 19 nt, Artificial Sequence
  Description of Artificial Sequence: Synthetic oligonucleotide
gauguacacauaaucuaua

SEQ ID NO: 797259 - RNA, 19 nt, Artificial Sequence
  Description of Artificial Sequence: Synthetic oligonucleotide
caaccgcagcuccucaagg

SEQ ID NO: 797260 - RNA, 19 nt, Artificial Sequence
  Description of Artificial Sequence: Synthetic oligonucleotide
cguuuauugaacucuaaca

SEQ ID NO: 797261 - RNA, 19 nt, Artificial Sequence
  Description of Artificial Sequence: Synthetic oligonucleotide
aggucuuuugauggauguc

SEQ ID NO: 797262 - RNA, 19 nt, Artificial Sequence
  Description of Artificial Sequence: Synthetic oligonucleotide
auugucugguacccaguaa

SEQ ID NO: 797263 - RNA, 19 nt, Artificial Sequence
  Description of Artificial Sequence: Synthetic oligonucleotide
gugccuacaaauagcauaa

SEQ ID NO: 797264 - RNA, 19 nt, Artificial Sequence
  Description of Artificial Sequence: Synthetic oligonucleotide
agucugaagucguguuucu

SEQ ID NO: 797265 - RNA, 19 nt, Artificial Sequence
  Description of Artificial Sequence: Synthetic oligonucleotide
  modified_base (3)..(3): a, c, u, g, unknown or other
acnuuaaaacaaauuccuu

SEQ ID NO: 797266 - RNA, 19 nt, Artificial Sequence
  Description of Artificial Sequence: Synthetic oligonucleotide
augugauaggugucacaca

SEQ ID NO: 797267 - RNA, 19 nt, Artificial Sequence
  Description of Artificial Sequence: Synthetic oligonucleotide
guaucugcccaguaggcgu

SEQ ID NO: 797268 - RNA, 19 nt, Artificial Sequence
  Description of Artificial Sequence: Synthetic oligonucleotide
auucagauaaacagcuauu

SEQ ID NO: 797269 - RNA, 19 nt, Artificial Sequence
  Description of Artificial Sequence: Synthetic oligonucleotide
aaggucuuuaggaccuaga

SEQ ID NO: 797270 - RNA, 19 nt, Artificial Sequence
  Description of Artificial Sequence: Synthetic oligonucleotide
gcucauguuauucuuggaa

SEQ ID NO: 797271 - RNA, 19 nt, Artificial Sequence
  Description of Artificial Sequence: Synthetic oligonucleotide
uuacaacucuagugccuac

SEQ ID NO: 797272 - RNA, 19 nt, Artificial Sequence
  Description of Artificial Sequence: Synthetic oligonucleotide
acaaucccgaguucuucau

SEQ ID NO: 797273 - RNA, 19 nt, Artificial Sequence
  Description of Artificial Sequence: Synthetic oligonucleotide
cuacucagaugugacuaac

SEQ ID NO: 797274 - RNA, 19 nt, Artificial Sequence
  Description of Artificial Sequence: Synthetic oligonucleotide
  modified_base (8)..(8): a, c, u, g, unknown or other
caaauacnuuaaaacaaau

SEQ ID NO: 797275 - RNA, 19 nt, Artificial Sequence
  Description of Artificial Sequence: Synthetic oligonucleotide
agguauuagcugcacuguu

SEQ ID NO: 797276 - RNA, 19 nt, Artificial Sequence
  Description of Artificial Sequence: Synthetic oligonucleotide
gcccuuuauucucaaggag

SEQ ID NO: 797277 - RNA, 19 nt, Artificial Sequence
  Description of Artificial Sequence: Synthetic oligonucleotide
uaucugcccaguaggcgua

SEQ ID NO: 797278 - RNA, 19 nt, Artificial Sequence
  Description of Artificial Sequence: Synthetic oligonucleotide
gugacuaaccauauucacu

SEQ ID NO: 797279 - RNA, 19 nt, Artificial Sequence
  Description of Artificial Sequence: Synthetic oligonucleotide
gccaugaccuuacuguuca

SEQ ID NO: 797280 - RNA, 19 nt, Artificial Sequence
  Description of Artificial Sequence: Synthetic oligonucleotide
cuacaaucccgaguucuuc

SEQ ID NO: 797281 - RNA, 19 nt, Artificial Sequence
  Description of Artificial Sequence: Synthetic oligonucleotide
auguagacuuggaguuuac

SEQ ID NO: 797282 - RNA, 19 nt, Artificial Sequence
  Description of Artificial Sequence: Synthetic oligonucleotide
cuguaccuacaaucccgag

SEQ ID NO: 797283 - RNA, 19 nt, Artificial Sequence
  Description of Artificial Sequence: Synthetic oligonucleotide
aagugcccuuuauucucaa

SEQ ID NO: 797284 - RNA, 19 nt, Artificial Sequence
  Description of Artificial Sequence: Synthetic oligonucleotide
cauaagaauaaaggcagau

SEQ ID NO: 797285 - RNA, 19 nt, Artificial Sequence
  Description of Artificial Sequence: Synthetic oligonucleotide
gggauagaaucacuaaacu

SEQ ID NO: 797286 - RNA, 19 nt, Artificial Sequence
  Description of Artificial Sequence: Synthetic oligonucleotide
  modified_base (4)..(4): a, c, u, g, unknown or other
agcncuuggccuaccgcug

SEQ ID NO: 797287 - RNA, 19 nt, Artificial Sequence
  Description of Artificial Sequence: Synthetic oligonucleotide
cugaagucguguuucuugu

SEQ ID NO: 797288 - RNA, 19 nt, Artificial Sequence
  Description of Artificial Sequence: Synthetic oligonucleotide
caguaggcguacaaucuaa

SEQ ID NO: 797289 - RNA, 19 nt, Artificial Sequence
  Description of Artificial Sequence: Synthetic oligonucleotide
acucuagugccuacaaaua

SEQ ID NO: 797290 - RNA, 19 nt, Artificial Sequence
  Description of Artificial Sequence: Synthetic oligonucleotide
aguaccuuuuaaagauaaa

SEQ ID NO: 797291 - RNA, 19 nt, Artificial Sequence
  Description of Artificial Sequence: Synthetic oligonucleotide
ccuuuagugauucauuccu

SEQ ID NO: 797292 - RNA, 19 nt, Artificial Sequence
  Description of Artificial Sequence: Synthetic oligonucleotide
gcuguuauauguuccaauu

SEQ ID NO: 797293 - RNA, 19 nt, Artificial Sequence
  Description of Artificial Sequence: Synthetic oligonucleotide
  modified_base (5)..(5): a, c, u, g, unknown or other
cagcncuuggccuaccgcu

SEQ ID NO: 797294 - RNA, 19 nt, Artificial Sequence
  Description of Artificial Sequence: Synthetic oligonucleotide
uuuccguuuugagccuccu

SEQ ID NO: 797295 - RNA, 19 nt, Artificial Sequence
  Description of Artificial Sequence: Synthetic oligonucleotide
aggugucacacaaaacauu

SEQ ID NO: 797296 - RNA, 19 nt, Artificial Sequence
  Description of Artificial Sequence: Synthetic oligonucleotide
acccuguuacauggaacug

SEQ ID NO: 797297 - RNA, 19 nt, Artificial Sequence
  Description of Artificial Sequence: Synthetic oligonucleotide
aguaggcguacaaucuaau

SEQ ID NO: 797298 - RNA, 19 nt, Artificial Sequence
  Description of Artificial Sequence: Synthetic oligonucleotide
uuccguuuugagccuccuu

SEQ ID NO: 797299 - RNA, 19 nt, Artificial Sequence
  Description of Artificial Sequence: Synthetic oligonucleotide
cuauagggauagaaucacu

SEQ ID NO: 797300 - RNA, 19 nt, Artificial Sequence
  Description of Artificial Sequence: Synthetic oligonucleotide
cauugccggcgucuccgcc

SEQ ID NO: 797301 - RNA, 19 nt, Artificial Sequence
  Description of Artificial Sequence: Synthetic oligonucleotide
cuauuuaaaguaggaccua

SEQ ID NO: 797302 - RNA, 19 nt, Artificial Sequence
  Description of Artificial Sequence: Synthetic oligonucleotide
cauacuuggaacugcccuu

SEQ ID NO: 797303 - RNA, 19 nt, Artificial Sequence
  Description of Artificial Sequence: Synthetic oligonucleotide
gcguacaaucuaaucuaag

SEQ ID NO: 797304 - RNA, 19 nt, Artificial Sequence
  Description of Artificial Sequence: Synthetic oligonucleotide
uggagauuuccgggacugu

SEQ ID NO: 797305 - RNA, 19 nt, Artificial Sequence
  Description of Artificial Sequence: Synthetic oligonucleotide
  modified_base (9)..(9): a, c, u, g, unknown or other
uccucagcncuuggccuac

SEQ ID NO: 797306 - RNA, 19 nt, Artificial Sequence
  Description of Artificial Sequence: Synthetic oligonucleotide
ccugauguggcacccuguc

SEQ ID NO: 797307 - RNA, 19 nt, Artificial Sequence
  Description of Artificial Sequence: Synthetic oligonucleotide
cuuuagugauucauuccuu

SEQ ID NO: 797308 - RNA, 19 nt, Artificial Sequence
  Description of Artificial Sequence: Synthetic oligonucleotide
cuuuauucucaaggaggaa

SEQ ID NO: 797309 - RNA, 19 nt, Artificial Sequence
  Description of Artificial Sequence: Synthetic oligonucleotide
ccaccucuuuagacuauag

SEQ ID NO: 797310 - RNA, 19 nt, Artificial Sequence
  Description of Artificial Sequence: Synthetic oligonucleotide
cucuaacaaugugauaggu

SEQ ID NO: 797311 - RNA, 19 nt, Artificial Sequence
  Description of Artificial Sequence: Synthetic oligonucleotide
gguacccaguaaauuucac

SEQ ID NO: 797312 - RNA, 19 nt, Artificial Sequence
  Description of Artificial Sequence: Synthetic oligonucleotide
gacuaaccauauucacuau

SEQ ID NO: 797313 - RNA, 19 nt, Artificial Sequence
  Description of Artificial Sequence: Synthetic oligonucleotide
ugccuacaaauagcauaaa

SEQ ID NO: 797314 - RNA, 19 nt, Artificial Sequence
  Description of Artificial Sequence: Synthetic oligonucleotide
caccucuuuagacuauagu

SEQ ID NO: 797315 - RNA, 19 nt, Artificial Sequence
  Description of Artificial Sequence: Synthetic oligonucleotide
cuaugccuguauuacuuuu

SEQ ID NO: 797316 - RNA, 19 nt, Artificial Sequence
  Description of Artificial Sequence: Synthetic oligonucleotide
  modified_base (17)..(17): a, c, u, g, unknown or other
guaagguaacaaauacnuu

SEQ ID NO: 797317 - RNA, 19 nt, Artificial Sequence
  Description of Artificial Sequence: Synthetic oligonucleotide
gugucaggagccaaguuuu

SEQ ID NO: 797318 - RNA, 19 nt, Artificial Sequence
  Description of Artificial Sequence: Synthetic oligonucleotide
ucugcccaguaggcguaca

SEQ ID NO: 797319 - RNA, 19 nt, Artificial Sequence
  Description of Artificial Sequence: Synthetic oligonucleotide
gugucauugccggcgucuc

SEQ ID NO: 797320 - RNA, 19 nt, Artificial Sequence
  Description of Artificial Sequence: Synthetic oligonucleotide
gcuguaccuacaaucccga

SEQ ID NO: 797321 - RNA, 19 nt, Artificial Sequence
  Description of Artificial Sequence: Synthetic oligonucleotide
ccgcuguaccuacaauccc

SEQ ID NO: 797322 - RNA, 19 nt, Artificial Sequence
  Description of Artificial Sequence: Synthetic oligonucleotide
cugcuaugccuguauuacu

SEQ ID NO: 797323 - RNA, 19 nt, Artificial Sequence
  Description of Artificial Sequence: Synthetic oligonucleotide
ggaaacuauggaugguauu

SEQ ID NO: 797324 - RNA, 19 nt, Artificial Sequence
  Description of Artificial Sequence: Synthetic oligonucleotide
ggcguacaaucuaaucuaa

SEQ ID NO: 797325 - RNA, 19 nt, Artificial Sequence
  Description of Artificial Sequence: Synthetic oligonucleotide
cugauguggcacccugucu

SEQ ID NO: 797326 - RNA, 19 nt, Artificial Sequence
  Description of Artificial Sequence: Synthetic oligonucleotide
cagcuguuauauguuccaa

SEQ ID NO: 797327 - RNA, 19 nt, Artificial Sequence
  Description of Artificial Sequence: Synthetic oligonucleotide
gucguguuucuugugucau

SEQ ID NO: 797328 - RNA, 19 nt, Artificial Sequence
  Description of Artificial Sequence: Synthetic oligonucleotide
ccuaccgcuguaccuacaa

SEQ ID NO: 797329 - RNA, 19 nt, Artificial Sequence
  Description of Artificial Sequence: Synthetic oligonucleotide
gccucuaguccagaagaaa

SEQ ID NO: 797330 - RNA, 19 nt, Artificial Sequence
  Description of Artificial Sequence: Synthetic oligonucleotide
gcgucuccgcccucagagc

SEQ ID NO: 797331 - RNA, 19 nt, Artificial Sequence
  Description of Artificial Sequence: Synthetic oligonucleotide
ggaccuagaaaugcaguuu

SEQ ID NO: 797332 - RNA, 19 nt, Artificial Sequence
  Description of Artificial Sequence: Synthetic oligonucleotide
ccaguaggcguacaaucua

SEQ ID NO: 797333 - RNA, 19 nt, Artificial Sequence
  Description of Artificial Sequence: Synthetic oligonucleotide
gguauuguauggguauauu

SEQ ID NO: 797334 - RNA, 19 nt, Artificial Sequence
  Description of Artificial Sequence: Synthetic oligonucleotide
gcuaugccuguauuacuuu

SEQ ID NO: 797335 - RNA, 19 nt, Artificial Sequence
  Description of Artificial Sequence: Synthetic oligonucleotide
ggccucuaguccagaagaa

SEQ ID NO: 797336 - RNA, 19 nt, Artificial Sequence
  Description of Artificial Sequence: Synthetic oligonucleotide
cuaccgcuguaccuacaau

SEQ ID NO: 797337 - RNA, 19 nt, Artificial Sequence
  Description of Artificial Sequence: Synthetic oligonucleotide
  modified_base (2)..(2): a, c, u, g, unknown or other
cncuuggccuaccgcugua

SEQ ID NO: 797338 - RNA, 19 nt, Artificial Sequence
  Description of Artificial Sequence: Synthetic oligonucleotide
  modified_base (3)..(3): a, c, u, g, unknown or other
gcncuuggccuaccgcugu

SEQ ID NO: 797339 - RNA, 19 nt, Artificial Sequence
  Description of Artificial Sequence: Synthetic oligonucleotide
ccuacaaucccgaguucuu

SEQ ID NO: 797340 - RNA, 19 nt, Artificial Sequence
  Description of Artificial Sequence: Synthetic oligonucleotide
ccguuuugagccuccuuuu

SEQ ID NO: 797341 - RNA, 19 nt, Artificial Sequence
  Description of Artificial Sequence: Synthetic oligonucleotide
  modified_base (8)..(8): a, c, u, g, unknown or other
ccucagcncuuggccuacc

SEQ ID NO: 797342 - RNA, 19 nt, Artificial Sequence
  Description of Artificial Sequence: Synthetic oligonucleotide
ccggcgucuccgcccucag

SEQ ID NO: 797343 - RNA, 19 nt, Artificial Sequence
  Description of Artificial Sequence: Synthetic oligonucleotide
ccuuuccguuuguuugacu

SEQ ID NO: 797344 - RNA, 19 nt, Artificial Sequence
  Description of Artificial Sequence: Synthetic oligonucleotide
gccuaccgcuguaccuaca

SEQ ID NO: 797345 - RNA, 19 nt, Artificial Sequence
  Description of Artificial Sequence: Synthetic oligonucleotide
cggcgucuccgcccucaga

SEQ ID NO: 797346 - RNA, 19 nt, Artificial Sequence
  Description of Artificial Sequence: Synthetic oligonucleotide
  modified_base (1)..(1): a, c, u, g, unknown or other
ncuuggccuaccgcuguac

SEQ ID NO: 797347 - RNA, 19 nt, Artificial Sequence
  Description of Artificial Sequence: Synthetic oligonucleotide
uaaaucaccauucagaaug

SEQ ID NO: 797348 - RNA, 19 nt, Artificial Sequence
  Description of Artificial Sequence: Synthetic oligonucleotide
ugaucagagaacacgaagg

SEQ ID NO: 797349 - RNA, 19 nt, Artificial Sequence
  Description of Artificial Sequence: Synthetic oligonucleotide
aauauccacagccaggaag

SEQ ID NO: 797350 - RNA, 19 nt, Artificial Sequence
  Description of Artificial Sequence: Synthetic oligonucleotide
acuguguacucucugagcc

SEQ ID NO: 797351 - RNA, 19 nt, Artificial Sequence
  Description of Artificial Sequence: Synthetic oligonucleotide
gauaugaucagagaacacg

SEQ ID NO: 797352 - RNA, 19 nt, Artificial Sequence
  Description of Artificial Sequence: Synthetic oligonucleotide
uuguguaugucucagauaa

SEQ ID NO: 797353 - RNA, 19 nt, Artificial Sequence
  Description of Artificial Sequence: Synthetic oligonucleotide
gauugggagguccagaagg

SEQ ID NO: 797354 - RNA, 19 nt, Artificial Sequence
  Description of Artificial Sequence: Synthetic oligonucleotide
cauagaaacggaaaggcag

SEQ ID NO: 797355 - RNA, 19 nt, Artificial Sequence
  Description of Artificial Sequence: Synthetic oligonucleotide
aauccuaggacuucaguug

SEQ ID NO: 797356 - RNA, 19 nt, Artificial Sequence
  Description of Artificial Sequence: Synthetic oligonucleotide
auauuccacauucaugggc

SEQ ID NO: 797357 - RNA, 19 nt, Artificial Sequence
  Description of Artificial Sequence: Synthetic oligonucleotide
ucuacggaugcaaacacag

SEQ ID NO: 797358 - RNA, 19 nt, Artificial Sequence
  Description of Artificial Sequence: Synthetic oligonucleotide
uacggaugcaaacacagag

SEQ ID NO: 797359 - RNA, 19 nt, Artificial Sequence
  Description of Artificial Sequence: Synthetic oligonucleotide
aagaauacccggauggccc

SEQ ID NO: 797360 - RNA, 19 nt, Artificial Sequence
  Description of Artificial Sequence: Synthetic oligonucleotide
ucuucauacgccuagccug

SEQ ID NO: 797361 - RNA, 19 nt, Artificial Sequence
  Description of Artificial Sequence: Synthetic oligonucleotide
agugacucaacacucagug

SEQ ID NO: 797362 - RNA, 19 nt, Artificial Sequence
  Description of Artificial Sequence: Synthetic oligonucleotide
gauggaagcauccaucaug

SEQ ID NO: 797363 - RNA, 19 nt, Artificial Sequence
  Description of Artificial Sequence: Synthetic oligonucleotide
aaggccugcgaacuugacc

SEQ ID NO: 797364 - RNA, 19 nt, Artificial Sequence
  Description of Artificial Sequence: Synthetic oligonucleotide
ugguauaccauauccagga

SEQ ID NO: 797365 - RNA, 19 nt, Artificial Sequence
  Description of Artificial Sequence: Synthetic oligonucleotide
ucugggaacauccugcgca

SEQ ID NO: 797366 - RNA, 19 nt, Artificial Sequence
  Description of Artificial Sequence: Synthetic oligonucleotide
caugguauaccauauccag

SEQ ID NO: 797367 - RNA, 19 nt, Artificial Sequence
  Description of Artificial Sequence: Synthetic oligonucleotide
uauuccacauucaugggcu

SEQ ID NO: 797368 - RNA, 19 nt, Artificial Sequence
  Description of Artificial Sequence: Synthetic oligonucleotide
augggcuuuauugucaugc

SEQ ID NO: 797369 - RNA, 19 nt, Artificial Sequence
  Description of Artificial Sequence: Synthetic oligonucleotide
augauagucgucaucaggg

SEQ ID NO: 797370 - RNA, 19 nt, Artificial Sequence
  Description of Artificial Sequence: Synthetic oligonucleotide
uaggacuucaguuguaggc

SEQ ID NO: 797371 - RNA, 19 nt, Artificial Sequence
  Description of Artificial Sequence: Synthetic oligonucleotide
ucaacacucagugugucgg

SEQ ID NO: 797372 - RNA, 19 nt, Artificial Sequence
  Description of Artificial Sequence: Synthetic oligonucleotide
cacgaagagggcaugauag

SEQ ID NO: 797373 - RNA, 19 nt, Artificial Sequence
  Description of Artificial Sequence: Synthetic oligonucleotide
cugguuuaugcauugggcc

SEQ ID NO: 797374 - RNA, 19 nt, Artificial Sequence
  Description of Artificial Sequence: Synthetic oligonucleotide
gaugcagcggauaugauca

SEQ ID NO: 797375 - RNA, 19 nt, Artificial Sequence
  Description of Artificial Sequence: Synthetic oligonucleotide
aucggugguguucugcucc

SEQ ID NO: 797376 - RNA, 19 nt, Artificial Sequence
  Description of Artificial Sequence: Synthetic oligonucleotide
auacgccuagccuggaugc

SEQ ID NO: 797377 - RNA, 19 nt, Artificial Sequence
  Description of Artificial Sequence: Synthetic oligonucleotide
cucagauaaaucaccauuc

SEQ ID NO: 797378 - RNA, 19 nt, Artificial Sequence
  Description of Artificial Sequence: Synthetic oligonucleotide
uuguuaugagacauggcgu

SEQ ID NO: 797379 - RNA, 19 nt, Artificial Sequence
  Description of Artificial Sequence: Synthetic oligonucleotide
uucaucuggagucucugug

SEQ ID NO: 797380 - RNA, 19 nt, Artificial Sequence
  Description of Artificial Sequence: Synthetic oligonucleotide
gauauuccacauucauggg

SEQ ID NO: 797381 - RNA, 19 nt, Artificial Sequence
  Description of Artificial Sequence: Synthetic oligonucleotide
aaugccagucaguggagug

SEQ ID NO: 797382 - RNA, 19 nt, Artificial Sequence
  Description of Artificial Sequence: Synthetic oligonucleotide
uguaguugggucucuuuug

SEQ ID NO: 797383 - RNA, 19 nt, Artificial Sequence
  Description of Artificial Sequence: Synthetic oligonucleotide
aagcgcuggaccaagccgc

SEQ ID NO: 797384 - RNA, 19 nt, Artificial Sequence
  Description of Artificial Sequence: Synthetic oligonucleotide
guauacaguaucuucaucu

SEQ ID NO: 797385 - RNA, 19 nt, Artificial Sequence
  Description of Artificial Sequence: Synthetic oligonucleotide
aggccugcgaacuugacca

SEQ ID NO: 797386 - RNA, 19 nt, Artificial Sequence
  Description of Artificial Sequence: Synthetic oligonucleotide
cacaucaccacauggcagc

SEQ ID NO: 797387 - RNA, 19 nt, Artificial Sequence
  Description of Artificial Sequence: Synthetic oligonucleotide
ucaacuguguacucucuga

SEQ ID NO: 797388 - RNA, 19 nt, Artificial Sequence
  Description of Artificial Sequence: Synthetic oligonucleotide
ugguuuaugcauugggcca

SEQ ID NO: 797389 - RNA, 19 nt, Artificial Sequence
  Description of Artificial Sequence: Synthetic oligonucleotide
agcggauaugaucagagaa

SEQ ID NO: 797390 - RNA, 19 nt, Artificial Sequence
  Description of Artificial Sequence: Synthetic oligonucleotide
gauggugggcugcugggcg

SEQ ID NO: 797391 - RNA, 19 nt, Artificial Sequence
  Description of Artificial Sequence: Synthetic oligonucleotide
cuucauacgccuagccugg

SEQ ID NO: 797392 - RNA, 19 nt, Artificial Sequence
  Description of Artificial Sequence: Synthetic oligonucleotide
cacaaagggagauccuugg

SEQ ID NO: 797393 - RNA, 19 nt, Artificial Sequence
  Description of Artificial Sequence: Synthetic oligonucleotide
ugacagggaacgcagcaug

SEQ ID NO: 797394 - RNA, 19 nt, Artificial Sequence
  Description of Artificial Sequence: Synthetic oligonucleotide
acuucucccuuauaggcug

SEQ ID NO: 797395 - RNA, 19 nt, Artificial Sequence
  Description of Artificial Sequence: Synthetic oligonucleotide
cagauaaaucaccauucag

SEQ ID NO: 797396 - RNA, 19 nt, Artificial Sequence
  Description of Artificial Sequence: Synthetic oligonucleotide
uuuguggauggugauauuc

SEQ ID NO: 797397 - RNA, 19 nt, Artificial Sequence
  Description of Artificial Sequence: Synthetic oligonucleotide
agggucagugacucaacac

SEQ ID NO: 797398 - RNA, 19 nt, Artificial Sequence
  Description of Artificial Sequence: Synthetic oligonucleotide
ggcaugguauaccauaucc

SEQ ID NO: 797399 - RNA, 19 nt, Artificial Sequence
  Description of Artificial Sequence: Synthetic oligonucleotide
aaugaagcaccggaugcug

SEQ ID NO: 797400 - RNA, 19 nt, Artificial Sequence
  Description of Artificial Sequence: Synthetic oligonucleotide
gaagaauacccggauggcc

SEQ ID NO: 797401 - RNA, 19 nt, Artificial Sequence
  Description of Artificial Sequence: Synthetic oligonucleotide
aacgcagcaugaagaauac

SEQ ID NO: 797402 - RNA, 19 nt, Artificial Sequence
  Description of Artificial Sequence: Synthetic oligonucleotide
ucucaagggaccucucgag

SEQ ID NO: 797403 - RNA, 19 nt, Artificial Sequence
  Description of Artificial Sequence: Synthetic oligonucleotide
acaaagggagauccuuggg

SEQ ID NO: 797404 - RNA, 19 nt, Artificial Sequence
  Description of Artificial Sequence: Synthetic oligonucleotide
ugucuacggaugcaaacac

SEQ ID NO: 797405 - RNA, 19 nt, Artificial Sequence
  Description of Artificial Sequence: Synthetic oligonucleotide
ucaguggagugcccguugg

SEQ ID NO: 797406 - RNA, 19 nt, Artificial Sequence
  Description of Artificial Sequence: Synthetic oligonucleotide
uugucuacggaugcaaaca

SEQ ID NO: 797407 - RNA, 19 nt, Artificial Sequence
  Description of Artificial Sequence: Synthetic oligonucleotide
cuugucuacggaugcaaac

SEQ ID NO: 797408 - RNA, 19 nt, Artificial Sequence
  Description of Artificial Sequence: Synthetic oligonucleotide
guaguugggucucuuuugc

SEQ ID NO: 797409 - RNA, 19 nt, Artificial Sequence
  Description of Artificial Sequence: Synthetic oligonucleotide
ugcugagaccaaauccuag

SEQ ID NO: 797410 - RNA, 19 nt, Artificial Sequence
  Description of Artificial Sequence: Synthetic oligonucleotide
uugcuacgcuccaugauca

SEQ ID NO: 797411 - RNA, 19 nt, Artificial Sequence
  Description of Artificial Sequence: Synthetic oligonucleotide
gagcuaugcugguuuaugc

SEQ ID NO: 797412 - RNA, 19 nt, Artificial Sequence
  Description of Artificial Sequence: Synthetic oligonucleotide
ugauagucgucaucagggc

SEQ ID NO: 797413 - RNA, 19 nt, Artificial Sequence
  Description of Artificial Sequence: Synthetic oligonucleotide
cuggucuagaaggugaggc

SEQ ID NO: 797414 - RNA, 19 nt, Artificial Sequence
  Description of Artificial Sequence: Synthetic oligonucleotide
uggguguccacucaguguu

SEQ ID NO: 797415 - RNA, 19 nt, Artificial Sequence
  Description of Artificial Sequence: Synthetic oligonucleotide
auaggcugcacuugguacu

SEQ ID NO: 797416 - RNA, 19 nt, Artificial Sequence
  Description of Artificial Sequence: Synthetic oligonucleotide
acggaugcaaacacagagc

SEQ ID NO: 797417 - RNA, 19 nt, Artificial Sequence
  Description of Artificial Sequence: Synthetic oligonucleotide
agugggcuuaaugaagcac

SEQ ID NO: 797418 - RNA, 19 nt, Artificial Sequence
  Description of Artificial Sequence: Synthetic oligonucleotide
ugcgaacuugaccacuccc

SEQ ID NO: 797419 - RNA, 19 nt, Artificial Sequence
  Description of Artificial Sequence: Synthetic oligonucleotide
ucucuuuagccuucucagc

SEQ ID NO: 797420 - RNA, 19 nt, Artificial Sequence
  Description of Artificial Sequence: Synthetic oligonucleotide
aagggcggcuauccucugc

SEQ ID NO: 797421 - RNA, 19 nt, Artificial Sequence
  Description of Artificial Sequence: Synthetic oligonucleotide
uucaguuguaggcuggauu

SEQ ID NO: 797422 - RNA, 19 nt, Artificial Sequence
  Description of Artificial Sequence: Synthetic oligonucleotide
ggauacaucaggcuccacc

SEQ ID NO: 797423 - RNA, 19 nt, Artificial Sequence
  Description of Artificial Sequence: Synthetic oligonucleotide
aucuucauacgccuagccu

SEQ ID NO: 797424 - RNA, 19 nt, Artificial Sequence
  Description of Artificial Sequence: Synthetic oligonucleotide
uuauaggcugcacuuggua

SEQ ID NO: 797425 - RNA, 19 nt, Artificial Sequence
  Description of Artificial Sequence: Synthetic oligonucleotide
cuucugggaacauccugcg

SEQ ID NO: 797426 - RNA, 19 nt, Artificial Sequence
  Description of Artificial Sequence: Synthetic oligonucleotide
uguguacucucugagccug

SEQ ID NO: 797427 - RNA, 19 nt, Artificial Sequence
  Description of Artificial Sequence: Synthetic oligonucleotide
gcugagaccaaauccuagg

SEQ ID NO: 797428 - RNA, 19 nt, Artificial Sequence
  Description of Artificial Sequence: Synthetic oligonucleotide
ugaagaauacccggauggc

SEQ ID NO: 797429 - RNA, 19 nt, Artificial Sequence
  Description of Artificial Sequence: Synthetic oligonucleotide
acucaguguucuguggggc

SEQ ID NO: 797430 - RNA, 19 nt, Artificial Sequence
  Description of Artificial Sequence: Synthetic oligonucleotide
cuggaugcggcccuuggcc

SEQ ID NO: 797431 - RNA, 19 nt, Artificial Sequence
  Description of Artificial Sequence: Synthetic oligonucleotide
agcuaugcugguuuaugca

SEQ ID NO: 797432 - RNA, 19 nt, Artificial Sequence
  Description of Artificial Sequence: Synthetic oligonucleotide
auauucagggcacggcugu

SEQ ID NO: 797433 - RNA, 19 nt, Artificial Sequence
  Description of Artificial Sequence: Synthetic oligonucleotide
gugggcuuaaugaagcacc

SEQ ID NO: 797434 - RNA, 19 nt, Artificial Sequence
  Description of Artificial Sequence: Synthetic oligonucleotide
gauauucagggcacggcug

SEQ ID NO: 797435 - RNA, 19 nt, Artificial Sequence
  Description of Artificial Sequence: Synthetic oligonucleotide
aauacccggauggcccgcc

SEQ ID NO: 797436 - RNA, 19 nt, Artificial Sequence
  Description of Artificial Sequence: Synthetic oligonucleotide
ccuguacucaucuucaaac

SEQ ID NO: 797437 - RNA, 19 nt, Artificial Sequence
  Description of Artificial Sequence: Synthetic oligonucleotide
cucucgagugucucagugg

SEQ ID NO: 797438 - RNA, 19 nt, Artificial Sequence
  Description of Artificial Sequence: Synthetic oligonucleotide
uuaugagacauggcguaca

SEQ ID NO: 797439 - RNA, 19 nt, Artificial Sequence
  Description of Artificial Sequence: Synthetic oligonucleotide
aucucaagggaccucucga

SEQ ID NO: 797440 - RNA, 19 nt, Artificial Sequence
  Description of Artificial Sequence: Synthetic oligonucleotide
cauacgccuagccuggaug

SEQ ID NO: 797441 - RNA, 19 nt, Artificial Sequence
  Description of Artificial Sequence: Synthetic oligonucleotide
gaacgcagcaugaagaaua

SEQ ID NO: 797442 - RNA, 19 nt, Artificial Sequence
  Description of Artificial Sequence: Synthetic oligonucleotide
ucgagugucucagugggcu

SEQ ID NO: 797443 - RNA, 19 nt, Artificial Sequence
  Description of Artificial Sequence: Synthetic oligonucleotide
ugacugugcaugcaaucaa

SEQ ID NO: 797444 - RNA, 19 nt, Artificial Sequence
  Description of Artificial Sequence: Synthetic oligonucleotide
acgaagguggccugcagga

SEQ ID NO: 797445 - RNA, 19 nt, Artificial Sequence
  Description of Artificial Sequence: Synthetic oligonucleotide
cuuggcagaacuucuggga

SEQ ID NO: 797446 - RNA, 19 nt, Artificial Sequence
  Description of Artificial Sequence: Synthetic oligonucleotide
auugggagguccagaaggg

SEQ ID NO: 797447 - RNA, 19 nt, Artificial Sequence
  Description of Artificial Sequence: Synthetic oligonucleotide
uuuguguaugucucagaua

SEQ ID NO: 797448 - RNA, 19 nt, Artificial Sequence
  Description of Artificial Sequence: Synthetic oligonucleotide
caucuucauacgccuagcc

SEQ ID NO: 797449 - RNA, 19 nt, Artificial Sequence
  Description of Artificial Sequence: Synthetic oligonucleotide
uccuuggguguccacucag

SEQ ID NO: 797450 - RNA, 19 nt, Artificial Sequence
  Description of Artificial Sequence: Synthetic oligonucleotide
uccuguacucaucuucaaa

SEQ ID NO: 797451 - RNA, 19 nt, Artificial Sequence
  Description of Artificial Sequence: Synthetic oligonucleotide
aaggacggagagcuaugcu

SEQ ID NO: 797452 - RNA, 19 nt, Artificial Sequence
  Description of Artificial Sequence: Synthetic oligonucleotide
aaaucaccauucagaauga

SEQ ID NO: 797453 - RNA, 19 nt, Artificial Sequence
  Description of Artificial Sequence: Synthetic oligonucleotide
uggucuagaaggugaggcu

SEQ ID NO: 797454 - RNA, 19 nt, Artificial Sequence
  Description of Artificial Sequence: Synthetic oligonucleotide
ugugucggcaguguccuca

SEQ ID NO: 797455 - RNA, 19 nt, Artificial Sequence
  Description of Artificial Sequence: Synthetic oligonucleotide
ccuuuguuaugagacaugg

SEQ ID NO: 797456 - RNA, 19 nt, Artificial Sequence
  Description of Artificial Sequence: Synthetic oligonucleotide
uugcauccguuucuugccc

SEQ ID NO: 797457 - RNA, 19 nt, Artificial Sequence
  Description of Artificial Sequence: Synthetic oligonucleotide
ugaugacugugcaugcaau

SEQ ID NO: 797458 - RNA, 19 nt, Artificial Sequence
  Description of Artificial Sequence: Synthetic oligonucleotide
cuacgcuccaugaucacca

SEQ ID NO: 797459 - RNA, 19 nt, Artificial Sequence
  Description of Artificial Sequence: Synthetic oligonucleotide
cacgaagguggccugcagg

SEQ ID NO: 797460 - RNA, 19 nt, Artificial Sequence
  Description of Artificial Sequence: Synthetic oligonucleotide
auaccauauccaggaaggg

SEQ ID NO: 797461 - RNA, 19 nt, Artificial Sequence
  Description of Artificial Sequence: Synthetic oligonucleotide
uugucaugcuccuguacuc

SEQ ID NO: 797462 - RNA, 19 nt, Artificial Sequence
  Description of Artificial Sequence: Synthetic oligonucleotide
agagaacacgaagguggcc

SEQ ID NO: 797463 - RNA, 19 nt, Artificial Sequence
  Description of Artificial Sequence: Synthetic oligonucleotide
aguggagugcccguuggag

SEQ ID NO: 797464 - RNA, 19 nt, Artificial Sequence
  Description of Artificial Sequence: Synthetic oligonucleotide
aacggaaaggcaggugcug

SEQ ID NO: 797465 - RNA, 19 nt, Artificial Sequence
  Description of Artificial Sequence: Synthetic oligonucleotide
aucacugacuggucuagaa

SEQ ID NO: 797466 - RNA, 19 nt, Artificial Sequence
  Description of Artificial Sequence: Synthetic oligonucleotide
ggcuuaaugaagcaccgga

SEQ ID NO: 797467 - RNA, 19 nt, Artificial Sequence
  Description of Artificial Sequence: Synthetic oligonucleotide
ccuuauaggcugcacuugg

SEQ ID NO: 797468 - RNA, 19 nt, Artificial Sequence
  Description of Artificial Sequence: Synthetic oligonucleotide
agcaaggagauggugggcu

SEQ ID NO: 797469 - RNA, 19 nt, Artificial Sequence
  Description of Artificial Sequence: Synthetic oligonucleotide
uccugcgcaggcuuugugu

SEQ ID NO: 797470 - RNA, 19 nt, Artificial Sequence
  Description of Artificial Sequence: Synthetic oligonucleotide
aaauauccacagccaggaa

SEQ ID NO: 797471 - RNA, 19 nt, Artificial Sequence
  Description of Artificial Sequence: Synthetic oligonucleotide
guugcugagaccaaauccu

SEQ ID NO: 797472 - RNA, 19 nt, Artificial Sequence
  Description of Artificial Sequence: Synthetic oligonucleotide
uauucagauccaagacauc

SEQ ID NO: 797473 - RNA, 19 nt, Artificial Sequence
  Description of Artificial Sequence: Synthetic oligonucleotide
agaacacgaagguggccug

SEQ ID NO: 797474 - RNA, 19 nt, Artificial Sequence
  Description of Artificial Sequence: Synthetic oligonucleotide
gauagucgucaucagggcu

SEQ ID NO: 797475 - RNA, 19 nt, Artificial Sequence
  Description of Artificial Sequence: Synthetic oligonucleotide
cugggaacauccugcgcag

SEQ ID NO: 797476 - RNA, 19 nt, Artificial Sequence
  Description of Artificial Sequence: Synthetic oligonucleotide
agggaacgcagcaugaaga

SEQ ID NO: 797477 - RNA, 19 nt, Artificial Sequence
  Description of Artificial Sequence: Synthetic oligonucleotide
gaccucucgagugucucag

SEQ ID NO: 797478 - RNA, 19 nt, Artificial Sequence
  Description of Artificial Sequence: Synthetic oligonucleotide
agauccuuggguguccacu

SEQ ID NO: 797479 - RNA, 19 nt, Artificial Sequence
  Description of Artificial Sequence: Synthetic oligonucleotide
acgaagagggcaugauagu

SEQ ID NO: 797480 - RNA, 19 nt, Artificial Sequence
  Description of Artificial Sequence: Synthetic oligonucleotide
gagaacacgaagguggccu

SEQ ID NO: 797481 - RNA, 19 nt, Artificial Sequence
  Description of Artificial Sequence: Synthetic oligonucleotide
cauggcguacaggaggcag

SEQ ID NO: 797482 - RNA, 19 nt, Artificial Sequence
  Description of Artificial Sequence: Synthetic oligonucleotide
acucaacacucaguguguc

SEQ ID NO: 797483 - RNA, 19 nt, Artificial Sequence
  Description of Artificial Sequence: Synthetic oligonucleotide
uugcugagaccaaauccua

SEQ ID NO: 797484 - RNA, 19 nt, Artificial Sequence
  Description of Artificial Sequence: Synthetic oligonucleotide
uggaccaagccgccguccu

SEQ ID NO: 797485 - RNA, 19 nt, Artificial Sequence
  Description of Artificial Sequence: Synthetic oligonucleotide
agggagauccuuggguguc

SEQ ID NO: 797486 - RNA, 19 nt, Artificial Sequence
  Description of Artificial Sequence: Synthetic oligonucleotide
agaaacggaaaggcaggug

SEQ ID NO: 797487 - RNA, 19 nt, Artificial Sequence
  Description of Artificial Sequence: Synthetic oligonucleotide
cuuuguguaugucucagau

SEQ ID NO: 797488 - RNA, 19 nt, Artificial Sequence
  Description of Artificial Sequence: Synthetic oligonucleotide
uggcguacaggaggcagag

SEQ ID NO: 797489 - RNA, 19 nt, Artificial Sequence
  Description of Artificial Sequence: Synthetic oligonucleotide
caaggacggagagcuaugc

SEQ ID NO: 797490 - RNA, 19 nt, Artificial Sequence
  Description of Artificial Sequence: Synthetic oligonucleotide
guuaugagacauggcguac

SEQ ID NO: 797491 - RNA, 19 nt, Artificial Sequence
  Description of Artificial Sequence: Synthetic oligonucleotide
cauggcagccgcuucacaa

SEQ ID NO: 797492 - RNA, 19 nt, Artificial Sequence
  Description of Artificial Sequence: Synthetic oligonucleotide
ucaugcuccuguacucauc

SEQ ID NO: 797493 - RNA, 19 nt, Artificial Sequence
  Description of Artificial Sequence: Synthetic oligonucleotide
caacacucagugugucggc

SEQ ID NO: 797494 - RNA, 19 nt, Artificial Sequence
  Description of Artificial Sequence: Synthetic oligonucleotide
ggucuagaaggugaggcug

SEQ ID NO: 797495 - RNA, 19 nt, Artificial Sequence
  Description of Artificial Sequence: Synthetic oligonucleotide
agggcggcuauccucugca

SEQ ID NO: 797496 - RNA, 19 nt, Artificial Sequence
  Description of Artificial Sequence: Synthetic oligonucleotide
cugcagaaggccugcgaac

SEQ ID NO: 797497 - RNA, 19 nt, Artificial Sequence
  Description of Artificial Sequence: Synthetic oligonucleotide
aaucacugacuggucuaga

SEQ ID NO: 797498 - RNA, 19 nt, Artificial Sequence
  Description of Artificial Sequence: Synthetic oligonucleotide
uucuggccaaguucuugcu

SEQ ID NO: 797499 - RNA, 19 nt, Artificial Sequence
  Description of Artificial Sequence: Synthetic oligonucleotide
agcuugcuacgcuccauga

SEQ ID NO: 797500 - RNA, 19 nt, Artificial Sequence
  Description of Artificial Sequence: Synthetic oligonucleotide
gcagcggauaugaucagag

SEQ ID NO: 797501 - RNA, 19 nt, Artificial Sequence
  Description of Artificial Sequence: Synthetic oligonucleotide
ugcauccguuucuugcccu

SEQ ID NO: 797502 - RNA, 19 nt, Artificial Sequence
  Description of Artificial Sequence: Synthetic oligonucleotide
uggggucacugcugccucg

SEQ ID NO: 797503 - RNA, 19 nt, Artificial Sequence
  Description of Artificial Sequence: Synthetic oligonucleotide
uacgccuagccuggaugcg

SEQ ID NO: 797504 - RNA, 19 nt, Artificial Sequence
  Description of Artificial Sequence: Synthetic oligonucleotide
caguuguaggcuggauugg

SEQ ID NO: 797505 - RNA, 19 nt, Artificial Sequence
  Description of Artificial Sequence: Synthetic oligonucleotide
ugcagcggauaugaucaga

SEQ ID NO: 797506 - RNA, 19 nt, Artificial Sequence
  Description of Artificial Sequence: Synthetic oligonucleotide
cugacuggucuagaaggug

SEQ ID NO: 797507 - RNA, 19 nt, Artificial Sequence
  Description of Artificial Sequence: Synthetic oligonucleotide
ggauccaugccuuuguuau

SEQ ID NO: 797508 - RNA, 19 nt, Artificial Sequence
  Description of Artificial Sequence: Synthetic oligonucleotide
ucauacgccuagccuggau

SEQ ID NO: 797509 - RNA, 19 nt, Artificial Sequence
  Description of Artificial Sequence: Synthetic oligonucleotide
gcggauaugaucagagaac

SEQ ID NO: 797510 - RNA, 19 nt, Artificial Sequence
  Description of Artificial Sequence: Synthetic oligonucleotide
cagauccaagacaucaucu

SEQ ID NO: 797511 - RNA, 19 nt, Artificial Sequence
  Description of Artificial Sequence: Synthetic oligonucleotide
gaacacgaagguggccugc

SEQ ID NO: 797512 - RNA, 19 nt, Artificial Sequence
  Description of Artificial Sequence: Synthetic oligonucleotide
acgccuagccuggaugcgg

SEQ ID NO: 797513 - RNA, 19 nt, Artificial Sequence
  Description of Artificial Sequence: Synthetic oligonucleotide
ucaucucaagggaccucuc

SEQ ID NO: 797514 - RNA, 19 nt, Artificial Sequence
  Description of Artificial Sequence: Synthetic oligonucleotide
cucgagugucucagugggc

SEQ ID NO: 797515 - RNA, 19 nt, Artificial Sequence
  Description of Artificial Sequence: Synthetic oligonucleotide
agaccaaauccuaggacuu

SEQ ID NO: 797516 - RNA, 19 nt, Artificial Sequence
  Description of Artificial Sequence: Synthetic oligonucleotide
ugcaugcaaucaagucacu

SEQ ID NO: 797517 - RNA, 19 nt, Artificial Sequence
  Description of Artificial Sequence: Synthetic oligonucleotide
accaagccgccguccuugg

SEQ ID NO: 797518 - RNA, 19 nt, Artificial Sequence
  Description of Artificial Sequence: Synthetic oligonucleotide
gcgaacuugaccacucccc

SEQ ID NO: 797519 - RNA, 19 nt, Artificial Sequence
  Description of Artificial Sequence: Synthetic oligonucleotide
gggucagugacucaacacu

SEQ ID NO: 797520 - RNA, 19 nt, Artificial Sequence
  Description of Artificial Sequence: Synthetic oligonucleotide
cugcgaacuugaccacucc

SEQ ID NO: 797521 - RNA, 19 nt, Artificial Sequence
  Description of Artificial Sequence: Synthetic oligonucleotide
aucuggagucucugugccu

SEQ ID NO: 797522 - RNA, 19 nt, Artificial Sequence
  Description of Artificial Sequence: Synthetic oligonucleotide
gagagcuugcuacgcucca

SEQ ID NO: 797523 - RNA, 19 nt, Artificial Sequence
  Description of Artificial Sequence: Synthetic oligonucleotide
gacagggaacgcagcauga

SEQ ID NO: 797524 - RNA, 19 nt, Artificial Sequence
  Description of Artificial Sequence: Synthetic oligonucleotide
gaccaaauccuaggacuuc

SEQ ID NO: 797525 - RNA, 19 nt, Artificial Sequence
  Description of Artificial Sequence: Synthetic oligonucleotide
ggcaccuugucuacggaug

SEQ ID NO: 797526 - RNA, 19 nt, Artificial Sequence
  Description of Artificial Sequence: Synthetic oligonucleotide
augcagcggauaugaucag

SEQ ID NO: 797527 - RNA, 19 nt, Artificial Sequence
  Description of Artificial Sequence: Synthetic oligonucleotide
auacccggauggcccgccg

SEQ ID NO: 797528 - RNA, 19 nt, Artificial Sequence
  Description of Artificial Sequence: Synthetic oligonucleotide
cuacggaugcaaacacaga

SEQ ID NO: 797529 - RNA, 19 nt, Artificial Sequence
  Description of Artificial Sequence: Synthetic oligonucleotide
agcgcuggaccaagccgcc

SEQ ID NO: 797530 - RNA, 19 nt, Artificial Sequence
  Description of Artificial Sequence: Synthetic oligonucleotide
auccuuggguguccacuca

SEQ ID NO: 797531 - RNA, 19 nt, Artificial Sequence
  Description of Artificial Sequence: Synthetic oligonucleotide
gcaugcaaucaagucacug

SEQ ID NO: 797532 - RNA, 19 nt, Artificial Sequence
  Description of Artificial Sequence: Synthetic oligonucleotide
cacaaucacugacuggucu

SEQ ID NO: 797533 - RNA, 19 nt, Artificial Sequence
  Description of Artificial Sequence: Synthetic oligonucleotide
aggaagcgcuggaccaagc

SEQ ID NO: 797534 - RNA, 19 nt, Artificial Sequence
  Description of Artificial Sequence: Synthetic oligonucleotide
uccuaggacuucaguugua

SEQ ID NO: 797535 - RNA, 19 nt, Artificial Sequence
  Description of Artificial Sequence: Synthetic oligonucleotide
ugcuacgcuccaugaucac

SEQ ID NO: 797536 - RNA, 19 nt, Artificial Sequence
  Description of Artificial Sequence: Synthetic oligonucleotide
agggcaugguauaccauau

SEQ ID NO: 797537 - RNA, 19 nt, Artificial Sequence
  Description of Artificial Sequence: Synthetic oligonucleotide
agggcaugauagucgucau

SEQ ID NO: 797538 - RNA, 19 nt, Artificial Sequence
  Description of Artificial Sequence: Synthetic oligonucleotide
gcaugguauaccauaucca

SEQ ID NO: 797539 - RNA, 19 nt, Artificial Sequence
  Description of Artificial Sequence: Synthetic oligonucleotide
guaggcuggauugggaggu

SEQ ID NO: 797540 - RNA, 19 nt, Artificial Sequence
  Description of Artificial Sequence: Synthetic oligonucleotide
gaauacccggauggcccgc

SEQ ID NO: 797541 - RNA, 19 nt, Artificial Sequence
  Description of Artificial Sequence: Synthetic oligonucleotide
ccaaauccuaggacuucag

SEQ ID NO: 797542 - RNA, 19 nt, Artificial Sequence
  Description of Artificial Sequence: Synthetic oligonucleotide
auccugcgcaggcuuugug

SEQ ID NO: 797543 - RNA, 19 nt, Artificial Sequence
  Description of Artificial Sequence: Synthetic oligonucleotide
gucuacggaugcaaacaca

SEQ ID NO: 797544 - RNA, 19 nt, Artificial Sequence
  Description of Artificial Sequence: Synthetic oligonucleotide
gggaacgcagcaugaagaa

SEQ ID NO: 797545 - RNA, 19 nt, Artificial Sequence
  Description of Artificial Sequence: Synthetic oligonucleotide
gggcuuagagugugggcug

SEQ ID NO: 797546 - RNA, 19 nt, Artificial Sequence
  Description of Artificial Sequence: Synthetic oligonucleotide
cauagagcaaggagauggu

SEQ ID NO: 797547 - RNA, 19 nt, Artificial Sequence
  Description of Artificial Sequence: Synthetic oligonucleotide
ggauaugaucagagaacac

SEQ ID NO: 797548 - RNA, 19 nt, Artificial Sequence
  Description of Artificial Sequence: Synthetic oligonucleotide
caucggugguguucugcuc

SEQ ID NO: 797549 - RNA, 19 nt, Artificial Sequence
  Description of Artificial Sequence: Synthetic oligonucleotide
gagauccuuggguguccac

SEQ ID NO: 797550 - RNA, 19 nt, Artificial Sequence
  Description of Artificial Sequence: Synthetic oligonucleotide
cuuauaggcugcacuuggu

SEQ ID NO: 797551 - RNA, 19 nt, Artificial Sequence
  Description of Artificial Sequence: Synthetic oligonucleotide
uacccggauggcccgccgu

SEQ ID NO: 797552 - RNA, 19 nt, Artificial Sequence
  Description of Artificial Sequence: Synthetic oligonucleotide
ggaugcaaacacagagcgc

SEQ ID NO: 797553 - RNA, 19 nt, Artificial Sequence
  Description of Artificial Sequence: Synthetic oligonucleotide
gcuacgcuccaugaucacc

SEQ ID NO: 797554 - RNA, 19 nt, Artificial Sequence
  Description of Artificial Sequence: Synthetic oligonucleotide
acagggaacgcagcaugaa

SEQ ID NO: 797555 - RNA, 19 nt, Artificial Sequence
  Description of Artificial Sequence: Synthetic oligonucleotide
gguuuguggauggugauau

SEQ ID NO: 797556 - RNA, 19 nt, Artificial Sequence
  Description of Artificial Sequence: Synthetic oligonucleotide
agcacgaagagggcaugau

SEQ ID NO: 797557 - RNA, 19 nt, Artificial Sequence
  Description of Artificial Sequence: Synthetic oligonucleotide
caaauccuaggacuucagu

SEQ ID NO: 797558 - RNA, 19 nt, Artificial Sequence
  Description of Artificial Sequence: Synthetic oligonucleotide
ccucucgagugucucagug

SEQ ID NO: 797559 - RNA, 19 nt, Artificial Sequence
  Description of Artificial Sequence: Synthetic oligonucleotide
auggcguacaggaggcaga

SEQ ID NO: 797560 - RNA, 19 nt, Artificial Sequence
  Description of Artificial Sequence: Synthetic oligonucleotide
auaguggcuggugcuccca

SEQ ID NO: 797561 - RNA, 19 nt, Artificial Sequence
  Description of Artificial Sequence: Synthetic oligonucleotide
cagcggauaugaucagaga

SEQ ID NO: 797562 - RNA, 19 nt, Artificial Sequence
  Description of Artificial Sequence: Synthetic oligonucleotide
gggcuuaaugaagcaccgg

SEQ ID NO: 797563 - RNA, 19 nt, Artificial Sequence
  Description of Artificial Sequence: Synthetic oligonucleotide
uacgcuccaugaucaccau

SEQ ID NO: 797564 - RNA, 19 nt, Artificial Sequence
  Description of Artificial Sequence: Synthetic oligonucleotide
gcuccuguacucaucuuca

SEQ ID NO: 797565 - RNA, 19 nt, Artificial Sequence
  Description of Artificial Sequence: Synthetic oligonucleotide
ugacaaggacggagagcua

SEQ ID NO: 797566 - RNA, 19 nt, Artificial Sequence
  Description of Artificial Sequence: Synthetic oligonucleotide
cagugggcuuaaugaagca

SEQ ID NO: 797567 - RNA, 19 nt, Artificial Sequence
  Description of Artificial Sequence: Synthetic oligonucleotide
gcuaugcugguuuaugcau

SEQ ID NO: 797568 - RNA, 19 nt, Artificial Sequence
  Description of Artificial Sequence: Synthetic oligonucleotide
gcggcuauccucugcaucu

SEQ ID NO: 797569 - RNA, 19 nt, Artificial Sequence
  Description of Artificial Sequence: Synthetic oligonucleotide
uucauacgccuagccugga

SEQ ID NO: 797570 - RNA, 19 nt, Artificial Sequence
  Description of Artificial Sequence: Synthetic oligonucleotide
gugacucaacacucagugu

SEQ ID NO: 797571 - RNA, 19 nt, Artificial Sequence
  Description of Artificial Sequence: Synthetic oligonucleotide
agcaccggaugcugggcuu

SEQ ID NO: 797572 - RNA, 19 nt, Artificial Sequence
  Description of Artificial Sequence: Synthetic oligonucleotide
uugguacugggagcuggau

SEQ ID NO: 797573 - RNA, 19 nt, Artificial Sequence
  Description of Artificial Sequence: Synthetic oligonucleotide
gguauaccauauccaggaa

SEQ ID NO: 797574 - RNA, 19 nt, Artificial Sequence
  Description of Artificial Sequence: Synthetic oligonucleotide
agagcuugcuacgcuccau

SEQ ID NO: 797575 - RNA, 19 nt, Artificial Sequence
  Description of Artificial Sequence: Synthetic oligonucleotide
cagccgcuucacaaaguca

SEQ ID NO: 797576 - RNA, 19 nt, Artificial Sequence
  Description of Artificial Sequence: Synthetic oligonucleotide
gagcacgaagagggcauga

SEQ ID NO: 797577 - RNA, 19 nt, Artificial Sequence
  Description of Artificial Sequence: Synthetic oligonucleotide
gccucggcggcacugguca

SEQ ID NO: 797578 - RNA, 19 nt, Artificial Sequence
  Description of Artificial Sequence: Synthetic oligonucleotide
gcaucuucauacgccuagc

SEQ ID NO: 797579 - RNA, 19 nt, Artificial Sequence
  Description of Artificial Sequence: Synthetic oligonucleotide
accucucgagugucucagu

SEQ ID NO: 797580 - RNA, 19 nt, Artificial Sequence
  Description of Artificial Sequence: Synthetic oligonucleotide
cacuguuauucagauccaa

SEQ ID NO: 797581 - RNA, 19 nt, Artificial Sequence
  Description of Artificial Sequence: Synthetic oligonucleotide
cuguuuugaucagguccuc

SEQ ID NO: 797582 - RNA, 19 nt, Artificial Sequence
  Description of Artificial Sequence: Synthetic oligonucleotide
ggcggcuauccucugcauc

SEQ ID NO: 797583 - RNA, 19 nt, Artificial Sequence
  Description of Artificial Sequence: Synthetic oligonucleotide
cggauaugaucagagaaca

SEQ ID NO: 797584 - RNA, 19 nt, Artificial Sequence
  Description of Artificial Sequence: Synthetic oligonucleotide
gcagagcacgaagagggca

SEQ ID NO: 797585 - RNA, 19 nt, Artificial Sequence
  Description of Artificial Sequence: Synthetic oligonucleotide
caagggaccucucgagugu

SEQ ID NO: 797586 - RNA, 19 nt, Artificial Sequence
  Description of Artificial Sequence: Synthetic oligonucleotide
gauggcccgccgugucuuc

SEQ ID NO: 797587 - RNA, 19 nt, Artificial Sequence
  Description of Artificial Sequence: Synthetic oligonucleotide
agucaguggagugcccguu

SEQ ID NO: 797588 - RNA, 19 nt, Artificial Sequence
  Description of Artificial Sequence: Synthetic oligonucleotide
cagugacucaacacucagu

SEQ ID NO: 797589 - RNA, 19 nt, Artificial Sequence
  Description of Artificial Sequence: Synthetic oligonucleotide
cuccuguacucaucuucaa

SEQ ID NO: 797590 - RNA, 19 nt, Artificial Sequence
  Description of Artificial Sequence: Synthetic oligonucleotide
cacacaaagggagauccuu

SEQ ID NO: 797591 - RNA, 19 nt, Artificial Sequence
  Description of Artificial Sequence: Synthetic oligonucleotide
ggaccucucgagugucuca

SEQ ID NO: 797592 - RNA, 19 nt, Artificial Sequence
  Description of Artificial Sequence: Synthetic oligonucleotide
ugucggcaguguccucaua

SEQ ID NO: 797593 - RNA, 19 nt, Artificial Sequence
  Description of Artificial Sequence: Synthetic oligonucleotide
gcacgaagagggcaugaua

SEQ ID NO: 797594 - RNA, 19 nt, Artificial Sequence
  Description of Artificial Sequence: Synthetic oligonucleotide
gggagauccuugggugucc

SEQ ID NO: 797595 - RNA, 19 nt, Artificial Sequence
  Description of Artificial Sequence: Synthetic oligonucleotide
cccguuggaggcaggagga

SEQ ID NO: 797596 - RNA, 19 nt, Artificial Sequence
  Description of Artificial Sequence: Synthetic oligonucleotide
caccugcauguccugcaga

SEQ ID NO: 797597 - RNA, 19 nt, Artificial Sequence
  Description of Artificial Sequence: Synthetic oligonucleotide
uaggcuggauugggagguc

SEQ ID NO: 797598 - RNA, 19 nt, Artificial Sequence
  Description of Artificial Sequence: Synthetic oligonucleotide
cccuuauaggcugcacuug

SEQ ID NO: 797599 - RNA, 19 nt, Artificial Sequence
  Description of Artificial Sequence: Synthetic oligonucleotide
uggcccgccgugucuucuc

SEQ ID NO: 797600 - RNA, 19 nt, Artificial Sequence
  Description of Artificial Sequence: Synthetic oligonucleotide
ggagagcuaugcugguuua

SEQ ID NO: 797601 - RNA, 19 nt, Artificial Sequence
  Description of Artificial Sequence: Synthetic oligonucleotide
cacuugguacugggagcug

SEQ ID NO: 797602 - RNA, 19 nt, Artificial Sequence
  Description of Artificial Sequence: Synthetic oligonucleotide
caguggagugcccguugga

SEQ ID NO: 797603 - RNA, 19 nt, Artificial Sequence
  Description of Artificial Sequence: Synthetic oligonucleotide
acggagagcuaugcugguu

SEQ ID NO: 797604 - RNA, 19 nt, Artificial Sequence
  Description of Artificial Sequence: Synthetic oligonucleotide
caggcgcugcuuggcaaug

SEQ ID NO: 797605 - RNA, 19 nt, Artificial Sequence
  Description of Artificial Sequence: Synthetic oligonucleotide
cugcaucuucauacgccua

SEQ ID NO: 797606 - RNA, 19 nt, Artificial Sequence
  Description of Artificial Sequence: Synthetic oligonucleotide
cagcgcucuucuccucauc

SEQ ID NO: 797607 - RNA, 19 nt, Artificial Sequence
  Description of Artificial Sequence: Synthetic oligonucleotide
uggcagcgcucuucuccuc

SEQ ID NO: 797608 - RNA, 19 nt, Artificial Sequence
  Description of Artificial Sequence: Synthetic oligonucleotide
aggcgcugcuuggcaauga

SEQ ID NO: 797609 - RNA, 19 nt, Artificial Sequence
  Description of Artificial Sequence: Synthetic oligonucleotide
ggcacaagggucagugacu

SEQ ID NO: 797610 - RNA, 19 nt, Artificial Sequence
  Description of Artificial Sequence: Synthetic oligonucleotide
cguuggaggcaggaggaug

SEQ ID NO: 797611 - RNA, 19 nt, Artificial Sequence
  Description of Artificial Sequence: Synthetic oligonucleotide
ggagauccuugggugucca

SEQ ID NO: 797612 - RNA, 19 nt, Artificial Sequence
  Description of Artificial Sequence: Synthetic oligonucleotide
gugcccguuggaggcagga

SEQ ID NO: 797613 - RNA, 19 nt, Artificial Sequence
  Description of Artificial Sequence: Synthetic oligonucleotide
ccugcgcaggcuuugugua

SEQ ID NO: 797614 - RNA, 19 nt, Artificial Sequence
  Description of Artificial Sequence: Synthetic oligonucleotide
gcuggaccaagccgccguc

SEQ ID NO: 797615 - RNA, 19 nt, Artificial Sequence
  Description of Artificial Sequence: Synthetic oligonucleotide
ggggccaggugcauggucu

SEQ ID NO: 797616 - RNA, 19 nt, Artificial Sequence
  Description of Artificial Sequence: Synthetic oligonucleotide
cucgcagacucuggguaua

SEQ ID NO: 797617 - RNA, 19 nt, Artificial Sequence
  Description of Artificial Sequence: Synthetic oligonucleotide
ggcuggauugggaggucca

SEQ ID NO: 797618 - RNA, 19 nt, Artificial Sequence
  Description of Artificial Sequence: Synthetic oligonucleotide
guuuguggauggugauauu

SEQ ID NO: 797619 - RNA, 19 nt, Artificial Sequence
  Description of Artificial Sequence: Synthetic oligonucleotide
cgccuagccuggaugcggc

SEQ ID NO: 797620 - RNA, 19 nt, Artificial Sequence
  Description of Artificial Sequence: Synthetic oligonucleotide
gcaccggaugcugggcuug

SEQ ID NO: 797621 - RNA, 19 nt, Artificial Sequence
  Description of Artificial Sequence: Synthetic oligonucleotide
gcggcacuggucauagaaa

SEQ ID NO: 797622 - RNA, 19 nt, Artificial Sequence
  Description of Artificial Sequence: Synthetic oligonucleotide
caggcucaucugguaaaua

SEQ ID NO: 797623 - RNA, 19 nt, Artificial Sequence
  Description of Artificial Sequence: Synthetic oligonucleotide
gggucucuuuugcauccgu

SEQ ID NO: 797624 - RNA, 19 nt, Artificial Sequence
  Description of Artificial Sequence: Synthetic oligonucleotide
gugucggcaguguccucau

SEQ ID NO: 797625 - RNA, 19 nt, Artificial Sequence
  Description of Artificial Sequence: Synthetic oligonucleotide
agccgccguccuuggugau

SEQ ID NO: 797626 - RNA, 19 nt, Artificial Sequence
  Description of Artificial Sequence: Synthetic oligonucleotide
gcucgcagacucuggguau

SEQ ID NO: 797627 - RNA, 19 nt, Artificial Sequence
  Description of Artificial Sequence: Synthetic oligonucleotide
cugcgcaggcuuuguguau

SEQ ID NO: 797628 - RNA, 19 nt, Artificial Sequence
  Description of Artificial Sequence: Synthetic oligonucleotide
gccgccguccuuggugaug

SEQ ID NO: 797629 - RNA, 19 nt, Artificial Sequence
  Description of Artificial Sequence: Synthetic oligonucleotide
gcgcuggaccaagccgccg

SEQ ID NO: 797630 - RNA, 19 nt, Artificial Sequence
  Description of Artificial Sequence: Synthetic oligonucleotide
cucggcggcacuggucaua

SEQ ID NO: 797631 - RNA, 19 nt, Artificial Sequence
  Description of Artificial Sequence: Synthetic oligonucleotide
agccuguggcagcgcucuu

SEQ ID NO: 797632 - RNA, 19 nt, Artificial Sequence
  Description of Artificial Sequence: Synthetic oligonucleotide
ccggauggcccgccguguc

SEQ ID NO: 797633 - RNA, 19 nt, Artificial Sequence
  Description of Artificial Sequence: Synthetic oligonucleotide
cauccugcgcaggcuuugu

SEQ ID NO: 797634 - RNA, 19 nt, Artificial Sequence
  Description of Artificial Sequence: Synthetic oligonucleotide
ggccccggcaguggccagc

SEQ ID NO: 797635 - RNA, 19 nt, Artificial Sequence
  Description of Artificial Sequence: Synthetic oligonucleotide
gcauccguuucuugcccuu

SEQ ID NO: 797636 - RNA, 19 nt, Artificial Sequence
  Description of Artificial Sequence: Synthetic oligonucleotide
gcagaaggccugcgaacuu

SEQ ID NO: 797637 - RNA, 19 nt, Artificial Sequence
  Description of Artificial Sequence: Synthetic oligonucleotide
gccguccuuggugaugacu

SEQ ID NO: 797638 - RNA, 19 nt, Artificial Sequence
  Description of Artificial Sequence: Synthetic oligonucleotide
gccugcgaacuugaccacu

SEQ ID NO: 797639 - RNA, 19 nt, Artificial Sequence
  Description of Artificial Sequence: Synthetic oligonucleotide
gcagcgcucuucuccucau

SEQ ID NO: 797640 - RNA, 19 nt, Artificial Sequence
  Description of Artificial Sequence: Synthetic oligonucleotide
cugccucggcggcacuggu

SEQ ID NO: 797641 - RNA, 19 nt, Artificial Sequence
  Description of Artificial Sequence: Synthetic oligonucleotide
caguggcaacugggucuca

SEQ ID NO: 797642 - RNA, 19 nt, Artificial Sequence
  Description of Artificial Sequence: Synthetic oligonucleotide
cgcuggaccaagccgccgu

SEQ ID NO: 797643 - RNA, 19 nt, Artificial Sequence
  Description of Artificial Sequence: Synthetic oligonucleotide
gcgcugcacugugggguca

SEQ ID NO: 797644 - RNA, 19 nt, Artificial Sequence
  Description of Artificial Sequence: Synthetic oligonucleotide
gggcggcuauccucugcau

SEQ ID NO: 797645 - RNA, 19 nt, Artificial Sequence
  Description of Artificial Sequence: Synthetic oligonucleotide
caggcuccaccaggcucau

SEQ ID NO: 797646 - RNA, 19 nt, Artificial Sequence
  Description of Artificial Sequence: Synthetic oligonucleotide
ccaagccgccguccuuggu

SEQ ID NO: 797647 - RNA, 19 nt, Artificial Sequence
  Description of Artificial Sequence: Synthetic oligonucleotide
cggauggcccgccgugucu

SEQ ID NO: 797648 - RNA, 19 nt, Artificial Sequence
  Description of Artificial Sequence: Synthetic oligonucleotide
cccggauggcccgccgugu

SEQ ID NO: 797649 - RNA, 19 nt, Artificial Sequence
  Description of Artificial Sequence: Synthetic oligonucleotide
ccucggcggcacuggucau

SEQ ID NO: 797650 - RNA, 19 nt, Artificial Sequence
  Description of Artificial Sequence: Synthetic oligonucleotide
cggcggcacuggucauaga

SEQ ID NO: 797651 - RNA, 19 nt, Artificial Sequence
  Description of Artificial Sequence: Synthetic oligonucleotide
cggcuauccucugcaucuu

SEQ ID NO: 797652 - RNA, 19 nt, Artificial Sequence
  Description of Artificial Sequence: Synthetic oligonucleotide
acaagaaugauuuacuugc

SEQ ID NO: 797653 - RNA, 19 nt, Artificial Sequence
  Description of Artificial Sequence: Synthetic oligonucleotide
uuugauuugaaauaaaucu

SEQ ID NO: 797654 - RNA, 19 nt, Artificial Sequence
  Description of Artificial Sequence: Synthetic oligonucleotide
aaaucagcaaccuugacag

SEQ ID NO: 797655 - RNA, 19 nt, Artificial Sequence
  Description of Artificial Sequence: Synthetic oligonucleotide
agaacaauuauuaaaauac

SEQ ID NO: 797656 - RNA, 19 nt, Artificial Sequence
  Description of Artificial Sequence: Synthetic oligonucleotide
uuuuauuuagccuaaacca

SEQ ID NO: 797657 - RNA, 19 nt, Artificial Sequence
  Description of Artificial Sequence: Synthetic oligonucleotide
aaaauaaguacauugucug

SEQ ID NO: 797658 - RNA, 19 nt, Artificial Sequence
  Description of Artificial Sequence: Synthetic oligonucleotide
uuugaaauaaaucuguacu

SEQ ID NO: 797659 - RNA, 19 nt, Artificial Sequence
  Description of Artificial Sequence: Synthetic oligonucleotide
aauaugcuuuuauuuagcc

SEQ ID NO: 797660 - RNA, 19 nt, Artificial Sequence
  Description of Artificial Sequence: Synthetic oligonucleotide
uguacaauaacacaaaaua

SEQ ID NO: 797661 - RNA, 19 nt, Artificial Sequence
  Description of Artificial Sequence: Synthetic oligonucleotide
aauacaaaguaccauucag

SEQ ID NO: 797662 - RNA, 19 nt, Artificial Sequence
  Description of Artificial Sequence: Synthetic oligonucleotide
aaaucuucaagguucacug

SEQ ID NO: 797663 - RNA, 19 nt, Artificial Sequence
  Description of Artificial Sequence: Synthetic oligonucleotide
uuuacuguaacaaaguuuu

SEQ ID NO: 797664 - RNA, 19 nt, Artificial Sequence
  Description of Artificial Sequence: Synthetic oligonucleotide
aguagccuaagccacaugc

SEQ ID NO: 797665 - RNA, 19 nt, Artificial Sequence
  Description of Artificial Sequence: Synthetic oligonucleotide
cuuuuauuuagccuaaacc

SEQ ID NO: 797666 - RNA, 19 nt, Artificial Sequence
  Description of Artificial Sequence: Synthetic oligonucleotide
uuauuuagccuaaaccacg

SEQ ID NO: 797667 - RNA, 19 nt, Artificial Sequence
  Description of Artificial Sequence: Synthetic oligonucleotide
aaaacacuggaauuccaac

SEQ ID NO: 797668 - RNA, 19 nt, Artificial Sequence
  Description of Artificial Sequence: Synthetic oligonucleotide
uccuaaugcaaaaugaggc

SEQ ID NO: 797669 - RNA, 19 nt, Artificial Sequence
  Description of Artificial Sequence: Synthetic oligonucleotide
uguacuggcaaucaguaug

SEQ ID NO: 797670 - RNA, 19 nt, Artificial Sequence
  Description of Artificial Sequence: Synthetic oligonucleotide
ugauagguagacaacauca

SEQ ID NO: 797671 - RNA, 19 nt, Artificial Sequence
  Description of Artificial Sequence: Synthetic oligonucleotide
aguauucuuuaucauacac

SEQ ID NO: 797672 - RNA, 19 nt, Artificial Sequence
  Description of Artificial Sequence: Synthetic oligonucleotide
aauauuuccaguccauuga

SEQ ID NO: 797673 - RNA, 19 nt, Artificial Sequence
  Description of Artificial Sequence: Synthetic oligonucleotide
gacacauuacccuaggaag

SEQ ID NO: 797674 - RNA, 19 nt, Artificial Sequence
  Description of Artificial Sequence: Synthetic oligonucleotide
aaauuacguguccacauuc

SEQ ID NO: 797675 - RNA, 19 nt, Artificial Sequence
  Description of Artificial Sequence: Synthetic oligonucleotide
cucuaaaccauuauguggc

SEQ ID NO: 797676 - RNA, 19 nt, Artificial Sequence
  Description of Artificial Sequence: Synthetic oligonucleotide
uuuagccuaaaccacgucc

SEQ ID NO: 797677 - RNA, 19 nt, Artificial Sequence
  Description of Artificial Sequence: Synthetic oligonucleotide
ugauuuaucagaacaauua

SEQ ID NO: 797678 - RNA, 19 nt, Artificial Sequence
  Description of Artificial Sequence: Synthetic oligonucleotide
ugauuugaaauaaaucugu

SEQ ID NO: 797679 - RNA, 19 nt, Artificial Sequence
  Description of Artificial Sequence: Synthetic oligonucleotide
uuuauuuagccuaaaccac

SEQ ID NO: 797680 - RNA, 19 nt, Artificial Sequence
  Description of Artificial Sequence: Synthetic oligonucleotide
agcuagaguagccuaagcc

SEQ ID NO: 797681 - RNA, 19 nt, Artificial Sequence
  Description of Artificial Sequence: Synthetic oligonucleotide
uguucuuauagcauuaaaa

SEQ ID NO: 797682 - RNA, 19 nt, Artificial Sequence
  Description of Artificial Sequence: Synthetic oligonucleotide
aaguuucuaauucugacaa

SEQ ID NO: 797683 - RNA, 19 nt, Artificial Sequence
  Description of Artificial Sequence: Synthetic oligonucleotide
ugcacuauacaguaguaag

SEQ ID NO: 797684 - RNA, 19 nt, Artificial Sequence
  Description of Artificial Sequence: Synthetic oligonucleotide
cauuauguggccaugguug

SEQ ID NO: 797685 - RNA, 19 nt, Artificial Sequence
  Description of Artificial Sequence: Synthetic oligonucleotide
aauucaacuauuggguuuc

SEQ ID NO: 797686 - RNA, 19 nt, Artificial Sequence
  Description of Artificial Sequence: Synthetic oligonucleotide
gaauauguugaaaacacug

SEQ ID NO: 797687 - RNA, 19 nt, Artificial Sequence
  Description of Artificial Sequence: Synthetic oligonucleotide
uuuacuugcacaaucuguc

SEQ ID NO: 797688 - RNA, 19 nt, Artificial Sequence
  Description of Artificial Sequence: Synthetic oligonucleotide
ugauuuucacauugcagcg

SEQ ID NO: 797689 - RNA, 19 nt, Artificial Sequence
  Description of Artificial Sequence: Synthetic oligonucleotide
guugguuucgaccuugugg

SEQ ID NO: 797690 - RNA, 19 nt, Artificial Sequence
  Description of Artificial Sequence: Synthetic oligonucleotide
accucauagagacagcuac

SEQ ID NO: 797691 - RNA, 19 nt, Artificial Sequence
  Description of Artificial Sequence: Synthetic oligonucleotide
augauaaauauuuuacugu

SEQ ID NO: 797692 - RNA, 19 nt, Artificial Sequence
  Description of Artificial Sequence: Synthetic oligonucleotide
uucuugagcauguauauac

SEQ ID NO: 797693 - RNA, 19 nt, Artificial Sequence
  Description of Artificial Sequence: Synthetic oligonucleotide
uguaucacaucugauuugg

SEQ ID NO: 797694 - RNA, 19 nt, Artificial Sequence
  Description of Artificial Sequence: Synthetic oligonucleotide
aaauguuugccugauaggu

SEQ ID NO: 797695 - RNA, 19 nt, Artificial Sequence
  Description of Artificial Sequence: Synthetic oligonucleotide
ugagcauguauauacaggu

SEQ ID NO: 797696 - RNA, 19 nt, Artificial Sequence
  Description of Artificial Sequence: Synthetic oligonucleotide
uauucaucuugcaagaguc

SEQ ID NO: 797697 - RNA, 19 nt, Artificial Sequence
  Description of Artificial Sequence: Synthetic oligonucleotide
auuauguuccaccaccauc

SEQ ID NO: 797698 - RNA, 19 nt, Artificial Sequence
  Description of Artificial Sequence: Synthetic oligonucleotide
acuauuggguuucagaaga

SEQ ID NO: 797699 - RNA, 19 nt, Artificial Sequence
  Description of Artificial Sequence: Synthetic oligonucleotide
acaauuuacagccauuuaa

SEQ ID NO: 797700 - RNA, 19 nt, Artificial Sequence
  Description of Artificial Sequence: Synthetic oligonucleotide
auguguucugauuauguuc

SEQ ID NO: 797701 - RNA, 19 nt, Artificial Sequence
  Description of Artificial Sequence: Synthetic oligonucleotide
cuuucuacagagcagauca

SEQ ID NO: 797702 - RNA, 19 nt, Artificial Sequence
  Description of Artificial Sequence: Synthetic oligonucleotide
uacaguaguaagcacagaa

SEQ ID NO: 797703 - RNA, 19 nt, Artificial Sequence
  Description of Artificial Sequence: Synthetic oligonucleotide
aacuauuggguuucagaag

SEQ ID NO: 797704 - RNA, 19 nt, Artificial Sequence
  Description of Artificial Sequence: Synthetic oligonucleotide
uuuaucaccacaaguuacu

SEQ ID NO: 797705 - RNA, 19 nt, Artificial Sequence
  Description of Artificial Sequence: Synthetic oligonucleotide
agggcaaauauuuccaguc

SEQ ID NO: 797706 - RNA, 19 nt, Artificial Sequence
  Description of Artificial Sequence: Synthetic oligonucleotide
ugauaaauauuuuacugua

SEQ ID NO: 797707 - RNA, 19 nt, Artificial Sequence
  Description of Artificial Sequence: Synthetic oligonucleotide
uaaaccacguccuaaugca

SEQ ID NO: 797708 - RNA, 19 nt, Artificial Sequence
  Description of Artificial Sequence: Synthetic oligonucleotide
uauaguauucuuuaucaua

SEQ ID NO: 797709 - RNA, 19 nt, Artificial Sequence
  Description of Artificial Sequence: Synthetic oligonucleotide
aggugugagcccuagcucc

SEQ ID NO: 797710 - RNA, 19 nt, Artificial Sequence
  Description of Artificial Sequence: Synthetic oligonucleotide
uuuggcaccgguuuuguug

SEQ ID NO: 797711 - RNA, 19 nt, Artificial Sequence
  Description of Artificial Sequence: Synthetic oligonucleotide
acauaccucuucuuaaacg

SEQ ID NO: 797712 - RNA, 19 nt, Artificial Sequence
  Description of Artificial Sequence: Synthetic oligonucleotide
gaaauagugcaccuuucag

SEQ ID NO: 797713 - RNA, 19 nt, Artificial Sequence
  Description of Artificial Sequence: Synthetic oligonucleotide
aaaaguguugccuccaauu

SEQ ID NO: 797714 - RNA, 19 nt, Artificial Sequence
  Description of Artificial Sequence: Synthetic oligonucleotide
auugcagcguucuugagca

SEQ ID NO: 797715 - RNA, 19 nt, Artificial Sequence
  Description of Artificial Sequence: Synthetic oligonucleotide
aucaucuauguacaauaac

SEQ ID NO: 797716 - RNA, 19 nt, Artificial Sequence
  Description of Artificial Sequence: Synthetic oligonucleotide
aaauaaguacauugucugu

SEQ ID NO: 797717 - RNA, 19 nt, Artificial Sequence
  Description of Artificial Sequence: Synthetic oligonucleotide
cugauuauguuccaccacc

SEQ ID NO: 797718 - RNA, 19 nt, Artificial Sequence
  Description of Artificial Sequence: Synthetic oligonucleotide
aaagggcaaauauuuccag

SEQ ID NO: 797719 - RNA, 19 nt, Artificial Sequence
  Description of Artificial Sequence: Synthetic oligonucleotide
uuugauugccaucauuuuc

SEQ ID NO: 797720 - RNA, 19 nt, Artificial Sequence
  Description of Artificial Sequence: Synthetic oligonucleotide
auguuugccugauagguag

SEQ ID NO: 797721 - RNA, 19 nt, Artificial Sequence
  Description of Artificial Sequence: Synthetic oligonucleotide
ugauuuacuugcacaaucu

SEQ ID NO: 797722 - RNA, 19 nt, Artificial Sequence
  Description of Artificial Sequence: Synthetic oligonucleotide
uuugcagacucuccaaagc

SEQ ID NO: 797723 - RNA, 19 nt, Artificial Sequence
  Description of Artificial Sequence: Synthetic oligonucleotide
aaaaucacgcugcugucga

SEQ ID NO: 797724 - RNA, 19 nt, Artificial Sequence
  Description of Artificial Sequence: Synthetic oligonucleotide
aacuauucauuaaagauuu

SEQ ID NO: 797725 - RNA, 19 nt, Artificial Sequence
  Description of Artificial Sequence: Synthetic oligonucleotide
acaugauaaauauuuuacu

SEQ ID NO: 797726 - RNA, 19 nt, Artificial Sequence
  Description of Artificial Sequence: Synthetic oligonucleotide
aaaugaggcuccccaaaag

SEQ ID NO: 797727 - RNA, 19 nt, Artificial Sequence
  Description of Artificial Sequence: Synthetic oligonucleotide
uuuuguuugcugagauugg

SEQ ID NO: 797728 - RNA, 19 nt, Artificial Sequence
  Description of Artificial Sequence: Synthetic oligonucleotide
aaacuauucauuaaagauu

SEQ ID NO: 797729 - RNA, 19 nt, Artificial Sequence
  Description of Artificial Sequence: Synthetic oligonucleotide
ucuauuaacccuuggcuuc

SEQ ID NO: 797730 - RNA, 19 nt, Artificial Sequence
  Description of Artificial Sequence: Synthetic oligonucleotide
uugaaauaaaucuguacua

SEQ ID NO: 797731 - RNA, 19 nt, Artificial Sequence
  Description of Artificial Sequence: Synthetic oligonucleotide
ucaucaucuauguacaaua

SEQ ID NO: 797732 - RNA, 19 nt, Artificial Sequence
  Description of Artificial Sequence: Synthetic oligonucleotide
uaguguagaagccuccacc

SEQ ID NO: 797733 - RNA, 19 nt, Artificial Sequence
  Description of Artificial Sequence: Synthetic oligonucleotide
uguuacgucacuuuauuuu

SEQ ID NO: 797734 - RNA, 19 nt, Artificial Sequence
  Description of Artificial Sequence: Synthetic oligonucleotide
cuaaaccacguccuaaugc

SEQ ID NO: 797735 - RNA, 19 nt, Artificial Sequence
  Description of Artificial Sequence: Synthetic oligonucleotide
uuagccuaaaccacguccu

SEQ ID NO: 797736 - RNA, 19 nt, Artificial Sequence
  Description of Artificial Sequence: Synthetic oligonucleotide
aaauucaacuauuggguuu

SEQ ID NO: 797737 - RNA, 19 nt, Artificial Sequence
  Description of Artificial Sequence: Synthetic oligonucleotide
aagcaguacuauuugauuu

SEQ ID NO: 797738 - RNA, 19 nt, Artificial Sequence
  Description of Artificial Sequence: Synthetic oligonucleotide
uuguuuuaguguagaagcc

SEQ ID NO: 797739 - RNA, 19 nt, Artificial Sequence
  Description of Artificial Sequence: Synthetic oligonucleotide
aguuccuugcagcuaaguc

SEQ ID NO: 797740 - RNA, 19 nt, Artificial Sequence
  Description of Artificial Sequence: Synthetic oligonucleotide
cauagugugcucuauuaac

SEQ ID NO: 797741 - RNA, 19 nt, Artificial Sequence
  Description of Artificial Sequence: Synthetic oligonucleotide
auuucuguggccuaacaaa

SEQ ID NO: 797742 - RNA, 19 nt, Artificial Sequence
  Description of Artificial Sequence: Synthetic oligonucleotide
auuacguguccacauucac

SEQ ID NO: 797743 - RNA, 19 nt, Artificial Sequence
  Description of Artificial Sequence: Synthetic oligonucleotide
auuauguggccaugguugg

SEQ ID NO: 797744 - RNA, 19 nt, Artificial Sequence
  Description of Artificial Sequence: Synthetic oligonucleotide
uguggauagucauccaacc

SEQ ID NO: 797745 - RNA, 19 nt, Artificial Sequence
  Description of Artificial Sequence: Synthetic oligonucleotide
ugacaaguuucuaauucug

SEQ ID NO: 797746 - RNA, 19 nt, Artificial Sequence
  Description of Artificial Sequence: Synthetic oligonucleotide
uuuaucauacacgucucug

SEQ ID NO: 797747 - RNA, 19 nt, Artificial Sequence
  Description of Artificial Sequence: Synthetic oligonucleotide
cuauacaguaguaagcaca

SEQ ID NO: 797748 - RNA, 19 nt, Artificial Sequence
  Description of Artificial Sequence: Synthetic oligonucleotide
ucauacacgucucuggcaa

SEQ ID NO: 797749 - RNA, 19 nt, Artificial Sequence
  Description of Artificial Sequence: Synthetic oligonucleotide
ucuguccagacacauuacc

SEQ ID NO: 797750 - RNA, 19 nt, Artificial Sequence
  Description of Artificial Sequence: Synthetic oligonucleotide
ucaagcaguacuauuugau

SEQ ID NO: 797751 - RNA, 19 nt, Artificial Sequence
  Description of Artificial Sequence: Synthetic oligonucleotide
uaagccacaugcacuauac

SEQ ID NO: 797752 - RNA, 19 nt, Artificial Sequence
  Description of Artificial Sequence: Synthetic oligonucleotide
uacuuauuuucagaguugc

SEQ ID NO: 797753 - RNA, 19 nt, Artificial Sequence
  Description of Artificial Sequence: Synthetic oligonucleotide
aucaguaugcuuccuuauc

SEQ ID NO: 797754 - RNA, 19 nt, Artificial Sequence
  Description of Artificial Sequence: Synthetic oligonucleotide
agccaaauucaacuauugg

SEQ ID NO: 797755 - RNA, 19 nt, Artificial Sequence
  Description of Artificial Sequence: Synthetic oligonucleotide
uccuuauguguucugauua

SEQ ID NO: 797756 - RNA, 19 nt, Artificial Sequence
  Description of Artificial Sequence: Synthetic oligonucleotide
gauuuacuugcacaaucug

SEQ ID NO: 797757 - RNA, 19 nt, Artificial Sequence
  Description of Artificial Sequence: Synthetic oligonucleotide
uauuuagccuaaaccacgu

SEQ ID NO: 797758 - RNA, 19 nt, Artificial Sequence
  Description of Artificial Sequence: Synthetic oligonucleotide
cugagauugggucucacac

SEQ ID NO: 797759 - RNA, 19 nt, Artificial Sequence
  Description of Artificial Sequence: Synthetic oligonucleotide
uucacgggcaguuuggcac

SEQ ID NO: 797760 - RNA, 19 nt, Artificial Sequence
  Description of Artificial Sequence: Synthetic oligonucleotide
caugacuggaaauagugca

SEQ ID NO: 797761 - RNA, 19 nt, Artificial Sequence
  Description of Artificial Sequence: Synthetic oligonucleotide
uucucaaauaguugaauuu

SEQ ID NO: 797762 - RNA, 19 nt, Artificial Sequence
  Description of Artificial Sequence: Synthetic oligonucleotide
aauucugacaagaaugauu

SEQ ID NO: 797763 - RNA, 19 nt, Artificial Sequence
  Description of Artificial Sequence: Synthetic oligonucleotide
acuagagcagaacaaaauu

SEQ ID NO: 797764 - RNA, 19 nt, Artificial Sequence
  Description of Artificial Sequence: Synthetic oligonucleotide
aaaauuacguguccacauu

SEQ ID NO: 797765 - RNA, 19 nt, Artificial Sequence
  Description of Artificial Sequence: Synthetic oligonucleotide
uguguauauaaaaguuuaa

SEQ ID NO: 797766 - RNA, 19 nt, Artificial Sequence
  Description of Artificial Sequence: Synthetic oligonucleotide
uugacaaaaccagcuagag

SEQ ID NO: 797767 - RNA, 19 nt, Artificial Sequence
  Description of Artificial Sequence: Synthetic oligonucleotide
uugccugauagguagacaa

SEQ ID NO: 797768 - RNA, 19 nt, Artificial Sequence
  Description of Artificial Sequence: Synthetic oligonucleotide
auaugcuuuuauuuagccu

SEQ ID NO: 797769 - RNA, 19 nt, Artificial Sequence
  Description of Artificial Sequence: Synthetic oligonucleotide
gaagagcacacccauguca

SEQ ID NO: 797770 - RNA, 19 nt, Artificial Sequence
  Description of Artificial Sequence: Synthetic oligonucleotide
ugauuauguuccaccacca

SEQ ID NO: 797771 - RNA, 19 nt, Artificial Sequence
  Description of Artificial Sequence: Synthetic oligonucleotide
uuucaauguuuacauugac

SEQ ID NO: 797772 - RNA, 19 nt, Artificial Sequence
  Description of Artificial Sequence: Synthetic oligonucleotide
auaaaaguuuaaaagggaa

SEQ ID NO: 797773 - RNA, 19 nt, Artificial Sequence
  Description of Artificial Sequence: Synthetic oligonucleotide
uguuuuaguguagaagccu

SEQ ID NO: 797774 - RNA, 19 nt, Artificial Sequence
  Description of Artificial Sequence: Synthetic oligonucleotide
agacacauuacccuaggaa

SEQ ID NO: 797775 - RNA, 19 nt, Artificial Sequence
  Description of Artificial Sequence: Synthetic oligonucleotide
cuuugucuacacacaagcc

SEQ ID NO: 797776 - RNA, 19 nt, Artificial Sequence
  Description of Artificial Sequence: Synthetic oligonucleotide
ugucuguuuugaaaauaug

SEQ ID NO: 797777 - RNA, 19 nt, Artificial Sequence
  Description of Artificial Sequence: Synthetic oligonucleotide
ucuugagcauguauauaca

SEQ ID NO: 797778 - RNA, 19 nt, Artificial Sequence
  Description of Artificial Sequence: Synthetic oligonucleotide
uggcuucaaguccugauga

SEQ ID NO: 797779 - RNA, 19 nt, Artificial Sequence
  Description of Artificial Sequence: Synthetic oligonucleotide
cauugcagcguucuugagc

SEQ ID NO: 797780 - RNA, 19 nt, Artificial Sequence
  Description of Artificial Sequence: Synthetic oligonucleotide
guagacaagauguuacguc

SEQ ID NO: 797781 - RNA, 19 nt, Artificial Sequence
  Description of Artificial Sequence: Synthetic oligonucleotide
ucugauuauguuccaccac

SEQ ID NO: 797782 - RNA, 19 nt, Artificial Sequence
  Description of Artificial Sequence: Synthetic oligonucleotide
caguagacaagauguuacg

SEQ ID NO: 797783 - RNA, 19 nt, Artificial Sequence
  Description of Artificial Sequence: Synthetic oligonucleotide
acacauuacccuaggaagg

SEQ ID NO: 797784 - RNA, 19 nt, Artificial Sequence
  Description of Artificial Sequence: Synthetic oligonucleotide
auauacaggucugggugcc

SEQ ID NO: 797785 - RNA, 19 nt, Artificial Sequence
  Description of Artificial Sequence: Synthetic oligonucleotide
gauuuaucaccacaaguua

SEQ ID NO: 797786 - RNA, 19 nt, Artificial Sequence
  Description of Artificial Sequence: Synthetic oligonucleotide
uucuacagagcagaucaag

SEQ ID NO: 797787 - RNA, 19 nt, Artificial Sequence
  Description of Artificial Sequence: Synthetic oligonucleotide
cuagcuccuggcuaaacug

SEQ ID NO: 797788 - RNA, 19 nt, Artificial Sequence
  Description of Artificial Sequence: Synthetic oligonucleotide
aaucacgcugcugucgauc

SEQ ID NO: 797789 - RNA, 19 nt, Artificial Sequence
  Description of Artificial Sequence: Synthetic oligonucleotide
ucaugucaugcuaucuuga

SEQ ID NO: 797790 - RNA, 19 nt, Artificial Sequence
  Description of Artificial Sequence: Synthetic oligonucleotide
auguauauacaggucuggg

SEQ ID NO: 797791 - RNA, 19 nt, Artificial Sequence
  Description of Artificial Sequence: Synthetic oligonucleotide
ugacaaaaccagcuagagu

SEQ ID NO: 797792 - RNA, 19 nt, Artificial Sequence
  Description of Artificial Sequence: Synthetic oligonucleotide
ucauagugugcucuauuaa

SEQ ID NO: 797793 - RNA, 19 nt, Artificial Sequence
  Description of Artificial Sequence: Synthetic oligonucleotide
uaggcagugacaaguuucu

SEQ ID NO: 797794 - RNA, 19 nt, Artificial Sequence
  Description of Artificial Sequence: Synthetic oligonucleotide
guaagcacagaauuccaca

SEQ ID NO: 797795 - RNA, 19 nt, Artificial Sequence
  Description of Artificial Sequence: Synthetic oligonucleotide
uggccucuaaaccauuaug

SEQ ID NO: 797796 - RNA, 19 nt, Artificial Sequence
  Description of Artificial Sequence: Synthetic oligonucleotide
cucaugucaugcuaucuug

SEQ ID NO: 797797 - RNA, 19 nt, Artificial Sequence
  Description of Artificial Sequence: Synthetic oligonucleotide
uagccuaagccacaugcac

SEQ ID NO: 797798 - RNA, 19 nt, Artificial Sequence
  Description of Artificial Sequence: Synthetic oligonucleotide
uacuacaguuccuuaugug

SEQ ID NO: 797799 - RNA, 19 nt, Artificial Sequence
  Description of Artificial Sequence: Synthetic oligonucleotide
cauucuggccucuaaacca

SEQ ID NO: 797800 - RNA, 19 nt, Artificial Sequence
  Description of Artificial Sequence: Synthetic oligonucleotide
ucuugcaagaguccauauc

SEQ ID NO: 797801 - RNA, 19 nt, Artificial Sequence
  Description of Artificial Sequence: Synthetic oligonucleotide
cuugcaagaguccauaucu

SEQ ID NO: 797802 - RNA, 19 nt, Artificial Sequence
  Description of Artificial Sequence: Synthetic oligonucleotide
ugucgauccaacucucaca

SEQ ID NO: 797803 - RNA, 19 nt, Artificial Sequence
  Description of Artificial Sequence: Synthetic oligonucleotide
aaaauacccuagaaaauuu

SEQ ID NO: 797804 - RNA, 19 nt, Artificial Sequence
  Description of Artificial Sequence: Synthetic oligonucleotide
cuuucaauguuuacauuga

SEQ ID NO: 797805 - RNA, 19 nt, Artificial Sequence
  Description of Artificial Sequence: Synthetic oligonucleotide
uuuaguguagaagccucca

SEQ ID NO: 797806 - RNA, 19 nt, Artificial Sequence
  Description of Artificial Sequence: Synthetic oligonucleotide
auugucuguggauagucau

SEQ ID NO: 797807 - RNA, 19 nt, Artificial Sequence
  Description of Artificial Sequence: Synthetic oligonucleotide
aagccaugacuggaaauag

SEQ ID NO: 797808 - RNA, 19 nt, Artificial Sequence
  Description of Artificial Sequence: Synthetic oligonucleotide
cauguauauacaggucugg

SEQ ID NO: 797809 - RNA, 19 nt, Artificial Sequence
  Description of Artificial Sequence: Synthetic oligonucleotide
ugagauugggucucacacu

SEQ ID NO: 797810 - RNA, 19 nt, Artificial Sequence
  Description of Artificial Sequence: Synthetic oligonucleotide
auucagcucaacugcaggu

SEQ ID NO: 797811 - RNA, 19 nt, Artificial Sequence
  Description of Artificial Sequence: Synthetic oligonucleotide
uuaguguagaagccuccac

SEQ ID NO: 797812 - RNA, 19 nt, Artificial Sequence
  Description of Artificial Sequence: Synthetic oligonucleotide
aaccaaaggaauguguaua

SEQ ID NO: 797813 - RNA, 19 nt, Artificial Sequence
  Description of Artificial Sequence: Synthetic oligonucleotide
ugcaagaguccauaucuuc

SEQ ID NO: 797814 - RNA, 19 nt, Artificial Sequence
  Description of Artificial Sequence: Synthetic oligonucleotide
cuguggauagucauccaac

SEQ ID NO: 797815 - RNA, 19 nt, Artificial Sequence
  Description of Artificial Sequence: Synthetic oligonucleotide
aauuacguguccacauuca

SEQ ID NO: 797816 - RNA, 19 nt, Artificial Sequence
  Description of Artificial Sequence: Synthetic oligonucleotide
augacuggaaauagugcac

SEQ ID NO: 797817 - RNA, 19 nt, Artificial Sequence
  Description of Artificial Sequence: Synthetic oligonucleotide
acuuauuuucagaguugcc

SEQ ID NO: 797818 - RNA, 19 nt, Artificial Sequence
  Description of Artificial Sequence: Synthetic oligonucleotide
uggauucgcuuucuugacc

SEQ ID NO: 797819 - RNA, 19 nt, Artificial Sequence
  Description of Artificial Sequence: Synthetic oligonucleotide
uguuugcagacucuccaaa

SEQ ID NO: 797820 - RNA, 19 nt, Artificial Sequence
  Description of Artificial Sequence: Synthetic oligonucleotide
uuaucacaauuuacagcca

SEQ ID NO: 797821 - RNA, 19 nt, Artificial Sequence
  Description of Artificial Sequence: Synthetic oligonucleotide
auuuucacauugcagcguu

SEQ ID NO: 797822 - RNA, 19 nt, Artificial Sequence
  Description of Artificial Sequence: Synthetic oligonucleotide
gagcacacccaugucauag

SEQ ID NO: 797823 - RNA, 19 nt, Artificial Sequence
  Description of Artificial Sequence: Synthetic oligonucleotide
cauuacccuaggaagguuc

SEQ ID NO: 797824 - RNA, 19 nt, Artificial Sequence
  Description of Artificial Sequence: Synthetic oligonucleotide
acauucacuagagcagaac

SEQ ID NO: 797825 - RNA, 19 nt, Artificial Sequence
  Description of Artificial Sequence: Synthetic oligonucleotide
uguugagauuuacaugaua

SEQ ID NO: 797826 - RNA, 19 nt, Artificial Sequence
  Description of Artificial Sequence: Synthetic oligonucleotide
ugugcucuauuaacccuug

SEQ ID NO: 797827 - RNA, 19 nt, Artificial Sequence
  Description of Artificial Sequence: Synthetic oligonucleotide
gauagucauccaaccaaag

SEQ ID NO: 797828 - RNA, 19 nt, Artificial Sequence
  Description of Artificial Sequence: Synthetic oligonucleotide
uuuuaacuguaugauuuau

SEQ ID NO: 797829 - RNA, 19 nt, Artificial Sequence
  Description of Artificial Sequence: Synthetic oligonucleotide
ugguggauucgcuuucuug

SEQ ID NO: 797830 - RNA, 19 nt, Artificial Sequence
  Description of Artificial Sequence: Synthetic oligonucleotide
agaagccuccaccugagaa

SEQ ID NO: 797831 - RNA, 19 nt, Artificial Sequence
  Description of Artificial Sequence: Synthetic oligonucleotide
aucaagcaguacuauuuga

SEQ ID NO: 797832 - RNA, 19 nt, Artificial Sequence
  Description of Artificial Sequence: Synthetic oligonucleotide
aguagacaagauguuacgu

SEQ ID NO: 797833 - RNA, 19 nt, Artificial Sequence
  Description of Artificial Sequence: Synthetic oligonucleotide
ucacaauuuacagccauuu

SEQ ID NO: 797834 - RNA, 19 nt, Artificial Sequence
  Description of Artificial Sequence: Synthetic oligonucleotide
ucuacacacaagccaugac

SEQ ID NO: 797835 - RNA, 19 nt, Artificial Sequence
  Description of Artificial Sequence: Synthetic oligonucleotide
ugugcacacuauaguauuc

SEQ ID NO: 797836 - RNA, 19 nt, Artificial Sequence
  Description of Artificial Sequence: Synthetic oligonucleotide
uaguauucuuuaucauaca

SEQ ID NO: 797837 - RNA, 19 nt, Artificial Sequence
  Description of Artificial Sequence: Synthetic oligonucleotide
acgucacuuuauuuuaacu

SEQ ID NO: 797838 - RNA, 19 nt, Artificial Sequence
  Description of Artificial Sequence: Synthetic oligonucleotide
gcuagaguagccuaagcca

SEQ ID NO: 797839 - RNA, 19 nt, Artificial Sequence
  Description of Artificial Sequence: Synthetic oligonucleotide
gguggauucgcuuucuuga

SEQ ID NO: 797840 - RNA, 19 nt, Artificial Sequence
  Description of Artificial Sequence: Synthetic oligonucleotide
agaucaagcaguacuauuu

SEQ ID NO: 797841 - RNA, 19 nt, Artificial Sequence
  Description of Artificial Sequence: Synthetic oligonucleotide
uuugucuguuuugaaaaua

SEQ ID NO: 797842 - RNA, 19 nt, Artificial Sequence
  Description of Artificial Sequence: Synthetic oligonucleotide
ugaccucauagagacagcu

SEQ ID NO: 797843 - RNA, 19 nt, Artificial Sequence
  Description of Artificial Sequence: Synthetic oligonucleotide
aaauguucuuauagcauua

SEQ ID NO: 797844 - RNA, 19 nt, Artificial Sequence
  Description of Artificial Sequence: Synthetic oligonucleotide
ucagcucaacugcagguau

SEQ ID NO: 797845 - RNA, 19 nt, Artificial Sequence
  Description of Artificial Sequence: Synthetic oligonucleotide
cuuuugauugccaucauuu

SEQ ID NO: 797846 - RNA, 19 nt, Artificial Sequence
  Description of Artificial Sequence: Synthetic oligonucleotide
agguucacuguaucacauc

SEQ ID NO: 797847 - RNA, 19 nt, Artificial Sequence
  Description of Artificial Sequence: Synthetic oligonucleotide
cugauagguagacaacauc

SEQ ID NO: 797848 - RNA, 19 nt, Artificial Sequence
  Description of Artificial Sequence: Synthetic oligonucleotide
uggaaauagugcaccuuuc

SEQ ID NO: 797849 - RNA, 19 nt, Artificial Sequence
  Description of Artificial Sequence: Synthetic oligonucleotide
cauaccucuucuuaaacgu

SEQ ID NO: 797850 - RNA, 19 nt, Artificial Sequence
  Description of Artificial Sequence: Synthetic oligonucleotide
guacuggcaaucaguaugc

SEQ ID NO: 797851 - RNA, 19 nt, Artificial Sequence
  Description of Artificial Sequence: Synthetic oligonucleotide
agacaagauguuacgucac

SEQ ID NO: 797852 - RNA, 19 nt, Artificial Sequence
  Description of Artificial Sequence: Synthetic oligonucleotide
uagaguagccuaagccaca

SEQ ID NO: 797853 - RNA, 19 nt, Artificial Sequence
  Description of Artificial Sequence: Synthetic oligonucleotide
gaauguguauauaaaaguu

SEQ ID NO: 797854 - RNA, 19 nt, Artificial Sequence
  Description of Artificial Sequence: Synthetic oligonucleotide
cagccaaauucaacuauug

SEQ ID NO: 797855 - RNA, 19 nt, Artificial Sequence
  Description of Artificial Sequence: Synthetic oligonucleotide
gaaaacacuggaauuccaa

SEQ ID NO: 797856 - RNA, 19 nt, Artificial Sequence
  Description of Artificial Sequence: Synthetic oligonucleotide
ugucuacacacaagccaug

SEQ ID NO: 797857 - RNA, 19 nt, Artificial Sequence
  Description of Artificial Sequence: Synthetic oligonucleotide
cuauuggguuucagaagag

SEQ ID NO: 797858 - RNA, 19 nt, Artificial Sequence
  Description of Artificial Sequence: Synthetic oligonucleotide
guuuuaguguagaagccuc

SEQ ID NO: 797859 - RNA, 19 nt, Artificial Sequence
  Description of Artificial Sequence: Synthetic oligonucleotide
cuuauguguucugauuaug

SEQ ID NO: 797860 - RNA, 19 nt, Artificial Sequence
  Description of Artificial Sequence: Synthetic oligonucleotide
ucuugguggauucgcuuuc

SEQ ID NO: 797861 - RNA, 19 nt, Artificial Sequence
  Description of Artificial Sequence: Synthetic oligonucleotide
uccccaaaaguguugccuc

SEQ ID NO: 797862 - RNA, 19 nt, Artificial Sequence
  Description of Artificial Sequence: Synthetic oligonucleotide
aaauacccuagaaaauuua

SEQ ID NO: 797863 - RNA, 19 nt, Artificial Sequence
  Description of Artificial Sequence: Synthetic oligonucleotide
guaugauuuaucagaacaa

SEQ ID NO: 797864 - RNA, 19 nt, Artificial Sequence
  Description of Artificial Sequence: Synthetic oligonucleotide
uuauaggugugagcccuag

SEQ ID NO: 797865 - RNA, 19 nt, Artificial Sequence
  Description of Artificial Sequence: Synthetic oligonucleotide
agaauauguugaaaacacu

SEQ ID NO: 797866 - RNA, 19 nt, Artificial Sequence
  Description of Artificial Sequence: Synthetic oligonucleotide
cuuaaacguucacagugca

SEQ ID NO: 797867 - RNA, 19 nt, Artificial Sequence
  Description of Artificial Sequence: Synthetic oligonucleotide
gguuucgaccuuguggugg

SEQ ID NO: 797868 - RNA, 19 nt, Artificial Sequence
  Description of Artificial Sequence: Synthetic oligonucleotide
aaaccauuauguggccaug

SEQ ID NO: 797869 - RNA, 19 nt, Artificial Sequence
  Description of Artificial Sequence: Synthetic oligonucleotide
ugucauagugugcucuauu

SEQ ID NO: 797870 - RNA, 19 nt, Artificial Sequence
  Description of Artificial Sequence: Synthetic oligonucleotide
cuguaugauuuaucagaac

SEQ ID NO: 797871 - RNA, 19 nt, Artificial Sequence
  Description of Artificial Sequence: Synthetic oligonucleotide
uuccuuauguguucugauu

SEQ ID NO: 797872 - RNA, 19 nt, Artificial Sequence
  Description of Artificial Sequence: Synthetic oligonucleotide
ugauugccaucauuuuccu

SEQ ID NO: 797873 - RNA, 19 nt, Artificial Sequence
  Description of Artificial Sequence: Synthetic oligonucleotide
augucaugcuaucuugaaa

SEQ ID NO: 797874 - RNA, 19 nt, Artificial Sequence
  Description of Artificial Sequence: Synthetic oligonucleotide
cugucgauccaacucucac

SEQ ID NO: 797875 - RNA, 19 nt, Artificial Sequence
  Description of Artificial Sequence: Synthetic oligonucleotide
cuccaauuguuuuagugua

SEQ ID NO: 797876 - RNA, 19 nt, Artificial Sequence
  Description of Artificial Sequence: Synthetic oligonucleotide
accauuauguggccauggu

SEQ ID NO: 797877 - RNA, 19 nt, Artificial Sequence
  Description of Artificial Sequence: Synthetic oligonucleotide
aaccagcuagaguagccua

SEQ ID NO: 797878 - RNA, 19 nt, Artificial Sequence
  Description of Artificial Sequence: Synthetic oligonucleotide
gauccaacucucacauacc

SEQ ID NO: 797879 - RNA, 19 nt, Artificial Sequence
  Description of Artificial Sequence: Synthetic oligonucleotide
acguccuaaugcaaaauga

SEQ ID NO: 797880 - RNA, 19 nt, Artificial Sequence
  Description of Artificial Sequence: Synthetic oligonucleotide
aagccacaugcacuauaca

SEQ ID NO: 797881 - RNA, 19 nt, Artificial Sequence
  Description of Artificial Sequence: Synthetic oligonucleotide
ggaaauagugcaccuuuca

SEQ ID NO: 797882 - RNA, 19 nt, Artificial Sequence
  Description of Artificial Sequence: Synthetic oligonucleotide
gucauagugugcucuauua

SEQ ID NO: 797883 - RNA, 19 nt, Artificial Sequence
  Description of Artificial Sequence: Synthetic oligonucleotide
caagguucacuguaucaca

SEQ ID NO: 797884 - RNA, 19 nt, Artificial Sequence
  Description of Artificial Sequence: Synthetic oligonucleotide
ugccugauagguagacaac

SEQ ID NO: 797885 - RNA, 19 nt, Artificial Sequence
  Description of Artificial Sequence: Synthetic oligonucleotide
uguugccuccaauuguuuu

SEQ ID NO: 797886 - RNA, 19 nt, Artificial Sequence
  Description of Artificial Sequence: Synthetic oligonucleotide
cuacacacaagccaugacu

SEQ ID NO: 797887 - RNA, 19 nt, Artificial Sequence
  Description of Artificial Sequence: Synthetic oligonucleotide
ucacgggcaguuuggcacc

SEQ ID NO: 797888 - RNA, 19 nt, Artificial Sequence
  Description of Artificial Sequence: Synthetic oligonucleotide
uugacccuuucuuugucua

SEQ ID NO: 797889 - RNA, 19 nt, Artificial Sequence
  Description of Artificial Sequence: Synthetic oligonucleotide
gauguuacgucacuuuauu

SEQ ID NO: 797890 - RNA, 19 nt, Artificial Sequence
  Description of Artificial Sequence: Synthetic oligonucleotide
uuugccugauagguagaca

SEQ ID NO: 797891 - RNA, 19 nt, Artificial Sequence
  Description of Artificial Sequence: Synthetic oligonucleotide
guggauagucauccaacca

SEQ ID NO: 797892 - RNA, 19 nt, Artificial Sequence
  Description of Artificial Sequence: Synthetic oligonucleotide
uugcacaaucuguccagac

SEQ ID NO: 797893 - RNA, 19 nt, Artificial Sequence
  Description of Artificial Sequence: Synthetic oligonucleotide
accgguuuuguugugcaca

SEQ ID NO: 797894 - RNA, 19 nt, Artificial Sequence
  Description of Artificial Sequence: Synthetic oligonucleotide
ucuguacuacaguuccuua

SEQ ID NO: 797895 - RNA, 19 nt, Artificial Sequence
  Description of Artificial Sequence: Synthetic oligonucleotide
guggccaugguugguuucg

SEQ ID NO: 797896 - RNA, 19 nt, Artificial Sequence
  Description of Artificial Sequence: Synthetic oligonucleotide
acaagccaugacuggaaau

SEQ ID NO: 797897 - RNA, 19 nt, Artificial Sequence
  Description of Artificial Sequence: Synthetic oligonucleotide
gccucuaaaccauuaugug

SEQ ID NO: 797898 - RNA, 19 nt, Artificial Sequence
  Description of Artificial Sequence: Synthetic oligonucleotide
ucgaccuugugguggugug

SEQ ID NO: 797899 - RNA, 19 nt, Artificial Sequence
  Description of Artificial Sequence: Synthetic oligonucleotide
acguucacagugcaguauu

SEQ ID NO: 797900 - RNA, 19 nt, Artificial Sequence
  Description of Artificial Sequence: Synthetic oligonucleotide
ucugggugccuuccacagc

SEQ ID NO: 797901 - RNA, 19 nt, Artificial Sequence
  Description of Artificial Sequence: Synthetic oligonucleotide
aacguucacagugcaguau

SEQ ID NO: 797902 - RNA, 19 nt, Artificial Sequence
  Description of Artificial Sequence: Synthetic oligonucleotide
guggauucgcuuucuugac

SEQ ID NO: 797903 - RNA, 19 nt, Artificial Sequence
  Description of Artificial Sequence: Synthetic oligonucleotide
uucgcuuucuugaccucau

SEQ ID NO: 797904 - RNA, 19 nt, Artificial Sequence
  Description of Artificial Sequence: Synthetic oligonucleotide
gguuuuguugugcacacua

SEQ ID NO: 797905 - RNA, 19 nt, Artificial Sequence
  Description of Artificial Sequence: Synthetic oligonucleotide
guagaagccuccaccugag

SEQ ID NO: 797906 - RNA, 19 nt, Artificial Sequence
  Description of Artificial Sequence: Synthetic oligonucleotide
gcacuauacaguaguaagc

SEQ ID NO: 797907 - RNA, 19 nt, Artificial Sequence
  Description of Artificial Sequence: Synthetic oligonucleotide
caaucaguaugcuuccuua

SEQ ID NO: 797908 - RNA, 19 nt, Artificial Sequence
  Description of Artificial Sequence: Synthetic oligonucleotide
agcguucuugagcauguau

SEQ ID NO: 797909 - RNA, 19 nt, Artificial Sequence
  Description of Artificial Sequence: Synthetic oligonucleotide
gccaugguugguuucgacc

SEQ ID NO: 797910 - RNA, 19 nt, Artificial Sequence
  Description of Artificial Sequence: Synthetic oligonucleotide
aaucuguacuacaguuccu

SEQ ID NO: 797911 - RNA, 19 nt, Artificial Sequence
  Description of Artificial Sequence: Synthetic oligonucleotide
caaaaugaggcuccccaaa

SEQ ID NO: 797912 - RNA, 19 nt, Artificial Sequence
  Description of Artificial Sequence: Synthetic oligonucleotide
cguccuaaugcaaaaugag

SEQ ID NO: 797913 - RNA, 19 nt, Artificial Sequence
  Description of Artificial Sequence: Synthetic oligonucleotide
gaguccauaucuucugagu

SEQ ID NO: 797914 - RNA, 19 nt, Artificial Sequence
  Description of Artificial Sequence: Synthetic oligonucleotide
uccuguccagagaaacuau

SEQ ID NO: 797915 - RNA, 19 nt, Artificial Sequence
  Description of Artificial Sequence: Synthetic oligonucleotide
accacguccuaaugcaaaa

SEQ ID NO: 797916 - RNA, 19 nt, Artificial Sequence
  Description of Artificial Sequence: Synthetic oligonucleotide
uucagcucaacugcaggua

SEQ ID NO: 797917 - RNA, 19 nt, Artificial Sequence
  Description of Artificial Sequence: Synthetic oligonucleotide
cauacacgucucuggcaag

SEQ ID NO: 797918 - RNA, 19 nt, Artificial Sequence
  Description of Artificial Sequence: Synthetic oligonucleotide
cagagaaacuauucauuaa

SEQ ID NO: 797919 - RNA, 19 nt, Artificial Sequence
  Description of Artificial Sequence: Synthetic oligonucleotide
aaccacguccuaaugcaaa

SEQ ID NO: 797920 - RNA, 19 nt, Artificial Sequence
  Description of Artificial Sequence: Synthetic oligonucleotide
auuacccuaggaagguuca

SEQ ID NO: 797921 - RNA, 19 nt, Artificial Sequence
  Description of Artificial Sequence: Synthetic oligonucleotide
auguuacgucacuuuauuu

SEQ ID NO: 797922 - RNA, 19 nt, Artificial Sequence
  Description of Artificial Sequence: Synthetic oligonucleotide
uuaucaccacaaguuacuu

SEQ ID NO: 797923 - RNA, 19 nt, Artificial Sequence
  Description of Artificial Sequence: Synthetic oligonucleotide
agauguuacgucacuuuau

SEQ ID NO: 797924 - RNA, 19 nt, Artificial Sequence
  Description of Artificial Sequence: Synthetic oligonucleotide
cagguauaggcagugacaa

SEQ ID NO: 797925 - RNA, 19 nt, Artificial Sequence
  Description of Artificial Sequence: Synthetic oligonucleotide
auacccuagaaaauuuaua

SEQ ID NO: 797926 - RNA, 19 nt, Artificial Sequence
  Description of Artificial Sequence: Synthetic oligonucleotide
acaagauguuacgucacuu

SEQ ID NO: 797927 - RNA, 19 nt, Artificial Sequence
  Description of Artificial Sequence: Synthetic oligonucleotide
auacacgucucuggcaaga

SEQ ID NO: 797928 - RNA, 19 nt, Artificial Sequence
  Description of Artificial Sequence: Synthetic oligonucleotide
agcacacccaugucauagu

SEQ ID NO: 797929 - RNA, 19 nt, Artificial Sequence
  Description of Artificial Sequence: Synthetic oligonucleotide
acacaccucaugucaugcu

SEQ ID NO: 797930 - RNA, 19 nt, Artificial Sequence
  Description of Artificial Sequence: Synthetic oligonucleotide
guucacuguaucacaucug

SEQ ID NO: 797931 - RNA, 19 nt, Artificial Sequence
  Description of Artificial Sequence: Synthetic oligonucleotide
caccauauucaucuugcaa

SEQ ID NO: 797932 - RNA, 19 nt, Artificial Sequence
  Description of Artificial Sequence: Synthetic oligonucleotide
ugcugucgauccaacucuc

SEQ ID NO: 797933 - RNA, 19 nt, Artificial Sequence
  Description of Artificial Sequence: Synthetic oligonucleotide
uucgaccuugugguggugu

SEQ ID NO: 797934 - RNA, 19 nt, Artificial Sequence
  Description of Artificial Sequence: Synthetic oligonucleotide
agcagaucaagcaguacua

SEQ ID NO: 797935 - RNA, 19 nt, Artificial Sequence
  Description of Artificial Sequence: Synthetic oligonucleotide
augcuuccuuaucacaauu

SEQ ID NO: 797936 - RNA, 19 nt, Artificial Sequence
  Description of Artificial Sequence: Synthetic oligonucleotide
gaccuuguggugguguguc

SEQ ID NO: 797937 - RNA, 19 nt, Artificial Sequence
  Description of Artificial Sequence: Synthetic oligonucleotide
cagcuagaguagccuaagc

SEQ ID NO: 797938 - RNA, 19 nt, Artificial Sequence
  Description of Artificial Sequence: Synthetic oligonucleotide
ugguuucgaccuuguggug

SEQ ID NO: 797939 - RNA, 19 nt, Artificial Sequence
  Description of Artificial Sequence: Synthetic oligonucleotide
cucuauuaacccuuggcuu

SEQ ID NO: 797940 - RNA, 19 nt, Artificial Sequence
  Description of Artificial Sequence: Synthetic oligonucleotide
agcccuagcuccuggcuaa

SEQ ID NO: 797941 - RNA, 19 nt, Artificial Sequence
  Description of Artificial Sequence: Synthetic oligonucleotide
uacccuaggaagguucaua

SEQ ID NO: 797942 - RNA, 19 nt, Artificial Sequence
  Description of Artificial Sequence: Synthetic oligonucleotide
gguuucagaagagcacacc

SEQ ID NO: 797943 - RNA, 19 nt, Artificial Sequence
  Description of Artificial Sequence: Synthetic oligonucleotide
agccuaagccacaugcacu

SEQ ID NO: 797944 - RNA, 19 nt, Artificial Sequence
  Description of Artificial Sequence: Synthetic oligonucleotide
caccuuucaguuuuauugu

SEQ ID NO: 797945 - RNA, 19 nt, Artificial Sequence
  Description of Artificial Sequence: Synthetic oligonucleotide
uguggccaugguugguuuc

SEQ ID NO: 797946 - RNA, 19 nt, Artificial Sequence
  Description of Artificial Sequence: Synthetic oligonucleotide
aaaccacguccuaaugcaa

SEQ ID NO: 797947 - RNA, 19 nt, Artificial Sequence
  Description of Artificial Sequence: Synthetic oligonucleotide
gauuuucacauugcagcgu

SEQ ID NO: 797948 - RNA, 19 nt, Artificial Sequence
  Description of Artificial Sequence: Synthetic oligonucleotide
ggauucgcuuucuugaccu

SEQ ID NO: 797949 - RNA, 19 nt, Artificial Sequence
  Description of Artificial Sequence: Synthetic oligonucleotide
cuauuaacccuuggcuuca

SEQ ID NO: 797950 - RNA, 19 nt, Artificial Sequence
  Description of Artificial Sequence: Synthetic oligonucleotide
guagccuaagccacaugca

SEQ ID NO: 797951 - RNA, 19 nt, Artificial Sequence
  Description of Artificial Sequence: Synthetic oligonucleotide
uggcuaaacuguugagauu

SEQ ID NO: 797952 - RNA, 19 nt, Artificial Sequence
  Description of Artificial Sequence: Synthetic oligonucleotide
uagccuaaaccacguccua

SEQ ID NO: 797953 - RNA, 19 nt, Artificial Sequence
  Description of Artificial Sequence: Synthetic oligonucleotide
accucuucuuaaacguuca

SEQ ID NO: 797954 - RNA, 19 nt, Artificial Sequence
  Description of Artificial Sequence: Synthetic oligonucleotide
agaguagccuaagccacau

SEQ ID NO: 797955 - RNA, 19 nt, Artificial Sequence
  Description of Artificial Sequence: Synthetic oligonucleotide
caaauucaacuauuggguu

SEQ ID NO: 797956 - RNA, 19 nt, Artificial Sequence
  Description of Artificial Sequence: Synthetic oligonucleotide
uacacgucucuggcaagac

SEQ ID NO: 797957 - RNA, 19 nt, Artificial Sequence
  Description of Artificial Sequence: Synthetic oligonucleotide
caccucaugucaugcuauc

SEQ ID NO: 797958 - RNA, 19 nt, Artificial Sequence
  Description of Artificial Sequence: Synthetic oligonucleotide
cacuagagcagaacaaaau

SEQ ID NO: 797959 - RNA, 19 nt, Artificial Sequence
  Description of Artificial Sequence: Synthetic oligonucleotide
ucaccacaaguuacuuauu

SEQ ID NO: 797960 - RNA, 19 nt, Artificial Sequence
  Description of Artificial Sequence: Synthetic oligonucleotide
caugcacuauacaguagua

SEQ ID NO: 797961 - RNA, 19 nt, Artificial Sequence
  Description of Artificial Sequence: Synthetic oligonucleotide
guguuugcagacucuccaa

SEQ ID NO: 797962 - RNA, 19 nt, Artificial Sequence
  Description of Artificial Sequence: Synthetic oligonucleotide
gaguagccuaagccacaug

SEQ ID NO: 797963 - RNA, 19 nt, Artificial Sequence
  Description of Artificial Sequence: Synthetic oligonucleotide
agggaaauguuugccugau

SEQ ID NO: 797964 - RNA, 19 nt, Artificial Sequence
  Description of Artificial Sequence: Synthetic oligonucleotide
caugucauagugugcucua

SEQ ID NO: 797965 - RNA, 19 nt, Artificial Sequence
  Description of Artificial Sequence: Synthetic oligonucleotide
cuaagccacaugcacuaua

SEQ ID NO: 797966 - RNA, 19 nt, Artificial Sequence
  Description of Artificial Sequence: Synthetic oligonucleotide
cuuuaucauacacgucucu

SEQ ID NO: 797967 - RNA, 19 nt, Artificial Sequence
  Description of Artificial Sequence: Synthetic oligonucleotide
caagauguuacgucacuuu

SEQ ID NO: 797968 - RNA, 19 nt, Artificial Sequence
  Description of Artificial Sequence: Synthetic oligonucleotide
aucacaauuuacagccauu

SEQ ID NO: 797969 - RNA, 19 nt, Artificial Sequence
  Description of Artificial Sequence: Synthetic oligonucleotide
cuugcagcuaagucucugu

SEQ ID NO: 797970 - RNA, 19 nt, Artificial Sequence
  Description of Artificial Sequence: Synthetic oligonucleotide
agccuaaaccacguccuaa

SEQ ID NO: 797971 - RNA, 19 nt, Artificial Sequence
  Description of Artificial Sequence: Synthetic oligonucleotide
caagcaguacuauuugauu

SEQ ID NO: 797972 - RNA, 19 nt, Artificial Sequence
  Description of Artificial Sequence: Synthetic oligonucleotide
uugguggauucgcuuucuu

SEQ ID NO: 797973 - RNA, 19 nt, Artificial Sequence
  Description of Artificial Sequence: Synthetic oligonucleotide
gguguacuggcaaucagua

SEQ ID NO: 797974 - RNA, 19 nt, Artificial Sequence
  Description of Artificial Sequence: Synthetic oligonucleotide
gggguguacuggcaaucag

SEQ ID NO: 797975 - RNA, 19 nt, Artificial Sequence
  Description of Artificial Sequence: Synthetic oligonucleotide
acaccucaugucaugcuau

SEQ ID NO: 797976 - RNA, 19 nt, Artificial Sequence
  Description of Artificial Sequence: Synthetic oligonucleotide
ccuaaaccacguccuaaug

SEQ ID NO: 797977 - RNA, 19 nt, Artificial Sequence
  Description of Artificial Sequence: Synthetic oligonucleotide
auacaguaguaagcacaga

SEQ ID NO: 797978 - RNA, 19 nt, Artificial Sequence
  Description of Artificial Sequence: Synthetic oligonucleotide
uucauccaacaugcaguuc

SEQ ID NO: 797979 - RNA, 19 nt, Artificial Sequence
  Description of Artificial Sequence: Synthetic oligonucleotide
guuucgaccuugugguggu

SEQ ID NO: 797980 - RNA, 19 nt, Artificial Sequence
  Description of Artificial Sequence: Synthetic oligonucleotide
augcuuuuauuuagccuaa

SEQ ID NO: 797981 - RNA, 19 nt, Artificial Sequence
  Description of Artificial Sequence: Synthetic oligonucleotide
ggccucuaaaccauuaugu

SEQ ID NO: 797982 - RNA, 19 nt, Artificial Sequence
  Description of Artificial Sequence: Synthetic oligonucleotide
agccaugacuggaaauagu

SEQ ID NO: 797983 - RNA, 19 nt, Artificial Sequence
  Description of Artificial Sequence: Synthetic oligonucleotide
ccuccaauuguuuuagugu

SEQ ID NO: 797984 - RNA, 19 nt, Artificial Sequence
  Description of Artificial Sequence: Synthetic oligonucleotide
ccuaaugcaaaaugaggcu

SEQ ID NO: 797985 - RNA, 19 nt, Artificial Sequence
  Description of Artificial Sequence: Synthetic oligonucleotide
caccgguuuuguugugcac

SEQ ID NO: 797986 - RNA, 19 nt, Artificial Sequence
  Description of Artificial Sequence: Synthetic oligonucleotide
gcugagauugggucucaca

SEQ ID NO: 797987 - RNA, 19 nt, Artificial Sequence
  Description of Artificial Sequence: Synthetic oligonucleotide
gguugguuucgaccuugug

SEQ ID NO: 797988 - RNA, 19 nt, Artificial Sequence
  Description of Artificial Sequence: Synthetic oligonucleotide
uacuggcaaucaguaugcu

SEQ ID NO: 797989 - RNA, 19 nt, Artificial Sequence
  Description of Artificial Sequence: Synthetic oligonucleotide
uuacccuaggaagguucau

SEQ ID NO: 797990 - RNA, 19 nt, Artificial Sequence
  Description of Artificial Sequence: Synthetic oligonucleotide
cuugcacaaucuguccaga

SEQ ID NO: 797991 - RNA, 19 nt, Artificial Sequence
  Description of Artificial Sequence: Synthetic oligonucleotide
ccccaaaaguguugccucc

SEQ ID NO: 797992 - RNA, 19 nt, Artificial Sequence
  Description of Artificial Sequence: Synthetic oligonucleotide
gccuaagccacaugcacua

SEQ ID NO: 797993 - RNA, 19 nt, Artificial Sequence
  Description of Artificial Sequence: Synthetic oligonucleotide
auguggccaugguugguuu

SEQ ID NO: 797994 - RNA, 19 nt, Artificial Sequence
  Description of Artificial Sequence: Synthetic oligonucleotide
auucaacuauuggguuuca

SEQ ID NO: 797995 - RNA, 19 nt, Artificial Sequence
  Description of Artificial Sequence: Synthetic oligonucleotide
ucgcuuucuugaccucaua

SEQ ID NO: 797996 - RNA, 19 nt, Artificial Sequence
  Description of Artificial Sequence: Synthetic oligonucleotide
cacauuacccuaggaaggu

SEQ ID NO: 797997 - RNA, 19 nt, Artificial Sequence
  Description of Artificial Sequence: Synthetic oligonucleotide
gaccucauagagacagcua

SEQ ID NO: 797998 - RNA, 19 nt, Artificial Sequence
  Description of Artificial Sequence: Synthetic oligonucleotide
acauuacccuaggaagguu

SEQ ID NO: 797999 - RNA, 19 nt, Artificial Sequence
  Description of Artificial Sequence: Synthetic oligonucleotide
cucauagagacagcuacuu

SEQ ID NO: 798000 - RNA, 19 nt, Artificial Sequence
  Description of Artificial Sequence: Synthetic oligonucleotide
uuucgaccuugugguggug

SEQ ID NO: 798001 - RNA, 19 nt, Artificial Sequence
  Description of Artificial Sequence: Synthetic oligonucleotide
ggcaccgguuuuguugugc

SEQ ID NO: 798002 - RNA, 19 nt, Artificial Sequence
  Description of Artificial Sequence: Synthetic oligonucleotide
caguccauugacccuuucu

SEQ ID NO: 798003 - RNA, 19 nt, Artificial Sequence
  Description of Artificial Sequence: Synthetic oligonucleotide
guuuucuaugagaaaucuu

SEQ ID NO: 798004 - RNA, 19 nt, Artificial Sequence
  Description of Artificial Sequence: Synthetic oligonucleotide
guccauugacccuuucuuu

SEQ ID NO: 798005 - RNA, 19 nt, Artificial Sequence
  Description of Artificial Sequence: Synthetic oligonucleotide
ccagcuagaguagccuaag

SEQ ID NO: 798006 - RNA, 19 nt, Artificial Sequence
  Description of Artificial Sequence: Synthetic oligonucleotide
cacacccaugucauagugu

SEQ ID NO: 798007 - RNA, 19 nt, Artificial Sequence
  Description of Artificial Sequence: Synthetic oligonucleotide
cagaucaagcaguacuauu

SEQ ID NO: 798008 - RNA, 19 nt, Artificial Sequence
  Description of Artificial Sequence: Synthetic oligonucleotide
uggccaugguugguuucga

SEQ ID NO: 798009 - RNA, 19 nt, Artificial Sequence
  Description of Artificial Sequence: Synthetic oligonucleotide
uugcugagauugggucuca

SEQ ID NO: 798010 - RNA, 19 nt, Artificial Sequence
  Description of Artificial Sequence: Synthetic oligonucleotide
ggcaguuuggcaccgguuu

SEQ ID NO: 798011 - RNA, 19 nt, Artificial Sequence
  Description of Artificial Sequence: Synthetic oligonucleotide
cacgggcaguuuggcaccg

SEQ ID NO: 798012 - RNA, 19 nt, Artificial Sequence
  Description of Artificial Sequence: Synthetic oligonucleotide
gcaccgguuuuguugugca

SEQ ID NO: 798013 - RNA, 19 nt, Artificial Sequence
  Description of Artificial Sequence: Synthetic oligonucleotide
gucauccaaccaaaggaau

SEQ ID NO: 798014 - RNA, 19 nt, Artificial Sequence
  Description of Artificial Sequence: Synthetic oligonucleotide
uggcaccgguuuuguugug

SEQ ID NO: 798015 - RNA, 19 nt, Artificial Sequence
  Description of Artificial Sequence: Synthetic oligonucleotide
ggccaugguugguuucgac

SEQ ID NO: 798016 - RNA, 19 nt, Artificial Sequence
  Description of Artificial Sequence: Synthetic oligonucleotide
gccuaaaccacguccuaau

SEQ ID NO: 798017 - RNA, 19 nt, Artificial Sequence
  Description of Artificial Sequence: Synthetic oligonucleotide
acgggcaguuuggcaccgg

SEQ ID NO: 798018 - RNA, 19 nt, Artificial Sequence
  Description of Artificial Sequence: Synthetic oligonucleotide
cuggccucuaaaccauuau

SEQ ID NO: 798019 - RNA, 19 nt, Artificial Sequence
  Description of Artificial Sequence: Synthetic oligonucleotide
gggugggguguacuggcaa

SEQ ID NO: 798020 - RNA, 19 nt, Artificial Sequence
  Description of Artificial Sequence: Synthetic oligonucleotide
cguucuugagcauguauau

SEQ ID NO: 798021 - RNA, 19 nt, Artificial Sequence
  Description of Artificial Sequence: Synthetic oligonucleotide
ccuuauguguucugauuau

SEQ ID NO: 798022 - RNA, 19 nt, Artificial Sequence
  Description of Artificial Sequence: Synthetic oligonucleotide
ccucauagagacagcuacu

SEQ ID NO: 798023 - RNA, 19 nt, Artificial Sequence
  Description of Artificial Sequence: Synthetic oligonucleotide
gcugucgauccaacucuca

SEQ ID NO: 798024 - RNA, 19 nt, Artificial Sequence
  Description of Artificial Sequence: Synthetic oligonucleotide
ggugggguguacuggcaau

SEQ ID NO: 798025 - RNA, 19 nt, Artificial Sequence
  Description of Artificial Sequence: Synthetic oligonucleotide
cacaucugauuugguggua

SEQ ID NO: 798026 - RNA, 19 nt, Artificial Sequence
  Description of Artificial Sequence: Synthetic oligonucleotide
ccucaugucaugcuaucuu

SEQ ID NO: 798027 - RNA, 19 nt, Artificial Sequence
  Description of Artificial Sequence: Synthetic oligonucleotide
caugguugguuucgaccuu

SEQ ID NO: 798028 - RNA, 19 nt, Artificial Sequence
  Description of Artificial Sequence: Synthetic oligonucleotide
gcagaucaagcaguacuau

SEQ ID NO: 798029 - RNA, 19 nt, Artificial Sequence
  Description of Artificial Sequence: Synthetic oligonucleotide
gucucacacucuugcccau

SEQ ID NO: 798030 - RNA, 19 nt, Artificial Sequence
  Description of Artificial Sequence: Synthetic oligonucleotide
ccauuauguggccaugguu

SEQ ID NO: 798031 - RNA, 19 nt, Artificial Sequence
  Description of Artificial Sequence: Synthetic oligonucleotide
caguuccuugcagcuaagu

SEQ ID NO: 798032 - RNA, 19 nt, Artificial Sequence
  Description of Artificial Sequence: Synthetic oligonucleotide
ccacagcucuuucuguucu

SEQ ID NO: 798033 - RNA, 19 nt, Artificial Sequence
  Description of Artificial Sequence: Synthetic oligonucleotide
ggcaaucaguaugcuuccu

SEQ ID NO: 798034 - RNA, 19 nt, Artificial Sequence
  Description of Artificial Sequence: Synthetic oligonucleotide
cccuagcuccuggcuaaac

SEQ ID NO: 798035 - RNA, 19 nt, Artificial Sequence
  Description of Artificial Sequence: Synthetic oligonucleotide
gugcaccuuucaguuuuau

SEQ ID NO: 798036 - RNA, 19 nt, Artificial Sequence
  Description of Artificial Sequence: Synthetic oligonucleotide
gggcaguuuggcaccgguu

SEQ ID NO: 798037 - RNA, 19 nt, Artificial Sequence
  Description of Artificial Sequence: Synthetic oligonucleotide
cgggcaguuuggcaccggu

SEQ ID NO: 798038 - RNA, 19 nt, Artificial Sequence
  Description of Artificial Sequence: Synthetic oligonucleotide
ccuaagccacaugcacuau

SEQ ID NO: 798039 - RNA, 19 nt, Artificial Sequence
  Description of Artificial Sequence: Synthetic oligonucleotide
acauguaugaucuugugcc

SEQ ID NO: 798040 - RNA, 19 nt, Artificial Sequence
  Description of Artificial Sequence: Synthetic oligonucleotide
aaaucuugaaacuccagac

SEQ ID NO: 798041 - RNA, 19 nt, Artificial Sequence
  Description of Artificial Sequence: Synthetic oligonucleotide
aguacaauuuggcacaugc

SEQ ID NO: 798042 - RNA, 19 nt, Artificial Sequence
  Description of Artificial Sequence: Synthetic oligonucleotide
acaguagacagacugaagc

SEQ ID NO: 798043 - RNA, 19 nt, Artificial Sequence
  Description of Artificial Sequence: Synthetic oligonucleotide
aagccaaucacuuagggga

SEQ ID NO: 798044 - RNA, 19 nt, Artificial Sequence
  Description of Artificial Sequence: Synthetic oligonucleotide
uucacuauaguucagccug

SEQ ID NO: 798045 - RNA, 19 nt, Artificial Sequence
  Description of Artificial Sequence: Synthetic oligonucleotide
agagauuagauugauaaac

SEQ ID NO: 798046 - RNA, 19 nt, Artificial Sequence
  Description of Artificial Sequence: Synthetic oligonucleotide
uagauugauaaacaucugg

SEQ ID NO: 798047 - RNA, 19 nt, Artificial Sequence
  Description of Artificial Sequence: Synthetic oligonucleotide
auuaguugcccgcugaccc

SEQ ID NO: 798048 - RNA, 19 nt, Artificial Sequence
  Description of Artificial Sequence: Synthetic oligonucleotide
acuaauccaaacuuaagag

SEQ ID NO: 798049 - RNA, 19 nt, Artificial Sequence
  Description of Artificial Sequence: Synthetic oligonucleotide
aauaagaaugaccacccug

SEQ ID NO: 798050 - RNA, 19 nt, Artificial Sequence
  Description of Artificial Sequence: Synthetic oligonucleotide
ugacauucaaaauaacucc

SEQ ID NO: 798051 - RNA, 19 nt, Artificial Sequence
  Description of Artificial Sequence: Synthetic oligonucleotide
uuugauuucuccacgggag

SEQ ID NO: 798052 - RNA, 19 nt, Artificial Sequence
  Description of Artificial Sequence: Synthetic oligonucleotide
auaaucuugugcuucuccc

SEQ ID NO: 798053 - RNA, 19 nt, Artificial Sequence
  Description of Artificial Sequence: Synthetic oligonucleotide
uacaauuuggcacaugcug

SEQ ID NO: 798054 - RNA, 19 nt, Artificial Sequence
  Description of Artificial Sequence: Synthetic oligonucleotide
ucaauaagaaugaccaccc

SEQ ID NO: 798055 - RNA, 19 nt, Artificial Sequence
  Description of Artificial Sequence: Synthetic oligonucleotide
uuugugacauucaaaauaa

SEQ ID NO: 798056 - RNA, 19 nt, Artificial Sequence
  Description of Artificial Sequence: Synthetic oligonucleotide
gaucaacauacauauagcc

SEQ ID NO: 798057 - RNA, 19 nt, Artificial Sequence
  Description of Artificial Sequence: Synthetic oligonucleotide
uccauaugagcuaaggggc

SEQ ID NO: 798058 - RNA, 19 nt, Artificial Sequence
  Description of Artificial Sequence: Synthetic oligonucleotide
ugaguucuauaucaaaagc

SEQ ID NO: 798059 - RNA, 19 nt, Artificial Sequence
  Description of Artificial Sequence: Synthetic oligonucleotide
ucucaaaucaucauccuuc

SEQ ID NO: 798060 - RNA, 19 nt, Artificial Sequence
  Description of Artificial Sequence: Synthetic oligonucleotide
acaucaauaagaaugacca

SEQ ID NO: 798061 - RNA, 19 nt, Artificial Sequence
  Description of Artificial Sequence: Synthetic oligonucleotide
ugguuaagcccaauggugg

SEQ ID NO: 798062 - RNA, 19 nt, Artificial Sequence
  Description of Artificial Sequence: Synthetic oligonucleotide
ugagaugcacgucugaaca

SEQ ID NO: 798063 - RNA, 19 nt, Artificial Sequence
  Description of Artificial Sequence: Synthetic oligonucleotide
uuuguaugggaauugcuga

SEQ ID NO: 798064 - RNA, 19 nt, Artificial Sequence
  Description of Artificial Sequence: Synthetic oligonucleotide
agugcaaacaucaauaaga

SEQ ID NO: 798065 - RNA, 19 nt, Artificial Sequence
  Description of Artificial Sequence: Synthetic oligonucleotide
aucaacauacauauagccc

SEQ ID NO: 798066 - RNA, 19 nt, Artificial Sequence
  Description of Artificial Sequence: Synthetic oligonucleotide
agaaacacuaauccaaacu

SEQ ID NO: 798067 - RNA, 19 nt, Artificial Sequence
  Description of Artificial Sequence: Synthetic oligonucleotide
ugaucaacauacauauagc

SEQ ID NO: 798068 - RNA, 19 nt, Artificial Sequence
  Description of Artificial Sequence: Synthetic oligonucleotide
ucacggaacaugaacagca

SEQ ID NO: 798069 - RNA, 19 nt, Artificial Sequence
  Description of Artificial Sequence: Synthetic oligonucleotide
aaucacuuaggggaguaac

SEQ ID NO: 798070 - RNA, 19 nt, Artificial Sequence
  Description of Artificial Sequence: Synthetic oligonucleotide
uauuagaauaagagauuag

SEQ ID NO: 798071 - RNA, 19 nt, Artificial Sequence
  Description of Artificial Sequence: Synthetic oligonucleotide
augaauuagcuuccuggcc

SEQ ID NO: 798072 - RNA, 19 nt, Artificial Sequence
  Description of Artificial Sequence: Synthetic oligonucleotide
uuuagaucugcucucucug

SEQ ID NO: 798073 - RNA, 19 nt, Artificial Sequence
  Description of Artificial Sequence: Synthetic oligonucleotide
uuaugggagaccuugaaua

SEQ ID NO: 798074 - RNA, 19 nt, Artificial Sequence
  Description of Artificial Sequence: Synthetic oligonucleotide
gacugaauacuccacuggg

SEQ ID NO: 798075 - RNA, 19 nt, Artificial Sequence
  Description of Artificial Sequence: Synthetic oligonucleotide
uguuugaucaacauacaua

SEQ ID NO: 798076 - RNA, 19 nt, Artificial Sequence
  Description of Artificial Sequence: Synthetic oligonucleotide
aaaauaacuccaccuauuu

SEQ ID NO: 798077 - RNA, 19 nt, Artificial Sequence
  Description of Artificial Sequence: Synthetic oligonucleotide
auugauaaacaucuggauu

SEQ ID NO: 798078 - RNA, 19 nt, Artificial Sequence
  Description of Artificial Sequence: Synthetic oligonucleotide
aaaggcucagaugcuagcg

SEQ ID NO: 798079 - RNA, 19 nt, Artificial Sequence
  Description of Artificial Sequence: Synthetic oligonucleotide
ugaugcucauuucaguagc

SEQ ID NO: 798080 - RNA, 19 nt, Artificial Sequence
  Description of Artificial Sequence: Synthetic oligonucleotide
acuauauaauccaacaacu

SEQ ID NO: 798081 - RNA, 19 nt, Artificial Sequence
  Description of Artificial Sequence: Synthetic oligonucleotide
ugagucacggaacaugaac

SEQ ID NO: 798082 - RNA, 19 nt, Artificial Sequence
  Description of Artificial Sequence: Synthetic oligonucleotide
agaucucuugaugaaagcg

SEQ ID NO: 798083 - RNA, 19 nt, Artificial Sequence
  Description of Artificial Sequence: Synthetic oligonucleotide
auugacuauauaauccaac

SEQ ID NO: 798084 - RNA, 19 nt, Artificial Sequence
  Description of Artificial Sequence: Synthetic oligonucleotide
uuauuagaauaagagauua

SEQ ID NO: 798085 - RNA, 19 nt, Artificial Sequence
  Description of Artificial Sequence: Synthetic oligonucleotide
cucugacacauacugaugc

SEQ ID NO: 798086 - RNA, 19 nt, Artificial Sequence
  Description of Artificial Sequence: Synthetic oligonucleotide
agcaaugcuaacuuuuccu

SEQ ID NO: 798087 - RNA, 19 nt, Artificial Sequence
  Description of Artificial Sequence: Synthetic oligonucleotide
gaguuugauuucuccacgg

SEQ ID NO: 798088 - RNA, 19 nt, Artificial Sequence
  Description of Artificial Sequence: Synthetic oligonucleotide
uccuaaaauuugcucagga

SEQ ID NO: 798089 - RNA, 19 nt, Artificial Sequence
  Description of Artificial Sequence: Synthetic oligonucleotide
augagaugcacgucugaac

SEQ ID NO: 798090 - RNA, 19 nt, Artificial Sequence
  Description of Artificial Sequence: Synthetic oligonucleotide
gacugcacggaguagugag

SEQ ID NO: 798091 - RNA, 19 nt, Artificial Sequence
  Description of Artificial Sequence: Synthetic oligonucleotide
ucaauuaguugcccgcuga

SEQ ID NO: 798092 - RNA, 19 nt, Artificial Sequence
  Description of Artificial Sequence: Synthetic oligonucleotide
aauacaaccagaagucuaa

SEQ ID NO: 798093 - RNA, 19 nt, Artificial Sequence
  Description of Artificial Sequence: Synthetic oligonucleotide
uuagauugauaaacaucug

SEQ ID NO: 798094 - RNA, 19 nt, Artificial Sequence
  Description of Artificial Sequence: Synthetic oligonucleotide
uccuuugucacagaugaga

SEQ ID NO: 798095 - RNA, 19 nt, Artificial Sequence
  Description of Artificial Sequence: Synthetic oligonucleotide
gagucaauuaguugcccgc

SEQ ID NO: 798096 - RNA, 19 nt, Artificial Sequence
  Description of Artificial Sequence: Synthetic oligonucleotide
cugguuaagcccaauggug

SEQ ID NO: 798097 - RNA, 19 nt, Artificial Sequence
  Description of Artificial Sequence: Synthetic oligonucleotide
uuguaugggaauugcugag

SEQ ID NO: 798098 - RNA, 19 nt, Artificial Sequence
  Description of Artificial Sequence: Synthetic oligonucleotide
agauuagauugauaaacau

SEQ ID NO: 798099 - RNA, 19 nt, Artificial Sequence
  Description of Artificial Sequence: Synthetic oligonucleotide
cuuaggggaguaaccauag

SEQ ID NO: 798100 - RNA, 19 nt, Artificial Sequence
  Description of Artificial Sequence: Synthetic oligonucleotide
cuaauccaaacuuaagaga

SEQ ID NO: 798101 - RNA, 19 nt, Artificial Sequence
  Description of Artificial Sequence: Synthetic oligonucleotide
ugcucauuucaguagcagc

SEQ ID NO: 798102 - RNA, 19 nt, Artificial Sequence
  Description of Artificial Sequence: Synthetic oligonucleotide
aucacuuaggggaguaacc

SEQ ID NO: 798103 - RNA, 19 nt, Artificial Sequence
  Description of Artificial Sequence: Synthetic oligonucleotide
uaugggagaccuugaauac

SEQ ID NO: 798104 - RNA, 19 nt, Artificial Sequence
  Description of Artificial Sequence: Synthetic oligonucleotide
cuggccauaacuaggccag

SEQ ID NO: 798105 - RNA, 19 nt, Artificial Sequence
  Description of Artificial Sequence: Synthetic oligonucleotide
aaagcgugaaccagaagcu

SEQ ID NO: 798106 - RNA, 19 nt, Artificial Sequence
  Description of Artificial Sequence: Synthetic oligonucleotide
caugauguacacaaucuga

SEQ ID NO: 798107 - RNA, 19 nt, Artificial Sequence
  Description of Artificial Sequence: Synthetic oligonucleotide
cacuaauccaaacuuaaga

SEQ ID NO: 798108 - RNA, 19 nt, Artificial Sequence
  Description of Artificial Sequence: Synthetic oligonucleotide
ucuugaaacuccagacuga

SEQ ID NO: 798109 - RNA, 19 nt, Artificial Sequence
  Description of Artificial Sequence: Synthetic oligonucleotide
gauuggaggaaagauagaa

SEQ ID NO: 798110 - RNA, 19 nt, Artificial Sequence
  Description of Artificial Sequence: Synthetic oligonucleotide
ugaagccccagcuaucaug

SEQ ID NO: 798111 - RNA, 19 nt, Artificial Sequence
  Description of Artificial Sequence: Synthetic oligonucleotide
gagugaaguaccaaggguc

SEQ ID NO: 798112 - RNA, 19 nt, Artificial Sequence
  Description of Artificial Sequence: Synthetic oligonucleotide
aguucuauaucaaaagcaa

SEQ ID NO: 798113 - RNA, 19 nt, Artificial Sequence
  Description of Artificial Sequence: Synthetic oligonucleotide
cauaacuaggccagacggc

SEQ ID NO: 798114 - RNA, 19 nt, Artificial Sequence
  Description of Artificial Sequence: Synthetic oligonucleotide
ucugacacauacugaugcc

SEQ ID NO: 798115 - RNA, 19 nt, Artificial Sequence
  Description of Artificial Sequence: Synthetic oligonucleotide
augggaauugcugaguucu

SEQ ID NO: 798116 - RNA, 19 nt, Artificial Sequence
  Description of Artificial Sequence: Synthetic oligonucleotide
augucaggccuuuuaucac

SEQ ID NO: 798117 - RNA, 19 nt, Artificial Sequence
  Description of Artificial Sequence: Synthetic oligonucleotide
aagcucccucucuucagac

SEQ ID NO: 798118 - RNA, 19 nt, Artificial Sequence
  Description of Artificial Sequence: Synthetic oligonucleotide
ucugcaggguucuuuauua

SEQ ID NO: 798119 - RNA, 19 nt, Artificial Sequence
  Description of Artificial Sequence: Synthetic oligonucleotide
ggaaagauagaacucugac

SEQ ID NO: 798120 - RNA, 19 nt, Artificial Sequence
  Description of Artificial Sequence: Synthetic oligonucleotide
uguaugaucuugugccuac

SEQ ID NO: 798121 - RNA, 19 nt, Artificial Sequence
  Description of Artificial Sequence: Synthetic oligonucleotide
ucacuuaggggaguaacca

SEQ ID NO: 798122 - RNA, 19 nt, Artificial Sequence
  Description of Artificial Sequence: Synthetic oligonucleotide
auaacuaggccagacggcu

SEQ ID NO: 798123 - RNA, 19 nt, Artificial Sequence
  Description of Artificial Sequence: Synthetic oligonucleotide
aauagcauuggugcuugga

SEQ ID NO: 798124 - RNA, 19 nt, Artificial Sequence
  Description of Artificial Sequence: Synthetic oligonucleotide
aaccugcgaagucuacuuc

SEQ ID NO: 798125 - RNA, 19 nt, Artificial Sequence
  Description of Artificial Sequence: Synthetic oligonucleotide
aaagcaugcuucccaugca

SEQ ID NO: 798126 - RNA, 19 nt, Artificial Sequence
  Description of Artificial Sequence: Synthetic oligonucleotide
auagcauuggugcuuggau

SEQ ID NO: 798127 - RNA, 19 nt, Artificial Sequence
  Description of Artificial Sequence: Synthetic oligonucleotide
aaguaccccacacaguaua

SEQ ID NO: 798128 - RNA, 19 nt, Artificial Sequence
  Description of Artificial Sequence: Synthetic oligonucleotide
cuaaguaccccacacagua

SEQ ID NO: 798129 - RNA, 19 nt, Artificial Sequence
  Description of Artificial Sequence: Synthetic oligonucleotide
acgauguauggggaguugc

SEQ ID NO: 798130 - RNA, 19 nt, Artificial Sequence
  Description of Artificial Sequence: Synthetic oligonucleotide
ccauaacuaggccagacgg

SEQ ID NO: 798131 - RNA, 19 nt, Artificial Sequence
  Description of Artificial Sequence: Synthetic oligonucleotide
aaaaugguuaaaggguuuu

SEQ ID NO: 798132 - RNA, 19 nt, Artificial Sequence
  Description of Artificial Sequence: Synthetic oligonucleotide
ucucgggcgacauguauga

SEQ ID NO: 798133 - RNA, 19 nt, Artificial Sequence
  Description of Artificial Sequence: Synthetic oligonucleotide
uagaaacacuaauccaaac

SEQ ID NO: 798134 - RNA, 19 nt, Artificial Sequence
  Description of Artificial Sequence: Synthetic oligonucleotide
augggagaccuugaauacc

SEQ ID NO: 798135 - RNA, 19 nt, Artificial Sequence
  Description of Artificial Sequence: Synthetic oligonucleotide
uccacgggaguuuacuaga

SEQ ID NO: 798136 - RNA, 19 nt, Artificial Sequence
  Description of Artificial Sequence: Synthetic oligonucleotide
ugacacauacugaugccau

SEQ ID NO: 798137 - RNA, 19 nt, Artificial Sequence
  Description of Artificial Sequence: Synthetic oligonucleotide
cugaauacuccacugggca

SEQ ID NO: 798138 - RNA, 19 nt, Artificial Sequence
  Description of Artificial Sequence: Synthetic oligonucleotide
ugaaccagaagcugcuuua

SEQ ID NO: 798139 - RNA, 19 nt, Artificial Sequence
  Description of Artificial Sequence: Synthetic oligonucleotide
agagccaaccugcgaaguc

SEQ ID NO: 798140 - RNA, 19 nt, Artificial Sequence
  Description of Artificial Sequence: Synthetic oligonucleotide
uucucaaaucaucauccuu

SEQ ID NO: 798141 - RNA, 19 nt, Artificial Sequence
  Description of Artificial Sequence: Synthetic oligonucleotide
auguauggggaguugcacu

SEQ ID NO: 798142 - RNA, 19 nt, Artificial Sequence
  Description of Artificial Sequence: Synthetic oligonucleotide
aaacuccagacugaauacu

SEQ ID NO: 798143 - RNA, 19 nt, Artificial Sequence
  Description of Artificial Sequence: Synthetic oligonucleotide
acgggaguuuacuagaaua

SEQ ID NO: 798144 - RNA, 19 nt, Artificial Sequence
  Description of Artificial Sequence: Synthetic oligonucleotide
caagcacaaagccaaucac

SEQ ID NO: 798145 - RNA, 19 nt, Artificial Sequence
  Description of Artificial Sequence: Synthetic oligonucleotide
uaagaaugaccacccuggu

SEQ ID NO: 798146 - RNA, 19 nt, Artificial Sequence
  Description of Artificial Sequence: Synthetic oligonucleotide
cuauacacguuguuuacaa

SEQ ID NO: 798147 - RNA, 19 nt, Artificial Sequence
  Description of Artificial Sequence: Synthetic oligonucleotide
ugcuaacuuuuccuaaaau

SEQ ID NO: 798148 - RNA, 19 nt, Artificial Sequence
  Description of Artificial Sequence: Synthetic oligonucleotide
gauugauaaacaucuggau

SEQ ID NO: 798149 - RNA, 19 nt, Artificial Sequence
  Description of Artificial Sequence: Synthetic oligonucleotide
aggccagacggcuuauggg

SEQ ID NO: 798150 - RNA, 19 nt, Artificial Sequence
  Description of Artificial Sequence: Synthetic oligonucleotide
uccaccuauuuagaaacac

SEQ ID NO: 798151 - RNA, 19 nt, Artificial Sequence
  Description of Artificial Sequence: Synthetic oligonucleotide
cucccgaagauaugucagg

SEQ ID NO: 798152 - RNA, 19 nt, Artificial Sequence
  Description of Artificial Sequence: Synthetic oligonucleotide
gacaauagaggcagccagc

SEQ ID NO: 798153 - RNA, 19 nt, Artificial Sequence
  Description of Artificial Sequence: Synthetic oligonucleotide
uuccuaaaauuugcucagg

SEQ ID NO: 798154 - RNA, 19 nt, Artificial Sequence
  Description of Artificial Sequence: Synthetic oligonucleotide
caucaauaagaaugaccac

SEQ ID NO: 798155 - RNA, 19 nt, Artificial Sequence
  Description of Artificial Sequence: Synthetic oligonucleotide
uagcuuccuggccauaacu

SEQ ID NO: 798156 - RNA, 19 nt, Artificial Sequence
  Description of Artificial Sequence: Synthetic oligonucleotide
uuaguugcccgcugacccc

SEQ ID NO: 798157 - RNA, 19 nt, Artificial Sequence
  Description of Artificial Sequence: Synthetic oligonucleotide
ugguauguguuugaucaac

SEQ ID NO: 798158 - RNA, 19 nt, Artificial Sequence
  Description of Artificial Sequence: Synthetic oligonucleotide
caugccacugggcagagga

SEQ ID NO: 798159 - RNA, 19 nt, Artificial Sequence
  Description of Artificial Sequence: Synthetic oligonucleotide
ugaauacuccacugggcaa

SEQ ID NO: 798160 - RNA, 19 nt, Artificial Sequence
  Description of Artificial Sequence: Synthetic oligonucleotide
agauaugucaggccuuuua

SEQ ID NO: 798161 - RNA, 19 nt, Artificial Sequence
  Description of Artificial Sequence: Synthetic oligonucleotide
cuauaguucagccugguau

SEQ ID NO: 798162 - RNA, 19 nt, Artificial Sequence
  Description of Artificial Sequence: Synthetic oligonucleotide
ugaaguaccaaggguccga

SEQ ID NO: 798163 - RNA, 19 nt, Artificial Sequence
  Description of Artificial Sequence: Synthetic oligonucleotide
uacugaugccauaauccau

SEQ ID NO: 798164 - RNA, 19 nt, Artificial Sequence
  Description of Artificial Sequence: Synthetic oligonucleotide
auaccacuccaccguugcc

SEQ ID NO: 798165 - RNA, 19 nt, Artificial Sequence
  Description of Artificial Sequence: Synthetic oligonucleotide
agcuaaggggccucccagg

SEQ ID NO: 798166 - RNA, 19 nt, Artificial Sequence
  Description of Artificial Sequence: Synthetic oligonucleotide
caccuauuuagaaacacua

SEQ ID NO: 798167 - RNA, 19 nt, Artificial Sequence
  Description of Artificial Sequence: Synthetic oligonucleotide
uguaugggaauugcugagu

SEQ ID NO: 798168 - RNA, 19 nt, Artificial Sequence
  Description of Artificial Sequence: Synthetic oligonucleotide
acaauagcauuggugcuug

SEQ ID NO: 798169 - RNA, 19 nt, Artificial Sequence
  Description of Artificial Sequence: Synthetic oligonucleotide
acacuaaguaccccacaca

SEQ ID NO: 798170 - RNA, 19 nt, Artificial Sequence
  Description of Artificial Sequence: Synthetic oligonucleotide
gauugcggguuugaucucc

SEQ ID NO: 798171 - RNA, 19 nt, Artificial Sequence
  Description of Artificial Sequence: Synthetic oligonucleotide
ugcuuggauuggaggaaag

SEQ ID NO: 798172 - RNA, 19 nt, Artificial Sequence
  Description of Artificial Sequence: Synthetic oligonucleotide
ucccgaagauaugucaggc

SEQ ID NO: 798173 - RNA, 19 nt, Artificial Sequence
  Description of Artificial Sequence: Synthetic oligonucleotide
uaacuccaccuauuuagaa

SEQ ID NO: 798174 - RNA, 19 nt, Artificial Sequence
  Description of Artificial Sequence: Synthetic oligonucleotide
gaugcacgucugaacagag

SEQ ID NO: 798175 - RNA, 19 nt, Artificial Sequence
  Description of Artificial Sequence: Synthetic oligonucleotide
uacaauagcauuggugcuu

SEQ ID NO: 798176 - RNA, 19 nt, Artificial Sequence
  Description of Artificial Sequence: Synthetic oligonucleotide
gauaugucaggccuuuuau

SEQ ID NO: 798177 - RNA, 19 nt, Artificial Sequence
  Description of Artificial Sequence: Synthetic oligonucleotide
agucucucgggcgacaugu

SEQ ID NO: 798178 - RNA, 19 nt, Artificial Sequence
  Description of Artificial Sequence: Synthetic oligonucleotide
caaggguccgagaauccug

SEQ ID NO: 798179 - RNA, 19 nt, Artificial Sequence
  Description of Artificial Sequence: Synthetic oligonucleotide
ugauccaaggacccaccau

SEQ ID NO: 798180 - RNA, 19 nt, Artificial Sequence
  Description of Artificial Sequence: Synthetic oligonucleotide
ucgggcgacauguaugauc

SEQ ID NO: 798181 - RNA, 19 nt, Artificial Sequence
  Description of Artificial Sequence: Synthetic oligonucleotide
augcuagcggcauggguug

SEQ ID NO: 798182 - RNA, 19 nt, Artificial Sequence
  Description of Artificial Sequence: Synthetic oligonucleotide
aagcgugaaccagaagcug

SEQ ID NO: 798183 - RNA, 19 nt, Artificial Sequence
  Description of Artificial Sequence: Synthetic oligonucleotide
uccgagaauccugacaaua

SEQ ID NO: 798184 - RNA, 19 nt, Artificial Sequence
  Description of Artificial Sequence: Synthetic oligonucleotide
uccauuccauaugagcuaa

SEQ ID NO: 798185 - RNA, 19 nt, Artificial Sequence
  Description of Artificial Sequence: Synthetic oligonucleotide
acacuaauccaaacuuaag

SEQ ID NO: 798186 - RNA, 19 nt, Artificial Sequence
  Description of Artificial Sequence: Synthetic oligonucleotide
gguuucacuauaguucagc

SEQ ID NO: 798187 - RNA, 19 nt, Artificial Sequence
  Description of Artificial Sequence: Synthetic oligonucleotide
gaugagaugcacgucugaa

SEQ ID NO: 798188 - RNA, 19 nt, Artificial Sequence
  Description of Artificial Sequence: Synthetic oligonucleotide
ccuugaauaccacuccacc

SEQ ID NO: 798189 - RNA, 19 nt, Artificial Sequence
  Description of Artificial Sequence: Synthetic oligonucleotide
uagcauuggugcuuggauu

SEQ ID NO: 798190 - RNA, 19 nt, Artificial Sequence
  Description of Artificial Sequence: Synthetic oligonucleotide
gucaauuaguugcccgcug

SEQ ID NO: 798191 - RNA, 19 nt, Artificial Sequence
  Description of Artificial Sequence: Synthetic oligonucleotide
accacacuaaguaccccac

SEQ ID NO: 798192 - RNA, 19 nt, Artificial Sequence
  Description of Artificial Sequence: Synthetic oligonucleotide
cacggaacaugaacagcag

SEQ ID NO: 798193 - RNA, 19 nt, Artificial Sequence
  Description of Artificial Sequence: Synthetic oligonucleotide
acggaacaugaacagcagu

SEQ ID NO: 798194 - RNA, 19 nt, Artificial Sequence
  Description of Artificial Sequence: Synthetic oligonucleotide
augcuaacuuuuccuaaaa

SEQ ID NO: 798195 - RNA, 19 nt, Artificial Sequence
  Description of Artificial Sequence: Synthetic oligonucleotide
uuaggggaguaaccauagu

SEQ ID NO: 798196 - RNA, 19 nt, Artificial Sequence
  Description of Artificial Sequence: Synthetic oligonucleotide
auaugagcuaaggggccuc

SEQ ID NO: 798197 - RNA, 19 nt, Artificial Sequence
  Description of Artificial Sequence: Synthetic oligonucleotide
uauggggaguugcacucau

SEQ ID NO: 798198 - RNA, 19 nt, Artificial Sequence
  Description of Artificial Sequence: Synthetic oligonucleotide
uaaguaccccacacaguau

SEQ ID NO: 798199 - RNA, 19 nt, Artificial Sequence
  Description of Artificial Sequence: Synthetic oligonucleotide
agucaauuaguugcccgcu

SEQ ID NO: 798200 - RNA, 19 nt, Artificial Sequence
  Description of Artificial Sequence: Synthetic oligonucleotide
ugcuuuagaucugcucucu

SEQ ID NO: 798201 - RNA, 19 nt, Artificial Sequence
  Description of Artificial Sequence: Synthetic oligonucleotide
accguugccggccccagcu

SEQ ID NO: 798202 - RNA, 19 nt, Artificial Sequence
  Description of Artificial Sequence: Synthetic oligonucleotide
cacgucugaacagagacaa

SEQ ID NO: 798203 - RNA, 19 nt, Artificial Sequence
  Description of Artificial Sequence: Synthetic oligonucleotide
cauugacuauauaauccaa

SEQ ID NO: 798204 - RNA, 19 nt, Artificial Sequence
  Description of Artificial Sequence: Synthetic oligonucleotide
uuaucacagcaaugcuaac

SEQ ID NO: 798205 - RNA, 19 nt, Artificial Sequence
  Description of Artificial Sequence: Synthetic oligonucleotide
uucagacugagaggucacc

SEQ ID NO: 798206 - RNA, 19 nt, Artificial Sequence
  Description of Artificial Sequence: Synthetic oligonucleotide
accaggguuucacuauagu

SEQ ID NO: 798207 - RNA, 19 nt, Artificial Sequence
  Description of Artificial Sequence: Synthetic oligonucleotide
gugaaguaccaaggguccg

SEQ ID NO: 798208 - RNA, 19 nt, Artificial Sequence
  Description of Artificial Sequence: Synthetic oligonucleotide
ccgagaauccugacaauag

SEQ ID NO: 798209 - RNA, 19 nt, Artificial Sequence
  Description of Artificial Sequence: Synthetic oligonucleotide
acaccacacuaaguacccc

SEQ ID NO: 798210 - RNA, 19 nt, Artificial Sequence
  Description of Artificial Sequence: Synthetic oligonucleotide
uaugagcuaaggggccucc

SEQ ID NO: 798211 - RNA, 19 nt, Artificial Sequence
  Description of Artificial Sequence: Synthetic oligonucleotide
aggaaagauagaacucuga

SEQ ID NO: 798212 - RNA, 19 nt, Artificial Sequence
  Description of Artificial Sequence: Synthetic oligonucleotide
cuuuagaucugcucucucu

SEQ ID NO: 798213 - RNA, 19 nt, Artificial Sequence
  Description of Artificial Sequence: Synthetic oligonucleotide
acguuguuuacaauagcau

SEQ ID NO: 798214 - RNA, 19 nt, Artificial Sequence
  Description of Artificial Sequence: Synthetic oligonucleotide
cuugugccuacaaaggagu

SEQ ID NO: 798215 - RNA, 19 nt, Artificial Sequence
  Description of Artificial Sequence: Synthetic oligonucleotide
caccacacuaaguacccca

SEQ ID NO: 798216 - RNA, 19 nt, Artificial Sequence
  Description of Artificial Sequence: Synthetic oligonucleotide
gucacggaacaugaacagc

SEQ ID NO: 798217 - RNA, 19 nt, Artificial Sequence
  Description of Artificial Sequence: Synthetic oligonucleotide
auccuucacgcuuccgcug

SEQ ID NO: 798218 - RNA, 19 nt, Artificial Sequence
  Description of Artificial Sequence: Synthetic oligonucleotide
accuauuuagaaacacuaa

SEQ ID NO: 798219 - RNA, 19 nt, Artificial Sequence
  Description of Artificial Sequence: Synthetic oligonucleotide
aaguacaauuuggcacaug

SEQ ID NO: 798220 - RNA, 19 nt, Artificial Sequence
  Description of Artificial Sequence: Synthetic oligonucleotide
ggcgacauguaugaucuug

SEQ ID NO: 798221 - RNA, 19 nt, Artificial Sequence
  Description of Artificial Sequence: Synthetic oligonucleotide
ccauaugagcuaaggggcc

SEQ ID NO: 798222 - RNA, 19 nt, Artificial Sequence
  Description of Artificial Sequence: Synthetic oligonucleotide
caccaggguuucacuauag

SEQ ID NO: 798223 - RNA, 19 nt, Artificial Sequence
  Description of Artificial Sequence: Synthetic oligonucleotide
acuauaguucagccuggua

SEQ ID NO: 798224 - RNA, 19 nt, Artificial Sequence
  Description of Artificial Sequence: Synthetic oligonucleotide
cgucugaacagagacaagc

SEQ ID NO: 798225 - RNA, 19 nt, Artificial Sequence
  Description of Artificial Sequence: Synthetic oligonucleotide
cacggaguagugagucccc

SEQ ID NO: 798226 - RNA, 19 nt, Artificial Sequence
  Description of Artificial Sequence: Synthetic oligonucleotide
acuuaggggaguaaccaua

SEQ ID NO: 798227 - RNA, 19 nt, Artificial Sequence
  Description of Artificial Sequence: Synthetic oligonucleotide
cugacacauacugaugcca

SEQ ID NO: 798228 - RNA, 19 nt, Artificial Sequence
  Description of Artificial Sequence: Synthetic oligonucleotide
gcacuauacacguuguuua

SEQ ID NO: 798229 - RNA, 19 nt, Artificial Sequence
  Description of Artificial Sequence: Synthetic oligonucleotide
ugcccgcugaccccaaaau

SEQ ID NO: 798230 - RNA, 19 nt, Artificial Sequence
  Description of Artificial Sequence: Synthetic oligonucleotide
ggccagacggcuuauggga

SEQ ID NO: 798231 - RNA, 19 nt, Artificial Sequence
  Description of Artificial Sequence: Synthetic oligonucleotide
uaguucagccugguaugug

SEQ ID NO: 798232 - RNA, 19 nt, Artificial Sequence
  Description of Artificial Sequence: Synthetic oligonucleotide
ccugacaauagaggcagcc

SEQ ID NO: 798233 - RNA, 19 nt, Artificial Sequence
  Description of Artificial Sequence: Synthetic oligonucleotide
ucccaugcacugccuguga

SEQ ID NO: 798234 - RNA, 19 nt, Artificial Sequence
  Description of Artificial Sequence: Synthetic oligonucleotide
aggguccgagaauccugac

SEQ ID NO: 798235 - RNA, 19 nt, Artificial Sequence
  Description of Artificial Sequence: Synthetic oligonucleotide
ccaaaggcucagaugcuag

SEQ ID NO: 798236 - RNA, 19 nt, Artificial Sequence
  Description of Artificial Sequence: Synthetic oligonucleotide
augaaagcgugaaccagaa

SEQ ID NO: 798237 - RNA, 19 nt, Artificial Sequence
  Description of Artificial Sequence: Synthetic oligonucleotide
gaguagugaguccccugga

SEQ ID NO: 798238 - RNA, 19 nt, Artificial Sequence
  Description of Artificial Sequence: Synthetic oligonucleotide
guguuugaucaacauacau

SEQ ID NO: 798239 - RNA, 19 nt, Artificial Sequence
  Description of Artificial Sequence: Synthetic oligonucleotide
cugcacggaguagugaguc

SEQ ID NO: 798240 - RNA, 19 nt, Artificial Sequence
  Description of Artificial Sequence: Synthetic oligonucleotide
auaagagauuagauugaua

SEQ ID NO: 798241 - RNA, 19 nt, Artificial Sequence
  Description of Artificial Sequence: Synthetic oligonucleotide
gacacauacugaugccaua

SEQ ID NO: 798242 - RNA, 19 nt, Artificial Sequence
  Description of Artificial Sequence: Synthetic oligonucleotide
uuucuccacgggaguuuac

SEQ ID NO: 798243 - RNA, 19 nt, Artificial Sequence
  Description of Artificial Sequence: Synthetic oligonucleotide
cauaauccauuugugacau

SEQ ID NO: 798244 - RNA, 19 nt, Artificial Sequence
  Description of Artificial Sequence: Synthetic oligonucleotide
gcaaugcuaacuuuuccua

SEQ ID NO: 798245 - RNA, 19 nt, Artificial Sequence
  Description of Artificial Sequence: Synthetic oligonucleotide
uugcggguuugaucuccag

SEQ ID NO: 798246 - RNA, 19 nt, Artificial Sequence
  Description of Artificial Sequence: Synthetic oligonucleotide
ugggaauugcugaguucua

SEQ ID NO: 798247 - RNA, 19 nt, Artificial Sequence
  Description of Artificial Sequence: Synthetic oligonucleotide
gacggcuuaugggagaccu

SEQ ID NO: 798248 - RNA, 19 nt, Artificial Sequence
  Description of Artificial Sequence: Synthetic oligonucleotide
gguuaagcccaauggugga

SEQ ID NO: 798249 - RNA, 19 nt, Artificial Sequence
  Description of Artificial Sequence: Synthetic oligonucleotide
uaguugcccgcugacccca

SEQ ID NO: 798250 - RNA, 19 nt, Artificial Sequence
  Description of Artificial Sequence: Synthetic oligonucleotide
uaacuaggccagacggcuu

SEQ ID NO: 798251 - RNA, 19 nt, Artificial Sequence
  Description of Artificial Sequence: Synthetic oligonucleotide
gaauacuccacugggcaau

SEQ ID NO: 798252 - RNA, 19 nt, Artificial Sequence
  Description of Artificial Sequence: Synthetic oligonucleotide
cucagaugcuagcggcaug

SEQ ID NO: 798253 - RNA, 19 nt, Artificial Sequence
  Description of Artificial Sequence: Synthetic oligonucleotide
auguaugaucuugugccua

SEQ ID NO: 798254 - RNA, 19 nt, Artificial Sequence
  Description of Artificial Sequence: Synthetic oligonucleotide
ccuaaaauuugcucaggaa

SEQ ID NO: 798255 - RNA, 19 nt, Artificial Sequence
  Description of Artificial Sequence: Synthetic oligonucleotide
cagacggcuuaugggagac

SEQ ID NO: 798256 - RNA, 19 nt, Artificial Sequence
  Description of Artificial Sequence: Synthetic oligonucleotide
cccgaagauaugucaggcc

SEQ ID NO: 798257 - RNA, 19 nt, Artificial Sequence
  Description of Artificial Sequence: Synthetic oligonucleotide
cuuaugggagaccuugaau

SEQ ID NO: 798258 - RNA, 19 nt, Artificial Sequence
  Description of Artificial Sequence: Synthetic oligonucleotide
gcugguuaagcccaauggu

SEQ ID NO: 798259 - RNA, 19 nt, Artificial Sequence
  Description of Artificial Sequence: Synthetic oligonucleotide
cauguaugaucuugugccu

SEQ ID NO: 798260 - RNA, 19 nt, Artificial Sequence
  Description of Artificial Sequence: Synthetic oligonucleotide
gagucucucgggcgacaug

SEQ ID NO: 798261 - RNA, 19 nt, Artificial Sequence
  Description of Artificial Sequence: Synthetic oligonucleotide
uagcggcauggguuggugu

SEQ ID NO: 798262 - RNA, 19 nt, Artificial Sequence
  Description of Artificial Sequence: Synthetic oligonucleotide
ugcuagcggcauggguugg

SEQ ID NO: 798263 - RNA, 19 nt, Artificial Sequence
  Description of Artificial Sequence: Synthetic oligonucleotide
gccagugagucacggaaca

SEQ ID NO: 798264 - RNA, 19 nt, Artificial Sequence
  Description of Artificial Sequence: Synthetic oligonucleotide
cuccaccuauuuagaaaca

SEQ ID NO: 798265 - RNA, 19 nt, Artificial Sequence
  Description of Artificial Sequence: Synthetic oligonucleotide
aguaccccacacaguauau

SEQ ID NO: 798266 - RNA, 19 nt, Artificial Sequence
  Description of Artificial Sequence: Synthetic oligonucleotide
gacauacaccacacuaagu

SEQ ID NO: 798267 - RNA, 19 nt, Artificial Sequence
  Description of Artificial Sequence: Synthetic oligonucleotide
cuagcggcauggguuggug

SEQ ID NO: 798268 - RNA, 19 nt, Artificial Sequence
  Description of Artificial Sequence: Synthetic oligonucleotide
gacugaagccccagcuauc

SEQ ID NO: 798269 - RNA, 19 nt, Artificial Sequence
  Description of Artificial Sequence: Synthetic oligonucleotide
caauagaggcagccagcca

SEQ ID NO: 798270 - RNA, 19 nt, Artificial Sequence
  Description of Artificial Sequence: Synthetic oligonucleotide
cacgauguauggggaguug

SEQ ID NO: 798271 - RNA, 19 nt, Artificial Sequence
  Description of Artificial Sequence: Synthetic oligonucleotide
gggcugguuaagcccaaug

SEQ ID NO: 798272 - RNA, 19 nt, Artificial Sequence
  Description of Artificial Sequence: Synthetic oligonucleotide
aggcacuauacacguuguu

SEQ ID NO: 798273 - RNA, 19 nt, Artificial Sequence
  Description of Artificial Sequence: Synthetic oligonucleotide
acugcacggaguagugagu

SEQ ID NO: 798274 - RNA, 19 nt, Artificial Sequence
  Description of Artificial Sequence: Synthetic oligonucleotide
ugccggccccagcucacug

SEQ ID NO: 798275 - RNA, 19 nt, Artificial Sequence
  Description of Artificial Sequence: Synthetic oligonucleotide
guacaauuuggcacaugcu

SEQ ID NO: 798276 - RNA, 19 nt, Artificial Sequence
  Description of Artificial Sequence: Synthetic oligonucleotide
auugcggguuugaucucca

SEQ ID NO: 798277 - RNA, 19 nt, Artificial Sequence
  Description of Artificial Sequence: Synthetic oligonucleotide
ggguccgagaauccugaca

SEQ ID NO: 798278 - RNA, 19 nt, Artificial Sequence
  Description of Artificial Sequence: Synthetic oligonucleotide
guaugaucuugugccuaca

SEQ ID NO: 798279 - RNA, 19 nt, Artificial Sequence
  Description of Artificial Sequence: Synthetic oligonucleotide
ccgaagauaugucaggccu

SEQ ID NO: 798280 - RNA, 19 nt, Artificial Sequence
  Description of Artificial Sequence: Synthetic oligonucleotide
acggaguagugaguccccu

SEQ ID NO: 798281 - RNA, 19 nt, Artificial Sequence
  Description of Artificial Sequence: Synthetic oligonucleotide
cggauugcggguuugaucu

SEQ ID NO: 798282 - RNA, 19 nt, Artificial Sequence
  Description of Artificial Sequence: Synthetic oligonucleotide
guauggggaguugcacuca

SEQ ID NO: 798283 - RNA, 19 nt, Artificial Sequence
  Description of Artificial Sequence: Synthetic oligonucleotide
caaccugcgaagucuacuu

SEQ ID NO: 798284 - RNA, 19 nt, Artificial Sequence
  Description of Artificial Sequence: Synthetic oligonucleotide
gugaaccagaagcugcuuu

SEQ ID NO: 798285 - RNA, 19 nt, Artificial Sequence
  Description of Artificial Sequence: Synthetic oligonucleotide
gcuuggauuggaggaaaga

SEQ ID NO: 798286 - RNA, 19 nt, Artificial Sequence
  Description of Artificial Sequence: Synthetic oligonucleotide
gcuuuagaucugcucucuc

SEQ ID NO: 798287 - RNA, 19 nt, Artificial Sequence
  Description of Artificial Sequence: Synthetic oligonucleotide
cauaugagcuaaggggccu

SEQ ID NO: 798288 - RNA, 19 nt, Artificial Sequence
  Description of Artificial Sequence: Synthetic oligonucleotide
gccagacggcuuaugggag

SEQ ID NO: 798289 - RNA, 19 nt, Artificial Sequence
  Description of Artificial Sequence: Synthetic oligonucleotide
gcuguccauuccauaugag

SEQ ID NO: 798290 - RNA, 19 nt, Artificial Sequence
  Description of Artificial Sequence: Synthetic oligonucleotide
ggcacuauacacguuguuu

SEQ ID NO: 798291 - RNA, 19 nt, Artificial Sequence
  Description of Artificial Sequence: Synthetic oligonucleotide
ugguuccggauugcggguu

SEQ ID NO: 798292 - RNA, 19 nt, Artificial Sequence
  Description of Artificial Sequence: Synthetic oligonucleotide
cgaagucuacuuccucggc

SEQ ID NO: 798293 - RNA, 19 nt, Artificial Sequence
  Description of Artificial Sequence: Synthetic oligonucleotide
ggaggucggcuguccauuc

SEQ ID NO: 798294 - RNA, 19 nt, Artificial Sequence
  Description of Artificial Sequence: Synthetic oligonucleotide
gcguuucggcugcaucucc

SEQ ID NO: 798295 - RNA, 19 nt, Artificial Sequence
  Description of Artificial Sequence: Synthetic oligonucleotide
ggguuucacuauaguucag

SEQ ID NO: 798296 - RNA, 19 nt, Artificial Sequence
  Description of Artificial Sequence: Synthetic oligonucleotide
caaucacuuaggggaguaa

SEQ ID NO: 798297 - RNA, 19 nt, Artificial Sequence
  Description of Artificial Sequence: Synthetic oligonucleotide
acuaggccagacggcuuau

SEQ ID NO: 798298 - RNA, 19 nt, Artificial Sequence
  Description of Artificial Sequence: Synthetic oligonucleotide
gggaguaaccauagugaua

SEQ ID NO: 798299 - RNA, 19 nt, Artificial Sequence
  Description of Artificial Sequence: Synthetic oligonucleotide
gugagucacggaacaugaa

SEQ ID NO: 798300 - RNA, 19 nt, Artificial Sequence
  Description of Artificial Sequence: Synthetic oligonucleotide
caccguugccggccccagc

SEQ ID NO: 798301 - RNA, 19 nt, Artificial Sequence
  Description of Artificial Sequence: Synthetic oligonucleotide
ggauugcggguuugaucuc

SEQ ID NO: 798302 - RNA, 19 nt, Artificial Sequence
  Description of Artificial Sequence: Synthetic oligonucleotide
cgggcgacauguaugaucu

SEQ ID NO: 798303 - RNA, 19 nt, Artificial Sequence
  Description of Artificial Sequence: Synthetic oligonucleotide
cgauguauggggaguugca

SEQ ID NO: 798304 - RNA, 19 nt, Artificial Sequence
  Description of Artificial Sequence: Synthetic oligonucleotide
agccaaccugcgaagucua

SEQ ID NO: 798305 - RNA, 19 nt, Artificial Sequence
  Description of Artificial Sequence: Synthetic oligonucleotide
ggcaauuuuggaggaggcu

SEQ ID NO: 798306 - RNA, 19 nt, Artificial Sequence
  Description of Artificial Sequence: Synthetic oligonucleotide
gcacgucugaacagagaca

SEQ ID NO: 798307 - RNA, 19 nt, Artificial Sequence
  Description of Artificial Sequence: Synthetic oligonucleotide
cccaaugguggagcagagc

SEQ ID NO: 798308 - RNA, 19 nt, Artificial Sequence
  Description of Artificial Sequence: Synthetic oligonucleotide
caucaagcucccagcuccu

SEQ ID NO: 798309 - RNA, 19 nt, Artificial Sequence
  Description of Artificial Sequence: Synthetic oligonucleotide
cugguuccggauugcgggu

SEQ ID NO: 798310 - RNA, 19 nt, Artificial Sequence
  Description of Artificial Sequence: Synthetic oligonucleotide
uugccggccccagcucacu

SEQ ID NO: 798311 - RNA, 19 nt, Artificial Sequence
  Description of Artificial Sequence: Synthetic oligonucleotide
gcgacauguaugaucuugu

SEQ ID NO: 798312 - RNA, 19 nt, Artificial Sequence
  Description of Artificial Sequence: Synthetic oligonucleotide
ccagacggcuuaugggaga

SEQ ID NO: 798313 - RNA, 19 nt, Artificial Sequence
  Description of Artificial Sequence: Synthetic oligonucleotide
gcccaaugguggagcagag

SEQ ID NO: 798314 - RNA, 19 nt, Artificial Sequence
  Description of Artificial Sequence: Synthetic oligonucleotide
cuccaccguugccggcccc

SEQ ID NO: 798315 - RNA, 19 nt, Artificial Sequence
  Description of Artificial Sequence: Synthetic oligonucleotide
ggccuggguggcguuucgg

SEQ ID NO: 798316 - RNA, 19 nt, Artificial Sequence
  Description of Artificial Sequence: Synthetic oligonucleotide
cacgggaguuuacuagaau

SEQ ID NO: 798317 - RNA, 19 nt, Artificial Sequence
  Description of Artificial Sequence: Synthetic oligonucleotide
guucagccugguauguguu

SEQ ID NO: 798318 - RNA, 19 nt, Artificial Sequence
  Description of Artificial Sequence: Synthetic oligonucleotide
guugcccgcugaccccaaa

SEQ ID NO: 798319 - RNA, 19 nt, Artificial Sequence
  Description of Artificial Sequence: Synthetic oligonucleotide
acggcuuaugggagaccuu

SEQ ID NO: 798320 - RNA, 19 nt, Artificial Sequence
  Description of Artificial Sequence: Synthetic oligonucleotide
cagagccaaccugcgaagu

SEQ ID NO: 798321 - RNA, 19 nt, Artificial Sequence
  Description of Artificial Sequence: Synthetic oligonucleotide
ccaaucacuuaggggagua

SEQ ID NO: 798322 - RNA, 19 nt, Artificial Sequence
  Description of Artificial Sequence: Synthetic oligonucleotide
cugaagccccagcuaucau

SEQ ID NO: 798323 - RNA, 19 nt, Artificial Sequence
  Description of Artificial Sequence: Synthetic oligonucleotide
ccaaccugcgaagucuacu

SEQ ID NO: 798324 - RNA, 19 nt, Artificial Sequence
  Description of Artificial Sequence: Synthetic oligonucleotide
cccaugcacugccugugaa

SEQ ID NO: 798325 - RNA, 19 nt, Artificial Sequence
  Description of Artificial Sequence: Synthetic oligonucleotide
aguugcccgcugaccccaa

SEQ ID NO: 798326 - RNA, 19 nt, Artificial Sequence
  Description of Artificial Sequence: Synthetic oligonucleotide
cguugccggccccagcuca

SEQ ID NO: 798327 - RNA, 19 nt, Artificial Sequence
  Description of Artificial Sequence: Synthetic oligonucleotide
gguuccggauugcggguuu

SEQ ID NO: 798328 - RNA, 19 nt, Artificial Sequence
  Description of Artificial Sequence: Synthetic oligonucleotide
gccaaucacuuaggggagu

SEQ ID NO: 798329 - RNA, 19 nt, Artificial Sequence
  Description of Artificial Sequence: Synthetic oligonucleotide
ccaccguugccggccccag

SEQ ID NO: 798330 - RNA, 19 nt, Artificial Sequence
  Description of Artificial Sequence: Synthetic oligonucleotide
gcuagcggcauggguuggu

SEQ ID NO: 798331 - RNA, 19 nt, Artificial Sequence
  Description of Artificial Sequence: Synthetic oligonucleotide
ccguugccggccccagcuc

SEQ ID NO: 798332 - RNA, 19 nt, Artificial Sequence
  Description of Artificial Sequence: Synthetic oligonucleotide
cucgggcgacauguaugau

SEQ ID NO: 798333 - RNA, 19 nt, Artificial Sequence
  Description of Artificial Sequence: Synthetic oligonucleotide
ccggccccagcucacugau

SEQ ID NO: 798334 - RNA, 19 nt, Artificial Sequence
  Description of Artificial Sequence: Synthetic oligonucleotide
aaagaugcuugucagagcg

SEQ ID NO: 798335 - RNA, 19 nt, Artificial Sequence
  Description of Artificial Sequence: Synthetic oligonucleotide
aagaaugacaguuccuucc

SEQ ID NO: 798336 - RNA, 19 nt, Artificial Sequence
  Description of Artificial Sequence: Synthetic oligonucleotide
uuugccacaaugcacaggg

SEQ ID NO: 798337 - RNA, 19 nt, Artificial Sequence
  Description of Artificial Sequence: Synthetic oligonucleotide
aauuucaacauuucucagg

SEQ ID NO: 798338 - RNA, 19 nt, Artificial Sequence
  Description of Artificial Sequence: Synthetic oligonucleotide
aaacaagcuaaacaagucg

SEQ ID NO: 798339 - RNA, 19 nt, Artificial Sequence
  Description of Artificial Sequence: Synthetic oligonucleotide
cuaagcauaauuacaaagg

SEQ ID NO: 798340 - RNA, 19 nt, Artificial Sequence
  Description of Artificial Sequence: Synthetic oligonucleotide
aaugucgccacaaaggucg

SEQ ID NO: 798341 - RNA, 19 nt, Artificial Sequence
  Description of Artificial Sequence: Synthetic oligonucleotide
aaacaagucggucugaacu

SEQ ID NO: 798342 - RNA, 19 nt, Artificial Sequence
  Description of Artificial Sequence: Synthetic oligonucleotide
uuuagagaaaaucaucaca

SEQ ID NO: 798343 - RNA, 19 nt, Artificial Sequence
  Description of Artificial Sequence: Synthetic oligonucleotide
aauaggaccugucuggcuc

SEQ ID NO: 798344 - RNA, 19 nt, Artificial Sequence
  Description of Artificial Sequence: Synthetic oligonucleotide
uuugacuaaaacaagcuaa

SEQ ID NO: 798345 - RNA, 19 nt, Artificial Sequence
  Description of Artificial Sequence: Synthetic oligonucleotide
aauggguugcuucugauca

SEQ ID NO: 798346 - RNA, 19 nt, Artificial Sequence
  Description of Artificial Sequence: Synthetic oligonucleotide
uauaacuucguuaccaaug

SEQ ID NO: 798347 - RNA, 19 nt, Artificial Sequence
  Description of Artificial Sequence: Synthetic oligonucleotide
uaguguuacagucugauac

SEQ ID NO: 798348 - RNA, 19 nt, Artificial Sequence
  Description of Artificial Sequence: Synthetic oligonucleotide
cuagcuaucacacccaggg

SEQ ID NO: 798349 - RNA, 19 nt, Artificial Sequence
  Description of Artificial Sequence: Synthetic oligonucleotide
uuuauugucuaaccaauca

SEQ ID NO: 798350 - RNA, 19 nt, Artificial Sequence
  Description of Artificial Sequence: Synthetic oligonucleotide
aaacucucagaacucauag

SEQ ID NO: 798351 - RNA, 19 nt, Artificial Sequence
  Description of Artificial Sequence: Synthetic oligonucleotide
gaugacuccacccaggagc

SEQ ID NO: 798352 - RNA, 19 nt, Artificial Sequence
  Description of Artificial Sequence: Synthetic oligonucleotide
uauugucuaaccaaucacc

SEQ ID NO: 798353 - RNA, 19 nt, Artificial Sequence
  Description of Artificial Sequence: Synthetic oligonucleotide
cagauacuaaccaaaagcc

SEQ ID NO: 798354 - RNA, 19 nt, Artificial Sequence
  Description of Artificial Sequence: Synthetic oligonucleotide
uuaccaaugaacaaggcuu

SEQ ID NO: 798355 - RNA, 19 nt, Artificial Sequence
  Description of Artificial Sequence: Synthetic oligonucleotide
aucaaagcuagugaaaugg

SEQ ID NO: 798356 - RNA, 19 nt, Artificial Sequence
  Description of Artificial Sequence: Synthetic oligonucleotide
aacuaacagaacucggagg

SEQ ID NO: 798357 - RNA, 19 nt, Artificial Sequence
  Description of Artificial Sequence: Synthetic oligonucleotide
aacaagcuaaacaagucgg

SEQ ID NO: 798358 - RNA, 19 nt, Artificial Sequence
  Description of Artificial Sequence: Synthetic oligonucleotide
ucugcaaacagauacuaac

SEQ ID NO: 798359 - RNA, 19 nt, Artificial Sequence
  Description of Artificial Sequence: Synthetic oligonucleotide
aaagaaugacaguuccuuc

SEQ ID NO: 798360 - RNA, 19 nt, Artificial Sequence
  Description of Artificial Sequence: Synthetic oligonucleotide
aucacaacuggacuuaguc

SEQ ID NO: 798361 - RNA, 19 nt, Artificial Sequence
  Description of Artificial Sequence: Synthetic oligonucleotide
aacuucguuaccaaugaac

SEQ ID NO: 798362 - RNA, 19 nt, Artificial Sequence
  Description of Artificial Sequence: Synthetic oligonucleotide
aaagcuagugaaauggaag

SEQ ID NO: 798363 - RNA, 19 nt, Artificial Sequence
  Description of Artificial Sequence: Synthetic oligonucleotide
aacuucuuuaguguuacag

SEQ ID NO: 798364 - RNA, 19 nt, Artificial Sequence
  Description of Artificial Sequence: Synthetic oligonucleotide
auugaggaggaguccaugc

SEQ ID NO: 798365 - RNA, 19 nt, Artificial Sequence
  Description of Artificial Sequence: Synthetic oligonucleotide
aaaggguuaagcagaaggg

SEQ ID NO: 798366 - RNA, 19 nt, Artificial Sequence
  Description of Artificial Sequence: Synthetic oligonucleotide
acuaacagaacucggagga

SEQ ID NO: 798367 - RNA, 19 nt, Artificial Sequence
  Description of Artificial Sequence: Synthetic oligonucleotide
aaguaaugucgccacaaag

SEQ ID NO: 798368 - RNA, 19 nt, Artificial Sequence
  Description of Artificial Sequence: Synthetic oligonucleotide
ugaacuaacagaacucgga

SEQ ID NO: 798369 - RNA, 19 nt, Artificial Sequence
  Description of Artificial Sequence: Synthetic oligonucleotide
cuaucuaucacuaucugca

SEQ ID NO: 798370 - RNA, 19 nt, Artificial Sequence
  Description of Artificial Sequence: Synthetic oligonucleotide
aguaaugucgccacaaagg

SEQ ID NO: 798371 - RNA, 19 nt, Artificial Sequence
  Description of Artificial Sequence: Synthetic oligonucleotide
aaguuuagcaccaacccag

SEQ ID NO: 798372 - RNA, 19 nt, Artificial Sequence
  Description of Artificial Sequence: Synthetic oligonucleotide
aauggaauacugguucucg

SEQ ID NO: 798373 - RNA, 19 nt, Artificial Sequence
  Description of Artificial Sequence: Synthetic oligonucleotide
uucguuaccaaugaacaag

SEQ ID NO: 798374 - RNA, 19 nt, Artificial Sequence
  Description of Artificial Sequence: Synthetic oligonucleotide
uaaccaaaagccuacagua

SEQ ID NO: 798375 - RNA, 19 nt, Artificial Sequence
  Description of Artificial Sequence: Synthetic oligonucleotide
ucguuaccaaugaacaagg

SEQ ID NO: 798376 - RNA, 19 nt, Artificial Sequence
  Description of Artificial Sequence: Synthetic oligonucleotide
augaacaaggcuuaucgug

SEQ ID NO: 798377 - RNA, 19 nt, Artificial Sequence
  Description of Artificial Sequence: Synthetic oligonucleotide
gagaaaaucaucacagccc

SEQ ID NO: 798378 - RNA, 19 nt, Artificial Sequence
  Description of Artificial Sequence: Synthetic oligonucleotide
uuauugucuaaccaaucac

SEQ ID NO: 798379 - RNA, 19 nt, Artificial Sequence
  Description of Artificial Sequence: Synthetic oligonucleotide
acucucagaacucauaggu

SEQ ID NO: 798380 - RNA, 19 nt, Artificial Sequence
  Description of Artificial Sequence: Synthetic oligonucleotide
aaaggucggauuuuguccu

SEQ ID NO: 798381 - RNA, 19 nt, Artificial Sequence
  Description of Artificial Sequence: Synthetic oligonucleotide
cugaaauccaacaggauuc

SEQ ID NO: 798382 - RNA, 19 nt, Artificial Sequence
  Description of Artificial Sequence: Synthetic oligonucleotide
aagcuaaacaagucggucu

SEQ ID NO: 798383 - RNA, 19 nt, Artificial Sequence
  Description of Artificial Sequence: Synthetic oligonucleotide
agaaaaucaucacagccca

SEQ ID NO: 798384 - RNA, 19 nt, Artificial Sequence
  Description of Artificial Sequence: Synthetic oligonucleotide
acaaaggucggauuuuguc

SEQ ID NO: 798385 - RNA, 19 nt, Artificial Sequence
  Description of Artificial Sequence: Synthetic oligonucleotide
gaacuaacagaacucggag

SEQ ID NO: 798386 - RNA, 19 nt, Artificial Sequence
  Description of Artificial Sequence: Synthetic oligonucleotide
aguagacuaggacaacugg

SEQ ID NO: 798387 - RNA, 19 nt, Artificial Sequence
  Description of Artificial Sequence: Synthetic oligonucleotide
caaaggucggauuuugucc

SEQ ID NO: 798388 - RNA, 19 nt, Artificial Sequence
  Description of Artificial Sequence: Synthetic oligonucleotide
aaaaugaccaucaaagcua

SEQ ID NO: 798389 - RNA, 19 nt, Artificial Sequence
  Description of Artificial Sequence: Synthetic oligonucleotide
cuucguaaagcccaucucc

SEQ ID NO: 798390 - RNA, 19 nt, Artificial Sequence
  Description of Artificial Sequence: Synthetic oligonucleotide
ugaacaaggcuuaucgugu

SEQ ID NO: 798391 - RNA, 19 nt, Artificial Sequence
  Description of Artificial Sequence: Synthetic oligonucleotide
gagguguacaauuucaaca

SEQ ID NO: 798392 - RNA, 19 nt, Artificial Sequence
  Description of Artificial Sequence: Synthetic oligonucleotide
uucuuuauugucuaaccaa

SEQ ID NO: 798393 - RNA, 19 nt, Artificial Sequence
  Description of Artificial Sequence: Synthetic oligonucleotide
ucauaacuuucucacaaac

SEQ ID NO: 798394 - RNA, 19 nt, Artificial Sequence
  Description of Artificial Sequence: Synthetic oligonucleotide
aacucucagaacucauagg

SEQ ID NO: 798395 - RNA, 19 nt, Artificial Sequence
  Description of Artificial Sequence: Synthetic oligonucleotide
agggcaagaaacucccugc

SEQ ID NO: 798396 - RNA, 19 nt, Artificial Sequence
  Description of Artificial Sequence: Synthetic oligonucleotide
gaccauucagcacagagca

SEQ ID NO: 798397 - RNA, 19 nt, Artificial Sequence
  Description of Artificial Sequence: Synthetic oligonucleotide
acgaaaaucagaccuugag

SEQ ID NO: 798398 - RNA, 19 nt, Artificial Sequence
  Description of Artificial Sequence: Synthetic oligonucleotide
ucuuuauugucuaaccaau

SEQ ID NO: 798399 - RNA, 19 nt, Artificial Sequence
  Description of Artificial Sequence: Synthetic oligonucleotide
acaaagggcaagaaacucc

SEQ ID NO: 798400 - RNA, 19 nt, Artificial Sequence
  Description of Artificial Sequence: Synthetic oligonucleotide
acagcccacauuuacaaug

SEQ ID NO: 798401 - RNA, 19 nt, Artificial Sequence
  Description of Artificial Sequence: Synthetic oligonucleotide
ucggucugaacuaacagaa

SEQ ID NO: 798402 - RNA, 19 nt, Artificial Sequence
  Description of Artificial Sequence: Synthetic oligonucleotide
uagacuaggacaacuggac

SEQ ID NO: 798403 - RNA, 19 nt, Artificial Sequence
  Description of Artificial Sequence: Synthetic oligonucleotide
aagggcaagaaacucccug

SEQ ID NO: 798404 - RNA, 19 nt, Artificial Sequence
  Description of Artificial Sequence: Synthetic oligonucleotide
ucucguauagcauguauaa

SEQ ID NO: 798405 - RNA, 19 nt, Artificial Sequence
  Description of Artificial Sequence: Synthetic oligonucleotide
cuacacuucacuguggacc

SEQ ID NO: 798406 - RNA, 19 nt, Artificial Sequence
  Description of Artificial Sequence: Synthetic oligonucleotide
acaaauguggccaagaguu

SEQ ID NO: 798407 - RNA, 19 nt, Artificial Sequence
  Description of Artificial Sequence: Synthetic oligonucleotide
aggauugcaacaauaggac

SEQ ID NO: 798408 - RNA, 19 nt, Artificial Sequence
  Description of Artificial Sequence: Synthetic oligonucleotide
ugagcugcuagcuuuggca

SEQ ID NO: 798409 - RNA, 19 nt, Artificial Sequence
  Description of Artificial Sequence: Synthetic oligonucleotide
uggaagguagcauucaaaa

SEQ ID NO: 798410 - RNA, 19 nt, Artificial Sequence
  Description of Artificial Sequence: Synthetic oligonucleotide
uccucacacgcucacaugc

SEQ ID NO: 798411 - RNA, 19 nt, Artificial Sequence
  Description of Artificial Sequence: Synthetic oligonucleotide
aacagaacucggaggaagc

SEQ ID NO: 798412 - RNA, 19 nt, Artificial Sequence
  Description of Artificial Sequence: Synthetic oligonucleotide
auuucucaggaguuuaucu

SEQ ID NO: 798413 - RNA, 19 nt, Artificial Sequence
  Description of Artificial Sequence: Synthetic oligonucleotide
uguaagccgagcuugucug

SEQ ID NO: 798414 - RNA, 19 nt, Artificial Sequence
  Description of Artificial Sequence: Synthetic oligonucleotide
uaguauaacuucguuacca

SEQ ID NO: 798415 - RNA, 19 nt, Artificial Sequence
  Description of Artificial Sequence: Synthetic oligonucleotide
caucuggcaacuuccaggg

SEQ ID NO: 798416 - RNA, 19 nt, Artificial Sequence
  Description of Artificial Sequence: Synthetic oligonucleotide
uuccuaucuaucacuaucu

SEQ ID NO: 798417 - RNA, 19 nt, Artificial Sequence
  Description of Artificial Sequence: Synthetic oligonucleotide
augccagaacacaagagcc

SEQ ID NO: 798418 - RNA, 19 nt, Artificial Sequence
  Description of Artificial Sequence: Synthetic oligonucleotide
aggguuaagcagaagggcc

SEQ ID NO: 798419 - RNA, 19 nt, Artificial Sequence
  Description of Artificial Sequence: Synthetic oligonucleotide
uacaaauguggccaagagu

SEQ ID NO: 798420 - RNA, 19 nt, Artificial Sequence
  Description of Artificial Sequence: Synthetic oligonucleotide
cuaacauucugguuaguuc

SEQ ID NO: 798421 - RNA, 19 nt, Artificial Sequence
  Description of Artificial Sequence: Synthetic oligonucleotide
uuuucuagccuggagcugc

SEQ ID NO: 798422 - RNA, 19 nt, Artificial Sequence
  Description of Artificial Sequence: Synthetic oligonucleotide
aaaugaccaucaaagcuag

SEQ ID NO: 798423 - RNA, 19 nt, Artificial Sequence
  Description of Artificial Sequence: Synthetic oligonucleotide
uuaucguguuccuugaaau

SEQ ID NO: 798424 - RNA, 19 nt, Artificial Sequence
  Description of Artificial Sequence: Synthetic oligonucleotide
uucauccccuacauuaacc

SEQ ID NO: 798425 - RNA, 19 nt, Artificial Sequence
  Description of Artificial Sequence: Synthetic oligonucleotide
cagagcgaaguuuagcacc

SEQ ID NO: 798426 - RNA, 19 nt, Artificial Sequence
  Description of Artificial Sequence: Synthetic oligonucleotide
ucgugugaagaccauucag

SEQ ID NO: 798427 - RNA, 19 nt, Artificial Sequence
  Description of Artificial Sequence: Synthetic oligonucleotide
auaauuacaaagggcaaga

SEQ ID NO: 798428 - RNA, 19 nt, Artificial Sequence
  Description of Artificial Sequence: Synthetic oligonucleotide
agguguacaauuucaacau

SEQ ID NO: 798429 - RNA, 19 nt, Artificial Sequence
  Description of Artificial Sequence: Synthetic oligonucleotide
ucaaagcuagugaaaugga

SEQ ID NO: 798430 - RNA, 19 nt, Artificial Sequence
  Description of Artificial Sequence: Synthetic oligonucleotide
ucaacauuucucaggaguu

SEQ ID NO: 798431 - RNA, 19 nt, Artificial Sequence
  Description of Artificial Sequence: Synthetic oligonucleotide
cuuccuaucuaucacuauc

SEQ ID NO: 798432 - RNA, 19 nt, Artificial Sequence
  Description of Artificial Sequence: Synthetic oligonucleotide
aauguaacacugguuuucu

SEQ ID NO: 798433 - RNA, 19 nt, Artificial Sequence
  Description of Artificial Sequence: Synthetic oligonucleotide
accaaaagccuacaguaga

SEQ ID NO: 798434 - RNA, 19 nt, Artificial Sequence
  Description of Artificial Sequence: Synthetic oligonucleotide
uuuccuaguauaacuucgu

SEQ ID NO: 798435 - RNA, 19 nt, Artificial Sequence
  Description of Artificial Sequence: Synthetic oligonucleotide
agcuaaacaagucggucug

SEQ ID NO: 798436 - RNA, 19 nt, Artificial Sequence
  Description of Artificial Sequence: Synthetic oligonucleotide
gaaguuuagcaccaaccca

SEQ ID NO: 798437 - RNA, 19 nt, Artificial Sequence
  Description of Artificial Sequence: Synthetic oligonucleotide
acauuaaccucauaacuuu

SEQ ID NO: 798438 - RNA, 19 nt, Artificial Sequence
  Description of Artificial Sequence: Synthetic oligonucleotide
auugcaaugaacauucuuu

SEQ ID NO: 798439 - RNA, 19 nt, Artificial Sequence
  Description of Artificial Sequence: Synthetic oligonucleotide
uacacuucacuguggacca

SEQ ID NO: 798440 - RNA, 19 nt, Artificial Sequence
  Description of Artificial Sequence: Synthetic oligonucleotide
aguguuacagucugauacu

SEQ ID NO: 798441 - RNA, 19 nt, Artificial Sequence
  Description of Artificial Sequence: Synthetic oligonucleotide
ucaaaauguaacacugguu

SEQ ID NO: 798442 - RNA, 19 nt, Artificial Sequence
  Description of Artificial Sequence: Synthetic oligonucleotide
auaggaccugucuggcucc

SEQ ID NO: 798443 - RNA, 19 nt, Artificial Sequence
  Description of Artificial Sequence: Synthetic oligonucleotide
ugggagguguacaauuuca

SEQ ID NO: 798444 - RNA, 19 nt, Artificial Sequence
  Description of Artificial Sequence: Synthetic oligonucleotide
uaucuaucacuaucugcag

SEQ ID NO: 798445 - RNA, 19 nt, Artificial Sequence
  Description of Artificial Sequence: Synthetic oligonucleotide
acuucguuaccaaugaaca

SEQ ID NO: 798446 - RNA, 19 nt, Artificial Sequence
  Description of Artificial Sequence: Synthetic oligonucleotide
ucuagcuaucacacccagg

SEQ ID NO: 798447 - RNA, 19 nt, Artificial Sequence
  Description of Artificial Sequence: Synthetic oligonucleotide
aacaagucggucugaacua

SEQ ID NO: 798448 - RNA, 19 nt, Artificial Sequence
  Description of Artificial Sequence: Synthetic oligonucleotide
ucugcuucgugugaagacc

SEQ ID NO: 798449 - RNA, 19 nt, Artificial Sequence
  Description of Artificial Sequence: Synthetic oligonucleotide
acaauaggaccugucuggc

SEQ ID NO: 798450 - RNA, 19 nt, Artificial Sequence
  Description of Artificial Sequence: Synthetic oligonucleotide
cuucgugugaagaccauuc

SEQ ID NO: 798451 - RNA, 19 nt, Artificial Sequence
  Description of Artificial Sequence: Synthetic oligonucleotide
guacaaauguggccaagag

SEQ ID NO: 798452 - RNA, 19 nt, Artificial Sequence
  Description of Artificial Sequence: Synthetic oligonucleotide
gucagagcgaaguuuagca

SEQ ID NO: 798453 - RNA, 19 nt, Artificial Sequence
  Description of Artificial Sequence: Synthetic oligonucleotide
uauugcaaugaacauucuu

SEQ ID NO: 798454 - RNA, 19 nt, Artificial Sequence
  Description of Artificial Sequence: Synthetic oligonucleotide
cagaccuugaguguucugg

SEQ ID NO: 798455 - RNA, 19 nt, Artificial Sequence
  Description of Artificial Sequence: Synthetic oligonucleotide
agucggucugaacuaacag

SEQ ID NO: 798456 - RNA, 19 nt, Artificial Sequence
  Description of Artificial Sequence: Synthetic oligonucleotide
caaacagauacuaaccaaa

SEQ ID NO: 798457 - RNA, 19 nt, Artificial Sequence
  Description of Artificial Sequence: Synthetic oligonucleotide
ucccgugccucauugacgc

SEQ ID NO: 798458 - RNA, 19 nt, Artificial Sequence
  Description of Artificial Sequence: Synthetic oligonucleotide
ucugguuaguucuucccgu

SEQ ID NO: 798459 - RNA, 19 nt, Artificial Sequence
  Description of Artificial Sequence: Synthetic oligonucleotide
uucucguauagcauguaua

SEQ ID NO: 798460 - RNA, 19 nt, Artificial Sequence
  Description of Artificial Sequence: Synthetic oligonucleotide
ugaagaccauucagcacag

SEQ ID NO: 798461 - RNA, 19 nt, Artificial Sequence
  Description of Artificial Sequence: Synthetic oligonucleotide
agcgaaguuuagcaccaac

SEQ ID NO: 798462 - RNA, 19 nt, Artificial Sequence
  Description of Artificial Sequence: Synthetic oligonucleotide
uuagucgccgguauugcaa

SEQ ID NO: 798463 - RNA, 19 nt, Artificial Sequence
  Description of Artificial Sequence: Synthetic oligonucleotide
aucacauaucuucucuucu

SEQ ID NO: 798464 - RNA, 19 nt, Artificial Sequence
  Description of Artificial Sequence: Synthetic oligonucleotide
agaaugacaguuccuuccu

SEQ ID NO: 798465 - RNA, 19 nt, Artificial Sequence
  Description of Artificial Sequence: Synthetic oligonucleotide
cuggcgaagggaauguaag

SEQ ID NO: 798466 - RNA, 19 nt, Artificial Sequence
  Description of Artificial Sequence: Synthetic oligonucleotide
cugguucucguauagcaug

SEQ ID NO: 798467 - RNA, 19 nt, Artificial Sequence
  Description of Artificial Sequence: Synthetic oligonucleotide
aauguaagccgagcuuguc

SEQ ID NO: 798468 - RNA, 19 nt, Artificial Sequence
  Description of Artificial Sequence: Synthetic oligonucleotide
auagcauguauaaggcacg

SEQ ID NO: 798469 - RNA, 19 nt, Artificial Sequence
  Description of Artificial Sequence: Synthetic oligonucleotide
gcauguauaaggcacggug

SEQ ID NO: 798470 - RNA, 19 nt, Artificial Sequence
  Description of Artificial Sequence: Synthetic oligonucleotide
aguauaacuucguuaccaa

SEQ ID NO: 798471 - RNA, 19 nt, Artificial Sequence
  Description of Artificial Sequence: Synthetic oligonucleotide
agacacuacugccauugag

SEQ ID NO: 798472 - RNA, 19 nt, Artificial Sequence
  Description of Artificial Sequence: Synthetic oligonucleotide
ucguguuccuugaaauuca

SEQ ID NO: 798473 - RNA, 19 nt, Artificial Sequence
  Description of Artificial Sequence: Synthetic oligonucleotide
ccgucuagguaaaagaugc

SEQ ID NO: 798474 - RNA, 19 nt, Artificial Sequence
  Description of Artificial Sequence: Synthetic oligonucleotide
uuaagcagaagggccuagg

SEQ ID NO: 798475 - RNA, 19 nt, Artificial Sequence
  Description of Artificial Sequence: Synthetic oligonucleotide
uucugaucacuucugguuu

SEQ ID NO: 798476 - RNA, 19 nt, Artificial Sequence
  Description of Artificial Sequence: Synthetic oligonucleotide
accaacaaaacugcaucuc

SEQ ID NO: 798477 - RNA, 19 nt, Artificial Sequence
  Description of Artificial Sequence: Synthetic oligonucleotide
ugggaaagaaugacaguuc

SEQ ID NO: 798478 - RNA, 19 nt, Artificial Sequence
  Description of Artificial Sequence: Synthetic oligonucleotide
aaaucagaccuugaguguu

SEQ ID NO: 798479 - RNA, 19 nt, Artificial Sequence
  Description of Artificial Sequence: Synthetic oligonucleotide
acagucugauacucuaaug

SEQ ID NO: 798480 - RNA, 19 nt, Artificial Sequence
  Description of Artificial Sequence: Synthetic oligonucleotide
uucccgugccucauugacg

SEQ ID NO: 798481 - RNA, 19 nt, Artificial Sequence
  Description of Artificial Sequence: Synthetic oligonucleotide
augggagguguacaauuuc

SEQ ID NO: 798482 - RNA, 19 nt, Artificial Sequence
  Description of Artificial Sequence: Synthetic oligonucleotide
aaggcacggugugagaaag

SEQ ID NO: 798483 - RNA, 19 nt, Artificial Sequence
  Description of Artificial Sequence: Synthetic oligonucleotide
uccuaucuaucacuaucug

SEQ ID NO: 798484 - RNA, 19 nt, Artificial Sequence
  Description of Artificial Sequence: Synthetic oligonucleotide
cagcccacauuuacaaugg

SEQ ID NO: 798485 - RNA, 19 nt, Artificial Sequence
  Description of Artificial Sequence: Synthetic oligonucleotide
cucauugacgcguucucug

SEQ ID NO: 798486 - RNA, 19 nt, Artificial Sequence
  Description of Artificial Sequence: Synthetic oligonucleotide
guacaagugagcugcuagc

SEQ ID NO: 798487 - RNA, 19 nt, Artificial Sequence
  Description of Artificial Sequence: Synthetic oligonucleotide
gggaaagaaugacaguucc

SEQ ID NO: 798488 - RNA, 19 nt, Artificial Sequence
  Description of Artificial Sequence: Synthetic oligonucleotide
uucgugugaagaccauuca

SEQ ID NO: 798489 - RNA, 19 nt, Artificial Sequence
  Description of Artificial Sequence: Synthetic oligonucleotide
ucuggcgaagggaauguaa

SEQ ID NO: 798490 - RNA, 19 nt, Artificial Sequence
  Description of Artificial Sequence: Synthetic oligonucleotide
acuuagucgccgguauugc

SEQ ID NO: 798491 - RNA, 19 nt, Artificial Sequence
  Description of Artificial Sequence: Synthetic oligonucleotide
aaucagaccuugaguguuc

SEQ ID NO: 798492 - RNA, 19 nt, Artificial Sequence
  Description of Artificial Sequence: Synthetic oligonucleotide
uagcuaucacacccagggg

SEQ ID NO: 798493 - RNA, 19 nt, Artificial Sequence
  Description of Artificial Sequence: Synthetic oligonucleotide
gacuuagucgccgguauug

SEQ ID NO: 798494 - RNA, 19 nt, Artificial Sequence
  Description of Artificial Sequence: Synthetic oligonucleotide
auguaagccgagcuugucu

SEQ ID NO: 798495 - RNA, 19 nt, Artificial Sequence
  Description of Artificial Sequence: Synthetic oligonucleotide
uuuggcacgaugggaaaga

SEQ ID NO: 798496 - RNA, 19 nt, Artificial Sequence
  Description of Artificial Sequence: Synthetic oligonucleotide
cuacaguagacuaggacaa

SEQ ID NO: 798497 - RNA, 19 nt, Artificial Sequence
  Description of Artificial Sequence: Synthetic oligonucleotide
gcuagcuuuggcacgaugg

SEQ ID NO: 798498 - RNA, 19 nt, Artificial Sequence
  Description of Artificial Sequence: Synthetic oligonucleotide
uagcauguauaaggcacgg

SEQ ID NO: 798499 - RNA, 19 nt, Artificial Sequence
  Description of Artificial Sequence: Synthetic oligonucleotide
uucguuuccuccagccagc

SEQ ID NO: 798500 - RNA, 19 nt, Artificial Sequence
  Description of Artificial Sequence: Synthetic oligonucleotide
cacuucguuuccuccagcc

SEQ ID NO: 798501 - RNA, 19 nt, Artificial Sequence
  Description of Artificial Sequence: Synthetic oligonucleotide
auugacgcguucucuguca

SEQ ID NO: 798502 - RNA, 19 nt, Artificial Sequence
  Description of Artificial Sequence: Synthetic oligonucleotide
ccuacaguagacuaggaca

SEQ ID NO: 798503 - RNA, 19 nt, Artificial Sequence
  Description of Artificial Sequence: Synthetic oligonucleotide
ggaauguaagccgagcuug

SEQ ID NO: 798504 - RNA, 19 nt, Artificial Sequence
  Description of Artificial Sequence: Synthetic oligonucleotide
caggauucagggugugugg

SEQ ID NO: 798505 - RNA, 19 nt, Artificial Sequence
  Description of Artificial Sequence: Synthetic oligonucleotide
caguagacuaggacaacug

SEQ ID NO: 798506 - RNA, 19 nt, Artificial Sequence
  Description of Artificial Sequence: Synthetic oligonucleotide
uaaugucgccacaaagguc

SEQ ID NO: 798507 - RNA, 19 nt, Artificial Sequence
  Description of Artificial Sequence: Synthetic oligonucleotide
aggaagauccuguuuguuu

SEQ ID NO: 798508 - RNA, 19 nt, Artificial Sequence
  Description of Artificial Sequence: Synthetic oligonucleotide
ugacuaaaacaagcuaaac

SEQ ID NO: 798509 - RNA, 19 nt, Artificial Sequence
  Description of Artificial Sequence: Synthetic oligonucleotide
gagccgucuagguaaaaga

SEQ ID NO: 798510 - RNA, 19 nt, Artificial Sequence
  Description of Artificial Sequence: Synthetic oligonucleotide
uaaucacauaucuucucuu

SEQ ID NO: 798511 - RNA, 19 nt, Artificial Sequence
  Description of Artificial Sequence: Synthetic oligonucleotide
cauuaaccucauaacuuuc

SEQ ID NO: 798512 - RNA, 19 nt, Artificial Sequence
  Description of Artificial Sequence: Synthetic oligonucleotide
agauacuaaccaaaagccu

SEQ ID NO: 798513 - RNA, 19 nt, Artificial Sequence
  Description of Artificial Sequence: Synthetic oligonucleotide
gaauggguugcuucugauc

SEQ ID NO: 798514 - RNA, 19 nt, Artificial Sequence
  Description of Artificial Sequence: Synthetic oligonucleotide
ucauugacgcguucucugu

SEQ ID NO: 798515 - RNA, 19 nt, Artificial Sequence
  Description of Artificial Sequence: Synthetic oligonucleotide
gaaacucccugccgauggg

SEQ ID NO: 798516 - RNA, 19 nt, Artificial Sequence
  Description of Artificial Sequence: Synthetic oligonucleotide
ugucagagcgaaguuuagc

SEQ ID NO: 798517 - RNA, 19 nt, Artificial Sequence
  Description of Artificial Sequence: Synthetic oligonucleotide
guaaugucgccacaaaggu

SEQ ID NO: 798518 - RNA, 19 nt, Artificial Sequence
  Description of Artificial Sequence: Synthetic oligonucleotide
acaacuggacuuagucgcc

SEQ ID NO: 798519 - RNA, 19 nt, Artificial Sequence
  Description of Artificial Sequence: Synthetic oligonucleotide
acugccauugaggaggagu

SEQ ID NO: 798520 - RNA, 19 nt, Artificial Sequence
  Description of Artificial Sequence: Synthetic oligonucleotide
ucuccggaccuuccuaucu

SEQ ID NO: 798521 - RNA, 19 nt, Artificial Sequence
  Description of Artificial Sequence: Synthetic oligonucleotide
ggacacugaaauccaacag

SEQ ID NO: 798522 - RNA, 19 nt, Artificial Sequence
  Description of Artificial Sequence: Synthetic oligonucleotide
guaaucacauaucuucucu

SEQ ID NO: 798523 - RNA, 19 nt, Artificial Sequence
  Description of Artificial Sequence: Synthetic oligonucleotide
agacuaggacaacuggaca

SEQ ID NO: 798524 - RNA, 19 nt, Artificial Sequence
  Description of Artificial Sequence: Synthetic oligonucleotide
aaaggucaccgauuccuuu

SEQ ID NO: 798525 - RNA, 19 nt, Artificial Sequence
  Description of Artificial Sequence: Synthetic oligonucleotide
cucagaacucauaggugug

SEQ ID NO: 798526 - RNA, 19 nt, Artificial Sequence
  Description of Artificial Sequence: Synthetic oligonucleotide
ccuaucuaucacuaucugc

SEQ ID NO: 798527 - RNA, 19 nt, Artificial Sequence
  Description of Artificial Sequence: Synthetic oligonucleotide
cugccauugaggaggaguc

SEQ ID NO: 798528 - RNA, 19 nt, Artificial Sequence
  Description of Artificial Sequence: Synthetic oligonucleotide
agagccgucuagguaaaag

SEQ ID NO: 798529 - RNA, 19 nt, Artificial Sequence
  Description of Artificial Sequence: Synthetic oligonucleotide
auggguugcuucugaucac

SEQ ID NO: 798530 - RNA, 19 nt, Artificial Sequence
  Description of Artificial Sequence: Synthetic oligonucleotide
cuuguaguccccuuccuaa

SEQ ID NO: 798531 - RNA, 19 nt, Artificial Sequence
  Description of Artificial Sequence: Synthetic oligonucleotide
gucggucugaacuaacaga

SEQ ID NO: 798532 - RNA, 19 nt, Artificial Sequence
  Description of Artificial Sequence: Synthetic oligonucleotide
acaguagacuaggacaacu

SEQ ID NO: 798533 - RNA, 19 nt, Artificial Sequence
  Description of Artificial Sequence: Synthetic oligonucleotide
augcuugucagagcgaagu

SEQ ID NO: 798534 - RNA, 19 nt, Artificial Sequence
  Description of Artificial Sequence: Synthetic oligonucleotide
uccaggccuucguaaagcc

SEQ ID NO: 798535 - RNA, 19 nt, Artificial Sequence
  Description of Artificial Sequence: Synthetic oligonucleotide
uggacuuagucgccgguau

SEQ ID NO: 798536 - RNA, 19 nt, Artificial Sequence
  Description of Artificial Sequence: Synthetic oligonucleotide
agaccuugaguguucugga

SEQ ID NO: 798537 - RNA, 19 nt, Artificial Sequence
  Description of Artificial Sequence: Synthetic oligonucleotide
aggaguuuaucugugguua

SEQ ID NO: 798538 - RNA, 19 nt, Artificial Sequence
  Description of Artificial Sequence: Synthetic oligonucleotide
uucaaccugugguaaucac

SEQ ID NO: 798539 - RNA, 19 nt, Artificial Sequence
  Description of Artificial Sequence: Synthetic oligonucleotide
uggccaagaguuguguggc

SEQ ID NO: 798540 - RNA, 19 nt, Artificial Sequence
  Description of Artificial Sequence: Synthetic oligonucleotide
caagcuaaacaagucgguc

SEQ ID NO: 798541 - RNA, 19 nt, Artificial Sequence
  Description of Artificial Sequence: Synthetic oligonucleotide
uauaaggcacggugugaga

SEQ ID NO: 798542 - RNA, 19 nt, Artificial Sequence
  Description of Artificial Sequence: Synthetic oligonucleotide
gaaagaaugacaguuccuu

SEQ ID NO: 798543 - RNA, 19 nt, Artificial Sequence
  Description of Artificial Sequence: Synthetic oligonucleotide
uaucguguuccuugaaauu

SEQ ID NO: 798544 - RNA, 19 nt, Artificial Sequence
  Description of Artificial Sequence: Synthetic oligonucleotide
cuaaccaaaagccuacagu

SEQ ID NO: 798545 - RNA, 19 nt, Artificial Sequence
  Description of Artificial Sequence: Synthetic oligonucleotide
cuucccgugccucauugac

SEQ ID NO: 798546 - RNA, 19 nt, Artificial Sequence
  Description of Artificial Sequence: Synthetic oligonucleotide
gguuaguucuucccgugcc

SEQ ID NO: 798547 - RNA, 19 nt, Artificial Sequence
  Description of Artificial Sequence: Synthetic oligonucleotide
auccccuacauuaaccuca

SEQ ID NO: 798548 - RNA, 19 nt, Artificial Sequence
  Description of Artificial Sequence: Synthetic oligonucleotide
caggccuucguaaagccca

SEQ ID NO: 798549 - RNA, 19 nt, Artificial Sequence
  Description of Artificial Sequence: Synthetic oligonucleotide
aaugcacagggaauggguu

SEQ ID NO: 798550 - RNA, 19 nt, Artificial Sequence
  Description of Artificial Sequence: Synthetic oligonucleotide
cuuugacuaaaacaagcua

SEQ ID NO: 798551 - RNA, 19 nt, Artificial Sequence
  Description of Artificial Sequence: Synthetic oligonucleotide
acuaggacaacuggacaca

SEQ ID NO: 798552 - RNA, 19 nt, Artificial Sequence
  Description of Artificial Sequence: Synthetic oligonucleotide
cucggaggaagcacccucc

SEQ ID NO: 798553 - RNA, 19 nt, Artificial Sequence
  Description of Artificial Sequence: Synthetic oligonucleotide
aagaaacucccugccgaug

SEQ ID NO: 798554 - RNA, 19 nt, Artificial Sequence
  Description of Artificial Sequence: Synthetic oligonucleotide
cgugugaagaccauucagc

SEQ ID NO: 798555 - RNA, 19 nt, Artificial Sequence
  Description of Artificial Sequence: Synthetic oligonucleotide
aagucggucugaacuaaca

SEQ ID NO: 798556 - RNA, 19 nt, Artificial Sequence
  Description of Artificial Sequence: Synthetic oligonucleotide
cuuaucguguuccuugaaa

SEQ ID NO: 798557 - RNA, 19 nt, Artificial Sequence
  Description of Artificial Sequence: Synthetic oligonucleotide
caaagcuagugaaauggaa

SEQ ID NO: 798558 - RNA, 19 nt, Artificial Sequence
  Description of Artificial Sequence: Synthetic oligonucleotide
ggcgaagggaauguaagcc

SEQ ID NO: 798559 - RNA, 19 nt, Artificial Sequence
  Description of Artificial Sequence: Synthetic oligonucleotide
auaaggcacggugugagaa

SEQ ID NO: 798560 - RNA, 19 nt, Artificial Sequence
  Description of Artificial Sequence: Synthetic oligonucleotide
cauaacuuucucacaaacu

SEQ ID NO: 798561 - RNA, 19 nt, Artificial Sequence
  Description of Artificial Sequence: Synthetic oligonucleotide
ucguaaagcccaucuccac

SEQ ID NO: 798562 - RNA, 19 nt, Artificial Sequence
  Description of Artificial Sequence: Synthetic oligonucleotide
guacaauuucaacauuucu

SEQ ID NO: 798563 - RNA, 19 nt, Artificial Sequence
  Description of Artificial Sequence: Synthetic oligonucleotide
aguuuagcaccaacccagg

SEQ ID NO: 798564 - RNA, 19 nt, Artificial Sequence
  Description of Artificial Sequence: Synthetic oligonucleotide
ugcagccuagcaccaggcc

SEQ ID NO: 798565 - RNA, 19 nt, Artificial Sequence
  Description of Artificial Sequence: Synthetic oligonucleotide
cucguauagcauguauaag

SEQ ID NO: 798566 - RNA, 19 nt, Artificial Sequence
  Description of Artificial Sequence: Synthetic oligonucleotide
ggagguguacaauuucaac

SEQ ID NO: 798567 - RNA, 19 nt, Artificial Sequence
  Description of Artificial Sequence: Synthetic oligonucleotide
uuccuaguauaacuucguu

SEQ ID NO: 798568 - RNA, 19 nt, Artificial Sequence
  Description of Artificial Sequence: Synthetic oligonucleotide
guggagaugccagacccag

SEQ ID NO: 798569 - RNA, 19 nt, Artificial Sequence
  Description of Artificial Sequence: Synthetic oligonucleotide
cucuagcuaucacacccag

SEQ ID NO: 798570 - RNA, 19 nt, Artificial Sequence
  Description of Artificial Sequence: Synthetic oligonucleotide
ggccuagguacaaaugugg

SEQ ID NO: 798571 - RNA, 19 nt, Artificial Sequence
  Description of Artificial Sequence: Synthetic oligonucleotide
uaaggcacggugugagaaa

SEQ ID NO: 798572 - RNA, 19 nt, Artificial Sequence
  Description of Artificial Sequence: Synthetic oligonucleotide
uaagccgagcuugucugug

SEQ ID NO: 798573 - RNA, 19 nt, Artificial Sequence
  Description of Artificial Sequence: Synthetic oligonucleotide
cacugggaacuucaucccc

SEQ ID NO: 798574 - RNA, 19 nt, Artificial Sequence
  Description of Artificial Sequence: Synthetic oligonucleotide
gccgguauugcaaugaaca

SEQ ID NO: 798575 - RNA, 19 nt, Artificial Sequence
  Description of Artificial Sequence: Synthetic oligonucleotide
ucggaggaagcacccuccc

SEQ ID NO: 798576 - RNA, 19 nt, Artificial Sequence
  Description of Artificial Sequence: Synthetic oligonucleotide
agcuggcuuugccacaaug

SEQ ID NO: 798577 - RNA, 19 nt, Artificial Sequence
  Description of Artificial Sequence: Synthetic oligonucleotide
cauguauaaggcacggugu

SEQ ID NO: 798578 - RNA, 19 nt, Artificial Sequence
  Description of Artificial Sequence: Synthetic oligonucleotide
ggucugaacuaacagaacu

SEQ ID NO: 798579 - RNA, 19 nt, Artificial Sequence
  Description of Artificial Sequence: Synthetic oligonucleotide
agaugcuugucagagcgaa

SEQ ID NO: 798580 - RNA, 19 nt, Artificial Sequence
  Description of Artificial Sequence: Synthetic oligonucleotide
agcuagugaaauggaaggu

SEQ ID NO: 798581 - RNA, 19 nt, Artificial Sequence
  Description of Artificial Sequence: Synthetic oligonucleotide
gucggauuuuguccuggcc

SEQ ID NO: 798582 - RNA, 19 nt, Artificial Sequence
  Description of Artificial Sequence: Synthetic oligonucleotide
aagccgagcuugucuguga

SEQ ID NO: 798583 - RNA, 19 nt, Artificial Sequence
  Description of Artificial Sequence: Synthetic oligonucleotide
agagcgaaguuuagcacca

SEQ ID NO: 798584 - RNA, 19 nt, Artificial Sequence
  Description of Artificial Sequence: Synthetic oligonucleotide
cuuuggcacgaugggaaag

SEQ ID NO: 798585 - RNA, 19 nt, Artificial Sequence
  Description of Artificial Sequence: Synthetic oligonucleotide
cacuucacuguggaccagg

SEQ ID NO: 798586 - RNA, 19 nt, Artificial Sequence
  Description of Artificial Sequence: Synthetic oligonucleotide
ugcuagcuuuggcacgaug

SEQ ID NO: 798587 - RNA, 19 nt, Artificial Sequence
  Description of Artificial Sequence: Synthetic oligonucleotide
cuaggacaacuggacacag

SEQ ID NO: 798588 - RNA, 19 nt, Artificial Sequence
  Description of Artificial Sequence: Synthetic oligonucleotide
gacgcguucucugucauua

SEQ ID NO: 798589 - RNA, 19 nt, Artificial Sequence
  Description of Artificial Sequence: Synthetic oligonucleotide
cauuucucaggaguuuauc

SEQ ID NO: 798590 - RNA, 19 nt, Artificial Sequence
  Description of Artificial Sequence: Synthetic oligonucleotide
cucacacgcucacaugcac

SEQ ID NO: 798591 - RNA, 19 nt, Artificial Sequence
  Description of Artificial Sequence: Synthetic oligonucleotide
gaugcuugucagagcgaag

SEQ ID NO: 798592 - RNA, 19 nt, Artificial Sequence
  Description of Artificial Sequence: Synthetic oligonucleotide
acaagugagcugcuagcuu

SEQ ID NO: 798593 - RNA, 19 nt, Artificial Sequence
  Description of Artificial Sequence: Synthetic oligonucleotide
cauccccuacauuaaccuc

SEQ ID NO: 798594 - RNA, 19 nt, Artificial Sequence
  Description of Artificial Sequence: Synthetic oligonucleotide
uacuaaccaaaagccuaca

SEQ ID NO: 798595 - RNA, 19 nt, Artificial Sequence
  Description of Artificial Sequence: Synthetic oligonucleotide
uagguacaaauguggccaa

SEQ ID NO: 798596 - RNA, 19 nt, Artificial Sequence
  Description of Artificial Sequence: Synthetic oligonucleotide
cuucguuaccaaugaacaa

SEQ ID NO: 798597 - RNA, 19 nt, Artificial Sequence
  Description of Artificial Sequence: Synthetic oligonucleotide
gcauucaaaauguaacacu

SEQ ID NO: 798598 - RNA, 19 nt, Artificial Sequence
  Description of Artificial Sequence: Synthetic oligonucleotide
caagucggucugaacuaac

SEQ ID NO: 798599 - RNA, 19 nt, Artificial Sequence
  Description of Artificial Sequence: Synthetic oligonucleotide
uucggggaagaguccuggc

SEQ ID NO: 798600 - RNA, 19 nt, Artificial Sequence
  Description of Artificial Sequence: Synthetic oligonucleotide
aggucaccgauuccuuuga

SEQ ID NO: 798601 - RNA, 19 nt, Artificial Sequence
  Description of Artificial Sequence: Synthetic oligonucleotide
caaacucucagaacucaua

SEQ ID NO: 798602 - RNA, 19 nt, Artificial Sequence
  Description of Artificial Sequence: Synthetic oligonucleotide
acgcguucucugucauuac

SEQ ID NO: 798603 - RNA, 19 nt, Artificial Sequence
  Description of Artificial Sequence: Synthetic oligonucleotide
cauugacgcguucucuguc

SEQ ID NO: 798604 - RNA, 19 nt, Artificial Sequence
  Description of Artificial Sequence: Synthetic oligonucleotide
acuggacuuagucgccggu

SEQ ID NO: 798605 - RNA, 19 nt, Artificial Sequence
  Description of Artificial Sequence: Synthetic oligonucleotide
uagucgccgguauugcaau

SEQ ID NO: 798606 - RNA, 19 nt, Artificial Sequence
  Description of Artificial Sequence: Synthetic oligonucleotide
uccccuacauuaaccucau

SEQ ID NO: 798607 - RNA, 19 nt, Artificial Sequence
  Description of Artificial Sequence: Synthetic oligonucleotide
accgauuccuuugacuaaa

SEQ ID NO: 798608 - RNA, 19 nt, Artificial Sequence
  Description of Artificial Sequence: Synthetic oligonucleotide
uacaguagacuaggacaac

SEQ ID NO: 798609 - RNA, 19 nt, Artificial Sequence
  Description of Artificial Sequence: Synthetic oligonucleotide
cuuagucgccgguauugca

SEQ ID NO: 798610 - RNA, 19 nt, Artificial Sequence
  Description of Artificial Sequence: Synthetic oligonucleotide
ucuaaccaaucaccacauu

SEQ ID NO: 798611 - RNA, 19 nt, Artificial Sequence
  Description of Artificial Sequence: Synthetic oligonucleotide
uugacgcguucucugucau

SEQ ID NO: 798612 - RNA, 19 nt, Artificial Sequence
  Description of Artificial Sequence: Synthetic oligonucleotide
guguuacagucugauacuc

SEQ ID NO: 798613 - RNA, 19 nt, Artificial Sequence
  Description of Artificial Sequence: Synthetic oligonucleotide
cuaucacuaucugcaggac

SEQ ID NO: 798614 - RNA, 19 nt, Artificial Sequence
  Description of Artificial Sequence: Synthetic oligonucleotide
caccaacccagggaguacc

SEQ ID NO: 798615 - RNA, 19 nt, Artificial Sequence
  Description of Artificial Sequence: Synthetic oligonucleotide
agcuuguaguccccuuccu

SEQ ID NO: 798616 - RNA, 19 nt, Artificial Sequence
  Description of Artificial Sequence: Synthetic oligonucleotide
cugcuucgugugaagacca

SEQ ID NO: 798617 - RNA, 19 nt, Artificial Sequence
  Description of Artificial Sequence: Synthetic oligonucleotide
aaggcuuaucguguuccuu

SEQ ID NO: 798618 - RNA, 19 nt, Artificial Sequence
  Description of Artificial Sequence: Synthetic oligonucleotide
gaagggccuagguacaaau

SEQ ID NO: 798619 - RNA, 19 nt, Artificial Sequence
  Description of Artificial Sequence: Synthetic oligonucleotide
gccuacaguagacuaggac

SEQ ID NO: 798620 - RNA, 19 nt, Artificial Sequence
  Description of Artificial Sequence: Synthetic oligonucleotide
ugggcuccucacacgcuca

SEQ ID NO: 798621 - RNA, 19 nt, Artificial Sequence
  Description of Artificial Sequence: Synthetic oligonucleotide
agccgucuagguaaaagau

SEQ ID NO: 798622 - RNA, 19 nt, Artificial Sequence
  Description of Artificial Sequence: Synthetic oligonucleotide
aagaugcuugucagagcga

SEQ ID NO: 798623 - RNA, 19 nt, Artificial Sequence
  Description of Artificial Sequence: Synthetic oligonucleotide
aaagggcaagaaacucccu

SEQ ID NO: 798624 - RNA, 19 nt, Artificial Sequence
  Description of Artificial Sequence: Synthetic oligonucleotide
ucgccgguauugcaaugaa

SEQ ID NO: 798625 - RNA, 19 nt, Artificial Sequence
  Description of Artificial Sequence: Synthetic oligonucleotide
gguacaaauguggccaaga

SEQ ID NO: 798626 - RNA, 19 nt, Artificial Sequence
  Description of Artificial Sequence: Synthetic oligonucleotide
cuaaacaagucggucugaa

SEQ ID NO: 798627 - RNA, 19 nt, Artificial Sequence
  Description of Artificial Sequence: Synthetic oligonucleotide
uccucuccggaccuuccua

SEQ ID NO: 798628 - RNA, 19 nt, Artificial Sequence
  Description of Artificial Sequence: Synthetic oligonucleotide
aacucggaggaagcacccu

SEQ ID NO: 798629 - RNA, 19 nt, Artificial Sequence
  Description of Artificial Sequence: Synthetic oligonucleotide
ggguguguggagaugccag

SEQ ID NO: 798630 - RNA, 19 nt, Artificial Sequence
  Description of Artificial Sequence: Synthetic oligonucleotide
agccagccuacacuucacu

SEQ ID NO: 798631 - RNA, 19 nt, Artificial Sequence
  Description of Artificial Sequence: Synthetic oligonucleotide
uguggccagagggcauggg

SEQ ID NO: 798632 - RNA, 19 nt, Artificial Sequence
  Description of Artificial Sequence: Synthetic oligonucleotide
acaagucggucugaacuaa

SEQ ID NO: 798633 - RNA, 19 nt, Artificial Sequence
  Description of Artificial Sequence: Synthetic oligonucleotide
ccccuuccuaaaaugaauc

SEQ ID NO: 798634 - RNA, 19 nt, Artificial Sequence
  Description of Artificial Sequence: Synthetic oligonucleotide
guauaacuucguuaccaau

SEQ ID NO: 798635 - RNA, 19 nt, Artificial Sequence
  Description of Artificial Sequence: Synthetic oligonucleotide
cuccucacacgcucacaug

SEQ ID NO: 798636 - RNA, 19 nt, Artificial Sequence
  Description of Artificial Sequence: Synthetic oligonucleotide
agucgccgguauugcaaug

SEQ ID NO: 798637 - RNA, 19 nt, Artificial Sequence
  Description of Artificial Sequence: Synthetic oligonucleotide
ugccgaugggagguguaca

SEQ ID NO: 798638 - RNA, 19 nt, Artificial Sequence
  Description of Artificial Sequence: Synthetic oligonucleotide
ucguuuccuccagccagcc

SEQ ID NO: 798639 - RNA, 19 nt, Artificial Sequence
  Description of Artificial Sequence: Synthetic oligonucleotide
gccgucuagguaaaagaug

SEQ ID NO: 798640 - RNA, 19 nt, Artificial Sequence
  Description of Artificial Sequence: Synthetic oligonucleotide
agcauguauaaggcacggu

SEQ ID NO: 798641 - RNA, 19 nt, Artificial Sequence
  Description of Artificial Sequence: Synthetic oligonucleotide
aggcacggugugagaaagc

SEQ ID NO: 798642 - RNA, 19 nt, Artificial Sequence
  Description of Artificial Sequence: Synthetic oligonucleotide
ugcuucgugugaagaccau

SEQ ID NO: 798643 - RNA, 19 nt, Artificial Sequence
  Description of Artificial Sequence: Synthetic oligonucleotide
ggaauacugguucucguau

SEQ ID NO: 798644 - RNA, 19 nt, Artificial Sequence
  Description of Artificial Sequence: Synthetic oligonucleotide
cagaacacaagagccaccu

SEQ ID NO: 798645 - RNA, 19 nt, Artificial Sequence
  Description of Artificial Sequence: Synthetic oligonucleotide
accacgaaaaucagaccuu

SEQ ID NO: 798646 - RNA, 19 nt, Artificial Sequence
  Description of Artificial Sequence: Synthetic oligonucleotide
gucgccgguauugcaauga

SEQ ID NO: 798647 - RNA, 19 nt, Artificial Sequence
  Description of Artificial Sequence: Synthetic oligonucleotide
gcuagugaaauggaaggua

SEQ ID NO: 798648 - RNA, 19 nt, Artificial Sequence
  Description of Artificial Sequence: Synthetic oligonucleotide
ccuuugacuaaaacaagcu

SEQ ID NO: 798649 - RNA, 19 nt, Artificial Sequence
  Description of Artificial Sequence: Synthetic oligonucleotide
gcggcuucggggaagaguc

SEQ ID NO: 798650 - RNA, 19 nt, Artificial Sequence
  Description of Artificial Sequence: Synthetic oligonucleotide
gaccugucuggcuccagcu

SEQ ID NO: 798651 - RNA, 19 nt, Artificial Sequence
  Description of Artificial Sequence: Synthetic oligonucleotide
gggccuagguacaaaugug

SEQ ID NO: 798652 - RNA, 19 nt, Artificial Sequence
  Description of Artificial Sequence: Synthetic oligonucleotide
gucuagguaaaagaugcuu

SEQ ID NO: 798653 - RNA, 19 nt, Artificial Sequence
  Description of Artificial Sequence: Synthetic oligonucleotide
ggucggauuuuguccuggc

SEQ ID NO: 798654 - RNA, 19 nt, Artificial Sequence
  Description of Artificial Sequence: Synthetic oligonucleotide
accuuccuaucuaucacua

SEQ ID NO: 798655 - RNA, 19 nt, Artificial Sequence
  Description of Artificial Sequence: Synthetic oligonucleotide
cugucuggcuccagcucuc

SEQ ID NO: 798656 - RNA, 19 nt, Artificial Sequence
  Description of Artificial Sequence: Synthetic oligonucleotide
cucuccggaccuuccuauc

SEQ ID NO: 798657 - RNA, 19 nt, Artificial Sequence
  Description of Artificial Sequence: Synthetic oligonucleotide
ggcuuaucguguuccuuga

SEQ ID NO: 798658 - RNA, 19 nt, Artificial Sequence
  Description of Artificial Sequence: Synthetic oligonucleotide
ccaggccuucguaaagccc

SEQ ID NO: 798659 - RNA, 19 nt, Artificial Sequence
  Description of Artificial Sequence: Synthetic oligonucleotide
gugaaauggaagguagcau

SEQ ID NO: 798660 - RNA, 19 nt, Artificial Sequence
  Description of Artificial Sequence: Synthetic oligonucleotide
cacaagagccaccucacuu

SEQ ID NO: 798661 - RNA, 19 nt, Artificial Sequence
  Description of Artificial Sequence: Synthetic oligonucleotide
guccccuuccuaaaaugaa

SEQ ID NO: 798662 - RNA, 19 nt, Artificial Sequence
  Description of Artificial Sequence: Synthetic oligonucleotide
cguuaccaaugaacaaggc

SEQ ID NO: 798663 - RNA, 19 nt, Artificial Sequence
  Description of Artificial Sequence: Synthetic oligonucleotide
ccuacacuucacuguggac

SEQ ID NO: 798664 - RNA, 19 nt, Artificial Sequence
  Description of Artificial Sequence: Synthetic oligonucleotide
cauuaggaagauccuguuu

SEQ ID NO: 798665 - RNA, 19 nt, Artificial Sequence
  Description of Artificial Sequence: Synthetic oligonucleotide
augucgccacaaaggucgg

SEQ ID NO: 798666 - RNA, 19 nt, Artificial Sequence
  Description of Artificial Sequence: Synthetic oligonucleotide
ugucgccacaaaggucgga

SEQ ID NO: 798667 - RNA, 19 nt, Artificial Sequence
  Description of Artificial Sequence: Synthetic oligonucleotide
caccgauuccuuugacuaa

SEQ ID NO: 798668 - RNA, 19 nt, Artificial Sequence
  Description of Artificial Sequence: Synthetic oligonucleotide
ccuuccuaaaaugaaucaa

SEQ ID NO: 798669 - RNA, 19 nt, Artificial Sequence
  Description of Artificial Sequence: Synthetic oligonucleotide
gcugcuagcuuuggcacga

SEQ ID NO: 798670 - RNA, 19 nt, Artificial Sequence
  Description of Artificial Sequence: Synthetic oligonucleotide
ccacaaaggucggauuuug

SEQ ID NO: 798671 - RNA, 19 nt, Artificial Sequence
  Description of Artificial Sequence: Synthetic oligonucleotide
ugacgcguucucugucauu

SEQ ID NO: 798672 - RNA, 19 nt, Artificial Sequence
  Description of Artificial Sequence: Synthetic oligonucleotide
ggccaagaguuguguggcc

SEQ ID NO: 798673 - RNA, 19 nt, Artificial Sequence
  Description of Artificial Sequence: Synthetic oligonucleotide
acacuucacuguggaccag

SEQ ID NO: 798674 - RNA, 19 nt, Artificial Sequence
  Description of Artificial Sequence: Synthetic oligonucleotide
cacaaaggucggauuuugu

SEQ ID NO: 798675 - RNA, 19 nt, Artificial Sequence
  Description of Artificial Sequence: Synthetic oligonucleotide
guaagccgagcuugucugu

SEQ ID NO: 798676 - RNA, 19 nt, Artificial Sequence
  Description of Artificial Sequence: Synthetic oligonucleotide
gccaagaguuguguggcca

SEQ ID NO: 798677 - RNA, 19 nt, Artificial Sequence
  Description of Artificial Sequence: Synthetic oligonucleotide
ccuagcaccaggccaggca

SEQ ID NO: 798678 - RNA, 19 nt, Artificial Sequence
  Description of Artificial Sequence: Synthetic oligonucleotide
gcuuguaguccccuuccua

SEQ ID NO: 798679 - RNA, 19 nt, Artificial Sequence
  Description of Artificial Sequence: Synthetic oligonucleotide
gggagguguacaauuucaa

SEQ ID NO: 798680 - RNA, 19 nt, Artificial Sequence
  Description of Artificial Sequence: Synthetic oligonucleotide
ggucaccgauuccuuugac

SEQ ID NO: 798681 - RNA, 19 nt, Artificial Sequence
  Description of Artificial Sequence: Synthetic oligonucleotide
ggcacggugugagaaagcu

SEQ ID NO: 798682 - RNA, 19 nt, Artificial Sequence
  Description of Artificial Sequence: Synthetic oligonucleotide
gccgaugggagguguacaa

SEQ ID NO: 798683 - RNA, 19 nt, Artificial Sequence
  Description of Artificial Sequence: Synthetic oligonucleotide
gggaauguaagccgagcuu

SEQ ID NO: 798684 - RNA, 19 nt, Artificial Sequence
  Description of Artificial Sequence: Synthetic oligonucleotide
gucgccacaaaggucggau

SEQ ID NO: 798685 - RNA, 19 nt, Artificial Sequence
  Description of Artificial Sequence: Synthetic oligonucleotide
cacugaaauccaacaggau

SEQ ID NO: 798686 - RNA, 19 nt, Artificial Sequence
  Description of Artificial Sequence: Synthetic oligonucleotide
ccacauuuacugcagccua

SEQ ID NO: 798687 - RNA, 19 nt, Artificial Sequence
  Description of Artificial Sequence: Synthetic oligonucleotide
gggaagaguccuggccucc

SEQ ID NO: 798688 - RNA, 19 nt, Artificial Sequence
  Description of Artificial Sequence: Synthetic oligonucleotide
uucuagccuggagcugcuc

SEQ ID NO: 798689 - RNA, 19 nt, Artificial Sequence
  Description of Artificial Sequence: Synthetic oligonucleotide
cuggacuuagucgccggua

SEQ ID NO: 798690 - RNA, 19 nt, Artificial Sequence
  Description of Artificial Sequence: Synthetic oligonucleotide
agccuacaguagacuagga

SEQ ID NO: 798691 - RNA, 19 nt, Artificial Sequence
  Description of Artificial Sequence: Synthetic oligonucleotide
gcacggugugagaaagcug

SEQ ID NO: 798692 - RNA, 19 nt, Artificial Sequence
  Description of Artificial Sequence: Synthetic oligonucleotide
gguguacaauuucaacauu

SEQ ID NO: 798693 - RNA, 19 nt, Artificial Sequence
  Description of Artificial Sequence: Synthetic oligonucleotide
caugcaccagagccgucua

SEQ ID NO: 798694 - RNA, 19 nt, Artificial Sequence
  Description of Artificial Sequence: Synthetic oligonucleotide
gcuuaucguguuccuugaa

SEQ ID NO: 798695 - RNA, 19 nt, Artificial Sequence
  Description of Artificial Sequence: Synthetic oligonucleotide
ccucacacgcucacaugca

SEQ ID NO: 798696 - RNA, 19 nt, Artificial Sequence
  Description of Artificial Sequence: Synthetic oligonucleotide
ucccugccgaugggaggug

SEQ ID NO: 798697 - RNA, 19 nt, Artificial Sequence
  Description of Artificial Sequence: Synthetic oligonucleotide
gcuucggggaagaguccug

SEQ ID NO: 798698 - RNA, 19 nt, Artificial Sequence
  Description of Artificial Sequence: Synthetic oligonucleotide
cggugugagaaagcugccc

SEQ ID NO: 798699 - RNA, 19 nt, Artificial Sequence
  Description of Artificial Sequence: Synthetic oligonucleotide
gagccaccucacuucguuu

SEQ ID NO: 798700 - RNA, 19 nt, Artificial Sequence
  Description of Artificial Sequence: Synthetic oligonucleotide
gugccucauugacgcguuc

SEQ ID NO: 798701 - RNA, 19 nt, Artificial Sequence
  Description of Artificial Sequence: Synthetic oligonucleotide
gagcgaaguuuagcaccaa

SEQ ID NO: 798702 - RNA, 19 nt, Artificial Sequence
  Description of Artificial Sequence: Synthetic oligonucleotide
aggccuucguaaagcccau

SEQ ID NO: 798703 - RNA, 19 nt, Artificial Sequence
  Description of Artificial Sequence: Synthetic oligonucleotide
cgccgguauugcaaugaac

SEQ ID NO: 798704 - RNA, 19 nt, Artificial Sequence
  Description of Artificial Sequence: Synthetic oligonucleotide
cccgugccucauugacgcg

SEQ ID NO: 798705 - RNA, 19 nt, Artificial Sequence
  Description of Artificial Sequence: Synthetic oligonucleotide
ccgguauugcaaugaacau

SEQ ID NO: 798706 - RNA, 19 nt, Artificial Sequence
  Description of Artificial Sequence: Synthetic oligonucleotide
ccgauuccuuugacuaaaa

SEQ ID NO: 798707 - RNA, 19 nt, Artificial Sequence
  Description of Artificial Sequence: Synthetic oligonucleotide
ggacuuagucgccgguauu

SEQ ID NO: 798708 - RNA, 19 nt, Artificial Sequence
  Description of Artificial Sequence: Synthetic oligonucleotide
cgaugggagguguacaauu

SEQ ID NO: 798709 - RNA, 19 nt, Artificial Sequence
  Description of Artificial Sequence: Synthetic oligonucleotide
ccuuccuaucuaucacuau

SEQ ID NO: 798710 - RNA, 19 nt, Artificial Sequence
  Description of Artificial Sequence: Synthetic oligonucleotide
ccucauugacgcguucucu

SEQ ID NO: 798711 - RNA, 19 nt, Artificial Sequence
  Description of Artificial Sequence: Synthetic oligonucleotide
gcuucgugugaagaccauu

SEQ ID NO: 798712 - RNA, 19 nt, Artificial Sequence
  Description of Artificial Sequence: Synthetic oligonucleotide
ggccuucguaaagcccauc

SEQ ID NO: 798713 - RNA, 19 nt, Artificial Sequence
  Description of Artificial Sequence: Synthetic oligonucleotide
ccucuccggaccuuccuau

SEQ ID NO: 798714 - RNA, 19 nt, Artificial Sequence
  Description of Artificial Sequence: Synthetic oligonucleotide
cgguauugcaaugaacauu

SEQ ID NO: 798715 - RNA, 19 nt, Artificial Sequence
  Description of Artificial Sequence: Synthetic oligonucleotide
cgcguucucugucauuacu

SEQ ID NO: 798716 - RNA, 19 nt, Artificial Sequence
  Description of Artificial Sequence: Synthetic oligonucleotide
ccugccgaugggaggugua

SEQ ID NO: 798717 - RNA, 19 nt, Artificial Sequence
  Description of Artificial Sequence: Synthetic oligonucleotide
cacagggaauggguugcuu

SEQ ID NO: 798718 - RNA, 19 nt, Artificial Sequence
  Description of Artificial Sequence: Synthetic oligonucleotide
cgccacaaaggucggauuu

SEQ ID NO: 798719 - RNA, 19 nt, Artificial Sequence
  Description of Artificial Sequence: Synthetic oligonucleotide
ccgugccucauugacgcgu

SEQ ID NO: 798720 - RNA, 19 nt, Artificial Sequence
  Description of Artificial Sequence: Synthetic oligonucleotide
ccgaugggagguguacaau

SEQ ID NO: 798721 - RNA, 19 nt, Artificial Sequence
  Description of Artificial Sequence: Synthetic oligonucleotide
cugcuagcuuuggcacgau

SEQ ID NO: 798722 - RNA, 19 nt, Artificial Sequence
  Description of Artificial Sequence: Synthetic oligonucleotide
ccccuacauuaaccucaua

SEQ ID NO: 798723 - RNA, 19 nt, Artificial Sequence
  Description of Artificial Sequence: Synthetic oligonucleotide
uacaaaucuauccagugca

SEQ ID NO: 798724 - RNA, 19 nt, Artificial Sequence
  Description of Artificial Sequence: Synthetic oligonucleotide
aagauuuucagcugguggu

SEQ ID NO: 798725 - RNA, 19 nt, Artificial Sequence
  Description of Artificial Sequence: Synthetic oligonucleotide
ucaucguacaaaucuaucc

SEQ ID NO: 798726 - RNA, 19 nt, Artificial Sequence
  Description of Artificial Sequence: Synthetic oligonucleotide
ugcgccaugacgcugagcc

SEQ ID NO: 798727 - RNA, 19 nt, Artificial Sequence
  Description of Artificial Sequence: Synthetic oligonucleotide
auauguugaccacaucacc

SEQ ID NO: 798728 - RNA, 19 nt, Artificial Sequence
  Description of Artificial Sequence: Synthetic oligonucleotide
aauucggcagaacuuccgg

SEQ ID NO: 798729 - RNA, 19 nt, Artificial Sequence
  Description of Artificial Sequence: Synthetic oligonucleotide
auagauguaaagccagcgg

SEQ ID NO: 798730 - RNA, 19 nt, Artificial Sequence
  Description of Artificial Sequence: Synthetic oligonucleotide
uagauguaaagccagcggu

SEQ ID NO: 798731 - RNA, 19 nt, Artificial Sequence
  Description of Artificial Sequence: Synthetic oligonucleotide
uauccagugcagaugggcg

SEQ ID NO: 798732 - RNA, 19 nt, Artificial Sequence
  Description of Artificial Sequence: Synthetic oligonucleotide
uugucaauucggcagaacu

SEQ ID NO: 798733 - RNA, 19 nt, Artificial Sequence
  Description of Artificial Sequence: Synthetic oligonucleotide
aaaucuauccagugcagau

SEQ ID NO: 798734 - RNA, 19 nt, Artificial Sequence
  Description of Artificial Sequence: Synthetic oligonucleotide
agagagaccacaucuaccu

SEQ ID NO: 798735 - RNA, 19 nt, Artificial Sequence
  Description of Artificial Sequence: Synthetic oligonucleotide
aggggagaaacucaagccg

SEQ ID NO: 798736 - RNA, 19 nt, Artificial Sequence
  Description of Artificial Sequence: Synthetic oligonucleotide
gaugcaauggagcucgaug

SEQ ID NO: 798737 - RNA, 19 nt, Artificial Sequence
  Description of Artificial Sequence: Synthetic oligonucleotide
uggcucaucguacaaaucu

SEQ ID NO: 798738 - RNA, 19 nt, Artificial Sequence
  Description of Artificial Sequence: Synthetic oligonucleotide
auggguuauucuccaaacc

SEQ ID NO: 798739 - RNA, 19 nt, Artificial Sequence
  Description of Artificial Sequence: Synthetic oligonucleotide
uuuucggcuucgaaugcgg

SEQ ID NO: 798740 - RNA, 19 nt, Artificial Sequence
  Description of Artificial Sequence: Synthetic oligonucleotide
ucuccaaaccaucaaaguu

SEQ ID NO: 798741 - RNA, 19 nt, Artificial Sequence
  Description of Artificial Sequence: Synthetic oligonucleotide
aauuggaguccgugcacuc

SEQ ID NO: 798742 - RNA, 19 nt, Artificial Sequence
  Description of Artificial Sequence: Synthetic oligonucleotide
ucuguagggcccaaacugc

SEQ ID NO: 798743 - RNA, 19 nt, Artificial Sequence
  Description of Artificial Sequence: Synthetic oligonucleotide
gaugacagcguuguacggg

SEQ ID NO: 798744 - RNA, 19 nt, Artificial Sequence
  Description of Artificial Sequence: Synthetic oligonucleotide
ucugagucaucuuggggag

SEQ ID NO: 798745 - RNA, 19 nt, Artificial Sequence
  Description of Artificial Sequence: Synthetic oligonucleotide
uauggguuauucuccaaac

SEQ ID NO: 798746 - RNA, 19 nt, Artificial Sequence
  Description of Artificial Sequence: Synthetic oligonucleotide
agaauuggaguccgugcac

SEQ ID NO: 798747 - RNA, 19 nt, Artificial Sequence
  Description of Artificial Sequence: Synthetic oligonucleotide
ugagcgacagcgagcagag

SEQ ID NO: 798748 - RNA, 19 nt, Artificial Sequence
  Description of Artificial Sequence: Synthetic oligonucleotide
aagccgagucacucggucg

SEQ ID NO: 798749 - RNA, 19 nt, Artificial Sequence
  Description of Artificial Sequence: Synthetic oligonucleotide
uaacaguccccgcugggag

SEQ ID NO: 798750 - RNA, 19 nt, Artificial Sequence
  Description of Artificial Sequence: Synthetic oligonucleotide
ucaauucggcagaacuucc

SEQ ID NO: 798751 - RNA, 19 nt, Artificial Sequence
  Description of Artificial Sequence: Synthetic oligonucleotide
ucaaagauuuucagcuggu

SEQ ID NO: 798752 - RNA, 19 nt, Artificial Sequence
  Description of Artificial Sequence: Synthetic oligonucleotide
agccgagucacucggucgc

SEQ ID NO: 798753 - RNA, 19 nt, Artificial Sequence
  Description of Artificial Sequence: Synthetic oligonucleotide
ggacuugucaauucggcag

SEQ ID NO: 798754 - RNA, 19 nt, Artificial Sequence
  Description of Artificial Sequence: Synthetic oligonucleotide
gaaaccccgucucugaaca

SEQ ID NO: 798755 - RNA, 19 nt, Artificial Sequence
  Description of Artificial Sequence: Synthetic oligonucleotide
auucccgcggcuaacaguc

SEQ ID NO: 798756 - RNA, 19 nt, Artificial Sequence
  Description of Artificial Sequence: Synthetic oligonucleotide
gaugccgccacugugcccc

SEQ ID NO: 798757 - RNA, 19 nt, Artificial Sequence
  Description of Artificial Sequence: Synthetic oligonucleotide
cuggacuugucaauucggc

SEQ ID NO: 798758 - RNA, 19 nt, Artificial Sequence
  Description of Artificial Sequence: Synthetic oligonucleotide
guuugcuccggguuuucgg

SEQ ID NO: 798759 - RNA, 19 nt, Artificial Sequence
  Description of Artificial Sequence: Synthetic oligonucleotide
ucccucgcaagucaaagau

SEQ ID NO: 798760 - RNA, 19 nt, Artificial Sequence
  Description of Artificial Sequence: Synthetic oligonucleotide
ugucaauucggcagaacuu

SEQ ID NO: 798761 - RNA, 19 nt, Artificial Sequence
  Description of Artificial Sequence: Synthetic oligonucleotide
caucguacaaaucuaucca

SEQ ID NO: 798762 - RNA, 19 nt, Artificial Sequence
  Description of Artificial Sequence: Synthetic oligonucleotide
uucugagcgacagcgagca

SEQ ID NO: 798763 - RNA, 19 nt, Artificial Sequence
  Description of Artificial Sequence: Synthetic oligonucleotide
gagucacucggucgcagcg

SEQ ID NO: 798764 - RNA, 19 nt, Artificial Sequence
  Description of Artificial Sequence: Synthetic oligonucleotide
uggacuugucaauucggca

SEQ ID NO: 798765 - RNA, 19 nt, Artificial Sequence
  Description of Artificial Sequence: Synthetic oligonucleotide
ucaaaggggcagaauugga

SEQ ID NO: 798766 - RNA, 19 nt, Artificial Sequence
  Description of Artificial Sequence: Synthetic oligonucleotide
agccgagacuucuuggcgg

SEQ ID NO: 798767 - RNA, 19 nt, Artificial Sequence
  Description of Artificial Sequence: Synthetic oligonucleotide
caauucggcagaacuuccg

SEQ ID NO: 798768 - RNA, 19 nt, Artificial Sequence
  Description of Artificial Sequence: Synthetic oligonucleotide
cucaagccgagucacucgg

SEQ ID NO: 798769 - RNA, 19 nt, Artificial Sequence
  Description of Artificial Sequence: Synthetic oligonucleotide
agaguaguucagucuguag

SEQ ID NO: 798770 - RNA, 19 nt, Artificial Sequence
  Description of Artificial Sequence: Synthetic oligonucleotide
acucaagccgagucacucg

SEQ ID NO: 798771 - RNA, 19 nt, Artificial Sequence
  Description of Artificial Sequence: Synthetic oligonucleotide
uuucggcuucgaaugcggg

SEQ ID NO: 798772 - RNA, 19 nt, Artificial Sequence
  Description of Artificial Sequence: Synthetic oligonucleotide
ugcgggaggguucuggacu

SEQ ID NO: 798773 - RNA, 19 nt, Artificial Sequence
  Description of Artificial Sequence: Synthetic oligonucleotide
aguugggcucagcggaccc

SEQ ID NO: 798774 - RNA, 19 nt, Artificial Sequence
  Description of Artificial Sequence: Synthetic oligonucleotide
aaccccgucucugaacagg

SEQ ID NO: 798775 - RNA, 19 nt, Artificial Sequence
  Description of Artificial Sequence: Synthetic oligonucleotide
ucgguuagcagcagcucug

SEQ ID NO: 798776 - RNA, 19 nt, Artificial Sequence
  Description of Artificial Sequence: Synthetic oligonucleotide
gagccgagacuucuuggcg

SEQ ID NO: 798777 - RNA, 19 nt, Artificial Sequence
  Description of Artificial Sequence: Synthetic oligonucleotide
ucugacgcucgccucuucc

SEQ ID NO: 798778 - RNA, 19 nt, Artificial Sequence
  Description of Artificial Sequence: Synthetic oligonucleotide
ggguuuucggcuucgaaug

SEQ ID NO: 798779 - RNA, 19 nt, Artificial Sequence
  Description of Artificial Sequence: Synthetic oligonucleotide
uguaaagccagcgguucug

SEQ ID NO: 798780 - RNA, 19 nt, Artificial Sequence
  Description of Artificial Sequence: Synthetic oligonucleotide
cagagagaccacaucuacc

SEQ ID NO: 798781 - RNA, 19 nt, Artificial Sequence
  Description of Artificial Sequence: Synthetic oligonucleotide
accuccuaaugccaggugu

SEQ ID NO: 798782 - RNA, 19 nt, Artificial Sequence
  Description of Artificial Sequence: Synthetic oligonucleotide
uccucgguuagcagcagcu

SEQ ID NO: 798783 - RNA, 19 nt, Artificial Sequence
  Description of Artificial Sequence: Synthetic oligonucleotide
uuugcugugucuuccccau

SEQ ID NO: 798784 - RNA, 19 nt, Artificial Sequence
  Description of Artificial Sequence: Synthetic oligonucleotide
ugucacccaaucgagggca

SEQ ID NO: 798785 - RNA, 19 nt, Artificial Sequence
  Description of Artificial Sequence: Synthetic oligonucleotide
augacagcguuguacgggu

SEQ ID NO: 798786 - RNA, 19 nt, Artificial Sequence
  Description of Artificial Sequence: Synthetic oligonucleotide
ucgcaagucaaagauuuuc

SEQ ID NO: 798787 - RNA, 19 nt, Artificial Sequence
  Description of Artificial Sequence: Synthetic oligonucleotide
uucaccucccauuccuggc

SEQ ID NO: 798788 - RNA, 19 nt, Artificial Sequence
  Description of Artificial Sequence: Synthetic oligonucleotide
ugucccucgcaagucaaag

SEQ ID NO: 798789 - RNA, 19 nt, Artificial Sequence
  Description of Artificial Sequence: Synthetic oligonucleotide
uucagccgucucaaguuug

SEQ ID NO: 798790 - RNA, 19 nt, Artificial Sequence
  Description of Artificial Sequence: Synthetic oligonucleotide
ucgcuguggagcuucggcc

SEQ ID NO: 798791 - RNA, 19 nt, Artificial Sequence
  Description of Artificial Sequence: Synthetic oligonucleotide
gucaauucggcagaacuuc

SEQ ID NO: 798792 - RNA, 19 nt, Artificial Sequence
  Description of Artificial Sequence: Synthetic oligonucleotide
guuuucggcuucgaaugcg

SEQ ID NO: 798793 - RNA, 19 nt, Artificial Sequence
  Description of Artificial Sequence: Synthetic oligonucleotide
cucaucguacaaaucuauc

SEQ ID NO: 798794 - RNA, 19 nt, Artificial Sequence
  Description of Artificial Sequence: Synthetic oligonucleotide
gccgucucaaguuugcucc

SEQ ID NO: 798795 - RNA, 19 nt, Artificial Sequence
  Description of Artificial Sequence: Synthetic oligonucleotide
agucuguagggcccaaacu

SEQ ID NO: 798796 - RNA, 19 nt, Artificial Sequence
  Description of Artificial Sequence: Synthetic oligonucleotide
agcguuguacggguucugc

SEQ ID NO: 798797 - RNA, 19 nt, Artificial Sequence
  Description of Artificial Sequence: Synthetic oligonucleotide
auuggaguccgugcacucg

SEQ ID NO: 798798 - RNA, 19 nt, Artificial Sequence
  Description of Artificial Sequence: Synthetic oligonucleotide
gagccggugggugagguag

SEQ ID NO: 798799 - RNA, 19 nt, Artificial Sequence
  Description of Artificial Sequence: Synthetic oligonucleotide
cuguagggcccaaacugcc

SEQ ID NO: 798800 - RNA, 19 nt, Artificial Sequence
  Description of Artificial Sequence: Synthetic oligonucleotide
cuguccuagaguaguucag

SEQ ID NO: 798801 - RNA, 19 nt, Artificial Sequence
  Description of Artificial Sequence: Synthetic oligonucleotide
gaaugucccucgcaaguca

SEQ ID NO: 798802 - RNA, 19 nt, Artificial Sequence
  Description of Artificial Sequence: Synthetic oligonucleotide
ccggaaguggccauguacg

SEQ ID NO: 798803 - RNA, 19 nt, Artificial Sequence
  Description of Artificial Sequence: Synthetic oligonucleotide
uucgaaugcgggaggguuc

SEQ ID NO: 798804 - RNA, 19 nt, Artificial Sequence
  Description of Artificial Sequence: Synthetic oligonucleotide
cucaggggcuggaaugucc

SEQ ID NO: 798805 - RNA, 19 nt, Artificial Sequence
  Description of Artificial Sequence: Synthetic oligonucleotide
uccaaacagaugagcucug

SEQ ID NO: 798806 - RNA, 19 nt, Artificial Sequence
  Description of Artificial Sequence: Synthetic oligonucleotide
ucucccuguccuagaguag

SEQ ID NO: 798807 - RNA, 19 nt, Artificial Sequence
  Description of Artificial Sequence: Synthetic oligonucleotide
aaaccccgucucugaacag

SEQ ID NO: 798808 - RNA, 19 nt, Artificial Sequence
  Description of Artificial Sequence: Synthetic oligonucleotide
ugcaccacggugacacaga

SEQ ID NO: 798809 - RNA, 19 nt, Artificial Sequence
  Description of Artificial Sequence: Synthetic oligonucleotide
gcagaauuggaguccgugc

SEQ ID NO: 798810 - RNA, 19 nt, Artificial Sequence
  Description of Artificial Sequence: Synthetic oligonucleotide
gacagcguuguacggguuc

SEQ ID NO: 798811 - RNA, 19 nt, Artificial Sequence
  Description of Artificial Sequence: Synthetic oligonucleotide
agguggaugacagcguugu

SEQ ID NO: 798812 - RNA, 19 nt, Artificial Sequence
  Description of Artificial Sequence: Synthetic oligonucleotide
guaguucagucuguagggc

SEQ ID NO: 798813 - RNA, 19 nt, Artificial Sequence
  Description of Artificial Sequence: Synthetic oligonucleotide
augcgggaggguucuggac

SEQ ID NO: 798814 - RNA, 19 nt, Artificial Sequence
  Description of Artificial Sequence: Synthetic oligonucleotide
accaucaaaguugggcuca

SEQ ID NO: 798815 - RNA, 19 nt, Artificial Sequence
  Description of Artificial Sequence: Synthetic oligonucleotide
cuguggaauccacugccac

SEQ ID NO: 798816 - RNA, 19 nt, Artificial Sequence
  Description of Artificial Sequence: Synthetic oligonucleotide
agacacggugccauuacug

SEQ ID NO: 798817 - RNA, 19 nt, Artificial Sequence
  Description of Artificial Sequence: Synthetic oligonucleotide
ugcccauauguugaccaca

SEQ ID NO: 798818 - RNA, 19 nt, Artificial Sequence
  Description of Artificial Sequence: Synthetic oligonucleotide
cuaaugccaggugucuccc

SEQ ID NO: 798819 - RNA, 19 nt, Artificial Sequence
  Description of Artificial Sequence: Synthetic oligonucleotide
guccuagaguaguucaguc

SEQ ID NO: 798820 - RNA, 19 nt, Artificial Sequence
  Description of Artificial Sequence: Synthetic oligonucleotide
augacgcugagccguccag

SEQ ID NO: 798821 - RNA, 19 nt, Artificial Sequence
  Description of Artificial Sequence: Synthetic oligonucleotide
acgcugagccguccagccc

SEQ ID NO: 798822 - RNA, 19 nt, Artificial Sequence
  Description of Artificial Sequence: Synthetic oligonucleotide
gacacggugccauuacugu

SEQ ID NO: 798823 - RNA, 19 nt, Artificial Sequence
  Description of Artificial Sequence: Synthetic oligonucleotide
acggugccauuacuguguc

SEQ ID NO: 798824 - RNA, 19 nt, Artificial Sequence
  Description of Artificial Sequence: Synthetic oligonucleotide
ccgacgaccuccuaaugcc

SEQ ID NO: 798825 - RNA, 19 nt, Artificial Sequence
  Description of Artificial Sequence: Synthetic oligonucleotide
ucgaaugcgggaggguucu

SEQ ID NO: 798826 - RNA, 19 nt, Artificial Sequence
  Description of Artificial Sequence: Synthetic oligonucleotide
cagguaggucagaaacccc

SEQ ID NO: 798827 - RNA, 19 nt, Artificial Sequence
  Description of Artificial Sequence: Synthetic oligonucleotide
cucagcggacccagggacc

SEQ ID NO: 798828 - RNA, 19 nt, Artificial Sequence
  Description of Artificial Sequence: Synthetic oligonucleotide
agucacucggucgcagcgg

SEQ ID NO: 798829 - RNA, 19 nt, Artificial Sequence
  Description of Artificial Sequence: Synthetic oligonucleotide
ggugaugccgccacugugc

SEQ ID NO: 798830 - RNA, 19 nt, Artificial Sequence
  Description of Artificial Sequence: Synthetic oligonucleotide
guagggcccaaacugccuc

SEQ ID NO: 798831 - RNA, 19 nt, Artificial Sequence
  Description of Artificial Sequence: Synthetic oligonucleotide
cuguauggguuauucucca

SEQ ID NO: 798832 - RNA, 19 nt, Artificial Sequence
  Description of Artificial Sequence: Synthetic oligonucleotide
gucacucggucgcagcggc

SEQ ID NO: 798833 - RNA, 19 nt, Artificial Sequence
  Description of Artificial Sequence: Synthetic oligonucleotide
ggaugacagcguuguacgg

SEQ ID NO: 798834 - RNA, 19 nt, Artificial Sequence
  Description of Artificial Sequence: Synthetic oligonucleotide
aaugucccucgcaagucaa

SEQ ID NO: 798835 - RNA, 19 nt, Artificial Sequence
  Description of Artificial Sequence: Synthetic oligonucleotide
gugaugccgccacugugcc

SEQ ID NO: 798836 - RNA, 19 nt, Artificial Sequence
  Description of Artificial Sequence: Synthetic oligonucleotide
cacccaaucgagggcagcc

SEQ ID NO: 798837 - RNA, 19 nt, Artificial Sequence
  Description of Artificial Sequence: Synthetic oligonucleotide
ugacgcucgccucuuccuc

SEQ ID NO: 798838 - RNA, 19 nt, Artificial Sequence
  Description of Artificial Sequence: Synthetic oligonucleotide
caucuuggggagugccgcc

SEQ ID NO: 798839 - RNA, 19 nt, Artificial Sequence
  Description of Artificial Sequence: Synthetic oligonucleotide
uagaguaguucagucugua

SEQ ID NO: 798840 - RNA, 19 nt, Artificial Sequence
  Description of Artificial Sequence: Synthetic oligonucleotide
ugaccccucugagucaucu

SEQ ID NO: 798841 - RNA, 19 nt, Artificial Sequence
  Description of Artificial Sequence: Synthetic oligonucleotide
uuacuguguccgaggugga

SEQ ID NO: 798842 - RNA, 19 nt, Artificial Sequence
  Description of Artificial Sequence: Synthetic oligonucleotide
uuguacggguucugcgcca

SEQ ID NO: 798843 - RNA, 19 nt, Artificial Sequence
  Description of Artificial Sequence: Synthetic oligonucleotide
ucaagccgagucacucggu

SEQ ID NO: 798844 - RNA, 19 nt, Artificial Sequence
  Description of Artificial Sequence: Synthetic oligonucleotide
cagaugggcgggcucucgg

SEQ ID NO: 798845 - RNA, 19 nt, Artificial Sequence
  Description of Artificial Sequence: Synthetic oligonucleotide
gguuuucggcuucgaaugc

SEQ ID NO: 798846 - RNA, 19 nt, Artificial Sequence
  Description of Artificial Sequence: Synthetic oligonucleotide
guucugagcgacagcgagc

SEQ ID NO: 798847 - RNA, 19 nt, Artificial Sequence
  Description of Artificial Sequence: Synthetic oligonucleotide
ugacgcugagccguccagc

SEQ ID NO: 798848 - RNA, 19 nt, Artificial Sequence
  Description of Artificial Sequence: Synthetic oligonucleotide
aaacucaagccgagucacu

SEQ ID NO: 798849 - RNA, 19 nt, Artificial Sequence
  Description of Artificial Sequence: Synthetic oligonucleotide
agcccgcgcauugagagcu

SEQ ID NO: 798850 - RNA, 19 nt, Artificial Sequence
  Description of Artificial Sequence: Synthetic oligonucleotide
cugagcgacagcgagcaga

SEQ ID NO: 798851 - RNA, 19 nt, Artificial Sequence
  Description of Artificial Sequence: Synthetic oligonucleotide
acagcguuguacggguucu

SEQ ID NO: 798852 - RNA, 19 nt, Artificial Sequence
  Description of Artificial Sequence: Synthetic oligonucleotide
uggaguccgugcacucggc

SEQ ID NO: 798853 - RNA, 19 nt, Artificial Sequence
  Description of Artificial Sequence: Synthetic oligonucleotide
gugcacucggccugagagc

SEQ ID NO: 798854 - RNA, 19 nt, Artificial Sequence
  Description of Artificial Sequence: Synthetic oligonucleotide
ccagagagaccacaucuac

SEQ ID NO: 798855 - RNA, 19 nt, Artificial Sequence
  Description of Artificial Sequence: Synthetic oligonucleotide
ccagcccgcgcauugagag

SEQ ID NO: 798856 - RNA, 19 nt, Artificial Sequence
  Description of Artificial Sequence: Synthetic oligonucleotide
gauguccgucugcaguauc

SEQ ID NO: 798857 - RNA, 19 nt, Artificial Sequence
  Description of Artificial Sequence: Synthetic oligonucleotide
uucuuggcggggugcgcgc

SEQ ID NO: 798858 - RNA, 19 nt, Artificial Sequence
  Description of Artificial Sequence: Synthetic oligonucleotide
cuuccggcuccuguauggg

SEQ ID NO: 798859 - RNA, 19 nt, Artificial Sequence
  Description of Artificial Sequence: Synthetic oligonucleotide
cgugcacucggccugagag

SEQ ID NO: 798860 - RNA, 19 nt, Artificial Sequence
  Description of Artificial Sequence: Synthetic oligonucleotide
auguccgucugcaguaucu

SEQ ID NO: 798861 - RNA, 19 nt, Artificial Sequence
  Description of Artificial Sequence: Synthetic oligonucleotide
gguuggaagggagccuugg

SEQ ID NO: 798862 - RNA, 19 nt, Artificial Sequence
  Description of Artificial Sequence: Synthetic oligonucleotide
ggcagaauuggaguccgug

SEQ ID NO: 798863 - RNA, 19 nt, Artificial Sequence
  Description of Artificial Sequence: Synthetic oligonucleotide
accccgacgaccuccuaau

SEQ ID NO: 798864 - RNA, 19 nt, Artificial Sequence
  Description of Artificial Sequence: Synthetic oligonucleotide
uccuaaugccaggugucuc

SEQ ID NO: 798865 - RNA, 19 nt, Artificial Sequence
  Description of Artificial Sequence: Synthetic oligonucleotide
ucugcgccaugacgcugag

SEQ ID NO: 798866 - RNA, 19 nt, Artificial Sequence
  Description of Artificial Sequence: Synthetic oligonucleotide
gguuagcagcagcucugcg

SEQ ID NO: 798867 - RNA, 19 nt, Artificial Sequence
  Description of Artificial Sequence: Synthetic oligonucleotide
gaauuggaguccgugcacu

SEQ ID NO: 798868 - RNA, 19 nt, Artificial Sequence
  Description of Artificial Sequence: Synthetic oligonucleotide
gagccguccagcccgcgca

SEQ ID NO: 798869 - RNA, 19 nt, Artificial Sequence
  Description of Artificial Sequence: Synthetic oligonucleotide
acgaucuuccccacagaca

SEQ ID NO: 798870 - RNA, 19 nt, Artificial Sequence
  Description of Artificial Sequence: Synthetic oligonucleotide
cccgacgaccuccuaaugc

SEQ ID NO: 798871 - RNA, 19 nt, Artificial Sequence
  Description of Artificial Sequence: Synthetic oligonucleotide
uaaugccaggugucucccu

SEQ ID NO: 798872 - RNA, 19 nt, Artificial Sequence
  Description of Artificial Sequence: Synthetic oligonucleotide
ucugagcgacagcgagcag

SEQ ID NO: 798873 - RNA, 19 nt, Artificial Sequence
  Description of Artificial Sequence: Synthetic oligonucleotide
gcagcggcggaugcaaugg

SEQ ID NO: 798874 - RNA, 19 nt, Artificial Sequence
  Description of Artificial Sequence: Synthetic oligonucleotide
ggggcagaauuggaguccg

SEQ ID NO: 798875 - RNA, 19 nt, Artificial Sequence
  Description of Artificial Sequence: Synthetic oligonucleotide
gccggaaguggccauguac

SEQ ID NO: 798876 - RNA, 19 nt, Artificial Sequence
  Description of Artificial Sequence: Synthetic oligonucleotide
cacaugaccccgacgaccu

SEQ ID NO: 798877 - RNA, 19 nt, Artificial Sequence
  Description of Artificial Sequence: Synthetic oligonucleotide
gaccccgacgaccuccuaa

SEQ ID NO: 798878 - RNA, 19 nt, Artificial Sequence
  Description of Artificial Sequence: Synthetic oligonucleotide
uucuggcggagccgagacu

SEQ ID NO: 798879 - RNA, 19 nt, Artificial Sequence
  Description of Artificial Sequence: Synthetic oligonucleotide
cucccaguaccgccgcggc

SEQ ID NO: 798880 - RNA, 19 nt, Artificial Sequence
  Description of Artificial Sequence: Synthetic oligonucleotide
gcucagcggacccagggac

SEQ ID NO: 798881 - RNA, 19 nt, Artificial Sequence
  Description of Artificial Sequence: Synthetic oligonucleotide
acucaggggcuggaauguc

SEQ ID NO: 798882 - RNA, 19 nt, Artificial Sequence
  Description of Artificial Sequence: Synthetic oligonucleotide
ggaaguggccauguacgug

SEQ ID NO: 798883 - RNA, 19 nt, Artificial Sequence
  Description of Artificial Sequence: Synthetic oligonucleotide
cacggugccauuacugugu

SEQ ID NO: 798884 - RNA, 19 nt, Artificial Sequence
  Description of Artificial Sequence: Synthetic oligonucleotide
gucccucgcaagucaaaga

SEQ ID NO: 798885 - RNA, 19 nt, Artificial Sequence
  Description of Artificial Sequence: Synthetic oligonucleotide
ugggugggccaccccugcc

SEQ ID NO: 798886 - RNA, 19 nt, Artificial Sequence
  Description of Artificial Sequence: Synthetic oligonucleotide
cugcaguaucuuugcugug

SEQ ID NO: 798887 - RNA, 19 nt, Artificial Sequence
  Description of Artificial Sequence: Synthetic oligonucleotide
guaaagccagcgguucuga

SEQ ID NO: 798888 - RNA, 19 nt, Artificial Sequence
  Description of Artificial Sequence: Synthetic oligonucleotide
ccuccuaaugccagguguc

SEQ ID NO: 798889 - RNA, 19 nt, Artificial Sequence
  Description of Artificial Sequence: Synthetic oligonucleotide
cccugguuaucauagaugu

SEQ ID NO: 798890 - RNA, 19 nt, Artificial Sequence
  Description of Artificial Sequence: Synthetic oligonucleotide
ccuguccuagaguaguuca

SEQ ID NO: 798891 - RNA, 19 nt, Artificial Sequence
  Description of Artificial Sequence: Synthetic oligonucleotide
cagcccgcacugcaccacg

SEQ ID NO: 798892 - RNA, 19 nt, Artificial Sequence
  Description of Artificial Sequence: Synthetic oligonucleotide
ggcuucgaaugcgggaggg

SEQ ID NO: 798893 - RNA, 19 nt, Artificial Sequence
  Description of Artificial Sequence: Synthetic oligonucleotide
ucacccauucccgcggcua

SEQ ID NO: 798894 - RNA, 19 nt, Artificial Sequence
  Description of Artificial Sequence: Synthetic oligonucleotide
cucgguuagcagcagcucu

SEQ ID NO: 798895 - RNA, 19 nt, Artificial Sequence
  Description of Artificial Sequence: Synthetic oligonucleotide
gggugcgcgcucuuugacc

SEQ ID NO: 798896 - RNA, 19 nt, Artificial Sequence
  Description of Artificial Sequence: Synthetic oligonucleotide
ucccaguaccgccgcggcu

SEQ ID NO: 798897 - RNA, 19 nt, Artificial Sequence
  Description of Artificial Sequence: Synthetic oligonucleotide
cuucaccaggcucgcugug

SEQ ID NO: 798898 - RNA, 19 nt, Artificial Sequence
  Description of Artificial Sequence: Synthetic oligonucleotide
aucuuggggagugccgccu

SEQ ID NO: 798899 - RNA, 19 nt, Artificial Sequence
  Description of Artificial Sequence: Synthetic oligonucleotide
aguggccauguacgugccu

SEQ ID NO: 798900 - RNA, 19 nt, Artificial Sequence
  Description of Artificial Sequence: Synthetic oligonucleotide
ccacaugaccccgacgacc

SEQ ID NO: 798901 - RNA, 19 nt, Artificial Sequence
  Description of Artificial Sequence: Synthetic oligonucleotide
cuagaguaguucagucugu

SEQ ID NO: 798902 - RNA, 19 nt, Artificial Sequence
  Description of Artificial Sequence: Synthetic oligonucleotide
ggaaugucccucgcaaguc

SEQ ID NO: 798903 - RNA, 19 nt, Artificial Sequence
  Description of Artificial Sequence: Synthetic oligonucleotide
ucggucgcagcggcggaug

SEQ ID NO: 798904 - RNA, 19 nt, Artificial Sequence
  Description of Artificial Sequence: Synthetic oligonucleotide
cgcugagccguccagcccg

SEQ ID NO: 798905 - RNA, 19 nt, Artificial Sequence
  Description of Artificial Sequence: Synthetic oligonucleotide
aucacccauucccgcggcu

SEQ ID NO: 798906 - RNA, 19 nt, Artificial Sequence
  Description of Artificial Sequence: Synthetic oligonucleotide
cagcccgcgcauugagagc

SEQ ID NO: 798907 - RNA, 19 nt, Artificial Sequence
  Description of Artificial Sequence: Synthetic oligonucleotide
uacuguguccgagguggau

SEQ ID NO: 798908 - RNA, 19 nt, Artificial Sequence
  Description of Artificial Sequence: Synthetic oligonucleotide
uacgugccuguggaaucca

SEQ ID NO: 798909 - RNA, 19 nt, Artificial Sequence
  Description of Artificial Sequence: Synthetic oligonucleotide
gcgcauugagagcugucac

SEQ ID NO: 798910 - RNA, 19 nt, Artificial Sequence
  Description of Artificial Sequence: Synthetic oligonucleotide
gggcccgcggcuucuggcg

SEQ ID NO: 798911 - RNA, 19 nt, Artificial Sequence
  Description of Artificial Sequence: Synthetic oligonucleotide
ggugcgcgcucuuugaccu

SEQ ID NO: 798912 - RNA, 19 nt, Artificial Sequence
  Description of Artificial Sequence: Synthetic oligonucleotide
gaacccagguuccucgguu

SEQ ID NO: 798913 - RNA, 19 nt, Artificial Sequence
  Description of Artificial Sequence: Synthetic oligonucleotide
cuggggcguccuucggggc

SEQ ID NO: 798914 - RNA, 19 nt, Artificial Sequence
  Description of Artificial Sequence: Synthetic oligonucleotide
acccaaucgagggcagcca

SEQ ID NO: 798915 - RNA, 19 nt, Artificial Sequence
  Description of Artificial Sequence: Synthetic oligonucleotide
accccgucucugaacaggu

SEQ ID NO: 798916 - RNA, 19 nt, Artificial Sequence
  Description of Artificial Sequence: Synthetic oligonucleotide
gugcuuggcagcacuugca

SEQ ID NO: 798917 - RNA, 19 nt, Artificial Sequence
  Description of Artificial Sequence: Synthetic oligonucleotide
ugacagcguuguacggguu

SEQ ID NO: 798918 - RNA, 19 nt, Artificial Sequence
  Description of Artificial Sequence: Synthetic oligonucleotide
gcggcggaugcaauggagc

SEQ ID NO: 798919 - RNA, 19 nt, Artificial Sequence
  Description of Artificial Sequence: Synthetic oligonucleotide
gcggagccgagacuucuug

SEQ ID NO: 798920 - RNA, 19 nt, Artificial Sequence
  Description of Artificial Sequence: Synthetic oligonucleotide
cuucgggucuggggcgucc

SEQ ID NO: 798921 - RNA, 19 nt, Artificial Sequence
  Description of Artificial Sequence: Synthetic oligonucleotide
ucugcgcgggcagcucuga

SEQ ID NO: 798922 - RNA, 19 nt, Artificial Sequence
  Description of Artificial Sequence: Synthetic oligonucleotide
acucggucgcagcggcgga

SEQ ID NO: 798923 - RNA, 19 nt, Artificial Sequence
  Description of Artificial Sequence: Synthetic oligonucleotide
cauucccgcggcuaacagu

SEQ ID NO: 798924 - RNA, 19 nt, Artificial Sequence
  Description of Artificial Sequence: Synthetic oligonucleotide
uucgggucuggggcguccu

SEQ ID NO: 798925 - RNA, 19 nt, Artificial Sequence
  Description of Artificial Sequence: Synthetic oligonucleotide
ccucgcaagucaaagauuu

SEQ ID NO: 798926 - RNA, 19 nt, Artificial Sequence
  Description of Artificial Sequence: Synthetic oligonucleotide
ccacauguccugcucccug

SEQ ID NO: 798927 - RNA, 19 nt, Artificial Sequence
  Description of Artificial Sequence: Synthetic oligonucleotide
ucuuggcggggugcgcgcu

SEQ ID NO: 798928 - RNA, 19 nt, Artificial Sequence
  Description of Artificial Sequence: Synthetic oligonucleotide
cuccggguuuucggcuucg

SEQ ID NO: 798929 - RNA, 19 nt, Artificial Sequence
  Description of Artificial Sequence: Synthetic oligonucleotide
uuggcggggugcgcgcucu

SEQ ID NO: 798930 - RNA, 19 nt, Artificial Sequence
  Description of Artificial Sequence: Synthetic oligonucleotide
uucggcccuucugcuuugc

SEQ ID NO: 798931 - RNA, 19 nt, Artificial Sequence
  Description of Artificial Sequence: Synthetic oligonucleotide
cccaaucgagggcagccac

SEQ ID NO: 798932 - RNA, 19 nt, Artificial Sequence
  Description of Artificial Sequence: Synthetic oligonucleotide
ggugucucccuguccuaga

SEQ ID NO: 798933 - RNA, 19 nt, Artificial Sequence
  Description of Artificial Sequence: Synthetic oligonucleotide
cagaauggaggaaguggau

SEQ ID NO: 798934 - RNA, 19 nt, Artificial Sequence
  Description of Artificial Sequence: Synthetic oligonucleotide
uccggguuuucggcuucga

SEQ ID NO: 798935 - RNA, 19 nt, Artificial Sequence
  Description of Artificial Sequence: Synthetic oligonucleotide
augaccccgacgaccuccu

SEQ ID NO: 798936 - RNA, 19 nt, Artificial Sequence
  Description of Artificial Sequence: Synthetic oligonucleotide
aggccggaaguggccaugu

SEQ ID NO: 798937 - RNA, 19 nt, Artificial Sequence
  Description of Artificial Sequence: Synthetic oligonucleotide
cuuggcggggugcgcgcuc

SEQ ID NO: 798938 - RNA, 19 nt, Artificial Sequence
  Description of Artificial Sequence: Synthetic oligonucleotide
ccggcuucggagcugucuc

SEQ ID NO: 798939 - RNA, 19 nt, Artificial Sequence
  Description of Artificial Sequence: Synthetic oligonucleotide
agagccggugggugaggua

SEQ ID NO: 798940 - RNA, 19 nt, Artificial Sequence
  Description of Artificial Sequence: Synthetic oligonucleotide
gcgccaugacgcugagccg

SEQ ID NO: 798941 - RNA, 19 nt, Artificial Sequence
  Description of Artificial Sequence: Synthetic oligonucleotide
guugggcucagcggaccca

SEQ ID NO: 798942 - RNA, 19 nt, Artificial Sequence
  Description of Artificial Sequence: Synthetic oligonucleotide
ccauucccgcggcuaacag

SEQ ID NO: 798943 - RNA, 19 nt, Artificial Sequence
  Description of Artificial Sequence: Synthetic oligonucleotide
ggcucaucguacaaaucua

SEQ ID NO: 798944 - RNA, 19 nt, Artificial Sequence
  Description of Artificial Sequence: Synthetic oligonucleotide
cuucgaaugcgggaggguu

SEQ ID NO: 798945 - RNA, 19 nt, Artificial Sequence
  Description of Artificial Sequence: Synthetic oligonucleotide
gcggcuaacaguccccgcu

SEQ ID NO: 798946 - RNA, 19 nt, Artificial Sequence
  Description of Artificial Sequence: Synthetic oligonucleotide
ggucgcggcucccgagucc

SEQ ID NO: 798947 - RNA, 19 nt, Artificial Sequence
  Description of Artificial Sequence: Synthetic oligonucleotide
gcagaugggcgggcucucg

SEQ ID NO: 798948 - RNA, 19 nt, Artificial Sequence
  Description of Artificial Sequence: Synthetic oligonucleotide
cugacgcucgccucuuccu

SEQ ID NO: 798949 - RNA, 19 nt, Artificial Sequence
  Description of Artificial Sequence: Synthetic oligonucleotide
cacggugacacagaaucuu

SEQ ID NO: 798950 - RNA, 19 nt, Artificial Sequence
  Description of Artificial Sequence: Synthetic oligonucleotide
cccgcggcuaacagucccc

SEQ ID NO: 798951 - RNA, 19 nt, Artificial Sequence
  Description of Artificial Sequence: Synthetic oligonucleotide
ggggugcgcgcucuuugac

SEQ ID NO: 798952 - RNA, 19 nt, Artificial Sequence
  Description of Artificial Sequence: Synthetic oligonucleotide
caaucgagggcagccacau

SEQ ID NO: 798953 - RNA, 19 nt, Artificial Sequence
  Description of Artificial Sequence: Synthetic oligonucleotide
ccgggcgcccuccacgggg

SEQ ID NO: 798954 - RNA, 19 nt, Artificial Sequence
  Description of Artificial Sequence: Synthetic oligonucleotide
uccgugcacucggccugag

SEQ ID NO: 798955 - RNA, 19 nt, Artificial Sequence
  Description of Artificial Sequence: Synthetic oligonucleotide
cagcguuguacggguucug

SEQ ID NO: 798956 - RNA, 19 nt, Artificial Sequence
  Description of Artificial Sequence: Synthetic oligonucleotide
ggggcgggucccgggaacg

SEQ ID NO: 798957 - RNA, 19 nt, Artificial Sequence
  Description of Artificial Sequence: Synthetic oligonucleotide
gguucuggacuugucaauu

SEQ ID NO: 798958 - RNA, 19 nt, Artificial Sequence
  Description of Artificial Sequence: Synthetic oligonucleotide
cuccuaaugccaggugucu

SEQ ID NO: 798959 - RNA, 19 nt, Artificial Sequence
  Description of Artificial Sequence: Synthetic oligonucleotide
agccagcgguucugagcga

SEQ ID NO: 798960 - RNA, 19 nt, Artificial Sequence
  Description of Artificial Sequence: Synthetic oligonucleotide
gcaccacggugacacagaa

SEQ ID NO: 798961 - RNA, 19 nt, Artificial Sequence
  Description of Artificial Sequence: Synthetic oligonucleotide
cccugcccggcuucggagc

SEQ ID NO: 798962 - RNA, 19 nt, Artificial Sequence
  Description of Artificial Sequence: Synthetic oligonucleotide
ggcgggucccgggaacggg

SEQ ID NO: 798963 - RNA, 19 nt, Artificial Sequence
  Description of Artificial Sequence: Synthetic oligonucleotide
ccaaucgagggcagccaca

SEQ ID NO: 798964 - RNA, 19 nt, Artificial Sequence
  Description of Artificial Sequence: Synthetic oligonucleotide
ggccauguacgugccugug

SEQ ID NO: 798965 - RNA, 19 nt, Artificial Sequence
  Description of Artificial Sequence: Synthetic oligonucleotide
ucuucgggucuggggcguc

SEQ ID NO: 798966 - RNA, 19 nt, Artificial Sequence
  Description of Artificial Sequence: Synthetic oligonucleotide
augucccucgcaagucaaa

SEQ ID NO: 798967 - RNA, 19 nt, Artificial Sequence
  Description of Artificial Sequence: Synthetic oligonucleotide
guaccgccgcggcuucuuc

SEQ ID NO: 798968 - RNA, 19 nt, Artificial Sequence
  Description of Artificial Sequence: Synthetic oligonucleotide
cucugacgcucgccucuuc

SEQ ID NO: 798969 - RNA, 19 nt, Artificial Sequence
  Description of Artificial Sequence: Synthetic oligonucleotide
ggcuucggagcugucucca

SEQ ID NO: 798970 - RNA, 19 nt, Artificial Sequence
  Description of Artificial Sequence: Synthetic oligonucleotide
cugcgcgggcagcucugac

SEQ ID NO: 798971 - RNA, 19 nt, Artificial Sequence
  Description of Artificial Sequence: Synthetic oligonucleotide
gccgccacugugccccacc

SEQ ID NO: 798972 - RNA, 19 nt, Artificial Sequence
  Description of Artificial Sequence: Synthetic oligonucleotide
cgucucugaacagguggcc

SEQ ID NO: 798973 - RNA, 19 nt, Artificial Sequence
  Description of Artificial Sequence: Synthetic oligonucleotide
cguccuucggggcccgcgg

SEQ ID NO: 798974 - RNA, 19 nt, Artificial Sequence
  Description of Artificial Sequence: Synthetic oligonucleotide
cagcggcggaugcaaugga

SEQ ID NO: 798975 - RNA, 19 nt, Artificial Sequence
  Description of Artificial Sequence: Synthetic oligonucleotide
gcucaucguacaaaucuau

SEQ ID NO: 798976 - RNA, 19 nt, Artificial Sequence
  Description of Artificial Sequence: Synthetic oligonucleotide
ggguucuggacuugucaau

SEQ ID NO: 798977 - RNA, 19 nt, Artificial Sequence
  Description of Artificial Sequence: Synthetic oligonucleotide
cugagccguccagcccgcg

SEQ ID NO: 798978 - RNA, 19 nt, Artificial Sequence
  Description of Artificial Sequence: Synthetic oligonucleotide
gcguccuucggggcccgcg

SEQ ID NO: 798979 - RNA, 19 nt, Artificial Sequence
  Description of Artificial Sequence: Synthetic oligonucleotide
cucgcaagucaaagauuuu

SEQ ID NO: 798980 - RNA, 19 nt, Artificial Sequence
  Description of Artificial Sequence: Synthetic oligonucleotide
gucgcggcucccgaguccu

SEQ ID NO: 798981 - RNA, 19 nt, Artificial Sequence
  Description of Artificial Sequence: Synthetic oligonucleotide
cugcgccaugacgcugagc

SEQ ID NO: 798982 - RNA, 19 nt, Artificial Sequence
  Description of Artificial Sequence: Synthetic oligonucleotide
cggcuaacaguccccgcug

SEQ ID NO: 798983 - RNA, 19 nt, Artificial Sequence
  Description of Artificial Sequence: Synthetic oligonucleotide
ccgcggcuaacaguccccg

SEQ ID NO: 798984 - RNA, 19 nt, Artificial Sequence
  Description of Artificial Sequence: Synthetic oligonucleotide
gugcgcgcucuuugaccuc

SEQ ID NO: 798985 - RNA, 19 nt, Artificial Sequence
  Description of Artificial Sequence: Synthetic oligonucleotide
cucaaggcucugccugacu

SEQ ID NO: 798986 - RNA, 19 nt, Artificial Sequence
  Description of Artificial Sequence: Synthetic oligonucleotide
ccucgguuagcagcagcuc

SEQ ID NO: 798987 - RNA, 19 nt, Artificial Sequence
  Description of Artificial Sequence: Synthetic oligonucleotide
gggucgcggcucccgaguc

SEQ ID NO: 798988 - RNA, 19 nt, Artificial Sequence
  Description of Artificial Sequence: Synthetic oligonucleotide
cccagucucucuauccgcu

SEQ ID NO: 798989 - RNA, 19 nt, Artificial Sequence
  Description of Artificial Sequence: Synthetic oligonucleotide
cccugcccauauguugacc

SEQ ID NO: 798990 - RNA, 19 nt, Artificial Sequence
  Description of Artificial Sequence: Synthetic oligonucleotide
augccgccacugugcccca

SEQ ID NO: 798991 - RNA, 19 nt, Artificial Sequence
  Description of Artificial Sequence: Synthetic oligonucleotide
ccgaguccucgccuucuuc

SEQ ID NO: 798992 - RNA, 19 nt, Artificial Sequence
  Description of Artificial Sequence: Synthetic oligonucleotide
cggguuuucggcuucgaau

SEQ ID NO: 798993 - RNA, 19 nt, Artificial Sequence
  Description of Artificial Sequence: Synthetic oligonucleotide
ccgagucacucggucgcag

SEQ ID NO: 798994 - RNA, 19 nt, Artificial Sequence
  Description of Artificial Sequence: Synthetic oligonucleotide
gaccccucugagucaucuu

SEQ ID NO: 798995 - RNA, 19 nt, Artificial Sequence
  Description of Artificial Sequence: Synthetic oligonucleotide
cggcuucgaaugcgggagg

SEQ ID NO: 798996 - RNA, 19 nt, Artificial Sequence
  Description of Artificial Sequence: Synthetic oligonucleotide
ucgcggcucccgaguccuc

SEQ ID NO: 798997 - RNA, 19 nt, Artificial Sequence
  Description of Artificial Sequence: Synthetic oligonucleotide
gcccauauguugaccacau

SEQ ID NO: 798998 - RNA, 19 nt, Artificial Sequence
  Description of Artificial Sequence: Synthetic oligonucleotide
gcgacagcgagcagagccu

SEQ ID NO: 798999 - RNA, 19 nt, Artificial Sequence
  Description of Artificial Sequence: Synthetic oligonucleotide
ccaugacgcugagccgucc

SEQ ID NO: 799000 - RNA, 19 nt, Artificial Sequence
  Description of Artificial Sequence: Synthetic oligonucleotide
gcugagccguccagcccgc

SEQ ID NO: 799001 - RNA, 19 nt, Artificial Sequence
  Description of Artificial Sequence: Synthetic oligonucleotide
cugagucaucuuggggagu

SEQ ID NO: 799002 - RNA, 19 nt, Artificial Sequence
  Description of Artificial Sequence: Synthetic oligonucleotide
cgcgcucuuugaccucggg

SEQ ID NO: 799003 - RNA, 19 nt, Artificial Sequence
  Description of Artificial Sequence: Synthetic oligonucleotide
cgacgaccuccuaaugcca

SEQ ID NO: 799004 - RNA, 19 nt, Artificial Sequence
  Description of Artificial Sequence: Synthetic oligonucleotide
caccacggugacacagaau

SEQ ID NO: 799005 - RNA, 19 nt, Artificial Sequence
  Description of Artificial Sequence: Synthetic oligonucleotide
caguccccgcugggagaag

SEQ ID NO: 799006 - RNA, 19 nt, Artificial Sequence
  Description of Artificial Sequence: Synthetic oligonucleotide
ccgcgcauugagagcuguc

SEQ ID NO: 799007 - RNA, 19 nt, Artificial Sequence
  Description of Artificial Sequence: Synthetic oligonucleotide
gccaugacgcugagccguc

SEQ ID NO: 799008 - RNA, 19 nt, Artificial Sequence
  Description of Artificial Sequence: Synthetic oligonucleotide
cccauucccgcggcuaaca

SEQ ID NO: 799009 - RNA, 19 nt, Artificial Sequence
  Description of Artificial Sequence: Synthetic oligonucleotide
cgcggcuaacaguccccgc

SEQ ID NO: 799010 - RNA, 19 nt, Artificial Sequence
  Description of Artificial Sequence: Synthetic oligonucleotide
uggcggggugcgcgcucuu

SEQ ID NO: 799011 - RNA, 19 nt, Artificial Sequence
  Description of Artificial Sequence: Synthetic oligonucleotide
ggaugcaauggagcucgau

SEQ ID NO: 799012 - RNA, 19 nt, Artificial Sequence
  Description of Artificial Sequence: Synthetic oligonucleotide
ccggguuuucggcuucgaa

SEQ ID NO: 799013 - RNA, 19 nt, Artificial Sequence
  Description of Artificial Sequence: Synthetic oligonucleotide
gcuucgaaugcgggagggu

SEQ ID NO: 799014 - RNA, 19 nt, Artificial Sequence
  Description of Artificial Sequence: Synthetic oligonucleotide
gcgcgcucuuugaccucgg

SEQ ID NO: 799015 - RNA, 19 nt, Artificial Sequence
  Description of Artificial Sequence: Synthetic oligonucleotide
gcgggaggguucuggacuu

SEQ ID NO: 799016 - RNA, 19 nt, Artificial Sequence
  Description of Artificial Sequence: Synthetic oligonucleotide
gccgagucacucggucgca

SEQ ID NO: 799017 - RNA, 19 nt, Artificial Sequence
  Description of Artificial Sequence: Synthetic oligonucleotide
cggcggaugcaauggagcu

SEQ ID NO: 799018 - RNA, 19 nt, Artificial Sequence
  Description of Artificial Sequence: Synthetic oligonucleotide
cggaaguggccauguacgu

SEQ ID NO: 799019 - RNA, 19 nt, Artificial Sequence
  Description of Artificial Sequence: Synthetic oligonucleotide
gcucccgaguccucgccuu

SEQ ID NO: 799020 - RNA, 19 nt, Artificial Sequence
  Description of Artificial Sequence: Synthetic oligonucleotide
gguccgcugcggccuccuc

SEQ ID NO: 799021 - RNA, 19 nt, Artificial Sequence
  Description of Artificial Sequence: Synthetic oligonucleotide
ggccccagacaggguccgc

SEQ ID NO: 799022 - RNA, 19 nt, Artificial Sequence
  Description of Artificial Sequence: Synthetic oligonucleotide
ggagcucgaugcccugguu

SEQ ID NO: 799023 - RNA, 19 nt, Artificial Sequence
  Description of Artificial Sequence: Synthetic oligonucleotide
cccgcggcuucuggcggag

SEQ ID NO: 799024 - RNA, 19 nt, Artificial Sequence
  Description of Artificial Sequence: Synthetic oligonucleotide
cgccaugacgcugagccgu

SEQ ID NO: 799025 - RNA, 19 nt, Artificial Sequence
  Description of Artificial Sequence: Synthetic oligonucleotide
cggggugcgcgcucuuuga

SEQ ID NO: 799026 - RNA, 19 nt, Artificial Sequence
  Description of Artificial Sequence: Synthetic oligonucleotide
ggccggaaguggccaugua

SEQ ID NO: 799027 - RNA, 19 nt, Artificial Sequence
  Description of Artificial Sequence: Synthetic oligonucleotide
gccacauguccugcucccu

SEQ ID NO: 799028 - RNA, 19 nt, Artificial Sequence
  Description of Artificial Sequence: Synthetic oligonucleotide
cgagguggaugacagcguu

SEQ ID NO: 799029 - RNA, 19 nt, Artificial Sequence
  Description of Artificial Sequence: Synthetic oligonucleotide
ccgggucauagcccagucu

SEQ ID NO: 799030 - RNA, 19 nt, Artificial Sequence
  Description of Artificial Sequence: Synthetic oligonucleotide
gcccgcacugcaccacggu

SEQ ID NO: 799031 - RNA, 19 nt, Artificial Sequence
  Description of Artificial Sequence: Synthetic oligonucleotide
ccgcggcuucuuccucuug

SEQ ID NO: 799032 - RNA, 19 nt, Artificial Sequence
  Description of Artificial Sequence: Synthetic oligonucleotide
gcccgcgcauugagagcug

SEQ ID NO: 799033 - RNA, 19 nt, Artificial Sequence
  Description of Artificial Sequence: Synthetic oligonucleotide
ccgugcacucggccugaga

SEQ ID NO: 799034 - RNA, 19 nt, Artificial Sequence
  Description of Artificial Sequence: Synthetic oligonucleotide
gcgggucccgggaacgggu

SEQ ID NO: 799035 - RNA, 19 nt, Artificial Sequence
  Description of Artificial Sequence: Synthetic oligonucleotide
cccggcuucggagcugucu

SEQ ID NO: 799036 - RNA, 19 nt, Artificial Sequence
  Description of Artificial Sequence: Synthetic oligonucleotide
gcucugacgcucgccucuu

SEQ ID NO: 799037 - RNA, 19 nt, Artificial Sequence
  Description of Artificial Sequence: Synthetic oligonucleotide
cccgcgcauugagagcugu

SEQ ID NO: 799038 - RNA, 19 nt, Artificial Sequence
  Description of Artificial Sequence: Synthetic oligonucleotide
ggcggggugcgcgcucuuu

SEQ ID NO: 799039 - RNA, 19 nt, Artificial Sequence
  Description of Artificial Sequence: Synthetic oligonucleotide
cgauguccgucugcaguau

SEQ ID NO: 799040 - RNA, 19 nt, Artificial Sequence
  Description of Artificial Sequence: Synthetic oligonucleotide
ccccggagaggcgccggcu

SEQ ID NO: 799041 - RNA, 19 nt, Artificial Sequence
  Description of Artificial Sequence: Synthetic oligonucleotide
ucuauaaugagauugacag

SEQ ID NO: 799042 - RNA, 19 nt, Artificial Sequence
  Description of Artificial Sequence: Synthetic oligonucleotide
uguaguauugauuacaaag

SEQ ID NO: 799043 - RNA, 19 nt, Artificial Sequence
  Description of Artificial Sequence: Synthetic oligonucleotide
cauugaauaacuaaguuug

SEQ ID NO: 799044 - RNA, 19 nt, Artificial Sequence
  Description of Artificial Sequence: Synthetic oligonucleotide
ucgacaagaaauuaagagg

SEQ ID NO: 799045 - RNA, 19 nt, Artificial Sequence
  Description of Artificial Sequence: Synthetic oligonucleotide
aauauaggaauugaaaacu

SEQ ID NO: 799046 - RNA, 19 nt, Artificial Sequence
  Description of Artificial Sequence: Synthetic oligonucleotide
cacacuaauguguagaacg

SEQ ID NO: 799047 - RNA, 19 nt, Artificial Sequence
  Description of Artificial Sequence: Synthetic oligonucleotide
agcauaucuguuuaugugc

SEQ ID NO: 799048 - RNA, 19 nt, Artificial Sequence
  Description of Artificial Sequence: Synthetic oligonucleotide
uaguauugauuacaaaggg

SEQ ID NO: 799049 - RNA, 19 nt, Artificial Sequence
  Description of Artificial Sequence: Synthetic oligonucleotide
uauaaaacgacaucagcug

SEQ ID NO: 799050 - RNA, 19 nt, Artificial Sequence
  Description of Artificial Sequence: Synthetic oligonucleotide
aauggcuacauugucgacc

SEQ ID NO: 799051 - RNA, 19 nt, Artificial Sequence
  Description of Artificial Sequence: Synthetic oligonucleotide
acaguuaucagauugcuga

SEQ ID NO: 799052 - RNA, 19 nt, Artificial Sequence
  Description of Artificial Sequence: Synthetic oligonucleotide
gaauauaggaauugaaaac

SEQ ID NO: 799053 - RNA, 19 nt, Artificial Sequence
  Description of Artificial Sequence: Synthetic oligonucleotide
ugaauaacuaaguuugccc

SEQ ID NO: 799054 - RNA, 19 nt, Artificial Sequence
  Description of Artificial Sequence: Synthetic oligonucleotide
uuguauacuuccauuaacc

SEQ ID NO: 799055 - RNA, 19 nt, Artificial Sequence
  Description of Artificial Sequence: Synthetic oligonucleotide
aaaaccaagcuuaaggaag

SEQ ID NO: 799056 - RNA, 19 nt, Artificial Sequence
  Description of Artificial Sequence: Synthetic oligonucleotide
auaaaacgacaucagcugc

SEQ ID NO: 799057 - RNA, 19 nt, Artificial Sequence
  Description of Artificial Sequence: Synthetic oligonucleotide
aggaauugaaaacuugaac

SEQ ID NO: 799058 - RNA, 19 nt, Artificial Sequence
  Description of Artificial Sequence: Synthetic oligonucleotide
acuugcaacaaaguaaggc

SEQ ID NO: 799059 - RNA, 19 nt, Artificial Sequence
  Description of Artificial Sequence: Synthetic oligonucleotide
aacgacaucagcugcugac

SEQ ID NO: 799060 - RNA, 19 nt, Artificial Sequence
  Description of Artificial Sequence: Synthetic oligonucleotide
cucgacaagaaauuaagag

SEQ ID NO: 799061 - RNA, 19 nt, Artificial Sequence
  Description of Artificial Sequence: Synthetic oligonucleotide
uuuacuccauauaaaacga

SEQ ID NO: 799062 - RNA, 19 nt, Artificial Sequence
  Description of Artificial Sequence: Synthetic oligonucleotide
uaucugaucauacuguaac

SEQ ID NO: 799063 - RNA, 19 nt, Artificial Sequence
  Description of Artificial Sequence: Synthetic oligonucleotide
uccauauaaaacgacauca

SEQ ID NO: 799064 - RNA, 19 nt, Artificial Sequence
  Description of Artificial Sequence: Synthetic oligonucleotide
uuuauggaaaugcuuguca

SEQ ID NO: 799065 - RNA, 19 nt, Artificial Sequence
  Description of Artificial Sequence: Synthetic oligonucleotide
guaguauugauuacaaagg

SEQ ID NO: 799066 - RNA, 19 nt, Artificial Sequence
  Description of Artificial Sequence: Synthetic oligonucleotide
uuuaucauaugcuuccaug

SEQ ID NO: 799067 - RNA, 19 nt, Artificial Sequence
  Description of Artificial Sequence: Synthetic oligonucleotide
ugcaaaaccuccuaagacc

SEQ ID NO: 799068 - RNA, 19 nt, Artificial Sequence
  Description of Artificial Sequence: Synthetic oligonucleotide
uaguugaucagaaaacuga

SEQ ID NO: 799069 - RNA, 19 nt, Artificial Sequence
  Description of Artificial Sequence: Synthetic oligonucleotide
auguguagaacgcuucucc

SEQ ID NO: 799070 - RNA, 19 nt, Artificial Sequence
  Description of Artificial Sequence: Synthetic oligonucleotide
uuuaucacucucaggaagc

SEQ ID NO: 799071 - RNA, 19 nt, Artificial Sequence
  Description of Artificial Sequence: Synthetic oligonucleotide
uagccgauaauccacuggg

SEQ ID NO: 799072 - RNA, 19 nt, Artificial Sequence
  Description of Artificial Sequence: Synthetic oligonucleotide
uccgcuguaacaucuaucc

SEQ ID NO: 799073 - RNA, 19 nt, Artificial Sequence
  Description of Artificial Sequence: Synthetic oligonucleotide
uccaagauagcauaucugu

SEQ ID NO: 799074 - RNA, 19 nt, Artificial Sequence
  Description of Artificial Sequence: Synthetic oligonucleotide
caagaaauuaagagguggg

SEQ ID NO: 799075 - RNA, 19 nt, Artificial Sequence
  Description of Artificial Sequence: Synthetic oligonucleotide
ugaucaauuuguaguauug

SEQ ID NO: 799076 - RNA, 19 nt, Artificial Sequence
  Description of Artificial Sequence: Synthetic oligonucleotide
ugaaaacuugaacagcaug

SEQ ID NO: 799077 - RNA, 19 nt, Artificial Sequence
  Description of Artificial Sequence: Synthetic oligonucleotide
acaucuauccuuugccgcc

SEQ ID NO: 799078 - RNA, 19 nt, Artificial Sequence
  Description of Artificial Sequence: Synthetic oligonucleotide
uguauacuuccauuaaccc

SEQ ID NO: 799079 - RNA, 19 nt, Artificial Sequence
  Description of Artificial Sequence: Synthetic oligonucleotide
uuguaauaccagcauauca

SEQ ID NO: 799080 - RNA, 19 nt, Artificial Sequence
  Description of Artificial Sequence: Synthetic oligonucleotide
uaucagauugcugauaaug

SEQ ID NO: 799081 - RNA, 19 nt, Artificial Sequence
  Description of Artificial Sequence: Synthetic oligonucleotide
agugagaagcuccauaaug

SEQ ID NO: 799082 - RNA, 19 nt, Artificial Sequence
  Description of Artificial Sequence: Synthetic oligonucleotide
uuaucauaugcuuccaugu

SEQ ID NO: 799083 - RNA, 19 nt, Artificial Sequence
  Description of Artificial Sequence: Synthetic oligonucleotide
auugauuacaaaggguugg

SEQ ID NO: 799084 - RNA, 19 nt, Artificial Sequence
  Description of Artificial Sequence: Synthetic oligonucleotide
acuaaguuugcccuuucuc

SEQ ID NO: 799085 - RNA, 19 nt, Artificial Sequence
  Description of Artificial Sequence: Synthetic oligonucleotide
acauugucgaccugggugg

SEQ ID NO: 799086 - RNA, 19 nt, Artificial Sequence
  Description of Artificial Sequence: Synthetic oligonucleotide
uaacaucuauccuuugccg

SEQ ID NO: 799087 - RNA, 19 nt, Artificial Sequence
  Description of Artificial Sequence: Synthetic oligonucleotide
aaucucugguaaauaaugg

SEQ ID NO: 799088 - RNA, 19 nt, Artificial Sequence
  Description of Artificial Sequence: Synthetic oligonucleotide
uugcaacaaaguaaggcag

SEQ ID NO: 799089 - RNA, 19 nt, Artificial Sequence
  Description of Artificial Sequence: Synthetic oligonucleotide
aucagauugcugauaaugc

SEQ ID NO: 799090 - RNA, 19 nt, Artificial Sequence
  Description of Artificial Sequence: Synthetic oligonucleotide
uuuguaguauugauuacaa

SEQ ID NO: 799091 - RNA, 19 nt, Artificial Sequence
  Description of Artificial Sequence: Synthetic oligonucleotide
aaaagaauggcuacauugu

SEQ ID NO: 799092 - RNA, 19 nt, Artificial Sequence
  Description of Artificial Sequence: Synthetic oligonucleotide
uacuccauauaaaacgaca

SEQ ID NO: 799093 - RNA, 19 nt, Artificial Sequence
  Description of Artificial Sequence: Synthetic oligonucleotide
aauuagguuuacuccauau

SEQ ID NO: 799094 - RNA, 19 nt, Artificial Sequence
  Description of Artificial Sequence: Synthetic oligonucleotide
ucacauugaauaacuaagu

SEQ ID NO: 799095 - RNA, 19 nt, Artificial Sequence
  Description of Artificial Sequence: Synthetic oligonucleotide
aaauuaagaggugggcuuc

SEQ ID NO: 799096 - RNA, 19 nt, Artificial Sequence
  Description of Artificial Sequence: Synthetic oligonucleotide
cauacuguaacugaccaug

SEQ ID NO: 799097 - RNA, 19 nt, Artificial Sequence
  Description of Artificial Sequence: Synthetic oligonucleotide
uguguagaacgcuucuccg

SEQ ID NO: 799098 - RNA, 19 nt, Artificial Sequence
  Description of Artificial Sequence: Synthetic oligonucleotide
ugcuuuuguaauaccagca

SEQ ID NO: 799099 - RNA, 19 nt, Artificial Sequence
  Description of Artificial Sequence: Synthetic oligonucleotide
cuuccuaacauucccacac

SEQ ID NO: 799100 - RNA, 19 nt, Artificial Sequence
  Description of Artificial Sequence: Synthetic oligonucleotide
augacuuucuguaagaggu

SEQ ID NO: 799101 - RNA, 19 nt, Artificial Sequence
  Description of Artificial Sequence: Synthetic oligonucleotide
uagauuauucuuagaauau

SEQ ID NO: 799102 - RNA, 19 nt, Artificial Sequence
  Description of Artificial Sequence: Synthetic oligonucleotide
aaaacauuccgagggaaca

SEQ ID NO: 799103 - RNA, 19 nt, Artificial Sequence
  Description of Artificial Sequence: Synthetic oligonucleotide
cuugcaacaaaguaaggca

SEQ ID NO: 799104 - RNA, 19 nt, Artificial Sequence
  Description of Artificial Sequence: Synthetic oligonucleotide
aacccaaugcaauuguuaa

SEQ ID NO: 799105 - RNA, 19 nt, Artificial Sequence
  Description of Artificial Sequence: Synthetic oligonucleotide
acauugaauaacuaaguuu

SEQ ID NO: 799106 - RNA, 19 nt, Artificial Sequence
  Description of Artificial Sequence: Synthetic oligonucleotide
cacuacuccagacugacag

SEQ ID NO: 799107 - RNA, 19 nt, Artificial Sequence
  Description of Artificial Sequence: Synthetic oligonucleotide
uugaauaacuaaguuugcc

SEQ ID NO: 799108 - RNA, 19 nt, Artificial Sequence
  Description of Artificial Sequence: Synthetic oligonucleotide
ugucauuccuaguucuagg

SEQ ID NO: 799109 - RNA, 19 nt, Artificial Sequence
  Description of Artificial Sequence: Synthetic oligonucleotide
agaauggcuacauugucga

SEQ ID NO: 799110 - RNA, 19 nt, Artificial Sequence
  Description of Artificial Sequence: Synthetic oligonucleotide
uuggaccaaaguuagccag

SEQ ID NO: 799111 - RNA, 19 nt, Artificial Sequence
  Description of Artificial Sequence: Synthetic oligonucleotide
uagcauaucuguuuaugug

SEQ ID NO: 799112 - RNA, 19 nt, Artificial Sequence
  Description of Artificial Sequence: Synthetic oligonucleotide
cuucuuucgaccaauguga

SEQ ID NO: 799113 - RNA, 19 nt, Artificial Sequence
  Description of Artificial Sequence: Synthetic oligonucleotide
ugacauuaagggcagaauu

SEQ ID NO: 799114 - RNA, 19 nt, Artificial Sequence
  Description of Artificial Sequence: Synthetic oligonucleotide
cuagauuauucuuagaaua

SEQ ID NO: 799115 - RNA, 19 nt, Artificial Sequence
  Description of Artificial Sequence: Synthetic oligonucleotide
ucggcuaauggugucaagg

SEQ ID NO: 799116 - RNA, 19 nt, Artificial Sequence
  Description of Artificial Sequence: Synthetic oligonucleotide
ucugaucauacuguaacug

SEQ ID NO: 799117 - RNA, 19 nt, Artificial Sequence
  Description of Artificial Sequence: Synthetic oligonucleotide
uccauuaacccaaugcaau

SEQ ID NO: 799118 - RNA, 19 nt, Artificial Sequence
  Description of Artificial Sequence: Synthetic oligonucleotide
auagcauaucuguuuaugu

SEQ ID NO: 799119 - RNA, 19 nt, Artificial Sequence
  Description of Artificial Sequence: Synthetic oligonucleotide
auauacuugcaacaaagua

SEQ ID NO: 799120 - RNA, 19 nt, Artificial Sequence
  Description of Artificial Sequence: Synthetic oligonucleotide
uggcuaguugaucagaaaa

SEQ ID NO: 799121 - RNA, 19 nt, Artificial Sequence
  Description of Artificial Sequence: Synthetic oligonucleotide
aauguguagaacgcuucuc

SEQ ID NO: 799122 - RNA, 19 nt, Artificial Sequence
  Description of Artificial Sequence: Synthetic oligonucleotide
uaaaacgacaucagcugcu

SEQ ID NO: 799123 - RNA, 19 nt, Artificial Sequence
  Description of Artificial Sequence: Synthetic oligonucleotide
aaacauuccgagggaacac

SEQ ID NO: 799124 - RNA, 19 nt, Artificial Sequence
  Description of Artificial Sequence: Synthetic oligonucleotide
uucgcuuauuucuucuucc

SEQ ID NO: 799125 - RNA, 19 nt, Artificial Sequence
  Description of Artificial Sequence: Synthetic oligonucleotide
gacucgacaagaaauuaag

SEQ ID NO: 799126 - RNA, 19 nt, Artificial Sequence
  Description of Artificial Sequence: Synthetic oligonucleotide
aaggaccuccguccaauac

SEQ ID NO: 799127 - RNA, 19 nt, Artificial Sequence
  Description of Artificial Sequence: Synthetic oligonucleotide
gauaaugcuggagauuccc

SEQ ID NO: 799128 - RNA, 19 nt, Artificial Sequence
  Description of Artificial Sequence: Synthetic oligonucleotide
gauagcauaucuguuuaug

SEQ ID NO: 799129 - RNA, 19 nt, Artificial Sequence
  Description of Artificial Sequence: Synthetic oligonucleotide
cugcuuaacauccuccugc

SEQ ID NO: 799130 - RNA, 19 nt, Artificial Sequence
  Description of Artificial Sequence: Synthetic oligonucleotide
auaugcuuccauguauacc

SEQ ID NO: 799131 - RNA, 19 nt, Artificial Sequence
  Description of Artificial Sequence: Synthetic oligonucleotide
agaugugugaggcaguuaa

SEQ ID NO: 799132 - RNA, 19 nt, Artificial Sequence
  Description of Artificial Sequence: Synthetic oligonucleotide
uggagauucccacagcuuc

SEQ ID NO: 799133 - RNA, 19 nt, Artificial Sequence
  Description of Artificial Sequence: Synthetic oligonucleotide
cuaguugaucagaaaacug

SEQ ID NO: 799134 - RNA, 19 nt, Artificial Sequence
  Description of Artificial Sequence: Synthetic oligonucleotide
auuaagggcagaauuaggu

SEQ ID NO: 799135 - RNA, 19 nt, Artificial Sequence
  Description of Artificial Sequence: Synthetic oligonucleotide
aauauacuugcaacaaagu

SEQ ID NO: 799136 - RNA, 19 nt, Artificial Sequence
  Description of Artificial Sequence: Synthetic oligonucleotide
aacacacuaauguguagaa

SEQ ID NO: 799137 - RNA, 19 nt, Artificial Sequence
  Description of Artificial Sequence: Synthetic oligonucleotide
auugaauaacuaaguuugc

SEQ ID NO: 799138 - RNA, 19 nt, Artificial Sequence
  Description of Artificial Sequence: Synthetic oligonucleotide
acacuaauguguagaacgc

SEQ ID NO: 799139 - RNA, 19 nt, Artificial Sequence
  Description of Artificial Sequence: Synthetic oligonucleotide
acauuaagggcagaauuag

SEQ ID NO: 799140 - RNA, 19 nt, Artificial Sequence
  Description of Artificial Sequence: Synthetic oligonucleotide
aauuaagaggugggcuucg

SEQ ID NO: 799141 - RNA, 19 nt, Artificial Sequence
  Description of Artificial Sequence: Synthetic oligonucleotide
uuaaggaagugccgaguug

SEQ ID NO: 799142 - RNA, 19 nt, Artificial Sequence
  Description of Artificial Sequence: Synthetic oligonucleotide
uguaacugaccauggaguc

SEQ ID NO: 799143 - RNA, 19 nt, Artificial Sequence
  Description of Artificial Sequence: Synthetic oligonucleotide
caagcuuaaggaagugccg

SEQ ID NO: 799144 - RNA, 19 nt, Artificial Sequence
  Description of Artificial Sequence: Synthetic oligonucleotide
ucucacaaauaaaugugau

SEQ ID NO: 799145 - RNA, 19 nt, Artificial Sequence
  Description of Artificial Sequence: Synthetic oligonucleotide
uaucuguuuaugugcaacu

SEQ ID NO: 799146 - RNA, 19 nt, Artificial Sequence
  Description of Artificial Sequence: Synthetic oligonucleotide
cauuaagggcagaauuagg

SEQ ID NO: 799147 - RNA, 19 nt, Artificial Sequence
  Description of Artificial Sequence: Synthetic oligonucleotide
uaauguguagaacgcuucu

SEQ ID NO: 799148 - RNA, 19 nt, Artificial Sequence
  Description of Artificial Sequence: Synthetic oligonucleotide
gagaaaaguucacugggga

SEQ ID NO: 799149 - RNA, 19 nt, Artificial Sequence
  Description of Artificial Sequence: Synthetic oligonucleotide
uguuaaggaaguccauuaa

SEQ ID NO: 799150 - RNA, 19 nt, Artificial Sequence
  Description of Artificial Sequence: Synthetic oligonucleotide
aaggguuggaaacuucaaa

SEQ ID NO: 799151 - RNA, 19 nt, Artificial Sequence
  Description of Artificial Sequence: Synthetic oligonucleotide
cagaauuagguuuacucca

SEQ ID NO: 799152 - RNA, 19 nt, Artificial Sequence
  Description of Artificial Sequence: Synthetic oligonucleotide
gcuucauauaaaugcauag

SEQ ID NO: 799153 - RNA, 19 nt, Artificial Sequence
  Description of Artificial Sequence: Synthetic oligonucleotide
ucgcccaaaagaacaagug

SEQ ID NO: 799154 - RNA, 19 nt, Artificial Sequence
  Description of Artificial Sequence: Synthetic oligonucleotide
cacuguucggcuaauggug

SEQ ID NO: 799155 - RNA, 19 nt, Artificial Sequence
  Description of Artificial Sequence: Synthetic oligonucleotide
ucauuccuaguucuaggga

SEQ ID NO: 799156 - RNA, 19 nt, Artificial Sequence
  Description of Artificial Sequence: Synthetic oligonucleotide
auguauaccaugucauccu

SEQ ID NO: 799157 - RNA, 19 nt, Artificial Sequence
  Description of Artificial Sequence: Synthetic oligonucleotide
uucgcccaaaagaacaagu

SEQ ID NO: 799158 - RNA, 19 nt, Artificial Sequence
  Description of Artificial Sequence: Synthetic oligonucleotide
gaucauacuguaacugacc

SEQ ID NO: 799159 - RNA, 19 nt, Artificial Sequence
  Description of Artificial Sequence: Synthetic oligonucleotide
aaaaguggugaauccguuu

SEQ ID NO: 799160 - RNA, 19 nt, Artificial Sequence
  Description of Artificial Sequence: Synthetic oligonucleotide
ugacagauugcugaugacu

SEQ ID NO: 799161 - RNA, 19 nt, Artificial Sequence
  Description of Artificial Sequence: Synthetic oligonucleotide
aagguggcacugaauauag

SEQ ID NO: 799162 - RNA, 19 nt, Artificial Sequence
  Description of Artificial Sequence: Synthetic oligonucleotide
accaagcuuaaggaagugc

SEQ ID NO: 799163 - RNA, 19 nt, Artificial Sequence
  Description of Artificial Sequence: Synthetic oligonucleotide
uuaacauccuccugcugac

SEQ ID NO: 799164 - RNA, 19 nt, Artificial Sequence
  Description of Artificial Sequence: Synthetic oligonucleotide
agagguagccgauaaucca

SEQ ID NO: 799165 - RNA, 19 nt, Artificial Sequence
  Description of Artificial Sequence: Synthetic oligonucleotide
uuucaauuccauugauagu

SEQ ID NO: 799166 - RNA, 19 nt, Artificial Sequence
  Description of Artificial Sequence: Synthetic oligonucleotide
guagccgauaauccacugg

SEQ ID NO: 799167 - RNA, 19 nt, Artificial Sequence
  Description of Artificial Sequence: Synthetic oligonucleotide
aaaacgacaucagcugcug

SEQ ID NO: 799168 - RNA, 19 nt, Artificial Sequence
  Description of Artificial Sequence: Synthetic oligonucleotide
agugaucuccugcuuaaca

SEQ ID NO: 799169 - RNA, 19 nt, Artificial Sequence
  Description of Artificial Sequence: Synthetic oligonucleotide
cuaauguguagaacgcuuc

SEQ ID NO: 799170 - RNA, 19 nt, Artificial Sequence
  Description of Artificial Sequence: Synthetic oligonucleotide
uuaucugaucauacuguaa

SEQ ID NO: 799171 - RNA, 19 nt, Artificial Sequence
  Description of Artificial Sequence: Synthetic oligonucleotide
cuuucgaccaaugugacaa

SEQ ID NO: 799172 - RNA, 19 nt, Artificial Sequence
  Description of Artificial Sequence: Synthetic oligonucleotide
aacuaaguuugcccuuucu

SEQ ID NO: 799173 - RNA, 19 nt, Artificial Sequence
  Description of Artificial Sequence: Synthetic oligonucleotide
ccaagcuuaaggaagugcc

SEQ ID NO: 799174 - RNA, 19 nt, Artificial Sequence
  Description of Artificial Sequence: Synthetic oligonucleotide
ucuugaaguucgcuuauuu

SEQ ID NO: 799175 - RNA, 19 nt, Artificial Sequence
  Description of Artificial Sequence: Synthetic oligonucleotide
aguucagaauacucggccu

SEQ ID NO: 799176 - RNA, 19 nt, Artificial Sequence
  Description of Artificial Sequence: Synthetic oligonucleotide
aaaccaagcuuaaggaagu

SEQ ID NO: 799177 - RNA, 19 nt, Artificial Sequence
  Description of Artificial Sequence: Synthetic oligonucleotide
ucgagcguggcagugaucu

SEQ ID NO: 799178 - RNA, 19 nt, Artificial Sequence
  Description of Artificial Sequence: Synthetic oligonucleotide
aguauugauuacaaagggu

SEQ ID NO: 799179 - RNA, 19 nt, Artificial Sequence
  Description of Artificial Sequence: Synthetic oligonucleotide
ggaagugccgaguugcuag

SEQ ID NO: 799180 - RNA, 19 nt, Artificial Sequence
  Description of Artificial Sequence: Synthetic oligonucleotide
uucgaccaaugugacaagg

SEQ ID NO: 799181 - RNA, 19 nt, Artificial Sequence
  Description of Artificial Sequence: Synthetic oligonucleotide
ucgaccaaugugacaagga

SEQ ID NO: 799182 - RNA, 19 nt, Artificial Sequence
  Description of Artificial Sequence: Synthetic oligonucleotide
accauggagucuugucacc

SEQ ID NO: 799183 - RNA, 19 nt, Artificial Sequence
  Description of Artificial Sequence: Synthetic oligonucleotide
guucagaauacucggccug

SEQ ID NO: 799184 - RNA, 19 nt, Artificial Sequence
  Description of Artificial Sequence: Synthetic oligonucleotide
gaccauggagucuugucac

SEQ ID NO: 799185 - RNA, 19 nt, Artificial Sequence
  Description of Artificial Sequence: Synthetic oligonucleotide
auuccgagggaacacaguu

SEQ ID NO: 799186 - RNA, 19 nt, Artificial Sequence
  Description of Artificial Sequence: Synthetic oligonucleotide
ucugcuaaucucugguaaa

SEQ ID NO: 799187 - RNA, 19 nt, Artificial Sequence
  Description of Artificial Sequence: Synthetic oligonucleotide
ugauaaugcuggagauucc

SEQ ID NO: 799188 - RNA, 19 nt, Artificial Sequence
  Description of Artificial Sequence: Synthetic oligonucleotide
ugggcuucggcuugcaaac

SEQ ID NO: 799189 - RNA, 19 nt, Artificial Sequence
  Description of Artificial Sequence: Synthetic oligonucleotide
acuucuauaaugagauuga

SEQ ID NO: 799190 - RNA, 19 nt, Artificial Sequence
  Description of Artificial Sequence: Synthetic oligonucleotide
uugauuacaaaggguugga

SEQ ID NO: 799191 - RNA, 19 nt, Artificial Sequence
  Description of Artificial Sequence: Synthetic oligonucleotide
cagacucuuaaacagaucu

SEQ ID NO: 799192 - RNA, 19 nt, Artificial Sequence
  Description of Artificial Sequence: Synthetic oligonucleotide
aucugcuaaucucugguaa

SEQ ID NO: 799193 - RNA, 19 nt, Artificial Sequence
  Description of Artificial Sequence: Synthetic oligonucleotide
ucagaaaacugaucucgau

SEQ ID NO: 799194 - RNA, 19 nt, Artificial Sequence
  Description of Artificial Sequence: Synthetic oligonucleotide
uacuguaacugaccaugga

SEQ ID NO: 799195 - RNA, 19 nt, Artificial Sequence
  Description of Artificial Sequence: Synthetic oligonucleotide
gaaauuaagaggugggcuu

SEQ ID NO: 799196 - RNA, 19 nt, Artificial Sequence
  Description of Artificial Sequence: Synthetic oligonucleotide
aggaccuccguccaauacu

SEQ ID NO: 799197 - RNA, 19 nt, Artificial Sequence
  Description of Artificial Sequence: Synthetic oligonucleotide
cauuccuaguucuagggaa

SEQ ID NO: 799198 - RNA, 19 nt, Artificial Sequence
  Description of Artificial Sequence: Synthetic oligonucleotide
auaaugggcuugcugacuu

SEQ ID NO: 799199 - RNA, 19 nt, Artificial Sequence
  Description of Artificial Sequence: Synthetic oligonucleotide
cuccauauaaaacgacauc

SEQ ID NO: 799200 - RNA, 19 nt, Artificial Sequence
  Description of Artificial Sequence: Synthetic oligonucleotide
ugcuuaacauccuccugcu

SEQ ID NO: 799201 - RNA, 19 nt, Artificial Sequence
  Description of Artificial Sequence: Synthetic oligonucleotide
agcuguacagugucauuug

SEQ ID NO: 799202 - RNA, 19 nt, Artificial Sequence
  Description of Artificial Sequence: Synthetic oligonucleotide
acacacuaauguguagaac

SEQ ID NO: 799203 - RNA, 19 nt, Artificial Sequence
  Description of Artificial Sequence: Synthetic oligonucleotide
cacuucgcccaaaagaaca

SEQ ID NO: 799204 - RNA, 19 nt, Artificial Sequence
  Description of Artificial Sequence: Synthetic oligonucleotide
gaaguucgcuuauuucuuc

SEQ ID NO: 799205 - RNA, 19 nt, Artificial Sequence
  Description of Artificial Sequence: Synthetic oligonucleotide
aauacucggccugaugcaa

SEQ ID NO: 799206 - RNA, 19 nt, Artificial Sequence
  Description of Artificial Sequence: Synthetic oligonucleotide
ugaauccguuucuugugcu

SEQ ID NO: 799207 - RNA, 19 nt, Artificial Sequence
  Description of Artificial Sequence: Synthetic oligonucleotide
gagagaagguuagugagaa

SEQ ID NO: 799208 - RNA, 19 nt, Artificial Sequence
  Description of Artificial Sequence: Synthetic oligonucleotide
agcacuucgcccaaaagaa

SEQ ID NO: 799209 - RNA, 19 nt, Artificial Sequence
  Description of Artificial Sequence: Synthetic oligonucleotide
uguauaccaugucauccuu

SEQ ID NO: 799210 - RNA, 19 nt, Artificial Sequence
  Description of Artificial Sequence: Synthetic oligonucleotide
cuaauggugucaaggccuc

SEQ ID NO: 799211 - RNA, 19 nt, Artificial Sequence
  Description of Artificial Sequence: Synthetic oligonucleotide
gccuuuauggaaaugcuug

SEQ ID NO: 799212 - RNA, 19 nt, Artificial Sequence
  Description of Artificial Sequence: Synthetic oligonucleotide
gacucuccaagauagcaua

SEQ ID NO: 799213 - RNA, 19 nt, Artificial Sequence
  Description of Artificial Sequence: Synthetic oligonucleotide
gagguagccgauaauccac

SEQ ID NO: 799214 - RNA, 19 nt, Artificial Sequence
  Description of Artificial Sequence: Synthetic oligonucleotide
ugccauccggagcagcaag

SEQ ID NO: 799215 - RNA, 19 nt, Artificial Sequence
  Description of Artificial Sequence: Synthetic oligonucleotide
uuaacccaaugcaauuguu

SEQ ID NO: 799216 - RNA, 19 nt, Artificial Sequence
  Description of Artificial Sequence: Synthetic oligonucleotide
auacuguaacugaccaugg

SEQ ID NO: 799217 - RNA, 19 nt, Artificial Sequence
  Description of Artificial Sequence: Synthetic oligonucleotide
uuguaguauugauuacaaa

SEQ ID NO: 799218 - RNA, 19 nt, Artificial Sequence
  Description of Artificial Sequence: Synthetic oligonucleotide
acuccauauaaaacgacau

SEQ ID NO: 799219 - RNA, 19 nt, Artificial Sequence
  Description of Artificial Sequence: Synthetic oligonucleotide
uuccuaacauucccacacu

SEQ ID NO: 799220 - RNA, 19 nt, Artificial Sequence
  Description of Artificial Sequence: Synthetic oligonucleotide
aaacgacaucagcugcuga

SEQ ID NO: 799221 - RNA, 19 nt, Artificial Sequence
  Description of Artificial Sequence: Synthetic oligonucleotide
guuagugagaagcuccaua

SEQ ID NO: 799222 - RNA, 19 nt, Artificial Sequence
  Description of Artificial Sequence: Synthetic oligonucleotide
agcuccauaaugagaagca

SEQ ID NO: 799223 - RNA, 19 nt, Artificial Sequence
  Description of Artificial Sequence: Synthetic oligonucleotide
gauaauccacugggaaccc

SEQ ID NO: 799224 - RNA, 19 nt, Artificial Sequence
  Description of Artificial Sequence: Synthetic oligonucleotide
gagcguggcagugaucucc

SEQ ID NO: 799225 - RNA, 19 nt, Artificial Sequence
  Description of Artificial Sequence: Synthetic oligonucleotide
accuccguccaauacugcu

SEQ ID NO: 799226 - RNA, 19 nt, Artificial Sequence
  Description of Artificial Sequence: Synthetic oligonucleotide
uuucgaccaaugugacaag

SEQ ID NO: 799227 - RNA, 19 nt, Artificial Sequence
  Description of Artificial Sequence: Synthetic oligonucleotide
ucauacuguaacugaccau

SEQ ID NO: 799228 - RNA, 19 nt, Artificial Sequence
  Description of Artificial Sequence: Synthetic oligonucleotide
cuuaucugaucauacugua

SEQ ID NO: 799229 - RNA, 19 nt, Artificial Sequence
  Description of Artificial Sequence: Synthetic oligonucleotide
uguucggcuaaugguguca

SEQ ID NO: 799230 - RNA, 19 nt, Artificial Sequence
  Description of Artificial Sequence: Synthetic oligonucleotide
acuaauguguagaacgcuu

SEQ ID NO: 799231 - RNA, 19 nt, Artificial Sequence
  Description of Artificial Sequence: Synthetic oligonucleotide
gcuaaucucugguaaauaa

SEQ ID NO: 799232 - RNA, 19 nt, Artificial Sequence
  Description of Artificial Sequence: Synthetic oligonucleotide
cauagcuuuggacucucca

SEQ ID NO: 799233 - RNA, 19 nt, Artificial Sequence
  Description of Artificial Sequence: Synthetic oligonucleotide
uuccgcuguaacaucuauc

SEQ ID NO: 799234 - RNA, 19 nt, Artificial Sequence
  Description of Artificial Sequence: Synthetic oligonucleotide
aacagcaugcugaguaaaa

SEQ ID NO: 799235 - RNA, 19 nt, Artificial Sequence
  Description of Artificial Sequence: Synthetic oligonucleotide
ggcuaauggugucaaggcc

SEQ ID NO: 799236 - RNA, 19 nt, Artificial Sequence
  Description of Artificial Sequence: Synthetic oligonucleotide
gguuuacuccauauaaaac

SEQ ID NO: 799237 - RNA, 19 nt, Artificial Sequence
  Description of Artificial Sequence: Synthetic oligonucleotide
ugacuuucuguaagaggua

SEQ ID NO: 799238 - RNA, 19 nt, Artificial Sequence
  Description of Artificial Sequence: Synthetic oligonucleotide
auaacuaaguuugcccuuu

SEQ ID NO: 799239 - RNA, 19 nt, Artificial Sequence
  Description of Artificial Sequence: Synthetic oligonucleotide
guccauaugugcaaaaccu

SEQ ID NO: 799240 - RNA, 19 nt, Artificial Sequence
  Description of Artificial Sequence: Synthetic oligonucleotide
acaaaggguuggaaacuuc

SEQ ID NO: 799241 - RNA, 19 nt, Artificial Sequence
  Description of Artificial Sequence: Synthetic oligonucleotide
uacuuccauuaacccaaug

SEQ ID NO: 799242 - RNA, 19 nt, Artificial Sequence
  Description of Artificial Sequence: Synthetic oligonucleotide
cugaucucgaucaucuucu

SEQ ID NO: 799243 - RNA, 19 nt, Artificial Sequence
  Description of Artificial Sequence: Synthetic oligonucleotide
uucugaacucauugauguc

SEQ ID NO: 799244 - RNA, 19 nt, Artificial Sequence
  Description of Artificial Sequence: Synthetic oligonucleotide
ugacaaggagcuguacagu

SEQ ID NO: 799245 - RNA, 19 nt, Artificial Sequence
  Description of Artificial Sequence: Synthetic oligonucleotide
ucggcggcaauucuuccua

SEQ ID NO: 799246 - RNA, 19 nt, Artificial Sequence
  Description of Artificial Sequence: Synthetic oligonucleotide
uccguguugugcuuuugua

SEQ ID NO: 799247 - RNA, 19 nt, Artificial Sequence
  Description of Artificial Sequence: Synthetic oligonucleotide
uuccaacgcagcacuucgc

SEQ ID NO: 799248 - RNA, 19 nt, Artificial Sequence
  Description of Artificial Sequence: Synthetic oligonucleotide
aaugugacaaggagcugua

SEQ ID NO: 799249 - RNA, 19 nt, Artificial Sequence
  Description of Artificial Sequence: Synthetic oligonucleotide
uuagcacacuguucggcua

SEQ ID NO: 799250 - RNA, 19 nt, Artificial Sequence
  Description of Artificial Sequence: Synthetic oligonucleotide
uuaucagauugcugauaau

SEQ ID NO: 799251 - RNA, 19 nt, Artificial Sequence
  Description of Artificial Sequence: Synthetic oligonucleotide
agggaauacaucagacucu

SEQ ID NO: 799252 - RNA, 19 nt, Artificial Sequence
  Description of Artificial Sequence: Synthetic oligonucleotide
cuauccuuugccgcccuag

SEQ ID NO: 799253 - RNA, 19 nt, Artificial Sequence
  Description of Artificial Sequence: Synthetic oligonucleotide
cacaaggccucgagcgugg

SEQ ID NO: 799254 - RNA, 19 nt, Artificial Sequence
  Description of Artificial Sequence: Synthetic oligonucleotide
cgauaauccacugggaacc

SEQ ID NO: 799255 - RNA, 19 nt, Artificial Sequence
  Description of Artificial Sequence: Synthetic oligonucleotide
auugucgaccuggguggcc

SEQ ID NO: 799256 - RNA, 19 nt, Artificial Sequence
  Description of Artificial Sequence: Synthetic oligonucleotide
caacgcagcacuucgccca

SEQ ID NO: 799257 - RNA, 19 nt, Artificial Sequence
  Description of Artificial Sequence: Synthetic oligonucleotide
uaacuaaguuugcccuuuc

SEQ ID NO: 799258 - RNA, 19 nt, Artificial Sequence
  Description of Artificial Sequence: Synthetic oligonucleotide
uuccgagggaacacaguua

SEQ ID NO: 799259 - RNA, 19 nt, Artificial Sequence
  Description of Artificial Sequence: Synthetic oligonucleotide
guauaccaugucauccuug

SEQ ID NO: 799260 - RNA, 19 nt, Artificial Sequence
  Description of Artificial Sequence: Synthetic oligonucleotide
agaauuagguuuacuccau

SEQ ID NO: 799261 - RNA, 19 nt, Artificial Sequence
  Description of Artificial Sequence: Synthetic oligonucleotide
uccuaguucuagggaauac

SEQ ID NO: 799262 - RNA, 19 nt, Artificial Sequence
  Description of Artificial Sequence: Synthetic oligonucleotide
gugccgaguugcuagaaaa

SEQ ID NO: 799263 - RNA, 19 nt, Artificial Sequence
  Description of Artificial Sequence: Synthetic oligonucleotide
acucgacaagaaauuaaga

SEQ ID NO: 799264 - RNA, 19 nt, Artificial Sequence
  Description of Artificial Sequence: Synthetic oligonucleotide
aguguucggcggcaauucu

SEQ ID NO: 799265 - RNA, 19 nt, Artificial Sequence
  Description of Artificial Sequence: Synthetic oligonucleotide
acauuccgagggaacacag

SEQ ID NO: 799266 - RNA, 19 nt, Artificial Sequence
  Description of Artificial Sequence: Synthetic oligonucleotide
gaauggcuacauugucgac

SEQ ID NO: 799267 - RNA, 19 nt, Artificial Sequence
  Description of Artificial Sequence: Synthetic oligonucleotide
cuagggaauacaucagacu

SEQ ID NO: 799268 - RNA, 19 nt, Artificial Sequence
  Description of Artificial Sequence: Synthetic oligonucleotide
uggacucgacaagaaauua

SEQ ID NO: 799269 - RNA, 19 nt, Artificial Sequence
  Description of Artificial Sequence: Synthetic oligonucleotide
auaaugcuggagauuccca

SEQ ID NO: 799270 - RNA, 19 nt, Artificial Sequence
  Description of Artificial Sequence: Synthetic oligonucleotide
ccgauaauccacugggaac

SEQ ID NO: 799271 - RNA, 19 nt, Artificial Sequence
  Description of Artificial Sequence: Synthetic oligonucleotide
gcaaaaccuccuaagacca

SEQ ID NO: 799272 - RNA, 19 nt, Artificial Sequence
  Description of Artificial Sequence: Synthetic oligonucleotide
gugggcuucggcuugcaaa

SEQ ID NO: 799273 - RNA, 19 nt, Artificial Sequence
  Description of Artificial Sequence: Synthetic oligonucleotide
caucuauccuuugccgccc

SEQ ID NO: 799274 - RNA, 19 nt, Artificial Sequence
  Description of Artificial Sequence: Synthetic oligonucleotide
gaagugccgaguugcuaga

SEQ ID NO: 799275 - RNA, 19 nt, Artificial Sequence
  Description of Artificial Sequence: Synthetic oligonucleotide
acacaaggccucgagcgug

SEQ ID NO: 799276 - RNA, 19 nt, Artificial Sequence
  Description of Artificial Sequence: Synthetic oligonucleotide
acuguucggcuaauggugu

SEQ ID NO: 799277 - RNA, 19 nt, Artificial Sequence
  Description of Artificial Sequence: Synthetic oligonucleotide
cccuagauuauucuuagaa

SEQ ID NO: 799278 - RNA, 19 nt, Artificial Sequence
  Description of Artificial Sequence: Synthetic oligonucleotide
ugcuaaucucugguaaaua

SEQ ID NO: 799279 - RNA, 19 nt, Artificial Sequence
  Description of Artificial Sequence: Synthetic oligonucleotide
agugccgaguugcuagaaa

SEQ ID NO: 799280 - RNA, 19 nt, Artificial Sequence
  Description of Artificial Sequence: Synthetic oligonucleotide
acucucaggaagcgcugcu

SEQ ID NO: 799281 - RNA, 19 nt, Artificial Sequence
  Description of Artificial Sequence: Synthetic oligonucleotide
gacagauugcugaugacuu

SEQ ID NO: 799282 - RNA, 19 nt, Artificial Sequence
  Description of Artificial Sequence: Synthetic oligonucleotide
gucucaaccaguucagaau

SEQ ID NO: 799283 - RNA, 19 nt, Artificial Sequence
  Description of Artificial Sequence: Synthetic oligonucleotide
uugccgcccuagauuauuc

SEQ ID NO: 799284 - RNA, 19 nt, Artificial Sequence
  Description of Artificial Sequence: Synthetic oligonucleotide
aaggaagugccgaguugcu

SEQ ID NO: 799285 - RNA, 19 nt, Artificial Sequence
  Description of Artificial Sequence: Synthetic oligonucleotide
cuggggauggcaguuaaaa

SEQ ID NO: 799286 - RNA, 19 nt, Artificial Sequence
  Description of Artificial Sequence: Synthetic oligonucleotide
uucggcuugcaaacugcuu

SEQ ID NO: 799287 - RNA, 19 nt, Artificial Sequence
  Description of Artificial Sequence: Synthetic oligonucleotide
acuggcuaguugaucagaa

SEQ ID NO: 799288 - RNA, 19 nt, Artificial Sequence
  Description of Artificial Sequence: Synthetic oligonucleotide
ugccgcccuagauuauucu

SEQ ID NO: 799289 - RNA, 19 nt, Artificial Sequence
  Description of Artificial Sequence: Synthetic oligonucleotide
cacauugaauaacuaaguu

SEQ ID NO: 799290 - RNA, 19 nt, Artificial Sequence
  Description of Artificial Sequence: Synthetic oligonucleotide
gcauaucuguuuaugugca

SEQ ID NO: 799291 - RNA, 19 nt, Artificial Sequence
  Description of Artificial Sequence: Synthetic oligonucleotide
gcuccauaaugagaagcag

SEQ ID NO: 799292 - RNA, 19 nt, Artificial Sequence
  Description of Artificial Sequence: Synthetic oligonucleotide
ugucacccuuucuucuaau

SEQ ID NO: 799293 - RNA, 19 nt, Artificial Sequence
  Description of Artificial Sequence: Synthetic oligonucleotide
ggcuucggcuugcaaacug

SEQ ID NO: 799294 - RNA, 19 nt, Artificial Sequence
  Description of Artificial Sequence: Synthetic oligonucleotide
caguguucggcggcaauuc

SEQ ID NO: 799295 - RNA, 19 nt, Artificial Sequence
  Description of Artificial Sequence: Synthetic oligonucleotide
gccgauaauccacugggaa

SEQ ID NO: 799296 - RNA, 19 nt, Artificial Sequence
  Description of Artificial Sequence: Synthetic oligonucleotide
gguagccgauaauccacug

SEQ ID NO: 799297 - RNA, 19 nt, Artificial Sequence
  Description of Artificial Sequence: Synthetic oligonucleotide
gcuaauggugucaaggccu

SEQ ID NO: 799298 - RNA, 19 nt, Artificial Sequence
  Description of Artificial Sequence: Synthetic oligonucleotide
ggccucgaggcagagcugg

SEQ ID NO: 799299 - RNA, 19 nt, Artificial Sequence
  Description of Artificial Sequence: Synthetic oligonucleotide
cuuaaggaagugccgaguu

SEQ ID NO: 799300 - RNA, 19 nt, Artificial Sequence
  Description of Artificial Sequence: Synthetic oligonucleotide
cauacaguguucggcggca

SEQ ID NO: 799301 - RNA, 19 nt, Artificial Sequence
  Description of Artificial Sequence: Synthetic oligonucleotide
gcuaguugaucagaaaacu

SEQ ID NO: 799302 - RNA, 19 nt, Artificial Sequence
  Description of Artificial Sequence: Synthetic oligonucleotide
gcggcaauucuuccuaaca

SEQ ID NO: 799303 - RNA, 19 nt, Artificial Sequence
  Description of Artificial Sequence: Synthetic oligonucleotide
augcauagcuuuggacucu

SEQ ID NO: 799304 - RNA, 19 nt, Artificial Sequence
  Description of Artificial Sequence: Synthetic oligonucleotide
gagcuguacagugucauuu

SEQ ID NO: 799305 - RNA, 19 nt, Artificial Sequence
  Description of Artificial Sequence: Synthetic oligonucleotide
agccuuuauggaaaugcuu

SEQ ID NO: 799306 - RNA, 19 nt, Artificial Sequence
  Description of Artificial Sequence: Synthetic oligonucleotide
ggagucuugucacccuuuc

SEQ ID NO: 799307 - RNA, 19 nt, Artificial Sequence
  Description of Artificial Sequence: Synthetic oligonucleotide
agguagccgauaauccacu

SEQ ID NO: 799308 - RNA, 19 nt, Artificial Sequence
  Description of Artificial Sequence: Synthetic oligonucleotide
aucuauccuuugccgcccu

SEQ ID NO: 799309 - RNA, 19 nt, Artificial Sequence
  Description of Artificial Sequence: Synthetic oligonucleotide
ucaucuccguguugugcuu

SEQ ID NO: 799310 - RNA, 19 nt, Artificial Sequence
  Description of Artificial Sequence: Synthetic oligonucleotide
gucacccuuucuucuaaua

SEQ ID NO: 799311 - RNA, 19 nt, Artificial Sequence
  Description of Artificial Sequence: Synthetic oligonucleotide
ccuccguccaauacugcug

SEQ ID NO: 799312 - RNA, 19 nt, Artificial Sequence
  Description of Artificial Sequence: Synthetic oligonucleotide
ucuauccuuugccgcccua

SEQ ID NO: 799313 - RNA, 19 nt, Artificial Sequence
  Description of Artificial Sequence: Synthetic oligonucleotide
cggcuaauggugucaaggc

SEQ ID NO: 799314 - RNA, 19 nt, Artificial Sequence
  Description of Artificial Sequence: Synthetic oligonucleotide
cauugucgaccuggguggc

SEQ ID NO: 799315 - RNA, 19 nt, Artificial Sequence
  Description of Artificial Sequence: Synthetic oligonucleotide
cguccaauacugcugcuug

SEQ ID NO: 799316 - RNA, 19 nt, Artificial Sequence
  Description of Artificial Sequence: Synthetic oligonucleotide
aagugccgaguugcuagaa

SEQ ID NO: 799317 - RNA, 19 nt, Artificial Sequence
  Description of Artificial Sequence: Synthetic oligonucleotide
cauuggcagucaaauuucu

SEQ ID NO: 799318 - RNA, 19 nt, Artificial Sequence
  Description of Artificial Sequence: Synthetic oligonucleotide
ucuccguguugugcuuuug

SEQ ID NO: 799319 - RNA, 19 nt, Artificial Sequence
  Description of Artificial Sequence: Synthetic oligonucleotide
gugcuuuagcacacuguuc

SEQ ID NO: 799320 - RNA, 19 nt, Artificial Sequence
  Description of Artificial Sequence: Synthetic oligonucleotide
agguggcacugaauauagg

SEQ ID NO: 799321 - RNA, 19 nt, Artificial Sequence
  Description of Artificial Sequence: Synthetic oligonucleotide
cuggcuaguugaucagaaa

SEQ ID NO: 799322 - RNA, 19 nt, Artificial Sequence
  Description of Artificial Sequence: Synthetic oligonucleotide
ggacucgacaagaaauuaa

SEQ ID NO: 799323 - RNA, 19 nt, Artificial Sequence
  Description of Artificial Sequence: Synthetic oligonucleotide
ggcucauguccucuaaaua

SEQ ID NO: 799324 - RNA, 19 nt, Artificial Sequence
  Description of Artificial Sequence: Synthetic oligonucleotide
cggccugaugcaaacacac

SEQ ID NO: 799325 - RNA, 19 nt, Artificial Sequence
  Description of Artificial Sequence: Synthetic oligonucleotide
aucuccguguugugcuuuu

SEQ ID NO: 799326 - RNA, 19 nt, Artificial Sequence
  Description of Artificial Sequence: Synthetic oligonucleotide
ccuaguucuagggaauaca

SEQ ID NO: 799327 - RNA, 19 nt, Artificial Sequence
  Description of Artificial Sequence: Synthetic oligonucleotide
gcuuaacauccuccugcug

SEQ ID NO: 799328 - RNA, 19 nt, Artificial Sequence
  Description of Artificial Sequence: Synthetic oligonucleotide
aacugaccauggagucuug

SEQ ID NO: 799329 - RNA, 19 nt, Artificial Sequence
  Description of Artificial Sequence: Synthetic oligonucleotide
ggcggcaauucuuccuaac

SEQ ID NO: 799330 - RNA, 19 nt, Artificial Sequence
  Description of Artificial Sequence: Synthetic oligonucleotide
agcguggcagugaucuccu

SEQ ID NO: 799331 - RNA, 19 nt, Artificial Sequence
  Description of Artificial Sequence: Synthetic oligonucleotide
guaagagguagccgauaau

SEQ ID NO: 799332 - RNA, 19 nt, Artificial Sequence
  Description of Artificial Sequence: Synthetic oligonucleotide
agccgauaauccacuggga

SEQ ID NO: 799333 - RNA, 19 nt, Artificial Sequence
  Description of Artificial Sequence: Synthetic oligonucleotide
guacugcucuucuuccgcu

SEQ ID NO: 799334 - RNA, 19 nt, Artificial Sequence
  Description of Artificial Sequence: Synthetic oligonucleotide
ccuuugccgcccuagauua

SEQ ID NO: 799335 - RNA, 19 nt, Artificial Sequence
  Description of Artificial Sequence: Synthetic oligonucleotide
gccauccggagcagcaagg

SEQ ID NO: 799336 - RNA, 19 nt, Artificial Sequence
  Description of Artificial Sequence: Synthetic oligonucleotide
cauugaugucauuccuagu

SEQ ID NO: 799337 - RNA, 19 nt, Artificial Sequence
  Description of Artificial Sequence: Synthetic oligonucleotide
aggaagugccgaguugcua

SEQ ID NO: 799338 - RNA, 19 nt, Artificial Sequence
  Description of Artificial Sequence: Synthetic oligonucleotide
cacuaauguguagaacgcu

SEQ ID NO: 799339 - RNA, 19 nt, Artificial Sequence
  Description of Artificial Sequence: Synthetic oligonucleotide
ccguuucuugugcuuuagc

SEQ ID NO: 799340 - RNA, 19 nt, Artificial Sequence
  Description of Artificial Sequence: Synthetic oligonucleotide
caguuaucagauugcugau

SEQ ID NO: 799341 - RNA, 19 nt, Artificial Sequence
  Description of Artificial Sequence: Synthetic oligonucleotide
cauuccgagggaacacagu

SEQ ID NO: 799342 - RNA, 19 nt, Artificial Sequence
  Description of Artificial Sequence: Synthetic oligonucleotide
ccguguugugcuuuuguaa

SEQ ID NO: 799343 - RNA, 19 nt, Artificial Sequence
  Description of Artificial Sequence: Synthetic oligonucleotide
ccuuuauggaaaugcuugu

SEQ ID NO: 799344 - RNA, 19 nt, Artificial Sequence
  Description of Artificial Sequence: Synthetic oligonucleotide
auacaguguucggcggcaa

SEQ ID NO: 799345 - RNA, 19 nt, Artificial Sequence
  Description of Artificial Sequence: Synthetic oligonucleotide
auacuuccauuaacccaau

SEQ ID NO: 799346 - RNA, 19 nt, Artificial Sequence
  Description of Artificial Sequence: Synthetic oligonucleotide
gcuugcugacuugacagua

SEQ ID NO: 799347 - RNA, 19 nt, Artificial Sequence
  Description of Artificial Sequence: Synthetic oligonucleotide
cacacaaggccucgagcgu

SEQ ID NO: 799348 - RNA, 19 nt, Artificial Sequence
  Description of Artificial Sequence: Synthetic oligonucleotide
cuccguguugugcuuuugu

SEQ ID NO: 799349 - RNA, 19 nt, Artificial Sequence
  Description of Artificial Sequence: Synthetic oligonucleotide
cucgagcguggcagugauc

SEQ ID NO: 799350 - RNA, 19 nt, Artificial Sequence
  Description of Artificial Sequence: Synthetic oligonucleotide
cugcuaaucucugguaaau

SEQ ID NO: 799351 - RNA, 19 nt, Artificial Sequence
  Description of Artificial Sequence: Synthetic oligonucleotide
cucgaggcagagcuggcau

SEQ ID NO: 799352 - RNA, 19 nt, Artificial Sequence
  Description of Artificial Sequence: Synthetic oligonucleotide
cauccuccugcugacacau

SEQ ID NO: 799353 - RNA, 19 nt, Artificial Sequence
  Description of Artificial Sequence: Synthetic oligonucleotide
cuuccgcuguaacaucuau

SEQ ID NO: 799354 - RNA, 19 nt, Artificial Sequence
  Description of Artificial Sequence: Synthetic oligonucleotide
ggcacugaauauaggaauu

SEQ ID NO: 799355 - RNA, 19 nt, Artificial Sequence
  Description of Artificial Sequence: Synthetic oligonucleotide
gguaaauaaugggcuugcu

SEQ ID NO: 799356 - RNA, 19 nt, Artificial Sequence
  Description of Artificial Sequence: Synthetic oligonucleotide
cguguugugcuuuuguaau

SEQ ID NO: 799357 - RNA, 19 nt, Artificial Sequence
  Description of Artificial Sequence: Synthetic oligonucleotide
augccacacaaggccucga

SEQ ID NO: 799358 - RNA, 19 nt, Artificial Sequence
  Description of Artificial Sequence: Synthetic oligonucleotide
cgcuguaacaucuauccuu

SEQ ID NO: 799359 - RNA, 19 nt, Artificial Sequence
  Description of Artificial Sequence: Synthetic oligonucleotide
gcucacuacuccagacuga

SEQ ID NO: 799360 - RNA, 19 nt, Artificial Sequence
  Description of Artificial Sequence: Synthetic oligonucleotide
ccaagauagcauaucuguu

SEQ ID NO: 799361 - RNA, 19 nt, Artificial Sequence
  Description of Artificial Sequence: Synthetic oligonucleotide
gcauagcuuuggacucucc

SEQ ID NO: 799362 - RNA, 19 nt, Artificial Sequence
  Description of Artificial Sequence: Synthetic oligonucleotide
cuaagaccagagccuucau

SEQ ID NO: 799363 - RNA, 19 nt, Artificial Sequence
  Description of Artificial Sequence: Synthetic oligonucleotide
gcugauaaugcuggagauu

SEQ ID NO: 799364 - RNA, 19 nt, Artificial Sequence
  Description of Artificial Sequence: Synthetic oligonucleotide
cauucccacacuggcuagu

SEQ ID NO: 799365 - RNA, 19 nt, Artificial Sequence
  Description of Artificial Sequence: Synthetic oligonucleotide
guguucggcggcaauucuu

SEQ ID NO: 799366 - RNA, 19 nt, Artificial Sequence
  Description of Artificial Sequence: Synthetic oligonucleotide
ggugggcuucggcuugcaa

SEQ ID NO: 799367 - RNA, 19 nt, Artificial Sequence
  Description of Artificial Sequence: Synthetic oligonucleotide
gguuagugagaagcuccau

SEQ ID NO: 799368 - RNA, 19 nt, Artificial Sequence
  Description of Artificial Sequence: Synthetic oligonucleotide
gggcagaauuagguuuacu

SEQ ID NO: 799369 - RNA, 19 nt, Artificial Sequence
  Description of Artificial Sequence: Synthetic oligonucleotide
ccgcuguaacaucuauccu

SEQ ID NO: 799370 - RNA, 19 nt, Artificial Sequence
  Description of Artificial Sequence: Synthetic oligonucleotide
gcuugucaucuuggaccaa

SEQ ID NO: 799371 - RNA, 19 nt, Artificial Sequence
  Description of Artificial Sequence: Synthetic oligonucleotide
cggcggcaauucuuccuaa

SEQ ID NO: 799372 - RNA, 19 nt, Artificial Sequence
  Description of Artificial Sequence: Synthetic oligonucleotide
aauuacuccaggcuguucc

SEQ ID NO: 799373 - RNA, 19 nt, Artificial Sequence
  Description of Artificial Sequence: Synthetic oligonucleotide
uaaaguucaaugcugagac

SEQ ID NO: 799374 - RNA, 19 nt, Artificial Sequence
  Description of Artificial Sequence: Synthetic oligonucleotide
cauagugacagaaaggucc

SEQ ID NO: 799375 - RNA, 19 nt, Artificial Sequence
  Description of Artificial Sequence: Synthetic oligonucleotide
ugguauuuccuccaguugg

SEQ ID NO: 799376 - RNA, 19 nt, Artificial Sequence
  Description of Artificial Sequence: Synthetic oligonucleotide
uuaaucaccuccuuggacc

SEQ ID NO: 799377 - RNA, 19 nt, Artificial Sequence
  Description of Artificial Sequence: Synthetic oligonucleotide
aucuuuugcgcccaugugc

SEQ ID NO: 799378 - RNA, 19 nt, Artificial Sequence
  Description of Artificial Sequence: Synthetic oligonucleotide
aacgcuuaguuucugggag

SEQ ID NO: 799379 - RNA, 19 nt, Artificial Sequence
  Description of Artificial Sequence: Synthetic oligonucleotide
ucucauuggugaaaggccg

SEQ ID NO: 799380 - RNA, 19 nt, Artificial Sequence
  Description of Artificial Sequence: Synthetic oligonucleotide
cuagcaguaaaguucaaug

SEQ ID NO: 799381 - RNA, 19 nt, Artificial Sequence
  Description of Artificial Sequence: Synthetic oligonucleotide
cagacguucacgcugaucc

SEQ ID NO: 799382 - RNA, 19 nt, Artificial Sequence
  Description of Artificial Sequence: Synthetic oligonucleotide
cuguaaaacgcuuaguuuc

SEQ ID NO: 799383 - RNA, 19 nt, Artificial Sequence
  Description of Artificial Sequence: Synthetic oligonucleotide
ugaaccuacauagaugucc

SEQ ID NO: 799384 - RNA, 19 nt, Artificial Sequence
  Description of Artificial Sequence: Synthetic oligonucleotide
ucuuaaugaguaccauucg

SEQ ID NO: 799385 - RNA, 19 nt, Artificial Sequence
  Description of Artificial Sequence: Synthetic oligonucleotide
aagagcgcugguuaagccg

SEQ ID NO: 799386 - RNA, 19 nt, Artificial Sequence
  Description of Artificial Sequence: Synthetic oligonucleotide
uuaacaggugccaaggcgu

SEQ ID NO: 799387 - RNA, 19 nt, Artificial Sequence
  Description of Artificial Sequence: Synthetic oligonucleotide
aaugaguaccauucguucu

SEQ ID NO: 799388 - RNA, 19 nt, Artificial Sequence
  Description of Artificial Sequence: Synthetic oligonucleotide
agacuguagacucucauug

SEQ ID NO: 799389 - RNA, 19 nt, Artificial Sequence
  Description of Artificial Sequence: Synthetic oligonucleotide
uagaucucuaaauaugaca

SEQ ID NO: 799390 - RNA, 19 nt, Artificial Sequence
  Description of Artificial Sequence: Synthetic oligonucleotide
auauuugagugucuccugg

SEQ ID NO: 799391 - RNA, 19 nt, Artificial Sequence
  Description of Artificial Sequence: Synthetic oligonucleotide
cuuaacaggugccaaggcg

SEQ ID NO: 799392 - RNA, 19 nt, Artificial Sequence
  Description of Artificial Sequence: Synthetic oligonucleotide
cuuaagucucucaaucucc

SEQ ID NO: 799393 - RNA, 19 nt, Artificial Sequence
  Description of Artificial Sequence: Synthetic oligonucleotide
ugguagaucucuaaauaug

SEQ ID NO: 799394 - RNA, 19 nt, Artificial Sequence
  Description of Artificial Sequence: Synthetic oligonucleotide
uuagcuucuguaaaacgcu

SEQ ID NO: 799395 - RNA, 19 nt, Artificial Sequence
  Description of Artificial Sequence: Synthetic oligonucleotide
cuauaccucguacacaggg

SEQ ID NO: 799396 - RNA, 19 nt, Artificial Sequence
  Description of Artificial Sequence: Synthetic oligonucleotide
uguaugguauucgagggag

SEQ ID NO: 799397 - RNA, 19 nt, Artificial Sequence
  Description of Artificial Sequence: Synthetic oligonucleotide
uucuguaaaacgcuuaguu

SEQ ID NO: 799398 - RNA, 19 nt, Artificial Sequence
  Description of Artificial Sequence: Synthetic oligonucleotide
aauaccuuuuccugguaga

SEQ ID NO: 799399 - RNA, 19 nt, Artificial Sequence
  Description of Artificial Sequence: Synthetic oligonucleotide
uauaccucguacacagggg

SEQ ID NO: 799400 - RNA, 19 nt, Artificial Sequence
  Description of Artificial Sequence: Synthetic oligonucleotide
aaaacgucuuuccggagca

SEQ ID NO: 799401 - RNA, 19 nt, Artificial Sequence
  Description of Artificial Sequence: Synthetic oligonucleotide
uaaaacgcuuaguuucugg

SEQ ID NO: 799402 - RNA, 19 nt, Artificial Sequence
  Description of Artificial Sequence: Synthetic oligonucleotide
uaauaccuuuuccugguag

SEQ ID NO: 799403 - RNA, 19 nt, Artificial Sequence
  Description of Artificial Sequence: Synthetic oligonucleotide
gaugcuaugagcugagcca

SEQ ID NO: 799404 - RNA, 19 nt, Artificial Sequence
  Description of Artificial Sequence: Synthetic oligonucleotide
agcaguaaaguucaaugcu

SEQ ID NO: 799405 - RNA, 19 nt, Artificial Sequence
  Description of Artificial Sequence: Synthetic oligonucleotide
cuuuccggagcaauguugg

SEQ ID NO: 799406 - RNA, 19 nt, Artificial Sequence
  Description of Artificial Sequence: Synthetic oligonucleotide
uguaaaacgcuuaguuucu

SEQ ID NO: 799407 - RNA, 19 nt, Artificial Sequence
  Description of Artificial Sequence: Synthetic oligonucleotide
acacguguucucuuucucc

SEQ ID NO: 799408 - RNA, 19 nt, Artificial Sequence
  Description of Artificial Sequence: Synthetic oligonucleotide
cuuaggaugggcuguacug

SEQ ID NO: 799409 - RNA, 19 nt, Artificial Sequence
  Description of Artificial Sequence: Synthetic oligonucleotide
cucucauuggugaaaggcc

SEQ ID NO: 799410 - RNA, 19 nt, Artificial Sequence
  Description of Artificial Sequence: Synthetic oligonucleotide
uuaagucucucaaucucca

SEQ ID NO: 799411 - RNA, 19 nt, Artificial Sequence
  Description of Artificial Sequence: Synthetic oligonucleotide
ugaaaggccgguuaaucac

SEQ ID NO: 799412 - RNA, 19 nt, Artificial Sequence
  Description of Artificial Sequence: Synthetic oligonucleotide
uucgccuucaggaaagacu

SEQ ID NO: 799413 - RNA, 19 nt, Artificial Sequence
  Description of Artificial Sequence: Synthetic oligonucleotide
cagaaguacugcaugacug

SEQ ID NO: 799414 - RNA, 19 nt, Artificial Sequence
  Description of Artificial Sequence: Synthetic oligonucleotide
gacgguuguccucugagcc

SEQ ID NO: 799415 - RNA, 19 nt, Artificial Sequence
  Description of Artificial Sequence: Synthetic oligonucleotide
ucuuuccggagcaauguug

SEQ ID NO: 799416 - RNA, 19 nt, Artificial Sequence
  Description of Artificial Sequence: Synthetic oligonucleotide
cuagugaugggcuucugug

SEQ ID NO: 799417 - RNA, 19 nt, Artificial Sequence
  Description of Artificial Sequence: Synthetic oligonucleotide
aauaugacauagugacaga

SEQ ID NO: 799418 - RNA, 19 nt, Artificial Sequence
  Description of Artificial Sequence: Synthetic oligonucleotide
uucguucucgcuuuggggu

SEQ ID NO: 799419 - RNA, 19 nt, Artificial Sequence
  Description of Artificial Sequence: Synthetic oligonucleotide
uccuaccuugcuuaggcag

SEQ ID NO: 799420 - RNA, 19 nt, Artificial Sequence
  Description of Artificial Sequence: Synthetic oligonucleotide
gaguccugcaauaagcgag

SEQ ID NO: 799421 - RNA, 19 nt, Artificial Sequence
  Description of Artificial Sequence: Synthetic oligonucleotide
auucguucucgcuuugggg

SEQ ID NO: 799422 - RNA, 19 nt, Artificial Sequence
  Description of Artificial Sequence: Synthetic oligonucleotide
aaucuuuugcgcccaugug

SEQ ID NO: 799423 - RNA, 19 nt, Artificial Sequence
  Description of Artificial Sequence: Synthetic oligonucleotide
aacucggagaagcuaguga

SEQ ID NO: 799424 - RNA, 19 nt, Artificial Sequence
  Description of Artificial Sequence: Synthetic oligonucleotide
auagugacagaaagguccc

SEQ ID NO: 799425 - RNA, 19 nt, Artificial Sequence
  Description of Artificial Sequence: Synthetic oligonucleotide
ucaaugcugagacuguauc

SEQ ID NO: 799426 - RNA, 19 nt, Artificial Sequence
  Description of Artificial Sequence: Synthetic oligonucleotide
agaucucuaaauaugacau

SEQ ID NO: 799427 - RNA, 19 nt, Artificial Sequence
  Description of Artificial Sequence: Synthetic oligonucleotide
cuuaguuucugggaggcag

SEQ ID NO: 799428 - RNA, 19 nt, Artificial Sequence
  Description of Artificial Sequence: Synthetic oligonucleotide
aagcucaagagguucgccu

SEQ ID NO: 799429 - RNA, 19 nt, Artificial Sequence
  Description of Artificial Sequence: Synthetic oligonucleotide
ugugccaguaacucugggc

SEQ ID NO: 799430 - RNA, 19 nt, Artificial Sequence
  Description of Artificial Sequence: Synthetic oligonucleotide
acgcugauccaccuugacc

SEQ ID NO: 799431 - RNA, 19 nt, Artificial Sequence
  Description of Artificial Sequence: Synthetic oligonucleotide
uaacucugggcuaaucugu

SEQ ID NO: 799432 - RNA, 19 nt, Artificial Sequence
  Description of Artificial Sequence: Synthetic oligonucleotide
acaacucgauuucuacugg

SEQ ID NO: 799433 - RNA, 19 nt, Artificial Sequence
  Description of Artificial Sequence: Synthetic oligonucleotide
cuaaucuguaacucccagc

SEQ ID NO: 799434 - RNA, 19 nt, Artificial Sequence
  Description of Artificial Sequence: Synthetic oligonucleotide
gaugaguugggccuucuuc

SEQ ID NO: 799435 - RNA, 19 nt, Artificial Sequence
  Description of Artificial Sequence: Synthetic oligonucleotide
agaggucuaauaccuuuuc

SEQ ID NO: 799436 - RNA, 19 nt, Artificial Sequence
  Description of Artificial Sequence: Synthetic oligonucleotide
agccgaaugcccugguugc

SEQ ID NO: 799437 - RNA, 19 nt, Artificial Sequence
  Description of Artificial Sequence: Synthetic oligonucleotide
ggaucuucgacucugucug

SEQ ID NO: 799438 - RNA, 19 nt, Artificial Sequence
  Description of Artificial Sequence: Synthetic oligonucleotide
aauggccgcagucguacag

SEQ ID NO: 799439 - RNA, 19 nt, Artificial Sequence
  Description of Artificial Sequence: Synthetic oligonucleotide
ugggcuaaucuguaacucc

SEQ ID NO: 799440 - RNA, 19 nt, Artificial Sequence
  Description of Artificial Sequence: Synthetic oligonucleotide
auaagguagaguuuuccuu

SEQ ID NO: 799441 - RNA, 19 nt, Artificial Sequence
  Description of Artificial Sequence: Synthetic oligonucleotide
cagcaaacgauccaaguuc

SEQ ID NO: 799442 - RNA, 19 nt, Artificial Sequence
  Description of Artificial Sequence: Synthetic oligonucleotide
caaacgauccaaguucagg

SEQ ID NO: 799443 - RNA, 19 nt, Artificial Sequence
  Description of Artificial Sequence: Synthetic oligonucleotide
aguacgaagagggagguau

SEQ ID NO: 799444 - RNA, 19 nt, Artificial Sequence
  Description of Artificial Sequence: Synthetic oligonucleotide
ugguccgcagccaagcuca

SEQ ID NO: 799445 - RNA, 19 nt, Artificial Sequence
  Description of Artificial Sequence: Synthetic oligonucleotide
uacagcuacccuuacucga

SEQ ID NO: 799446 - RNA, 19 nt, Artificial Sequence
  Description of Artificial Sequence: Synthetic oligonucleotide
gaaguacugcaugacugcg

SEQ ID NO: 799447 - RNA, 19 nt, Artificial Sequence
  Description of Artificial Sequence: Synthetic oligonucleotide
agcugucuauaccucguac

SEQ ID NO: 799448 - RNA, 19 nt, Artificial Sequence
  Description of Artificial Sequence: Synthetic oligonucleotide
cauucguucucgcuuuggg

SEQ ID NO: 799449 - RNA, 19 nt, Artificial Sequence
  Description of Artificial Sequence: Synthetic oligonucleotide
cuggccaaugcguugcagg

SEQ ID NO: 799450 - RNA, 19 nt, Artificial Sequence
  Description of Artificial Sequence: Synthetic oligonucleotide
cugauauuugagugucucc

SEQ ID NO: 799451 - RNA, 19 nt, Artificial Sequence
  Description of Artificial Sequence: Synthetic oligonucleotide
caguuggccaccucaagag

SEQ ID NO: 799452 - RNA, 19 nt, Artificial Sequence
  Description of Artificial Sequence: Synthetic oligonucleotide
aacuccugaaguggccgcc

SEQ ID NO: 799453 - RNA, 19 nt, Artificial Sequence
  Description of Artificial Sequence: Synthetic oligonucleotide
aaaguucaaugcugagacu

SEQ ID NO: 799454 - RNA, 19 nt, Artificial Sequence
  Description of Artificial Sequence: Synthetic oligonucleotide
caauaagguagaguuuucc

SEQ ID NO: 799455 - RNA, 19 nt, Artificial Sequence
  Description of Artificial Sequence: Synthetic oligonucleotide
uugggguauucaguaaagg

SEQ ID NO: 799456 - RNA, 19 nt, Artificial Sequence
  Description of Artificial Sequence: Synthetic oligonucleotide
gagccgaaugcccugguug

SEQ ID NO: 799457 - RNA, 19 nt, Artificial Sequence
  Description of Artificial Sequence: Synthetic oligonucleotide
uaaauggccgcagucguac

SEQ ID NO: 799458 - RNA, 19 nt, Artificial Sequence
  Description of Artificial Sequence: Synthetic oligonucleotide
cuacccuuacucgagcugg

SEQ ID NO: 799459 - RNA, 19 nt, Artificial Sequence
  Description of Artificial Sequence: Synthetic oligonucleotide
ucuauaccucguacacagg

SEQ ID NO: 799460 - RNA, 19 nt, Artificial Sequence
  Description of Artificial Sequence: Synthetic oligonucleotide
guacagcuacccuuacucg

SEQ ID NO: 799461 - RNA, 19 nt, Artificial Sequence
  Description of Artificial Sequence: Synthetic oligonucleotide
agucuucucggaucgcuag

SEQ ID NO: 799462 - RNA, 19 nt, Artificial Sequence
  Description of Artificial Sequence: Synthetic oligonucleotide
aaguacugcaugacugcgg

SEQ ID NO: 799463 - RNA, 19 nt, Artificial Sequence
  Description of Artificial Sequence: Synthetic oligonucleotide
augcuaugagcugagccac

SEQ ID NO: 799464 - RNA, 19 nt, Artificial Sequence
  Description of Artificial Sequence: Synthetic oligonucleotide
augaugaugcuaugagcug

SEQ ID NO: 799465 - RNA, 19 nt, Artificial Sequence
  Description of Artificial Sequence: Synthetic oligonucleotide
ucaucuuaagucucucaau

SEQ ID NO: 799466 - RNA, 19 nt, Artificial Sequence
  Description of Artificial Sequence: Synthetic oligonucleotide
ggucuaauaccuuuuccug

SEQ ID NO: 799467 - RNA, 19 nt, Artificial Sequence
  Description of Artificial Sequence: Synthetic oligonucleotide
ugucuuaaugaguaccauu

SEQ ID NO: 799468 - RNA, 19 nt, Artificial Sequence
  Description of Artificial Sequence: Synthetic oligonucleotide
auauggaucuucgacucug

SEQ ID NO: 799469 - RNA, 19 nt, Artificial Sequence
  Description of Artificial Sequence: Synthetic oligonucleotide
uauuugagugucuccuggu

SEQ ID NO: 799470 - RNA, 19 nt, Artificial Sequence
  Description of Artificial Sequence: Synthetic oligonucleotide
cacugucuuaaugaguacc

SEQ ID NO: 799471 - RNA, 19 nt, Artificial Sequence
  Description of Artificial Sequence: Synthetic oligonucleotide
aguaggcccauaggcaagc

SEQ ID NO: 799472 - RNA, 19 nt, Artificial Sequence
  Description of Artificial Sequence: Synthetic oligonucleotide
gcugcuauagacucagggc

SEQ ID NO: 799473 - RNA, 19 nt, Artificial Sequence
  Description of Artificial Sequence: Synthetic oligonucleotide
cucauuggugaaaggccgg

SEQ ID NO: 799474 - RNA, 19 nt, Artificial Sequence
  Description of Artificial Sequence: Synthetic oligonucleotide
cuuggaccuagcaguaaag

SEQ ID NO: 799475 - RNA, 19 nt, Artificial Sequence
  Description of Artificial Sequence: Synthetic oligonucleotide
gaagagcgcugguuaagcc

SEQ ID NO: 799476 - RNA, 19 nt, Artificial Sequence
  Description of Artificial Sequence: Synthetic oligonucleotide
ugccuguacaagagggaag

SEQ ID NO: 799477 - RNA, 19 nt, Artificial Sequence
  Description of Artificial Sequence: Synthetic oligonucleotide
uagaguuuuccuucccgcu

SEQ ID NO: 799478 - RNA, 19 nt, Artificial Sequence
  Description of Artificial Sequence: Synthetic oligonucleotide
ugggcuguacugaaccuac

SEQ ID NO: 799479 - RNA, 19 nt, Artificial Sequence
  Description of Artificial Sequence: Synthetic oligonucleotide
uuugagccgaaugcccugg

SEQ ID NO: 799480 - RNA, 19 nt, Artificial Sequence
  Description of Artificial Sequence: Synthetic oligonucleotide
gaugaugcuaugagcugag

SEQ ID NO: 799481 - RNA, 19 nt, Artificial Sequence
  Description of Artificial Sequence: Synthetic oligonucleotide
aacauggcuggguccauau

SEQ ID NO: 799482 - RNA, 19 nt, Artificial Sequence
  Description of Artificial Sequence: Synthetic oligonucleotide
aaaugccuuaggaugggcu

SEQ ID NO: 799483 - RNA, 19 nt, Artificial Sequence
  Description of Artificial Sequence: Synthetic oligonucleotide
uucauccauaaauggccgc

SEQ ID NO: 799484 - RNA, 19 nt, Artificial Sequence
  Description of Artificial Sequence: Synthetic oligonucleotide
ugagacuguagacucucau

SEQ ID NO: 799485 - RNA, 19 nt, Artificial Sequence
  Description of Artificial Sequence: Synthetic oligonucleotide
agcgaguaagcuugcuguc

SEQ ID NO: 799486 - RNA, 19 nt, Artificial Sequence
  Description of Artificial Sequence: Synthetic oligonucleotide
ugauccaccuugaccagaa

SEQ ID NO: 799487 - RNA, 19 nt, Artificial Sequence
  Description of Artificial Sequence: Synthetic oligonucleotide
ugucccuguaugguauucg

SEQ ID NO: 799488 - RNA, 19 nt, Artificial Sequence
  Description of Artificial Sequence: Synthetic oligonucleotide
gaaaggccgguuaaucacc

SEQ ID NO: 799489 - RNA, 19 nt, Artificial Sequence
  Description of Artificial Sequence: Synthetic oligonucleotide
agcccugggaauuacucca

SEQ ID NO: 799490 - RNA, 19 nt, Artificial Sequence
  Description of Artificial Sequence: Synthetic oligonucleotide
cuucccgcuggcgaaaugg

SEQ ID NO: 799491 - RNA, 19 nt, Artificial Sequence
  Description of Artificial Sequence: Synthetic oligonucleotide
ucccuguaugguauucgag

SEQ ID NO: 799492 - RNA, 19 nt, Artificial Sequence
  Description of Artificial Sequence: Synthetic oligonucleotide
cacuuugcccaguacgaag

SEQ ID NO: 799493 - RNA, 19 nt, Artificial Sequence
  Description of Artificial Sequence: Synthetic oligonucleotide
gggguauucaguaaaggug

SEQ ID NO: 799494 - RNA, 19 nt, Artificial Sequence
  Description of Artificial Sequence: Synthetic oligonucleotide
caggaaucaggauguuucc

SEQ ID NO: 799495 - RNA, 19 nt, Artificial Sequence
  Description of Artificial Sequence: Synthetic oligonucleotide
cccuguaugguauucgagg

SEQ ID NO: 799496 - RNA, 19 nt, Artificial Sequence
  Description of Artificial Sequence: Synthetic oligonucleotide
agagcgcugguuaagccgg

SEQ ID NO: 799497 - RNA, 19 nt, Artificial Sequence
  Description of Artificial Sequence: Synthetic oligonucleotide
uacugcaugacugcgggaa

SEQ ID NO: 799498 - RNA, 19 nt, Artificial Sequence
  Description of Artificial Sequence: Synthetic oligonucleotide
ugcuauagacucagggcuc

SEQ ID NO: 799499 - RNA, 19 nt, Artificial Sequence
  Description of Artificial Sequence: Synthetic oligonucleotide
caacucgauuucuacuggc

SEQ ID NO: 799500 - RNA, 19 nt, Artificial Sequence
  Description of Artificial Sequence: Synthetic oligonucleotide
gcuuagcuucuguaaaacg

SEQ ID NO: 799501 - RNA, 19 nt, Artificial Sequence
  Description of Artificial Sequence: Synthetic oligonucleotide
acgcuuaguuucugggagg

SEQ ID NO: 799502 - RNA, 19 nt, Artificial Sequence
  Description of Artificial Sequence: Synthetic oligonucleotide
auaugacauagugacagaa

SEQ ID NO: 799503 - RNA, 19 nt, Artificial Sequence
  Description of Artificial Sequence: Synthetic oligonucleotide
acugucuuaaugaguacca

SEQ ID NO: 799504 - RNA, 19 nt, Artificial Sequence
  Description of Artificial Sequence: Synthetic oligonucleotide
ucgauuucuacuggcuggc

SEQ ID NO: 799505 - RNA, 19 nt, Artificial Sequence
  Description of Artificial Sequence: Synthetic oligonucleotide
gugaaaggccgguuaauca

SEQ ID NO: 799506 - RNA, 19 nt, Artificial Sequence
  Description of Artificial Sequence: Synthetic oligonucleotide
aacucgauuucuacuggcu

SEQ ID NO: 799507 - RNA, 19 nt, Artificial Sequence
  Description of Artificial Sequence: Synthetic oligonucleotide
ugccccaguaggcccauag

SEQ ID NO: 799508 - RNA, 19 nt, Artificial Sequence
  Description of Artificial Sequence: Synthetic oligonucleotide
agacucucauuggugaaag

SEQ ID NO: 799509 - RNA, 19 nt, Artificial Sequence
  Description of Artificial Sequence: Synthetic oligonucleotide
gaccuagcaguaaaguuca

SEQ ID NO: 799510 - RNA, 19 nt, Artificial Sequence
  Description of Artificial Sequence: Synthetic oligonucleotide
ucaagagagcagcugucua

SEQ ID NO: 799511 - RNA, 19 nt, Artificial Sequence
  Description of Artificial Sequence: Synthetic oligonucleotide
aaacucggagaagcuagug

SEQ ID NO: 799512 - RNA, 19 nt, Artificial Sequence
  Description of Artificial Sequence: Synthetic oligonucleotide
caguaaaguucaaugcuga

SEQ ID NO: 799513 - RNA, 19 nt, Artificial Sequence
  Description of Artificial Sequence: Synthetic oligonucleotide
aaucaguugcaggggcauc

SEQ ID NO: 799514 - RNA, 19 nt, Artificial Sequence
  Description of Artificial Sequence: Synthetic oligonucleotide
agacagcuuaacaggugcc

SEQ ID NO: 799515 - RNA, 19 nt, Artificial Sequence
  Description of Artificial Sequence: Synthetic oligonucleotide
ugcuuagcuucuguaaaac

SEQ ID NO: 799516 - RNA, 19 nt, Artificial Sequence
  Description of Artificial Sequence: Synthetic oligonucleotide
agaaaggucccagggucgg

SEQ ID NO: 799517 - RNA, 19 nt, Artificial Sequence
  Description of Artificial Sequence: Synthetic oligonucleotide
ggauauggaucuucgacuc

SEQ ID NO: 799518 - RNA, 19 nt, Artificial Sequence
  Description of Artificial Sequence: Synthetic oligonucleotide
uauucgagggaggcccugg

SEQ ID NO: 799519 - RNA, 19 nt, Artificial Sequence
  Description of Artificial Sequence: Synthetic oligonucleotide
uauggaucuucgacucugu

SEQ ID NO: 799520 - RNA, 19 nt, Artificial Sequence
  Description of Artificial Sequence: Synthetic oligonucleotide
acauagugacagaaagguc

SEQ ID NO: 799521 - RNA, 19 nt, Artificial Sequence
  Description of Artificial Sequence: Synthetic oligonucleotide
aauaaucuuuugcgcccau

SEQ ID NO: 799522 - RNA, 19 nt, Artificial Sequence
  Description of Artificial Sequence: Synthetic oligonucleotide
augacugcgggaagagcgc

SEQ ID NO: 799523 - RNA, 19 nt, Artificial Sequence
  Description of Artificial Sequence: Synthetic oligonucleotide
ggcgaaauggagccagacg

SEQ ID NO: 799524 - RNA, 19 nt, Artificial Sequence
  Description of Artificial Sequence: Synthetic oligonucleotide
ggaccuagcaguaaaguuc

SEQ ID NO: 799525 - RNA, 19 nt, Artificial Sequence
  Description of Artificial Sequence: Synthetic oligonucleotide
aaccuacauagauguccug

SEQ ID NO: 799526 - RNA, 19 nt, Artificial Sequence
  Description of Artificial Sequence: Synthetic oligonucleotide
aaggccgguuaaucaccuc

SEQ ID NO: 799527 - RNA, 19 nt, Artificial Sequence
  Description of Artificial Sequence: Synthetic oligonucleotide
ccuagcaauucuuucugag

SEQ ID NO: 799528 - RNA, 19 nt, Artificial Sequence
  Description of Artificial Sequence: Synthetic oligonucleotide
uucgacucugucugcuucu

SEQ ID NO: 799529 - RNA, 19 nt, Artificial Sequence
  Description of Artificial Sequence: Synthetic oligonucleotide
gaggcccugguuuaaugca

SEQ ID NO: 799530 - RNA, 19 nt, Artificial Sequence
  Description of Artificial Sequence: Synthetic oligonucleotide
cugguugccugugcgacgg

SEQ ID NO: 799531 - RNA, 19 nt, Artificial Sequence
  Description of Artificial Sequence: Synthetic oligonucleotide
agacacguguucucuuucu

SEQ ID NO: 799532 - RNA, 19 nt, Artificial Sequence
  Description of Artificial Sequence: Synthetic oligonucleotide
ugcugucccuguaugguau

SEQ ID NO: 799533 - RNA, 19 nt, Artificial Sequence
  Description of Artificial Sequence: Synthetic oligonucleotide
gcaguaaaguucaaugcug

SEQ ID NO: 799534 - RNA, 19 nt, Artificial Sequence
  Description of Artificial Sequence: Synthetic oligonucleotide
gcuccuaccuugcuuaggc

SEQ ID NO: 799535 - RNA, 19 nt, Artificial Sequence
  Description of Artificial Sequence: Synthetic oligonucleotide
gcuaaucuguaacucccag

SEQ ID NO: 799536 - RNA, 19 nt, Artificial Sequence
  Description of Artificial Sequence: Synthetic oligonucleotide
cccaguacgaagagggagg

SEQ ID NO: 799537 - RNA, 19 nt, Artificial Sequence
  Description of Artificial Sequence: Synthetic oligonucleotide
cuaccuugcuuaggcagcg

SEQ ID NO: 799538 - RNA, 19 nt, Artificial Sequence
  Description of Artificial Sequence: Synthetic oligonucleotide
aggugccaaggcgugagac

SEQ ID NO: 799539 - RNA, 19 nt, Artificial Sequence
  Description of Artificial Sequence: Synthetic oligonucleotide
aagagagcagcugucuaua

SEQ ID NO: 799540 - RNA, 19 nt, Artificial Sequence
  Description of Artificial Sequence: Synthetic oligonucleotide
ggauguuuccucgacaguc

SEQ ID NO: 799541 - RNA, 19 nt, Artificial Sequence
  Description of Artificial Sequence: Synthetic oligonucleotide
ggauccagugccucuuggg

SEQ ID NO: 799542 - RNA, 19 nt, Artificial Sequence
  Description of Artificial Sequence: Synthetic oligonucleotide
gugccaguaacucugggcu

SEQ ID NO: 799543 - RNA, 19 nt, Artificial Sequence
  Description of Artificial Sequence: Synthetic oligonucleotide
agcaaacgauccaaguuca

SEQ ID NO: 799544 - RNA, 19 nt, Artificial Sequence
  Description of Artificial Sequence: Synthetic oligonucleotide
uguuccgggcugccuagca

SEQ ID NO: 799545 - RNA, 19 nt, Artificial Sequence
  Description of Artificial Sequence: Synthetic oligonucleotide
aaaggccgguuaaucaccu

SEQ ID NO: 799546 - RNA, 19 nt, Artificial Sequence
  Description of Artificial Sequence: Synthetic oligonucleotide
cucggagaagcuagugaug

SEQ ID NO: 799547 - RNA, 19 nt, Artificial Sequence
  Description of Artificial Sequence: Synthetic oligonucleotide
acguucacgcugauccacc

SEQ ID NO: 799548 - RNA, 19 nt, Artificial Sequence
  Description of Artificial Sequence: Synthetic oligonucleotide
aguuggccaccucaagaga

SEQ ID NO: 799549 - RNA, 19 nt, Artificial Sequence
  Description of Artificial Sequence: Synthetic oligonucleotide
uauagacucagggcuccca

SEQ ID NO: 799550 - RNA, 19 nt, Artificial Sequence
  Description of Artificial Sequence: Synthetic oligonucleotide
uuuccggagcaauguuggc

SEQ ID NO: 799551 - RNA, 19 nt, Artificial Sequence
  Description of Artificial Sequence: Synthetic oligonucleotide
gacagcuuaacaggugcca

SEQ ID NO: 799552 - RNA, 19 nt, Artificial Sequence
  Description of Artificial Sequence: Synthetic oligonucleotide
ucguacagcuacccuuacu

SEQ ID NO: 799553 - RNA, 19 nt, Artificial Sequence
  Description of Artificial Sequence: Synthetic oligonucleotide
ugcgcagaucccgagcuga

SEQ ID NO: 799554 - RNA, 19 nt, Artificial Sequence
  Description of Artificial Sequence: Synthetic oligonucleotide
acaggugccaaggcgugag

SEQ ID NO: 799555 - RNA, 19 nt, Artificial Sequence
  Description of Artificial Sequence: Synthetic oligonucleotide
cuucgacucugucugcuuc

SEQ ID NO: 799556 - RNA, 19 nt, Artificial Sequence
  Description of Artificial Sequence: Synthetic oligonucleotide
aaauggccgcagucguaca

SEQ ID NO: 799557 - RNA, 19 nt, Artificial Sequence
  Description of Artificial Sequence: Synthetic oligonucleotide
uaccauucguucucgcuuu

SEQ ID NO: 799558 - RNA, 19 nt, Artificial Sequence
  Description of Artificial Sequence: Synthetic oligonucleotide
gcgaaauggagccagacgu

SEQ ID NO: 799559 - RNA, 19 nt, Artificial Sequence
  Description of Artificial Sequence: Synthetic oligonucleotide
gaucuucgacucugucugc

SEQ ID NO: 799560 - RNA, 19 nt, Artificial Sequence
  Description of Artificial Sequence: Synthetic oligonucleotide
agguauugauggcuccacu

SEQ ID NO: 799561 - RNA, 19 nt, Artificial Sequence
  Description of Artificial Sequence: Synthetic oligonucleotide
guaugguauucgagggagg

SEQ ID NO: 799562 - RNA, 19 nt, Artificial Sequence
  Description of Artificial Sequence: Synthetic oligonucleotide
ggaggcccugguuuaaugc

SEQ ID NO: 799563 - RNA, 19 nt, Artificial Sequence
  Description of Artificial Sequence: Synthetic oligonucleotide
gacguucacgcugauccac

SEQ ID NO: 799564 - RNA, 19 nt, Artificial Sequence
  Description of Artificial Sequence: Synthetic oligonucleotide
agcuacccuuacucgagcu

SEQ ID NO: 799565 - RNA, 19 nt, Artificial Sequence
  Description of Artificial Sequence: Synthetic oligonucleotide
gagguauugauggcuccac

SEQ ID NO: 799566 - RNA, 19 nt, Artificial Sequence
  Description of Artificial Sequence: Synthetic oligonucleotide
agcucaagagguucgccuu

SEQ ID NO: 799567 - RNA, 19 nt, Artificial Sequence
  Description of Artificial Sequence: Synthetic oligonucleotide
uucccgcuggcgaaaugga

SEQ ID NO: 799568 - RNA, 19 nt, Artificial Sequence
  Description of Artificial Sequence: Synthetic oligonucleotide
cccauaggcaagcacacug

SEQ ID NO: 799569 - RNA, 19 nt, Artificial Sequence
  Description of Artificial Sequence: Synthetic oligonucleotide
uuuggauccagugccucuu

SEQ ID NO: 799570 - RNA, 19 nt, Artificial Sequence
  Description of Artificial Sequence: Synthetic oligonucleotide
acgguuguccucugagcca

SEQ ID NO: 799571 - RNA, 19 nt, Artificial Sequence
  Description of Artificial Sequence: Synthetic oligonucleotide
ggcgugagacuguagacuc

SEQ ID NO: 799572 - RNA, 19 nt, Artificial Sequence
  Description of Artificial Sequence: Synthetic oligonucleotide
acaucggauggcuccggcu

SEQ ID NO: 799573 - RNA, 19 nt, Artificial Sequence
  Description of Artificial Sequence: Synthetic oligonucleotide
cuugcuuaggcagcggcca

SEQ ID NO: 799574 - RNA, 19 nt, Artificial Sequence
  Description of Artificial Sequence: Synthetic oligonucleotide
gaaccuacauagauguccu

SEQ ID NO: 799575 - RNA, 19 nt, Artificial Sequence
  Description of Artificial Sequence: Synthetic oligonucleotide
gagacuguauccagguaaa

SEQ ID NO: 799576 - RNA, 19 nt, Artificial Sequence
  Description of Artificial Sequence: Synthetic oligonucleotide
aggcgugagacuguagacu

SEQ ID NO: 799577 - RNA, 19 nt, Artificial Sequence
  Description of Artificial Sequence: Synthetic oligonucleotide
gagguucgccuucaggaaa

SEQ ID NO: 799578 - RNA, 19 nt, Artificial Sequence
  Description of Artificial Sequence: Synthetic oligonucleotide
guaaaacgcuuaguuucug

SEQ ID NO: 799579 - RNA, 19 nt, Artificial Sequence
  Description of Artificial Sequence: Synthetic oligonucleotide
auaccuuuuccugguagau

SEQ ID NO: 799580 - RNA, 19 nt, Artificial Sequence
  Description of Artificial Sequence: Synthetic oligonucleotide
aguucaaugcugagacugu

SEQ ID NO: 799581 - RNA, 19 nt, Artificial Sequence
  Description of Artificial Sequence: Synthetic oligonucleotide
caguaggcccauaggcaag

SEQ ID NO: 799582 - RNA, 19 nt, Artificial Sequence
  Description of Artificial Sequence: Synthetic oligonucleotide
gggcuaaucuguaacuccc

SEQ ID NO: 799583 - RNA, 19 nt, Artificial Sequence
  Description of Artificial Sequence: Synthetic oligonucleotide
ucucgcuuugggguauuca

SEQ ID NO: 799584 - RNA, 19 nt, Artificial Sequence
  Description of Artificial Sequence: Synthetic oligonucleotide
aggauguuuccucgacagu

SEQ ID NO: 799585 - RNA, 19 nt, Artificial Sequence
  Description of Artificial Sequence: Synthetic oligonucleotide
caagcucaagagguucgcc

SEQ ID NO: 799586 - RNA, 19 nt, Artificial Sequence
  Description of Artificial Sequence: Synthetic oligonucleotide
gcuccuacaacucgauuuc

SEQ ID NO: 799587 - RNA, 19 nt, Artificial Sequence
  Description of Artificial Sequence: Synthetic oligonucleotide
uacccuuacucgagcugga

SEQ ID NO: 799588 - RNA, 19 nt, Artificial Sequence
  Description of Artificial Sequence: Synthetic oligonucleotide
aguccugcaauaagcgagu

SEQ ID NO: 799589 - RNA, 19 nt, Artificial Sequence
  Description of Artificial Sequence: Synthetic oligonucleotide
uaccuuuuccugguagauc

SEQ ID NO: 799590 - RNA, 19 nt, Artificial Sequence
  Description of Artificial Sequence: Synthetic oligonucleotide
uugauggcuccacucucuu

SEQ ID NO: 799591 - RNA, 19 nt, Artificial Sequence
  Description of Artificial Sequence: Synthetic oligonucleotide
ggauccaagaggucuaaua

SEQ ID NO: 799592 - RNA, 19 nt, Artificial Sequence
  Description of Artificial Sequence: Synthetic oligonucleotide
agacguucacgcugaucca

SEQ ID NO: 799593 - RNA, 19 nt, Artificial Sequence
  Description of Artificial Sequence: Synthetic oligonucleotide
gucccuguaugguauucga

SEQ ID NO: 799594 - RNA, 19 nt, Artificial Sequence
  Description of Artificial Sequence: Synthetic oligonucleotide
ugccacugugccuguacaa

SEQ ID NO: 799595 - RNA, 19 nt, Artificial Sequence
  Description of Artificial Sequence: Synthetic oligonucleotide
guugccugugcgacgguug

SEQ ID NO: 799596 - RNA, 19 nt, Artificial Sequence
  Description of Artificial Sequence: Synthetic oligonucleotide
uuccgggcugccuagcauu

SEQ ID NO: 799597 - RNA, 19 nt, Artificial Sequence
  Description of Artificial Sequence: Synthetic oligonucleotide
ggaagagcgcugguuaagc

SEQ ID NO: 799598 - RNA, 19 nt, Artificial Sequence
  Description of Artificial Sequence: Synthetic oligonucleotide
cuguaugguauucgaggga

SEQ ID NO: 799599 - RNA, 19 nt, Artificial Sequence
  Description of Artificial Sequence: Synthetic oligonucleotide
gauguuuccucgacagucu

SEQ ID NO: 799600 - RNA, 19 nt, Artificial Sequence
  Description of Artificial Sequence: Synthetic oligonucleotide
cugagccuucauucagcag

SEQ ID NO: 799601 - RNA, 19 nt, Artificial Sequence
  Description of Artificial Sequence: Synthetic oligonucleotide
ggguauucaguaaaggugu

SEQ ID NO: 799602 - RNA, 19 nt, Artificial Sequence
  Description of Artificial Sequence: Synthetic oligonucleotide
cccgcuggcgaaauggagc

SEQ ID NO: 799603 - RNA, 19 nt, Artificial Sequence
  Description of Artificial Sequence: Synthetic oligonucleotide
gauauggaucuucgacucu

SEQ ID NO: 799604 - RNA, 19 nt, Artificial Sequence
  Description of Artificial Sequence: Synthetic oligonucleotide
ccgagcugagccuucauuc

SEQ ID NO: 799605 - RNA, 19 nt, Artificial Sequence
  Description of Artificial Sequence: Synthetic oligonucleotide
aucuucgacucugucugcu

SEQ ID NO: 799606 - RNA, 19 nt, Artificial Sequence
  Description of Artificial Sequence: Synthetic oligonucleotide
ucguucucgcuuuggggua

SEQ ID NO: 799607 - RNA, 19 nt, Artificial Sequence
  Description of Artificial Sequence: Synthetic oligonucleotide
ggagcggagugcugguccg

SEQ ID NO: 799608 - RNA, 19 nt, Artificial Sequence
  Description of Artificial Sequence: Synthetic oligonucleotide
ggugaaaggccgguuaauc

SEQ ID NO: 799609 - RNA, 19 nt, Artificial Sequence
  Description of Artificial Sequence: Synthetic oligonucleotide
uggcgaaauggagccagac

SEQ ID NO: 799610 - RNA, 19 nt, Artificial Sequence
  Description of Artificial Sequence: Synthetic oligonucleotide
aacucugggcuaaucugua

SEQ ID NO: 799611 - RNA, 19 nt, Artificial Sequence
  Description of Artificial Sequence: Synthetic oligonucleotide
gcuuaacaggugccaaggc

SEQ ID NO: 799612 - RNA, 19 nt, Artificial Sequence
  Description of Artificial Sequence: Synthetic oligonucleotide
aacaggugccaaggcguga

SEQ ID NO: 799613 - RNA, 19 nt, Artificial Sequence
  Description of Artificial Sequence: Synthetic oligonucleotide
ugguuaagccggguggcuc

SEQ ID NO: 799614 - RNA, 19 nt, Artificial Sequence
  Description of Artificial Sequence: Synthetic oligonucleotide
gcuggcgaaauggagccag

SEQ ID NO: 799615 - RNA, 19 nt, Artificial Sequence
  Description of Artificial Sequence: Synthetic oligonucleotide
cugaaccuacauagauguc

SEQ ID NO: 799616 - RNA, 19 nt, Artificial Sequence
  Description of Artificial Sequence: Synthetic oligonucleotide
ucuucgacucugucugcuu

SEQ ID NO: 799617 - RNA, 19 nt, Artificial Sequence
  Description of Artificial Sequence: Synthetic oligonucleotide
cacaucggauggcuccggc

SEQ ID NO: 799618 - RNA, 19 nt, Artificial Sequence
  Description of Artificial Sequence: Synthetic oligonucleotide
ucgacucugucugcuucug

SEQ ID NO: 799619 - RNA, 19 nt, Artificial Sequence
  Description of Artificial Sequence: Synthetic oligonucleotide
guaccauucguucucgcuu

SEQ ID NO: 799620 - RNA, 19 nt, Artificial Sequence
  Description of Artificial Sequence: Synthetic oligonucleotide
uugcuuaggcagcggccaa

SEQ ID NO: 799621 - RNA, 19 nt, Artificial Sequence
  Description of Artificial Sequence: Synthetic oligonucleotide
ugagccgaaugcccugguu

SEQ ID NO: 799622 - RNA, 19 nt, Artificial Sequence
  Description of Artificial Sequence: Synthetic oligonucleotide
ccuugcuuaggcagcggcc

SEQ ID NO: 799623 - RNA, 19 nt, Artificial Sequence
  Description of Artificial Sequence: Synthetic oligonucleotide
agucguacagcuacccuua

SEQ ID NO: 799624 - RNA, 19 nt, Artificial Sequence
  Description of Artificial Sequence: Synthetic oligonucleotide
gcaaaugccuuaggauggg

SEQ ID NO: 799625 - RNA, 19 nt, Artificial Sequence
  Description of Artificial Sequence: Synthetic oligonucleotide
ugcgacgguuguccucuga

SEQ ID NO: 799626 - RNA, 19 nt, Artificial Sequence
  Description of Artificial Sequence: Synthetic oligonucleotide
ugccuagcauugugugugu

SEQ ID NO: 799627 - RNA, 19 nt, Artificial Sequence
  Description of Artificial Sequence: Synthetic oligonucleotide
gccaagcucaagagguucg

SEQ ID NO: 799628 - RNA, 19 nt, Artificial Sequence
  Description of Artificial Sequence: Synthetic oligonucleotide
cuucucggaucgcuagguc

SEQ ID NO: 799629 - RNA, 19 nt, Artificial Sequence
  Description of Artificial Sequence: Synthetic oligonucleotide
gcuacccuuacucgagcug

SEQ ID NO: 799630 - RNA, 19 nt, Artificial Sequence
  Description of Artificial Sequence: Synthetic oligonucleotide
uugagccgaaugcccuggu

SEQ ID NO: 799631 - RNA, 19 nt, Artificial Sequence
  Description of Artificial Sequence: Synthetic oligonucleotide
cucugaugggccuagcaau

SEQ ID NO: 799632 - RNA, 19 nt, Artificial Sequence
  Description of Artificial Sequence: Synthetic oligonucleotide
uuguaagcugcaggagguc

SEQ ID NO: 799633 - RNA, 19 nt, Artificial Sequence
  Description of Artificial Sequence: Synthetic oligonucleotide
ugacugcgggaagagcgcu

SEQ ID NO: 799634 - RNA, 19 nt, Artificial Sequence
  Description of Artificial Sequence: Synthetic oligonucleotide
gaaguggccgccgccaucu

SEQ ID NO: 799635 - RNA, 19 nt, Artificial Sequence
  Description of Artificial Sequence: Synthetic oligonucleotide
gaauuacuccaggcuguuc

SEQ ID NO: 799636 - RNA, 19 nt, Artificial Sequence
  Description of Artificial Sequence: Synthetic oligonucleotide
uggagacacguguucucuu

SEQ ID NO: 799637 - RNA, 19 nt, Artificial Sequence
  Description of Artificial Sequence: Synthetic oligonucleotide
cacguguucucuuucuccu

SEQ ID NO: 799638 - RNA, 19 nt, Artificial Sequence
  Description of Artificial Sequence: Synthetic oligonucleotide
ccgcuggcgaaauggagcc

SEQ ID NO: 799639 - RNA, 19 nt, Artificial Sequence
  Description of Artificial Sequence: Synthetic oligonucleotide
aggcuccuaccuugcuuag

SEQ ID NO: 799640 - RNA, 19 nt, Artificial Sequence
  Description of Artificial Sequence: Synthetic oligonucleotide
caggcucggacacaucgga

SEQ ID NO: 799641 - RNA, 19 nt, Artificial Sequence
  Description of Artificial Sequence: Synthetic oligonucleotide
gcccaguacgaagagggag

SEQ ID NO: 799642 - RNA, 19 nt, Artificial Sequence
  Description of Artificial Sequence: Synthetic oligonucleotide
uggugaaaggccgguuaau

SEQ ID NO: 799643 - RNA, 19 nt, Artificial Sequence
  Description of Artificial Sequence: Synthetic oligonucleotide
caagagagcagcugucuau

SEQ ID NO: 799644 - RNA, 19 nt, Artificial Sequence
  Description of Artificial Sequence: Synthetic oligonucleotide
aggugggcgccggcuaggc

SEQ ID NO: 799645 - RNA, 19 nt, Artificial Sequence
  Description of Artificial Sequence: Synthetic oligonucleotide
ggcuccuacaacucgauuu

SEQ ID NO: 799646 - RNA, 19 nt, Artificial Sequence
  Description of Artificial Sequence: Synthetic oligonucleotide
ugcuuaggcagcggccaac

SEQ ID NO: 799647 - RNA, 19 nt, Artificial Sequence
  Description of Artificial Sequence: Synthetic oligonucleotide
cugaugggccuagcaauuc

SEQ ID NO: 799648 - RNA, 19 nt, Artificial Sequence
  Description of Artificial Sequence: Synthetic oligonucleotide
ccugguagaucucuaaaua

SEQ ID NO: 799649 - RNA, 19 nt, Artificial Sequence
  Description of Artificial Sequence: Synthetic oligonucleotide
augggcuguacugaaccua

SEQ ID NO: 799650 - RNA, 19 nt, Artificial Sequence
  Description of Artificial Sequence: Synthetic oligonucleotide
cuuaggcagcggccaacuc

SEQ ID NO: 799651 - RNA, 19 nt, Artificial Sequence
  Description of Artificial Sequence: Synthetic oligonucleotide
gaggugggcgccggcuagg

SEQ ID NO: 799652 - RNA, 19 nt, Artificial Sequence
  Description of Artificial Sequence: Synthetic oligonucleotide
ccagcccaugaugaguugg

SEQ ID NO: 799653 - RNA, 19 nt, Artificial Sequence
  Description of Artificial Sequence: Synthetic oligonucleotide
gccugugcgacgguugucc

SEQ ID NO: 799654 - RNA, 19 nt, Artificial Sequence
  Description of Artificial Sequence: Synthetic oligonucleotide
acccuuacucgagcuggag

SEQ ID NO: 799655 - RNA, 19 nt, Artificial Sequence
  Description of Artificial Sequence: Synthetic oligonucleotide
gacagucuucucggaucgc

SEQ ID NO: 799656 - RNA, 19 nt, Artificial Sequence
  Description of Artificial Sequence: Synthetic oligonucleotide
cucggaucgcuaggucucc

SEQ ID NO: 799657 - RNA, 19 nt, Artificial Sequence
  Description of Artificial Sequence: Synthetic oligonucleotide
gaaucaguugcaggggcau

SEQ ID NO: 799658 - RNA, 19 nt, Artificial Sequence
  Description of Artificial Sequence: Synthetic oligonucleotide
auaaauggccgcagucgua

SEQ ID NO: 799659 - RNA, 19 nt, Artificial Sequence
  Description of Artificial Sequence: Synthetic oligonucleotide
cuuuggauccagugccucu

SEQ ID NO: 799660 - RNA, 19 nt, Artificial Sequence
  Description of Artificial Sequence: Synthetic oligonucleotide
aucggauggcuccggcuuu

SEQ ID NO: 799661 - RNA, 19 nt, Artificial Sequence
  Description of Artificial Sequence: Synthetic oligonucleotide
aaacgucuuuccggagcaa

SEQ ID NO: 799662 - RNA, 19 nt, Artificial Sequence
  Description of Artificial Sequence: Synthetic oligonucleotide
gcuguuccgggcugccuag

SEQ ID NO: 799663 - RNA, 19 nt, Artificial Sequence
  Description of Artificial Sequence: Synthetic oligonucleotide
ccuuacucgagcuggaggu

SEQ ID NO: 799664 - RNA, 19 nt, Artificial Sequence
  Description of Artificial Sequence: Synthetic oligonucleotide
cugcucaaacucggagaag

SEQ ID NO: 799665 - RNA, 19 nt, Artificial Sequence
  Description of Artificial Sequence: Synthetic oligonucleotide
cagcggccaacuccugaag

SEQ ID NO: 799666 - RNA, 19 nt, Artificial Sequence
  Description of Artificial Sequence: Synthetic oligonucleotide
ggagguauugauggcucca

SEQ ID NO: 799667 - RNA, 19 nt, Artificial Sequence
  Description of Artificial Sequence: Synthetic oligonucleotide
gucguacagcuacccuuac

SEQ ID NO: 799668 - RNA, 19 nt, Artificial Sequence
  Description of Artificial Sequence: Synthetic oligonucleotide
ccugguugccugugcgacg

SEQ ID NO: 799669 - RNA, 19 nt, Artificial Sequence
  Description of Artificial Sequence: Synthetic oligonucleotide
guauucgagggaggcccug

SEQ ID NO: 799670 - RNA, 19 nt, Artificial Sequence
  Description of Artificial Sequence: Synthetic oligonucleotide
uccuuggaccuagcaguaa

SEQ ID NO: 799671 - RNA, 19 nt, Artificial Sequence
  Description of Artificial Sequence: Synthetic oligonucleotide
gccccaguaggcccauagg

SEQ ID NO: 799672 - RNA, 19 nt, Artificial Sequence
  Description of Artificial Sequence: Synthetic oligonucleotide
cagucguacagcuacccuu

SEQ ID NO: 799673 - RNA, 19 nt, Artificial Sequence
  Description of Artificial Sequence: Synthetic oligonucleotide
cuaugagcugagccaccca

SEQ ID NO: 799674 - RNA, 19 nt, Artificial Sequence
  Description of Artificial Sequence: Synthetic oligonucleotide
agggagcggagugcugguc

SEQ ID NO: 799675 - RNA, 19 nt, Artificial Sequence
  Description of Artificial Sequence: Synthetic oligonucleotide
agacuguauccagguaaaa

SEQ ID NO: 799676 - RNA, 19 nt, Artificial Sequence
  Description of Artificial Sequence: Synthetic oligonucleotide
cauagauguccuguugagu

SEQ ID NO: 799677 - RNA, 19 nt, Artificial Sequence
  Description of Artificial Sequence: Synthetic oligonucleotide
cuaauaccuuuuccuggua

SEQ ID NO: 799678 - RNA, 19 nt, Artificial Sequence
  Description of Artificial Sequence: Synthetic oligonucleotide
gagcgcugguuaagccggg

SEQ ID NO: 799679 - RNA, 19 nt, Artificial Sequence
  Description of Artificial Sequence: Synthetic oligonucleotide
augaugaguugggccuucu

SEQ ID NO: 799680 - RNA, 19 nt, Artificial Sequence
  Description of Artificial Sequence: Synthetic oligonucleotide
aaggggccguggagcuccc

SEQ ID NO: 799681 - RNA, 19 nt, Artificial Sequence
  Description of Artificial Sequence: Synthetic oligonucleotide
cuagcauugugugugucuu

SEQ ID NO: 799682 - RNA, 19 nt, Artificial Sequence
  Description of Artificial Sequence: Synthetic oligonucleotide
cuuuugcgcccaugugcca

SEQ ID NO: 799683 - RNA, 19 nt, Artificial Sequence
  Description of Artificial Sequence: Synthetic oligonucleotide
ugccuuaggaugggcugua

SEQ ID NO: 799684 - RNA, 19 nt, Artificial Sequence
  Description of Artificial Sequence: Synthetic oligonucleotide
agcggagugcugguccgca

SEQ ID NO: 799685 - RNA, 19 nt, Artificial Sequence
  Description of Artificial Sequence: Synthetic oligonucleotide
ugcgcccaugugccaguaa

SEQ ID NO: 799686 - RNA, 19 nt, Artificial Sequence
  Description of Artificial Sequence: Synthetic oligonucleotide
agccuucauucagcagauc

SEQ ID NO: 799687 - RNA, 19 nt, Artificial Sequence
  Description of Artificial Sequence: Synthetic oligonucleotide
ggcuccuaccuugcuuagg

SEQ ID NO: 799688 - RNA, 19 nt, Artificial Sequence
  Description of Artificial Sequence: Synthetic oligonucleotide
cugcgcagaucccgagcug

SEQ ID NO: 799689 - RNA, 19 nt, Artificial Sequence
  Description of Artificial Sequence: Synthetic oligonucleotide
augggccuagcaauucuuu

SEQ ID NO: 799690 - RNA, 19 nt, Artificial Sequence
  Description of Artificial Sequence: Synthetic oligonucleotide
ucggaucgcuaggucuccu

SEQ ID NO: 799691 - RNA, 19 nt, Artificial Sequence
  Description of Artificial Sequence: Synthetic oligonucleotide
uucucgcuuugggguauuc

SEQ ID NO: 799692 - RNA, 19 nt, Artificial Sequence
  Description of Artificial Sequence: Synthetic oligonucleotide
ccauucguucucgcuuugg

SEQ ID NO: 799693 - RNA, 19 nt, Artificial Sequence
  Description of Artificial Sequence: Synthetic oligonucleotide
caucggauggcuccggcuu

SEQ ID NO: 799694 - RNA, 19 nt, Artificial Sequence
  Description of Artificial Sequence: Synthetic oligonucleotide
gagcggagugcugguccgc

SEQ ID NO: 799695 - RNA, 19 nt, Artificial Sequence
  Description of Artificial Sequence: Synthetic oligonucleotide
gagccuucauucagcagau

SEQ ID NO: 799696 - RNA, 19 nt, Artificial Sequence
  Description of Artificial Sequence: Synthetic oligonucleotide
cuggcgaaauggagccaga

SEQ ID NO: 799697 - RNA, 19 nt, Artificial Sequence
  Description of Artificial Sequence: Synthetic oligonucleotide
cuucugugugaggccagga

SEQ ID NO: 799698 - RNA, 19 nt, Artificial Sequence
  Description of Artificial Sequence: Synthetic oligonucleotide
gaugggccuagcaauucuu

SEQ ID NO: 799699 - RNA, 19 nt, Artificial Sequence
  Description of Artificial Sequence: Synthetic oligonucleotide
gcgcugguuaagccgggug

SEQ ID NO: 799700 - RNA, 19 nt, Artificial Sequence
  Description of Artificial Sequence: Synthetic oligonucleotide
ggcuaaucuguaacuccca

SEQ ID NO: 799701 - RNA, 19 nt, Artificial Sequence
  Description of Artificial Sequence: Synthetic oligonucleotide
ccuuggaccuagcaguaaa

SEQ ID NO: 799702 - RNA, 19 nt, Artificial Sequence
  Description of Artificial Sequence: Synthetic oligonucleotide
aggauccaagaggucuaau

SEQ ID NO: 799703 - RNA, 19 nt, Artificial Sequence
  Description of Artificial Sequence: Synthetic oligonucleotide
cgacgguuguccucugagc

SEQ ID NO: 799704 - RNA, 19 nt, Artificial Sequence
  Description of Artificial Sequence: Synthetic oligonucleotide
gccucugaugggccuagca

SEQ ID NO: 799705 - RNA, 19 nt, Artificial Sequence
  Description of Artificial Sequence: Synthetic oligonucleotide
gaucccgagcugagccuuc

SEQ ID NO: 799706 - RNA, 19 nt, Artificial Sequence
  Description of Artificial Sequence: Synthetic oligonucleotide
gcgcuuucuucccuuguaa

SEQ ID NO: 799707 - RNA, 19 nt, Artificial Sequence
  Description of Artificial Sequence: Synthetic oligonucleotide
ccguggagcucccuccagc

SEQ ID NO: 799708 - RNA, 19 nt, Artificial Sequence
  Description of Artificial Sequence: Synthetic oligonucleotide
cccuuguaagcugcaggag

SEQ ID NO: 799709 - RNA, 19 nt, Artificial Sequence
  Description of Artificial Sequence: Synthetic oligonucleotide
cgugagacuguagacucuc

SEQ ID NO: 799710 - RNA, 19 nt, Artificial Sequence
  Description of Artificial Sequence: Synthetic oligonucleotide
agcgcugguuaagccgggu

SEQ ID NO: 799711 - RNA, 19 nt, Artificial Sequence
  Description of Artificial Sequence: Synthetic oligonucleotide
cuccugaugcaggauccaa

SEQ ID NO: 799712 - RNA, 19 nt, Artificial Sequence
  Description of Artificial Sequence: Synthetic oligonucleotide
cuguuccgggcugccuagc

SEQ ID NO: 799713 - RNA, 19 nt, Artificial Sequence
  Description of Artificial Sequence: Synthetic oligonucleotide
gagggagcggagugcuggu

SEQ ID NO: 799714 - RNA, 19 nt, Artificial Sequence
  Description of Artificial Sequence: Synthetic oligonucleotide
ccuagcauugugugugucu

SEQ ID NO: 799715 - RNA, 19 nt, Artificial Sequence
  Description of Artificial Sequence: Synthetic oligonucleotide
ucggcccucugcgcuuucu

SEQ ID NO: 799716 - RNA, 19 nt, Artificial Sequence
  Description of Artificial Sequence: Synthetic oligonucleotide
cccugguugccugugcgac

SEQ ID NO: 799717 - RNA, 19 nt, Artificial Sequence
  Description of Artificial Sequence: Synthetic oligonucleotide
ggagacacguguucucuuu

SEQ ID NO: 799718 - RNA, 19 nt, Artificial Sequence
  Description of Artificial Sequence: Synthetic oligonucleotide
gucuuuccggagcaauguu

SEQ ID NO: 799719 - RNA, 19 nt, Artificial Sequence
  Description of Artificial Sequence: Synthetic oligonucleotide
ugccugugcgacgguuguc

SEQ ID NO: 799720 - RNA, 19 nt, Artificial Sequence
  Description of Artificial Sequence: Synthetic oligonucleotide
ucccagggucggcccucug

SEQ ID NO: 799721 - RNA, 19 nt, Artificial Sequence
  Description of Artificial Sequence: Synthetic oligonucleotide
cggagugcugguccgcagc

SEQ ID NO: 799722 - RNA, 19 nt, Artificial Sequence
  Description of Artificial Sequence: Synthetic oligonucleotide
aaguggccgccgccaucuu

SEQ ID NO: 799723 - RNA, 19 nt, Artificial Sequence
  Description of Artificial Sequence: Synthetic oligonucleotide
cagcugucuauaccucgua

SEQ ID NO: 799724 - RNA, 19 nt, Artificial Sequence
  Description of Artificial Sequence: Synthetic oligonucleotide
uuaagccggguggcuccua

SEQ ID NO: 799725 - RNA, 19 nt, Artificial Sequence
  Description of Artificial Sequence: Synthetic oligonucleotide
cugucuuaaugaguaccau

SEQ ID NO: 799726 - RNA, 19 nt, Artificial Sequence
  Description of Artificial Sequence: Synthetic oligonucleotide
guuccgggcugccuagcau

SEQ ID NO: 799727 - RNA, 19 nt, Artificial Sequence
  Description of Artificial Sequence: Synthetic oligonucleotide
ccgcagucguacagcuacc

SEQ ID NO: 799728 - RNA, 19 nt, Artificial Sequence
  Description of Artificial Sequence: Synthetic oligonucleotide
gcagucguacagcuacccu

SEQ ID NO: 799729 - RNA, 19 nt, Artificial Sequence
  Description of Artificial Sequence: Synthetic oligonucleotide
ggcuccggcuuucuuuugu

SEQ ID NO: 799730 - RNA, 19 nt, Artificial Sequence
  Description of Artificial Sequence: Synthetic oligonucleotide
caggugccaaggcgugaga

SEQ ID NO: 799731 - RNA, 19 nt, Artificial Sequence
  Description of Artificial Sequence: Synthetic oligonucleotide
ggccguggagcucccucca

SEQ ID NO: 799732 - RNA, 19 nt, Artificial Sequence
  Description of Artificial Sequence: Synthetic oligonucleotide
guuaagccggguggcuccu

SEQ ID NO: 799733 - RNA, 19 nt, Artificial Sequence
  Description of Artificial Sequence: Synthetic oligonucleotide
guccugcaauaagcgagua

SEQ ID NO: 799734 - RNA, 19 nt, Artificial Sequence
  Description of Artificial Sequence: Synthetic oligonucleotide
cugguuaagccggguggcu

SEQ ID NO: 799735 - RNA, 19 nt, Artificial Sequence
  Description of Artificial Sequence: Synthetic oligonucleotide
ccagacguucacgcugauc

SEQ ID NO: 799736 - RNA, 19 nt, Artificial Sequence
  Description of Artificial Sequence: Synthetic oligonucleotide
guacgaagagggagguauu

SEQ ID NO: 799737 - RNA, 19 nt, Artificial Sequence
  Description of Artificial Sequence: Synthetic oligonucleotide
ccuagcaguaaaguucaau

SEQ ID NO: 799738 - RNA, 19 nt, Artificial Sequence
  Description of Artificial Sequence: Synthetic oligonucleotide
guggcuccuacaacucgau

SEQ ID NO: 799739 - RNA, 19 nt, Artificial Sequence
  Description of Artificial Sequence: Synthetic oligonucleotide
ggccgguuaaucaccuccu

SEQ ID NO: 799740 - RNA, 19 nt, Artificial Sequence
  Description of Artificial Sequence: Synthetic oligonucleotide
gccuagcauuguguguguc

SEQ ID NO: 799741 - RNA, 19 nt, Artificial Sequence
  Description of Artificial Sequence: Synthetic oligonucleotide
gguauucgagggaggcccu

SEQ ID NO: 799742 - RNA, 19 nt, Artificial Sequence
  Description of Artificial Sequence: Synthetic oligonucleotide
caguacgaagagggaggua

SEQ ID NO: 799743 - RNA, 19 nt, Artificial Sequence
  Description of Artificial Sequence: Synthetic oligonucleotide
gccaaggcgugagacugua

SEQ ID NO: 799744 - RNA, 19 nt, Artificial Sequence
  Description of Artificial Sequence: Synthetic oligonucleotide
gccuuaggaugggcuguac

SEQ ID NO: 799745 - RNA, 19 nt, Artificial Sequence
  Description of Artificial Sequence: Synthetic oligonucleotide
ccucgacagucuucucgga

SEQ ID NO: 799746 - RNA, 19 nt, Artificial Sequence
  Description of Artificial Sequence: Synthetic oligonucleotide
ccaguacgaagagggaggu

SEQ ID NO: 799747 - RNA, 19 nt, Artificial Sequence
  Description of Artificial Sequence: Synthetic oligonucleotide
gucggcccucugcgcuuuc

SEQ ID NO: 799748 - RNA, 19 nt, Artificial Sequence
  Description of Artificial Sequence: Synthetic oligonucleotide
ccuccagcccaugaugagu

SEQ ID NO: 799749 - RNA, 19 nt, Artificial Sequence
  Description of Artificial Sequence: Synthetic oligonucleotide
ccaagaggucuaauaccuu

SEQ ID NO: 799750 - RNA, 19 nt, Artificial Sequence
  Description of Artificial Sequence: Synthetic oligonucleotide
gccaggaaucaggauguuu

SEQ ID NO: 799751 - RNA, 19 nt, Artificial Sequence
  Description of Artificial Sequence: Synthetic oligonucleotide
gcguugcaggcugcgcaga

SEQ ID NO: 799752 - RNA, 19 nt, Artificial Sequence
  Description of Artificial Sequence: Synthetic oligonucleotide
cgaaauggagccagacguu

SEQ ID NO: 799753 - RNA, 19 nt, Artificial Sequence
  Description of Artificial Sequence: Synthetic oligonucleotide
aggggccguggagcucccu

SEQ ID NO: 799754 - RNA, 19 nt, Artificial Sequence
  Description of Artificial Sequence: Synthetic oligonucleotide
gcgugagacuguagacucu

SEQ ID NO: 799755 - RNA, 19 nt, Artificial Sequence
  Description of Artificial Sequence: Synthetic oligonucleotide
ggugggcgccggcuaggcu

SEQ ID NO: 799756 - RNA, 19 nt, Artificial Sequence
  Description of Artificial Sequence: Synthetic oligonucleotide
ccugugcgacgguuguccu

SEQ ID NO: 799757 - RNA, 19 nt, Artificial Sequence
  Description of Artificial Sequence: Synthetic oligonucleotide
guucucgcuuugggguauu

SEQ ID NO: 799758 - RNA, 19 nt, Artificial Sequence
  Description of Artificial Sequence: Synthetic oligonucleotide
ggccgcagucguacagcua

SEQ ID NO: 799759 - RNA, 19 nt, Artificial Sequence
  Description of Artificial Sequence: Synthetic oligonucleotide
cgcuggcgaaauggagcca

SEQ ID NO: 799760 - RNA, 19 nt, Artificial Sequence
  Description of Artificial Sequence: Synthetic oligonucleotide
cguucucgcuuugggguau

SEQ ID NO: 799761 - RNA, 19 nt, Artificial Sequence
  Description of Artificial Sequence: Synthetic oligonucleotide
uuaauaauguauuaggugc

SEQ ID NO: 799762 - RNA, 19 nt, Artificial Sequence
  Description of Artificial Sequence: Synthetic oligonucleotide
uuaguaacuucucaggugg

SEQ ID NO: 799763 - RNA, 19 nt, Artificial Sequence
  Description of Artificial Sequence: Synthetic oligonucleotide
  modified_base (3)..(3): a, c, u, g, unknown or other
ganacagagagucaugggg

SEQ ID NO: 799764 - RNA, 19 nt, Artificial Sequence
  Description of Artificial Sequence: Synthetic oligonucleotide
  modified_base (17)..(17): a, c, u, g, unknown or other
ugaugauagagcaaganac

SEQ ID NO: 799765 - RNA, 19 nt, Artificial Sequence
  Description of Artificial Sequence: Synthetic oligonucleotide
ucuaccauagcccugauuc

SEQ ID NO: 799766 - RNA, 19 nt, Artificial Sequence
  Description of Artificial Sequence: Synthetic oligonucleotide
auagauacuguccauacag

SEQ ID NO: 799767 - RNA, 19 nt, Artificial Sequence
  Description of Artificial Sequence: Synthetic oligonucleotide
aaguuuaggacucaguaga

SEQ ID NO: 799768 - RNA, 19 nt, Artificial Sequence
  Description of Artificial Sequence: Synthetic oligonucleotide
uuuucuagaacauuuagua

SEQ ID NO: 799769 - RNA, 19 nt, Artificial Sequence
  Description of Artificial Sequence: Synthetic oligonucleotide
  modified_base (13)..(13): a, c, u, g, unknown or other
gauagagcaaganacagag

SEQ ID NO: 799770 - RNA, 19 nt, Artificial Sequence
  Description of Artificial Sequence: Synthetic oligonucleotide
cauuauauagauacugucc

SEQ ID NO: 799771 - RNA, 19 nt, Artificial Sequence
  Description of Artificial Sequence: Synthetic oligonucleotide
uuuauuaaugacacgugug

SEQ ID NO: 799772 - RNA, 19 nt, Artificial Sequence
  Description of Artificial Sequence: Synthetic oligonucleotide
uucaaucugacacaaaagu

SEQ ID NO: 799773 - RNA, 19 nt, Artificial Sequence
  Description of Artificial Sequence: Synthetic oligonucleotide
auuauauagauacugucca

SEQ ID NO: 799774 - RNA, 19 nt, Artificial Sequence
  Description of Artificial Sequence: Synthetic oligonucleotide
uguuacacauuccaagggg

SEQ ID NO: 799775 - RNA, 19 nt, Artificial Sequence
  Description of Artificial Sequence: Synthetic oligonucleotide
uucuauaaaagcagacugg

SEQ ID NO: 799776 - RNA, 19 nt, Artificial Sequence
  Description of Artificial Sequence: Synthetic oligonucleotide
aguagaaacaguaaguauc

SEQ ID NO: 799777 - RNA, 19 nt, Artificial Sequence
  Description of Artificial Sequence: Synthetic oligonucleotide
uuauuaaugacacguguga

SEQ ID NO: 799778 - RNA, 19 nt, Artificial Sequence
  Description of Artificial Sequence: Synthetic oligonucleotide
cauagugggauucuggucg

SEQ ID NO: 799779 - RNA, 19 nt, Artificial Sequence
  Description of Artificial Sequence: Synthetic oligonucleotide
uucauauucacagagcacc

SEQ ID NO: 799780 - RNA, 19 nt, Artificial Sequence
  Description of Artificial Sequence: Synthetic oligonucleotide
uuugucaacauacaggaua

SEQ ID NO: 799781 - RNA, 19 nt, Artificial Sequence
  Description of Artificial Sequence: Synthetic oligonucleotide
uugugaauguuucauuggg

SEQ ID NO: 799782 - RNA, 19 nt, Artificial Sequence
  Description of Artificial Sequence: Synthetic oligonucleotide
ugacgagaaacucauagug

SEQ ID NO: 799783 - RNA, 19 nt, Artificial Sequence
  Description of Artificial Sequence: Synthetic oligonucleotide
uuaacuuuacuguucaccu

SEQ ID NO: 799784 - RNA, 19 nt, Artificial Sequence
  Description of Artificial Sequence: Synthetic oligonucleotide
agugacgagaaacucauag

SEQ ID NO: 799785 - RNA, 19 nt, Artificial Sequence
  Description of Artificial Sequence: Synthetic oligonucleotide
uuuuauuaaugacacgugu

SEQ ID NO: 799786 - RNA, 19 nt, Artificial Sequence
  Description of Artificial Sequence: Synthetic oligonucleotide
  modified_base (5)..(5): a, c, u, g, unknown or other
aaganacagagagucaugg

SEQ ID NO: 799787 - RNA, 19 nt, Artificial Sequence
  Description of Artificial Sequence: Synthetic oligonucleotide
acauuauauagauacuguc

SEQ ID NO: 799788 - RNA, 19 nt, Artificial Sequence
  Description of Artificial Sequence: Synthetic oligonucleotide
agugaaugccuuuugcucg

SEQ ID NO: 799789 - RNA, 19 nt, Artificial Sequence
  Description of Artificial Sequence: Synthetic oligonucleotide
uuuacuguucaccuugacc

SEQ ID NO: 799790 - RNA, 19 nt, Artificial Sequence
  Description of Artificial Sequence: Synthetic oligonucleotide
uguaguuguuuccagggag

SEQ ID NO: 799791 - RNA, 19 nt, Artificial Sequence
  Description of Artificial Sequence: Synthetic oligonucleotide
uggauuuguggcaagacug

SEQ ID NO: 799792 - RNA, 19 nt, Artificial Sequence
  Description of Artificial Sequence: Synthetic oligonucleotide
uaauaugaucuucagcagc

SEQ ID NO: 799793 - RNA, 19 nt, Artificial Sequence
  Description of Artificial Sequence: Synthetic oligonucleotide
agaaugaaggaguuggaag

SEQ ID NO: 799794 - RNA, 19 nt, Artificial Sequence
  Description of Artificial Sequence: Synthetic oligonucleotide
uauuaggugcaacugaaac

SEQ ID NO: 799795 - RNA, 19 nt, Artificial Sequence
  Description of Artificial Sequence: Synthetic oligonucleotide
uuuaggacucaguagaaac

SEQ ID NO: 799796 - RNA, 19 nt, Artificial Sequence
  Description of Artificial Sequence: Synthetic oligonucleotide
ucuagcaucuauuuuauua

SEQ ID NO: 799797 - RNA, 19 nt, Artificial Sequence
  Description of Artificial Sequence: Synthetic oligonucleotide
cauuuaguaacuucucagg

SEQ ID NO: 799798 - RNA, 19 nt, Artificial Sequence
  Description of Artificial Sequence: Synthetic oligonucleotide
agcugagacacauaaauca

SEQ ID NO: 799799 - RNA, 19 nt, Artificial Sequence
  Description of Artificial Sequence: Synthetic oligonucleotide
aacauuuaguaacuucuca

SEQ ID NO: 799800 - RNA, 19 nt, Artificial Sequence
  Description of Artificial Sequence: Synthetic oligonucleotide
ugacacaaaaguauguagu

SEQ ID NO: 799801 - RNA, 19 nt, Artificial Sequence
  Description of Artificial Sequence: Synthetic oligonucleotide
uuuaguaacuucucaggug

SEQ ID NO: 799802 - RNA, 19 nt, Artificial Sequence
  Description of Artificial Sequence: Synthetic oligonucleotide
gaaguuuaggacucaguag

SEQ ID NO: 799803 - RNA, 19 nt, Artificial Sequence
  Description of Artificial Sequence: Synthetic oligonucleotide
ugaaguuuaggacucagua

SEQ ID NO: 799804 - RNA, 19 nt, Artificial Sequence
  Description of Artificial Sequence: Synthetic oligonucleotide
auuaucaggaaauauuaau

SEQ ID NO: 799805 - RNA, 19 nt, Artificial Sequence
  Description of Artificial Sequence: Synthetic oligonucleotide
uguaaauucacuugcugaa

SEQ ID NO: 799806 - RNA, 19 nt, Artificial Sequence
  Description of Artificial Sequence: Synthetic oligonucleotide
cauguuggaguucucaucc

SEQ ID NO: 799807 - RNA, 19 nt, Artificial Sequence
  Description of Artificial Sequence: Synthetic oligonucleotide
ucuacuuaucucuaucuga

SEQ ID NO: 799808 - RNA, 19 nt, Artificial Sequence
  Description of Artificial Sequence: Synthetic oligonucleotide
  modified_base (14)..(14): a, c, u, g, unknown or other
ugauagagcaaganacaga

SEQ ID NO: 799809 - RNA, 19 nt, Artificial Sequence
  Description of Artificial Sequence: Synthetic oligonucleotide
aacauugugcucauguauc

SEQ ID NO: 799810 - RNA, 19 nt, Artificial Sequence
  Description of Artificial Sequence: Synthetic oligonucleotide
uaauaauguauuaggugca

SEQ ID NO: 799811 - RNA, 19 nt, Artificial Sequence
  Description of Artificial Sequence: Synthetic oligonucleotide
aaacauugugcucauguau

SEQ ID NO: 799812 - RNA, 19 nt, Artificial Sequence
  Description of Artificial Sequence: Synthetic oligonucleotide
uacccuucuauaaaagcag

SEQ ID NO: 799813 - RNA, 19 nt, Artificial Sequence
  Description of Artificial Sequence: Synthetic oligonucleotide
uuaauggucacuuccgggu

SEQ ID NO: 799814 - RNA, 19 nt, Artificial Sequence
  Description of Artificial Sequence: Synthetic oligonucleotide
cauggggugucuuuuaggg

SEQ ID NO: 799815 - RNA, 19 nt, Artificial Sequence
  Description of Artificial Sequence: Synthetic oligonucleotide
uauuaauucuacuuaucuc

SEQ ID NO: 799816 - RNA, 19 nt, Artificial Sequence
  Description of Artificial Sequence: Synthetic oligonucleotide
ugguaguuaacuuuacugu

SEQ ID NO: 799817 - RNA, 19 nt, Artificial Sequence
  Description of Artificial Sequence: Synthetic oligonucleotide
uccacuguaaauucacuug

SEQ ID NO: 799818 - RNA, 19 nt, Artificial Sequence
  Description of Artificial Sequence: Synthetic oligonucleotide
aauaugaucuucagcagca

SEQ ID NO: 799819 - RNA, 19 nt, Artificial Sequence
  Description of Artificial Sequence: Synthetic oligonucleotide
ucuuugacauucauuauua

SEQ ID NO: 799820 - RNA, 19 nt, Artificial Sequence
  Description of Artificial Sequence: Synthetic oligonucleotide
aagcugacugaucauaagu

SEQ ID NO: 799821 - RNA, 19 nt, Artificial Sequence
  Description of Artificial Sequence: Synthetic oligonucleotide
auacuguccauacagacaa

SEQ ID NO: 799822 - RNA, 19 nt, Artificial Sequence
  Description of Artificial Sequence: Synthetic oligonucleotide
uguauuaggugcaacugaa

SEQ ID NO: 799823 - RNA, 19 nt, Artificial Sequence
  Description of Artificial Sequence: Synthetic oligonucleotide
uugaccuaaaaguaucucu

SEQ ID NO: 799824 - RNA, 19 nt, Artificial Sequence
  Description of Artificial Sequence: Synthetic oligonucleotide
uugucaacauacaggauac

SEQ ID NO: 799825 - RNA, 19 nt, Artificial Sequence
  Description of Artificial Sequence: Synthetic oligonucleotide
ucuuguauggauucggaau

SEQ ID NO: 799826 - RNA, 19 nt, Artificial Sequence
  Description of Artificial Sequence: Synthetic oligonucleotide
acauaaaucaagcuaguuu

SEQ ID NO: 799827 - RNA, 19 nt, Artificial Sequence
  Description of Artificial Sequence: Synthetic oligonucleotide
uaugcacugugucuugggg

SEQ ID NO: 799828 - RNA, 19 nt, Artificial Sequence
  Description of Artificial Sequence: Synthetic oligonucleotide
ucuaccuuguuuauaacuu

SEQ ID NO: 799829 - RNA, 19 nt, Artificial Sequence
  Description of Artificial Sequence: Synthetic oligonucleotide
aagucgcugucauaacugg

SEQ ID NO: 799830 - RNA, 19 nt, Artificial Sequence
  Description of Artificial Sequence: Synthetic oligonucleotide
cuuguauggauucggaaug

SEQ ID NO: 799831 - RNA, 19 nt, Artificial Sequence
  Description of Artificial Sequence: Synthetic oligonucleotide
aagugguuggcauccgcac

SEQ ID NO: 799832 - RNA, 19 nt, Artificial Sequence
  Description of Artificial Sequence: Synthetic oligonucleotide
auagcccugauucuuauga

SEQ ID NO: 799833 - RNA, 19 nt, Artificial Sequence
  Description of Artificial Sequence: Synthetic oligonucleotide
uucaguugggcuuucugcc

SEQ ID NO: 799834 - RNA, 19 nt, Artificial Sequence
  Description of Artificial Sequence: Synthetic oligonucleotide
ucgaagguuuuccacagug

SEQ ID NO: 799835 - RNA, 19 nt, Artificial Sequence
  Description of Artificial Sequence: Synthetic oligonucleotide
guuaacuuuacuguucacc

SEQ ID NO: 799836 - RNA, 19 nt, Artificial Sequence
  Description of Artificial Sequence: Synthetic oligonucleotide
auuaggugcaacugaaacu

SEQ ID NO: 799837 - RNA, 19 nt, Artificial Sequence
  Description of Artificial Sequence: Synthetic oligonucleotide
uaguuaacuuuacuguuca

SEQ ID NO: 799838 - RNA, 19 nt, Artificial Sequence
  Description of Artificial Sequence: Synthetic oligonucleotide
uaugaauuggguugguggu

SEQ ID NO: 799839 - RNA, 19 nt, Artificial Sequence
  Description of Artificial Sequence: Synthetic oligonucleotide
uccauacagacaaacagau

SEQ ID NO: 799840 - RNA, 19 nt, Artificial Sequence
  Description of Artificial Sequence: Synthetic oligonucleotide
aauaaucuggaagagucau

SEQ ID NO: 799841 - RNA, 19 nt, Artificial Sequence
  Description of Artificial Sequence: Synthetic oligonucleotide
uuaggacucaguagaaaca

SEQ ID NO: 799842 - RNA, 19 nt, Artificial Sequence
  Description of Artificial Sequence: Synthetic oligonucleotide
uuaaugacacgugugaauc

SEQ ID NO: 799843 - RNA, 19 nt, Artificial Sequence
  Description of Artificial Sequence: Synthetic oligonucleotide
ugacugaucauaaguaaaa

SEQ ID NO: 799844 - RNA, 19 nt, Artificial Sequence
  Description of Artificial Sequence: Synthetic oligonucleotide
ugaauguuucauuggggcc

SEQ ID NO: 799845 - RNA, 19 nt, Artificial Sequence
  Description of Artificial Sequence: Synthetic oligonucleotide
uucaaguacacgugguacc

SEQ ID NO: 799846 - RNA, 19 nt, Artificial Sequence
  Description of Artificial Sequence: Synthetic oligonucleotide
  modified_base (4)..(4): a, c, u, g, unknown or other
aganacagagagucauggg

SEQ ID NO: 799847 - RNA, 19 nt, Artificial Sequence
  Description of Artificial Sequence: Synthetic oligonucleotide
uggauuucaaguacacgug

SEQ ID NO: 799848 - RNA, 19 nt, Artificial Sequence
  Description of Artificial Sequence: Synthetic oligonucleotide
uuggauguauuaauucuac

SEQ ID NO: 799849 - RNA, 19 nt, Artificial Sequence
  Description of Artificial Sequence: Synthetic oligonucleotide
uggaaguaaaguuauuaau

SEQ ID NO: 799850 - RNA, 19 nt, Artificial Sequence
  Description of Artificial Sequence: Synthetic oligonucleotide
uguauuaauucuacuuauc

SEQ ID NO: 799851 - RNA, 19 nt, Artificial Sequence
  Description of Artificial Sequence: Synthetic oligonucleotide
cagacuuccaguuccaaug

SEQ ID NO: 799852 - RNA, 19 nt, Artificial Sequence
  Description of Artificial Sequence: Synthetic oligonucleotide
uucauuauuaagugggcua

SEQ ID NO: 799853 - RNA, 19 nt, Artificial Sequence
  Description of Artificial Sequence: Synthetic oligonucleotide
agagucaugggguaauaug

SEQ ID NO: 799854 - RNA, 19 nt, Artificial Sequence
  Description of Artificial Sequence: Synthetic oligonucleotide
uucuuaugaaauguguuac

SEQ ID NO: 799855 - RNA, 19 nt, Artificial Sequence
  Description of Artificial Sequence: Synthetic oligonucleotide
ugcagaacuccuuuugagc

SEQ ID NO: 799856 - RNA, 19 nt, Artificial Sequence
  Description of Artificial Sequence: Synthetic oligonucleotide
cugacacaaaaguauguag

SEQ ID NO: 799857 - RNA, 19 nt, Artificial Sequence
  Description of Artificial Sequence: Synthetic oligonucleotide
auaguccaagcugacaugg

SEQ ID NO: 799858 - RNA, 19 nt, Artificial Sequence
  Description of Artificial Sequence: Synthetic oligonucleotide
auucuuaugaaauguguua

SEQ ID NO: 799859 - RNA, 19 nt, Artificial Sequence
  Description of Artificial Sequence: Synthetic oligonucleotide
cuuaugaaauguguuacac

SEQ ID NO: 799860 - RNA, 19 nt, Artificial Sequence
  Description of Artificial Sequence: Synthetic oligonucleotide
uccuuuugagcccagucac

SEQ ID NO: 799861 - RNA, 19 nt, Artificial Sequence
  Description of Artificial Sequence: Synthetic oligonucleotide
uuuuagggguccuggaaug

SEQ ID NO: 799862 - RNA, 19 nt, Artificial Sequence
  Description of Artificial Sequence: Synthetic oligonucleotide
uuaggugcaacugaaacuu

SEQ ID NO: 799863 - RNA, 19 nt, Artificial Sequence
  Description of Artificial Sequence: Synthetic oligonucleotide
accuaaaaguaucucugag

SEQ ID NO: 799864 - RNA, 19 nt, Artificial Sequence
  Description of Artificial Sequence: Synthetic oligonucleotide
  modified_base (2)..(2): a, c, u, g, unknown or other
anacagagagucauggggu

SEQ ID NO: 799865 - RNA, 19 nt, Artificial Sequence
  Description of Artificial Sequence: Synthetic oligonucleotide
uuugagcccagucacucca

SEQ ID NO: 799866 - RNA, 19 nt, Artificial Sequence
  Description of Artificial Sequence: Synthetic oligonucleotide
ucuuaugaaauguguuaca

SEQ ID NO: 799867 - RNA, 19 nt, Artificial Sequence
  Description of Artificial Sequence: Synthetic oligonucleotide
  modified_base (16)..(16): a, c, u, g, unknown or other
gaugauagagcaaganaca

SEQ ID NO: 799868 - RNA, 19 nt, Artificial Sequence
  Description of Artificial Sequence: Synthetic oligonucleotide
auuaaugacacgugugaau

SEQ ID NO: 799869 - RNA, 19 nt, Artificial Sequence
  Description of Artificial Sequence: Synthetic oligonucleotide
uaggacucaguagaaacag

SEQ ID NO: 799870 - RNA, 19 nt, Artificial Sequence
  Description of Artificial Sequence: Synthetic oligonucleotide
  modified_base (9)..(9): a, c, u, g, unknown or other
gagcaaganacagagaguc

SEQ ID NO: 799871 - RNA, 19 nt, Artificial Sequence
  Description of Artificial Sequence: Synthetic oligonucleotide
cuauuuuauuaaugacacg

SEQ ID NO: 799872 - RNA, 19 nt, Artificial Sequence
  Description of Artificial Sequence: Synthetic oligonucleotide
aguagcagacugaugauag

SEQ ID NO: 799873 - RNA, 19 nt, Artificial Sequence
  Description of Artificial Sequence: Synthetic oligonucleotide
ugcauuuuguauucugaac

SEQ ID NO: 799874 - RNA, 19 nt, Artificial Sequence
  Description of Artificial Sequence: Synthetic oligonucleotide
uguggcaagacuguccuug

SEQ ID NO: 799875 - RNA, 19 nt, Artificial Sequence
  Description of Artificial Sequence: Synthetic oligonucleotide
agucacauccccaaaagug

SEQ ID NO: 799876 - RNA, 19 nt, Artificial Sequence
  Description of Artificial Sequence: Synthetic oligonucleotide
auguauuaauucuacuuau

SEQ ID NO: 799877 - RNA, 19 nt, Artificial Sequence
  Description of Artificial Sequence: Synthetic oligonucleotide
uuuuggguggcacugcauc

SEQ ID NO: 799878 - RNA, 19 nt, Artificial Sequence
  Description of Artificial Sequence: Synthetic oligonucleotide
aacagauggugacauugga

SEQ ID NO: 799879 - RNA, 19 nt, Artificial Sequence
  Description of Artificial Sequence: Synthetic oligonucleotide
aguaagguuuggaacaguc

SEQ ID NO: 799880 - RNA, 19 nt, Artificial Sequence
  Description of Artificial Sequence: Synthetic oligonucleotide
aaguuauuaauggucacuu

SEQ ID NO: 799881 - RNA, 19 nt, Artificial Sequence
  Description of Artificial Sequence: Synthetic oligonucleotide
cuaaaaguaucucugaggu

SEQ ID NO: 799882 - RNA, 19 nt, Artificial Sequence
  Description of Artificial Sequence: Synthetic oligonucleotide
ucaacauacaggauacauu

SEQ ID NO: 799883 - RNA, 19 nt, Artificial Sequence
  Description of Artificial Sequence: Synthetic oligonucleotide
uggauugguucuuuuguca

SEQ ID NO: 799884 - RNA, 19 nt, Artificial Sequence
  Description of Artificial Sequence: Synthetic oligonucleotide
uuaauucuacuuaucucua

SEQ ID NO: 799885 - RNA, 19 nt, Artificial Sequence
  Description of Artificial Sequence: Synthetic oligonucleotide
ggagucaugaccuuuguga

SEQ ID NO: 799886 - RNA, 19 nt, Artificial Sequence
  Description of Artificial Sequence: Synthetic oligonucleotide
ugaauuggguuggugguag

SEQ ID NO: 799887 - RNA, 19 nt, Artificial Sequence
  Description of Artificial Sequence: Synthetic oligonucleotide
ucaggacuuuuccaguagc

SEQ ID NO: 799888 - RNA, 19 nt, Artificial Sequence
  Description of Artificial Sequence: Synthetic oligonucleotide
guaacugagcuuucuguug

SEQ ID NO: 799889 - RNA, 19 nt, Artificial Sequence
  Description of Artificial Sequence: Synthetic oligonucleotide
ugaacagugcccuggcaug

SEQ ID NO: 799890 - RNA, 19 nt, Artificial Sequence
  Description of Artificial Sequence: Synthetic oligonucleotide
gaucauaaguaaaauucuc

SEQ ID NO: 799891 - RNA, 19 nt, Artificial Sequence
  Description of Artificial Sequence: Synthetic oligonucleotide
uguggaagguacuuggcau

SEQ ID NO: 799892 - RNA, 19 nt, Artificial Sequence
  Description of Artificial Sequence: Synthetic oligonucleotide
auggauucggaaugucagg

SEQ ID NO: 799893 - RNA, 19 nt, Artificial Sequence
  Description of Artificial Sequence: Synthetic oligonucleotide
auaauguauuaggugcaac

SEQ ID NO: 799894 - RNA, 19 nt, Artificial Sequence
  Description of Artificial Sequence: Synthetic oligonucleotide
cacucauguggacagaaac

SEQ ID NO: 799895 - RNA, 19 nt, Artificial Sequence
  Description of Artificial Sequence: Synthetic oligonucleotide
uaucucuaucugaaaugcc

SEQ ID NO: 799896 - RNA, 19 nt, Artificial Sequence
  Description of Artificial Sequence: Synthetic oligonucleotide
uucacaguggugcuguaau

SEQ ID NO: 799897 - RNA, 19 nt, Artificial Sequence
  Description of Artificial Sequence: Synthetic oligonucleotide
uggaguucaaucugacaca

SEQ ID NO: 799898 - RNA, 19 nt, Artificial Sequence
  Description of Artificial Sequence: Synthetic oligonucleotide
gugggauucuggucgaagg

SEQ ID NO: 799899 - RNA, 19 nt, Artificial Sequence
  Description of Artificial Sequence: Synthetic oligonucleotide
agugggcuauucuucuugg

SEQ ID NO: 799900 - RNA, 19 nt, Artificial Sequence
  Description of Artificial Sequence: Synthetic oligonucleotide
uucucauccggagucauga

SEQ ID NO: 799901 - RNA, 19 nt, Artificial Sequence
  Description of Artificial Sequence: Synthetic oligonucleotide
cacccaauaaucuggaaga

SEQ ID NO: 799902 - RNA, 19 nt, Artificial Sequence
  Description of Artificial Sequence: Synthetic oligonucleotide
cacagagcacccaauaauc

SEQ ID NO: 799903 - RNA, 19 nt, Artificial Sequence
  Description of Artificial Sequence: Synthetic oligonucleotide
agagcaagugaugggaguc

SEQ ID NO: 799904 - RNA, 19 nt, Artificial Sequence
  Description of Artificial Sequence: Synthetic oligonucleotide
aauaauguauuaggugcaa

SEQ ID NO: 799905 - RNA, 19 nt, Artificial Sequence
  Description of Artificial Sequence: Synthetic oligonucleotide
gagucaugggguaauauga

SEQ ID NO: 799906 - RNA, 19 nt, Artificial Sequence
  Description of Artificial Sequence: Synthetic oligonucleotide
uuccggguucuccagagga

SEQ ID NO: 799907 - RNA, 19 nt, Artificial Sequence
  Description of Artificial Sequence: Synthetic oligonucleotide
gcaacugaaacuuguacac

SEQ ID NO: 799908 - RNA, 19 nt, Artificial Sequence
  Description of Artificial Sequence: Synthetic oligonucleotide
ucauuauuaagugggcuau

SEQ ID NO: 799909 - RNA, 19 nt, Artificial Sequence
  Description of Artificial Sequence: Synthetic oligonucleotide
aaugacacgugugaaucaa

SEQ ID NO: 799910 - RNA, 19 nt, Artificial Sequence
  Description of Artificial Sequence: Synthetic oligonucleotide
aguuaacuuuacuguucac

SEQ ID NO: 799911 - RNA, 19 nt, Artificial Sequence
  Description of Artificial Sequence: Synthetic oligonucleotide
gcagaacuccuuuugagcc

SEQ ID NO: 799912 - RNA, 19 nt, Artificial Sequence
  Description of Artificial Sequence: Synthetic oligonucleotide
guucccagagacuaugcac

SEQ ID NO: 799913 - RNA, 19 nt, Artificial Sequence
  Description of Artificial Sequence: Synthetic oligonucleotide
ggugaguaagguuuggaac

SEQ ID NO: 799914 - RNA, 19 nt, Artificial Sequence
  Description of Artificial Sequence: Synthetic oligonucleotide
aauucacuugcugaaguuu

SEQ ID NO: 799915 - RNA, 19 nt, Artificial Sequence
  Description of Artificial Sequence: Synthetic oligonucleotide
ggaaauauuaauaauguau

SEQ ID NO: 799916 - RNA, 19 nt, Artificial Sequence
  Description of Artificial Sequence: Synthetic oligonucleotide
acauggggugucuuuuagg

SEQ ID NO: 799917 - RNA, 19 nt, Artificial Sequence
  Description of Artificial Sequence: Synthetic oligonucleotide
uauuaaugacacgugugaa

SEQ ID NO: 799918 - RNA, 19 nt, Artificial Sequence
  Description of Artificial Sequence: Synthetic oligonucleotide
aaccagaaucaaaagcuga

SEQ ID NO: 799919 - RNA, 19 nt, Artificial Sequence
  Description of Artificial Sequence: Synthetic oligonucleotide
uaguaacuucucagguggg

SEQ ID NO: 799920 - RNA, 19 nt, Artificial Sequence
  Description of Artificial Sequence: Synthetic oligonucleotide
uggauucggaaugucagga

SEQ ID NO: 799921 - RNA, 19 nt, Artificial Sequence
  Description of Artificial Sequence: Synthetic oligonucleotide
uaaugacacgugugaauca

SEQ ID NO: 799922 - RNA, 19 nt, Artificial Sequence
  Description of Artificial Sequence: Synthetic oligonucleotide
cuuggauuucaaguacacg

SEQ ID NO: 799923 - RNA, 19 nt, Artificial Sequence
  Description of Artificial Sequence: Synthetic oligonucleotide
auucauuauuaagugggcu

SEQ ID NO: 799924 - RNA, 19 nt, Artificial Sequence
  Description of Artificial Sequence: Synthetic oligonucleotide
ugggcuauucuucuuggua

SEQ ID NO: 799925 - RNA, 19 nt, Artificial Sequence
  Description of Artificial Sequence: Synthetic oligonucleotide
acuaacuucuuuccaggaa

SEQ ID NO: 799926 - RNA, 19 nt, Artificial Sequence
  Description of Artificial Sequence: Synthetic oligonucleotide
cacagugaaugccuuuugc

SEQ ID NO: 799927 - RNA, 19 nt, Artificial Sequence
  Description of Artificial Sequence: Synthetic oligonucleotide
gggucaauaguccaagcug

SEQ ID NO: 799928 - RNA, 19 nt, Artificial Sequence
  Description of Artificial Sequence: Synthetic oligonucleotide
gguacccuucuauaaaagc

SEQ ID NO: 799929 - RNA, 19 nt, Artificial Sequence
  Description of Artificial Sequence: Synthetic oligonucleotide
guacccuucuauaaaagca

SEQ ID NO: 799930 - RNA, 19 nt, Artificial Sequence
  Description of Artificial Sequence: Synthetic oligonucleotide
ggaaugucaggacuuuucc

SEQ ID NO: 799931 - RNA, 19 nt, Artificial Sequence
  Description of Artificial Sequence: Synthetic oligonucleotide
gcacccaauaaucuggaag

SEQ ID NO: 799932 - RNA, 19 nt, Artificial Sequence
  Description of Artificial Sequence: Synthetic oligonucleotide
cacaaaaguauguaguugu

SEQ ID NO: 799933 - RNA, 19 nt, Artificial Sequence
  Description of Artificial Sequence: Synthetic oligonucleotide
ucgcugucauaacugggcc

SEQ ID NO: 799934 - RNA, 19 nt, Artificial Sequence
  Description of Artificial Sequence: Synthetic oligonucleotide
uggauguauuaauucuacu

SEQ ID NO: 799935 - RNA, 19 nt, Artificial Sequence
  Description of Artificial Sequence: Synthetic oligonucleotide
uuuggguggcacugcaucu

SEQ ID NO: 799936 - RNA, 19 nt, Artificial Sequence
  Description of Artificial Sequence: Synthetic oligonucleotide
uggaacaguccacuguaaa

SEQ ID NO: 799937 - RNA, 19 nt, Artificial Sequence
  Description of Artificial Sequence: Synthetic oligonucleotide
uuuugagcccagucacucc

SEQ ID NO: 799938 - RNA, 19 nt, Artificial Sequence
  Description of Artificial Sequence: Synthetic oligonucleotide
uguaugaauuggguuggug

SEQ ID NO: 799939 - RNA, 19 nt, Artificial Sequence
  Description of Artificial Sequence: Synthetic oligonucleotide
ucuaguaacugagcuuucu

SEQ ID NO: 799940 - RNA, 19 nt, Artificial Sequence
  Description of Artificial Sequence: Synthetic oligonucleotide
caagugaugggagucuccc

SEQ ID NO: 799941 - RNA, 19 nt, Artificial Sequence
  Description of Artificial Sequence: Synthetic oligonucleotide
cuaugcacugugucuuggg

SEQ ID NO: 799942 - RNA, 19 nt, Artificial Sequence
  Description of Artificial Sequence: Synthetic oligonucleotide
uaguccaagcugacauggg

SEQ ID NO: 799943 - RNA, 19 nt, Artificial Sequence
  Description of Artificial Sequence: Synthetic oligonucleotide
cauaacugggccagcucag

SEQ ID NO: 799944 - RNA, 19 nt, Artificial Sequence
  Description of Artificial Sequence: Synthetic oligonucleotide
gugguuggcauccgcacag

SEQ ID NO: 799945 - RNA, 19 nt, Artificial Sequence
  Description of Artificial Sequence: Synthetic oligonucleotide
aguuguuuccagggagagc

SEQ ID NO: 799946 - RNA, 19 nt, Artificial Sequence
  Description of Artificial Sequence: Synthetic oligonucleotide
uccaaggggaucucagacu

SEQ ID NO: 799947 - RNA, 19 nt, Artificial Sequence
  Description of Artificial Sequence: Synthetic oligonucleotide
guaguuaacuuuacuguuc

SEQ ID NO: 799948 - RNA, 19 nt, Artificial Sequence
  Description of Artificial Sequence: Synthetic oligonucleotide
uaauucuacuuaucucuau

SEQ ID NO: 799949 - RNA, 19 nt, Artificial Sequence
  Description of Artificial Sequence: Synthetic oligonucleotide
ucauagugggauucugguc

SEQ ID NO: 799950 - RNA, 19 nt, Artificial Sequence
  Description of Artificial Sequence: Synthetic oligonucleotide
uuggguuggugguaguuaa

SEQ ID NO: 799951 - RNA, 19 nt, Artificial Sequence
  Description of Artificial Sequence: Synthetic oligonucleotide
gauucggaaugucaggacu

SEQ ID NO: 799952 - RNA, 19 nt, Artificial Sequence
  Description of Artificial Sequence: Synthetic oligonucleotide
aaguacacgugguacccuu

SEQ ID NO: 799953 - RNA, 19 nt, Artificial Sequence
  Description of Artificial Sequence: Synthetic oligonucleotide
ccaacagcuuauuaucagg

SEQ ID NO: 799954 - RNA, 19 nt, Artificial Sequence
  Description of Artificial Sequence: Synthetic oligonucleotide
acagacaaacagaugguga

SEQ ID NO: 799955 - RNA, 19 nt, Artificial Sequence
  Description of Artificial Sequence: Synthetic oligonucleotide
ugccuguaguguaugaauu

SEQ ID NO: 799956 - RNA, 19 nt, Artificial Sequence
  Description of Artificial Sequence: Synthetic oligonucleotide
uucauggauacaucuucau

SEQ ID NO: 799957 - RNA, 19 nt, Artificial Sequence
  Description of Artificial Sequence: Synthetic oligonucleotide
aacucauagugggauucug

SEQ ID NO: 799958 - RNA, 19 nt, Artificial Sequence
  Description of Artificial Sequence: Synthetic oligonucleotide
ucccguuuguuucucuagu

SEQ ID NO: 799959 - RNA, 19 nt, Artificial Sequence
  Description of Artificial Sequence: Synthetic oligonucleotide
ugcucggggucuuugauuu

SEQ ID NO: 799960 - RNA, 19 nt, Artificial Sequence
  Description of Artificial Sequence: Synthetic oligonucleotide
uuuugcucggggucuuuga

SEQ ID NO: 799961 - RNA, 19 nt, Artificial Sequence
  Description of Artificial Sequence: Synthetic oligonucleotide
gacgauguuggauguauua

SEQ ID NO: 799962 - RNA, 19 nt, Artificial Sequence
  Description of Artificial Sequence: Synthetic oligonucleotide
aaagugccuguaguguaug

SEQ ID NO: 799963 - RNA, 19 nt, Artificial Sequence
  Description of Artificial Sequence: Synthetic oligonucleotide
  modified_base (18)..(18): a, c, u, g, unknown or other
cugaugauagagcaagana

SEQ ID NO: 799964 - RNA, 19 nt, Artificial Sequence
  Description of Artificial Sequence: Synthetic oligonucleotide
auaaucuggaagagucauc

SEQ ID NO: 799965 - RNA, 19 nt, Artificial Sequence
  Description of Artificial Sequence: Synthetic oligonucleotide
  modified_base (10)..(10): a, c, u, g, unknown or other
agagcaaganacagagagu

SEQ ID NO: 799966 - RNA, 19 nt, Artificial Sequence
  Description of Artificial Sequence: Synthetic oligonucleotide
aaaagugccuguaguguau

SEQ ID NO: 799967 - RNA, 19 nt, Artificial Sequence
  Description of Artificial Sequence: Synthetic oligonucleotide
  modified_base (19)..(19): a, c, u, g, unknown or other
acugaugauagagcaagan

SEQ ID NO: 799968 - RNA, 19 nt, Artificial Sequence
  Description of Artificial Sequence: Synthetic oligonucleotide
acucgagccuuguacuuug

SEQ ID NO: 799969 - RNA, 19 nt, Artificial Sequence
  Description of Artificial Sequence: Synthetic oligonucleotide
ggccaugggaaccagaauc

SEQ ID NO: 799970 - RNA, 19 nt, Artificial Sequence
  Description of Artificial Sequence: Synthetic oligonucleotide
ugguguacggagugacgag

SEQ ID NO: 799971 - RNA, 19 nt, Artificial Sequence
  Description of Artificial Sequence: Synthetic oligonucleotide
ggaaccagaaucaaaagcu

SEQ ID NO: 799972 - RNA, 19 nt, Artificial Sequence
  Description of Artificial Sequence: Synthetic oligonucleotide
auaaaucaagcuaguuucu

SEQ ID NO: 799973 - RNA, 19 nt, Artificial Sequence
  Description of Artificial Sequence: Synthetic oligonucleotide
cuuuugagcccagucacuc

SEQ ID NO: 799974 - RNA, 19 nt, Artificial Sequence
  Description of Artificial Sequence: Synthetic oligonucleotide
uuuugucaacauacaggau

SEQ ID NO: 799975 - RNA, 19 nt, Artificial Sequence
  Description of Artificial Sequence: Synthetic oligonucleotide
uuugcucggggucuuugau

SEQ ID NO: 799976 - RNA, 19 nt, Artificial Sequence
  Description of Artificial Sequence: Synthetic oligonucleotide
ccacuguaaauucacuugc

SEQ ID NO: 799977 - RNA, 19 nt, Artificial Sequence
  Description of Artificial Sequence: Synthetic oligonucleotide
ugguuccacuucacagugg

SEQ ID NO: 799978 - RNA, 19 nt, Artificial Sequence
  Description of Artificial Sequence: Synthetic oligonucleotide
uccggguucuccagaggag

SEQ ID NO: 799979 - RNA, 19 nt, Artificial Sequence
  Description of Artificial Sequence: Synthetic oligonucleotide
cugacugaucauaaguaaa

SEQ ID NO: 799980 - RNA, 19 nt, Artificial Sequence
  Description of Artificial Sequence: Synthetic oligonucleotide
guuacacauuccaagggga

SEQ ID NO: 799981 - RNA, 19 nt, Artificial Sequence
  Description of Artificial Sequence: Synthetic oligonucleotide
ugucauaacugggccagcu

SEQ ID NO: 799982 - RNA, 19 nt, Artificial Sequence
  Description of Artificial Sequence: Synthetic oligonucleotide
guagaaacaguaaguaucu

SEQ ID NO: 799983 - RNA, 19 nt, Artificial Sequence
  Description of Artificial Sequence: Synthetic oligonucleotide
ggaguucucauccggaguc

SEQ ID NO: 799984 - RNA, 19 nt, Artificial Sequence
  Description of Artificial Sequence: Synthetic oligonucleotide
ggucgaagguuuuccacag

SEQ ID NO: 799985 - RNA, 19 nt, Artificial Sequence
  Description of Artificial Sequence: Synthetic oligonucleotide
cuugucuccacccaugggu

SEQ ID NO: 799986 - RNA, 19 nt, Artificial Sequence
  Description of Artificial Sequence: Synthetic oligonucleotide
accagucacauccccaaaa

SEQ ID NO: 799987 - RNA, 19 nt, Artificial Sequence
  Description of Artificial Sequence: Synthetic oligonucleotide
uuucuguugcauagauuuu

SEQ ID NO: 799988 - RNA, 19 nt, Artificial Sequence
  Description of Artificial Sequence: Synthetic oligonucleotide
cuugaccuaaaaguaucuc

SEQ ID NO: 799989 - RNA, 19 nt, Artificial Sequence
  Description of Artificial Sequence: Synthetic oligonucleotide
acggagugacgagaaacuc

SEQ ID NO: 799990 - RNA, 19 nt, Artificial Sequence
  Description of Artificial Sequence: Synthetic oligonucleotide
uuguauggauucggaaugu

SEQ ID NO: 799991 - RNA, 19 nt, Artificial Sequence
  Description of Artificial Sequence: Synthetic oligonucleotide
caauaguccaagcugacau

SEQ ID NO: 799992 - RNA, 19 nt, Artificial Sequence
  Description of Artificial Sequence: Synthetic oligonucleotide
agcccugauucuuaugaaa

SEQ ID NO: 799993 - RNA, 19 nt, Artificial Sequence
  Description of Artificial Sequence: Synthetic oligonucleotide
uacacauuccaaggggauc

SEQ ID NO: 799994 - RNA, 19 nt, Artificial Sequence
  Description of Artificial Sequence: Synthetic oligonucleotide
ggcuguuauucucacucag

SEQ ID NO: 799995 - RNA, 19 nt, Artificial Sequence
  Description of Artificial Sequence: Synthetic oligonucleotide
aauuggguuggugguaguu

SEQ ID NO: 799996 - RNA, 19 nt, Artificial Sequence
  Description of Artificial Sequence: Synthetic oligonucleotide
uaacuuuacuguucaccuu

SEQ ID NO: 799997 - RNA, 19 nt, Artificial Sequence
  Description of Artificial Sequence: Synthetic oligonucleotide
agugggauucuggucgaag

SEQ ID NO: 799998 - RNA, 19 nt, Artificial Sequence
  Description of Artificial Sequence: Synthetic oligonucleotide
ugugcucauguaucacuuc

SEQ ID NO: 799999 - RNA, 19 nt, Artificial Sequence
  Description of Artificial Sequence: Synthetic oligonucleotide
uguacggagugacgagaaa

SEQ ID NO: 800000 - RNA, 19 nt, Artificial Sequence
  Description of Artificial Sequence: Synthetic oligonucleotide
auagugggauucuggucga

SEQ ID NO: 800001 - RNA, 19 nt, Artificial Sequence
  Description of Artificial Sequence: Synthetic oligonucleotide
ggauguauuaauucuacuu

SEQ ID NO: 800002 - RNA, 19 nt, Artificial Sequence
  Description of Artificial Sequence: Synthetic oligonucleotide
agacuaugcacugugucuu

SEQ ID NO: 800003 - RNA, 19 nt, Artificial Sequence
  Description of Artificial Sequence: Synthetic oligonucleotide
guuggauguauuaauucua

SEQ ID NO: 800004 - RNA, 19 nt, Artificial Sequence
  Description of Artificial Sequence: Synthetic oligonucleotide
acgugguacccuucuauaa

SEQ ID NO: 800005 - RNA, 19 nt, Artificial Sequence
  Description of Artificial Sequence: Synthetic oligonucleotide
acagagcacccaauaaucu

SEQ ID NO: 800006 - RNA, 19 nt, Artificial Sequence
  Description of Artificial Sequence: Synthetic oligonucleotide
acgauguuggauguauuaa

SEQ ID NO: 800007 - RNA, 19 nt, Artificial Sequence
  Description of Artificial Sequence: Synthetic oligonucleotide
gauuuguggcaagacuguc

SEQ ID NO: 800008 - RNA, 19 nt, Artificial Sequence
  Description of Artificial Sequence: Synthetic oligonucleotide
aggacaucuggaaugcagu

SEQ ID NO: 800009 - RNA, 19 nt, Artificial Sequence
  Description of Artificial Sequence: Synthetic oligonucleotide
guggaagguacuuggcauc

SEQ ID NO: 800010 - RNA, 19 nt, Artificial Sequence
  Description of Artificial Sequence: Synthetic oligonucleotide
acagaaacauugugcucau

SEQ ID NO: 800011 - RNA, 19 nt, Artificial Sequence
  Description of Artificial Sequence: Synthetic oligonucleotide
ggucaauaguccaagcuga

SEQ ID NO: 800012 - RNA, 19 nt, Artificial Sequence
  Description of Artificial Sequence: Synthetic oligonucleotide
guuuggaacaguccacugu

SEQ ID NO: 800013 - RNA, 19 nt, Artificial Sequence
  Description of Artificial Sequence: Synthetic oligonucleotide
gugguacccuucuauaaaa

SEQ ID NO: 800014 - RNA, 19 nt, Artificial Sequence
  Description of Artificial Sequence: Synthetic oligonucleotide
guaccagucacauccccaa

SEQ ID NO: 800015 - RNA, 19 nt, Artificial Sequence
  Description of Artificial Sequence: Synthetic oligonucleotide
gaacaguccacuguaaauu

SEQ ID NO: 800016 - RNA, 19 nt, Artificial Sequence
  Description of Artificial Sequence: Synthetic oligonucleotide
augguaccagucacauccc

SEQ ID NO: 800017 - RNA, 19 nt, Artificial Sequence
  Description of Artificial Sequence: Synthetic oligonucleotide
guggggucaauaguccaag

SEQ ID NO: 800018 - RNA, 19 nt, Artificial Sequence
  Description of Artificial Sequence: Synthetic oligonucleotide
gaccuuugugaauguuuca

SEQ ID NO: 800019 - RNA, 19 nt, Artificial Sequence
  Description of Artificial Sequence: Synthetic oligonucleotide
gucuuugacauucauuauu

SEQ ID NO: 800020 - RNA, 19 nt, Artificial Sequence
  Description of Artificial Sequence: Synthetic oligonucleotide
aggcuguuauucucacuca

SEQ ID NO: 800021 - RNA, 19 nt, Artificial Sequence
  Description of Artificial Sequence: Synthetic oligonucleotide
cauagcccugauucuuaug

SEQ ID NO: 800022 - RNA, 19 nt, Artificial Sequence
  Description of Artificial Sequence: Synthetic oligonucleotide
caggacuuuuccaguagca

SEQ ID NO: 800023 - RNA, 19 nt, Artificial Sequence
  Description of Artificial Sequence: Synthetic oligonucleotide
cucauagugggauucuggu

SEQ ID NO: 800024 - RNA, 19 nt, Artificial Sequence
  Description of Artificial Sequence: Synthetic oligonucleotide
ccuucuaccuuguuuauaa

SEQ ID NO: 800025 - RNA, 19 nt, Artificial Sequence
  Description of Artificial Sequence: Synthetic oligonucleotide
auguuggaguucaaucuga

SEQ ID NO: 800026 - RNA, 19 nt, Artificial Sequence
  Description of Artificial Sequence: Synthetic oligonucleotide
caugggaaccagaaucaaa

SEQ ID NO: 800027 - RNA, 19 nt, Artificial Sequence
  Description of Artificial Sequence: Synthetic oligonucleotide
uggguuggugguaguuaac

SEQ ID NO: 800028 - RNA, 19 nt, Artificial Sequence
  Description of Artificial Sequence: Synthetic oligonucleotide
uccacccaugggugaagcc

SEQ ID NO: 800029 - RNA, 19 nt, Artificial Sequence
  Description of Artificial Sequence: Synthetic oligonucleotide
aggugcaacugaaacuugu

SEQ ID NO: 800030 - RNA, 19 nt, Artificial Sequence
  Description of Artificial Sequence: Synthetic oligonucleotide
ccagucacauccccaaaag

SEQ ID NO: 800031 - RNA, 19 nt, Artificial Sequence
  Description of Artificial Sequence: Synthetic oligonucleotide
uagcccugauucuuaugaa

SEQ ID NO: 800032 - RNA, 19 nt, Artificial Sequence
  Description of Artificial Sequence: Synthetic oligonucleotide
caguggugcuguaauucuc

SEQ ID NO: 800033 - RNA, 19 nt, Artificial Sequence
  Description of Artificial Sequence: Synthetic oligonucleotide
gcugacugaucauaaguaa

SEQ ID NO: 800034 - RNA, 19 nt, Artificial Sequence
  Description of Artificial Sequence: Synthetic oligonucleotide
agugccuguaguguaugaa

SEQ ID NO: 800035 - RNA, 19 nt, Artificial Sequence
  Description of Artificial Sequence: Synthetic oligonucleotide
ucucauccggagucaugac

SEQ ID NO: 800036 - RNA, 19 nt, Artificial Sequence
  Description of Artificial Sequence: Synthetic oligonucleotide
ugacauggggugucuuuua

SEQ ID NO: 800037 - RNA, 19 nt, Artificial Sequence
  Description of Artificial Sequence: Synthetic oligonucleotide
aguacacgugguacccuuc

SEQ ID NO: 800038 - RNA, 19 nt, Artificial Sequence
  Description of Artificial Sequence: Synthetic oligonucleotide
agcagacuggaagucgcug

SEQ ID NO: 800039 - RNA, 19 nt, Artificial Sequence
  Description of Artificial Sequence: Synthetic oligonucleotide
gugacgagaaacucauagu

SEQ ID NO: 800040 - RNA, 19 nt, Artificial Sequence
  Description of Artificial Sequence: Synthetic oligonucleotide
cacuaacuucuuuccagga

SEQ ID NO: 800041 - RNA, 19 nt, Artificial Sequence
  Description of Artificial Sequence: Synthetic oligonucleotide
  modified_base (8)..(8): a, c, u, g, unknown or other
agcaaganacagagaguca

SEQ ID NO: 800042 - RNA, 19 nt, Artificial Sequence
  Description of Artificial Sequence: Synthetic oligonucleotide
cuuccggguucuccagagg

SEQ ID NO: 800043 - RNA, 19 nt, Artificial Sequence
  Description of Artificial Sequence: Synthetic oligonucleotide
ugucaacauacaggauaca

SEQ ID NO: 800044 - RNA, 19 nt, Artificial Sequence
  Description of Artificial Sequence: Synthetic oligonucleotide
cacugguguacggagugac

SEQ ID NO: 800045 - RNA, 19 nt, Artificial Sequence
  Description of Artificial Sequence: Synthetic oligonucleotide
guagcagacugaugauaga

SEQ ID NO: 800046 - RNA, 19 nt, Artificial Sequence
  Description of Artificial Sequence: Synthetic oligonucleotide
ggauugguucuuuugucaa

SEQ ID NO: 800047 - RNA, 19 nt, Artificial Sequence
  Description of Artificial Sequence: Synthetic oligonucleotide
agucaugggguaauaugau

SEQ ID NO: 800048 - RNA, 19 nt, Artificial Sequence
  Description of Artificial Sequence: Synthetic oligonucleotide
auucggaaugucaggacuu

SEQ ID NO: 800049 - RNA, 19 nt, Artificial Sequence
  Description of Artificial Sequence: Synthetic oligonucleotide
uguaucccguuuguuucuc

SEQ ID NO: 800050 - RNA, 19 nt, Artificial Sequence
  Description of Artificial Sequence: Synthetic oligonucleotide
agcuuauuaucaggaaaua

SEQ ID NO: 800051 - RNA, 19 nt, Artificial Sequence
  Description of Artificial Sequence: Synthetic oligonucleotide
gguaguuaacuuuacuguu

SEQ ID NO: 800052 - RNA, 19 nt, Artificial Sequence
  Description of Artificial Sequence: Synthetic oligonucleotide
augacacgugugaaucaag

SEQ ID NO: 800053 - RNA, 19 nt, Artificial Sequence
  Description of Artificial Sequence: Synthetic oligonucleotide
  modified_base (12)..(12): a, c, u, g, unknown or other
auagagcaaganacagaga

SEQ ID NO: 800054 - RNA, 19 nt, Artificial Sequence
  Description of Artificial Sequence: Synthetic oligonucleotide
cuuuugcucggggucuuug

SEQ ID NO: 800055 - RNA, 19 nt, Artificial Sequence
  Description of Artificial Sequence: Synthetic oligonucleotide
uugcucggggucuuugauu

SEQ ID NO: 800056 - RNA, 19 nt, Artificial Sequence
  Description of Artificial Sequence: Synthetic oligonucleotide
guaucucugaggucaggcu

SEQ ID NO: 800057 - RNA, 19 nt, Artificial Sequence
  Description of Artificial Sequence: Synthetic oligonucleotide
gggccuucuaccuuguuua

SEQ ID NO: 800058 - RNA, 19 nt, Artificial Sequence
  Description of Artificial Sequence: Synthetic oligonucleotide
cccugauucuuaugaaaug

SEQ ID NO: 800059 - RNA, 19 nt, Artificial Sequence
  Description of Artificial Sequence: Synthetic oligonucleotide
uccgcacagcgcacucgag

SEQ ID NO: 800060 - RNA, 19 nt, Artificial Sequence
  Description of Artificial Sequence: Synthetic oligonucleotide
  modified_base (7)..(7): a, c, u, g, unknown or other
gcaaganacagagagucau

SEQ ID NO: 800061 - RNA, 19 nt, Artificial Sequence
  Description of Artificial Sequence: Synthetic oligonucleotide
uccuggguguaucccguuu

SEQ ID NO: 800062 - RNA, 19 nt, Artificial Sequence
  Description of Artificial Sequence: Synthetic oligonucleotide
gacugaucauaaguaaaau

SEQ ID NO: 800063 - RNA, 19 nt, Artificial Sequence
  Description of Artificial Sequence: Synthetic oligonucleotide
ggacucaguagaaacagua

SEQ ID NO: 800064 - RNA, 19 nt, Artificial Sequence
  Description of Artificial Sequence: Synthetic oligonucleotide
cagucacuccauuuccaga

SEQ ID NO: 800065 - RNA, 19 nt, Artificial Sequence
  Description of Artificial Sequence: Synthetic oligonucleotide
ucuccacccaugggugaag

SEQ ID NO: 800066 - RNA, 19 nt, Artificial Sequence
  Description of Artificial Sequence: Synthetic oligonucleotide
gguuccacuucacaguggu

SEQ ID NO: 800067 - RNA, 19 nt, Artificial Sequence
  Description of Artificial Sequence: Synthetic oligonucleotide
uucggaaugucaggacuuu

SEQ ID NO: 800068 - RNA, 19 nt, Artificial Sequence
  Description of Artificial Sequence: Synthetic oligonucleotide
augaauuggguugguggua

SEQ ID NO: 800069 - RNA, 19 nt, Artificial Sequence
  Description of Artificial Sequence: Synthetic oligonucleotide
uggcaucaucuaccauagc

SEQ ID NO: 800070 - RNA, 19 nt, Artificial Sequence
  Description of Artificial Sequence: Synthetic oligonucleotide
agacuggaagucgcuguca

SEQ ID NO: 800071 - RNA, 19 nt, Artificial Sequence
  Description of Artificial Sequence: Synthetic oligonucleotide
acauuccaaggggaucuca

SEQ ID NO: 800072 - RNA, 19 nt, Artificial Sequence
  Description of Artificial Sequence: Synthetic oligonucleotide
cauccgcacagcgcacucg

SEQ ID NO: 800073 - RNA, 19 nt, Artificial Sequence
  Description of Artificial Sequence: Synthetic oligonucleotide
ggacagaaacauugugcuc

SEQ ID NO: 800074 - RNA, 19 nt, Artificial Sequence
  Description of Artificial Sequence: Synthetic oligonucleotide
cugaacagugcccuggcau

SEQ ID NO: 800075 - RNA, 19 nt, Artificial Sequence
  Description of Artificial Sequence: Synthetic oligonucleotide
ucggggucuuugauuucau

SEQ ID NO: 800076 - RNA, 19 nt, Artificial Sequence
  Description of Artificial Sequence: Synthetic oligonucleotide
aagcugacauggggugucu

SEQ ID NO: 800077 - RNA, 19 nt, Artificial Sequence
  Description of Artificial Sequence: Synthetic oligonucleotide
gugccuguaguguaugaau

SEQ ID NO: 800078 - RNA, 19 nt, Artificial Sequence
  Description of Artificial Sequence: Synthetic oligonucleotide
cuagugacaggaugcugcu

SEQ ID NO: 800079 - RNA, 19 nt, Artificial Sequence
  Description of Artificial Sequence: Synthetic oligonucleotide
gaguucucauccggaguca

SEQ ID NO: 800080 - RNA, 19 nt, Artificial Sequence
  Description of Artificial Sequence: Synthetic oligonucleotide
acuggaagucgcugucaua

SEQ ID NO: 800081 - RNA, 19 nt, Artificial Sequence
  Description of Artificial Sequence: Synthetic oligonucleotide
ggcacugccauuugcauuu

SEQ ID NO: 800082 - RNA, 19 nt, Artificial Sequence
  Description of Artificial Sequence: Synthetic oligonucleotide
auuggggccuuggccagca

SEQ ID NO: 800083 - RNA, 19 nt, Artificial Sequence
  Description of Artificial Sequence: Synthetic oligonucleotide
acugaggagggaggcuuca

SEQ ID NO: 800084 - RNA, 19 nt, Artificial Sequence
  Description of Artificial Sequence: Synthetic oligonucleotide
ggggucaauaguccaagcu

SEQ ID NO: 800085 - RNA, 19 nt, Artificial Sequence
  Description of Artificial Sequence: Synthetic oligonucleotide
cacgugguacccuucuaua

SEQ ID NO: 800086 - RNA, 19 nt, Artificial Sequence
  Description of Artificial Sequence: Synthetic oligonucleotide
gguaccagucacaucccca

SEQ ID NO: 800087 - RNA, 19 nt, Artificial Sequence
  Description of Artificial Sequence: Synthetic oligonucleotide
guacacgugguacccuucu

SEQ ID NO: 800088 - RNA, 19 nt, Artificial Sequence
  Description of Artificial Sequence: Synthetic oligonucleotide
ccuggguguaucccguuug

SEQ ID NO: 800089 - RNA, 19 nt, Artificial Sequence
  Description of Artificial Sequence: Synthetic oligonucleotide
gccaugggaaccagaauca

SEQ ID NO: 800090 - RNA, 19 nt, Artificial Sequence
  Description of Artificial Sequence: Synthetic oligonucleotide
gguguacggagugacgaga

SEQ ID NO: 800091 - RNA, 19 nt, Artificial Sequence
  Description of Artificial Sequence: Synthetic oligonucleotide
ucggaaugucaggacuuuu

SEQ ID NO: 800092 - RNA, 19 nt, Artificial Sequence
  Description of Artificial Sequence: Synthetic oligonucleotide
guguacggagugacgagaa

SEQ ID NO: 800093 - RNA, 19 nt, Artificial Sequence
  Description of Artificial Sequence: Synthetic oligonucleotide
guguaucccguuuguuucu

SEQ ID NO: 800094 - RNA, 19 nt, Artificial Sequence
  Description of Artificial Sequence: Synthetic oligonucleotide
guuccacuucacaguggug

SEQ ID NO: 800095 - RNA, 19 nt, Artificial Sequence
  Description of Artificial Sequence: Synthetic oligonucleotide
uggcauccgcacagcgcac

SEQ ID NO: 800096 - RNA, 19 nt, Artificial Sequence
  Description of Artificial Sequence: Synthetic oligonucleotide
uccccggcacugccauuug

SEQ ID NO: 800097 - RNA, 19 nt, Artificial Sequence
  Description of Artificial Sequence: Synthetic oligonucleotide
ggagugacgagaaacucau

SEQ ID NO: 800098 - RNA, 19 nt, Artificial Sequence
  Description of Artificial Sequence: Synthetic oligonucleotide
cugucauaacugggccagc

SEQ ID NO: 800099 - RNA, 19 nt, Artificial Sequence
  Description of Artificial Sequence: Synthetic oligonucleotide
gcucauguaucacuucccu

SEQ ID NO: 800100 - RNA, 19 nt, Artificial Sequence
  Description of Artificial Sequence: Synthetic oligonucleotide
gcuggcacucauguggaca

SEQ ID NO: 800101 - RNA, 19 nt, Artificial Sequence
  Description of Artificial Sequence: Synthetic oligonucleotide
uggguguaucccguuuguu

SEQ ID NO: 800102 - RNA, 19 nt, Artificial Sequence
  Description of Artificial Sequence: Synthetic oligonucleotide
caguagcagacugaugaua

SEQ ID NO: 800103 - RNA, 19 nt, Artificial Sequence
  Description of Artificial Sequence: Synthetic oligonucleotide
ccgcacagcgcacucgagc

SEQ ID NO: 800104 - RNA, 19 nt, Artificial Sequence
  Description of Artificial Sequence: Synthetic oligonucleotide
cagucacauccccaaaagu

SEQ ID NO: 800105 - RNA, 19 nt, Artificial Sequence
  Description of Artificial Sequence: Synthetic oligonucleotide
caugggguaauaugaucuu

SEQ ID NO: 800106 - RNA, 19 nt, Artificial Sequence
  Description of Artificial Sequence: Synthetic oligonucleotide
gaauuggguuggugguagu

SEQ ID NO: 800107 - RNA, 19 nt, Artificial Sequence
  Description of Artificial Sequence: Synthetic oligonucleotide
ccggguucuccagaggagc

SEQ ID NO: 800108 - RNA, 19 nt, Artificial Sequence
  Description of Artificial Sequence: Synthetic oligonucleotide
ccucaggugugcagaacuc

SEQ ID NO: 800109 - RNA, 19 nt, Artificial Sequence
  Description of Artificial Sequence: Synthetic oligonucleotide
ggguguaucccguuuguuu

SEQ ID NO: 800110 - RNA, 19 nt, Artificial Sequence
  Description of Artificial Sequence: Synthetic oligonucleotide
cauuggggccuuggccagc

SEQ ID NO: 800111 - RNA, 19 nt, Artificial Sequence
  Description of Artificial Sequence: Synthetic oligonucleotide
uuguggcaagacuguccuu

SEQ ID NO: 800112 - RNA, 19 nt, Artificial Sequence
  Description of Artificial Sequence: Synthetic oligonucleotide
caacugaaacuuguacacu

SEQ ID NO: 800113 - RNA, 19 nt, Artificial Sequence
  Description of Artificial Sequence: Synthetic oligonucleotide
gggagagcaccuuccaggu

SEQ ID NO: 800114 - RNA, 19 nt, Artificial Sequence
  Description of Artificial Sequence: Synthetic oligonucleotide
ggauuuguggcaagacugu

SEQ ID NO: 800115 - RNA, 19 nt, Artificial Sequence
  Description of Artificial Sequence: Synthetic oligonucleotide
cagacgauguuggauguau

SEQ ID NO: 800116 - RNA, 19 nt, Artificial Sequence
  Description of Artificial Sequence: Synthetic oligonucleotide
cacauuccaaggggaucuc

SEQ ID NO: 800117 - RNA, 19 nt, Artificial Sequence
  Description of Artificial Sequence: Synthetic oligonucleotide
gguggggucaauaguccaa

SEQ ID NO: 800118 - RNA, 19 nt, Artificial Sequence
  Description of Artificial Sequence: Synthetic oligonucleotide
ccguuuguuucucuaguaa

SEQ ID NO: 800119 - RNA, 19 nt, Artificial Sequence
  Description of Artificial Sequence: Synthetic oligonucleotide
cacauccccaaaagugccu

SEQ ID NO: 800120 - RNA, 19 nt, Artificial Sequence
  Description of Artificial Sequence: Synthetic oligonucleotide
agcgcacucgagccuugua

SEQ ID NO: 800121 - RNA, 19 nt, Artificial Sequence
  Description of Artificial Sequence: Synthetic oligonucleotide
uagugacaggaugcugcuu

SEQ ID NO: 800122 - RNA, 19 nt, Artificial Sequence
  Description of Artificial Sequence: Synthetic oligonucleotide
gugggcuauucuucuuggu

SEQ ID NO: 800123 - RNA, 19 nt, Artificial Sequence
  Description of Artificial Sequence: Synthetic oligonucleotide
guaucccguuuguuucucu

SEQ ID NO: 800124 - RNA, 19 nt, Artificial Sequence
  Description of Artificial Sequence: Synthetic oligonucleotide
cuggguguaucccguuugu

SEQ ID NO: 800125 - RNA, 19 nt, Artificial Sequence
  Description of Artificial Sequence: Synthetic oligonucleotide
cgugugaaucaaguuguuc

SEQ ID NO: 800126 - RNA, 19 nt, Artificial Sequence
  Description of Artificial Sequence: Synthetic oligonucleotide
ggagagcaccuuccagguc

SEQ ID NO: 800127 - RNA, 19 nt, Artificial Sequence
  Description of Artificial Sequence: Synthetic oligonucleotide
cccggcacugccauuugca

SEQ ID NO: 800128 - RNA, 19 nt, Artificial Sequence
  Description of Artificial Sequence: Synthetic oligonucleotide
gucgaagguuuuccacagu

SEQ ID NO: 800129 - RNA, 19 nt, Artificial Sequence
  Description of Artificial Sequence: Synthetic oligonucleotide
cgugguacccuucuauaaa

SEQ ID NO: 800130 - RNA, 19 nt, Artificial Sequence
  Description of Artificial Sequence: Synthetic oligonucleotide
ccuugaccuaaaaguaucu

SEQ ID NO: 800131 - RNA, 19 nt, Artificial Sequence
  Description of Artificial Sequence: Synthetic oligonucleotide
ggauucuggucgaagguuu

SEQ ID NO: 800132 - RNA, 19 nt, Artificial Sequence
  Description of Artificial Sequence: Synthetic oligonucleotide
cugacauggggugucuuuu

SEQ ID NO: 800133 - RNA, 19 nt, Artificial Sequence
  Description of Artificial Sequence: Synthetic oligonucleotide
uggggccuucuaccuuguu

SEQ ID NO: 800134 - RNA, 19 nt, Artificial Sequence
  Description of Artificial Sequence: Synthetic oligonucleotide
acagcgcacucgagccuug

SEQ ID NO: 800135 - RNA, 19 nt, Artificial Sequence
  Description of Artificial Sequence: Synthetic oligonucleotide
gcauccgcacagcgcacuc

SEQ ID NO: 800136 - RNA, 19 nt, Artificial Sequence
  Description of Artificial Sequence: Synthetic oligonucleotide
ccagaaucaaaagcugacu

SEQ ID NO: 800137 - RNA, 19 nt, Artificial Sequence
  Description of Artificial Sequence: Synthetic oligonucleotide
cauuauuaagugggcuauu

SEQ ID NO: 800138 - RNA, 19 nt, Artificial Sequence
  Description of Artificial Sequence: Synthetic oligonucleotide
cccguuuguuucucuagua

SEQ ID NO: 800139 - RNA, 19 nt, Artificial Sequence
  Description of Artificial Sequence: Synthetic oligonucleotide
gggauucuggucgaagguu

SEQ ID NO: 800140 - RNA, 19 nt, Artificial Sequence
  Description of Artificial Sequence: Synthetic oligonucleotide
cccaauaaucuggaagagu

SEQ ID NO: 800141 - RNA, 19 nt, Artificial Sequence
  Description of Artificial Sequence: Synthetic oligonucleotide
ccuuuugagcccagucacu

SEQ ID NO: 800142 - RNA, 19 nt, Artificial Sequence
  Description of Artificial Sequence: Synthetic oligonucleotide
gcacucauguggacagaaa

SEQ ID NO: 800143 - RNA, 19 nt, Artificial Sequence
  Description of Artificial Sequence: Synthetic oligonucleotide
gcucggggucuuugauuuc

SEQ ID NO: 800144 - RNA, 19 nt, Artificial Sequence
  Description of Artificial Sequence: Synthetic oligonucleotide
gccuucuaccuuguuuaua

SEQ ID NO: 800145 - RNA, 19 nt, Artificial Sequence
  Description of Artificial Sequence: Synthetic oligonucleotide
gccagcugagacacauaaa

SEQ ID NO: 800146 - RNA, 19 nt, Artificial Sequence
  Description of Artificial Sequence: Synthetic oligonucleotide
cacucgagccuuguacuuu

SEQ ID NO: 800147 - RNA, 19 nt, Artificial Sequence
  Description of Artificial Sequence: Synthetic oligonucleotide
cccagacgauguuggaugu

SEQ ID NO: 800148 - RNA, 19 nt, Artificial Sequence
  Description of Artificial Sequence: Synthetic oligonucleotide
cuccccggcacugccauuu

SEQ ID NO: 800149 - RNA, 19 nt, Artificial Sequence
  Description of Artificial Sequence: Synthetic oligonucleotide
ccaugggaaccagaaucaa

SEQ ID NO: 800150 - RNA, 19 nt, Artificial Sequence
  Description of Artificial Sequence: Synthetic oligonucleotide
gggacuucauguagucuuu

SEQ ID NO: 800151 - RNA, 19 nt, Artificial Sequence
  Description of Artificial Sequence: Synthetic oligonucleotide
ggcauccgcacagcgcacu

SEQ ID NO: 800152 - RNA, 19 nt, Artificial Sequence
  Description of Artificial Sequence: Synthetic oligonucleotide
caucuaccauagcccugau

SEQ ID NO: 800153 - RNA, 19 nt, Artificial Sequence
  Description of Artificial Sequence: Synthetic oligonucleotide
ccaagcugacauggggugu

SEQ ID NO: 800154 - RNA, 19 nt, Artificial Sequence
  Description of Artificial Sequence: Synthetic oligonucleotide
ccggcacugccauuugcau

SEQ ID NO: 800155 - RNA, 19 nt, Artificial Sequence
  Description of Artificial Sequence: Synthetic oligonucleotide
ccagacgauguuggaugua

SEQ ID NO: 800156 - RNA, 19 nt, Artificial Sequence
  Description of Artificial Sequence: Synthetic oligonucleotide
ccggagucaugaccuuugu

SEQ ID NO: 800157 - RNA, 19 nt, Artificial Sequence
  Description of Artificial Sequence: Synthetic oligonucleotide
cagcgcacucgagccuugu

SEQ ID NO: 800158 - RNA, 19 nt, Artificial Sequence
  Description of Artificial Sequence: Synthetic oligonucleotide
gcacugccauuugcauuuu

SEQ ID NO: 800159 - RNA, 19 nt, Artificial Sequence
  Description of Artificial Sequence: Synthetic oligonucleotide
uuuaaacucauccacauag

SEQ ID NO: 800160 - RNA, 19 nt, Artificial Sequence
  Description of Artificial Sequence: Synthetic oligonucleotide
aucgaucaaacucaaaacc

SEQ ID NO: 800161 - RNA, 19 nt, Artificial Sequence
  Description of Artificial Sequence: Synthetic oligonucleotide
aaaaggcucgguuuaacac

SEQ ID NO: 800162 - RNA, 19 nt, Artificial Sequence
  Description of Artificial Sequence: Synthetic oligonucleotide
auaagagcugaauacgugc

SEQ ID NO: 800163 - RNA, 19 nt, Artificial Sequence
  Description of Artificial Sequence: Synthetic oligonucleotide
aagagcaaaucauaccuuc

SEQ ID NO: 800164 - RNA, 19 nt, Artificial Sequence
  Description of Artificial Sequence: Synthetic oligonucleotide
aggagaacuuauuuggacc

SEQ ID NO: 800165 - RNA, 19 nt, Artificial Sequence
  Description of Artificial Sequence: Synthetic oligonucleotide
aacauaggguccgaaaagc

SEQ ID NO: 800166 - RNA, 19 nt, Artificial Sequence
  Description of Artificial Sequence: Synthetic oligonucleotide
cucaauaagagcugaauac

SEQ ID NO: 800167 - RNA, 19 nt, Artificial Sequence
  Description of Artificial Sequence: Synthetic oligonucleotide
aaacauaggguccgaaaag

SEQ ID NO: 800168 - RNA, 19 nt, Artificial Sequence
  Description of Artificial Sequence: Synthetic oligonucleotide
cuuaaggaugauuuggccc

SEQ ID NO: 800169 - RNA, 19 nt, Artificial Sequence
  Description of Artificial Sequence: Synthetic oligonucleotide
gauggguuggcacaucugg

SEQ ID NO: 800170 - RNA, 19 nt, Artificial Sequence
  Description of Artificial Sequence: Synthetic oligonucleotide
ggaaggagaacuuauuugg

SEQ ID NO: 800171 - RNA, 19 nt, Artificial Sequence
  Description of Artificial Sequence: Synthetic oligonucleotide
aaguagacgagcugauagg

SEQ ID NO: 800172 - RNA, 19 nt, Artificial Sequence
  Description of Artificial Sequence: Synthetic oligonucleotide
uuaaacucauccacauagg

SEQ ID NO: 800173 - RNA, 19 nt, Artificial Sequence
  Description of Artificial Sequence: Synthetic oligonucleotide
agcugugugagucaagccg

SEQ ID NO: 800174 - RNA, 19 nt, Artificial Sequence
  Description of Artificial Sequence: Synthetic oligonucleotide
ugggaccucaauaagagcu

SEQ ID NO: 800175 - RNA, 19 nt, Artificial Sequence
  Description of Artificial Sequence: Synthetic oligonucleotide
agcacguguaagcagcucc

SEQ ID NO: 800176 - RNA, 19 nt, Artificial Sequence
  Description of Artificial Sequence: Synthetic oligonucleotide
ucgaucaaacucaaaaccu

SEQ ID NO: 800177 - RNA, 19 nt, Artificial Sequence
  Description of Artificial Sequence: Synthetic oligonucleotide
auuuggccccaucugagcc

SEQ ID NO: 800178 - RNA, 19 nt, Artificial Sequence
  Description of Artificial Sequence: Synthetic oligonucleotide
aaaggcucgguuuaacacu

SEQ ID NO: 800179 - RNA, 19 nt, Artificial Sequence
  Description of Artificial Sequence: Synthetic oligonucleotide
aggaguaucaaagcaaggg

SEQ ID NO: 800180 - RNA, 19 nt, Artificial Sequence
  Description of Artificial Sequence: Synthetic oligonucleotide
cuucaauuaggcaaggcuc

SEQ ID NO: 800181 - RNA, 19 nt, Artificial Sequence
  Description of Artificial Sequence: Synthetic oligonucleotide
guaugugagcuccaguugg

SEQ ID NO: 800182 - RNA, 19 nt, Artificial Sequence
  Description of Artificial Sequence: Synthetic oligonucleotide
ucaaucaccccauuguacu

SEQ ID NO: 800183 - RNA, 19 nt, Artificial Sequence
  Description of Artificial Sequence: Synthetic oligonucleotide
cauggcaugguacaguggc

SEQ ID NO: 800184 - RNA, 19 nt, Artificial Sequence
  Description of Artificial Sequence: Synthetic oligonucleotide
uaggccuugagaaaauugu

SEQ ID NO: 800185 - RNA, 19 nt, Artificial Sequence
  Description of Artificial Sequence: Synthetic oligonucleotide
gaugauuuggccccaucug

SEQ ID NO: 800186 - RNA, 19 nt, Artificial Sequence
  Description of Artificial Sequence: Synthetic oligonucleotide
agagacguccauguguugc

SEQ ID NO: 800187 - RNA, 19 nt, Artificial Sequence
  Description of Artificial Sequence: Synthetic oligonucleotide
ugagacaaagcaguaaccu

SEQ ID NO: 800188 - RNA, 19 nt, Artificial Sequence
  Description of Artificial Sequence: Synthetic oligonucleotide
cuuaucuaggaaguagacg

SEQ ID NO: 800189 - RNA, 19 nt, Artificial Sequence
  Description of Artificial Sequence: Synthetic oligonucleotide
aauaagagcugaauacgug

SEQ ID NO: 800190 - RNA, 19 nt, Artificial Sequence
  Description of Artificial Sequence: Synthetic oligonucleotide
ugugagucaagccgcagcu

SEQ ID NO: 800191 - RNA, 19 nt, Artificial Sequence
  Description of Artificial Sequence: Synthetic oligonucleotide
gguagagauggauacagcc

SEQ ID NO: 800192 - RNA, 19 nt, Artificial Sequence
  Description of Artificial Sequence: Synthetic oligonucleotide
caucgaucaaacucaaaac

SEQ ID NO: 800193 - RNA, 19 nt, Artificial Sequence
  Description of Artificial Sequence: Synthetic oligonucleotide
cucgguuuaacacugccug

SEQ ID NO: 800194 - RNA, 19 nt, Artificial Sequence
  Description of Artificial Sequence: Synthetic oligonucleotide
uuggcagcuucaauuaggc

SEQ ID NO: 800195 - RNA, 19 nt, Artificial Sequence
  Description of Artificial Sequence: Synthetic oligonucleotide
ugcauuucacugcaggagu

SEQ ID NO: 800196 - RNA, 19 nt, Artificial Sequence
  Description of Artificial Sequence: Synthetic oligonucleotide
uccagagacguccaugugu

SEQ ID NO: 800197 - RNA, 19 nt, Artificial Sequence
  Description of Artificial Sequence: Synthetic oligonucleotide
aacuuauuuggaccucucu

SEQ ID NO: 800198 - RNA, 19 nt, Artificial Sequence
  Description of Artificial Sequence: Synthetic oligonucleotide
cugaauacgugcauuucac

SEQ ID NO: 800199 - RNA, 19 nt, Artificial Sequence
  Description of Artificial Sequence: Synthetic oligonucleotide
auaggguccgaaaagcuuc

SEQ ID NO: 800200 - RNA, 19 nt, Artificial Sequence
  Description of Artificial Sequence: Synthetic oligonucleotide
ucagcuaaggagcgguccc

SEQ ID NO: 800201 - RNA, 19 nt, Artificial Sequence
  Description of Artificial Sequence: Synthetic oligonucleotide
aguuggaagcgcucggcgg

SEQ ID NO: 800202 - RNA, 19 nt, Artificial Sequence
  Description of Artificial Sequence: Synthetic oligonucleotide
cauagugcgagaagggcug

SEQ ID NO: 800203 - RNA, 19 nt, Artificial Sequence
  Description of Artificial Sequence: Synthetic oligonucleotide
agagcaaaucauaccuucc

SEQ ID NO: 800204 - RNA, 19 nt, Artificial Sequence
  Description of Artificial Sequence: Synthetic oligonucleotide
acgugcauuucacugcagg

SEQ ID NO: 800205 - RNA, 19 nt, Artificial Sequence
  Description of Artificial Sequence: Synthetic oligonucleotide
ugcuggacguaguugacca

SEQ ID NO: 800206 - RNA, 19 nt, Artificial Sequence
  Description of Artificial Sequence: Synthetic oligonucleotide
gcugaaaagauguccuugg

SEQ ID NO: 800207 - RNA, 19 nt, Artificial Sequence
  Description of Artificial Sequence: Synthetic oligonucleotide
aaaccccggguccuucccc

SEQ ID NO: 800208 - RNA, 19 nt, Artificial Sequence
  Description of Artificial Sequence: Synthetic oligonucleotide
acccacacgagccucuaac

SEQ ID NO: 800209 - RNA, 19 nt, Artificial Sequence
  Description of Artificial Sequence: Synthetic oligonucleotide
ugugaaacggcacggucuc

SEQ ID NO: 800210 - RNA, 19 nt, Artificial Sequence
  Description of Artificial Sequence: Synthetic oligonucleotide
cacacgagccucuaacugc

SEQ ID NO: 800211 - RNA, 19 nt, Artificial Sequence
  Description of Artificial Sequence: Synthetic oligonucleotide
guuggaagcgcucggcggg

SEQ ID NO: 800212 - RNA, 19 nt, Artificial Sequence
  Description of Artificial Sequence: Synthetic oligonucleotide
uucgcugccccucaucaug

SEQ ID NO: 800213 - RNA, 19 nt, Artificial Sequence
  Description of Artificial Sequence: Synthetic oligonucleotide
gagcugauaggucuuccag

SEQ ID NO: 800214 - RNA, 19 nt, Artificial Sequence
  Description of Artificial Sequence: Synthetic oligonucleotide
aucagcuaaggagcggucc

SEQ ID NO: 800215 - RNA, 19 nt, Artificial Sequence
  Description of Artificial Sequence: Synthetic oligonucleotide
auuucgcugccccucauca

SEQ ID NO: 800216 - RNA, 19 nt, Artificial Sequence
  Description of Artificial Sequence: Synthetic oligonucleotide
aaaucauaccuuccccaaa

SEQ ID NO: 800217 - RNA, 19 nt, Artificial Sequence
  Description of Artificial Sequence: Synthetic oligonucleotide
augucuagcucugagguca

SEQ ID NO: 800218 - RNA, 19 nt, Artificial Sequence
  Description of Artificial Sequence: Synthetic oligonucleotide
uguaagcagcuccgaacag

SEQ ID NO: 800219 - RNA, 19 nt, Artificial Sequence
  Description of Artificial Sequence: Synthetic oligonucleotide
uuuagcucagggaaauauu

SEQ ID NO: 800220 - RNA, 19 nt, Artificial Sequence
  Description of Artificial Sequence: Synthetic oligonucleotide
caugagugaguccccaggc

SEQ ID NO: 800221 - RNA, 19 nt, Artificial Sequence
  Description of Artificial Sequence: Synthetic oligonucleotide
guaggugucaucggggucc

SEQ ID NO: 800222 - RNA, 19 nt, Artificial Sequence
  Description of Artificial Sequence: Synthetic oligonucleotide
caagccgcagcuccgaggc

SEQ ID NO: 800223 - RNA, 19 nt, Artificial Sequence
  Description of Artificial Sequence: Synthetic oligonucleotide
guaagcagcuccgaacagg

SEQ ID NO: 800224 - RNA, 19 nt, Artificial Sequence
  Description of Artificial Sequence: Synthetic oligonucleotide
auguguugccucaacagag

SEQ ID NO: 800225 - RNA, 19 nt, Artificial Sequence
  Description of Artificial Sequence: Synthetic oligonucleotide
aagugcucgcgcucaucac

SEQ ID NO: 800226 - RNA, 19 nt, Artificial Sequence
  Description of Artificial Sequence: Synthetic oligonucleotide
ugaauacgugcauuucacu

SEQ ID NO: 800227 - RNA, 19 nt, Artificial Sequence
  Description of Artificial Sequence: Synthetic oligonucleotide
auacgugcauuucacugca

SEQ ID NO: 800228 - RNA, 19 nt, Artificial Sequence
  Description of Artificial Sequence: Synthetic oligonucleotide
ucaacccgcggccuucccg

SEQ ID NO: 800229 - RNA, 19 nt, Artificial Sequence
  Description of Artificial Sequence: Synthetic oligonucleotide
caaacauaggguccgaaaa

SEQ ID NO: 800230 - RNA, 19 nt, Artificial Sequence
  Description of Artificial Sequence: Synthetic oligonucleotide
aacggcacggucuccgaga

SEQ ID NO: 800231 - RNA, 19 nt, Artificial Sequence
  Description of Artificial Sequence: Synthetic oligonucleotide
cacggugccgcucaacccg

SEQ ID NO: 800232 - RNA, 19 nt, Artificial Sequence
  Description of Artificial Sequence: Synthetic oligonucleotide
acacgagccucuaacugcc

SEQ ID NO: 800233 - RNA, 19 nt, Artificial Sequence
  Description of Artificial Sequence: Synthetic oligonucleotide
ccagguaugagacaaagca

SEQ ID NO: 800234 - RNA, 19 nt, Artificial Sequence
  Description of Artificial Sequence: Synthetic oligonucleotide
uaaggagcgguccccugcc

SEQ ID NO: 800235 - RNA, 19 nt, Artificial Sequence
  Description of Artificial Sequence: Synthetic oligonucleotide
cugaaaagauguccuuggc

SEQ ID NO: 800236 - RNA, 19 nt, Artificial Sequence
  Description of Artificial Sequence: Synthetic oligonucleotide
guguaagcagcuccgaaca

SEQ ID NO: 800237 - RNA, 19 nt, Artificial Sequence
  Description of Artificial Sequence: Synthetic oligonucleotide
aaccccggguccuuccccg

SEQ ID NO: 800238 - RNA, 19 nt, Artificial Sequence
  Description of Artificial Sequence: Synthetic oligonucleotide
cuggacguaguugaccacg

SEQ ID NO: 800239 - RNA, 19 nt, Artificial Sequence
  Description of Artificial Sequence: Synthetic oligonucleotide
gaguaucaaagcaagggaa

SEQ ID NO: 800240 - RNA, 19 nt, Artificial Sequence
  Description of Artificial Sequence: Synthetic oligonucleotide
gucgcagccuccaagcacg

SEQ ID NO: 800241 - RNA, 19 nt, Artificial Sequence
  Description of Artificial Sequence: Synthetic oligonucleotide
agggcugcgugugaaacgg

SEQ ID NO: 800242 - RNA, 19 nt, Artificial Sequence
  Description of Artificial Sequence: Synthetic oligonucleotide
aaacggcacggucuccgag

SEQ ID NO: 800243 - RNA, 19 nt, Artificial Sequence
  Description of Artificial Sequence: Synthetic oligonucleotide
aaggcucgguuuaacacug

SEQ ID NO: 800244 - RNA, 19 nt, Artificial Sequence
  Description of Artificial Sequence: Synthetic oligonucleotide
cuaaggagcgguccccugc

SEQ ID NO: 800245 - RNA, 19 nt, Artificial Sequence
  Description of Artificial Sequence: Synthetic oligonucleotide
uggcagaguguacuucugc

SEQ ID NO: 800246 - RNA, 19 nt, Artificial Sequence
  Description of Artificial Sequence: Synthetic oligonucleotide
cugcgugugaaacggcacg

SEQ ID NO: 800247 - RNA, 19 nt, Artificial Sequence
  Description of Artificial Sequence: Synthetic oligonucleotide
ucaucauggcaugguacag

SEQ ID NO: 800248 - RNA, 19 nt, Artificial Sequence
  Description of Artificial Sequence: Synthetic oligonucleotide
cuuugggcauacaugguga

SEQ ID NO: 800249 - RNA, 19 nt, Artificial Sequence
  Description of Artificial Sequence: Synthetic oligonucleotide
agugcucgcgcucaucaca

SEQ ID NO: 800250 - RNA, 19 nt, Artificial Sequence
  Description of Artificial Sequence: Synthetic oligonucleotide
guaacucagcauuccgggc

SEQ ID NO: 800251 - RNA, 19 nt, Artificial Sequence
  Description of Artificial Sequence: Synthetic oligonucleotide
ugcgggaaggccacgcaca

SEQ ID NO: 800252 - RNA, 19 nt, Artificial Sequence
  Description of Artificial Sequence: Synthetic oligonucleotide
caccccauuguacuccucc

SEQ ID NO: 800253 - RNA, 19 nt, Artificial Sequence
  Description of Artificial Sequence: Synthetic oligonucleotide
auaggccuugagaaaauug

SEQ ID NO: 800254 - RNA, 19 nt, Artificial Sequence
  Description of Artificial Sequence: Synthetic oligonucleotide
auaggaggggauggguugg

SEQ ID NO: 800255 - RNA, 19 nt, Artificial Sequence
  Description of Artificial Sequence: Synthetic oligonucleotide
ggagaucucaugaaugaug

SEQ ID NO: 800256 - RNA, 19 nt, Artificial Sequence
  Description of Artificial Sequence: Synthetic oligonucleotide
cauguguugccucaacaga

SEQ ID NO: 800257 - RNA, 19 nt, Artificial Sequence
  Description of Artificial Sequence: Synthetic oligonucleotide
uacauggugaagccuucau

SEQ ID NO: 800258 - RNA, 19 nt, Artificial Sequence
  Description of Artificial Sequence: Synthetic oligonucleotide
gugugagucaagccgcagc

SEQ ID NO: 800259 - RNA, 19 nt, Artificial Sequence
  Description of Artificial Sequence: Synthetic oligonucleotide
auucccgggugggagaggg

SEQ ID NO: 800260 - RNA, 19 nt, Artificial Sequence
  Description of Artificial Sequence: Synthetic oligonucleotide
aaucuacucucuucuucuu

SEQ ID NO: 800261 - RNA, 19 nt, Artificial Sequence
  Description of Artificial Sequence: Synthetic oligonucleotide
ucgguuuaacacugccuga

SEQ ID NO: 800262 - RNA, 19 nt, Artificial Sequence
  Description of Artificial Sequence: Synthetic oligonucleotide
ugaguccccaggcgagagg

SEQ ID NO: 800263 - RNA, 19 nt, Artificial Sequence
  Description of Artificial Sequence: Synthetic oligonucleotide
caacccgcggccuucccgg

SEQ ID NO: 800264 - RNA, 19 nt, Artificial Sequence
  Description of Artificial Sequence: Synthetic oligonucleotide
gguaugugagcuccaguug

SEQ ID NO: 800265 - RNA, 19 nt, Artificial Sequence
  Description of Artificial Sequence: Synthetic oligonucleotide
uggacguaguugaccacgu

SEQ ID NO: 800266 - RNA, 19 nt, Artificial Sequence
  Description of Artificial Sequence: Synthetic oligonucleotide
ucucccaagugcucgcgcu

SEQ ID NO: 800267 - RNA, 19 nt, Artificial Sequence
  Description of Artificial Sequence: Synthetic oligonucleotide
cguaacucagcauuccggg

SEQ ID NO: 800268 - RNA, 19 nt, Artificial Sequence
  Description of Artificial Sequence: Synthetic oligonucleotide
caaaucauaccuuccccaa

SEQ ID NO: 800269 - RNA, 19 nt, Artificial Sequence
  Description of Artificial Sequence: Synthetic oligonucleotide
uguaggugucaucgggguc

SEQ ID NO: 800270 - RNA, 19 nt, Artificial Sequence
  Description of Artificial Sequence: Synthetic oligonucleotide
aggggacuucugcaggauc

SEQ ID NO: 800271 - RNA, 19 nt, Artificial Sequence
  Description of Artificial Sequence: Synthetic oligonucleotide
gcaggaguaucaaagcaag

SEQ ID NO: 800272 - RNA, 19 nt, Artificial Sequence
  Description of Artificial Sequence: Synthetic oligonucleotide
caauaagagcugaauacgu

SEQ ID NO: 800273 - RNA, 19 nt, Artificial Sequence
  Description of Artificial Sequence: Synthetic oligonucleotide
cauacauggugaagccuuc

SEQ ID NO: 800274 - RNA, 19 nt, Artificial Sequence
  Description of Artificial Sequence: Synthetic oligonucleotide
ugagcggguuuuccucucc

SEQ ID NO: 800275 - RNA, 19 nt, Artificial Sequence
  Description of Artificial Sequence: Synthetic oligonucleotide
gcugaauacgugcauuuca

SEQ ID NO: 800276 - RNA, 19 nt, Artificial Sequence
  Description of Artificial Sequence: Synthetic oligonucleotide
gaucucgaaggcgcggaag

SEQ ID NO: 800277 - RNA, 19 nt, Artificial Sequence
  Description of Artificial Sequence: Synthetic oligonucleotide
gcuccgaacaggaugguag

SEQ ID NO: 800278 - RNA, 19 nt, Artificial Sequence
  Description of Artificial Sequence: Synthetic oligonucleotide
uucucccaagugcucgcgc

SEQ ID NO: 800279 - RNA, 19 nt, Artificial Sequence
  Description of Artificial Sequence: Synthetic oligonucleotide
uaggguccgaaaagcuucu

SEQ ID NO: 800280 - RNA, 19 nt, Artificial Sequence
  Description of Artificial Sequence: Synthetic oligonucleotide
gcaaaucauaccuucccca

SEQ ID NO: 800281 - RNA, 19 nt, Artificial Sequence
  Description of Artificial Sequence: Synthetic oligonucleotide
gguccgaaaagcuucucuc

SEQ ID NO: 800282 - RNA, 19 nt, Artificial Sequence
  Description of Artificial Sequence: Synthetic oligonucleotide
acgagcugauaggucuucc

SEQ ID NO: 800283 - RNA, 19 nt, Artificial Sequence
  Description of Artificial Sequence: Synthetic oligonucleotide
auagugcgagaagggcugc

SEQ ID NO: 800284 - RNA, 19 nt, Artificial Sequence
  Description of Artificial Sequence: Synthetic oligonucleotide
gaggcccgaauucggcccg

SEQ ID NO: 800285 - RNA, 19 nt, Artificial Sequence
  Description of Artificial Sequence: Synthetic oligonucleotide
caauuaggcaaggcucugc

SEQ ID NO: 800286 - RNA, 19 nt, Artificial Sequence
  Description of Artificial Sequence: Synthetic oligonucleotide
uccgaacaggaugguagag

SEQ ID NO: 800287 - RNA, 19 nt, Artificial Sequence
  Description of Artificial Sequence: Synthetic oligonucleotide
ccaucgaucaaacucaaaa

SEQ ID NO: 800288 - RNA, 19 nt, Artificial Sequence
  Description of Artificial Sequence: Synthetic oligonucleotide
ccuccaagcacguguaagc

SEQ ID NO: 800289 - RNA, 19 nt, Artificial Sequence
  Description of Artificial Sequence: Synthetic oligonucleotide
ucccggaggcccgaauucg

SEQ ID NO: 800290 - RNA, 19 nt, Artificial Sequence
  Description of Artificial Sequence: Synthetic oligonucleotide
ugucaucgggguccacgcc

SEQ ID NO: 800291 - RNA, 19 nt, Artificial Sequence
  Description of Artificial Sequence: Synthetic oligonucleotide
aggcgagagguccgggagg

SEQ ID NO: 800292 - RNA, 19 nt, Artificial Sequence
  Description of Artificial Sequence: Synthetic oligonucleotide
uggcuugcaugucuagcuc

SEQ ID NO: 800293 - RNA, 19 nt, Artificial Sequence
  Description of Artificial Sequence: Synthetic oligonucleotide
ugccgcucaacccgcggcc

SEQ ID NO: 800294 - RNA, 19 nt, Artificial Sequence
  Description of Artificial Sequence: Synthetic oligonucleotide
caaucaccccauuguacuc

SEQ ID NO: 800295 - RNA, 19 nt, Artificial Sequence
  Description of Artificial Sequence: Synthetic oligonucleotide
ggggccaaccagcaaaccc

SEQ ID NO: 800296 - RNA, 19 nt, Artificial Sequence
  Description of Artificial Sequence: Synthetic oligonucleotide
uccccaggcgagagguccg

SEQ ID NO: 800297 - RNA, 19 nt, Artificial Sequence
  Description of Artificial Sequence: Synthetic oligonucleotide
cacgccugguucaaucuuc

SEQ ID NO: 800298 - RNA, 19 nt, Artificial Sequence
  Description of Artificial Sequence: Synthetic oligonucleotide
gcuucaauuaggcaaggcu

SEQ ID NO: 800299 - RNA, 19 nt, Artificial Sequence
  Description of Artificial Sequence: Synthetic oligonucleotide
ggagaacuuauuuggaccu

SEQ ID NO: 800300 - RNA, 19 nt, Artificial Sequence
  Description of Artificial Sequence: Synthetic oligonucleotide
ccucuaacugcccuugggc

SEQ ID NO: 800301 - RNA, 19 nt, Artificial Sequence
  Description of Artificial Sequence: Synthetic oligonucleotide
ucagcauuccgggcauuug

SEQ ID NO: 800302 - RNA, 19 nt, Artificial Sequence
  Description of Artificial Sequence: Synthetic oligonucleotide
uucagccaucgaucaaacu

SEQ ID NO: 800303 - RNA, 19 nt, Artificial Sequence
  Description of Artificial Sequence: Synthetic oligonucleotide
ccguaacucagcauuccgg

SEQ ID NO: 800304 - RNA, 19 nt, Artificial Sequence
  Description of Artificial Sequence: Synthetic oligonucleotide
caaacaaggauucuccauu

SEQ ID NO: 800305 - RNA, 19 nt, Artificial Sequence
  Description of Artificial Sequence: Synthetic oligonucleotide
ccaaccagcaaaccccggg

SEQ ID NO: 800306 - RNA, 19 nt, Artificial Sequence
  Description of Artificial Sequence: Synthetic oligonucleotide
uccgaggcgcccucgggca

SEQ ID NO: 800307 - RNA, 19 nt, Artificial Sequence
  Description of Artificial Sequence: Synthetic oligonucleotide
ugccucaacagagcucgcc

SEQ ID NO: 800308 - RNA, 19 nt, Artificial Sequence
  Description of Artificial Sequence: Synthetic oligonucleotide
aggagcgguccccugccag

SEQ ID NO: 800309 - RNA, 19 nt, Artificial Sequence
  Description of Artificial Sequence: Synthetic oligonucleotide
cucgcgcucaucacagcug

SEQ ID NO: 800310 - RNA, 19 nt, Artificial Sequence
  Description of Artificial Sequence: Synthetic oligonucleotide
gccgccgucaccuccaggc

SEQ ID NO: 800311 - RNA, 19 nt, Artificial Sequence
  Description of Artificial Sequence: Synthetic oligonucleotide
uguagacaaaugguuucuu

SEQ ID NO: 800312 - RNA, 19 nt, Artificial Sequence
  Description of Artificial Sequence: Synthetic oligonucleotide
gccguaacucagcauuccg

SEQ ID NO: 800313 - RNA, 19 nt, Artificial Sequence
  Description of Artificial Sequence: Synthetic oligonucleotide
gaaggcgcggaagcuggag

SEQ ID NO: 800314 - RNA, 19 nt, Artificial Sequence
  Description of Artificial Sequence: Synthetic oligonucleotide
acgagccucuaacugcccu

SEQ ID NO: 800315 - RNA, 19 nt, Artificial Sequence
  Description of Artificial Sequence: Synthetic oligonucleotide
guagagauggauacagccu

SEQ ID NO: 800316 - RNA, 19 nt, Artificial Sequence
  Description of Artificial Sequence: Synthetic oligonucleotide
guaugagacaaagcaguaa

SEQ ID NO: 800317 - RNA, 19 nt, Artificial Sequence
  Description of Artificial Sequence: Synthetic oligonucleotide
uagugcgagaagggcugcg

SEQ ID NO: 800318 - RNA, 19 nt, Artificial Sequence
  Description of Artificial Sequence: Synthetic oligonucleotide
uggcagcuucaauuaggca

SEQ ID NO: 800319 - RNA, 19 nt, Artificial Sequence
  Description of Artificial Sequence: Synthetic oligonucleotide
ugucuagcucugaggucac

SEQ ID NO: 800320 - RNA, 19 nt, Artificial Sequence
  Description of Artificial Sequence: Synthetic oligonucleotide
uaaggaugauuuggcccca

SEQ ID NO: 800321 - RNA, 19 nt, Artificial Sequence
  Description of Artificial Sequence: Synthetic oligonucleotide
ggggugacaaaggucaaac

SEQ ID NO: 800322 - RNA, 19 nt, Artificial Sequence
  Description of Artificial Sequence: Synthetic oligonucleotide
agccucuaacugcccuugg

SEQ ID NO: 800323 - RNA, 19 nt, Artificial Sequence
  Description of Artificial Sequence: Synthetic oligonucleotide
acguguaagcagcuccgaa

SEQ ID NO: 800324 - RNA, 19 nt, Artificial Sequence
  Description of Artificial Sequence: Synthetic oligonucleotide
caaaccccggguccuuccc

SEQ ID NO: 800325 - RNA, 19 nt, Artificial Sequence
  Description of Artificial Sequence: Synthetic oligonucleotide
cuccgaggcgcccucgggc

SEQ ID NO: 800326 - RNA, 19 nt, Artificial Sequence
  Description of Artificial Sequence: Synthetic oligonucleotide
gccucuaacugcccuuggg

SEQ ID NO: 800327 - RNA, 19 nt, Artificial Sequence
  Description of Artificial Sequence: Synthetic oligonucleotide
agcgucgccgccgucaccu

SEQ ID NO: 800328 - RNA, 19 nt, Artificial Sequence
  Description of Artificial Sequence: Synthetic oligonucleotide
uggccaaagcuaucagaua

SEQ ID NO: 800329 - RNA, 19 nt, Artificial Sequence
  Description of Artificial Sequence: Synthetic oligonucleotide
cugcuggacguaguugacc

SEQ ID NO: 800330 - RNA, 19 nt, Artificial Sequence
  Description of Artificial Sequence: Synthetic oligonucleotide
ggcucgguuuaacacugcc

SEQ ID NO: 800331 - RNA, 19 nt, Artificial Sequence
  Description of Artificial Sequence: Synthetic oligonucleotide
ccucaucauggcaugguac

SEQ ID NO: 800332 - RNA, 19 nt, Artificial Sequence
  Description of Artificial Sequence: Synthetic oligonucleotide
gugcucgcgcucaucacag

SEQ ID NO: 800333 - RNA, 19 nt, Artificial Sequence
  Description of Artificial Sequence: Synthetic oligonucleotide
agagauggauacagccuca

SEQ ID NO: 800334 - RNA, 19 nt, Artificial Sequence
  Description of Artificial Sequence: Synthetic oligonucleotide
ucccaagugcucgcgcuca

SEQ ID NO: 800335 - RNA, 19 nt, Artificial Sequence
  Description of Artificial Sequence: Synthetic oligonucleotide
cuucucccaagugcucgcg

SEQ ID NO: 800336 - RNA, 19 nt, Artificial Sequence
  Description of Artificial Sequence: Synthetic oligonucleotide
cauuucgcugccccucauc

SEQ ID NO: 800337 - RNA, 19 nt, Artificial Sequence
  Description of Artificial Sequence: Synthetic oligonucleotide
auacauggugaagccuuca

SEQ ID NO: 800338 - RNA, 19 nt, Artificial Sequence
  Description of Artificial Sequence: Synthetic oligonucleotide
agauaggaggggauggguu

SEQ ID NO: 800339 - RNA, 19 nt, Artificial Sequence
  Description of Artificial Sequence: Synthetic oligonucleotide
acgcacaaggccuggccau

SEQ ID NO: 800340 - RNA, 19 nt, Artificial Sequence
  Description of Artificial Sequence: Synthetic oligonucleotide
cuccgaacaggaugguaga

SEQ ID NO: 800341 - RNA, 19 nt, Artificial Sequence
  Description of Artificial Sequence: Synthetic oligonucleotide
ggugggccagguaugagac

SEQ ID NO: 800342 - RNA, 19 nt, Artificial Sequence
  Description of Artificial Sequence: Synthetic oligonucleotide
guucagccaucgaucaaac

SEQ ID NO: 800343 - RNA, 19 nt, Artificial Sequence
  Description of Artificial Sequence: Synthetic oligonucleotide
uugagcggguuuuccucuc

SEQ ID NO: 800344 - RNA, 19 nt, Artificial Sequence
  Description of Artificial Sequence: Synthetic oligonucleotide
guagacgagcugauagguc

SEQ ID NO: 800345 - RNA, 19 nt, Artificial Sequence
  Description of Artificial Sequence: Synthetic oligonucleotide
aggaucucgaaggcgcgga

SEQ ID NO: 800346 - RNA, 19 nt, Artificial Sequence
  Description of Artificial Sequence: Synthetic oligonucleotide
agguagaauuccagaaaau

SEQ ID NO: 800347 - RNA, 19 nt, Artificial Sequence
  Description of Artificial Sequence: Synthetic oligonucleotide
gcacguguaagcagcuccg

SEQ ID NO: 800348 - RNA, 19 nt, Artificial Sequence
  Description of Artificial Sequence: Synthetic oligonucleotide
uuucgcugccccucaucau

SEQ ID NO: 800349 - RNA, 19 nt, Artificial Sequence
  Description of Artificial Sequence: Synthetic oligonucleotide
gagcugaauacgugcauuu

SEQ ID NO: 800350 - RNA, 19 nt, Artificial Sequence
  Description of Artificial Sequence: Synthetic oligonucleotide
gugccgcucaacccgcggc

SEQ ID NO: 800351 - RNA, 19 nt, Artificial Sequence
  Description of Artificial Sequence: Synthetic oligonucleotide
gagccguaacucagcauuc

SEQ ID NO: 800352 - RNA, 19 nt, Artificial Sequence
  Description of Artificial Sequence: Synthetic oligonucleotide
agcaaaccccggguccuuc

SEQ ID NO: 800353 - RNA, 19 nt, Artificial Sequence
  Description of Artificial Sequence: Synthetic oligonucleotide
cacgcacaaggccuggcca

SEQ ID NO: 800354 - RNA, 19 nt, Artificial Sequence
  Description of Artificial Sequence: Synthetic oligonucleotide
uuccccgacgcgguaugug

SEQ ID NO: 800355 - RNA, 19 nt, Artificial Sequence
  Description of Artificial Sequence: Synthetic oligonucleotide
gggaccucaauaagagcug

SEQ ID NO: 800356 - RNA, 19 nt, Artificial Sequence
  Description of Artificial Sequence: Synthetic oligonucleotide
gucaucgggguccacgccu

SEQ ID NO: 800357 - RNA, 19 nt, Artificial Sequence
  Description of Artificial Sequence: Synthetic oligonucleotide
ccacacgagccucuaacug

SEQ ID NO: 800358 - RNA, 19 nt, Artificial Sequence
  Description of Artificial Sequence: Synthetic oligonucleotide
ucccgguucccggucccgg

SEQ ID NO: 800359 - RNA, 19 nt, Artificial Sequence
  Description of Artificial Sequence: Synthetic oligonucleotide
gucccggaggcccgaauuc

SEQ ID NO: 800360 - RNA, 19 nt, Artificial Sequence
  Description of Artificial Sequence: Synthetic oligonucleotide
cuccagagacguccaugug

SEQ ID NO: 800361 - RNA, 19 nt, Artificial Sequence
  Description of Artificial Sequence: Synthetic oligonucleotide
guguagacaaaugguuucu

SEQ ID NO: 800362 - RNA, 19 nt, Artificial Sequence
  Description of Artificial Sequence: Synthetic oligonucleotide
ccccaguuggcauugguga

SEQ ID NO: 800363 - RNA, 19 nt, Artificial Sequence
  Description of Artificial Sequence: Synthetic oligonucleotide
agcuaaggagcgguccccu

SEQ ID NO: 800364 - RNA, 19 nt, Artificial Sequence
  Description of Artificial Sequence: Synthetic oligonucleotide
gccuccaagcacguguaag

SEQ ID NO: 800365 - RNA, 19 nt, Artificial Sequence
  Description of Artificial Sequence: Synthetic oligonucleotide
cucccaagugcucgcgcuc

SEQ ID NO: 800366 - RNA, 19 nt, Artificial Sequence
  Description of Artificial Sequence: Synthetic oligonucleotide
cacgagccucuaacugccc

SEQ ID NO: 800367 - RNA, 19 nt, Artificial Sequence
  Description of Artificial Sequence: Synthetic oligonucleotide
uaggugucaucggggucca

SEQ ID NO: 800368 - RNA, 19 nt, Artificial Sequence
  Description of Artificial Sequence: Synthetic oligonucleotide
cacauucccgggugggaga

SEQ ID NO: 800369 - RNA, 19 nt, Artificial Sequence
  Description of Artificial Sequence: Synthetic oligonucleotide
cucgcccugucgcagccuc

SEQ ID NO: 800370 - RNA, 19 nt, Artificial Sequence
  Description of Artificial Sequence: Synthetic oligonucleotide
guggcagaguguacuucug

SEQ ID NO: 800371 - RNA, 19 nt, Artificial Sequence
  Description of Artificial Sequence: Synthetic oligonucleotide
caaaccaacugugggagau

SEQ ID NO: 800372 - RNA, 19 nt, Artificial Sequence
  Description of Artificial Sequence: Synthetic oligonucleotide
ggugccgcucaacccgcgg

SEQ ID NO: 800373 - RNA, 19 nt, Artificial Sequence
  Description of Artificial Sequence: Synthetic oligonucleotide
cacacccggcuccuggguc

SEQ ID NO: 800374 - RNA, 19 nt, Artificial Sequence
  Description of Artificial Sequence: Synthetic oligonucleotide
aaggaugauuuggccccau

SEQ ID NO: 800375 - RNA, 19 nt, Artificial Sequence
  Description of Artificial Sequence: Synthetic oligonucleotide
ugccugacccuggguguag

SEQ ID NO: 800376 - RNA, 19 nt, Artificial Sequence
  Description of Artificial Sequence: Synthetic oligonucleotide
gauccuccuuugggcauac

SEQ ID NO: 800377 - RNA, 19 nt, Artificial Sequence
  Description of Artificial Sequence: Synthetic oligonucleotide
aggcucgguuuaacacugc

SEQ ID NO: 800378 - RNA, 19 nt, Artificial Sequence
  Description of Artificial Sequence: Synthetic oligonucleotide
agacguccauguguugccu

SEQ ID NO: 800379 - RNA, 19 nt, Artificial Sequence
  Description of Artificial Sequence: Synthetic oligonucleotide
ccgccagcucuucagcugg

SEQ ID NO: 800380 - RNA, 19 nt, Artificial Sequence
  Description of Artificial Sequence: Synthetic oligonucleotide
ccaaacauaggguccgaaa

SEQ ID NO: 800381 - RNA, 19 nt, Artificial Sequence
  Description of Artificial Sequence: Synthetic oligonucleotide
acccuggguguagacaaau

SEQ ID NO: 800382 - RNA, 19 nt, Artificial Sequence
  Description of Artificial Sequence: Synthetic oligonucleotide
caucgggguccacgccugg

SEQ ID NO: 800383 - RNA, 19 nt, Artificial Sequence
  Description of Artificial Sequence: Synthetic oligonucleotide
ucgcccugucgcagccucc

SEQ ID NO: 800384 - RNA, 19 nt, Artificial Sequence
  Description of Artificial Sequence: Synthetic oligonucleotide
caaccagcaaaccccgggu

SEQ ID NO: 800385 - RNA, 19 nt, Artificial Sequence
  Description of Artificial Sequence: Synthetic oligonucleotide
ggaccucaauaagagcuga

SEQ ID NO: 800386 - RNA, 19 nt, Artificial Sequence
  Description of Artificial Sequence: Synthetic oligonucleotide
gcgagaagggcugcgugug

SEQ ID NO: 800387 - RNA, 19 nt, Artificial Sequence
  Description of Artificial Sequence: Synthetic oligonucleotide
acgccugguucaaucuuca

SEQ ID NO: 800388 - RNA, 19 nt, Artificial Sequence
  Description of Artificial Sequence: Synthetic oligonucleotide
ggauggguuggcacaucug

SEQ ID NO: 800389 - RNA, 19 nt, Artificial Sequence
  Description of Artificial Sequence: Synthetic oligonucleotide
gugaaacggcacggucucc

SEQ ID NO: 800390 - RNA, 19 nt, Artificial Sequence
  Description of Artificial Sequence: Synthetic oligonucleotide
cucaacccgcggccuuccc

SEQ ID NO: 800391 - RNA, 19 nt, Artificial Sequence
  Description of Artificial Sequence: Synthetic oligonucleotide
aggcccgaauucggcccgc

SEQ ID NO: 800392 - RNA, 19 nt, Artificial Sequence
  Description of Artificial Sequence: Synthetic oligonucleotide
ccauagugcgagaagggcu

SEQ ID NO: 800393 - RNA, 19 nt, Artificial Sequence
  Description of Artificial Sequence: Synthetic oligonucleotide
cccggaggcccgaauucgg

SEQ ID NO: 800394 - RNA, 19 nt, Artificial Sequence
  Description of Artificial Sequence: Synthetic oligonucleotide
gcgguccccugccaguaag

SEQ ID NO: 800395 - RNA, 19 nt, Artificial Sequence
  Description of Artificial Sequence: Synthetic oligonucleotide
caucauggcaugguacagu

SEQ ID NO: 800396 - RNA, 19 nt, Artificial Sequence
  Description of Artificial Sequence: Synthetic oligonucleotide
ggguccgaaaagcuucucu

SEQ ID NO: 800397 - RNA, 19 nt, Artificial Sequence
  Description of Artificial Sequence: Synthetic oligonucleotide
cgugugaaacggcacgguc

SEQ ID NO: 800398 - RNA, 19 nt, Artificial Sequence
  Description of Artificial Sequence: Synthetic oligonucleotide
gcugcgugugaaacggcac

SEQ ID NO: 800399 - RNA, 19 nt, Artificial Sequence
  Description of Artificial Sequence: Synthetic oligonucleotide
gcgcggaagcuggaggccg

SEQ ID NO: 800400 - RNA, 19 nt, Artificial Sequence
  Description of Artificial Sequence: Synthetic oligonucleotide
cugauaggucuuccaggua

SEQ ID NO: 800401 - RNA, 19 nt, Artificial Sequence
  Description of Artificial Sequence: Synthetic oligonucleotide
agcuccgaacaggauggua

SEQ ID NO: 800402 - RNA, 19 nt, Artificial Sequence
  Description of Artificial Sequence: Synthetic oligonucleotide
ggucuccgagaguggcugc

SEQ ID NO: 800403 - RNA, 19 nt, Artificial Sequence
  Description of Artificial Sequence: Synthetic oligonucleotide
ccggaggcccgaauucggc

SEQ ID NO: 800404 - RNA, 19 nt, Artificial Sequence
  Description of Artificial Sequence: Synthetic oligonucleotide
acggucuccgagaguggcu

SEQ ID NO: 800405 - RNA, 19 nt, Artificial Sequence
  Description of Artificial Sequence: Synthetic oligonucleotide
gucuagcucugaggucacc

SEQ ID NO: 800406 - RNA, 19 nt, Artificial Sequence
  Description of Artificial Sequence: Synthetic oligonucleotide
gcuggacguaguugaccac

SEQ ID NO: 800407 - RNA, 19 nt, Artificial Sequence
  Description of Artificial Sequence: Synthetic oligonucleotide
aucgggguccacgccuggu

SEQ ID NO: 800408 - RNA, 19 nt, Artificial Sequence
  Description of Artificial Sequence: Synthetic oligonucleotide
cacguguaagcagcuccga

SEQ ID NO: 800409 - RNA, 19 nt, Artificial Sequence
  Description of Artificial Sequence: Synthetic oligonucleotide
auucggcccgcagguccag

SEQ ID NO: 800410 - RNA, 19 nt, Artificial Sequence
  Description of Artificial Sequence: Synthetic oligonucleotide
gggguccacgccugguuca

SEQ ID NO: 800411 - RNA, 19 nt, Artificial Sequence
  Description of Artificial Sequence: Synthetic oligonucleotide
ccgaacaggaugguagaga

SEQ ID NO: 800412 - RNA, 19 nt, Artificial Sequence
  Description of Artificial Sequence: Synthetic oligonucleotide
cggaggcccgaauucggcc

SEQ ID NO: 800413 - RNA, 19 nt, Artificial Sequence
  Description of Artificial Sequence: Synthetic oligonucleotide
ccccgacgcgguaugugag

SEQ ID NO: 800414 - RNA, 19 nt, Artificial Sequence
  Description of Artificial Sequence: Synthetic oligonucleotide
guucccggucccggaggcc

SEQ ID NO: 800415 - RNA, 19 nt, Artificial Sequence
  Description of Artificial Sequence: Synthetic oligonucleotide
gcauuucacugcaggagua

SEQ ID NO: 800416 - RNA, 19 nt, Artificial Sequence
  Description of Artificial Sequence: Synthetic oligonucleotide
ccggguccuuccccgacgc

SEQ ID NO: 800417 - RNA, 19 nt, Artificial Sequence
  Description of Artificial Sequence: Synthetic oligonucleotide
ccagagacguccauguguu

SEQ ID NO: 800418 - RNA, 19 nt, Artificial Sequence
  Description of Artificial Sequence: Synthetic oligonucleotide
ggaucucgaaggcgcggaa

SEQ ID NO: 800419 - RNA, 19 nt, Artificial Sequence
  Description of Artificial Sequence: Synthetic oligonucleotide
ccuuccccgacgcgguaug

SEQ ID NO: 800420 - RNA, 19 nt, Artificial Sequence
  Description of Artificial Sequence: Synthetic oligonucleotide
gccccaucugagccguaac

SEQ ID NO: 800421 - RNA, 19 nt, Artificial Sequence
  Description of Artificial Sequence: Synthetic oligonucleotide
ccaaaccaacugugggaga

SEQ ID NO: 800422 - RNA, 19 nt, Artificial Sequence
  Description of Artificial Sequence: Synthetic oligonucleotide
gcacggucuccgagagugg

SEQ ID NO: 800423 - RNA, 19 nt, Artificial Sequence
  Description of Artificial Sequence: Synthetic oligonucleotide
gcucgguuuaacacugccu

SEQ ID NO: 800424 - RNA, 19 nt, Artificial Sequence
  Description of Artificial Sequence: Synthetic oligonucleotide
cauaggccuugagaaaauu

SEQ ID NO: 800425 - RNA, 19 nt, Artificial Sequence
  Description of Artificial Sequence: Synthetic oligonucleotide
gucuccgagaguggcugcu

SEQ ID NO: 800426 - RNA, 19 nt, Artificial Sequence
  Description of Artificial Sequence: Synthetic oligonucleotide
ccgguucccggucccggag

SEQ ID NO: 800427 - RNA, 19 nt, Artificial Sequence
  Description of Artificial Sequence: Synthetic oligonucleotide
cgccgucaccuccaggcag

SEQ ID NO: 800428 - RNA, 19 nt, Artificial Sequence
  Description of Artificial Sequence: Synthetic oligonucleotide
cagcgucgccgccgucacc

SEQ ID NO: 800429 - RNA, 19 nt, Artificial Sequence
  Description of Artificial Sequence: Synthetic oligonucleotide
gggagaucucaugaaugau

SEQ ID NO: 800430 - RNA, 19 nt, Artificial Sequence
  Description of Artificial Sequence: Synthetic oligonucleotide
gcucaacccgcggccuucc

SEQ ID NO: 800431 - RNA, 19 nt, Artificial Sequence
  Description of Artificial Sequence: Synthetic oligonucleotide
cgguucccggucccggagg

SEQ ID NO: 800432 - RNA, 19 nt, Artificial Sequence
  Description of Artificial Sequence: Synthetic oligonucleotide
cgcgguaugugagcuccag

SEQ ID NO: 800433 - RNA, 19 nt, Artificial Sequence
  Description of Artificial Sequence: Synthetic oligonucleotide
ggucccggaggcccgaauu

SEQ ID NO: 800434 - RNA, 19 nt, Artificial Sequence
  Description of Artificial Sequence: Synthetic oligonucleotide
gccacgcacaaggccuggc

SEQ ID NO: 800435 - RNA, 19 nt, Artificial Sequence
  Description of Artificial Sequence: Synthetic oligonucleotide
ggguccaaccucagcugaa

SEQ ID NO: 800436 - RNA, 19 nt, Artificial Sequence
  Description of Artificial Sequence: Synthetic oligonucleotide
acgcgguaugugagcucca

SEQ ID NO: 800437 - RNA, 19 nt, Artificial Sequence
  Description of Artificial Sequence: Synthetic oligonucleotide
cacccacacgagccucuaa

SEQ ID NO: 800438 - RNA, 19 nt, Artificial Sequence
  Description of Artificial Sequence: Synthetic oligonucleotide
gccuucccgguucccgguc

SEQ ID NO: 800439 - RNA, 19 nt, Artificial Sequence
  Description of Artificial Sequence: Synthetic oligonucleotide
gggcugcgugugaaacggc

SEQ ID NO: 800440 - RNA, 19 nt, Artificial Sequence
  Description of Artificial Sequence: Synthetic oligonucleotide
ccgggcauuugaaaucuuu

SEQ ID NO: 800441 - RNA, 19 nt, Artificial Sequence
  Description of Artificial Sequence: Synthetic oligonucleotide
gccaucgaucaaacucaaa

SEQ ID NO: 800442 - RNA, 19 nt, Artificial Sequence
  Description of Artificial Sequence: Synthetic oligonucleotide
uggccccaucugagccgua

SEQ ID NO: 800443 - RNA, 19 nt, Artificial Sequence
  Description of Artificial Sequence: Synthetic oligonucleotide
ccgaggcgcccucgggcag

SEQ ID NO: 800444 - RNA, 19 nt, Artificial Sequence
  Description of Artificial Sequence: Synthetic oligonucleotide
cccaaacauaggguccgaa

SEQ ID NO: 800445 - RNA, 19 nt, Artificial Sequence
  Description of Artificial Sequence: Synthetic oligonucleotide
ggacguaguugaccacguu

SEQ ID NO: 800446 - RNA, 19 nt, Artificial Sequence
  Description of Artificial Sequence: Synthetic oligonucleotide
gcgugugaaacggcacggu

SEQ ID NO: 800447 - RNA, 19 nt, Artificial Sequence
  Description of Artificial Sequence: Synthetic oligonucleotide
cuuccccgacgcgguaugu

SEQ ID NO: 800448 - RNA, 19 nt, Artificial Sequence
  Description of Artificial Sequence: Synthetic oligonucleotide
cccgguucccggucccgga

SEQ ID NO: 800449 - RNA, 19 nt, Artificial Sequence
  Description of Artificial Sequence: Synthetic oligonucleotide
cggguccuuccccgacgcg

SEQ ID NO: 800450 - RNA, 19 nt, Artificial Sequence
  Description of Artificial Sequence: Synthetic oligonucleotide
cggugccgcucaacccgcg

SEQ ID NO: 800451 - RNA, 19 nt, Artificial Sequence
  Description of Artificial Sequence: Synthetic oligonucleotide
ccgccgucaccuccaggca

SEQ ID NO: 800452 - RNA, 19 nt, Artificial Sequence
  Description of Artificial Sequence: Synthetic oligonucleotide
ggcccgaauucggcccgca

SEQ ID NO: 800453 - RNA, 19 nt, Artificial Sequence
  Description of Artificial Sequence: Synthetic oligonucleotide
cgcucaacccgcggccuuc

SEQ ID NO: 800454 - RNA, 19 nt, Artificial Sequence
  Description of Artificial Sequence: Synthetic oligonucleotide
ccccucaucauggcauggu

SEQ ID NO: 800455 - RNA, 19 nt, Artificial Sequence
  Description of Artificial Sequence: Synthetic oligonucleotide
cagcuccgaacaggauggu

SEQ ID NO: 800456 - RNA, 19 nt, Artificial Sequence
  Description of Artificial Sequence: Synthetic oligonucleotide
cgagccucuaacugcccuu

SEQ ID NO: 800457 - RNA, 19 nt, Artificial Sequence
  Description of Artificial Sequence: Synthetic oligonucleotide
cgccgccgucaccuccagg

SEQ ID NO: 800458 - RNA, 19 nt, Artificial Sequence
  Description of Artificial Sequence: Synthetic oligonucleotide
cagcaaaccccggguccuu

SEQ ID NO: 800459 - RNA, 19 nt, Artificial Sequence
  Description of Artificial Sequence: Synthetic oligonucleotide
cccaagugcucgcgcucau

SEQ ID NO: 800460 - RNA, 19 nt, Artificial Sequence
  Description of Artificial Sequence: Synthetic oligonucleotide
ccgcucaacccgcggccuu

SEQ ID NO: 800461 - RNA, 19 nt, Artificial Sequence
  Description of Artificial Sequence: Synthetic oligonucleotide
aaaauaauagcuuuagcag

SEQ ID NO: 800462 - RNA, 19 nt, Artificial Sequence
  Description of Artificial Sequence: Synthetic oligonucleotide
auaacuaucauaaaguuac

SEQ ID NO: 800463 - RNA, 19 nt, Artificial Sequence
  Description of Artificial Sequence: Synthetic oligonucleotide
caagaugagaaauaaaugg

SEQ ID NO: 800464 - RNA, 19 nt, Artificial Sequence
  Description of Artificial Sequence: Synthetic oligonucleotide
cuaucauaaaguuacaugc

SEQ ID NO: 800465 - RNA, 19 nt, Artificial Sequence
  Description of Artificial Sequence: Synthetic oligonucleotide
aaagcucugcaacaaaacc

SEQ ID NO: 800466 - RNA, 19 nt, Artificial Sequence
  Description of Artificial Sequence: Synthetic oligonucleotide
ucguaagacaauuucaugg

SEQ ID NO: 800467 - RNA, 19 nt, Artificial Sequence
  Description of Artificial Sequence: Synthetic oligonucleotide
uguaugauuggacaaagca

SEQ ID NO: 800468 - RNA, 19 nt, Artificial Sequence
  Description of Artificial Sequence: Synthetic oligonucleotide
uccuguuaaacuuuuaaag

SEQ ID NO: 800469 - RNA, 19 nt, Artificial Sequence
  Description of Artificial Sequence: Synthetic oligonucleotide
ucgauauuaauaaauacaa

SEQ ID NO: 800470 - RNA, 19 nt, Artificial Sequence
  Description of Artificial Sequence: Synthetic oligonucleotide
aauuagaagguaacaaaac

SEQ ID NO: 800471 - RNA, 19 nt, Artificial Sequence
  Description of Artificial Sequence: Synthetic oligonucleotide
acaucaagaaccaacagac

SEQ ID NO: 800472 - RNA, 19 nt, Artificial Sequence
  Description of Artificial Sequence: Synthetic oligonucleotide
ugagaaauaaaugguaucc

SEQ ID NO: 800473 - RNA, 19 nt, Artificial Sequence
  Description of Artificial Sequence: Synthetic oligonucleotide
cuguuaaacuuuuaaagcc

SEQ ID NO: 800474 - RNA, 19 nt, Artificial Sequence
  Description of Artificial Sequence: Synthetic oligonucleotide
ugcaugaacagcuaccagg

SEQ ID NO: 800475 - RNA, 19 nt, Artificial Sequence
  Description of Artificial Sequence: Synthetic oligonucleotide
cuagcauaggacaugauac

SEQ ID NO: 800476 - RNA, 19 nt, Artificial Sequence
  Description of Artificial Sequence: Synthetic oligonucleotide
guauagauaacucuguaac

SEQ ID NO: 800477 - RNA, 19 nt, Artificial Sequence
  Description of Artificial Sequence: Synthetic oligonucleotide
auaacucuguaacaauagc

SEQ ID NO: 800478 - RNA, 19 nt, Artificial Sequence
  Description of Artificial Sequence: Synthetic oligonucleotide
agaaccaacagacaccauc

SEQ ID NO: 800479 - RNA, 19 nt, Artificial Sequence
  Description of Artificial Sequence: Synthetic oligonucleotide
uuccuuaacagccauuugc

SEQ ID NO: 800480 - RNA, 19 nt, Artificial Sequence
  Description of Artificial Sequence: Synthetic oligonucleotide
acuaucauaaaguuacaug

SEQ ID NO: 800481 - RNA, 19 nt, Artificial Sequence
  Description of Artificial Sequence: Synthetic oligonucleotide
agauuaauuggguagucag

SEQ ID NO: 800482 - RNA, 19 nt, Artificial Sequence
  Description of Artificial Sequence: Synthetic oligonucleotide
uuuucguaagacaauuuca

SEQ ID NO: 800483 - RNA, 19 nt, Artificial Sequence
  Description of Artificial Sequence: Synthetic oligonucleotide
uuaguaauuuccauggaaa

SEQ ID NO: 800484 - RNA, 19 nt, Artificial Sequence
  Description of Artificial Sequence: Synthetic oligonucleotide
gaaguugcaguuaaugacg

SEQ ID NO: 800485 - RNA, 19 nt, Artificial Sequence
  Description of Artificial Sequence: Synthetic oligonucleotide
aaucuugccgguugaugcc

SEQ ID NO: 800486 - RNA, 19 nt, Artificial Sequence
  Description of Artificial Sequence: Synthetic oligonucleotide
uuaaugacguguaccacag

SEQ ID NO: 800487 - RNA, 19 nt, Artificial Sequence
  Description of Artificial Sequence: Synthetic oligonucleotide
acaaucauaacacuggcaa

SEQ ID NO: 800488 - RNA, 19 nt, Artificial Sequence
  Description of Artificial Sequence: Synthetic oligonucleotide
uuuaguaauuuccauggaa

SEQ ID NO: 800489 - RNA, 19 nt, Artificial Sequence
  Description of Artificial Sequence: Synthetic oligonucleotide
uguuaaacuuuuaaagccu

SEQ ID NO: 800490 - RNA, 19 nt, Artificial Sequence
  Description of Artificial Sequence: Synthetic oligonucleotide
cauaaaguuacaugcagac

SEQ ID NO: 800491 - RNA, 19 nt, Artificial Sequence
  Description of Artificial Sequence: Synthetic oligonucleotide
aacuagauagaacugggaa

SEQ ID NO: 800492 - RNA, 19 nt, Artificial Sequence
  Description of Artificial Sequence: Synthetic oligonucleotide
uggguagucagcuaguuug

SEQ ID NO: 800493 - RNA, 19 nt, Artificial Sequence
  Description of Artificial Sequence: Synthetic oligonucleotide
aacaaaguauagauaacuc

SEQ ID NO: 800494 - RNA, 19 nt, Artificial Sequence
  Description of Artificial Sequence: Synthetic oligonucleotide
cuaugcauaagugaauucg

SEQ ID NO: 800495 - RNA, 19 nt, Artificial Sequence
  Description of Artificial Sequence: Synthetic oligonucleotide
uguacugaucaacugacgu

SEQ ID NO: 800496 - RNA, 19 nt, Artificial Sequence
  Description of Artificial Sequence: Synthetic oligonucleotide
gaaacgguagcuuagucca

SEQ ID NO: 800497 - RNA, 19 nt, Artificial Sequence
  Description of Artificial Sequence: Synthetic oligonucleotide
acaaaguauagauaacucu

SEQ ID NO: 800498 - RNA, 19 nt, Artificial Sequence
  Description of Artificial Sequence: Synthetic oligonucleotide
ugaauuaucguagcccugg

SEQ ID NO: 800499 - RNA, 19 nt, Artificial Sequence
  Description of Artificial Sequence: Synthetic oligonucleotide
gauuggacaaagcacuuug

SEQ ID NO: 800500 - RNA, 19 nt, Artificial Sequence
  Description of Artificial Sequence: Synthetic oligonucleotide
ucugaauuaucguagcccu

SEQ ID NO: 800501 - RNA, 19 nt, Artificial Sequence
  Description of Artificial Sequence: Synthetic oligonucleotide
uuuugaaucuugccgguug

SEQ ID NO: 800502 - RNA, 19 nt, Artificial Sequence
  Description of Artificial Sequence: Synthetic oligonucleotide
ucaagucuaugcauaagug

SEQ ID NO: 800503 - RNA, 19 nt, Artificial Sequence
  Description of Artificial Sequence: Synthetic oligonucleotide
acguuaauacugcuuuucc

SEQ ID NO: 800504 - RNA, 19 nt, Artificial Sequence
  Description of Artificial Sequence: Synthetic oligonucleotide
uagaagguaacaaaacauc

SEQ ID NO: 800505 - RNA, 19 nt, Artificial Sequence
  Description of Artificial Sequence: Synthetic oligonucleotide
gugaauucgauauuaauaa

SEQ ID NO: 800506 - RNA, 19 nt, Artificial Sequence
  Description of Artificial Sequence: Synthetic oligonucleotide
uuucguaagacaauuucau

SEQ ID NO: 800507 - RNA, 19 nt, Artificial Sequence
  Description of Artificial Sequence: Synthetic oligonucleotide
uuuucgacgagaccugcag

SEQ ID NO: 800508 - RNA, 19 nt, Artificial Sequence
  Description of Artificial Sequence: Synthetic oligonucleotide
ucauaaaguuacaugcaga

SEQ ID NO: 800509 - RNA, 19 nt, Artificial Sequence
  Description of Artificial Sequence: Synthetic oligonucleotide
uaugcauaagugaauucga

SEQ ID NO: 800510 - RNA, 19 nt, Artificial Sequence
  Description of Artificial Sequence: Synthetic oligonucleotide
aauuugguguuuuacccaa

SEQ ID NO: 800511 - RNA, 19 nt, Artificial Sequence
  Description of Artificial Sequence: Synthetic oligonucleotide
uuuggugcagcuuucuuac

SEQ ID NO: 800512 - RNA, 19 nt, Artificial Sequence
  Description of Artificial Sequence: Synthetic oligonucleotide
aucaagucuaugcauaagu

SEQ ID NO: 800513 - RNA, 19 nt, Artificial Sequence
  Description of Artificial Sequence: Synthetic oligonucleotide
ucuagcauaggacaugaua

SEQ ID NO: 800514 - RNA, 19 nt, Artificial Sequence
  Description of Artificial Sequence: Synthetic oligonucleotide
cuagauagaacugggaaac

SEQ ID NO: 800515 - RNA, 19 nt, Artificial Sequence
  Description of Artificial Sequence: Synthetic oligonucleotide
gguagcuuaguccaaaagc

SEQ ID NO: 800516 - RNA, 19 nt, Artificial Sequence
  Description of Artificial Sequence: Synthetic oligonucleotide
uagcauaggacaugauacg

SEQ ID NO: 800517 - RNA, 19 nt, Artificial Sequence
  Description of Artificial Sequence: Synthetic oligonucleotide
uuuaaagccugaagcauuc

SEQ ID NO: 800518 - RNA, 19 nt, Artificial Sequence
  Description of Artificial Sequence: Synthetic oligonucleotide
uuagcagaggugauuaaaa

SEQ ID NO: 800519 - RNA, 19 nt, Artificial Sequence
  Description of Artificial Sequence: Synthetic oligonucleotide
aauucgauauuaauaaaua

SEQ ID NO: 800520 - RNA, 19 nt, Artificial Sequence
  Description of Artificial Sequence: Synthetic oligonucleotide
uggacaaagcacuuugaug

SEQ ID NO: 800521 - RNA, 19 nt, Artificial Sequence
  Description of Artificial Sequence: Synthetic oligonucleotide
agccagauuaauuggguag

SEQ ID NO: 800522 - RNA, 19 nt, Artificial Sequence
  Description of Artificial Sequence: Synthetic oligonucleotide
ugaugcacuguucuggacu

SEQ ID NO: 800523 - RNA, 19 nt, Artificial Sequence
  Description of Artificial Sequence: Synthetic oligonucleotide
aacaucaguagugggauca

SEQ ID NO: 800524 - RNA, 19 nt, Artificial Sequence
  Description of Artificial Sequence: Synthetic oligonucleotide
uggacuaauugaaguagcc

SEQ ID NO: 800525 - RNA, 19 nt, Artificial Sequence
  Description of Artificial Sequence: Synthetic oligonucleotide
uuucugaauuaucguagcc

SEQ ID NO: 800526 - RNA, 19 nt, Artificial Sequence
  Description of Artificial Sequence: Synthetic oligonucleotide
uccuuaacagccauuugcu

SEQ ID NO: 800527 - RNA, 19 nt, Artificial Sequence
  Description of Artificial Sequence: Synthetic oligonucleotide
uuaacagccauuugcuuuc

SEQ ID NO: 800528 - RNA, 19 nt, Artificial Sequence
  Description of Artificial Sequence: Synthetic oligonucleotide
uaauuugguguuuuaccca

SEQ ID NO: 800529 - RNA, 19 nt, Artificial Sequence
  Description of Artificial Sequence: Synthetic oligonucleotide
agcaaauugcuuccuuaac

SEQ ID NO: 800530 - RNA, 19 nt, Artificial Sequence
  Description of Artificial Sequence: Synthetic oligonucleotide
uaguaauuuccauggaaac

SEQ ID NO: 800531 - RNA, 19 nt, Artificial Sequence
  Description of Artificial Sequence: Synthetic oligonucleotide
guuugguaaagugucagcc

SEQ ID NO: 800532 - RNA, 19 nt, Artificial Sequence
  Description of Artificial Sequence: Synthetic oligonucleotide
auuaucguagcccuggauu

SEQ ID NO: 800533 - RNA, 19 nt, Artificial Sequence
  Description of Artificial Sequence: Synthetic oligonucleotide
cuaguuuguaugauuggac

SEQ ID NO: 800534 - RNA, 19 nt, Artificial Sequence
  Description of Artificial Sequence: Synthetic oligonucleotide
ccuguuaaacuuuuaaagc

SEQ ID NO: 800535 - RNA, 19 nt, Artificial Sequence
  Description of Artificial Sequence: Synthetic oligonucleotide
agauagaacugggaaacgg

SEQ ID NO: 800536 - RNA, 19 nt, Artificial Sequence
  Description of Artificial Sequence: Synthetic oligonucleotide
aauuaccuaauuugguguu

SEQ ID NO: 800537 - RNA, 19 nt, Artificial Sequence
  Description of Artificial Sequence: Synthetic oligonucleotide
caugucaauaauuaguuua

SEQ ID NO: 800538 - RNA, 19 nt, Artificial Sequence
  Description of Artificial Sequence: Synthetic oligonucleotide
acuagauagaacugggaaa

SEQ ID NO: 800539 - RNA, 19 nt, Artificial Sequence
  Description of Artificial Sequence: Synthetic oligonucleotide
uuugguguuuuacccaaac

SEQ ID NO: 800540 - RNA, 19 nt, Artificial Sequence
  Description of Artificial Sequence: Synthetic oligonucleotide
aauaacuaucauaaaguua

SEQ ID NO: 800541 - RNA, 19 nt, Artificial Sequence
  Description of Artificial Sequence: Synthetic oligonucleotide
aauagcuuuagcagaggug

SEQ ID NO: 800542 - RNA, 19 nt, Artificial Sequence
  Description of Artificial Sequence: Synthetic oligonucleotide
cuucauuuuacugccagug

SEQ ID NO: 800543 - RNA, 19 nt, Artificial Sequence
  Description of Artificial Sequence: Synthetic oligonucleotide
aagccugaagcauuccugu

SEQ ID NO: 800544 - RNA, 19 nt, Artificial Sequence
  Description of Artificial Sequence: Synthetic oligonucleotide
gguguuuuacccaaacugg

SEQ ID NO: 800545 - RNA, 19 nt, Artificial Sequence
  Description of Artificial Sequence: Synthetic oligonucleotide
aaaguuuaguccuguuaaa

SEQ ID NO: 800546 - RNA, 19 nt, Artificial Sequence
  Description of Artificial Sequence: Synthetic oligonucleotide
uuguacugaucaacugacg

SEQ ID NO: 800547 - RNA, 19 nt, Artificial Sequence
  Description of Artificial Sequence: Synthetic oligonucleotide
uucgacgagaccugcagca

SEQ ID NO: 800548 - RNA, 19 nt, Artificial Sequence
  Description of Artificial Sequence: Synthetic oligonucleotide
aauuuggaauaacuaucau

SEQ ID NO: 800549 - RNA, 19 nt, Artificial Sequence
  Description of Artificial Sequence: Synthetic oligonucleotide
agcauaggacaugauacgg

SEQ ID NO: 800550 - RNA, 19 nt, Artificial Sequence
  Description of Artificial Sequence: Synthetic oligonucleotide
gaaaguuggcugcacauaa

SEQ ID NO: 800551 - RNA, 19 nt, Artificial Sequence
  Description of Artificial Sequence: Synthetic oligonucleotide
uucuuacggggucagagaa

SEQ ID NO: 800552 - RNA, 19 nt, Artificial Sequence
  Description of Artificial Sequence: Synthetic oligonucleotide
uuaucaagucuaugcauaa

SEQ ID NO: 800553 - RNA, 19 nt, Artificial Sequence
  Description of Artificial Sequence: Synthetic oligonucleotide
ugacguguaccacagccac

SEQ ID NO: 800554 - RNA, 19 nt, Artificial Sequence
  Description of Artificial Sequence: Synthetic oligonucleotide
guaugauuggacaaagcac

SEQ ID NO: 800555 - RNA, 19 nt, Artificial Sequence
  Description of Artificial Sequence: Synthetic oligonucleotide
acguuugauguaaagguuc

SEQ ID NO: 800556 - RNA, 19 nt, Artificial Sequence
  Description of Artificial Sequence: Synthetic oligonucleotide
uuuaguccuguuaaacuuu

SEQ ID NO: 800557 - RNA, 19 nt, Artificial Sequence
  Description of Artificial Sequence: Synthetic oligonucleotide
aguuuguaugauuggacaa

SEQ ID NO: 800558 - RNA, 19 nt, Artificial Sequence
  Description of Artificial Sequence: Synthetic oligonucleotide
uuaucguagcccuggauua

SEQ ID NO: 800559 - RNA, 19 nt, Artificial Sequence
  Description of Artificial Sequence: Synthetic oligonucleotide
agcaucucuagcauaggac

SEQ ID NO: 800560 - RNA, 19 nt, Artificial Sequence
  Description of Artificial Sequence: Synthetic oligonucleotide
ugauucuaugacauuucuc

SEQ ID NO: 800561 - RNA, 19 nt, Artificial Sequence
  Description of Artificial Sequence: Synthetic oligonucleotide
ucaccuuauguuaggauuu

SEQ ID NO: 800562 - RNA, 19 nt, Artificial Sequence
  Description of Artificial Sequence: Synthetic oligonucleotide
ugcuuucugaauuaucgua

SEQ ID NO: 800563 - RNA, 19 nt, Artificial Sequence
  Description of Artificial Sequence: Synthetic oligonucleotide
gauuagaccuggcaugauc

SEQ ID NO: 800564 - RNA, 19 nt, Artificial Sequence
  Description of Artificial Sequence: Synthetic oligonucleotide
ggaaacgguagcuuagucc

SEQ ID NO: 800565 - RNA, 19 nt, Artificial Sequence
  Description of Artificial Sequence: Synthetic oligonucleotide
caacugacguuaauacugc

SEQ ID NO: 800566 - RNA, 19 nt, Artificial Sequence
  Description of Artificial Sequence: Synthetic oligonucleotide
guaacaauagcaaauugcu

SEQ ID NO: 800567 - RNA, 19 nt, Artificial Sequence
  Description of Artificial Sequence: Synthetic oligonucleotide
uguuuuacccaaacuggua

SEQ ID NO: 800568 - RNA, 19 nt, Artificial Sequence
  Description of Artificial Sequence: Synthetic oligonucleotide
uuaaggguuuccuuagaua

SEQ ID NO: 800569 - RNA, 19 nt, Artificial Sequence
  Description of Artificial Sequence: Synthetic oligonucleotide
uuucuuacggggucagaga

SEQ ID NO: 800570 - RNA, 19 nt, Artificial Sequence
  Description of Artificial Sequence: Synthetic oligonucleotide
uuuagcagaggugauuaaa

SEQ ID NO: 800571 - RNA, 19 nt, Artificial Sequence
  Description of Artificial Sequence: Synthetic oligonucleotide
uccgguaagagcacauuaa

SEQ ID NO: 800572 - RNA, 19 nt, Artificial Sequence
  Description of Artificial Sequence: Synthetic oligonucleotide
aguuaaugacguguaccac

SEQ ID NO: 800573 - RNA, 19 nt, Artificial Sequence
  Description of Artificial Sequence: Synthetic oligonucleotide
aauuaucguagcccuggau

SEQ ID NO: 800574 - RNA, 19 nt, Artificial Sequence
  Description of Artificial Sequence: Synthetic oligonucleotide
caguuaaugacguguacca

SEQ ID NO: 800575 - RNA, 19 nt, Artificial Sequence
  Description of Artificial Sequence: Synthetic oligonucleotide
uacugaucaacugacguua

SEQ ID NO: 800576 - RNA, 19 nt, Artificial Sequence
  Description of Artificial Sequence: Synthetic oligonucleotide
accaucagucuuucagaac

SEQ ID NO: 800577 - RNA, 19 nt, Artificial Sequence
  Description of Artificial Sequence: Synthetic oligonucleotide
aaaguuacaugcagacuga

SEQ ID NO: 800578 - RNA, 19 nt, Artificial Sequence
  Description of Artificial Sequence: Synthetic oligonucleotide
cagaaacaucaguaguggg

SEQ ID NO: 800579 - RNA, 19 nt, Artificial Sequence
  Description of Artificial Sequence: Synthetic oligonucleotide
ucuuacggggucagagaag

SEQ ID NO: 800580 - RNA, 19 nt, Artificial Sequence
  Description of Artificial Sequence: Synthetic oligonucleotide
ucuaucacuuuuguuugcu

SEQ ID NO: 800581 - RNA, 19 nt, Artificial Sequence
  Description of Artificial Sequence: Synthetic oligonucleotide
ugccuuaagauuucuuuua

SEQ ID NO: 800582 - RNA, 19 nt, Artificial Sequence
  Description of Artificial Sequence: Synthetic oligonucleotide
ucuaugcauaagugaauuc

SEQ ID NO: 800583 - RNA, 19 nt, Artificial Sequence
  Description of Artificial Sequence: Synthetic oligonucleotide
uuucgacgagaccugcagc

SEQ ID NO: 800584 - RNA, 19 nt, Artificial Sequence
  Description of Artificial Sequence: Synthetic oligonucleotide
uaguccaaaagcuguacuu

SEQ ID NO: 800585 - RNA, 19 nt, Artificial Sequence
  Description of Artificial Sequence: Synthetic oligonucleotide
auuaucaagucuaugcaua

SEQ ID NO: 800586 - RNA, 19 nt, Artificial Sequence
  Description of Artificial Sequence: Synthetic oligonucleotide
uagauagaacugggaaacg

SEQ ID NO: 800587 - RNA, 19 nt, Artificial Sequence
  Description of Artificial Sequence: Synthetic oligonucleotide
gaauucgauauuaauaaau

SEQ ID NO: 800588 - RNA, 19 nt, Artificial Sequence
  Description of Artificial Sequence: Synthetic oligonucleotide
uuuuacccaaacugguaau

SEQ ID NO: 800589 - RNA, 19 nt, Artificial Sequence
  Description of Artificial Sequence: Synthetic oligonucleotide
caaagguuaaugggaagac

SEQ ID NO: 800590 - RNA, 19 nt, Artificial Sequence
  Description of Artificial Sequence: Synthetic oligonucleotide
aguuacaugcagacugagg

SEQ ID NO: 800591 - RNA, 19 nt, Artificial Sequence
  Description of Artificial Sequence: Synthetic oligonucleotide
ugcaguuaaugacguguac

SEQ ID NO: 800592 - RNA, 19 nt, Artificial Sequence
  Description of Artificial Sequence: Synthetic oligonucleotide
auuugaaaguuggcugcac

SEQ ID NO: 800593 - RNA, 19 nt, Artificial Sequence
  Description of Artificial Sequence: Synthetic oligonucleotide
gaugccuuaagauuucuuu

SEQ ID NO: 800594 - RNA, 19 nt, Artificial Sequence
  Description of Artificial Sequence: Synthetic oligonucleotide
gacguuaauacugcuuuuc

SEQ ID NO: 800595 - RNA, 19 nt, Artificial Sequence
  Description of Artificial Sequence: Synthetic oligonucleotide
ucagcuaguuuguaugauu

SEQ ID NO: 800596 - RNA, 19 nt, Artificial Sequence
  Description of Artificial Sequence: Synthetic oligonucleotide
guagcccuggauuagaccu

SEQ ID NO: 800597 - RNA, 19 nt, Artificial Sequence
  Description of Artificial Sequence: Synthetic oligonucleotide
aaggggcacggcuuuaaau

SEQ ID NO: 800598 - RNA, 19 nt, Artificial Sequence
  Description of Artificial Sequence: Synthetic oligonucleotide
agguaacaaaacaucaccu

SEQ ID NO: 800599 - RNA, 19 nt, Artificial Sequence
  Description of Artificial Sequence: Synthetic oligonucleotide
cuacaaccaaccauccauc

SEQ ID NO: 800600 - RNA, 19 nt, Artificial Sequence
  Description of Artificial Sequence: Synthetic oligonucleotide
uuaguccuguuaaacuuuu

SEQ ID NO: 800601 - RNA, 19 nt, Artificial Sequence
  Description of Artificial Sequence: Synthetic oligonucleotide
aggggcacggcuuuaaaua

SEQ ID NO: 800602 - RNA, 19 nt, Artificial Sequence
  Description of Artificial Sequence: Synthetic oligonucleotide
aacugacguuaauacugcu

SEQ ID NO: 800603 - RNA, 19 nt, Artificial Sequence
  Description of Artificial Sequence: Synthetic oligonucleotide
uagaccuggcaugaucucc

SEQ ID NO: 800604 - RNA, 19 nt, Artificial Sequence
  Description of Artificial Sequence: Synthetic oligonucleotide
augccuuaagauuucuuuu

SEQ ID NO: 800605 - RNA, 19 nt, Artificial Sequence
  Description of Artificial Sequence: Synthetic oligonucleotide
aaguugcaguuaaugacgu

SEQ ID NO: 800606 - RNA, 19 nt, Artificial Sequence
  Description of Artificial Sequence: Synthetic oligonucleotide
uugcaguuaaugacgugua

SEQ ID NO: 800607 - RNA, 19 nt, Artificial Sequence
  Description of Artificial Sequence: Synthetic oligonucleotide
agguggcaacaucaagaac

SEQ ID NO: 800608 - RNA, 19 nt, Artificial Sequence
  Description of Artificial Sequence: Synthetic oligonucleotide
uuuacccaaacugguaaua

SEQ ID NO: 800609 - RNA, 19 nt, Artificial Sequence
  Description of Artificial Sequence: Synthetic oligonucleotide
acugggaaacgguagcuua

SEQ ID NO: 800610 - RNA, 19 nt, Artificial Sequence
  Description of Artificial Sequence: Synthetic oligonucleotide
agaccuggcaugaucuccg

SEQ ID NO: 800611 - RNA, 19 nt, Artificial Sequence
  Description of Artificial Sequence: Synthetic oligonucleotide
agcacuaacuuuguccaga

SEQ ID NO: 800612 - RNA, 19 nt, Artificial Sequence
  Description of Artificial Sequence: Synthetic oligonucleotide
uuuucaugacagucagcuc

SEQ ID NO: 800613 - RNA, 19 nt, Artificial Sequence
  Description of Artificial Sequence: Synthetic oligonucleotide
auuuuacugccagugaguu

SEQ ID NO: 800614 - RNA, 19 nt, Artificial Sequence
  Description of Artificial Sequence: Synthetic oligonucleotide
guugcaguuaaugacgugu

SEQ ID NO: 800615 - RNA, 19 nt, Artificial Sequence
  Description of Artificial Sequence: Synthetic oligonucleotide
gcaguuaaugacguguacc

SEQ ID NO: 800616 - RNA, 19 nt, Artificial Sequence
  Description of Artificial Sequence: Synthetic oligonucleotide
aauuggguagucagcuagu

SEQ ID NO: 800617 - RNA, 19 nt, Artificial Sequence
  Description of Artificial Sequence: Synthetic oligonucleotide
uaucguagcccuggauuag

SEQ ID NO: 800618 - RNA, 19 nt, Artificial Sequence
  Description of Artificial Sequence: Synthetic oligonucleotide
guuuaguccuguuaaacuu

SEQ ID NO: 800619 - RNA, 19 nt, Artificial Sequence
  Description of Artificial Sequence: Synthetic oligonucleotide
uuuccggacacugcuuucu

SEQ ID NO: 800620 - RNA, 19 nt, Artificial Sequence
  Description of Artificial Sequence: Synthetic oligonucleotide
ugacacgagccucggcacc

SEQ ID NO: 800621 - RNA, 19 nt, Artificial Sequence
  Description of Artificial Sequence: Synthetic oligonucleotide
ugccgguugaugccuuaag

SEQ ID NO: 800622 - RNA, 19 nt, Artificial Sequence
  Description of Artificial Sequence: Synthetic oligonucleotide
accuuuguacugaucaacu

SEQ ID NO: 800623 - RNA, 19 nt, Artificial Sequence
  Description of Artificial Sequence: Synthetic oligonucleotide
uuaaagccugaagcauucc

SEQ ID NO: 800624 - RNA, 19 nt, Artificial Sequence
  Description of Artificial Sequence: Synthetic oligonucleotide
cugaauuaucguagcccug

SEQ ID NO: 800625 - RNA, 19 nt, Artificial Sequence
  Description of Artificial Sequence: Synthetic oligonucleotide
gguuugguaaagugucagc

SEQ ID NO: 800626 - RNA, 19 nt, Artificial Sequence
  Description of Artificial Sequence: Synthetic oligonucleotide
uaaugacguguaccacagc

SEQ ID NO: 800627 - RNA, 19 nt, Artificial Sequence
  Description of Artificial Sequence: Synthetic oligonucleotide
gaauuaucguagcccugga

SEQ ID NO: 800628 - RNA, 19 nt, Artificial Sequence
  Description of Artificial Sequence: Synthetic oligonucleotide
caaguagcccugcuguguc

SEQ ID NO: 800629 - RNA, 19 nt, Artificial Sequence
  Description of Artificial Sequence: Synthetic oligonucleotide
uagcccuggauuagaccug

SEQ ID NO: 800630 - RNA, 19 nt, Artificial Sequence
  Description of Artificial Sequence: Synthetic oligonucleotide
gcacguuugauguaaaggu

SEQ ID NO: 800631 - RNA, 19 nt, Artificial Sequence
  Description of Artificial Sequence: Synthetic oligonucleotide
guugaacaaaguauagaua

SEQ ID NO: 800632 - RNA, 19 nt, Artificial Sequence
  Description of Artificial Sequence: Synthetic oligonucleotide
uuccggacacugcuuucug

SEQ ID NO: 800633 - RNA, 19 nt, Artificial Sequence
  Description of Artificial Sequence: Synthetic oligonucleotide
uuggguagucagcuaguuu

SEQ ID NO: 800634 - RNA, 19 nt, Artificial Sequence
  Description of Artificial Sequence: Synthetic oligonucleotide
gugcacguuugauguaaag

SEQ ID NO: 800635 - RNA, 19 nt, Artificial Sequence
  Description of Artificial Sequence: Synthetic oligonucleotide
ugaugccuuaagauuucuu

SEQ ID NO: 800636 - RNA, 19 nt, Artificial Sequence
  Description of Artificial Sequence: Synthetic oligonucleotide
acguguaccacagccacau

SEQ ID NO: 800637 - RNA, 19 nt, Artificial Sequence
  Description of Artificial Sequence: Synthetic oligonucleotide
ucguagcccuggauuagac

SEQ ID NO: 800638 - RNA, 19 nt, Artificial Sequence
  Description of Artificial Sequence: Synthetic oligonucleotide
ggcacggcuuuaaauaaag

SEQ ID NO: 800639 - RNA, 19 nt, Artificial Sequence
  Description of Artificial Sequence: Synthetic oligonucleotide
auagaacugggaaacggua

SEQ ID NO: 800640 - RNA, 19 nt, Artificial Sequence
  Description of Artificial Sequence: Synthetic oligonucleotide
ugugcacguuugauguaaa

SEQ ID NO: 800641 - RNA, 19 nt, Artificial Sequence
  Description of Artificial Sequence: Synthetic oligonucleotide
uugaugcacuguucuggac

SEQ ID NO: 800642 - RNA, 19 nt, Artificial Sequence
  Description of Artificial Sequence: Synthetic oligonucleotide
gcaaagguuaaugggaaga

SEQ ID NO: 800643 - RNA, 19 nt, Artificial Sequence
  Description of Artificial Sequence: Synthetic oligonucleotide
cauuaucaagucuaugcau

SEQ ID NO: 800644 - RNA, 19 nt, Artificial Sequence
  Description of Artificial Sequence: Synthetic oligonucleotide
caguugaacaaaguauaga

SEQ ID NO: 800645 - RNA, 19 nt, Artificial Sequence
  Description of Artificial Sequence: Synthetic oligonucleotide
cgguaagagcacauuaagg

SEQ ID NO: 800646 - RNA, 19 nt, Artificial Sequence
  Description of Artificial Sequence: Synthetic oligonucleotide
aaaguuggcugcacauaaa

SEQ ID NO: 800647 - RNA, 19 nt, Artificial Sequence
  Description of Artificial Sequence: Synthetic oligonucleotide
augguauccugguuccaaa

SEQ ID NO: 800648 - RNA, 19 nt, Artificial Sequence
  Description of Artificial Sequence: Synthetic oligonucleotide
ugacguuaauacugcuuuu

SEQ ID NO: 800649 - RNA, 19 nt, Artificial Sequence
  Description of Artificial Sequence: Synthetic oligonucleotide
gcuaguuuguaugauugga

SEQ ID NO: 800650 - RNA, 19 nt, Artificial Sequence
  Description of Artificial Sequence: Synthetic oligonucleotide
caucaagaaccaacagaca

SEQ ID NO: 800651 - RNA, 19 nt, Artificial Sequence
  Description of Artificial Sequence: Synthetic oligonucleotide
cauuuuacugccagugagu

SEQ ID NO: 800652 - RNA, 19 nt, Artificial Sequence
  Description of Artificial Sequence: Synthetic oligonucleotide
aacugggaaacgguagcuu

SEQ ID NO: 800653 - RNA, 19 nt, Artificial Sequence
  Description of Artificial Sequence: Synthetic oligonucleotide
cugacguuaauacugcuuu

SEQ ID NO: 800654 - RNA, 19 nt, Artificial Sequence
  Description of Artificial Sequence: Synthetic oligonucleotide
ccauuaucaagucuaugca

SEQ ID NO: 800655 - RNA, 19 nt, Artificial Sequence
  Description of Artificial Sequence: Synthetic oligonucleotide
cugcuagaacagaauaaaa

SEQ ID NO: 800656 - RNA, 19 nt, Artificial Sequence
  Description of Artificial Sequence: Synthetic oligonucleotide
ccgguaagagcacauuaag

SEQ ID NO: 800657 - RNA, 19 nt, Artificial Sequence
  Description of Artificial Sequence: Synthetic oligonucleotide
guugaugccuuaagauuuc

SEQ ID NO: 800658 - RNA, 19 nt, Artificial Sequence
  Description of Artificial Sequence: Synthetic oligonucleotide
cacaucgacagagccuggc

SEQ ID NO: 800659 - RNA, 19 nt, Artificial Sequence
  Description of Artificial Sequence: Synthetic oligonucleotide
cagauuaauuggguaguca

SEQ ID NO: 800660 - RNA, 19 nt, Artificial Sequence
  Description of Artificial Sequence: Synthetic oligonucleotide
acugacguuaauacugcuu

SEQ ID NO: 800661 - RNA, 19 nt, Artificial Sequence
  Description of Artificial Sequence: Synthetic oligonucleotide
ugacucccaugucaauaau

SEQ ID NO: 800662 - RNA, 19 nt, Artificial Sequence
  Description of Artificial Sequence: Synthetic oligonucleotide
augacguguaccacagcca

SEQ ID NO: 800663 - RNA, 19 nt, Artificial Sequence
  Description of Artificial Sequence: Synthetic oligonucleotide
cccacugacacgagccucg

SEQ ID NO: 800664 - RNA, 19 nt, Artificial Sequence
  Description of Artificial Sequence: Synthetic oligonucleotide
guaccacagccacaucgac

SEQ ID NO: 800665 - RNA, 19 nt, Artificial Sequence
  Description of Artificial Sequence: Synthetic oligonucleotide
cuuuccggacacugcuuuc

SEQ ID NO: 800666 - RNA, 19 nt, Artificial Sequence
  Description of Artificial Sequence: Synthetic oligonucleotide
caaagcacuuugaugcacu

SEQ ID NO: 800667 - RNA, 19 nt, Artificial Sequence
  Description of Artificial Sequence: Synthetic oligonucleotide
agucuaugcauaagugaau

SEQ ID NO: 800668 - RNA, 19 nt, Artificial Sequence
  Description of Artificial Sequence: Synthetic oligonucleotide
cugguaauauuugaaaguu

SEQ ID NO: 800669 - RNA, 19 nt, Artificial Sequence
  Description of Artificial Sequence: Synthetic oligonucleotide
ucugugcacguuugaugua

SEQ ID NO: 800670 - RNA, 19 nt, Artificial Sequence
  Description of Artificial Sequence: Synthetic oligonucleotide
gcuuuaaauaaagguggca

SEQ ID NO: 800671 - RNA, 19 nt, Artificial Sequence
  Description of Artificial Sequence: Synthetic oligonucleotide
aucuugccgguugaugccu

SEQ ID NO: 800672 - RNA, 19 nt, Artificial Sequence
  Description of Artificial Sequence: Synthetic oligonucleotide
gacacgagccucggcacca

SEQ ID NO: 800673 - RNA, 19 nt, Artificial Sequence
  Description of Artificial Sequence: Synthetic oligonucleotide
ucgacgagaccugcagcac

SEQ ID NO: 800674 - RNA, 19 nt, Artificial Sequence
  Description of Artificial Sequence: Synthetic oligonucleotide
guacugaucaacugacguu

SEQ ID NO: 800675 - RNA, 19 nt, Artificial Sequence
  Description of Artificial Sequence: Synthetic oligonucleotide
guguuuuacccaaacuggu

SEQ ID NO: 800676 - RNA, 19 nt, Artificial Sequence
  Description of Artificial Sequence: Synthetic oligonucleotide
agccacaucgacagagccu

SEQ ID NO: 800677 - RNA, 19 nt, Artificial Sequence
  Description of Artificial Sequence: Synthetic oligonucleotide
aucguagcccuggauuaga

SEQ ID NO: 800678 - RNA, 19 nt, Artificial Sequence
  Description of Artificial Sequence: Synthetic oligonucleotide
acagucagcucugcauagu

SEQ ID NO: 800679 - RNA, 19 nt, Artificial Sequence
  Description of Artificial Sequence: Synthetic oligonucleotide
cuccgguaagagcacauua

SEQ ID NO: 800680 - RNA, 19 nt, Artificial Sequence
  Description of Artificial Sequence: Synthetic oligonucleotide
gugaguugacugaggugug

SEQ ID NO: 800681 - RNA, 19 nt, Artificial Sequence
  Description of Artificial Sequence: Synthetic oligonucleotide
caacagacaccaucagucu

SEQ ID NO: 800682 - RNA, 19 nt, Artificial Sequence
  Description of Artificial Sequence: Synthetic oligonucleotide
agccugucugugcacguuu

SEQ ID NO: 800683 - RNA, 19 nt, Artificial Sequence
  Description of Artificial Sequence: Synthetic oligonucleotide
ccuacaaccaaccauccau

SEQ ID NO: 800684 - RNA, 19 nt, Artificial Sequence
  Description of Artificial Sequence: Synthetic oligonucleotide
cugugcacguuugauguaa

SEQ ID NO: 800685 - RNA, 19 nt, Artificial Sequence
  Description of Artificial Sequence: Synthetic oligonucleotide
gaacugggaaacgguagcu

SEQ ID NO: 800686 - RNA, 19 nt, Artificial Sequence
  Description of Artificial Sequence: Synthetic oligonucleotide
gaaggggcacggcuuuaaa

SEQ ID NO: 800687 - RNA, 19 nt, Artificial Sequence
  Description of Artificial Sequence: Synthetic oligonucleotide
ccugguuccaaauuaccua

SEQ ID NO: 800688 - RNA, 19 nt, Artificial Sequence
  Description of Artificial Sequence: Synthetic oligonucleotide
ccaggcaggugauuuggug

SEQ ID NO: 800689 - RNA, 19 nt, Artificial Sequence
  Description of Artificial Sequence: Synthetic oligonucleotide
aaacgguagcuuaguccaa

SEQ ID NO: 800690 - RNA, 19 nt, Artificial Sequence
  Description of Artificial Sequence: Synthetic oligonucleotide
gacgagaccugcagcacua

SEQ ID NO: 800691 - RNA, 19 nt, Artificial Sequence
  Description of Artificial Sequence: Synthetic oligonucleotide
gccgguugaugccuuaaga

SEQ ID NO: 800692 - RNA, 19 nt, Artificial Sequence
  Description of Artificial Sequence: Synthetic oligonucleotide
ucuccgguaagagcacauu

SEQ ID NO: 800693 - RNA, 19 nt, Artificial Sequence
  Description of Artificial Sequence: Synthetic oligonucleotide
ucuugccgguugaugccuu

SEQ ID NO: 800694 - RNA, 19 nt, Artificial Sequence
  Description of Artificial Sequence: Synthetic oligonucleotide
cagcgguuugguaaagugu

SEQ ID NO: 800695 - RNA, 19 nt, Artificial Sequence
  Description of Artificial Sequence: Synthetic oligonucleotide
agaaggggcacggcuuuaa

SEQ ID NO: 800696 - RNA, 19 nt, Artificial Sequence
  Description of Artificial Sequence: Synthetic oligonucleotide
caucucuagcauaggacau

SEQ ID NO: 800697 - RNA, 19 nt, Artificial Sequence
  Description of Artificial Sequence: Synthetic oligonucleotide
cacguuugauguaaagguu

SEQ ID NO: 800698 - RNA, 19 nt, Artificial Sequence
  Description of Artificial Sequence: Synthetic oligonucleotide
acugaucaacugacguuaa

SEQ ID NO: 800699 - RNA, 19 nt, Artificial Sequence
  Description of Artificial Sequence: Synthetic oligonucleotide
gggaaacgguagcuuaguc

SEQ ID NO: 800700 - RNA, 19 nt, Artificial Sequence
  Description of Artificial Sequence: Synthetic oligonucleotide
uacugccagugaguugacu

SEQ ID NO: 800701 - RNA, 19 nt, Artificial Sequence
  Description of Artificial Sequence: Synthetic oligonucleotide
cccucugucacagaaaaua

SEQ ID NO: 800702 - RNA, 19 nt, Artificial Sequence
  Description of Artificial Sequence: Synthetic oligonucleotide
gacguguaccacagccaca

SEQ ID NO: 800703 - RNA, 19 nt, Artificial Sequence
  Description of Artificial Sequence: Synthetic oligonucleotide
ggacaugauacggaacaaa

SEQ ID NO: 800704 - RNA, 19 nt, Artificial Sequence
  Description of Artificial Sequence: Synthetic oligonucleotide
uugccgguugaugccuuaa

SEQ ID NO: 800705 - RNA, 19 nt, Artificial Sequence
  Description of Artificial Sequence: Synthetic oligonucleotide
guagugggaucagcuccug

SEQ ID NO: 800706 - RNA, 19 nt, Artificial Sequence
  Description of Artificial Sequence: Synthetic oligonucleotide
ggacacugcuuucugaauu

SEQ ID NO: 800707 - RNA, 19 nt, Artificial Sequence
  Description of Artificial Sequence: Synthetic oligonucleotide
gaacagcuaccaggcagaa

SEQ ID NO: 800708 - RNA, 19 nt, Artificial Sequence
  Description of Artificial Sequence: Synthetic oligonucleotide
gacucccaugucaauaauu

SEQ ID NO: 800709 - RNA, 19 nt, Artificial Sequence
  Description of Artificial Sequence: Synthetic oligonucleotide
aggugauuuggugcagcuu

SEQ ID NO: 800710 - RNA, 19 nt, Artificial Sequence
  Description of Artificial Sequence: Synthetic oligonucleotide
cgguuugguaaagugucag

SEQ ID NO: 800711 - RNA, 19 nt, Artificial Sequence
  Description of Artificial Sequence: Synthetic oligonucleotide
cagcuuucuuacgggguca

SEQ ID NO: 800712 - RNA, 19 nt, Artificial Sequence
  Description of Artificial Sequence: Synthetic oligonucleotide
caccuuauguuaggauuua

SEQ ID NO: 800713 - RNA, 19 nt, Artificial Sequence
  Description of Artificial Sequence: Synthetic oligonucleotide
ccugguugacucccauguc

SEQ ID NO: 800714 - RNA, 19 nt, Artificial Sequence
  Description of Artificial Sequence: Synthetic oligonucleotide
ccgguugaugccuuaagau

SEQ ID NO: 800715 - RNA, 19 nt, Artificial Sequence
  Description of Artificial Sequence: Synthetic oligonucleotide
cugaucaacugacguuaau

SEQ ID NO: 800716 - RNA, 19 nt, Artificial Sequence
  Description of Artificial Sequence: Synthetic oligonucleotide
cuugccgguugaugccuua

SEQ ID NO: 800717 - RNA, 19 nt, Artificial Sequence
  Description of Artificial Sequence: Synthetic oligonucleotide
ggcuugaguucaucaccaa

SEQ ID NO: 800718 - RNA, 19 nt, Artificial Sequence
  Description of Artificial Sequence: Synthetic oligonucleotide
cacgagccucggcaccauc

SEQ ID NO: 800719 - RNA, 19 nt, Artificial Sequence
  Description of Artificial Sequence: Synthetic oligonucleotide
acgagaccugcagcacuaa

SEQ ID NO: 800720 - RNA, 19 nt, Artificial Sequence
  Description of Artificial Sequence: Synthetic oligonucleotide
gcuuuccggacacugcuuu

SEQ ID NO: 800721 - RNA, 19 nt, Artificial Sequence
  Description of Artificial Sequence: Synthetic oligonucleotide
gcgguuugguaaaguguca

SEQ ID NO: 800722 - RNA, 19 nt, Artificial Sequence
  Description of Artificial Sequence: Synthetic oligonucleotide
augcacuguucuggacuaa

SEQ ID NO: 800723 - RNA, 19 nt, Artificial Sequence
  Description of Artificial Sequence: Synthetic oligonucleotide
gggcacggcuuuaaauaaa

SEQ ID NO: 800724 - RNA, 19 nt, Artificial Sequence
  Description of Artificial Sequence: Synthetic oligonucleotide
acacgagccucggcaccau

SEQ ID NO: 800725 - RNA, 19 nt, Artificial Sequence
  Description of Artificial Sequence: Synthetic oligonucleotide
gguugacucccaugucaau

SEQ ID NO: 800726 - RNA, 19 nt, Artificial Sequence
  Description of Artificial Sequence: Synthetic oligonucleotide
ccaaguagcccugcugugu

SEQ ID NO: 800727 - RNA, 19 nt, Artificial Sequence
  Description of Artificial Sequence: Synthetic oligonucleotide
ggcagcgguuugguaaagu

SEQ ID NO: 800728 - RNA, 19 nt, Artificial Sequence
  Description of Artificial Sequence: Synthetic oligonucleotide
ggauuagaccuggcaugau

SEQ ID NO: 800729 - RNA, 19 nt, Artificial Sequence
  Description of Artificial Sequence: Synthetic oligonucleotide
gcacuguucuggacuaauu

SEQ ID NO: 800730 - RNA, 19 nt, Artificial Sequence
  Description of Artificial Sequence: Synthetic oligonucleotide
cgacgagaccugcagcacu

SEQ ID NO: 800731 - RNA, 19 nt, Artificial Sequence
  Description of Artificial Sequence: Synthetic oligonucleotide
cgagccucggcaccaucuu

SEQ ID NO: 800732 - RNA, 19 nt, Artificial Sequence
  Description of Artificial Sequence: Synthetic oligonucleotide
acuguuguagguuagaggc

SEQ ID NO: 800733 - RNA, 19 nt, Artificial Sequence
  Description of Artificial Sequence: Synthetic oligonucleotide
aaucucacaauacuucugc

SEQ ID NO: 800734 - RNA, 19 nt, Artificial Sequence
  Description of Artificial Sequence: Synthetic oligonucleotide
ugcuagauuuauuauagcg

SEQ ID NO: 800735 - RNA, 19 nt, Artificial Sequence
  Description of Artificial Sequence: Synthetic oligonucleotide
acuuauaaggauaauuugc

SEQ ID NO: 800736 - RNA, 19 nt, Artificial Sequence
  Description of Artificial Sequence: Synthetic oligonucleotide
aaugcuagauuuauuauag

SEQ ID NO: 800737 - RNA, 19 nt, Artificial Sequence
  Description of Artificial Sequence: Synthetic oligonucleotide
auuauagcguuuuauuaac

SEQ ID NO: 800738 - RNA, 19 nt, Artificial Sequence
  Description of Artificial Sequence: Synthetic oligonucleotide
uagcguuuuauuaacaagc

SEQ ID NO: 800739 - RNA, 19 nt, Artificial Sequence
  Description of Artificial Sequence: Synthetic oligonucleotide
uauaaggauaauuugcuaa

SEQ ID NO: 800740 - RNA, 19 nt, Artificial Sequence
  Description of Artificial Sequence: Synthetic oligonucleotide
gagaccuugguuuuggucc

SEQ ID NO: 800741 - RNA, 19 nt, Artificial Sequence
  Description of Artificial Sequence: Synthetic oligonucleotide
uuaacaagcuuucuuccag

SEQ ID NO: 800742 - RNA, 19 nt, Artificial Sequence
  Description of Artificial Sequence: Synthetic oligonucleotide
agacaagccaacugcaacc

SEQ ID NO: 800743 - RNA, 19 nt, Artificial Sequence
  Description of Artificial Sequence: Synthetic oligonucleotide
aaacuagagaccuugguuu

SEQ ID NO: 800744 - RNA, 19 nt, Artificial Sequence
  Description of Artificial Sequence: Synthetic oligonucleotide
auugagagagaagugacac

SEQ ID NO: 800745 - RNA, 19 nt, Artificial Sequence
  Description of Artificial Sequence: Synthetic oligonucleotide
acacuuaguauaucuauuc

SEQ ID NO: 800746 - RNA, 19 nt, Artificial Sequence
  Description of Artificial Sequence: Synthetic oligonucleotide
aaggauaauuugcuaaugu

SEQ ID NO: 800747 - RNA, 19 nt, Artificial Sequence
  Description of Artificial Sequence: Synthetic oligonucleotide
uuugguaaacuagagaccu

SEQ ID NO: 800748 - RNA, 19 nt, Artificial Sequence
  Description of Artificial Sequence: Synthetic oligonucleotide
aacaagcuuucuuccagac

SEQ ID NO: 800749 - RNA, 19 nt, Artificial Sequence
  Description of Artificial Sequence: Synthetic oligonucleotide
augcuuacaucucugauug

SEQ ID NO: 800750 - RNA, 19 nt, Artificial Sequence
  Description of Artificial Sequence: Synthetic oligonucleotide
uucucguaagccaagguga

SEQ ID NO: 800751 - RNA, 19 nt, Artificial Sequence
  Description of Artificial Sequence: Synthetic oligonucleotide
aauaugguuccagcuaugg

SEQ ID NO: 800752 - RNA, 19 nt, Artificial Sequence
  Description of Artificial Sequence: Synthetic oligonucleotide
uuguaacucauaaaacuca

SEQ ID NO: 800753 - RNA, 19 nt, Artificial Sequence
  Description of Artificial Sequence: Synthetic oligonucleotide
guucauuaugguuuaaaug

SEQ ID NO: 800754 - RNA, 19 nt, Artificial Sequence
  Description of Artificial Sequence: Synthetic oligonucleotide
ugauauuccaaguggucag

SEQ ID NO: 800755 - RNA, 19 nt, Artificial Sequence
  Description of Artificial Sequence: Synthetic oligonucleotide
aacuuuguggacugcucgg

SEQ ID NO: 800756 - RNA, 19 nt, Artificial Sequence
  Description of Artificial Sequence: Synthetic oligonucleotide
cacacuaaaugcaacggcc

SEQ ID NO: 800757 - RNA, 19 nt, Artificial Sequence
  Description of Artificial Sequence: Synthetic oligonucleotide
uacacgguaagaauuggca

SEQ ID NO: 800758 - RNA, 19 nt, Artificial Sequence
  Description of Artificial Sequence: Synthetic oligonucleotide
ucaagguuuggcaucgugc

SEQ ID NO: 800759 - RNA, 19 nt, Artificial Sequence
  Description of Artificial Sequence: Synthetic oligonucleotide
uccucuugguucaaaaccc

SEQ ID NO: 800760 - RNA, 19 nt, Artificial Sequence
  Description of Artificial Sequence: Synthetic oligonucleotide
gaaaaugcggagcagaugu

SEQ ID NO: 800761 - RNA, 19 nt, Artificial Sequence
  Description of Artificial Sequence: Synthetic oligonucleotide
ugauugagagagaagugac

SEQ ID NO: 800762 - RNA, 19 nt, Artificial Sequence
  Description of Artificial Sequence: Synthetic oligonucleotide
aggcgcugaacuuagcucg

SEQ ID NO: 800763 - RNA, 19 nt, Artificial Sequence
  Description of Artificial Sequence: Synthetic oligonucleotide
uggguguacgccaggaccg

SEQ ID NO: 800764 - RNA, 19 nt, Artificial Sequence
  Description of Artificial Sequence: Synthetic oligonucleotide
uccaguucggaucuggggu

SEQ ID NO: 800765 - RNA, 19 nt, Artificial Sequence
  Description of Artificial Sequence: Synthetic oligonucleotide
gaaauggucaggccacggg

SEQ ID NO: 800766 - RNA, 19 nt, Artificial Sequence
  Description of Artificial Sequence: Synthetic oligonucleotide
aucauguuauuccacguga

SEQ ID NO: 800767 - RNA, 19 nt, Artificial Sequence
  Description of Artificial Sequence: Synthetic oligonucleotide
acggucgggaucuggagcc

SEQ ID NO: 800768 - RNA, 19 nt, Artificial Sequence
  Description of Artificial Sequence: Synthetic oligonucleotide
uuugcuuggccauuggaaa

SEQ ID NO: 800769 - RNA, 19 nt, Artificial Sequence
  Description of Artificial Sequence: Synthetic oligonucleotide
acuaaaugcaacggccacc

SEQ ID NO: 800770 - RNA, 19 nt, Artificial Sequence
  Description of Artificial Sequence: Synthetic oligonucleotide
uguaacucauaaaacucau

SEQ ID NO: 800771 - RNA, 19 nt, Artificial Sequence
  Description of Artificial Sequence: Synthetic oligonucleotide
ugacaaauaugguuccagc

SEQ ID NO: 800772 - RNA, 19 nt, Artificial Sequence
  Description of Artificial Sequence: Synthetic oligonucleotide
aaccgagauggugacagac

SEQ ID NO: 800773 - RNA, 19 nt, Artificial Sequence
  Description of Artificial Sequence: Synthetic oligonucleotide
aaccagccauggcugaggc

SEQ ID NO: 800774 - RNA, 19 nt, Artificial Sequence
  Description of Artificial Sequence: Synthetic oligonucleotide
gauggugacagacuccaac

SEQ ID NO: 800775 - RNA, 19 nt, Artificial Sequence
  Description of Artificial Sequence: Synthetic oligonucleotide
auuaacaagcuuucuucca

SEQ ID NO: 800776 - RNA, 19 nt, Artificial Sequence
  Description of Artificial Sequence: Synthetic oligonucleotide
ugcauuggaagaagaaggu

SEQ ID NO: 800777 - RNA, 19 nt, Artificial Sequence
  Description of Artificial Sequence: Synthetic oligonucleotide
caagcgauaugccaccccg

SEQ ID NO: 800778 - RNA, 19 nt, Artificial Sequence
  Description of Artificial Sequence: Synthetic oligonucleotide
guaguggacagcaaagucc

SEQ ID NO: 800779 - RNA, 19 nt, Artificial Sequence
  Description of Artificial Sequence: Synthetic oligonucleotide
ucgaaaguguucuucucug

SEQ ID NO: 800780 - RNA, 19 nt, Artificial Sequence
  Description of Artificial Sequence: Synthetic oligonucleotide
cuuagcucgcuggagaucc

SEQ ID NO: 800781 - RNA, 19 nt, Artificial Sequence
  Description of Artificial Sequence: Synthetic oligonucleotide
uuuggccuauugcaguucc

SEQ ID NO: 800782 - RNA, 19 nt, Artificial Sequence
  Description of Artificial Sequence: Synthetic oligonucleotide
gacaaggugugggaaaagg

SEQ ID NO: 800783 - RNA, 19 nt, Artificial Sequence
  Description of Artificial Sequence: Synthetic oligonucleotide
uuaggaugauauuccaagu

SEQ ID NO: 800784 - RNA, 19 nt, Artificial Sequence
  Description of Artificial Sequence: Synthetic oligonucleotide
aucacacuaaaugcaacgg

SEQ ID NO: 800785 - RNA, 19 nt, Artificial Sequence
  Description of Artificial Sequence: Synthetic oligonucleotide
acaaauaugguuccagcua

SEQ ID NO: 800786 - RNA, 19 nt, Artificial Sequence
  Description of Artificial Sequence: Synthetic oligonucleotide
uuauagcguuuuauuaaca

SEQ ID NO: 800787 - RNA, 19 nt, Artificial Sequence
  Description of Artificial Sequence: Synthetic oligonucleotide
acacgguaagaauuggcag

SEQ ID NO: 800788 - RNA, 19 nt, Artificial Sequence
  Description of Artificial Sequence: Synthetic oligonucleotide
ugguaaacuagagaccuug

SEQ ID NO: 800789 - RNA, 19 nt, Artificial Sequence
  Description of Artificial Sequence: Synthetic oligonucleotide
ugguuugguaaacuagaga

SEQ ID NO: 800790 - RNA, 19 nt, Artificial Sequence
  Description of Artificial Sequence: Synthetic oligonucleotide
ucguaagccaaggugaaga

SEQ ID NO: 800791 - RNA, 19 nt, Artificial Sequence
  Description of Artificial Sequence: Synthetic oligonucleotide
agaacucccaccagggcgc

SEQ ID NO: 800792 - RNA, 19 nt, Artificial Sequence
  Description of Artificial Sequence: Synthetic oligonucleotide
caagccaacugcaaccgag

SEQ ID NO: 800793 - RNA, 19 nt, Artificial Sequence
  Description of Artificial Sequence: Synthetic oligonucleotide
auaauuugcuaauguugcu

SEQ ID NO: 800794 - RNA, 19 nt, Artificial Sequence
  Description of Artificial Sequence: Synthetic oligonucleotide
aaauggcugaauauaaauu

SEQ ID NO: 800795 - RNA, 19 nt, Artificial Sequence
  Description of Artificial Sequence: Synthetic oligonucleotide
acgugaccagccuuuggcc

SEQ ID NO: 800796 - RNA, 19 nt, Artificial Sequence
  Description of Artificial Sequence: Synthetic oligonucleotide
caugacgagcaucaugaag

SEQ ID NO: 800797 - RNA, 19 nt, Artificial Sequence
  Description of Artificial Sequence: Synthetic oligonucleotide
uguggcucaucgaaagugu

SEQ ID NO: 800798 - RNA, 19 nt, Artificial Sequence
  Description of Artificial Sequence: Synthetic oligonucleotide
uuauaaggauaauuugcua

SEQ ID NO: 800799 - RNA, 19 nt, Artificial Sequence
  Description of Artificial Sequence: Synthetic oligonucleotide
uaaggauaauuugcuaaug

SEQ ID NO: 800800 - RNA, 19 nt, Artificial Sequence
  Description of Artificial Sequence: Synthetic oligonucleotide
cugaauauaaauuuugguu

SEQ ID NO: 800801 - RNA, 19 nt, Artificial Sequence
  Description of Artificial Sequence: Synthetic oligonucleotide
accguuugccuucacgguc

SEQ ID NO: 800802 - RNA, 19 nt, Artificial Sequence
  Description of Artificial Sequence: Synthetic oligonucleotide
aacccuagagucuuugcuu

SEQ ID NO: 800803 - RNA, 19 nt, Artificial Sequence
  Description of Artificial Sequence: Synthetic oligonucleotide
ucaggcgcugaacuuagcu

SEQ ID NO: 800804 - RNA, 19 nt, Artificial Sequence
  Description of Artificial Sequence: Synthetic oligonucleotide
auggugaggggacacuuag

SEQ ID NO: 800805 - RNA, 19 nt, Artificial Sequence
  Description of Artificial Sequence: Synthetic oligonucleotide
agccaagcgauaugccacc

SEQ ID NO: 800806 - RNA, 19 nt, Artificial Sequence
  Description of Artificial Sequence: Synthetic oligonucleotide
uauuccaaguggucagcag

SEQ ID NO: 800807 - RNA, 19 nt, Artificial Sequence
  Description of Artificial Sequence: Synthetic oligonucleotide
aaugcaacggccaccgaga

SEQ ID NO: 800808 - RNA, 19 nt, Artificial Sequence
  Description of Artificial Sequence: Synthetic oligonucleotide
ggaccguuugccuucacgg

SEQ ID NO: 800809 - RNA, 19 nt, Artificial Sequence
  Description of Artificial Sequence: Synthetic oligonucleotide
uuauuccacgugaccagcc

SEQ ID NO: 800810 - RNA, 19 nt, Artificial Sequence
  Description of Artificial Sequence: Synthetic oligonucleotide
ucaugcuccaguucggauc

SEQ ID NO: 800811 - RNA, 19 nt, Artificial Sequence
  Description of Artificial Sequence: Synthetic oligonucleotide
uucaagguuuggcaucgug

SEQ ID NO: 800812 - RNA, 19 nt, Artificial Sequence
  Description of Artificial Sequence: Synthetic oligonucleotide
ucucuccuaguaaauggcu

SEQ ID NO: 800813 - RNA, 19 nt, Artificial Sequence
  Description of Artificial Sequence: Synthetic oligonucleotide
aggauaauuugcuaauguu

SEQ ID NO: 800814 - RNA, 19 nt, Artificial Sequence
  Description of Artificial Sequence: Synthetic oligonucleotide
aaaugcggagcagaugugu

SEQ ID NO: 800815 - RNA, 19 nt, Artificial Sequence
  Description of Artificial Sequence: Synthetic oligonucleotide
ucaaaacccagcagugggu

SEQ ID NO: 800816 - RNA, 19 nt, Artificial Sequence
  Description of Artificial Sequence: Synthetic oligonucleotide
ugguuuaaauguucugagu

SEQ ID NO: 800817 - RNA, 19 nt, Artificial Sequence
  Description of Artificial Sequence: Synthetic oligonucleotide
aaaccagccauggcugagg

SEQ ID NO: 800818 - RNA, 19 nt, Artificial Sequence
  Description of Artificial Sequence: Synthetic oligonucleotide
cuacacgguaagaauuggc

SEQ ID NO: 800819 - RNA, 19 nt, Artificial Sequence
  Description of Artificial Sequence: Synthetic oligonucleotide
cacgugaccagccuuuggc

SEQ ID NO: 800820 - RNA, 19 nt, Artificial Sequence
  Description of Artificial Sequence: Synthetic oligonucleotide
auacacaugacgagcauca

SEQ ID NO: 800821 - RNA, 19 nt, Artificial Sequence
  Description of Artificial Sequence: Synthetic oligonucleotide
  modified_base (14)..(14): a, c, u, g, unknown or other
cuuggagcaucacngaaaa

SEQ ID NO: 800822 - RNA, 19 nt, Artificial Sequence
  Description of Artificial Sequence: Synthetic oligonucleotide
gaacuuagcucgcuggaga

SEQ ID NO: 800823 - RNA, 19 nt, Artificial Sequence
  Description of Artificial Sequence: Synthetic oligonucleotide
aacuuagcucgcuggagau

SEQ ID NO: 800824 - RNA, 19 nt, Artificial Sequence
  Description of Artificial Sequence: Synthetic oligonucleotide
cuugggaacuugaaagguc

SEQ ID NO: 800825 - RNA, 19 nt, Artificial Sequence
  Description of Artificial Sequence: Synthetic oligonucleotide
ugaacuuagcucgcuggag

SEQ ID NO: 800826 - RNA, 19 nt, Artificial Sequence
  Description of Artificial Sequence: Synthetic oligonucleotide
gggguuguaacucauaaaa

SEQ ID NO: 800827 - RNA, 19 nt, Artificial Sequence
  Description of Artificial Sequence: Synthetic oligonucleotide
agguugcugacaaaccagc

SEQ ID NO: 800828 - RNA, 19 nt, Artificial Sequence
  Description of Artificial Sequence: Synthetic oligonucleotide
ugugagaugccagggguug

SEQ ID NO: 800829 - RNA, 19 nt, Artificial Sequence
  Description of Artificial Sequence: Synthetic oligonucleotide
acacaugacgagcaucaug

SEQ ID NO: 800830 - RNA, 19 nt, Artificial Sequence
  Description of Artificial Sequence: Synthetic oligonucleotide
gguuguaacucauaaaacu

SEQ ID NO: 800831 - RNA, 19 nt, Artificial Sequence
  Description of Artificial Sequence: Synthetic oligonucleotide
gacaaauaugguuccagcu

SEQ ID NO: 800832 - RNA, 19 nt, Artificial Sequence
  Description of Artificial Sequence: Synthetic oligonucleotide
ucuugggaacuugaaaggu

SEQ ID NO: 800833 - RNA, 19 nt, Artificial Sequence
  Description of Artificial Sequence: Synthetic oligonucleotide
aacuagagaccuugguuuu

SEQ ID NO: 800834 - RNA, 19 nt, Artificial Sequence
  Description of Artificial Sequence: Synthetic oligonucleotide
acugcaaccgagaugguga

SEQ ID NO: 800835 - RNA, 19 nt, Artificial Sequence
  Description of Artificial Sequence: Synthetic oligonucleotide
gagccugguucauuucugg

SEQ ID NO: 800836 - RNA, 19 nt, Artificial Sequence
  Description of Artificial Sequence: Synthetic oligonucleotide
augaucgucagaccaucug

SEQ ID NO: 800837 - RNA, 19 nt, Artificial Sequence
  Description of Artificial Sequence: Synthetic oligonucleotide
cagguugcugacaaaccag

SEQ ID NO: 800838 - RNA, 19 nt, Artificial Sequence
  Description of Artificial Sequence: Synthetic oligonucleotide
guucaaaacccagcagugg

SEQ ID NO: 800839 - RNA, 19 nt, Artificial Sequence
  Description of Artificial Sequence: Synthetic oligonucleotide
acccuagagucuuugcuug

SEQ ID NO: 800840 - RNA, 19 nt, Artificial Sequence
  Description of Artificial Sequence: Synthetic oligonucleotide
aggaccguuugccuucacg

SEQ ID NO: 800841 - RNA, 19 nt, Artificial Sequence
  Description of Artificial Sequence: Synthetic oligonucleotide
cuagagaccuugguuuugg

SEQ ID NO: 800842 - RNA, 19 nt, Artificial Sequence
  Description of Artificial Sequence: Synthetic oligonucleotide
uauuccacgugaccagccu

SEQ ID NO: 800843 - RNA, 19 nt, Artificial Sequence
  Description of Artificial Sequence: Synthetic oligonucleotide
gguaagaauuggcagugug

SEQ ID NO: 800844 - RNA, 19 nt, Artificial Sequence
  Description of Artificial Sequence: Synthetic oligonucleotide
gaagugacacauggcaccc

SEQ ID NO: 800845 - RNA, 19 nt, Artificial Sequence
  Description of Artificial Sequence: Synthetic oligonucleotide
gugacaaauaugguuccag

SEQ ID NO: 800846 - RNA, 19 nt, Artificial Sequence
  Description of Artificial Sequence: Synthetic oligonucleotide
aaaggcuuaggaugauauu

SEQ ID NO: 800847 - RNA, 19 nt, Artificial Sequence
  Description of Artificial Sequence: Synthetic oligonucleotide
uacgccaggaccguuugcc

SEQ ID NO: 800848 - RNA, 19 nt, Artificial Sequence
  Description of Artificial Sequence: Synthetic oligonucleotide
ucuucucguaagccaaggu

SEQ ID NO: 800849 - RNA, 19 nt, Artificial Sequence
  Description of Artificial Sequence: Synthetic oligonucleotide
gguaaaggaaucuggccac

SEQ ID NO: 800850 - RNA, 19 nt, Artificial Sequence
  Description of Artificial Sequence: Synthetic oligonucleotide
aagguacucguggaaccuc

SEQ ID NO: 800851 - RNA, 19 nt, Artificial Sequence
  Description of Artificial Sequence: Synthetic oligonucleotide
ugccgguugauguuggaaa

SEQ ID NO: 800852 - RNA, 19 nt, Artificial Sequence
  Description of Artificial Sequence: Synthetic oligonucleotide
cuauugcaguuccucuugg

SEQ ID NO: 800853 - RNA, 19 nt, Artificial Sequence
  Description of Artificial Sequence: Synthetic oligonucleotide
aaggcaccgcacuggagcu

SEQ ID NO: 800854 - RNA, 19 nt, Artificial Sequence
  Description of Artificial Sequence: Synthetic oligonucleotide
guaagccaaggugaagagg

SEQ ID NO: 800855 - RNA, 19 nt, Artificial Sequence
  Description of Artificial Sequence: Synthetic oligonucleotide
ugucaccaggacuugcaga

SEQ ID NO: 800856 - RNA, 19 nt, Artificial Sequence
  Description of Artificial Sequence: Synthetic oligonucleotide
caggucguagaacuccagg

SEQ ID NO: 800857 - RNA, 19 nt, Artificial Sequence
  Description of Artificial Sequence: Synthetic oligonucleotide
gauaugccaccccguagug

SEQ ID NO: 800858 - RNA, 19 nt, Artificial Sequence
  Description of Artificial Sequence: Synthetic oligonucleotide
cuccaguucggaucugggg

SEQ ID NO: 800859 - RNA, 19 nt, Artificial Sequence
  Description of Artificial Sequence: Synthetic oligonucleotide
gaaaaggcaccgcacugga

SEQ ID NO: 800860 - RNA, 19 nt, Artificial Sequence
  Description of Artificial Sequence: Synthetic oligonucleotide
gauacacaugacgagcauc

SEQ ID NO: 800861 - RNA, 19 nt, Artificial Sequence
  Description of Artificial Sequence: Synthetic oligonucleotide
ucucguaagccaaggugaa

SEQ ID NO: 800862 - RNA, 19 nt, Artificial Sequence
  Description of Artificial Sequence: Synthetic oligonucleotide
cuccagacaaggcuguaac

SEQ ID NO: 800863 - RNA, 19 nt, Artificial Sequence
  Description of Artificial Sequence: Synthetic oligonucleotide
ugcuaauguugcuuuguau

SEQ ID NO: 800864 - RNA, 19 nt, Artificial Sequence
  Description of Artificial Sequence: Synthetic oligonucleotide
cuuacaucucugauugaga

SEQ ID NO: 800865 - RNA, 19 nt, Artificial Sequence
  Description of Artificial Sequence: Synthetic oligonucleotide
gggacuagaacucccacca

SEQ ID NO: 800866 - RNA, 19 nt, Artificial Sequence
  Description of Artificial Sequence: Synthetic oligonucleotide
gcuuacaucucugauugag

SEQ ID NO: 800867 - RNA, 19 nt, Artificial Sequence
  Description of Artificial Sequence: Synthetic oligonucleotide
uccagacaaggcuguaaca

SEQ ID NO: 800868 - RNA, 19 nt, Artificial Sequence
  Description of Artificial Sequence: Synthetic oligonucleotide
aaggcaccggcacaugcau

SEQ ID NO: 800869 - RNA, 19 nt, Artificial Sequence
  Description of Artificial Sequence: Synthetic oligonucleotide
uguguggcucaucgaaagu

SEQ ID NO: 800870 - RNA, 19 nt, Artificial Sequence
  Description of Artificial Sequence: Synthetic oligonucleotide
agcguuuuauuaacaagcu

SEQ ID NO: 800871 - RNA, 19 nt, Artificial Sequence
  Description of Artificial Sequence: Synthetic oligonucleotide
agguacucguggaaccucc

SEQ ID NO: 800872 - RNA, 19 nt, Artificial Sequence
  Description of Artificial Sequence: Synthetic oligonucleotide
aaauaugguuccagcuaug

SEQ ID NO: 800873 - RNA, 19 nt, Artificial Sequence
  Description of Artificial Sequence: Synthetic oligonucleotide
cacuaaaugcaacggccac

SEQ ID NO: 800874 - RNA, 19 nt, Artificial Sequence
  Description of Artificial Sequence: Synthetic oligonucleotide
cuuuguggacugcucgggc

SEQ ID NO: 800875 - RNA, 19 nt, Artificial Sequence
  Description of Artificial Sequence: Synthetic oligonucleotide
ucgucagaccaucugucau

SEQ ID NO: 800876 - RNA, 19 nt, Artificial Sequence
  Description of Artificial Sequence: Synthetic oligonucleotide
ugacgagcaucaugaaggu

SEQ ID NO: 800877 - RNA, 19 nt, Artificial Sequence
  Description of Artificial Sequence: Synthetic oligonucleotide
uugcuaauguugcuuugua

SEQ ID NO: 800878 - RNA, 19 nt, Artificial Sequence
  Description of Artificial Sequence: Synthetic oligonucleotide
ugcggagcagauguguggc

SEQ ID NO: 800879 - RNA, 19 nt, Artificial Sequence
  Description of Artificial Sequence: Synthetic oligonucleotide
aucgucagaccaucuguca

SEQ ID NO: 800880 - RNA, 19 nt, Artificial Sequence
  Description of Artificial Sequence: Synthetic oligonucleotide
aucuucucguaagccaagg

SEQ ID NO: 800881 - RNA, 19 nt, Artificial Sequence
  Description of Artificial Sequence: Synthetic oligonucleotide
guaacaaggcugagccugg

SEQ ID NO: 800882 - RNA, 19 nt, Artificial Sequence
  Description of Artificial Sequence: Synthetic oligonucleotide
gguuuaaauguucugaguu

SEQ ID NO: 800883 - RNA, 19 nt, Artificial Sequence
  Description of Artificial Sequence: Synthetic oligonucleotide
ucacggucgggaucuggag

SEQ ID NO: 800884 - RNA, 19 nt, Artificial Sequence
  Description of Artificial Sequence: Synthetic oligonucleotide
uccgggacuagaacuccca

SEQ ID NO: 800885 - RNA, 19 nt, Artificial Sequence
  Description of Artificial Sequence: Synthetic oligonucleotide
gucucuccuaguaaauggc

SEQ ID NO: 800886 - RNA, 19 nt, Artificial Sequence
  Description of Artificial Sequence: Synthetic oligonucleotide
aaaaugcggagcagaugug

SEQ ID NO: 800887 - RNA, 19 nt, Artificial Sequence
  Description of Artificial Sequence: Synthetic oligonucleotide
guagaacuguugcaucuuc

SEQ ID NO: 800888 - RNA, 19 nt, Artificial Sequence
  Description of Artificial Sequence: Synthetic oligonucleotide
ugaugaucgucagaccauc

SEQ ID NO: 800889 - RNA, 19 nt, Artificial Sequence
  Description of Artificial Sequence: Synthetic oligonucleotide
ugcguagcuucuugggaac

SEQ ID NO: 800890 - RNA, 19 nt, Artificial Sequence
  Description of Artificial Sequence: Synthetic oligonucleotide
auaugccaccccguagugg

SEQ ID NO: 800891 - RNA, 19 nt, Artificial Sequence
  Description of Artificial Sequence: Synthetic oligonucleotide
cagcuauggagaugauggc

SEQ ID NO: 800892 - RNA, 19 nt, Artificial Sequence
  Description of Artificial Sequence: Synthetic oligonucleotide
caucccgguggcuuuuggc

SEQ ID NO: 800893 - RNA, 19 nt, Artificial Sequence
  Description of Artificial Sequence: Synthetic oligonucleotide
uuggcaucgugcagucugu

SEQ ID NO: 800894 - RNA, 19 nt, Artificial Sequence
  Description of Artificial Sequence: Synthetic oligonucleotide
cacggucgggaucuggagc

SEQ ID NO: 800895 - RNA, 19 nt, Artificial Sequence
  Description of Artificial Sequence: Synthetic oligonucleotide
auauuccaaguggucagca

SEQ ID NO: 800896 - RNA, 19 nt, Artificial Sequence
  Description of Artificial Sequence: Synthetic oligonucleotide
guaaacuagagaccuuggu

SEQ ID NO: 800897 - RNA, 19 nt, Artificial Sequence
  Description of Artificial Sequence: Synthetic oligonucleotide
caggcgcugaacuuagcuc

SEQ ID NO: 800898 - RNA, 19 nt, Artificial Sequence
  Description of Artificial Sequence: Synthetic oligonucleotide
agcuccgggacuagaacuc

SEQ ID NO: 800899 - RNA, 19 nt, Artificial Sequence
  Description of Artificial Sequence: Synthetic oligonucleotide
guacucguggaaccuccag

SEQ ID NO: 800900 - RNA, 19 nt, Artificial Sequence
  Description of Artificial Sequence: Synthetic oligonucleotide
cuuguggcccaaggcaccg

SEQ ID NO: 800901 - RNA, 19 nt, Artificial Sequence
  Description of Artificial Sequence: Synthetic oligonucleotide
caaauaugguuccagcuau

SEQ ID NO: 800902 - RNA, 19 nt, Artificial Sequence
  Description of Artificial Sequence: Synthetic oligonucleotide
ggagccaagcgauaugcca

SEQ ID NO: 800903 - RNA, 19 nt, Artificial Sequence
  Description of Artificial Sequence: Synthetic oligonucleotide
augcaacggccaccgagag

SEQ ID NO: 800904 - RNA, 19 nt, Artificial Sequence
  Description of Artificial Sequence: Synthetic oligonucleotide
aagccaacugcaaccgaga

SEQ ID NO: 800905 - RNA, 19 nt, Artificial Sequence
  Description of Artificial Sequence: Synthetic oligonucleotide
ggugaggggacacuuagua

SEQ ID NO: 800906 - RNA, 19 nt, Artificial Sequence
  Description of Artificial Sequence: Synthetic oligonucleotide
cacaugcauuggaagaaga

SEQ ID NO: 800907 - RNA, 19 nt, Artificial Sequence
  Description of Artificial Sequence: Synthetic oligonucleotide
acuagagaccuugguuuug

SEQ ID NO: 800908 - RNA, 19 nt, Artificial Sequence
  Description of Artificial Sequence: Synthetic oligonucleotide
  modified_base (16)..(16): a, c, u, g, unknown or other
cacuuggagcaucacngaa

SEQ ID NO: 800909 - RNA, 19 nt, Artificial Sequence
  Description of Artificial Sequence: Synthetic oligonucleotide
  modified_base (15)..(15): a, c, u, g, unknown or other
acuuggagcaucacngaaa

SEQ ID NO: 800910 - RNA, 19 nt, Artificial Sequence
  Description of Artificial Sequence: Synthetic oligonucleotide
cugaacuuagcucgcugga

SEQ ID NO: 800911 - RNA, 19 nt, Artificial Sequence
  Description of Artificial Sequence: Synthetic oligonucleotide
agagccccauggcaaugag

SEQ ID NO: 800912 - RNA, 19 nt, Artificial Sequence
  Description of Artificial Sequence: Synthetic oligonucleotide
ggcaucgugcagucugugg

SEQ ID NO: 800913 - RNA, 19 nt, Artificial Sequence
  Description of Artificial Sequence: Synthetic oligonucleotide
agcgauaugccaccccgua

SEQ ID NO: 800914 - RNA, 19 nt, Artificial Sequence
  Description of Artificial Sequence: Synthetic oligonucleotide
acccgacugugacaaauau

SEQ ID NO: 800915 - RNA, 19 nt, Artificial Sequence
  Description of Artificial Sequence: Synthetic oligonucleotide
guaagaauuggcagugugu

SEQ ID NO: 800916 - RNA, 19 nt, Artificial Sequence
  Description of Artificial Sequence: Synthetic oligonucleotide
cagggcgcagaccacgaug

SEQ ID NO: 800917 - RNA, 19 nt, Artificial Sequence
  Description of Artificial Sequence: Synthetic oligonucleotide
gauguguggcucaucgaaa

SEQ ID NO: 800918 - RNA, 19 nt, Artificial Sequence
  Description of Artificial Sequence: Synthetic oligonucleotide
ucgggaucuggagccaagc

SEQ ID NO: 800919 - RNA, 19 nt, Artificial Sequence
  Description of Artificial Sequence: Synthetic oligonucleotide
uugguaaacuagagaccuu

SEQ ID NO: 800920 - RNA, 19 nt, Artificial Sequence
  Description of Artificial Sequence: Synthetic oligonucleotide
cugcguagcuucuugggaa

SEQ ID NO: 800921 - RNA, 19 nt, Artificial Sequence
  Description of Artificial Sequence: Synthetic oligonucleotide
ccuauugcaguuccucuug

SEQ ID NO: 800922 - RNA, 19 nt, Artificial Sequence
  Description of Artificial Sequence: Synthetic oligonucleotide
gcuagauuuauuauagcgu

SEQ ID NO: 800923 - RNA, 19 nt, Artificial Sequence
  Description of Artificial Sequence: Synthetic oligonucleotide
ggucccuggcaucuacacg

SEQ ID NO: 800924 - RNA, 19 nt, Artificial Sequence
  Description of Artificial Sequence: Synthetic oligonucleotide
ccguuugccuucacggucg

SEQ ID NO: 800925 - RNA, 19 nt, Artificial Sequence
  Description of Artificial Sequence: Synthetic oligonucleotide
cugugccgguugauguugg

SEQ ID NO: 800926 - RNA, 19 nt, Artificial Sequence
  Description of Artificial Sequence: Synthetic oligonucleotide
aguucggaucugggguccc

SEQ ID NO: 800927 - RNA, 19 nt, Artificial Sequence
  Description of Artificial Sequence: Synthetic oligonucleotide
cagucggcuagcagggcug

SEQ ID NO: 800928 - RNA, 19 nt, Artificial Sequence
  Description of Artificial Sequence: Synthetic oligonucleotide
uggcaguguguguuuugcu

SEQ ID NO: 800929 - RNA, 19 nt, Artificial Sequence
  Description of Artificial Sequence: Synthetic oligonucleotide
cugcaaccgagauggugac

SEQ ID NO: 800930 - RNA, 19 nt, Artificial Sequence
  Description of Artificial Sequence: Synthetic oligonucleotide
uuggccuauugcaguuccu

SEQ ID NO: 800931 - RNA, 19 nt, Artificial Sequence
  Description of Artificial Sequence: Synthetic oligonucleotide
ggugaugaaggcagaagga

SEQ ID NO: 800932 - RNA, 19 nt, Artificial Sequence
  Description of Artificial Sequence: Synthetic oligonucleotide
caucuacacgguaagaauu

SEQ ID NO: 800933 - RNA, 19 nt, Artificial Sequence
  Description of Artificial Sequence: Synthetic oligonucleotide
ggguuguaacucauaaaac

SEQ ID NO: 800934 - RNA, 19 nt, Artificial Sequence
  Description of Artificial Sequence: Synthetic oligonucleotide
caaggcaccggcacaugca

SEQ ID NO: 800935 - RNA, 19 nt, Artificial Sequence
  Description of Artificial Sequence: Synthetic oligonucleotide
ucgugcagucuguggaauc

SEQ ID NO: 800936 - RNA, 19 nt, Artificial Sequence
  Description of Artificial Sequence: Synthetic oligonucleotide
cccguaguggacagcaaag

SEQ ID NO: 800937 - RNA, 19 nt, Artificial Sequence
  Description of Artificial Sequence: Synthetic oligonucleotide
gacgagggacccgacugug

SEQ ID NO: 800938 - RNA, 19 nt, Artificial Sequence
  Description of Artificial Sequence: Synthetic oligonucleotide
uccuaguaaauggcugaau

SEQ ID NO: 800939 - RNA, 19 nt, Artificial Sequence
  Description of Artificial Sequence: Synthetic oligonucleotide
ccuaguaaauggcugaaua

SEQ ID NO: 800940 - RNA, 19 nt, Artificial Sequence
  Description of Artificial Sequence: Synthetic oligonucleotide
uuagcucgcuggagaucca

SEQ ID NO: 800941 - RNA, 19 nt, Artificial Sequence
  Description of Artificial Sequence: Synthetic oligonucleotide
acggccccaucacuuggag

SEQ ID NO: 800942 - RNA, 19 nt, Artificial Sequence
  Description of Artificial Sequence: Synthetic oligonucleotide
caaugagggugccaucgga

SEQ ID NO: 800943 - RNA, 19 nt, Artificial Sequence
  Description of Artificial Sequence: Synthetic oligonucleotide
auugcccucgguguccccu

SEQ ID NO: 800944 - RNA, 19 nt, Artificial Sequence
  Description of Artificial Sequence: Synthetic oligonucleotide
ugugccgguugauguugga

SEQ ID NO: 800945 - RNA, 19 nt, Artificial Sequence
  Description of Artificial Sequence: Synthetic oligonucleotide
ggacacuuaguauaucuau

SEQ ID NO: 800946 - RNA, 19 nt, Artificial Sequence
  Description of Artificial Sequence: Synthetic oligonucleotide
cucguaagccaaggugaag

SEQ ID NO: 800947 - RNA, 19 nt, Artificial Sequence
  Description of Artificial Sequence: Synthetic oligonucleotide
ggcaucuacacgguaagaa

SEQ ID NO: 800948 - RNA, 19 nt, Artificial Sequence
  Description of Artificial Sequence: Synthetic oligonucleotide
ccgagauggugacagacuc

SEQ ID NO: 800949 - RNA, 19 nt, Artificial Sequence
  Description of Artificial Sequence: Synthetic oligonucleotide
gacacuuaguauaucuauu

SEQ ID NO: 800950 - RNA, 19 nt, Artificial Sequence
  Description of Artificial Sequence: Synthetic oligonucleotide
gccaacugcaaccgagaug

SEQ ID NO: 800951 - RNA, 19 nt, Artificial Sequence
  Description of Artificial Sequence: Synthetic oligonucleotide
gcgcagaccacgaugagca

SEQ ID NO: 800952 - RNA, 19 nt, Artificial Sequence
  Description of Artificial Sequence: Synthetic oligonucleotide
gaagguacucguggaaccu

SEQ ID NO: 800953 - RNA, 19 nt, Artificial Sequence
  Description of Artificial Sequence: Synthetic oligonucleotide
uggcaucuacacgguaaga

SEQ ID NO: 800954 - RNA, 19 nt, Artificial Sequence
  Description of Artificial Sequence: Synthetic oligonucleotide
caguucggaucuggggucc

SEQ ID NO: 800955 - RNA, 19 nt, Artificial Sequence
  Description of Artificial Sequence: Synthetic oligonucleotide
gcaacccuagagucuuugc

SEQ ID NO: 800956 - RNA, 19 nt, Artificial Sequence
  Description of Artificial Sequence: Synthetic oligonucleotide
gcgauaugccaccccguag

SEQ ID NO: 800957 - RNA, 19 nt, Artificial Sequence
  Description of Artificial Sequence: Synthetic oligonucleotide
uggugaguucacuguugua

SEQ ID NO: 800958 - RNA, 19 nt, Artificial Sequence
  Description of Artificial Sequence: Synthetic oligonucleotide
gcagucuguggaaucacac

SEQ ID NO: 800959 - RNA, 19 nt, Artificial Sequence
  Description of Artificial Sequence: Synthetic oligonucleotide
ccagguugcugacaaacca

SEQ ID NO: 800960 - RNA, 19 nt, Artificial Sequence
  Description of Artificial Sequence: Synthetic oligonucleotide
ggacuagaacucccaccag

SEQ ID NO: 800961 - RNA, 19 nt, Artificial Sequence
  Description of Artificial Sequence: Synthetic oligonucleotide
gaccguuugccuucacggu

SEQ ID NO: 800962 - RNA, 19 nt, Artificial Sequence
  Description of Artificial Sequence: Synthetic oligonucleotide
caggccagucggcuagcag

SEQ ID NO: 800963 - RNA, 19 nt, Artificial Sequence
  Description of Artificial Sequence: Synthetic oligonucleotide
gcugcguagcuucuuggga

SEQ ID NO: 800964 - RNA, 19 nt, Artificial Sequence
  Description of Artificial Sequence: Synthetic oligonucleotide
acgccaggaccguuugccu

SEQ ID NO: 800965 - RNA, 19 nt, Artificial Sequence
  Description of Artificial Sequence: Synthetic oligonucleotide
cguaagccaaggugaagag

SEQ ID NO: 800966 - RNA, 19 nt, Artificial Sequence
  Description of Artificial Sequence: Synthetic oligonucleotide
ccaaggcaccggcacaugc

SEQ ID NO: 800967 - RNA, 19 nt, Artificial Sequence
  Description of Artificial Sequence: Synthetic oligonucleotide
ccggcacaugcauuggaag

SEQ ID NO: 800968 - RNA, 19 nt, Artificial Sequence
  Description of Artificial Sequence: Synthetic oligonucleotide
cccgacugugacaaauaug

SEQ ID NO: 800969 - RNA, 19 nt, Artificial Sequence
  Description of Artificial Sequence: Synthetic oligonucleotide
gucagccugguuugguaaa

SEQ ID NO: 800970 - RNA, 19 nt, Artificial Sequence
  Description of Artificial Sequence: Synthetic oligonucleotide
aguucugagugugcuggua

SEQ ID NO: 800971 - RNA, 19 nt, Artificial Sequence
  Description of Artificial Sequence: Synthetic oligonucleotide
uacacaugacgagcaucau

SEQ ID NO: 800972 - RNA, 19 nt, Artificial Sequence
  Description of Artificial Sequence: Synthetic oligonucleotide
ggcgcagaccacgaugagc

SEQ ID NO: 800973 - RNA, 19 nt, Artificial Sequence
  Description of Artificial Sequence: Synthetic oligonucleotide
ccuuguggcccaaggcacc

SEQ ID NO: 800974 - RNA, 19 nt, Artificial Sequence
  Description of Artificial Sequence: Synthetic oligonucleotide
ggcucaucgaaaguguucu

SEQ ID NO: 800975 - RNA, 19 nt, Artificial Sequence
  Description of Artificial Sequence: Synthetic oligonucleotide
cucaggcgcugaacuuagc

SEQ ID NO: 800976 - RNA, 19 nt, Artificial Sequence
  Description of Artificial Sequence: Synthetic oligonucleotide
guacgccaggaccguuugc

SEQ ID NO: 800977 - RNA, 19 nt, Artificial Sequence
  Description of Artificial Sequence: Synthetic oligonucleotide
gugaccagccuuuggccua

SEQ ID NO: 800978 - RNA, 19 nt, Artificial Sequence
  Description of Artificial Sequence: Synthetic oligonucleotide
ccucaggcgcugaacuuag

SEQ ID NO: 800979 - RNA, 19 nt, Artificial Sequence
  Description of Artificial Sequence: Synthetic oligonucleotide
uggcaucgugcagucugug

SEQ ID NO: 800980 - RNA, 19 nt, Artificial Sequence
  Description of Artificial Sequence: Synthetic oligonucleotide
ggagauccaugaguccacc

SEQ ID NO: 800981 - RNA, 19 nt, Artificial Sequence
  Description of Artificial Sequence: Synthetic oligonucleotide
ccaguucggaucugggguc

SEQ ID NO: 800982 - RNA, 19 nt, Artificial Sequence
  Description of Artificial Sequence: Synthetic oligonucleotide
gaugaucgucagaccaucu

SEQ ID NO: 800983 - RNA, 19 nt, Artificial Sequence
  Description of Artificial Sequence: Synthetic oligonucleotide
cgggacuagaacucccacc

SEQ ID NO: 800984 - RNA, 19 nt, Artificial Sequence
  Description of Artificial Sequence: Synthetic oligonucleotide
ccuugguuuuggucccucc

SEQ ID NO: 800985 - RNA, 19 nt, Artificial Sequence
  Description of Artificial Sequence: Synthetic oligonucleotide
gguuccagcuauggagaug

SEQ ID NO: 800986 - RNA, 19 nt, Artificial Sequence
  Description of Artificial Sequence: Synthetic oligonucleotide
ccaagcgauaugccacccc

SEQ ID NO: 800987 - RNA, 19 nt, Artificial Sequence
  Description of Artificial Sequence: Synthetic oligonucleotide
ggcaacccuagagucuuug

SEQ ID NO: 800988 - RNA, 19 nt, Artificial Sequence
  Description of Artificial Sequence: Synthetic oligonucleotide
gaacuccagguugcugaca

SEQ ID NO: 800989 - RNA, 19 nt, Artificial Sequence
  Description of Artificial Sequence: Synthetic oligonucleotide
cucgguguccccugugucu

SEQ ID NO: 800990 - RNA, 19 nt, Artificial Sequence
  Description of Artificial Sequence: Synthetic oligonucleotide
gugaggggacacuuaguau

SEQ ID NO: 800991 - RNA, 19 nt, Artificial Sequence
  Description of Artificial Sequence: Synthetic oligonucleotide
caucucugauugagagaga

SEQ ID NO: 800992 - RNA, 19 nt, Artificial Sequence
  Description of Artificial Sequence: Synthetic oligonucleotide
ugaccagccuuuggccuau

SEQ ID NO: 800993 - RNA, 19 nt, Artificial Sequence
  Description of Artificial Sequence: Synthetic oligonucleotide
agcucgcuggagauccaug

SEQ ID NO: 800994 - RNA, 19 nt, Artificial Sequence
  Description of Artificial Sequence: Synthetic oligonucleotide
acgggugaugaaggcagaa

SEQ ID NO: 800995 - RNA, 19 nt, Artificial Sequence
  Description of Artificial Sequence: Synthetic oligonucleotide
uagcucgcuggagauccau

SEQ ID NO: 800996 - RNA, 19 nt, Artificial Sequence
  Description of Artificial Sequence: Synthetic oligonucleotide
ggccacgggugaugaaggc

SEQ ID NO: 800997 - RNA, 19 nt, Artificial Sequence
  Description of Artificial Sequence: Synthetic oligonucleotide
gccaccccguaguggacag

SEQ ID NO: 800998 - RNA, 19 nt, Artificial Sequence
  Description of Artificial Sequence: Synthetic oligonucleotide
ggcaguguguguuuugcuu

SEQ ID NO: 800999 - RNA, 19 nt, Artificial Sequence
  Description of Artificial Sequence: Synthetic oligonucleotide
ugucaucccgguggcuuuu

SEQ ID NO: 801000 - RNA, 19 nt, Artificial Sequence
  Description of Artificial Sequence: Synthetic oligonucleotide
cacggccccaucacuugga

SEQ ID NO: 801001 - RNA, 19 nt, Artificial Sequence
  Description of Artificial Sequence: Synthetic oligonucleotide
caacggccaccgagagccc

SEQ ID NO: 801002 - RNA, 19 nt, Artificial Sequence
  Description of Artificial Sequence: Synthetic oligonucleotide
gucggcuagcagggcugcg

SEQ ID NO: 801003 - RNA, 19 nt, Artificial Sequence
  Description of Artificial Sequence: Synthetic oligonucleotide
ccacgugaccagccuuugg

SEQ ID NO: 801004 - RNA, 19 nt, Artificial Sequence
  Description of Artificial Sequence: Synthetic oligonucleotide
acaggccagucggcuagca

SEQ ID NO: 801005 - RNA, 19 nt, Artificial Sequence
  Description of Artificial Sequence: Synthetic oligonucleotide
acgagggacccgacuguga

SEQ ID NO: 801006 - RNA, 19 nt, Artificial Sequence
  Description of Artificial Sequence: Synthetic oligonucleotide
ggucaggccacgggugaug

SEQ ID NO: 801007 - RNA, 19 nt, Artificial Sequence
  Description of Artificial Sequence: Synthetic oligonucleotide
cugguucauuucuggggcu

SEQ ID NO: 801008 - RNA, 19 nt, Artificial Sequence
  Description of Artificial Sequence: Synthetic oligonucleotide
cacaggccagucggcuagc

SEQ ID NO: 801009 - RNA, 19 nt, Artificial Sequence
  Description of Artificial Sequence: Synthetic oligonucleotide
ggcccucaggcgcugaacu

SEQ ID NO: 801010 - RNA, 19 nt, Artificial Sequence
  Description of Artificial Sequence: Synthetic oligonucleotide
ccgggacuagaacucccac

SEQ ID NO: 801011 - RNA, 19 nt, Artificial Sequence
  Description of Artificial Sequence: Synthetic oligonucleotide
gcguuuuauuaacaagcuu

SEQ ID NO: 801012 - RNA, 19 nt, Artificial Sequence
  Description of Artificial Sequence: Synthetic oligonucleotide
agauggugacagacuccaa

SEQ ID NO: 801013 - RNA, 19 nt, Artificial Sequence
  Description of Artificial Sequence: Synthetic oligonucleotide
gccaagcgauaugccaccc

SEQ ID NO: 801014 - RNA, 19 nt, Artificial Sequence
  Description of Artificial Sequence: Synthetic oligonucleotide
gggcgcagaccacgaugag

SEQ ID NO: 801015 - RNA, 19 nt, Artificial Sequence
  Description of Artificial Sequence: Synthetic oligonucleotide
gccuauugcaguuccucuu

SEQ ID NO: 801016 - RNA, 19 nt, Artificial Sequence
  Description of Artificial Sequence: Synthetic oligonucleotide
cgauaugccaccccguagu

SEQ ID NO: 801017 - RNA, 19 nt, Artificial Sequence
  Description of Artificial Sequence: Synthetic oligonucleotide
ccucgguguccccuguguc

SEQ ID NO: 801018 - RNA, 19 nt, Artificial Sequence
  Description of Artificial Sequence: Synthetic oligonucleotide
gcuccagacaaggcuguaa

SEQ ID NO: 801019 - RNA, 19 nt, Artificial Sequence
  Description of Artificial Sequence: Synthetic oligonucleotide
ccaucggacaggcuguccu

SEQ ID NO: 801020 - RNA, 19 nt, Artificial Sequence
  Description of Artificial Sequence: Synthetic oligonucleotide
caccacggccccaucacuu

SEQ ID NO: 801021 - RNA, 19 nt, Artificial Sequence
  Description of Artificial Sequence: Synthetic oligonucleotide
ccccguaguggacagcaaa

SEQ ID NO: 801022 - RNA, 19 nt, Artificial Sequence
  Description of Artificial Sequence: Synthetic oligonucleotide
ggacccgacugugacaaau

SEQ ID NO: 801023 - RNA, 19 nt, Artificial Sequence
  Description of Artificial Sequence: Synthetic oligonucleotide
caggaccguuugccuucac

SEQ ID NO: 801024 - RNA, 19 nt, Artificial Sequence
  Description of Artificial Sequence: Synthetic oligonucleotide
gccaucggacaggcugucc

SEQ ID NO: 801025 - RNA, 19 nt, Artificial Sequence
  Description of Artificial Sequence: Synthetic oligonucleotide
guguacgccaggaccguuu

SEQ ID NO: 801026 - RNA, 19 nt, Artificial Sequence
  Description of Artificial Sequence: Synthetic oligonucleotide
accccguaguggacagcaa

SEQ ID NO: 801027 - RNA, 19 nt, Artificial Sequence
  Description of Artificial Sequence: Synthetic oligonucleotide
ggucgggaucuggagccaa

SEQ ID NO: 801028 - RNA, 19 nt, Artificial Sequence
  Description of Artificial Sequence: Synthetic oligonucleotide
gcauacuuauaaggauaau

SEQ ID NO: 801029 - RNA, 19 nt, Artificial Sequence
  Description of Artificial Sequence: Synthetic oligonucleotide
ccguaguggacagcaaagu

SEQ ID NO: 801030 - RNA, 19 nt, Artificial Sequence
  Description of Artificial Sequence: Synthetic oligonucleotide
gcaccacggccccaucacu

SEQ ID NO: 801031 - RNA, 19 nt, Artificial Sequence
  Description of Artificial Sequence: Synthetic oligonucleotide
cuucaagguuuggcaucgu

SEQ ID NO: 801032 - RNA, 19 nt, Artificial Sequence
  Description of Artificial Sequence: Synthetic oligonucleotide
gcggagcagauguguggcu

SEQ ID NO: 801033 - RNA, 19 nt, Artificial Sequence
  Description of Artificial Sequence: Synthetic oligonucleotide
aggcaacccuagagucuuu

SEQ ID NO: 801034 - RNA, 19 nt, Artificial Sequence
  Description of Artificial Sequence: Synthetic oligonucleotide
ggcaccgcacuggagcuuu

SEQ ID NO: 801035 - RNA, 19 nt, Artificial Sequence
  Description of Artificial Sequence: Synthetic oligonucleotide
cccaaggcaccggcacaug

SEQ ID NO: 801036 - RNA, 19 nt, Artificial Sequence
  Description of Artificial Sequence: Synthetic oligonucleotide
ggcgaaggcccagcugaua

SEQ ID NO: 801037 - RNA, 19 nt, Artificial Sequence
  Description of Artificial Sequence: Synthetic oligonucleotide
ggguguacgccaggaccgu

SEQ ID NO: 801038 - RNA, 19 nt, Artificial Sequence
  Description of Artificial Sequence: Synthetic oligonucleotide
ccaggaccguuugccuuca

SEQ ID NO: 801039 - RNA, 19 nt, Artificial Sequence
  Description of Artificial Sequence: Synthetic oligonucleotide
cccucgguguccccugugu

SEQ ID NO: 801040 - RNA, 19 nt, Artificial Sequence
  Description of Artificial Sequence: Synthetic oligonucleotide
ccgagagccccauggcaau

SEQ ID NO: 801041 - RNA, 19 nt, Artificial Sequence
  Description of Artificial Sequence: Synthetic oligonucleotide
cugccuugucagccugguu

SEQ ID NO: 801042 - RNA, 19 nt, Artificial Sequence
  Description of Artificial Sequence: Synthetic oligonucleotide
gcgcugaacuuagcucgcu

SEQ ID NO: 801043 - RNA, 19 nt, Artificial Sequence
  Description of Artificial Sequence: Synthetic oligonucleotide
gguguacgccaggaccguu

SEQ ID NO: 801044 - RNA, 19 nt, Artificial Sequence
  Description of Artificial Sequence: Synthetic oligonucleotide
cgguaagaauuggcagugu

SEQ ID NO: 801045 - RNA, 19 nt, Artificial Sequence
  Description of Artificial Sequence: Synthetic oligonucleotide
ccagggcgcagaccacgau

SEQ ID NO: 801046 - RNA, 19 nt, Artificial Sequence
  Description of Artificial Sequence: Synthetic oligonucleotide
cggucgggaucuggagcca

SEQ ID NO: 801047 - RNA, 19 nt, Artificial Sequence
  Description of Artificial Sequence: Synthetic oligonucleotide
uuauuuauagcuuugggug

SEQ ID NO: 801048 - RNA, 19 nt, Artificial Sequence
  Description of Artificial Sequence: Synthetic oligonucleotide
uuggauuugucaaugaugg

SEQ ID NO: 801049 - RNA, 19 nt, Artificial Sequence
  Description of Artificial Sequence: Synthetic oligonucleotide
aaugaaaagaaacucgcug

SEQ ID NO: 801050 - RNA, 19 nt, Artificial Sequence
  Description of Artificial Sequence: Synthetic oligonucleotide
aggagcauaaaauauaaca

SEQ ID NO: 801051 - RNA, 19 nt, Artificial Sequence
  Description of Artificial Sequence: Synthetic oligonucleotide
aucuauucauuauuuauag

SEQ ID NO: 801052 - RNA, 19 nt, Artificial Sequence
  Description of Artificial Sequence: Synthetic oligonucleotide
uggaccaucuugcaaaagg

SEQ ID NO: 801053 - RNA, 19 nt, Artificial Sequence
  Description of Artificial Sequence: Synthetic oligonucleotide
uauuuauagcuuugggugg

SEQ ID NO: 801054 - RNA, 19 nt, Artificial Sequence
  Description of Artificial Sequence: Synthetic oligonucleotide
agauuuguuccccaggaac

SEQ ID NO: 801055 - RNA, 19 nt, Artificial Sequence
  Description of Artificial Sequence: Synthetic oligonucleotide
agaaacucgcugcuaagcc

SEQ ID NO: 801056 - RNA, 19 nt, Artificial Sequence
  Description of Artificial Sequence: Synthetic oligonucleotide
auagcaccgauccaaggcc

SEQ ID NO: 801057 - RNA, 19 nt, Artificial Sequence
  Description of Artificial Sequence: Synthetic oligonucleotide
agcuuuagaccccugaagg

SEQ ID NO: 801058 - RNA, 19 nt, Artificial Sequence
  Description of Artificial Sequence: Synthetic oligonucleotide
uucuaggcggcccacagcg

SEQ ID NO: 801059 - RNA, 19 nt, Artificial Sequence
  Description of Artificial Sequence: Synthetic oligonucleotide
agucauugaacaucagucg

SEQ ID NO: 801060 - RNA, 19 nt, Artificial Sequence
  Description of Artificial Sequence: Synthetic oligonucleotide
acucgaaaugaaaagaaac

SEQ ID NO: 801061 - RNA, 19 nt, Artificial Sequence
  Description of Artificial Sequence: Synthetic oligonucleotide
gauucuauggggcuacugc

SEQ ID NO: 801062 - RNA, 19 nt, Artificial Sequence
  Description of Artificial Sequence: Synthetic oligonucleotide
uucaccuuaugguagaacu

SEQ ID NO: 801063 - RNA, 19 nt, Artificial Sequence
  Description of Artificial Sequence: Synthetic oligonucleotide
acuagaggagccuuggguc

SEQ ID NO: 801064 - RNA, 19 nt, Artificial Sequence
  Description of Artificial Sequence: Synthetic oligonucleotide
gaaagcaccaauccuggag

SEQ ID NO: 801065 - RNA, 19 nt, Artificial Sequence
  Description of Artificial Sequence: Synthetic oligonucleotide
uuaggguaucugcagaaag

SEQ ID NO: 801066 - RNA, 19 nt, Artificial Sequence
  Description of Artificial Sequence: Synthetic oligonucleotide
aaaugguaggucugucugg

SEQ ID NO: 801067 - RNA, 19 nt, Artificial Sequence
  Description of Artificial Sequence: Synthetic oligonucleotide
uacgagaaagcaccaaucc

SEQ ID NO: 801068 - RNA, 19 nt, Artificial Sequence
  Description of Artificial Sequence: Synthetic oligonucleotide
ucauugaacaucagucgag

SEQ ID NO: 801069 - RNA, 19 nt, Artificial Sequence
  Description of Artificial Sequence: Synthetic oligonucleotide
aucaucgagggugaaaggc

SEQ ID NO: 801070 - RNA, 19 nt, Artificial Sequence
  Description of Artificial Sequence: Synthetic oligonucleotide
uugaacaucagucgagcca

SEQ ID NO: 801071 - RNA, 19 nt, Artificial Sequence
  Description of Artificial Sequence: Synthetic oligonucleotide
ugaacaucagucgagccag

SEQ ID NO: 801072 - RNA, 19 nt, Artificial Sequence
  Description of Artificial Sequence: Synthetic oligonucleotide
ugugauccaagcauccugc

SEQ ID NO: 801073 - RNA, 19 nt, Artificial Sequence
  Description of Artificial Sequence: Synthetic oligonucleotide
aguccgaauaagcuguaac

SEQ ID NO: 801074 - RNA, 19 nt, Artificial Sequence
  Description of Artificial Sequence: Synthetic oligonucleotide
ugaauccugaaagaguucc

SEQ ID NO: 801075 - RNA, 19 nt, Artificial Sequence
  Description of Artificial Sequence: Synthetic oligonucleotide
ucggcgaugcaucucaucc

SEQ ID NO: 801076 - RNA, 19 nt, Artificial Sequence
  Description of Artificial Sequence: Synthetic oligonucleotide
cacuguuagacacagugag

SEQ ID NO: 801077 - RNA, 19 nt, Artificial Sequence
  Description of Artificial Sequence: Synthetic oligonucleotide
aaaucauuccgugcgucac

SEQ ID NO: 801078 - RNA, 19 nt, Artificial Sequence
  Description of Artificial Sequence: Synthetic oligonucleotide
auagcgaccaucccaguag

SEQ ID NO: 801079 - RNA, 19 nt, Artificial Sequence
  Description of Artificial Sequence: Synthetic oligonucleotide
cacacuagacaccagcucc

SEQ ID NO: 801080 - RNA, 19 nt, Artificial Sequence
  Description of Artificial Sequence: Synthetic oligonucleotide
auaccaaguaccugggaag

SEQ ID NO: 801081 - RNA, 19 nt, Artificial Sequence
  Description of Artificial Sequence: Synthetic oligonucleotide
uacuccgaggacaaguuug

SEQ ID NO: 801082 - RNA, 19 nt, Artificial Sequence
  Description of Artificial Sequence: Synthetic oligonucleotide
cauagcaccgauccaaggc

SEQ ID NO: 801083 - RNA, 19 nt, Artificial Sequence
  Description of Artificial Sequence: Synthetic oligonucleotide
uaagccugagccauacgag

SEQ ID NO: 801084 - RNA, 19 nt, Artificial Sequence
  Description of Artificial Sequence: Synthetic oligonucleotide
acaaguuugguuuguagaa

SEQ ID NO: 801085 - RNA, 19 nt, Artificial Sequence
  Description of Artificial Sequence: Synthetic oligonucleotide
ucgaaaugaaaagaaacuc

SEQ ID NO: 801086 - RNA, 19 nt, Artificial Sequence
  Description of Artificial Sequence: Synthetic oligonucleotide
uaggguaucugcagaaagc

SEQ ID NO: 801087 - RNA, 19 nt, Artificial Sequence
  Description of Artificial Sequence: Synthetic oligonucleotide
ucuauucauuauuuauagc

SEQ ID NO: 801088 - RNA, 19 nt, Artificial Sequence
  Description of Artificial Sequence: Synthetic oligonucleotide
uucacuugcaagacccucc

SEQ ID NO: 801089 - RNA, 19 nt, Artificial Sequence
  Description of Artificial Sequence: Synthetic oligonucleotide
gacaaguuugguuuguaga

SEQ ID NO: 801090 - RNA, 19 nt, Artificial Sequence
  Description of Artificial Sequence: Synthetic oligonucleotide
uguguggaagaucauguau

SEQ ID NO: 801091 - RNA, 19 nt, Artificial Sequence
  Description of Artificial Sequence: Synthetic oligonucleotide
aaagccgcugcaucuuuag

SEQ ID NO: 801092 - RNA, 19 nt, Artificial Sequence
  Description of Artificial Sequence: Synthetic oligonucleotide
ucauaugcguucuccaugu

SEQ ID NO: 801093 - RNA, 19 nt, Artificial Sequence
  Description of Artificial Sequence: Synthetic oligonucleotide
agagguuucuugugucacc

SEQ ID NO: 801094 - RNA, 19 nt, Artificial Sequence
  Description of Artificial Sequence: Synthetic oligonucleotide
uauaaaucauuccgugcgu

SEQ ID NO: 801095 - RNA, 19 nt, Artificial Sequence
  Description of Artificial Sequence: Synthetic oligonucleotide
ugagccauacgagaaagca

SEQ ID NO: 801096 - RNA, 19 nt, Artificial Sequence
  Description of Artificial Sequence: Synthetic oligonucleotide
ugugucaccagguggugag

SEQ ID NO: 801097 - RNA, 19 nt, Artificial Sequence
  Description of Artificial Sequence: Synthetic oligonucleotide
gauaccaaguaccugggaa

SEQ ID NO: 801098 - RNA, 19 nt, Artificial Sequence
  Description of Artificial Sequence: Synthetic oligonucleotide
caaaugguaggucugucug

SEQ ID NO: 801099 - RNA, 19 nt, Artificial Sequence
  Description of Artificial Sequence: Synthetic oligonucleotide
agugauugcauccgggaga

SEQ ID NO: 801100 - RNA, 19 nt, Artificial Sequence
  Description of Artificial Sequence: Synthetic oligonucleotide
agcgauuccccucccuucc

SEQ ID NO: 801101 - RNA, 19 nt, Artificial Sequence
  Description of Artificial Sequence: Synthetic oligonucleotide
uggauugagagcuucccgu

SEQ ID NO: 801102 - RNA, 19 nt, Artificial Sequence
  Description of Artificial Sequence: Synthetic oligonucleotide
aagucauaugcguucucca

SEQ ID NO: 801103 - RNA, 19 nt, Artificial Sequence
  Description of Artificial Sequence: Synthetic oligonucleotide
cuuuagaccccugaaggcc

SEQ ID NO: 801104 - RNA, 19 nt, Artificial Sequence
  Description of Artificial Sequence: Synthetic oligonucleotide
uaaaucauuccgugcguca

SEQ ID NO: 801105 - RNA, 19 nt, Artificial Sequence
  Description of Artificial Sequence: Synthetic oligonucleotide
ugugaauuccucagggguc

SEQ ID NO: 801106 - RNA, 19 nt, Artificial Sequence
  Description of Artificial Sequence: Synthetic oligonucleotide
ugcaagacccuccuugcug

SEQ ID NO: 801107 - RNA, 19 nt, Artificial Sequence
  Description of Artificial Sequence: Synthetic oligonucleotide
auacuggccuccucuagac

SEQ ID NO: 801108 - RNA, 19 nt, Artificial Sequence
  Description of Artificial Sequence: Synthetic oligonucleotide
uguugcguggauacuggcc

SEQ ID NO: 801109 - RNA, 19 nt, Artificial Sequence
  Description of Artificial Sequence: Synthetic oligonucleotide
aacccacugagguggcggc

SEQ ID NO: 801110 - RNA, 19 nt, Artificial Sequence
  Description of Artificial Sequence: Synthetic oligonucleotide
aacuguugcguggauacug

SEQ ID NO: 801111 - RNA, 19 nt, Artificial Sequence
  Description of Artificial Sequence: Synthetic oligonucleotide
ucaucgagggugaaaggcu

SEQ ID NO: 801112 - RNA, 19 nt, Artificial Sequence
  Description of Artificial Sequence: Synthetic oligonucleotide
aaaugaaaagaaacucgcu

SEQ ID NO: 801113 - RNA, 19 nt, Artificial Sequence
  Description of Artificial Sequence: Synthetic oligonucleotide
ucaccuuaugguagaacug

SEQ ID NO: 801114 - RNA, 19 nt, Artificial Sequence
  Description of Artificial Sequence: Synthetic oligonucleotide
cugaacagaagcccauacg

SEQ ID NO: 801115 - RNA, 19 nt, Artificial Sequence
  Description of Artificial Sequence: Synthetic oligonucleotide
ugggagaaucuucucuucc

SEQ ID NO: 801116 - RNA, 19 nt, Artificial Sequence
  Description of Artificial Sequence: Synthetic oligonucleotide
ucuugcaaaagggugugug

SEQ ID NO: 801117 - RNA, 19 nt, Artificial Sequence
  Description of Artificial Sequence: Synthetic oligonucleotide
auucuauggggcuacugca

SEQ ID NO: 801118 - RNA, 19 nt, Artificial Sequence
  Description of Artificial Sequence: Synthetic oligonucleotide
ugcgguaggcugcauagca

SEQ ID NO: 801119 - RNA, 19 nt, Artificial Sequence
  Description of Artificial Sequence: Synthetic oligonucleotide
agucuagacgcuugggcag

SEQ ID NO: 801120 - RNA, 19 nt, Artificial Sequence
  Description of Artificial Sequence: Synthetic oligonucleotide
aaugguaggucugucugga

SEQ ID NO: 801121 - RNA, 19 nt, Artificial Sequence
  Description of Artificial Sequence: Synthetic oligonucleotide
aagccugagccauacgaga

SEQ ID NO: 801122 - RNA, 19 nt, Artificial Sequence
  Description of Artificial Sequence: Synthetic oligonucleotide
aaguucaccuuaugguaga

SEQ ID NO: 801123 - RNA, 19 nt, Artificial Sequence
  Description of Artificial Sequence: Synthetic oligonucleotide
gagucuagacgcuugggca

SEQ ID NO: 801124 - RNA, 19 nt, Artificial Sequence
  Description of Artificial Sequence: Synthetic oligonucleotide
cuagaggagccuugggucc

SEQ ID NO: 801125 - RNA, 19 nt, Artificial Sequence
  Description of Artificial Sequence: Synthetic oligonucleotide
auaaaucauuccgugcguc

SEQ ID NO: 801126 - RNA, 19 nt, Artificial Sequence
  Description of Artificial Sequence: Synthetic oligonucleotide
gauugagagcuucccgucc

SEQ ID NO: 801127 - RNA, 19 nt, Artificial Sequence
  Description of Artificial Sequence: Synthetic oligonucleotide
aacaucagucgagccaggg

SEQ ID NO: 801128 - RNA, 19 nt, Artificial Sequence
  Description of Artificial Sequence: Synthetic oligonucleotide
uccgaauaagcuguaacaa

SEQ ID NO: 801129 - RNA, 19 nt, Artificial Sequence
  Description of Artificial Sequence: Synthetic oligonucleotide
aaacucgcugcuaagccug

SEQ ID NO: 801130 - RNA, 19 nt, Artificial Sequence
  Description of Artificial Sequence: Synthetic oligonucleotide
uguuagacacagugaguug

SEQ ID NO: 801131 - RNA, 19 nt, Artificial Sequence
  Description of Artificial Sequence: Synthetic oligonucleotide
gacacucgaaaugaaaaga

SEQ ID NO: 801132 - RNA, 19 nt, Artificial Sequence
  Description of Artificial Sequence: Synthetic oligonucleotide
aaaggguguguggaagauc

SEQ ID NO: 801133 - RNA, 19 nt, Artificial Sequence
  Description of Artificial Sequence: Synthetic oligonucleotide
gucauugaacaucagucga

SEQ ID NO: 801134 - RNA, 19 nt, Artificial Sequence
  Description of Artificial Sequence: Synthetic oligonucleotide
auacgagaaagcaccaauc

SEQ ID NO: 801135 - RNA, 19 nt, Artificial Sequence
  Description of Artificial Sequence: Synthetic oligonucleotide
uccacaagccuugggagag

SEQ ID NO: 801136 - RNA, 19 nt, Artificial Sequence
  Description of Artificial Sequence: Synthetic oligonucleotide
caccuuaugguagaacugc

SEQ ID NO: 801137 - RNA, 19 nt, Artificial Sequence
  Description of Artificial Sequence: Synthetic oligonucleotide
cauugaacaucagucgagc

SEQ ID NO: 801138 - RNA, 19 nt, Artificial Sequence
  Description of Artificial Sequence: Synthetic oligonucleotide
auacuuucggcgaugcauc

SEQ ID NO: 801139 - RNA, 19 nt, Artificial Sequence
  Description of Artificial Sequence: Synthetic oligonucleotide
acgagaaagcaccaauccu

SEQ ID NO: 801140 - RNA, 19 nt, Artificial Sequence
  Description of Artificial Sequence: Synthetic oligonucleotide
guccgaauaagcuguaaca

SEQ ID NO: 801141 - RNA, 19 nt, Artificial Sequence
  Description of Artificial Sequence: Synthetic oligonucleotide
uugcaaaagggugugugga

SEQ ID NO: 801142 - RNA, 19 nt, Artificial Sequence
  Description of Artificial Sequence: Synthetic oligonucleotide
aaggcccgcauguagcacu

SEQ ID NO: 801143 - RNA, 19 nt, Artificial Sequence
  Description of Artificial Sequence: Synthetic oligonucleotide
auacgggucuggcccaagc

SEQ ID NO: 801144 - RNA, 19 nt, Artificial Sequence
  Description of Artificial Sequence: Synthetic oligonucleotide
guuagacacagugaguuga

SEQ ID NO: 801145 - RNA, 19 nt, Artificial Sequence
  Description of Artificial Sequence: Synthetic oligonucleotide
cuaguggauacuccgagga

SEQ ID NO: 801146 - RNA, 19 nt, Artificial Sequence
  Description of Artificial Sequence: Synthetic oligonucleotide
caagugucuguuuuggcca

SEQ ID NO: 801147 - RNA, 19 nt, Artificial Sequence
  Description of Artificial Sequence: Synthetic oligonucleotide
cucgaaaugaaaagaaacu

SEQ ID NO: 801148 - RNA, 19 nt, Artificial Sequence
  Description of Artificial Sequence: Synthetic oligonucleotide
cuggggaucagcgauuccc

SEQ ID NO: 801149 - RNA, 19 nt, Artificial Sequence
  Description of Artificial Sequence: Synthetic oligonucleotide
augcaucucauccacucgu

SEQ ID NO: 801150 - RNA, 19 nt, Artificial Sequence
  Description of Artificial Sequence: Synthetic oligonucleotide
guccaaucagcauugccac

SEQ ID NO: 801151 - RNA, 19 nt, Artificial Sequence
  Description of Artificial Sequence: Synthetic oligonucleotide
auugagagcuucccgucca

SEQ ID NO: 801152 - RNA, 19 nt, Artificial Sequence
  Description of Artificial Sequence: Synthetic oligonucleotide
ggacacucgaaaugaaaag

SEQ ID NO: 801153 - RNA, 19 nt, Artificial Sequence
  Description of Artificial Sequence: Synthetic oligonucleotide
ggauuugucaaugaugguc

SEQ ID NO: 801154 - RNA, 19 nt, Artificial Sequence
  Description of Artificial Sequence: Synthetic oligonucleotide
acgacaggaagucauugaa

SEQ ID NO: 801155 - RNA, 19 nt, Artificial Sequence
  Description of Artificial Sequence: Synthetic oligonucleotide
ccaagugucuguuuuggcc

SEQ ID NO: 801156 - RNA, 19 nt, Artificial Sequence
  Description of Artificial Sequence: Synthetic oligonucleotide
acuuuaagaaaggagcaua

SEQ ID NO: 801157 - RNA, 19 nt, Artificial Sequence
  Description of Artificial Sequence: Synthetic oligonucleotide
ucggugcccacuucuaggc

SEQ ID NO: 801158 - RNA, 19 nt, Artificial Sequence
  Description of Artificial Sequence: Synthetic oligonucleotide
cucggugcccacuucuagg

SEQ ID NO: 801159 - RNA, 19 nt, Artificial Sequence
  Description of Artificial Sequence: Synthetic oligonucleotide
uggugagaaguucaccuua

SEQ ID NO: 801160 - RNA, 19 nt, Artificial Sequence
  Description of Artificial Sequence: Synthetic oligonucleotide
ucacuugcaagacccuccu

SEQ ID NO: 801161 - RNA, 19 nt, Artificial Sequence
  Description of Artificial Sequence: Synthetic oligonucleotide
ucucggugcccacuucuag

SEQ ID NO: 801162 - RNA, 19 nt, Artificial Sequence
  Description of Artificial Sequence: Synthetic oligonucleotide
caggaagucauugaacauc

SEQ ID NO: 801163 - RNA, 19 nt, Artificial Sequence
  Description of Artificial Sequence: Synthetic oligonucleotide
ugagguguacauguuccca

SEQ ID NO: 801164 - RNA, 19 nt, Artificial Sequence
  Description of Artificial Sequence: Synthetic oligonucleotide
cagcgaaguccgaauaagc

SEQ ID NO: 801165 - RNA, 19 nt, Artificial Sequence
  Description of Artificial Sequence: Synthetic oligonucleotide
ugcaucuauucauuauuua

SEQ ID NO: 801166 - RNA, 19 nt, Artificial Sequence
  Description of Artificial Sequence: Synthetic oligonucleotide
agucauaugcguucuccau

SEQ ID NO: 801167 - RNA, 19 nt, Artificial Sequence
  Description of Artificial Sequence: Synthetic oligonucleotide
uacgggucuggcccaagcc

SEQ ID NO: 801168 - RNA, 19 nt, Artificial Sequence
  Description of Artificial Sequence: Synthetic oligonucleotide
gguagacugcaauaucacc

SEQ ID NO: 801169 - RNA, 19 nt, Artificial Sequence
  Description of Artificial Sequence: Synthetic oligonucleotide
uccucuagacgggacgccg

SEQ ID NO: 801170 - RNA, 19 nt, Artificial Sequence
  Description of Artificial Sequence: Synthetic oligonucleotide
cagcuuuagaccccugaag

SEQ ID NO: 801171 - RNA, 19 nt, Artificial Sequence
  Description of Artificial Sequence: Synthetic oligonucleotide
agggcauagcgaccauccc

SEQ ID NO: 801172 - RNA, 19 nt, Artificial Sequence
  Description of Artificial Sequence: Synthetic oligonucleotide
gacgacaggaagucauuga

SEQ ID NO: 801173 - RNA, 19 nt, Artificial Sequence
  Description of Artificial Sequence: Synthetic oligonucleotide
uacuggccuccucuagacg

SEQ ID NO: 801174 - RNA, 19 nt, Artificial Sequence
  Description of Artificial Sequence: Synthetic oligonucleotide
ugauccaagcauccugcau

SEQ ID NO: 801175 - RNA, 19 nt, Artificial Sequence
  Description of Artificial Sequence: Synthetic oligonucleotide
aggacuagaggagccuugg

SEQ ID NO: 801176 - RNA, 19 nt, Artificial Sequence
  Description of Artificial Sequence: Synthetic oligonucleotide
acuguugcguggauacugg

SEQ ID NO: 801177 - RNA, 19 nt, Artificial Sequence
  Description of Artificial Sequence: Synthetic oligonucleotide
agcgaaguccgaauaagcu

SEQ ID NO: 801178 - RNA, 19 nt, Artificial Sequence
  Description of Artificial Sequence: Synthetic oligonucleotide
cuuucggcgaugcaucuca

SEQ ID NO: 801179 - RNA, 19 nt, Artificial Sequence
  Description of Artificial Sequence: Synthetic oligonucleotide
caucaucgagggugaaagg

SEQ ID NO: 801180 - RNA, 19 nt, Artificial Sequence
  Description of Artificial Sequence: Synthetic oligonucleotide
uagcgaccaucccaguagc

SEQ ID NO: 801181 - RNA, 19 nt, Artificial Sequence
  Description of Artificial Sequence: Synthetic oligonucleotide
acuccgaggacaaguuugg

SEQ ID NO: 801182 - RNA, 19 nt, Artificial Sequence
  Description of Artificial Sequence: Synthetic oligonucleotide
uuuaggguaucugcagaaa

SEQ ID NO: 801183 - RNA, 19 nt, Artificial Sequence
  Description of Artificial Sequence: Synthetic oligonucleotide
acacucgaaaugaaaagaa

SEQ ID NO: 801184 - RNA, 19 nt, Artificial Sequence
  Description of Artificial Sequence: Synthetic oligonucleotide
gguccaaucagcauugcca

SEQ ID NO: 801185 - RNA, 19 nt, Artificial Sequence
  Description of Artificial Sequence: Synthetic oligonucleotide
uggagccaaaagccgcugc

SEQ ID NO: 801186 - RNA, 19 nt, Artificial Sequence
  Description of Artificial Sequence: Synthetic oligonucleotide
acauguucccauuguucgu

SEQ ID NO: 801187 - RNA, 19 nt, Artificial Sequence
  Description of Artificial Sequence: Synthetic oligonucleotide
ucagcgauuccccucccuu

SEQ ID NO: 801188 - RNA, 19 nt, Artificial Sequence
  Description of Artificial Sequence: Synthetic oligonucleotide
uccgaggacaaguuugguu

SEQ ID NO: 801189 - RNA, 19 nt, Artificial Sequence
  Description of Artificial Sequence: Synthetic oligonucleotide
guucguggacagguaaagg

SEQ ID NO: 801190 - RNA, 19 nt, Artificial Sequence
  Description of Artificial Sequence: Synthetic oligonucleotide
caggugugauccaagcauc

SEQ ID NO: 801191 - RNA, 19 nt, Artificial Sequence
  Description of Artificial Sequence: Synthetic oligonucleotide
guugcguggauacuggccu

SEQ ID NO: 801192 - RNA, 19 nt, Artificial Sequence
  Description of Artificial Sequence: Synthetic oligonucleotide
acgccgggcauacuuucgg

SEQ ID NO: 801193 - RNA, 19 nt, Artificial Sequence
  Description of Artificial Sequence: Synthetic oligonucleotide
gaaacucgcugcuaagccu

SEQ ID NO: 801194 - RNA, 19 nt, Artificial Sequence
  Description of Artificial Sequence: Synthetic oligonucleotide
cugagccauacgagaaagc

SEQ ID NO: 801195 - RNA, 19 nt, Artificial Sequence
  Description of Artificial Sequence: Synthetic oligonucleotide
uagcuuuggguggaauuug

SEQ ID NO: 801196 - RNA, 19 nt, Artificial Sequence
  Description of Artificial Sequence: Synthetic oligonucleotide
gagccauacgagaaagcac

SEQ ID NO: 801197 - RNA, 19 nt, Artificial Sequence
  Description of Artificial Sequence: Synthetic oligonucleotide
acagcagcgaaguccgaau

SEQ ID NO: 801198 - RNA, 19 nt, Artificial Sequence
  Description of Artificial Sequence: Synthetic oligonucleotide
uggauuugucaaugauggu

SEQ ID NO: 801199 - RNA, 19 nt, Artificial Sequence
  Description of Artificial Sequence: Synthetic oligonucleotide
gacgcuugggcagaucuga

SEQ ID NO: 801200 - RNA, 19 nt, Artificial Sequence
  Description of Artificial Sequence: Synthetic oligonucleotide
uugcaagacccuccuugcu

SEQ ID NO: 801201 - RNA, 19 nt, Artificial Sequence
  Description of Artificial Sequence: Synthetic oligonucleotide
cucuagacgggacgccggg

SEQ ID NO: 801202 - RNA, 19 nt, Artificial Sequence
  Description of Artificial Sequence: Synthetic oligonucleotide
ggagccuuggguccaauca

SEQ ID NO: 801203 - RNA, 19 nt, Artificial Sequence
  Description of Artificial Sequence: Synthetic oligonucleotide
uacuuucggcgaugcaucu

SEQ ID NO: 801204 - RNA, 19 nt, Artificial Sequence
  Description of Artificial Sequence: Synthetic oligonucleotide
gagggaggcggugccaccg

SEQ ID NO: 801205 - RNA, 19 nt, Artificial Sequence
  Description of Artificial Sequence: Synthetic oligonucleotide
ucguuccagauaccaagua

SEQ ID NO: 801206 - RNA, 19 nt, Artificial Sequence
  Description of Artificial Sequence: Synthetic oligonucleotide
cacucgaaaugaaaagaaa

SEQ ID NO: 801207 - RNA, 19 nt, Artificial Sequence
  Description of Artificial Sequence: Synthetic oligonucleotide
ugcuaagccugagccauac

SEQ ID NO: 801208 - RNA, 19 nt, Artificial Sequence
  Description of Artificial Sequence: Synthetic oligonucleotide
cugugaauuccucaggggu

SEQ ID NO: 801209 - RNA, 19 nt, Artificial Sequence
  Description of Artificial Sequence: Synthetic oligonucleotide
gcguuggugguaucuaugc

SEQ ID NO: 801210 - RNA, 19 nt, Artificial Sequence
  Description of Artificial Sequence: Synthetic oligonucleotide
gaggcggugccaccguagc

SEQ ID NO: 801211 - RNA, 19 nt, Artificial Sequence
  Description of Artificial Sequence: Synthetic oligonucleotide
ggaugccaacaucuuuugg

SEQ ID NO: 801212 - RNA, 19 nt, Artificial Sequence
  Description of Artificial Sequence: Synthetic oligonucleotide
cuggguagacugcaauauc

SEQ ID NO: 801213 - RNA, 19 nt, Artificial Sequence
  Description of Artificial Sequence: Synthetic oligonucleotide
agguuucuugugucaccag

SEQ ID NO: 801214 - RNA, 19 nt, Artificial Sequence
  Description of Artificial Sequence: Synthetic oligonucleotide
acuguuagacacagugagu

SEQ ID NO: 801215 - RNA, 19 nt, Artificial Sequence
  Description of Artificial Sequence: Synthetic oligonucleotide
agauucuauggggcuacug

SEQ ID NO: 801216 - RNA, 19 nt, Artificial Sequence
  Description of Artificial Sequence: Synthetic oligonucleotide
cuucuaggcggcccacagc

SEQ ID NO: 801217 - RNA, 19 nt, Artificial Sequence
  Description of Artificial Sequence: Synthetic oligonucleotide
ggucaugcgccuccgggag

SEQ ID NO: 801218 - RNA, 19 nt, Artificial Sequence
  Description of Artificial Sequence: Synthetic oligonucleotide
cuguugcguggauacuggc

SEQ ID NO: 801219 - RNA, 19 nt, Artificial Sequence
  Description of Artificial Sequence: Synthetic oligonucleotide
cuaggcggcccacagcguc

SEQ ID NO: 801220 - RNA, 19 nt, Artificial Sequence
  Description of Artificial Sequence: Synthetic oligonucleotide
ugcaucucauccacucguu

SEQ ID NO: 801221 - RNA, 19 nt, Artificial Sequence
  Description of Artificial Sequence: Synthetic oligonucleotide
gaauccugaaagaguucca

SEQ ID NO: 801222 - RNA, 19 nt, Artificial Sequence
  Description of Artificial Sequence: Synthetic oligonucleotide
gccuccgggagucuagacg

SEQ ID NO: 801223 - RNA, 19 nt, Artificial Sequence
  Description of Artificial Sequence: Synthetic oligonucleotide
cauacuuucggcgaugcau

SEQ ID NO: 801224 - RNA, 19 nt, Artificial Sequence
  Description of Artificial Sequence: Synthetic oligonucleotide
gacgccgggcauacuuucg

SEQ ID NO: 801225 - RNA, 19 nt, Artificial Sequence
  Description of Artificial Sequence: Synthetic oligonucleotide
cauacgagaaagcaccaau

SEQ ID NO: 801226 - RNA, 19 nt, Artificial Sequence
  Description of Artificial Sequence: Synthetic oligonucleotide
guggauacuggccuccucu

SEQ ID NO: 801227 - RNA, 19 nt, Artificial Sequence
  Description of Artificial Sequence: Synthetic oligonucleotide
uggacgacaggaagucauu

SEQ ID NO: 801228 - RNA, 19 nt, Artificial Sequence
  Description of Artificial Sequence: Synthetic oligonucleotide
uggauacuggccuccucua

SEQ ID NO: 801229 - RNA, 19 nt, Artificial Sequence
  Description of Artificial Sequence: Synthetic oligonucleotide
ggcuggaaaguagaccucc

SEQ ID NO: 801230 - RNA, 19 nt, Artificial Sequence
  Description of Artificial Sequence: Synthetic oligonucleotide
uccaggacuagaggagccu

SEQ ID NO: 801231 - RNA, 19 nt, Artificial Sequence
  Description of Artificial Sequence: Synthetic oligonucleotide
caucagucgagccagggau

SEQ ID NO: 801232 - RNA, 19 nt, Artificial Sequence
  Description of Artificial Sequence: Synthetic oligonucleotide
accguagcaggcguuggug

SEQ ID NO: 801233 - RNA, 19 nt, Artificial Sequence
  Description of Artificial Sequence: Synthetic oligonucleotide
caaguaccugggaagaggu

SEQ ID NO: 801234 - RNA, 19 nt, Artificial Sequence
  Description of Artificial Sequence: Synthetic oligonucleotide
cuguaacaaaugguagguc

SEQ ID NO: 801235 - RNA, 19 nt, Artificial Sequence
  Description of Artificial Sequence: Synthetic oligonucleotide
cuagacgggacgccgggca

SEQ ID NO: 801236 - RNA, 19 nt, Artificial Sequence
  Description of Artificial Sequence: Synthetic oligonucleotide
gguaggcugcauagcaccg

SEQ ID NO: 801237 - RNA, 19 nt, Artificial Sequence
  Description of Artificial Sequence: Synthetic oligonucleotide
gaacaucagucgagccagg

SEQ ID NO: 801238 - RNA, 19 nt, Artificial Sequence
  Description of Artificial Sequence: Synthetic oligonucleotide
ggauugagagcuucccguc

SEQ ID NO: 801239 - RNA, 19 nt, Artificial Sequence
  Description of Artificial Sequence: Synthetic oligonucleotide
ucagucgagccagggauuu

SEQ ID NO: 801240 - RNA, 19 nt, Artificial Sequence
  Description of Artificial Sequence: Synthetic oligonucleotide
gccgggcauacuuucggcg

SEQ ID NO: 801241 - RNA, 19 nt, Artificial Sequence
  Description of Artificial Sequence: Synthetic oligonucleotide
auacuccgaggacaaguuu

SEQ ID NO: 801242 - RNA, 19 nt, Artificial Sequence
  Description of Artificial Sequence: Synthetic oligonucleotide
ucuagacgggacgccgggc

SEQ ID NO: 801243 - RNA, 19 nt, Artificial Sequence
  Description of Artificial Sequence: Synthetic oligonucleotide
ucaugcgccuccgggaguc

SEQ ID NO: 801244 - RNA, 19 nt, Artificial Sequence
  Description of Artificial Sequence: Synthetic oligonucleotide
guagaccuccagggcaagg

SEQ ID NO: 801245 - RNA, 19 nt, Artificial Sequence
  Description of Artificial Sequence: Synthetic oligonucleotide
aaguccgaauaagcuguaa

SEQ ID NO: 801246 - RNA, 19 nt, Artificial Sequence
  Description of Artificial Sequence: Synthetic oligonucleotide
cgaccaucccaguagcugg

SEQ ID NO: 801247 - RNA, 19 nt, Artificial Sequence
  Description of Artificial Sequence: Synthetic oligonucleotide
gaccccugaaggccuccag

SEQ ID NO: 801248 - RNA, 19 nt, Artificial Sequence
  Description of Artificial Sequence: Synthetic oligonucleotide
agaccuccagggcaaggau

SEQ ID NO: 801249 - RNA, 19 nt, Artificial Sequence
  Description of Artificial Sequence: Synthetic oligonucleotide
uucggcgaugcaucucauc

SEQ ID NO: 801250 - RNA, 19 nt, Artificial Sequence
  Description of Artificial Sequence: Synthetic oligonucleotide
ggacuagaggagccuuggg

SEQ ID NO: 801251 - RNA, 19 nt, Artificial Sequence
  Description of Artificial Sequence: Synthetic oligonucleotide
cuguuagacacagugaguu

SEQ ID NO: 801252 - RNA, 19 nt, Artificial Sequence
  Description of Artificial Sequence: Synthetic oligonucleotide
ggugguaucuaugccuuca

SEQ ID NO: 801253 - RNA, 19 nt, Artificial Sequence
  Description of Artificial Sequence: Synthetic oligonucleotide
accuuaugguagaacugcu

SEQ ID NO: 801254 - RNA, 19 nt, Artificial Sequence
  Description of Artificial Sequence: Synthetic oligonucleotide
aucagcgauuccccucccu

SEQ ID NO: 801255 - RNA, 19 nt, Artificial Sequence
  Description of Artificial Sequence: Synthetic oligonucleotide
ucuaggcggcccacagcgu

SEQ ID NO: 801256 - RNA, 19 nt, Artificial Sequence
  Description of Artificial Sequence: Synthetic oligonucleotide
aaaagccgcugcaucuuua

SEQ ID NO: 801257 - RNA, 19 nt, Artificial Sequence
  Description of Artificial Sequence: Synthetic oligonucleotide
cguuccagauaccaaguac

SEQ ID NO: 801258 - RNA, 19 nt, Artificial Sequence
  Description of Artificial Sequence: Synthetic oligonucleotide
uauggggcuacugcaucua

SEQ ID NO: 801259 - RNA, 19 nt, Artificial Sequence
  Description of Artificial Sequence: Synthetic oligonucleotide
augcguucuccaugugggu

SEQ ID NO: 801260 - RNA, 19 nt, Artificial Sequence
  Description of Artificial Sequence: Synthetic oligonucleotide
ccuuaugguagaacugcuc

SEQ ID NO: 801261 - RNA, 19 nt, Artificial Sequence
  Description of Artificial Sequence: Synthetic oligonucleotide
cagcgauuccccucccuuc

SEQ ID NO: 801262 - RNA, 19 nt, Artificial Sequence
  Description of Artificial Sequence: Synthetic oligonucleotide
auuccgugcgucacugcug

SEQ ID NO: 801263 - RNA, 19 nt, Artificial Sequence
  Description of Artificial Sequence: Synthetic oligonucleotide
ccugagccauacgagaaag

SEQ ID NO: 801264 - RNA, 19 nt, Artificial Sequence
  Description of Artificial Sequence: Synthetic oligonucleotide
agcuuuggguggaauuuga

SEQ ID NO: 801265 - RNA, 19 nt, Artificial Sequence
  Description of Artificial Sequence: Synthetic oligonucleotide
cauagcgaccaucccagua

SEQ ID NO: 801266 - RNA, 19 nt, Artificial Sequence
  Description of Artificial Sequence: Synthetic oligonucleotide
ggcaaggaugccaacaucu

SEQ ID NO: 801267 - RNA, 19 nt, Artificial Sequence
  Description of Artificial Sequence: Synthetic oligonucleotide
uugcguggauacuggccuc

SEQ ID NO: 801268 - RNA, 19 nt, Artificial Sequence
  Description of Artificial Sequence: Synthetic oligonucleotide
cccgaagaacccacugagg

SEQ ID NO: 801269 - RNA, 19 nt, Artificial Sequence
  Description of Artificial Sequence: Synthetic oligonucleotide
aguagaccuccagggcaag

SEQ ID NO: 801270 - RNA, 19 nt, Artificial Sequence
  Description of Artificial Sequence: Synthetic oligonucleotide
ggacgacaggaagucauug

SEQ ID NO: 801271 - RNA, 19 nt, Artificial Sequence
  Description of Artificial Sequence: Synthetic oligonucleotide
cauuccgugcgucacugcu

SEQ ID NO: 801272 - RNA, 19 nt, Artificial Sequence
  Description of Artificial Sequence: Synthetic oligonucleotide
uuucggcgaugcaucucau

SEQ ID NO: 801273 - RNA, 19 nt, Artificial Sequence
  Description of Artificial Sequence: Synthetic oligonucleotide
cuggacgacaggaagucau

SEQ ID NO: 801274 - RNA, 19 nt, Artificial Sequence
  Description of Artificial Sequence: Synthetic oligonucleotide
agccccuuguauaaaucau

SEQ ID NO: 801275 - RNA, 19 nt, Artificial Sequence
  Description of Artificial Sequence: Synthetic oligonucleotide
ggcauacuuucggcgaugc

SEQ ID NO: 801276 - RNA, 19 nt, Artificial Sequence
  Description of Artificial Sequence: Synthetic oligonucleotide
gcgaccaucccaguagcug

SEQ ID NO: 801277 - RNA, 19 nt, Artificial Sequence
  Description of Artificial Sequence: Synthetic oligonucleotide
cucguuccagauaccaagu

SEQ ID NO: 801278 - RNA, 19 nt, Artificial Sequence
  Description of Artificial Sequence: Synthetic oligonucleotide
gcuaagccugagccauacg

SEQ ID NO: 801279 - RNA, 19 nt, Artificial Sequence
  Description of Artificial Sequence: Synthetic oligonucleotide
aggcggcccacagcguccc

SEQ ID NO: 801280 - RNA, 19 nt, Artificial Sequence
  Description of Artificial Sequence: Synthetic oligonucleotide
gacgggacgccgggcauac

SEQ ID NO: 801281 - RNA, 19 nt, Artificial Sequence
  Description of Artificial Sequence: Synthetic oligonucleotide
cgugcgucacugcuggacg

SEQ ID NO: 801282 - RNA, 19 nt, Artificial Sequence
  Description of Artificial Sequence: Synthetic oligonucleotide
ccgaauaagcuguaacaaa

SEQ ID NO: 801283 - RNA, 19 nt, Artificial Sequence
  Description of Artificial Sequence: Synthetic oligonucleotide
cgaagaacccacugaggug

SEQ ID NO: 801284 - RNA, 19 nt, Artificial Sequence
  Description of Artificial Sequence: Synthetic oligonucleotide
ccucuagacgggacgccgg

SEQ ID NO: 801285 - RNA, 19 nt, Artificial Sequence
  Description of Artificial Sequence: Synthetic oligonucleotide
agacgcuugggcagaucug

SEQ ID NO: 801286 - RNA, 19 nt, Artificial Sequence
  Description of Artificial Sequence: Synthetic oligonucleotide
gggagucuagacgcuuggg

SEQ ID NO: 801287 - RNA, 19 nt, Artificial Sequence
  Description of Artificial Sequence: Synthetic oligonucleotide
cauugaagagggaggcggu

SEQ ID NO: 801288 - RNA, 19 nt, Artificial Sequence
  Description of Artificial Sequence: Synthetic oligonucleotide
accgauccaaggcccgcau

SEQ ID NO: 801289 - RNA, 19 nt, Artificial Sequence
  Description of Artificial Sequence: Synthetic oligonucleotide
aacucgcugcuaagccuga

SEQ ID NO: 801290 - RNA, 19 nt, Artificial Sequence
  Description of Artificial Sequence: Synthetic oligonucleotide
cagggauuucuggaccauc

SEQ ID NO: 801291 - RNA, 19 nt, Artificial Sequence
  Description of Artificial Sequence: Synthetic oligonucleotide
ggcguuggugguaucuaug

SEQ ID NO: 801292 - RNA, 19 nt, Artificial Sequence
  Description of Artificial Sequence: Synthetic oligonucleotide
cgaauaagcuguaacaaau

SEQ ID NO: 801293 - RNA, 19 nt, Artificial Sequence
  Description of Artificial Sequence: Synthetic oligonucleotide
gguaaagggaagccuuggu

SEQ ID NO: 801294 - RNA, 19 nt, Artificial Sequence
  Description of Artificial Sequence: Synthetic oligonucleotide
gugcgucacugcuggacga

SEQ ID NO: 801295 - RNA, 19 nt, Artificial Sequence
  Description of Artificial Sequence: Synthetic oligonucleotide
uggguccaaucagcauugc

SEQ ID NO: 801296 - RNA, 19 nt, Artificial Sequence
  Description of Artificial Sequence: Synthetic oligonucleotide
gucuagacgcuugggcaga

SEQ ID NO: 801297 - RNA, 19 nt, Artificial Sequence
  Description of Artificial Sequence: Synthetic oligonucleotide
agcaggcguuggugguauc

SEQ ID NO: 801298 - RNA, 19 nt, Artificial Sequence
  Description of Artificial Sequence: Synthetic oligonucleotide
ccgaagaacccacugaggu

SEQ ID NO: 801299 - RNA, 19 nt, Artificial Sequence
  Description of Artificial Sequence: Synthetic oligonucleotide
ucuagacgcuugggcagau

SEQ ID NO: 801300 - RNA, 19 nt, Artificial Sequence
  Description of Artificial Sequence: Synthetic oligonucleotide
uggucucggugcccacuuc

SEQ ID NO: 801301 - RNA, 19 nt, Artificial Sequence
  Description of Artificial Sequence: Synthetic oligonucleotide
cuggagccaaaagccgcug

SEQ ID NO: 801302 - RNA, 19 nt, Artificial Sequence
  Description of Artificial Sequence: Synthetic oligonucleotide
cugcuggacgacaggaagu

SEQ ID NO: 801303 - RNA, 19 nt, Artificial Sequence
  Description of Artificial Sequence: Synthetic oligonucleotide
gggucaugcgccuccggga

SEQ ID NO: 801304 - RNA, 19 nt, Artificial Sequence
  Description of Artificial Sequence: Synthetic oligonucleotide
ccuccucuagacgggacgc

SEQ ID NO: 801305 - RNA, 19 nt, Artificial Sequence
  Description of Artificial Sequence: Synthetic oligonucleotide
gaggacaaguuugguuugu

SEQ ID NO: 801306 - RNA, 19 nt, Artificial Sequence
  Description of Artificial Sequence: Synthetic oligonucleotide
agcccuugcuccaggacua

SEQ ID NO: 801307 - RNA, 19 nt, Artificial Sequence
  Description of Artificial Sequence: Synthetic oligonucleotide
uccgggagucuagacgcuu

SEQ ID NO: 801308 - RNA, 19 nt, Artificial Sequence
  Description of Artificial Sequence: Synthetic oligonucleotide
gaaguccgaauaagcugua

SEQ ID NO: 801309 - RNA, 19 nt, Artificial Sequence
  Description of Artificial Sequence: Synthetic oligonucleotide
aggcugcauagcaccgauc

SEQ ID NO: 801310 - RNA, 19 nt, Artificial Sequence
  Description of Artificial Sequence: Synthetic oligonucleotide
aucagucgagccagggauu

SEQ ID NO: 801311 - RNA, 19 nt, Artificial Sequence
  Description of Artificial Sequence: Synthetic oligonucleotide
ggaggcggugccaccguag

SEQ ID NO: 801312 - RNA, 19 nt, Artificial Sequence
  Description of Artificial Sequence: Synthetic oligonucleotide
gcugcuaagccugagccau

SEQ ID NO: 801313 - RNA, 19 nt, Artificial Sequence
  Description of Artificial Sequence: Synthetic oligonucleotide
guugccuacuggguagacu

SEQ ID NO: 801314 - RNA, 19 nt, Artificial Sequence
  Description of Artificial Sequence: Synthetic oligonucleotide
cauacgggucuggcccaag

SEQ ID NO: 801315 - RNA, 19 nt, Artificial Sequence
  Description of Artificial Sequence: Synthetic oligonucleotide
cuggcguugccuacugggu

SEQ ID NO: 801316 - RNA, 19 nt, Artificial Sequence
  Description of Artificial Sequence: Synthetic oligonucleotide
caucgagggugaaaggcuu

SEQ ID NO: 801317 - RNA, 19 nt, Artificial Sequence
  Description of Artificial Sequence: Synthetic oligonucleotide
gggcaaggaugccaacauc

SEQ ID NO: 801318 - RNA, 19 nt, Artificial Sequence
  Description of Artificial Sequence: Synthetic oligonucleotide
ggacgccgggcauacuuuc

SEQ ID NO: 801319 - RNA, 19 nt, Artificial Sequence
  Description of Artificial Sequence: Synthetic oligonucleotide
cugugggccuggcguugcc

SEQ ID NO: 801320 - RNA, 19 nt, Artificial Sequence
  Description of Artificial Sequence: Synthetic oligonucleotide
agcgaccaucccaguagcu

SEQ ID NO: 801321 - RNA, 19 nt, Artificial Sequence
  Description of Artificial Sequence: Synthetic oligonucleotide
ucccguccacuaguggaua

SEQ ID NO: 801322 - RNA, 19 nt, Artificial Sequence
  Description of Artificial Sequence: Synthetic oligonucleotide
ggcacccauagagggauga

SEQ ID NO: 801323 - RNA, 19 nt, Artificial Sequence
  Description of Artificial Sequence: Synthetic oligonucleotide
gccgcugcaucuuuagggu

SEQ ID NO: 801324 - RNA, 19 nt, Artificial Sequence
  Description of Artificial Sequence: Synthetic oligonucleotide
ccacuaguggauacuccga

SEQ ID NO: 801325 - RNA, 19 nt, Artificial Sequence
  Description of Artificial Sequence: Synthetic oligonucleotide
aggcccgcauguagcacug

SEQ ID NO: 801326 - RNA, 19 nt, Artificial Sequence
  Description of Artificial Sequence: Synthetic oligonucleotide
gcacccauagagggaugag

SEQ ID NO: 801327 - RNA, 19 nt, Artificial Sequence
  Description of Artificial Sequence: Synthetic oligonucleotide
cuagacgcuugggcagauc

SEQ ID NO: 801328 - RNA, 19 nt, Artificial Sequence
  Description of Artificial Sequence: Synthetic oligonucleotide
gccaccguagcaggcguug

SEQ ID NO: 801329 - RNA, 19 nt, Artificial Sequence
  Description of Artificial Sequence: Synthetic oligonucleotide
ggcccaagcccacuguaua

SEQ ID NO: 801330 - RNA, 19 nt, Artificial Sequence
  Description of Artificial Sequence: Synthetic oligonucleotide
ccacagcgucccauggcag

SEQ ID NO: 801331 - RNA, 19 nt, Artificial Sequence
  Description of Artificial Sequence: Synthetic oligonucleotide
ccauguggguuccccucag

SEQ ID NO: 801332 - RNA, 19 nt, Artificial Sequence
  Description of Artificial Sequence: Synthetic oligonucleotide
ccgggcauacuuucggcga

SEQ ID NO: 801333 - RNA, 19 nt, Artificial Sequence
  Description of Artificial Sequence: Synthetic oligonucleotide
ugcccacuucuaggcggcc

SEQ ID NO: 801334 - RNA, 19 nt, Artificial Sequence
  Description of Artificial Sequence: Synthetic oligonucleotide
ugauugcauccgggagagu

SEQ ID NO: 801335 - RNA, 19 nt, Artificial Sequence
  Description of Artificial Sequence: Synthetic oligonucleotide
gccuacuggguagacugca

SEQ ID NO: 801336 - RNA, 19 nt, Artificial Sequence
  Description of Artificial Sequence: Synthetic oligonucleotide
cccguccacuaguggauac

SEQ ID NO: 801337 - RNA, 19 nt, Artificial Sequence
  Description of Artificial Sequence: Synthetic oligonucleotide
ccccaggaacuguugcgug

SEQ ID NO: 801338 - RNA, 19 nt, Artificial Sequence
  Description of Artificial Sequence: Synthetic oligonucleotide
gcccgcauguagcacugga

SEQ ID NO: 801339 - RNA, 19 nt, Artificial Sequence
  Description of Artificial Sequence: Synthetic oligonucleotide
gggcauacuuucggcgaug

SEQ ID NO: 801340 - RNA, 19 nt, Artificial Sequence
  Description of Artificial Sequence: Synthetic oligonucleotide
gcgguaggcugcauagcac

SEQ ID NO: 801341 - RNA, 19 nt, Artificial Sequence
  Description of Artificial Sequence: Synthetic oligonucleotide
ggugagaaguucaccuuau

SEQ ID NO: 801342 - RNA, 19 nt, Artificial Sequence
  Description of Artificial Sequence: Synthetic oligonucleotide
gccuggcguugccuacugg

SEQ ID NO: 801343 - RNA, 19 nt, Artificial Sequence
  Description of Artificial Sequence: Synthetic oligonucleotide
cacuucuaggcggcccaca

SEQ ID NO: 801344 - RNA, 19 nt, Artificial Sequence
  Description of Artificial Sequence: Synthetic oligonucleotide
gcuuuggguggaauuugaa

SEQ ID NO: 801345 - RNA, 19 nt, Artificial Sequence
  Description of Artificial Sequence: Synthetic oligonucleotide
cguccacuaguggauacuc

SEQ ID NO: 801346 - RNA, 19 nt, Artificial Sequence
  Description of Artificial Sequence: Synthetic oligonucleotide
agacgggacgccgggcaua

SEQ ID NO: 801347 - RNA, 19 nt, Artificial Sequence
  Description of Artificial Sequence: Synthetic oligonucleotide
gguuccccucagcccuugc

SEQ ID NO: 801348 - RNA, 19 nt, Artificial Sequence
  Description of Artificial Sequence: Synthetic oligonucleotide
caccgauccaaggcccgca

SEQ ID NO: 801349 - RNA, 19 nt, Artificial Sequence
  Description of Artificial Sequence: Synthetic oligonucleotide
ccaccguagcaggcguugg

SEQ ID NO: 801350 - RNA, 19 nt, Artificial Sequence
  Description of Artificial Sequence: Synthetic oligonucleotide
ggcgccaccugugggccug

SEQ ID NO: 801351 - RNA, 19 nt, Artificial Sequence
  Description of Artificial Sequence: Synthetic oligonucleotide
gcccacuucuaggcggccc

SEQ ID NO: 801352 - RNA, 19 nt, Artificial Sequence
  Description of Artificial Sequence: Synthetic oligonucleotide
gcaccgauccaaggcccgc

SEQ ID NO: 801353 - RNA, 19 nt, Artificial Sequence
  Description of Artificial Sequence: Synthetic oligonucleotide
ccuggggaucagcgauucc

SEQ ID NO: 801354 - RNA, 19 nt, Artificial Sequence
  Description of Artificial Sequence: Synthetic oligonucleotide
gagucccgaagaacccacu

SEQ ID NO: 801355 - RNA, 19 nt, Artificial Sequence
  Description of Artificial Sequence: Synthetic oligonucleotide
ccgauccaaggcccgcaug

SEQ ID NO: 801356 - RNA, 19 nt, Artificial Sequence
  Description of Artificial Sequence: Synthetic oligonucleotide
cugcuaagccugagccaua

SEQ ID NO: 801357 - RNA, 19 nt, Artificial Sequence
  Description of Artificial Sequence: Synthetic oligonucleotide
aggcacccauagagggaug

SEQ ID NO: 801358 - RNA, 19 nt, Artificial Sequence
  Description of Artificial Sequence: Synthetic oligonucleotide
caccguagcaggcguuggu

SEQ ID NO: 801359 - RNA, 19 nt, Artificial Sequence
  Description of Artificial Sequence: Synthetic oligonucleotide
gcuggacgacaggaaguca

SEQ ID NO: 801360 - RNA, 19 nt, Artificial Sequence
  Description of Artificial Sequence: Synthetic oligonucleotide
gcgauuccccucccuucca

SEQ ID NO: 801361 - RNA, 19 nt, Artificial Sequence
  Description of Artificial Sequence: Synthetic oligonucleotide
gucaugcgccuccgggagu

SEQ ID NO: 801362 - RNA, 19 nt, Artificial Sequence
  Description of Artificial Sequence: Synthetic oligonucleotide
cggugcccacuucuaggcg

SEQ ID NO: 801363 - RNA, 19 nt, Artificial Sequence
  Description of Artificial Sequence: Synthetic oligonucleotide
cccuggggaucagcgauuc

SEQ ID NO: 801364 - RNA, 19 nt, Artificial Sequence
  Description of Artificial Sequence: Synthetic oligonucleotide
ccgcauguagcacuggauu

SEQ ID NO: 801365 - RNA, 19 nt, Artificial Sequence
  Description of Artificial Sequence: Synthetic oligonucleotide
ggcccgcauguagcacugg

SEQ ID NO: 801366 - RNA, 19 nt, Artificial Sequence
  Description of Artificial Sequence: Synthetic oligonucleotide
cuccgggagucuagacgcu

SEQ ID NO: 801367 - RNA, 19 nt, Artificial Sequence
  Description of Artificial Sequence: Synthetic oligonucleotide
gccccuuguauaaaucauu

SEQ ID NO: 801368 - RNA, 19 nt, Artificial Sequence
  Description of Artificial Sequence: Synthetic oligonucleotide
cguggauacuggccuccuc

SEQ ID NO: 801369 - RNA, 19 nt, Artificial Sequence
  Description of Artificial Sequence: Synthetic oligonucleotide
cggugccaccguagcaggc

SEQ ID NO: 801370 - RNA, 19 nt, Artificial Sequence
  Description of Artificial Sequence: Synthetic oligonucleotide
cuccgaggacaaguuuggu

SEQ ID NO: 801371 - RNA, 19 nt, Artificial Sequence
  Description of Artificial Sequence: Synthetic oligonucleotide
gcguugccuacuggguaga

SEQ ID NO: 801372 - RNA, 19 nt, Artificial Sequence
  Description of Artificial Sequence: Synthetic oligonucleotide
cagauucuauggggcuacu

SEQ ID NO: 801373 - RNA, 19 nt, Artificial Sequence
  Description of Artificial Sequence: Synthetic oligonucleotide
cccgcauguagcacuggau

SEQ ID NO: 801374 - RNA, 19 nt, Artificial Sequence
  Description of Artificial Sequence: Synthetic oligonucleotide
gccaauucuugggcagagu

SEQ ID NO: 801375 - RNA, 19 nt, Artificial Sequence
  Description of Artificial Sequence: Synthetic oligonucleotide
ccucugcaccacuguuaga

SEQ ID NO: 801376 - RNA, 19 nt, Artificial Sequence
  Description of Artificial Sequence: Synthetic oligonucleotide
acgggacgccgggcauacu

SEQ ID NO: 801377 - RNA, 19 nt, Artificial Sequence
  Description of Artificial Sequence: Synthetic oligonucleotide
cgccuccgggagucuagac

SEQ ID NO: 801378 - RNA, 19 nt, Artificial Sequence
  Description of Artificial Sequence: Synthetic oligonucleotide
gcgccuccgggagucuaga

SEQ ID NO: 801379 - RNA, 19 nt, Artificial Sequence
  Description of Artificial Sequence: Synthetic oligonucleotide
gggacgccgggcauacuuu

SEQ ID NO: 801380 - RNA, 19 nt, Artificial Sequence
  Description of Artificial Sequence: Synthetic oligonucleotide
ccguccacuaguggauacu

SEQ ID NO: 801381 - RNA, 19 nt, Artificial Sequence
  Description of Artificial Sequence: Synthetic oligonucleotide
gcguggauacuggccuccu

SEQ ID NO: 801382 - RNA, 19 nt, Artificial Sequence
  Description of Artificial Sequence: Synthetic oligonucleotide
ccauacgggucuggcccaa

SEQ ID NO: 801383 - RNA, 19 nt, Artificial Sequence
  Description of Artificial Sequence: Synthetic oligonucleotide
cgggacgccgggcauacuu

SEQ ID NO: 801384 - RNA, 19 nt, Artificial Sequence
  Description of Artificial Sequence: Synthetic oligonucleotide
cgggcauacuuucggcgau

SEQ ID NO: 801385 - RNA, 19 nt, Artificial Sequence
  Description of Artificial Sequence: Synthetic oligonucleotide
aaagcuauaacuuacucac

SEQ ID NO: 801386 - RNA, 19 nt, Artificial Sequence
  Description of Artificial Sequence: Synthetic oligonucleotide
uuuaauaggagcauucagg

SEQ ID NO: 801387 - RNA, 19 nt, Artificial Sequence
  Description of Artificial Sequence: Synthetic oligonucleotide
auauacacaacacagcagc

SEQ ID NO: 801388 - RNA, 19 nt, Artificial Sequence
  Description of Artificial Sequence: Synthetic oligonucleotide
uucagguauauaaauaagg

SEQ ID NO: 801389 - RNA, 19 nt, Artificial Sequence
  Description of Artificial Sequence: Synthetic oligonucleotide
cauacauucaccucgagag

SEQ ID NO: 801390 - RNA, 19 nt, Artificial Sequence
  Description of Artificial Sequence: Synthetic oligonucleotide
aagccaaacauauaggcca

SEQ ID NO: 801391 - RNA, 19 nt, Artificial Sequence
  Description of Artificial Sequence: Synthetic oligonucleotide
aucuggaaaggguacaucc

SEQ ID NO: 801392 - RNA, 19 nt, Artificial Sequence
  Description of Artificial Sequence: Synthetic oligonucleotide
uggguuacgacaauaagca

SEQ ID NO: 801393 - RNA, 19 nt, Artificial Sequence
  Description of Artificial Sequence: Synthetic oligonucleotide
uauacugugcugaaaagga

SEQ ID NO: 801394 - RNA, 19 nt, Artificial Sequence
  Description of Artificial Sequence: Synthetic oligonucleotide
aauaccuguauuuaagaaa

SEQ ID NO: 801395 - RNA, 19 nt, Artificial Sequence
  Description of Artificial Sequence: Synthetic oligonucleotide
caugacaugacucaauagc

SEQ ID NO: 801396 - RNA, 19 nt, Artificial Sequence
  Description of Artificial Sequence: Synthetic oligonucleotide
aaagccaaacauauaggcc

SEQ ID NO: 801397 - RNA, 19 nt, Artificial Sequence
  Description of Artificial Sequence: Synthetic oligonucleotide
acuagucagacacagauga

SEQ ID NO: 801398 - RNA, 19 nt, Artificial Sequence
  Description of Artificial Sequence: Synthetic oligonucleotide
ugcaugaccucucauacag

SEQ ID NO: 801399 - RNA, 19 nt, Artificial Sequence
  Description of Artificial Sequence: Synthetic oligonucleotide
uuaauaggagcauucaggu

SEQ ID NO: 801400 - RNA, 19 nt, Artificial Sequence
  Description of Artificial Sequence: Synthetic oligonucleotide
auaccuguauuuaagaaac

SEQ ID NO: 801401 - RNA, 19 nt, Artificial Sequence
  Description of Artificial Sequence: Synthetic oligonucleotide
ucuuauacugugcugaaaa

SEQ ID NO: 801402 - RNA, 19 nt, Artificial Sequence
  Description of Artificial Sequence: Synthetic oligonucleotide
cucucuacuagucagacac

SEQ ID NO: 801403 - RNA, 19 nt, Artificial Sequence
  Description of Artificial Sequence: Synthetic oligonucleotide
uuaucuaagucacagcauc

SEQ ID NO: 801404 - RNA, 19 nt, Artificial Sequence
  Description of Artificial Sequence: Synthetic oligonucleotide
gaacccuccaaauggaccg

SEQ ID NO: 801405 - RNA, 19 nt, Artificial Sequence
  Description of Artificial Sequence: Synthetic oligonucleotide
acauauaggccauaauauc

SEQ ID NO: 801406 - RNA, 19 nt, Artificial Sequence
  Description of Artificial Sequence: Synthetic oligonucleotide
cacacacacacauuaaucc

SEQ ID NO: 801407 - RNA, 19 nt, Artificial Sequence
  Description of Artificial Sequence: Synthetic oligonucleotide
uguauuuccuuuuggguug

SEQ ID NO: 801408 - RNA, 19 nt, Artificial Sequence
  Description of Artificial Sequence: Synthetic oligonucleotide
ggcggaauaggucagaugg

SEQ ID NO: 801409 - RNA, 19 nt, Artificial Sequence
  Description of Artificial Sequence: Synthetic oligonucleotide
agcuauaacuuacucacag

SEQ ID NO: 801410 - RNA, 19 nt, Artificial Sequence
  Description of Artificial Sequence: Synthetic oligonucleotide
uaauagaacugacagucga

SEQ ID NO: 801411 - RNA, 19 nt, Artificial Sequence
  Description of Artificial Sequence: Synthetic oligonucleotide
ugugaguugaagcuuuuca

SEQ ID NO: 801412 - RNA, 19 nt, Artificial Sequence
  Description of Artificial Sequence: Synthetic oligonucleotide
auuuaauaggagcauucag

SEQ ID NO: 801413 - RNA, 19 nt, Artificial Sequence
  Description of Artificial Sequence: Synthetic oligonucleotide
uuauggauaacaagaugug

SEQ ID NO: 801414 - RNA, 19 nt, Artificial Sequence
  Description of Artificial Sequence: Synthetic oligonucleotide
cuggguuacgacaauaagc

SEQ ID NO: 801415 - RNA, 19 nt, Artificial Sequence
  Description of Artificial Sequence: Synthetic oligonucleotide
uucggagagagcuuaauga

SEQ ID NO: 801416 - RNA, 19 nt, Artificial Sequence
  Description of Artificial Sequence: Synthetic oligonucleotide
ggugaaaacacugagcgcg

SEQ ID NO: 801417 - RNA, 19 nt, Artificial Sequence
  Description of Artificial Sequence: Synthetic oligonucleotide
guuacgacaauaagcaagg

SEQ ID NO: 801418 - RNA, 19 nt, Artificial Sequence
  Description of Artificial Sequence: Synthetic oligonucleotide
uauaucacauucuuauacu

SEQ ID NO: 801419 - RNA, 19 nt, Artificial Sequence
  Description of Artificial Sequence: Synthetic oligonucleotide
acgacaauaagcaagguca

SEQ ID NO: 801420 - RNA, 19 nt, Artificial Sequence
  Description of Artificial Sequence: Synthetic oligonucleotide
aaugagugggguccgacca

SEQ ID NO: 801421 - RNA, 19 nt, Artificial Sequence
  Description of Artificial Sequence: Synthetic oligonucleotide
ucuacauguguucuacacc

SEQ ID NO: 801422 - RNA, 19 nt, Artificial Sequence
  Description of Artificial Sequence: Synthetic oligonucleotide
caauccuaagugcagagag

SEQ ID NO: 801423 - RNA, 19 nt, Artificial Sequence
  Description of Artificial Sequence: Synthetic oligonucleotide
ugaccgaacucauauagga

SEQ ID NO: 801424 - RNA, 19 nt, Artificial Sequence
  Description of Artificial Sequence: Synthetic oligonucleotide
auaagguaaauacuuucca

SEQ ID NO: 801425 - RNA, 19 nt, Artificial Sequence
  Description of Artificial Sequence: Synthetic oligonucleotide
aaaacacugagcgcgcgcg

SEQ ID NO: 801426 - RNA, 19 nt, Artificial Sequence
  Description of Artificial Sequence: Synthetic oligonucleotide
cauuaucuaagucacagca

SEQ ID NO: 801427 - RNA, 19 nt, Artificial Sequence
  Description of Artificial Sequence: Synthetic oligonucleotide
uuggacacuacucaucuuc

SEQ ID NO: 801428 - RNA, 19 nt, Artificial Sequence
  Description of Artificial Sequence: Synthetic oligonucleotide
ucgagaguacuauauacac

SEQ ID NO: 801429 - RNA, 19 nt, Artificial Sequence
  Description of Artificial Sequence: Synthetic oligonucleotide
uaggccauaauaucauugc

SEQ ID NO: 801430 - RNA, 19 nt, Artificial Sequence
  Description of Artificial Sequence: Synthetic oligonucleotide
ugacacaugaaaugggaac

SEQ ID NO: 801431 - RNA, 19 nt, Artificial Sequence
  Description of Artificial Sequence: Synthetic oligonucleotide
ucaauaccuguauuuaaga

SEQ ID NO: 801432 - RNA, 19 nt, Artificial Sequence
  Description of Artificial Sequence: Synthetic oligonucleotide
ucggagagagcuuaaugag

SEQ ID NO: 801433 - RNA, 19 nt, Artificial Sequence
  Description of Artificial Sequence: Synthetic oligonucleotide
uccaaauggaccgaugagc

SEQ ID NO: 801434 - RNA, 19 nt, Artificial Sequence
  Description of Artificial Sequence: Synthetic oligonucleotide
aauauaucacauucuuaua

SEQ ID NO: 801435 - RNA, 19 nt, Artificial Sequence
  Description of Artificial Sequence: Synthetic oligonucleotide
uaagguaaauacuuuccaa

SEQ ID NO: 801436 - RNA, 19 nt, Artificial Sequence
  Description of Artificial Sequence: Synthetic oligonucleotide
ucuacugcauacacuaaaa

SEQ ID NO: 801437 - RNA, 19 nt, Artificial Sequence
  Description of Artificial Sequence: Synthetic oligonucleotide
gacaugacucaauagcaac

SEQ ID NO: 801438 - RNA, 19 nt, Artificial Sequence
  Description of Artificial Sequence: Synthetic oligonucleotide
aacaacuagauggauggga

SEQ ID NO: 801439 - RNA, 19 nt, Artificial Sequence
  Description of Artificial Sequence: Synthetic oligonucleotide
gaacugacagucgauaaug

SEQ ID NO: 801440 - RNA, 19 nt, Artificial Sequence
  Description of Artificial Sequence: Synthetic oligonucleotide
aacucauauaggaaacaag

SEQ ID NO: 801441 - RNA, 19 nt, Artificial Sequence
  Description of Artificial Sequence: Synthetic oligonucleotide
caaacauaauagaacugac

SEQ ID NO: 801442 - RNA, 19 nt, Artificial Sequence
  Description of Artificial Sequence: Synthetic oligonucleotide
uguuauacuccugcaggcg

SEQ ID NO: 801443 - RNA, 19 nt, Artificial Sequence
  Description of Artificial Sequence: Synthetic oligonucleotide
acagacauacauucaccuc

SEQ ID NO: 801444 - RNA, 19 nt, Artificial Sequence
  Description of Artificial Sequence: Synthetic oligonucleotide
uacgacaauaagcaagguc

SEQ ID NO: 801445 - RNA, 19 nt, Artificial Sequence
  Description of Artificial Sequence: Synthetic oligonucleotide
ucaugugcccucugcaggg

SEQ ID NO: 801446 - RNA, 19 nt, Artificial Sequence
  Description of Artificial Sequence: Synthetic oligonucleotide
ugugacuggguuacgacaa

SEQ ID NO: 801447 - RNA, 19 nt, Artificial Sequence
  Description of Artificial Sequence: Synthetic oligonucleotide
guuguauuccacaggacag

SEQ ID NO: 801448 - RNA, 19 nt, Artificial Sequence
  Description of Artificial Sequence: Synthetic oligonucleotide
ugaucuggccgcaacguca

SEQ ID NO: 801449 - RNA, 19 nt, Artificial Sequence
  Description of Artificial Sequence: Synthetic oligonucleotide
aauaggucagauggcucac

SEQ ID NO: 801450 - RNA, 19 nt, Artificial Sequence
  Description of Artificial Sequence: Synthetic oligonucleotide
uucuacugcauacacuaaa

SEQ ID NO: 801451 - RNA, 19 nt, Artificial Sequence
  Description of Artificial Sequence: Synthetic oligonucleotide
auuccuucaaacaaguuau

SEQ ID NO: 801452 - RNA, 19 nt, Artificial Sequence
  Description of Artificial Sequence: Synthetic oligonucleotide
aaacacugagcgcgcgcgc

SEQ ID NO: 801453 - RNA, 19 nt, Artificial Sequence
  Description of Artificial Sequence: Synthetic oligonucleotide
uacccagacaucacauagg

SEQ ID NO: 801454 - RNA, 19 nt, Artificial Sequence
  Description of Artificial Sequence: Synthetic oligonucleotide
cacacacacacacacacac

SEQ ID NO: 801455 - RNA, 19 nt, Artificial Sequence
  Description of Artificial Sequence: Synthetic oligonucleotide
acauaauagaacugacagu

SEQ ID NO: 801456 - RNA, 19 nt, Artificial Sequence
  Description of Artificial Sequence: Synthetic oligonucleotide
caauauaucacauucuuau

SEQ ID NO: 801457 - RNA, 19 nt, Artificial Sequence
  Description of Artificial Sequence: Synthetic oligonucleotide
agggugugugaaccgaagc

SEQ ID NO: 801458 - RNA, 19 nt, Artificial Sequence
  Description of Artificial Sequence: Synthetic oligonucleotide
cagccaaacauaauagaac

SEQ ID NO: 801459 - RNA, 19 nt, Artificial Sequence
  Description of Artificial Sequence: Synthetic oligonucleotide
cacuacucaucuuccaagg

SEQ ID NO: 801460 - RNA, 19 nt, Artificial Sequence
  Description of Artificial Sequence: Synthetic oligonucleotide
aacgucagaaacugcugga

SEQ ID NO: 801461 - RNA, 19 nt, Artificial Sequence
  Description of Artificial Sequence: Synthetic oligonucleotide
uaucuaagucacagcaucu

SEQ ID NO: 801462 - RNA, 19 nt, Artificial Sequence
  Description of Artificial Sequence: Synthetic oligonucleotide
agcauucagguauauaaau

SEQ ID NO: 801463 - RNA, 19 nt, Artificial Sequence
  Description of Artificial Sequence: Synthetic oligonucleotide
gguuacgacaauaagcaag

SEQ ID NO: 801464 - RNA, 19 nt, Artificial Sequence
  Description of Artificial Sequence: Synthetic oligonucleotide
uauaggaaacaagugacuu

SEQ ID NO: 801465 - RNA, 19 nt, Artificial Sequence
  Description of Artificial Sequence: Synthetic oligonucleotide
caacgucagaaacugcugg

SEQ ID NO: 801466 - RNA, 19 nt, Artificial Sequence
  Description of Artificial Sequence: Synthetic oligonucleotide
uacugugcugaaaaggaau

SEQ ID NO: 801467 - RNA, 19 nt, Artificial Sequence
  Description of Artificial Sequence: Synthetic oligonucleotide
uuugggccccuaauaaagc

SEQ ID NO: 801468 - RNA, 19 nt, Artificial Sequence
  Description of Artificial Sequence: Synthetic oligonucleotide
aggguuuuggcuuggacaa

SEQ ID NO: 801469 - RNA, 19 nt, Artificial Sequence
  Description of Artificial Sequence: Synthetic oligonucleotide
aucagugagccucccuccc

SEQ ID NO: 801470 - RNA, 19 nt, Artificial Sequence
  Description of Artificial Sequence: Synthetic oligonucleotide
acagugaagcuguuggugu

SEQ ID NO: 801471 - RNA, 19 nt, Artificial Sequence
  Description of Artificial Sequence: Synthetic oligonucleotide
acuggguuacgacaauaag

SEQ ID NO: 801472 - RNA, 19 nt, Artificial Sequence
  Description of Artificial Sequence: Synthetic oligonucleotide
acauacauucaccucgaga

SEQ ID NO: 801473 - RNA, 19 nt, Artificial Sequence
  Description of Artificial Sequence: Synthetic oligonucleotide
ccacauuauaaacagacug

SEQ ID NO: 801474 - RNA, 19 nt, Artificial Sequence
  Description of Artificial Sequence: Synthetic oligonucleotide
uggacacuacucaucuucc

SEQ ID NO: 801475 - RNA, 19 nt, Artificial Sequence
  Description of Artificial Sequence: Synthetic oligonucleotide
ccaaauggaccgaugagcg

SEQ ID NO: 801476 - RNA, 19 nt, Artificial Sequence
  Description of Artificial Sequence: Synthetic oligonucleotide
guuugggccccuaauaaag

SEQ ID NO: 801477 - RNA, 19 nt, Artificial Sequence
  Description of Artificial Sequence: Synthetic oligonucleotide
acaacuagauggaugggag

SEQ ID NO: 801478 - RNA, 19 nt, Artificial Sequence
  Description of Artificial Sequence: Synthetic oligonucleotide
acacacacacacauuaauc

SEQ ID NO: 801479 - RNA, 19 nt, Artificial Sequence
  Description of Artificial Sequence: Synthetic oligonucleotide
ugacaugacucaauagcaa

SEQ ID NO: 801480 - RNA, 19 nt, Artificial Sequence
  Description of Artificial Sequence: Synthetic oligonucleotide
aacaaguuauggauaacaa

SEQ ID NO: 801481 - RNA, 19 nt, Artificial Sequence
  Description of Artificial Sequence: Synthetic oligonucleotide
aagcgauccaugaugccuc

SEQ ID NO: 801482 - RNA, 19 nt, Artificial Sequence
  Description of Artificial Sequence: Synthetic oligonucleotide
uacuagucagacacagaug

SEQ ID NO: 801483 - RNA, 19 nt, Artificial Sequence
  Description of Artificial Sequence: Synthetic oligonucleotide
acacggugaaaacacugag

SEQ ID NO: 801484 - RNA, 19 nt, Artificial Sequence
  Description of Artificial Sequence: Synthetic oligonucleotide
agaugaaugcaugaccucu

SEQ ID NO: 801485 - RNA, 19 nt, Artificial Sequence
  Description of Artificial Sequence: Synthetic oligonucleotide
cuacaccaauccuaagugc

SEQ ID NO: 801486 - RNA, 19 nt, Artificial Sequence
  Description of Artificial Sequence: Synthetic oligonucleotide
ccagacaucacauaggaga

SEQ ID NO: 801487 - RNA, 19 nt, Artificial Sequence
  Description of Artificial Sequence: Synthetic oligonucleotide
augacaugacucaauagca

SEQ ID NO: 801488 - RNA, 19 nt, Artificial Sequence
  Description of Artificial Sequence: Synthetic oligonucleotide
auaggccauaauaucauug

SEQ ID NO: 801489 - RNA, 19 nt, Artificial Sequence
  Description of Artificial Sequence: Synthetic oligonucleotide
ucuacuagucagacacaga

SEQ ID NO: 801490 - RNA, 19 nt, Artificial Sequence
  Description of Artificial Sequence: Synthetic oligonucleotide
cucuacuagucagacacag

SEQ ID NO: 801491 - RNA, 19 nt, Artificial Sequence
  Description of Artificial Sequence: Synthetic oligonucleotide
uccgugaccaggaauggua

SEQ ID NO: 801492 - RNA, 19 nt, Artificial Sequence
  Description of Artificial Sequence: Synthetic oligonucleotide
aaaggcucguuugaaucca

SEQ ID NO: 801493 - RNA, 19 nt, Artificial Sequence
  Description of Artificial Sequence: Synthetic oligonucleotide
uucaugcuuucugagaaaa

SEQ ID NO: 801494 - RNA, 19 nt, Artificial Sequence
  Description of Artificial Sequence: Synthetic oligonucleotide
ugagcgaagcaaaggugga

SEQ ID NO: 801495 - RNA, 19 nt, Artificial Sequence
  Description of Artificial Sequence: Synthetic oligonucleotide
auagcaacaggaugaccga

SEQ ID NO: 801496 - RNA, 19 nt, Artificial Sequence
  Description of Artificial Sequence: Synthetic oligonucleotide
augugacuggguuacgaca

SEQ ID NO: 801497 - RNA, 19 nt, Artificial Sequence
  Description of Artificial Sequence: Synthetic oligonucleotide
uccccggaagaacucagca

SEQ ID NO: 801498 - RNA, 19 nt, Artificial Sequence
  Description of Artificial Sequence: Synthetic oligonucleotide
cuucggagagagcuuaaug

SEQ ID NO: 801499 - RNA, 19 nt, Artificial Sequence
  Description of Artificial Sequence: Synthetic oligonucleotide
uaccuguauuuaagaaacc

SEQ ID NO: 801500 - RNA, 19 nt, Artificial Sequence
  Description of Artificial Sequence: Synthetic oligonucleotide
ugggccccuaauaaagcug

SEQ ID NO: 801501 - RNA, 19 nt, Artificial Sequence
  Description of Artificial Sequence: Synthetic oligonucleotide
ugggguccgaccaaagaaa

SEQ ID NO: 801502 - RNA, 19 nt, Artificial Sequence
  Description of Artificial Sequence: Synthetic oligonucleotide
cuagauggaugggaguuag

SEQ ID NO: 801503 - RNA, 19 nt, Artificial Sequence
  Description of Artificial Sequence: Synthetic oligonucleotide
gccauaauaucauugcaga

SEQ ID NO: 801504 - RNA, 19 nt, Artificial Sequence
  Description of Artificial Sequence: Synthetic oligonucleotide
gguauuggcaaagucuuug

SEQ ID NO: 801505 - RNA, 19 nt, Artificial Sequence
  Description of Artificial Sequence: Synthetic oligonucleotide
caacugacuggaucacucc

SEQ ID NO: 801506 - RNA, 19 nt, Artificial Sequence
  Description of Artificial Sequence: Synthetic oligonucleotide
uaacuuacucacagcccac

SEQ ID NO: 801507 - RNA, 19 nt, Artificial Sequence
  Description of Artificial Sequence: Synthetic oligonucleotide
caauaccuguauuuaagaa

SEQ ID NO: 801508 - RNA, 19 nt, Artificial Sequence
  Description of Artificial Sequence: Synthetic oligonucleotide
gugaccugcccucacucag

SEQ ID NO: 801509 - RNA, 19 nt, Artificial Sequence
  Description of Artificial Sequence: Synthetic oligonucleotide
cacacacacacacacauua

SEQ ID NO: 801510 - RNA, 19 nt, Artificial Sequence
  Description of Artificial Sequence: Synthetic oligonucleotide
augaccgaacucauauagg

SEQ ID NO: 801511 - RNA, 19 nt, Artificial Sequence
  Description of Artificial Sequence: Synthetic oligonucleotide
ggcaacacugucuuucaug

SEQ ID NO: 801512 - RNA, 19 nt, Artificial Sequence
  Description of Artificial Sequence: Synthetic oligonucleotide
uggaucaguuugcuugggu

SEQ ID NO: 801513 - RNA, 19 nt, Artificial Sequence
  Description of Artificial Sequence: Synthetic oligonucleotide
auauaggccauaauaucau

SEQ ID NO: 801514 - RNA, 19 nt, Artificial Sequence
  Description of Artificial Sequence: Synthetic oligonucleotide
uucaccucgagaguacuau

SEQ ID NO: 801515 - RNA, 19 nt, Artificial Sequence
  Description of Artificial Sequence: Synthetic oligonucleotide
auucuuauacugugcugaa

SEQ ID NO: 801516 - RNA, 19 nt, Artificial Sequence
  Description of Artificial Sequence: Synthetic oligonucleotide
gaacaacuagauggauggg

SEQ ID NO: 801517 - RNA, 19 nt, Artificial Sequence
  Description of Artificial Sequence: Synthetic oligonucleotide
augaccucucauacagccc

SEQ ID NO: 801518 - RNA, 19 nt, Artificial Sequence
  Description of Artificial Sequence: Synthetic oligonucleotide
ugcaggcggaauaggucag

SEQ ID NO: 801519 - RNA, 19 nt, Artificial Sequence
  Description of Artificial Sequence: Synthetic oligonucleotide
cuacuagucagacacagau

SEQ ID NO: 801520 - RNA, 19 nt, Artificial Sequence
  Description of Artificial Sequence: Synthetic oligonucleotide
aacuuacucacagcccaca

SEQ ID NO: 801521 - RNA, 19 nt, Artificial Sequence
  Description of Artificial Sequence: Synthetic oligonucleotide
gcuauaacuuacucacagc

SEQ ID NO: 801522 - RNA, 19 nt, Artificial Sequence
  Description of Artificial Sequence: Synthetic oligonucleotide
uuaaugagugggguccgac

SEQ ID NO: 801523 - RNA, 19 nt, Artificial Sequence
  Description of Artificial Sequence: Synthetic oligonucleotide
aagggugugugaaccgaag

SEQ ID NO: 801524 - RNA, 19 nt, Artificial Sequence
  Description of Artificial Sequence: Synthetic oligonucleotide
agaguacuauauacacaac

SEQ ID NO: 801525 - RNA, 19 nt, Artificial Sequence
  Description of Artificial Sequence: Synthetic oligonucleotide
acauucaccucgagaguac

SEQ ID NO: 801526 - RNA, 19 nt, Artificial Sequence
  Description of Artificial Sequence: Synthetic oligonucleotide
ccaacaacugacuggauca

SEQ ID NO: 801527 - RNA, 19 nt, Artificial Sequence
  Description of Artificial Sequence: Synthetic oligonucleotide
gacacggugaaaacacuga

SEQ ID NO: 801528 - RNA, 19 nt, Artificial Sequence
  Description of Artificial Sequence: Synthetic oligonucleotide
uauaggccauaauaucauu

SEQ ID NO: 801529 - RNA, 19 nt, Artificial Sequence
  Description of Artificial Sequence: Synthetic oligonucleotide
uguggucuacaggaccucc

SEQ ID NO: 801530 - RNA, 19 nt, Artificial Sequence
  Description of Artificial Sequence: Synthetic oligonucleotide
agcgaagcaaagguggaga

SEQ ID NO: 801531 - RNA, 19 nt, Artificial Sequence
  Description of Artificial Sequence: Synthetic oligonucleotide
acacugagcgcgcgcgcgc

SEQ ID NO: 801532 - RNA, 19 nt, Artificial Sequence
  Description of Artificial Sequence: Synthetic oligonucleotide
cuuugcaacucaaagcuau

SEQ ID NO: 801533 - RNA, 19 nt, Artificial Sequence
  Description of Artificial Sequence: Synthetic oligonucleotide
ccucgagaguacuauauac

SEQ ID NO: 801534 - RNA, 19 nt, Artificial Sequence
  Description of Artificial Sequence: Synthetic oligonucleotide
caaagcgauccaugaugcc

SEQ ID NO: 801535 - RNA, 19 nt, Artificial Sequence
  Description of Artificial Sequence: Synthetic oligonucleotide
cugcaggcggaauagguca

SEQ ID NO: 801536 - RNA, 19 nt, Artificial Sequence
  Description of Artificial Sequence: Synthetic oligonucleotide
gaucuggccgcaacgucag

SEQ ID NO: 801537 - RNA, 19 nt, Artificial Sequence
  Description of Artificial Sequence: Synthetic oligonucleotide
ucucucuacuagucagaca

SEQ ID NO: 801538 - RNA, 19 nt, Artificial Sequence
  Description of Artificial Sequence: Synthetic oligonucleotide
uggccgcaacgucagaaac

SEQ ID NO: 801539 - RNA, 19 nt, Artificial Sequence
  Description of Artificial Sequence: Synthetic oligonucleotide
gcccuugucagucagguga

SEQ ID NO: 801540 - RNA, 19 nt, Artificial Sequence
  Description of Artificial Sequence: Synthetic oligonucleotide
gcucguuugaauccacuug

SEQ ID NO: 801541 - RNA, 19 nt, Artificial Sequence
  Description of Artificial Sequence: Synthetic oligonucleotide
gacauacauucaccucgag

SEQ ID NO: 801542 - RNA, 19 nt, Artificial Sequence
  Description of Artificial Sequence: Synthetic oligonucleotide
gugcugaaaaggaaucuac

SEQ ID NO: 801543 - RNA, 19 nt, Artificial Sequence
  Description of Artificial Sequence: Synthetic oligonucleotide
ggacaagaugcucauguga

SEQ ID NO: 801544 - RNA, 19 nt, Artificial Sequence
  Description of Artificial Sequence: Synthetic oligonucleotide
uauuacacuguggguuucu

SEQ ID NO: 801545 - RNA, 19 nt, Artificial Sequence
  Description of Artificial Sequence: Synthetic oligonucleotide
gguccagccaaacauaaua

SEQ ID NO: 801546 - RNA, 19 nt, Artificial Sequence
  Description of Artificial Sequence: Synthetic oligonucleotide
guaggacacggugaaaaca

SEQ ID NO: 801547 - RNA, 19 nt, Artificial Sequence
  Description of Artificial Sequence: Synthetic oligonucleotide
gaaccgaagcccucugcuc

SEQ ID NO: 801548 - RNA, 19 nt, Artificial Sequence
  Description of Artificial Sequence: Synthetic oligonucleotide
ugugugaaccgaagcccuc

SEQ ID NO: 801549 - RNA, 19 nt, Artificial Sequence
  Description of Artificial Sequence: Synthetic oligonucleotide
aaggcucguuugaauccac

SEQ ID NO: 801550 - RNA, 19 nt, Artificial Sequence
  Description of Artificial Sequence: Synthetic oligonucleotide
uuggugucauuguuguauu

SEQ ID NO: 801551 - RNA, 19 nt, Artificial Sequence
  Description of Artificial Sequence: Synthetic oligonucleotide
uuggugaccugcccucacu

SEQ ID NO: 801552 - RNA, 19 nt, Artificial Sequence
  Description of Artificial Sequence: Synthetic oligonucleotide
gacaagaugcucaugugau

SEQ ID NO: 801553 - RNA, 19 nt, Artificial Sequence
  Description of Artificial Sequence: Synthetic oligonucleotide
gcaaagggugugugaaccg

SEQ ID NO: 801554 - RNA, 19 nt, Artificial Sequence
  Description of Artificial Sequence: Synthetic oligonucleotide
ggaauguuauacuccugca

SEQ ID NO: 801555 - RNA, 19 nt, Artificial Sequence
  Description of Artificial Sequence: Synthetic oligonucleotide
ugcgacuucuuugcaacuc

SEQ ID NO: 801556 - RNA, 19 nt, Artificial Sequence
  Description of Artificial Sequence: Synthetic oligonucleotide
gagcgaagcaaagguggag

SEQ ID NO: 801557 - RNA, 19 nt, Artificial Sequence
  Description of Artificial Sequence: Synthetic oligonucleotide
gaucaguuugcuuggguuu

SEQ ID NO: 801558 - RNA, 19 nt, Artificial Sequence
  Description of Artificial Sequence: Synthetic oligonucleotide
acuugcgaagaacccucca

SEQ ID NO: 801559 - RNA, 19 nt, Artificial Sequence
  Description of Artificial Sequence: Synthetic oligonucleotide
cuugcgaagaacccuccaa

SEQ ID NO: 801560 - RNA, 19 nt, Artificial Sequence
  Description of Artificial Sequence: Synthetic oligonucleotide
gagcauucagguauauaaa

SEQ ID NO: 801561 - RNA, 19 nt, Artificial Sequence
  Description of Artificial Sequence: Synthetic oligonucleotide
gggccccuaauaaagcugg

SEQ ID NO: 801562 - RNA, 19 nt, Artificial Sequence
  Description of Artificial Sequence: Synthetic oligonucleotide
auaaaccauaucauuccuu

SEQ ID NO: 801563 - RNA, 19 nt, Artificial Sequence
  Description of Artificial Sequence: Synthetic oligonucleotide
caauguacacauugacaaa

SEQ ID NO: 801564 - RNA, 19 nt, Artificial Sequence
  Description of Artificial Sequence: Synthetic oligonucleotide
gacuggguuacgacaauaa

SEQ ID NO: 801565 - RNA, 19 nt, Artificial Sequence
  Description of Artificial Sequence: Synthetic oligonucleotide
cagccaacaacugacugga

SEQ ID NO: 801566 - RNA, 19 nt, Artificial Sequence
  Description of Artificial Sequence: Synthetic oligonucleotide
gugaaaacacugagcgcgc

SEQ ID NO: 801567 - RNA, 19 nt, Artificial Sequence
  Description of Artificial Sequence: Synthetic oligonucleotide
gguaggacacggugaaaac

SEQ ID NO: 801568 - RNA, 19 nt, Artificial Sequence
  Description of Artificial Sequence: Synthetic oligonucleotide
agacauacauucaccucga

SEQ ID NO: 801569 - RNA, 19 nt, Artificial Sequence
  Description of Artificial Sequence: Synthetic oligonucleotide
gcucaugugaucagugagc

SEQ ID NO: 801570 - RNA, 19 nt, Artificial Sequence
  Description of Artificial Sequence: Synthetic oligonucleotide
aggcggaauaggucagaug

SEQ ID NO: 801571 - RNA, 19 nt, Artificial Sequence
  Description of Artificial Sequence: Synthetic oligonucleotide
accucgagaguacuauaua

SEQ ID NO: 801572 - RNA, 19 nt, Artificial Sequence
  Description of Artificial Sequence: Synthetic oligonucleotide
gcgaagcaaagguggagag

SEQ ID NO: 801573 - RNA, 19 nt, Artificial Sequence
  Description of Artificial Sequence: Synthetic oligonucleotide
uggguuggcccaugacaug

SEQ ID NO: 801574 - RNA, 19 nt, Artificial Sequence
  Description of Artificial Sequence: Synthetic oligonucleotide
gguuggacacuacucaucu

SEQ ID NO: 801575 - RNA, 19 nt, Artificial Sequence
  Description of Artificial Sequence: Synthetic oligonucleotide
ucacauggguccagccaaa

SEQ ID NO: 801576 - RNA, 19 nt, Artificial Sequence
  Description of Artificial Sequence: Synthetic oligonucleotide
acugagcgcgcgcgcgcgc

SEQ ID NO: 801577 - RNA, 19 nt, Artificial Sequence
  Description of Artificial Sequence: Synthetic oligonucleotide
cacacacacacacacacau

SEQ ID NO: 801578 - RNA, 19 nt, Artificial Sequence
  Description of Artificial Sequence: Synthetic oligonucleotide
uuacgacaauaagcaaggu

SEQ ID NO: 801579 - RNA, 19 nt, Artificial Sequence
  Description of Artificial Sequence: Synthetic oligonucleotide
ucaccucgagaguacuaua

SEQ ID NO: 801580 - RNA, 19 nt, Artificial Sequence
  Description of Artificial Sequence: Synthetic oligonucleotide
ugugaucagugagccuccc

SEQ ID NO: 801581 - RNA, 19 nt, Artificial Sequence
  Description of Artificial Sequence: Synthetic oligonucleotide
gccgcaacgucagaaacug

SEQ ID NO: 801582 - RNA, 19 nt, Artificial Sequence
  Description of Artificial Sequence: Synthetic oligonucleotide
gcuguggaucuggaaaggg

SEQ ID NO: 801583 - RNA, 19 nt, Artificial Sequence
  Description of Artificial Sequence: Synthetic oligonucleotide
gauugugaguugaagcuuu

SEQ ID NO: 801584 - RNA, 19 nt, Artificial Sequence
  Description of Artificial Sequence: Synthetic oligonucleotide
caagugggcuuccaggcaa

SEQ ID NO: 801585 - RNA, 19 nt, Artificial Sequence
  Description of Artificial Sequence: Synthetic oligonucleotide
caacaacugacuggaucac

SEQ ID NO: 801586 - RNA, 19 nt, Artificial Sequence
  Description of Artificial Sequence: Synthetic oligonucleotide
ugacuggguuacgacaaua

SEQ ID NO: 801587 - RNA, 19 nt, Artificial Sequence
  Description of Artificial Sequence: Synthetic oligonucleotide
caaauggaccgaugagcga

SEQ ID NO: 801588 - RNA, 19 nt, Artificial Sequence
  Description of Artificial Sequence: Synthetic oligonucleotide
auacugugcugaaaaggaa

SEQ ID NO: 801589 - RNA, 19 nt, Artificial Sequence
  Description of Artificial Sequence: Synthetic oligonucleotide
gccuccgugaccaggaaug

SEQ ID NO: 801590 - RNA, 19 nt, Artificial Sequence
  Description of Artificial Sequence: Synthetic oligonucleotide
cgcacacacacacacacac

SEQ ID NO: 801591 - RNA, 19 nt, Artificial Sequence
  Description of Artificial Sequence: Synthetic oligonucleotide
ggucacauggguccagcca

SEQ ID NO: 801592 - RNA, 19 nt, Artificial Sequence
  Description of Artificial Sequence: Synthetic oligonucleotide
caaagggugugugaaccga

SEQ ID NO: 801593 - RNA, 19 nt, Artificial Sequence
  Description of Artificial Sequence: Synthetic oligonucleotide
gguuuuggcuuggacaaga

SEQ ID NO: 801594 - RNA, 19 nt, Artificial Sequence
  Description of Artificial Sequence: Synthetic oligonucleotide
acgucagaaacugcuggau

SEQ ID NO: 801595 - RNA, 19 nt, Artificial Sequence
  Description of Artificial Sequence: Synthetic oligonucleotide
ugcccuugucagucaggug

SEQ ID NO: 801596 - RNA, 19 nt, Artificial Sequence
  Description of Artificial Sequence: Synthetic oligonucleotide
ugccuccgugaccaggaau

SEQ ID NO: 801597 - RNA, 19 nt, Artificial Sequence
  Description of Artificial Sequence: Synthetic oligonucleotide
aguccccggaagaacucag

SEQ ID NO: 801598 - RNA, 19 nt, Artificial Sequence
  Description of Artificial Sequence: Synthetic oligonucleotide
cuagucagacacagaugaa

SEQ ID NO: 801599 - RNA, 19 nt, Artificial Sequence
  Description of Artificial Sequence: Synthetic oligonucleotide
ggaccgaugagcgaagcaa

SEQ ID NO: 801600 - RNA, 19 nt, Artificial Sequence
  Description of Artificial Sequence: Synthetic oligonucleotide
gaagguugugacaguacau

SEQ ID NO: 801601 - RNA, 19 nt, Artificial Sequence
  Description of Artificial Sequence: Synthetic oligonucleotide
cagugagccucccucccuc

SEQ ID NO: 801602 - RNA, 19 nt, Artificial Sequence
  Description of Artificial Sequence: Synthetic oligonucleotide
aggccucagcucugaaaga

SEQ ID NO: 801603 - RNA, 19 nt, Artificial Sequence
  Description of Artificial Sequence: Synthetic oligonucleotide
acacacacacacacacaca

SEQ ID NO: 801604 - RNA, 19 nt, Artificial Sequence
  Description of Artificial Sequence: Synthetic oligonucleotide
ggaaucuacauguguucua

SEQ ID NO: 801605 - RNA, 19 nt, Artificial Sequence
  Description of Artificial Sequence: Synthetic oligonucleotide
ucccugcgacuucuuugca

SEQ ID NO: 801606 - RNA, 19 nt, Artificial Sequence
  Description of Artificial Sequence: Synthetic oligonucleotide
cacacacacacacauuaau

SEQ ID NO: 801607 - RNA, 19 nt, Artificial Sequence
  Description of Artificial Sequence: Synthetic oligonucleotide
ggaauaggucagauggcuc

SEQ ID NO: 801608 - RNA, 19 nt, Artificial Sequence
  Description of Artificial Sequence: Synthetic oligonucleotide
ggaugggaguuagaacccc

SEQ ID NO: 801609 - RNA, 19 nt, Artificial Sequence
  Description of Artificial Sequence: Synthetic oligonucleotide
cuucuucggagagagcuua

SEQ ID NO: 801610 - RNA, 19 nt, Artificial Sequence
  Description of Artificial Sequence: Synthetic oligonucleotide
acacacacacacacauuaa

SEQ ID NO: 801611 - RNA, 19 nt, Artificial Sequence
  Description of Artificial Sequence: Synthetic oligonucleotide
agcgcgcgcgcgcgcacac

SEQ ID NO: 801612 - RNA, 19 nt, Artificial Sequence
  Description of Artificial Sequence: Synthetic oligonucleotide
gaguccccggaagaacuca

SEQ ID NO: 801613 - RNA, 19 nt, Artificial Sequence
  Description of Artificial Sequence: Synthetic oligonucleotide
cgcgcacacacacacacac

SEQ ID NO: 801614 - RNA, 19 nt, Artificial Sequence
  Description of Artificial Sequence: Synthetic oligonucleotide
auaggagcauucagguaua

SEQ ID NO: 801615 - RNA, 19 nt, Artificial Sequence
  Description of Artificial Sequence: Synthetic oligonucleotide
gguugugacaguacauucu

SEQ ID NO: 801616 - RNA, 19 nt, Artificial Sequence
  Description of Artificial Sequence: Synthetic oligonucleotide
uccuuuuggguuggcccau

SEQ ID NO: 801617 - RNA, 19 nt, Artificial Sequence
  Description of Artificial Sequence: Synthetic oligonucleotide
ggaucaguuugcuuggguu

SEQ ID NO: 801618 - RNA, 19 nt, Artificial Sequence
  Description of Artificial Sequence: Synthetic oligonucleotide
cacugagcgcgcgcgcgcg

SEQ ID NO: 801619 - RNA, 19 nt, Artificial Sequence
  Description of Artificial Sequence: Synthetic oligonucleotide
caccucgagaguacuauau

SEQ ID NO: 801620 - RNA, 19 nt, Artificial Sequence
  Description of Artificial Sequence: Synthetic oligonucleotide
caacuagauggaugggagu

SEQ ID NO: 801621 - RNA, 19 nt, Artificial Sequence
  Description of Artificial Sequence: Synthetic oligonucleotide
cuggccgcaacgucagaaa

SEQ ID NO: 801622 - RNA, 19 nt, Artificial Sequence
  Description of Artificial Sequence: Synthetic oligonucleotide
cuuaaugagugggguccga

SEQ ID NO: 801623 - RNA, 19 nt, Artificial Sequence
  Description of Artificial Sequence: Synthetic oligonucleotide
cagacuguauauacagauu

SEQ ID NO: 801624 - RNA, 19 nt, Artificial Sequence
  Description of Artificial Sequence: Synthetic oligonucleotide
cuguacccagacaucacau

SEQ ID NO: 801625 - RNA, 19 nt, Artificial Sequence
  Description of Artificial Sequence: Synthetic oligonucleotide
agcaaacccacagcacaua

SEQ ID NO: 801626 - RNA, 19 nt, Artificial Sequence
  Description of Artificial Sequence: Synthetic oligonucleotide
ggugaccugcccucacuca

SEQ ID NO: 801627 - RNA, 19 nt, Artificial Sequence
  Description of Artificial Sequence: Synthetic oligonucleotide
aggagcauucagguauaua

SEQ ID NO: 801628 - RNA, 19 nt, Artificial Sequence
  Description of Artificial Sequence: Synthetic oligonucleotide
uaggagcauucagguauau

SEQ ID NO: 801629 - RNA, 19 nt, Artificial Sequence
  Description of Artificial Sequence: Synthetic oligonucleotide
guccccggaagaacucagc

SEQ ID NO: 801630 - RNA, 19 nt, Artificial Sequence
  Description of Artificial Sequence: Synthetic oligonucleotide
cgagaguacuauauacaca

SEQ ID NO: 801631 - RNA, 19 nt, Artificial Sequence
  Description of Artificial Sequence: Synthetic oligonucleotide
gcggaauaggucagauggc

SEQ ID NO: 801632 - RNA, 19 nt, Artificial Sequence
  Description of Artificial Sequence: Synthetic oligonucleotide
auucaccucgagaguacua

SEQ ID NO: 801633 - RNA, 19 nt, Artificial Sequence
  Description of Artificial Sequence: Synthetic oligonucleotide
gcagcaacacaagugggcu

SEQ ID NO: 801634 - RNA, 19 nt, Artificial Sequence
  Description of Artificial Sequence: Synthetic oligonucleotide
ugagcgcgcgcgcgcgcac

SEQ ID NO: 801635 - RNA, 19 nt, Artificial Sequence
  Description of Artificial Sequence: Synthetic oligonucleotide
ggaugaccgaacucauaua

SEQ ID NO: 801636 - RNA, 19 nt, Artificial Sequence
  Description of Artificial Sequence: Synthetic oligonucleotide
cgcgcgcacacacacacac

SEQ ID NO: 801637 - RNA, 19 nt, Artificial Sequence
  Description of Artificial Sequence: Synthetic oligonucleotide
acacacacacacacacauu

SEQ ID NO: 801638 - RNA, 19 nt, Artificial Sequence
  Description of Artificial Sequence: Synthetic oligonucleotide
ggguuacgacaauaagcaa

SEQ ID NO: 801639 - RNA, 19 nt, Artificial Sequence
  Description of Artificial Sequence: Synthetic oligonucleotide
caucagguacuggcaguca

SEQ ID NO: 801640 - RNA, 19 nt, Artificial Sequence
  Description of Artificial Sequence: Synthetic oligonucleotide
cagaucucugaguguauuu

SEQ ID NO: 801641 - RNA, 19 nt, Artificial Sequence
  Description of Artificial Sequence: Synthetic oligonucleotide
gcaucuguacccagacauc

SEQ ID NO: 801642 - RNA, 19 nt, Artificial Sequence
  Description of Artificial Sequence: Synthetic oligonucleotide
gugugaaccgaagcccucu

SEQ ID NO: 801643 - RNA, 19 nt, Artificial Sequence
  Description of Artificial Sequence: Synthetic oligonucleotide
gccccuaauaaagcuggca

SEQ ID NO: 801644 - RNA, 19 nt, Artificial Sequence
  Description of Artificial Sequence: Synthetic oligonucleotide
gcaaacccacagcacauau

SEQ ID NO: 801645 - RNA, 19 nt, Artificial Sequence
  Description of Artificial Sequence: Synthetic oligonucleotide
gugaucagugagccucccu

SEQ ID NO: 801646 - RNA, 19 nt, Artificial Sequence
  Description of Artificial Sequence: Synthetic oligonucleotide
cgaugagcgaagcaaaggu

SEQ ID NO: 801647 - RNA, 19 nt, Artificial Sequence
  Description of Artificial Sequence: Synthetic oligonucleotide
augccuccgugaccaggaa

SEQ ID NO: 801648 - RNA, 19 nt, Artificial Sequence
  Description of Artificial Sequence: Synthetic oligonucleotide
gggguccgaccaaagaaaa

SEQ ID NO: 801649 - RNA, 19 nt, Artificial Sequence
  Description of Artificial Sequence: Synthetic oligonucleotide
acccuccaaauggaccgau

SEQ ID NO: 801650 - RNA, 19 nt, Artificial Sequence
  Description of Artificial Sequence: Synthetic oligonucleotide
gcacacacacacacacaca

SEQ ID NO: 801651 - RNA, 19 nt, Artificial Sequence
  Description of Artificial Sequence: Synthetic oligonucleotide
ggaguccccggaagaacuc

SEQ ID NO: 801652 - RNA, 19 nt, Artificial Sequence
  Description of Artificial Sequence: Synthetic oligonucleotide
gugacuggguuacgacaau

SEQ ID NO: 801653 - RNA, 19 nt, Artificial Sequence
  Description of Artificial Sequence: Synthetic oligonucleotide
ccgcaacgucagaaacugc

SEQ ID NO: 801654 - RNA, 19 nt, Artificial Sequence
  Description of Artificial Sequence: Synthetic oligonucleotide
ggugagacuugaguguguu

SEQ ID NO: 801655 - RNA, 19 nt, Artificial Sequence
  Description of Artificial Sequence: Synthetic oligonucleotide
ggccgcaacgucagaaacu

SEQ ID NO: 801656 - RNA, 19 nt, Artificial Sequence
  Description of Artificial Sequence: Synthetic oligonucleotide
cugagcgcgcgcgcgcgca

SEQ ID NO: 801657 - RNA, 19 nt, Artificial Sequence
  Description of Artificial Sequence: Synthetic oligonucleotide
caggcggaauaggucagau

SEQ ID NO: 801658 - RNA, 19 nt, Artificial Sequence
  Description of Artificial Sequence: Synthetic oligonucleotide
cuccgugaccaggaauggu

SEQ ID NO: 801659 - RNA, 19 nt, Artificial Sequence
  Description of Artificial Sequence: Synthetic oligonucleotide
gagcgcgcgcgcgcgcaca

SEQ ID NO: 801660 - RNA, 19 nt, Artificial Sequence
  Description of Artificial Sequence: Synthetic oligonucleotide
gcgcacacacacacacaca

SEQ ID NO: 801661 - RNA, 19 nt, Artificial Sequence
  Description of Artificial Sequence: Synthetic oligonucleotide
ccgaagcccucugcucccc

SEQ ID NO: 801662 - RNA, 19 nt, Artificial Sequence
  Description of Artificial Sequence: Synthetic oligonucleotide
cgcgcgcgcgcgcacacac

SEQ ID NO: 801663 - RNA, 19 nt, Artificial Sequence
  Description of Artificial Sequence: Synthetic oligonucleotide
ccgugaccaggaaugguau

SEQ ID NO: 801664 - RNA, 19 nt, Artificial Sequence
  Description of Artificial Sequence: Synthetic oligonucleotide
gcgcgcacacacacacaca

SEQ ID NO: 801665 - RNA, 19 nt, Artificial Sequence
  Description of Artificial Sequence: Synthetic oligonucleotide
ggguccagccaaacauaau

SEQ ID NO: 801666 - RNA, 19 nt, Artificial Sequence
  Description of Artificial Sequence: Synthetic oligonucleotide
gcugggcaacacugucuuu

SEQ ID NO: 801667 - RNA, 19 nt, Artificial Sequence
  Description of Artificial Sequence: Synthetic oligonucleotide
gcgcgcgcacacacacaca

SEQ ID NO: 801668 - RNA, 19 nt, Artificial Sequence
  Description of Artificial Sequence: Synthetic oligonucleotide
gcgcgcgcgcgcacacaca

SEQ ID NO: 801669 - RNA, 19 nt, Artificial Sequence
  Description of Artificial Sequence: Synthetic oligonucleotide
gcgcgcgcgcgcgcacaca

SEQ ID NO: 801670 - RNA, 19 nt, Artificial Sequence
  Description of Artificial Sequence: Synthetic oligonucleotide
ucaaguauaacaaugaacc

SEQ ID NO: 801671 - RNA, 19 nt, Artificial Sequence
  Description of Artificial Sequence: Synthetic oligonucleotide
aaaaccuagaauuccaagc

SEQ ID NO: 801672 - RNA, 19 nt, Artificial Sequence
  Description of Artificial Sequence: Synthetic oligonucleotide
aaagauaugagcagaaagc

SEQ ID NO: 801673 - RNA, 19 nt, Artificial Sequence
  Description of Artificial Sequence: Synthetic oligonucleotide
aaaagauaugagcagaaag

SEQ ID NO: 801674 - RNA, 19 nt, Artificial Sequence
  Description of Artificial Sequence: Synthetic oligonucleotide
uguaguacacauaaaacag

SEQ ID NO: 801675 - RNA, 19 nt, Artificial Sequence
  Description of Artificial Sequence: Synthetic oligonucleotide
ucugaaaaugcacacauag

SEQ ID NO: 801676 - RNA, 19 nt, Artificial Sequence
  Description of Artificial Sequence: Synthetic oligonucleotide
ucuacuagaaauaacaaaa

SEQ ID NO: 801677 - RNA, 19 nt, Artificial Sequence
  Description of Artificial Sequence: Synthetic oligonucleotide
aaucuguucaaguauaaca

SEQ ID NO: 801678 - RNA, 19 nt, Artificial Sequence
  Description of Artificial Sequence: Synthetic oligonucleotide
aaacaaaacaaaacaaaac

SEQ ID NO: 801679 - RNA, 19 nt, Artificial Sequence
  Description of Artificial Sequence: Synthetic oligonucleotide
aacacguacugacaagucc

SEQ ID NO: 801680 - RNA, 19 nt, Artificial Sequence
  Description of Artificial Sequence: Synthetic oligonucleotide
agaaucaggaagaacaucc

SEQ ID NO: 801681 - RNA, 19 nt, Artificial Sequence
  Description of Artificial Sequence: Synthetic oligonucleotide
auaacaaugaaccgugagg

SEQ ID NO: 801682 - RNA, 19 nt, Artificial Sequence
  Description of Artificial Sequence: Synthetic oligonucleotide
ugauauuccggaacaaugg

SEQ ID NO: 801683 - RNA, 19 nt, Artificial Sequence
  Description of Artificial Sequence: Synthetic oligonucleotide
uaagcauaauaguagagcc

SEQ ID NO: 801684 - RNA, 19 nt, Artificial Sequence
  Description of Artificial Sequence: Synthetic oligonucleotide
aucgccauuauucaguaac

SEQ ID NO: 801685 - RNA, 19 nt, Artificial Sequence
  Description of Artificial Sequence: Synthetic oligonucleotide
aguugaacaagaaauaggg

SEQ ID NO: 801686 - RNA, 19 nt, Artificial Sequence
  Description of Artificial Sequence: Synthetic oligonucleotide
cuuguaagcauaauaguag

SEQ ID NO: 801687 - RNA, 19 nt, Artificial Sequence
  Description of Artificial Sequence: Synthetic oligonucleotide
aaaagaaugggugagggga

SEQ ID NO: 801688 - RNA, 19 nt, Artificial Sequence
  Description of Artificial Sequence: Synthetic oligonucleotide
aaaccuagaauuccaagcu

SEQ ID NO: 801689 - RNA, 19 nt, Artificial Sequence
  Description of Artificial Sequence: Synthetic oligonucleotide
cauacguugguacaaaacc

SEQ ID NO: 801690 - RNA, 19 nt, Artificial Sequence
  Description of Artificial Sequence: Synthetic oligonucleotide
ucaucggcaagaaaguagg

SEQ ID NO: 801691 - RNA, 19 nt, Artificial Sequence
  Description of Artificial Sequence: Synthetic oligonucleotide
uccauauuggccuuuuccg

SEQ ID NO: 801692 - RNA, 19 nt, Artificial Sequence
  Description of Artificial Sequence: Synthetic oligonucleotide
aagacggcuggccagaauc

SEQ ID NO: 801693 - RNA, 19 nt, Artificial Sequence
  Description of Artificial Sequence: Synthetic oligonucleotide
aaauagggaauugaaagug

SEQ ID NO: 801694 - RNA, 19 nt, Artificial Sequence
  Description of Artificial Sequence: Synthetic oligonucleotide
uaccauacgaaucuguuca

SEQ ID NO: 801695 - RNA, 19 nt, Artificial Sequence
  Description of Artificial Sequence: Synthetic oligonucleotide
aaacuaccaaagcuugagc

SEQ ID NO: 801696 - RNA, 19 nt, Artificial Sequence
  Description of Artificial Sequence: Synthetic oligonucleotide
uauaacaaugaaccgugag

SEQ ID NO: 801697 - RNA, 19 nt, Artificial Sequence
  Description of Artificial Sequence: Synthetic oligonucleotide
ucguuaacaauaaaguuaa

SEQ ID NO: 801698 - RNA, 19 nt, Artificial Sequence
  Description of Artificial Sequence: Synthetic oligonucleotide
cuuucuacuagaaauaaca

SEQ ID NO: 801699 - RNA, 19 nt, Artificial Sequence
  Description of Artificial Sequence: Synthetic oligonucleotide
aaggcauugagccagcagu

SEQ ID NO: 801700 - RNA, 19 nt, Artificial Sequence
  Description of Artificial Sequence: Synthetic oligonucleotide
aaaacuaccaaagcuugag

SEQ ID NO: 801701 - RNA, 19 nt, Artificial Sequence
  Description of Artificial Sequence: Synthetic oligonucleotide
aaaacaaaacaaaacaaaa

SEQ ID NO: 801702 - RNA, 19 nt, Artificial Sequence
  Description of Artificial Sequence: Synthetic oligonucleotide
uauuccggaacaauggggc

SEQ ID NO: 801703 - RNA, 19 nt, Artificial Sequence
  Description of Artificial Sequence: Synthetic oligonucleotide
uacaacaugggacuggugu

SEQ ID NO: 801704 - RNA, 19 nt, Artificial Sequence
  Description of Artificial Sequence: Synthetic oligonucleotide
accguuacagaguaacacc

SEQ ID NO: 801705 - RNA, 19 nt, Artificial Sequence
  Description of Artificial Sequence: Synthetic oligonucleotide
ugagccuucauuaccauac

SEQ ID NO: 801706 - RNA, 19 nt, Artificial Sequence
  Description of Artificial Sequence: Synthetic oligonucleotide
gauauuccggaacaauggg

SEQ ID NO: 801707 - RNA, 19 nt, Artificial Sequence
  Description of Artificial Sequence: Synthetic oligonucleotide
aacguggccggacauaauc

SEQ ID NO: 801708 - RNA, 19 nt, Artificial Sequence
  Description of Artificial Sequence: Synthetic oligonucleotide
aaguauaacaaugaaccgu

SEQ ID NO: 801709 - RNA, 19 nt, Artificial Sequence
  Description of Artificial Sequence: Synthetic oligonucleotide
gaaagcgcagccuugauca

SEQ ID NO: 801710 - RNA, 19 nt, Artificial Sequence
  Description of Artificial Sequence: Synthetic oligonucleotide
uguguaugcuaacacaaca

SEQ ID NO: 801711 - RNA, 19 nt, Artificial Sequence
  Description of Artificial Sequence: Synthetic oligonucleotide
ucaccuaacagugugcacg

SEQ ID NO: 801712 - RNA, 19 nt, Artificial Sequence
  Description of Artificial Sequence: Synthetic oligonucleotide
aaccguuacagaguaacac

SEQ ID NO: 801713 - RNA, 19 nt, Artificial Sequence
  Description of Artificial Sequence: Synthetic oligonucleotide
aaguugaacaagaaauagg

SEQ ID NO: 801714 - RNA, 19 nt, Artificial Sequence
  Description of Artificial Sequence: Synthetic oligonucleotide
ucggcaagaaaguaggcag

SEQ ID NO: 801715 - RNA, 19 nt, Artificial Sequence
  Description of Artificial Sequence: Synthetic oligonucleotide
uguaagcauaauaguagag

SEQ ID NO: 801716 - RNA, 19 nt, Artificial Sequence
  Description of Artificial Sequence: Synthetic oligonucleotide
uaugcuuagucucuccuug

SEQ ID NO: 801717 - RNA, 19 nt, Artificial Sequence
  Description of Artificial Sequence: Synthetic oligonucleotide
agaaccguuacagaguaac

SEQ ID NO: 801718 - RNA, 19 nt, Artificial Sequence
  Description of Artificial Sequence: Synthetic oligonucleotide
gaagaguacaaagagcacc

SEQ ID NO: 801719 - RNA, 19 nt, Artificial Sequence
  Description of Artificial Sequence: Synthetic oligonucleotide
uuccauauuggccuuuucc

SEQ ID NO: 801720 - RNA, 19 nt, Artificial Sequence
  Description of Artificial Sequence: Synthetic oligonucleotide
aagauaugagcagaaagca

SEQ ID NO: 801721 - RNA, 19 nt, Artificial Sequence
  Description of Artificial Sequence: Synthetic oligonucleotide
aagaacguaaggaacagca

SEQ ID NO: 801722 - RNA, 19 nt, Artificial Sequence
  Description of Artificial Sequence: Synthetic oligonucleotide
cauagcacuccacagacag

SEQ ID NO: 801723 - RNA, 19 nt, Artificial Sequence
  Description of Artificial Sequence: Synthetic oligonucleotide
auaauaguagagccaauca

SEQ ID NO: 801724 - RNA, 19 nt, Artificial Sequence
  Description of Artificial Sequence: Synthetic oligonucleotide
ucaugcaacaaaugcaaca

SEQ ID NO: 801725 - RNA, 19 nt, Artificial Sequence
  Description of Artificial Sequence: Synthetic oligonucleotide
acaagauuaucuuugggaa

SEQ ID NO: 801726 - RNA, 19 nt, Artificial Sequence
  Description of Artificial Sequence: Synthetic oligonucleotide
aaauagguauuuucucucu

SEQ ID NO: 801727 - RNA, 19 nt, Artificial Sequence
  Description of Artificial Sequence: Synthetic oligonucleotide
aaaacacguacugacaagu

SEQ ID NO: 801728 - RNA, 19 nt, Artificial Sequence
  Description of Artificial Sequence: Synthetic oligonucleotide
ucucugacaaacgagugag

SEQ ID NO: 801729 - RNA, 19 nt, Artificial Sequence
  Description of Artificial Sequence: Synthetic oligonucleotide
cuaaugaaaggccuuguug

SEQ ID NO: 801730 - RNA, 19 nt, Artificial Sequence
  Description of Artificial Sequence: Synthetic oligonucleotide
aucuuugggaaauagguau

SEQ ID NO: 801731 - RNA, 19 nt, Artificial Sequence
  Description of Artificial Sequence: Synthetic oligonucleotide
aguugccacaguuagcuag

SEQ ID NO: 801732 - RNA, 19 nt, Artificial Sequence
  Description of Artificial Sequence: Synthetic oligonucleotide
agaacacgagcgcugaagg

SEQ ID NO: 801733 - RNA, 19 nt, Artificial Sequence
  Description of Artificial Sequence: Synthetic oligonucleotide
aaagaacguaaggaacagc

SEQ ID NO: 801734 - RNA, 19 nt, Artificial Sequence
  Description of Artificial Sequence: Synthetic oligonucleotide
guaagcauaauaguagagc

SEQ ID NO: 801735 - RNA, 19 nt, Artificial Sequence
  Description of Artificial Sequence: Synthetic oligonucleotide
agauggaaguuaaacacac

SEQ ID NO: 801736 - RNA, 19 nt, Artificial Sequence
  Description of Artificial Sequence: Synthetic oligonucleotide
aagauuaucuuugggaaau

SEQ ID NO: 801737 - RNA, 19 nt, Artificial Sequence
  Description of Artificial Sequence: Synthetic oligonucleotide
uuguaagcauaauaguaga

SEQ ID NO: 801738 - RNA, 19 nt, Artificial Sequence
  Description of Artificial Sequence: Synthetic oligonucleotide
aacgagugagccuucauua

SEQ ID NO: 801739 - RNA, 19 nt, Artificial Sequence
  Description of Artificial Sequence: Synthetic oligonucleotide
uaaaacacguacugacaag

SEQ ID NO: 801740 - RNA, 19 nt, Artificial Sequence
  Description of Artificial Sequence: Synthetic oligonucleotide
cuugagcugagauaacccc

SEQ ID NO: 801741 - RNA, 19 nt, Artificial Sequence
  Description of Artificial Sequence: Synthetic oligonucleotide
auuaucuuugggaaauagg

SEQ ID NO: 801742 - RNA, 19 nt, Artificial Sequence
  Description of Artificial Sequence: Synthetic oligonucleotide
cuaagggaauagaugagug

SEQ ID NO: 801743 - RNA, 19 nt, Artificial Sequence
  Description of Artificial Sequence: Synthetic oligonucleotide
cauauuggccuuuuccggc

SEQ ID NO: 801744 - RNA, 19 nt, Artificial Sequence
  Description of Artificial Sequence: Synthetic oligonucleotide
aggaccagaacacgagcgc

SEQ ID NO: 801745 - RNA, 19 nt, Artificial Sequence
  Description of Artificial Sequence: Synthetic oligonucleotide
aaccuagaauuccaagcug

SEQ ID NO: 801746 - RNA, 19 nt, Artificial Sequence
  Description of Artificial Sequence: Synthetic oligonucleotide
uguaugcuaacacaacaua

SEQ ID NO: 801747 - RNA, 19 nt, Artificial Sequence
  Description of Artificial Sequence: Synthetic oligonucleotide
aauacaacaugggacuggu

SEQ ID NO: 801748 - RNA, 19 nt, Artificial Sequence
  Description of Artificial Sequence: Synthetic oligonucleotide
cucaucggcaagaaaguag

SEQ ID NO: 801749 - RNA, 19 nt, Artificial Sequence
  Description of Artificial Sequence: Synthetic oligonucleotide
aagaguacaaagagcacca

SEQ ID NO: 801750 - RNA, 19 nt, Artificial Sequence
  Description of Artificial Sequence: Synthetic oligonucleotide
uaaguguuuuggcuaauuc

SEQ ID NO: 801751 - RNA, 19 nt, Artificial Sequence
  Description of Artificial Sequence: Synthetic oligonucleotide
uacucuagguacauucucu

SEQ ID NO: 801752 - RNA, 19 nt, Artificial Sequence
  Description of Artificial Sequence: Synthetic oligonucleotide
ugucacgguaaauaagugu

SEQ ID NO: 801753 - RNA, 19 nt, Artificial Sequence
  Description of Artificial Sequence: Synthetic oligonucleotide
cagauaaaacuaccaaagc

SEQ ID NO: 801754 - RNA, 19 nt, Artificial Sequence
  Description of Artificial Sequence: Synthetic oligonucleotide
ccggacauaauccagaaag

SEQ ID NO: 801755 - RNA, 19 nt, Artificial Sequence
  Description of Artificial Sequence: Synthetic oligonucleotide
guuuguaaacucuggcacc

SEQ ID NO: 801756 - RNA, 19 nt, Artificial Sequence
  Description of Artificial Sequence: Synthetic oligonucleotide
uugagaaccguuacagagu

SEQ ID NO: 801757 - RNA, 19 nt, Artificial Sequence
  Description of Artificial Sequence: Synthetic oligonucleotide
ucacgguaaauaaguguag

SEQ ID NO: 801758 - RNA, 19 nt, Artificial Sequence
  Description of Artificial Sequence: Synthetic oligonucleotide
ugucguuaacaauaaaguu

SEQ ID NO: 801759 - RNA, 19 nt, Artificial Sequence
  Description of Artificial Sequence: Synthetic oligonucleotide
agaaaccaauuccuaauga

SEQ ID NO: 801760 - RNA, 19 nt, Artificial Sequence
  Description of Artificial Sequence: Synthetic oligonucleotide
uaaaacuaccaaagcuuga

SEQ ID NO: 801761 - RNA, 19 nt, Artificial Sequence
  Description of Artificial Sequence: Synthetic oligonucleotide
aguaacacccuuuucugaa

SEQ ID NO: 801762 - RNA, 19 nt, Artificial Sequence
  Description of Artificial Sequence: Synthetic oligonucleotide
gauaugagcagaaagcaua

SEQ ID NO: 801763 - RNA, 19 nt, Artificial Sequence
  Description of Artificial Sequence: Synthetic oligonucleotide
caaacagauaaaacuacca

SEQ ID NO: 801764 - RNA, 19 nt, Artificial Sequence
  Description of Artificial Sequence: Synthetic oligonucleotide
augcuaacacaacauacgu

SEQ ID NO: 801765 - RNA, 19 nt, Artificial Sequence
  Description of Artificial Sequence: Synthetic oligonucleotide
ugagaaccguuacagagua

SEQ ID NO: 801766 - RNA, 19 nt, Artificial Sequence
  Description of Artificial Sequence: Synthetic oligonucleotide
uuuguaaacucuggcaccu

SEQ ID NO: 801767 - RNA, 19 nt, Artificial Sequence
  Description of Artificial Sequence: Synthetic oligonucleotide
aauagggaauugaaagugu

SEQ ID NO: 801768 - RNA, 19 nt, Artificial Sequence
  Description of Artificial Sequence: Synthetic oligonucleotide
aaacgagugagccuucauu

SEQ ID NO: 801769 - RNA, 19 nt, Artificial Sequence
  Description of Artificial Sequence: Synthetic oligonucleotide
uaacacaacauacguuggu

SEQ ID NO: 801770 - RNA, 19 nt, Artificial Sequence
  Description of Artificial Sequence: Synthetic oligonucleotide
aacaaugaaccgugaggcu

SEQ ID NO: 801771 - RNA, 19 nt, Artificial Sequence
  Description of Artificial Sequence: Synthetic oligonucleotide
aacauagccccaucuuaca

SEQ ID NO: 801772 - RNA, 19 nt, Artificial Sequence
  Description of Artificial Sequence: Synthetic oligonucleotide
aauagguauuuucucucuu

SEQ ID NO: 801773 - RNA, 19 nt, Artificial Sequence
  Description of Artificial Sequence: Synthetic oligonucleotide
acaaugaaccgugaggcug

SEQ ID NO: 801774 - RNA, 19 nt, Artificial Sequence
  Description of Artificial Sequence: Synthetic oligonucleotide
gaucaugcaacaaaugcaa

SEQ ID NO: 801775 - RNA, 19 nt, Artificial Sequence
  Description of Artificial Sequence: Synthetic oligonucleotide
acauacguugguacaaaac

SEQ ID NO: 801776 - RNA, 19 nt, Artificial Sequence
  Description of Artificial Sequence: Synthetic oligonucleotide
agaaagcauaacaagauua

SEQ ID NO: 801777 - RNA, 19 nt, Artificial Sequence
  Description of Artificial Sequence: Synthetic oligonucleotide
guaugcuaacacaacauac

SEQ ID NO: 801778 - RNA, 19 nt, Artificial Sequence
  Description of Artificial Sequence: Synthetic oligonucleotide
caaagaacaugaagaguac

SEQ ID NO: 801779 - RNA, 19 nt, Artificial Sequence
  Description of Artificial Sequence: Synthetic oligonucleotide
aaaguguagacaggaacau

SEQ ID NO: 801780 - RNA, 19 nt, Artificial Sequence
  Description of Artificial Sequence: Synthetic oligonucleotide
cuugaucaugcaacaaaug

SEQ ID NO: 801781 - RNA, 19 nt, Artificial Sequence
  Description of Artificial Sequence: Synthetic oligonucleotide
auauuccggaacaaugggg

SEQ ID NO: 801782 - RNA, 19 nt, Artificial Sequence
  Description of Artificial Sequence: Synthetic oligonucleotide
gaacacgagcgcugaaggg

SEQ ID NO: 801783 - RNA, 19 nt, Artificial Sequence
  Description of Artificial Sequence: Synthetic oligonucleotide
acgagugagccuucauuac

SEQ ID NO: 801784 - RNA, 19 nt, Artificial Sequence
  Description of Artificial Sequence: Synthetic oligonucleotide
gcagaucugaguucgaagc

SEQ ID NO: 801785 - RNA, 19 nt, Artificial Sequence
  Description of Artificial Sequence: Synthetic oligonucleotide
uguaaacucuggcaccuaa

SEQ ID NO: 801786 - RNA, 19 nt, Artificial Sequence
  Description of Artificial Sequence: Synthetic oligonucleotide
auaaguguaggagcaaaca

SEQ ID NO: 801787 - RNA, 19 nt, Artificial Sequence
  Description of Artificial Sequence: Synthetic oligonucleotide
caaagcguagcaucucagc

SEQ ID NO: 801788 - RNA, 19 nt, Artificial Sequence
  Description of Artificial Sequence: Synthetic oligonucleotide
aaaucgccauuauucagua

SEQ ID NO: 801789 - RNA, 19 nt, Artificial Sequence
  Description of Artificial Sequence: Synthetic oligonucleotide
uuaccauacgaaucuguuc

SEQ ID NO: 801790 - RNA, 19 nt, Artificial Sequence
  Description of Artificial Sequence: Synthetic oligonucleotide
gucguuaacaauaaaguua

SEQ ID NO: 801791 - RNA, 19 nt, Artificial Sequence
  Description of Artificial Sequence: Synthetic oligonucleotide
acgguaaauaaguguagga

SEQ ID NO: 801792 - RNA, 19 nt, Artificial Sequence
  Description of Artificial Sequence: Synthetic oligonucleotide
uuauucaguaacugcugaa

SEQ ID NO: 801793 - RNA, 19 nt, Artificial Sequence
  Description of Artificial Sequence: Synthetic oligonucleotide
aaacacguacugacaaguc

SEQ ID NO: 801794 - RNA, 19 nt, Artificial Sequence
  Description of Artificial Sequence: Synthetic oligonucleotide
uacguugguacaaaaccua

SEQ ID NO: 801795 - RNA, 19 nt, Artificial Sequence
  Description of Artificial Sequence: Synthetic oligonucleotide
auaccauaauguuccauau

SEQ ID NO: 801796 - RNA, 19 nt, Artificial Sequence
  Description of Artificial Sequence: Synthetic oligonucleotide
guaaggaacagcaucagua

SEQ ID NO: 801797 - RNA, 19 nt, Artificial Sequence
  Description of Artificial Sequence: Synthetic oligonucleotide
acagaguaacacccuuuuc

SEQ ID NO: 801798 - RNA, 19 nt, Artificial Sequence
  Description of Artificial Sequence: Synthetic oligonucleotide
cacgguaaauaaguguagg

SEQ ID NO: 801799 - RNA, 19 nt, Artificial Sequence
  Description of Artificial Sequence: Synthetic oligonucleotide
cauaccauaauguuccaua

SEQ ID NO: 801800 - RNA, 19 nt, Artificial Sequence
  Description of Artificial Sequence: Synthetic oligonucleotide
auagcugucacgguaaaua

SEQ ID NO: 801801 - RNA, 19 nt, Artificial Sequence
  Description of Artificial Sequence: Synthetic oligonucleotide
uaauccagaaaggugggau

SEQ ID NO: 801802 - RNA, 19 nt, Artificial Sequence
  Description of Artificial Sequence: Synthetic oligonucleotide
uccucaucggcaagaaagu

SEQ ID NO: 801803 - RNA, 19 nt, Artificial Sequence
  Description of Artificial Sequence: Synthetic oligonucleotide
aacauacguugguacaaaa

SEQ ID NO: 801804 - RNA, 19 nt, Artificial Sequence
  Description of Artificial Sequence: Synthetic oligonucleotide
ucucucaaagaauguagua

SEQ ID NO: 801805 - RNA, 19 nt, Artificial Sequence
  Description of Artificial Sequence: Synthetic oligonucleotide
aguuagcuagcucaccuaa

SEQ ID NO: 801806 - RNA, 19 nt, Artificial Sequence
  Description of Artificial Sequence: Synthetic oligonucleotide
ucuaagacacagguacuga

SEQ ID NO: 801807 - RNA, 19 nt, Artificial Sequence
  Description of Artificial Sequence: Synthetic oligonucleotide
caaagaacguaaggaacag

SEQ ID NO: 801808 - RNA, 19 nt, Artificial Sequence
  Description of Artificial Sequence: Synthetic oligonucleotide
uuccuaaugaaaggccuug

SEQ ID NO: 801809 - RNA, 19 nt, Artificial Sequence
  Description of Artificial Sequence: Synthetic oligonucleotide
uacugguugacugugggua

SEQ ID NO: 801810 - RNA, 19 nt, Artificial Sequence
  Description of Artificial Sequence: Synthetic oligonucleotide
caacauugagaaccguuac

SEQ ID NO: 801811 - RNA, 19 nt, Artificial Sequence
  Description of Artificial Sequence: Synthetic oligonucleotide
cacaggaccagaacacgag

SEQ ID NO: 801812 - RNA, 19 nt, Artificial Sequence
  Description of Artificial Sequence: Synthetic oligonucleotide
gccauuauucaguaacugc

SEQ ID NO: 801813 - RNA, 19 nt, Artificial Sequence
  Description of Artificial Sequence: Synthetic oligonucleotide
cauaccauucuugagaaua

SEQ ID NO: 801814 - RNA, 19 nt, Artificial Sequence
  Description of Artificial Sequence: Synthetic oligonucleotide
ucgccauuauucaguaacu

SEQ ID NO: 801815 - RNA, 19 nt, Artificial Sequence
  Description of Artificial Sequence: Synthetic oligonucleotide
auacguugguacaaaaccu

SEQ ID NO: 801816 - RNA, 19 nt, Artificial Sequence
  Description of Artificial Sequence: Synthetic oligonucleotide
cugucguuaacaauaaagu

SEQ ID NO: 801817 - RNA, 19 nt, Artificial Sequence
  Description of Artificial Sequence: Synthetic oligonucleotide
uccucggauagcugucacg

SEQ ID NO: 801818 - RNA, 19 nt, Artificial Sequence
  Description of Artificial Sequence: Synthetic oligonucleotide
aaguguagacaggaacaug

SEQ ID NO: 801819 - RNA, 19 nt, Artificial Sequence
  Description of Artificial Sequence: Synthetic oligonucleotide
uccuuggcggcauuuagua

SEQ ID NO: 801820 - RNA, 19 nt, Artificial Sequence
  Description of Artificial Sequence: Synthetic oligonucleotide
agcccauaccauaauguuc

SEQ ID NO: 801821 - RNA, 19 nt, Artificial Sequence
  Description of Artificial Sequence: Synthetic oligonucleotide
uuuccggcugucguuaaca

SEQ ID NO: 801822 - RNA, 19 nt, Artificial Sequence
  Description of Artificial Sequence: Synthetic oligonucleotide
gggaauugaaaguguagac

SEQ ID NO: 801823 - RNA, 19 nt, Artificial Sequence
  Description of Artificial Sequence: Synthetic oligonucleotide
auauuggccuuuuccggcu

SEQ ID NO: 801824 - RNA, 19 nt, Artificial Sequence
  Description of Artificial Sequence: Synthetic oligonucleotide
ugcuaacacaacauacguu

SEQ ID NO: 801825 - RNA, 19 nt, Artificial Sequence
  Description of Artificial Sequence: Synthetic oligonucleotide
acacguacugacaagucca

SEQ ID NO: 801826 - RNA, 19 nt, Artificial Sequence
  Description of Artificial Sequence: Synthetic oligonucleotide
gcccauaccauaauguucc

SEQ ID NO: 801827 - RNA, 19 nt, Artificial Sequence
  Description of Artificial Sequence: Synthetic oligonucleotide
uagcugucacgguaaauaa

SEQ ID NO: 801828 - RNA, 19 nt, Artificial Sequence
  Description of Artificial Sequence: Synthetic oligonucleotide
ugaguggaugagaagucuu

SEQ ID NO: 801829 - RNA, 19 nt, Artificial Sequence
  Description of Artificial Sequence: Synthetic oligonucleotide
uccaagcuggaagacuaag

SEQ ID NO: 801830 - RNA, 19 nt, Artificial Sequence
  Description of Artificial Sequence: Synthetic oligonucleotide
cagaguaacacccuuuucu

SEQ ID NO: 801831 - RNA, 19 nt, Artificial Sequence
  Description of Artificial Sequence: Synthetic oligonucleotide
aucggcaagaaaguaggca

SEQ ID NO: 801832 - RNA, 19 nt, Artificial Sequence
  Description of Artificial Sequence: Synthetic oligonucleotide
uuccuuggcggcauuuagu

SEQ ID NO: 801833 - RNA, 19 nt, Artificial Sequence
  Description of Artificial Sequence: Synthetic oligonucleotide
ggagcaaacaggaaguaca

SEQ ID NO: 801834 - RNA, 19 nt, Artificial Sequence
  Description of Artificial Sequence: Synthetic oligonucleotide
acguggccggacauaaucc

SEQ ID NO: 801835 - RNA, 19 nt, Artificial Sequence
  Description of Artificial Sequence: Synthetic oligonucleotide
guaguacacauaaaacaga

SEQ ID NO: 801836 - RNA, 19 nt, Artificial Sequence
  Description of Artificial Sequence: Synthetic oligonucleotide
aguuccaccaguccuuaua

SEQ ID NO: 801837 - RNA, 19 nt, Artificial Sequence
  Description of Artificial Sequence: Synthetic oligonucleotide
uaguuggaguaggauguag

SEQ ID NO: 801838 - RNA, 19 nt, Artificial Sequence
  Description of Artificial Sequence: Synthetic oligonucleotide
caccaguccuuauaaaaca

SEQ ID NO: 801839 - RNA, 19 nt, Artificial Sequence
  Description of Artificial Sequence: Synthetic oligonucleotide
ccguuacagaguaacaccc

SEQ ID NO: 801840 - RNA, 19 nt, Artificial Sequence
  Description of Artificial Sequence: Synthetic oligonucleotide
ggucaagauaugcuuaguc

SEQ ID NO: 801841 - RNA, 19 nt, Artificial Sequence
  Description of Artificial Sequence: Synthetic oligonucleotide
gcuagcucaccuaacagug

SEQ ID NO: 801842 - RNA, 19 nt, Artificial Sequence
  Description of Artificial Sequence: Synthetic oligonucleotide
cuuggcggcauuuaguacu

SEQ ID NO: 801843 - RNA, 19 nt, Artificial Sequence
  Description of Artificial Sequence: Synthetic oligonucleotide
cagaacacgagcgcugaag

SEQ ID NO: 801844 - RNA, 19 nt, Artificial Sequence
  Description of Artificial Sequence: Synthetic oligonucleotide
gagugagccuucauuacca

SEQ ID NO: 801845 - RNA, 19 nt, Artificial Sequence
  Description of Artificial Sequence: Synthetic oligonucleotide
cugucacgguaaauaagug

SEQ ID NO: 801846 - RNA, 19 nt, Artificial Sequence
  Description of Artificial Sequence: Synthetic oligonucleotide
uucugaaaaugcacacaua

SEQ ID NO: 801847 - RNA, 19 nt, Artificial Sequence
  Description of Artificial Sequence: Synthetic oligonucleotide
aguacucuagguacauucu

SEQ ID NO: 801848 - RNA, 19 nt, Artificial Sequence
  Description of Artificial Sequence: Synthetic oligonucleotide
cuaagacacagguacugaa

SEQ ID NO: 801849 - RNA, 19 nt, Artificial Sequence
  Description of Artificial Sequence: Synthetic oligonucleotide
aaaggccuuguugggugag

SEQ ID NO: 801850 - RNA, 19 nt, Artificial Sequence
  Description of Artificial Sequence: Synthetic oligonucleotide
caguguguaugcuaacaca

SEQ ID NO: 801851 - RNA, 19 nt, Artificial Sequence
  Description of Artificial Sequence: Synthetic oligonucleotide
guugaacaagaaauaggga

SEQ ID NO: 801852 - RNA, 19 nt, Artificial Sequence
  Description of Artificial Sequence: Synthetic oligonucleotide
cacguacugacaaguccag

SEQ ID NO: 801853 - RNA, 19 nt, Artificial Sequence
  Description of Artificial Sequence: Synthetic oligonucleotide
auuccggaacaauggggca

SEQ ID NO: 801854 - RNA, 19 nt, Artificial Sequence
  Description of Artificial Sequence: Synthetic oligonucleotide
agcucaccuaacagugugc

SEQ ID NO: 801855 - RNA, 19 nt, Artificial Sequence
  Description of Artificial Sequence: Synthetic oligonucleotide
cuccuuggacagaauuaag

SEQ ID NO: 801856 - RNA, 19 nt, Artificial Sequence
  Description of Artificial Sequence: Synthetic oligonucleotide
guugacuguggguacugga

SEQ ID NO: 801857 - RNA, 19 nt, Artificial Sequence
  Description of Artificial Sequence: Synthetic oligonucleotide
agaaugggugaggggaaag

SEQ ID NO: 801858 - RNA, 19 nt, Artificial Sequence
  Description of Artificial Sequence: Synthetic oligonucleotide
ggcuaauucauggucaaga

SEQ ID NO: 801859 - RNA, 19 nt, Artificial Sequence
  Description of Artificial Sequence: Synthetic oligonucleotide
uuggcggcauuuaguacuc

SEQ ID NO: 801860 - RNA, 19 nt, Artificial Sequence
  Description of Artificial Sequence: Synthetic oligonucleotide
cauggucaagauaugcuua

SEQ ID NO: 801861 - RNA, 19 nt, Artificial Sequence
  Description of Artificial Sequence: Synthetic oligonucleotide
caucggcaagaaaguaggc

SEQ ID NO: 801862 - RNA, 19 nt, Artificial Sequence
  Description of Artificial Sequence: Synthetic oligonucleotide
uuuuccggcugucguuaac

SEQ ID NO: 801863 - RNA, 19 nt, Artificial Sequence
  Description of Artificial Sequence: Synthetic oligonucleotide
ugaggcagcacagguuugu

SEQ ID NO: 801864 - RNA, 19 nt, Artificial Sequence
  Description of Artificial Sequence: Synthetic oligonucleotide
gcauuuaguacucuaggua

SEQ ID NO: 801865 - RNA, 19 nt, Artificial Sequence
  Description of Artificial Sequence: Synthetic oligonucleotide
aagagacucuugucuuaaa

SEQ ID NO: 801866 - RNA, 19 nt, Artificial Sequence
  Description of Artificial Sequence: Synthetic oligonucleotide
guacugacaaguccaggaa

SEQ ID NO: 801867 - RNA, 19 nt, Artificial Sequence
  Description of Artificial Sequence: Synthetic oligonucleotide
gguccuguaguaguuggag

SEQ ID NO: 801868 - RNA, 19 nt, Artificial Sequence
  Description of Artificial Sequence: Synthetic oligonucleotide
cucucugacaaacgaguga

SEQ ID NO: 801869 - RNA, 19 nt, Artificial Sequence
  Description of Artificial Sequence: Synthetic oligonucleotide
ccucggauagcugucacgg

SEQ ID NO: 801870 - RNA, 19 nt, Artificial Sequence
  Description of Artificial Sequence: Synthetic oligonucleotide
ggcaagaaaguaggcagag

SEQ ID NO: 801871 - RNA, 19 nt, Artificial Sequence
  Description of Artificial Sequence: Synthetic oligonucleotide
guaggauguagaguuccac

SEQ ID NO: 801872 - RNA, 19 nt, Artificial Sequence
  Description of Artificial Sequence: Synthetic oligonucleotide
uuugggaaauagguauuuu

SEQ ID NO: 801873 - RNA, 19 nt, Artificial Sequence
  Description of Artificial Sequence: Synthetic oligonucleotide
ccuuguaagcauaauagua

SEQ ID NO: 801874 - RNA, 19 nt, Artificial Sequence
  Description of Artificial Sequence: Synthetic oligonucleotide
agcugucacgguaaauaag

SEQ ID NO: 801875 - RNA, 19 nt, Artificial Sequence
  Description of Artificial Sequence: Synthetic oligonucleotide
uccggaacaauggggcaca

SEQ ID NO: 801876 - RNA, 19 nt, Artificial Sequence
  Description of Artificial Sequence: Synthetic oligonucleotide
auagggaauugaaagugua

SEQ ID NO: 801877 - RNA, 19 nt, Artificial Sequence
  Description of Artificial Sequence: Synthetic oligonucleotide
guaggagcaaacaggaagu

SEQ ID NO: 801878 - RNA, 19 nt, Artificial Sequence
  Description of Artificial Sequence: Synthetic oligonucleotide
uccuaaugaaaggccuugu

SEQ ID NO: 801879 - RNA, 19 nt, Artificial Sequence
  Description of Artificial Sequence: Synthetic oligonucleotide
guggguacuggaacugugc

SEQ ID NO: 801880 - RNA, 19 nt, Artificial Sequence
  Description of Artificial Sequence: Synthetic oligonucleotide
ccaaucauggaccaccaca

SEQ ID NO: 801881 - RNA, 19 nt, Artificial Sequence
  Description of Artificial Sequence: Synthetic oligonucleotide
gaaaggccuuguuggguga

SEQ ID NO: 801882 - RNA, 19 nt, Artificial Sequence
  Description of Artificial Sequence: Synthetic oligonucleotide
acguaaggaacagcaucag

SEQ ID NO: 801883 - RNA, 19 nt, Artificial Sequence
  Description of Artificial Sequence: Synthetic oligonucleotide
ggcauaccauucuugagaa

SEQ ID NO: 801884 - RNA, 19 nt, Artificial Sequence
  Description of Artificial Sequence: Synthetic oligonucleotide
aaagcgcagccuugaucau

SEQ ID NO: 801885 - RNA, 19 nt, Artificial Sequence
  Description of Artificial Sequence: Synthetic oligonucleotide
agggacgucuuuaauccca

SEQ ID NO: 801886 - RNA, 19 nt, Artificial Sequence
  Description of Artificial Sequence: Synthetic oligonucleotide
cagaaucaggaagaacauc

SEQ ID NO: 801887 - RNA, 19 nt, Artificial Sequence
  Description of Artificial Sequence: Synthetic oligonucleotide
cucaccuaacagugugcac

SEQ ID NO: 801888 - RNA, 19 nt, Artificial Sequence
  Description of Artificial Sequence: Synthetic oligonucleotide
uccccaguugccacaguua

SEQ ID NO: 801889 - RNA, 19 nt, Artificial Sequence
  Description of Artificial Sequence: Synthetic oligonucleotide
uaccauucuugagaauaaa

SEQ ID NO: 801890 - RNA, 19 nt, Artificial Sequence
  Description of Artificial Sequence: Synthetic oligonucleotide
uggcuaauucauggucaag

SEQ ID NO: 801891 - RNA, 19 nt, Artificial Sequence
  Description of Artificial Sequence: Synthetic oligonucleotide
gaaccguuacagaguaaca

SEQ ID NO: 801892 - RNA, 19 nt, Artificial Sequence
  Description of Artificial Sequence: Synthetic oligonucleotide
gccuuguugggugaggcag

SEQ ID NO: 801893 - RNA, 19 nt, Artificial Sequence
  Description of Artificial Sequence: Synthetic oligonucleotide
acgaaucuguucaaguaua

SEQ ID NO: 801894 - RNA, 19 nt, Artificial Sequence
  Description of Artificial Sequence: Synthetic oligonucleotide
cauugagccagcagugcaa

SEQ ID NO: 801895 - RNA, 19 nt, Artificial Sequence
  Description of Artificial Sequence: Synthetic oligonucleotide
ugguugacuguggguacug

SEQ ID NO: 801896 - RNA, 19 nt, Artificial Sequence
  Description of Artificial Sequence: Synthetic oligonucleotide
guaacacccuuuucugaaa

SEQ ID NO: 801897 - RNA, 19 nt, Artificial Sequence
  Description of Artificial Sequence: Synthetic oligonucleotide
agaacguaaggaacagcau

SEQ ID NO: 801898 - RNA, 19 nt, Artificial Sequence
  Description of Artificial Sequence: Synthetic oligonucleotide
accauacgaaucuguucaa

SEQ ID NO: 801899 - RNA, 19 nt, Artificial Sequence
  Description of Artificial Sequence: Synthetic oligonucleotide
agugagccuucauuaccau

SEQ ID NO: 801900 - RNA, 19 nt, Artificial Sequence
  Description of Artificial Sequence: Synthetic oligonucleotide
caccuaacagugugcacga

SEQ ID NO: 801901 - RNA, 19 nt, Artificial Sequence
  Description of Artificial Sequence: Synthetic oligonucleotide
uuccggcugucguuaacaa

SEQ ID NO: 801902 - RNA, 19 nt, Artificial Sequence
  Description of Artificial Sequence: Synthetic oligonucleotide
ugucaccaaagcguagcau

SEQ ID NO: 801903 - RNA, 19 nt, Artificial Sequence
  Description of Artificial Sequence: Synthetic oligonucleotide
uggucaagauaugcuuagu

SEQ ID NO: 801904 - RNA, 19 nt, Artificial Sequence
  Description of Artificial Sequence: Synthetic oligonucleotide
auuccuaaugaaaggccuu

SEQ ID NO: 801905 - RNA, 19 nt, Artificial Sequence
  Description of Artificial Sequence: Synthetic oligonucleotide
agaauguaguacacauaaa

SEQ ID NO: 801906 - RNA, 19 nt, Artificial Sequence
  Description of Artificial Sequence: Synthetic oligonucleotide
gcggcauuuaguacucuag

SEQ ID NO: 801907 - RNA, 19 nt, Artificial Sequence
  Description of Artificial Sequence: Synthetic oligonucleotide
gcugucacgguaaauaagu

SEQ ID NO: 801908 - RNA, 19 nt, Artificial Sequence
  Description of Artificial Sequence: Synthetic oligonucleotide
agaaagagagaagcccaua

SEQ ID NO: 801909 - RNA, 19 nt, Artificial Sequence
  Description of Artificial Sequence: Synthetic oligonucleotide
ccccaguugccacaguuag

SEQ ID NO: 801910 - RNA, 19 nt, Artificial Sequence
  Description of Artificial Sequence: Synthetic oligonucleotide
gagguccaugccagcuugg

SEQ ID NO: 801911 - RNA, 19 nt, Artificial Sequence
  Description of Artificial Sequence: Synthetic oligonucleotide
ccaaagcguagcaucucag

SEQ ID NO: 801912 - RNA, 19 nt, Artificial Sequence
  Description of Artificial Sequence: Synthetic oligonucleotide
cuagaauuccaagcuggaa

SEQ ID NO: 801913 - RNA, 19 nt, Artificial Sequence
  Description of Artificial Sequence: Synthetic oligonucleotide
cggcauuuaguacucuagg

SEQ ID NO: 801914 - RNA, 19 nt, Artificial Sequence
  Description of Artificial Sequence: Synthetic oligonucleotide
cauggaccaccacauucca

SEQ ID NO: 801915 - RNA, 19 nt, Artificial Sequence
  Description of Artificial Sequence: Synthetic oligonucleotide
uuaguacucuagguacauu

SEQ ID NO: 801916 - RNA, 19 nt, Artificial Sequence
  Description of Artificial Sequence: Synthetic oligonucleotide
uccaggaacguggccggac

SEQ ID NO: 801917 - RNA, 19 nt, Artificial Sequence
  Description of Artificial Sequence: Synthetic oligonucleotide
guauaacaaugaaccguga

SEQ ID NO: 801918 - RNA, 19 nt, Artificial Sequence
  Description of Artificial Sequence: Synthetic oligonucleotide
guaaacucuggcaccuaaa

SEQ ID NO: 801919 - RNA, 19 nt, Artificial Sequence
  Description of Artificial Sequence: Synthetic oligonucleotide
guguaugcuaacacaacau

SEQ ID NO: 801920 - RNA, 19 nt, Artificial Sequence
  Description of Artificial Sequence: Synthetic oligonucleotide
auggaccaccacauuccag

SEQ ID NO: 801921 - RNA, 19 nt, Artificial Sequence
  Description of Artificial Sequence: Synthetic oligonucleotide
aucuccgggaagaaaccaa

SEQ ID NO: 801922 - RNA, 19 nt, Artificial Sequence
  Description of Artificial Sequence: Synthetic oligonucleotide
acgagcgcugaaggggcuc

SEQ ID NO: 801923 - RNA, 19 nt, Artificial Sequence
  Description of Artificial Sequence: Synthetic oligonucleotide
gaacaauggggcacagagu

SEQ ID NO: 801924 - RNA, 19 nt, Artificial Sequence
  Description of Artificial Sequence: Synthetic oligonucleotide
gggacgucuuuaaucccag

SEQ ID NO: 801925 - RNA, 19 nt, Artificial Sequence
  Description of Artificial Sequence: Synthetic oligonucleotide
aggcagaucugaguucgaa

SEQ ID NO: 801926 - RNA, 19 nt, Artificial Sequence
  Description of Artificial Sequence: Synthetic oligonucleotide
uggcgggcauaccauucuu

SEQ ID NO: 801927 - RNA, 19 nt, Artificial Sequence
  Description of Artificial Sequence: Synthetic oligonucleotide
gcuaagggaauagaugagu

SEQ ID NO: 801928 - RNA, 19 nt, Artificial Sequence
  Description of Artificial Sequence: Synthetic oligonucleotide
caacauacguugguacaaa

SEQ ID NO: 801929 - RNA, 19 nt, Artificial Sequence
  Description of Artificial Sequence: Synthetic oligonucleotide
gugagccuucauuaccaua

SEQ ID NO: 801930 - RNA, 19 nt, Artificial Sequence
  Description of Artificial Sequence: Synthetic oligonucleotide
ggaacguggccggacauaa

SEQ ID NO: 801931 - RNA, 19 nt, Artificial Sequence
  Description of Artificial Sequence: Synthetic oligonucleotide
ugcuggcgggcauaccauu

SEQ ID NO: 801932 - RNA, 19 nt, Artificial Sequence
  Description of Artificial Sequence: Synthetic oligonucleotide
agaguuccaccaguccuua

SEQ ID NO: 801933 - RNA, 19 nt, Artificial Sequence
  Description of Artificial Sequence: Synthetic oligonucleotide
auacaacaugggacuggug

SEQ ID NO: 801934 - RNA, 19 nt, Artificial Sequence
  Description of Artificial Sequence: Synthetic oligonucleotide
gacaaacgagugagccuuc

SEQ ID NO: 801935 - RNA, 19 nt, Artificial Sequence
  Description of Artificial Sequence: Synthetic oligonucleotide
uuguaaacucuggcaccua

SEQ ID NO: 801936 - RNA, 19 nt, Artificial Sequence
  Description of Artificial Sequence: Synthetic oligonucleotide
caccaaagcguagcaucuc

SEQ ID NO: 801937 - RNA, 19 nt, Artificial Sequence
  Description of Artificial Sequence: Synthetic oligonucleotide
ccuaacagugugcacgaaa

SEQ ID NO: 801938 - RNA, 19 nt, Artificial Sequence
  Description of Artificial Sequence: Synthetic oligonucleotide
ccuugaucaugcaacaaau

SEQ ID NO: 801939 - RNA, 19 nt, Artificial Sequence
  Description of Artificial Sequence: Synthetic oligonucleotide
ggacagaauuaaggaaaca

SEQ ID NO: 801940 - RNA, 19 nt, Artificial Sequence
  Description of Artificial Sequence: Synthetic oligonucleotide
gggacugguguguggcuca

SEQ ID NO: 801941 - RNA, 19 nt, Artificial Sequence
  Description of Artificial Sequence: Synthetic oligonucleotide
caggaggaugugaggucca

SEQ ID NO: 801942 - RNA, 19 nt, Artificial Sequence
  Description of Artificial Sequence: Synthetic oligonucleotide
cuuugggaaauagguauuu

SEQ ID NO: 801943 - RNA, 19 nt, Artificial Sequence
  Description of Artificial Sequence: Synthetic oligonucleotide
ggcgggcauaccauucuug

SEQ ID NO: 801944 - RNA, 19 nt, Artificial Sequence
  Description of Artificial Sequence: Synthetic oligonucleotide
aggaacguggccggacaua

SEQ ID NO: 801945 - RNA, 19 nt, Artificial Sequence
  Description of Artificial Sequence: Synthetic oligonucleotide
cuuuuccggcugucguuaa

SEQ ID NO: 801946 - RNA, 19 nt, Artificial Sequence
  Description of Artificial Sequence: Synthetic oligonucleotide
ggcggcauuuaguacucua

SEQ ID NO: 801947 - RNA, 19 nt, Artificial Sequence
  Description of Artificial Sequence: Synthetic oligonucleotide
aggaggaugugagguccau

SEQ ID NO: 801948 - RNA, 19 nt, Artificial Sequence
  Description of Artificial Sequence: Synthetic oligonucleotide
gccguggcuaagggaauag

SEQ ID NO: 801949 - RNA, 19 nt, Artificial Sequence
  Description of Artificial Sequence: Synthetic oligonucleotide
cguugguacaaaaccuaga

SEQ ID NO: 801950 - RNA, 19 nt, Artificial Sequence
  Description of Artificial Sequence: Synthetic oligonucleotide
cgggcauaccauucuugag

SEQ ID NO: 801951 - RNA, 19 nt, Artificial Sequence
  Description of Artificial Sequence: Synthetic oligonucleotide
ggauagcugucacgguaaa

SEQ ID NO: 801952 - RNA, 19 nt, Artificial Sequence
  Description of Artificial Sequence: Synthetic oligonucleotide
cuaaguguuuuggcuaauu

SEQ ID NO: 801953 - RNA, 19 nt, Artificial Sequence
  Description of Artificial Sequence: Synthetic oligonucleotide
gagaaccguuacagaguaa

SEQ ID NO: 801954 - RNA, 19 nt, Artificial Sequence
  Description of Artificial Sequence: Synthetic oligonucleotide
cgccauuauucaguaacug

SEQ ID NO: 801955 - RNA, 19 nt, Artificial Sequence
  Description of Artificial Sequence: Synthetic oligonucleotide
gccaaucauggaccaccac

SEQ ID NO: 801956 - RNA, 19 nt, Artificial Sequence
  Description of Artificial Sequence: Synthetic oligonucleotide
cuggcgggcauaccauucu

SEQ ID NO: 801957 - RNA, 19 nt, Artificial Sequence
  Description of Artificial Sequence: Synthetic oligonucleotide
uggcggcauuuaguacucu

SEQ ID NO: 801958 - RNA, 19 nt, Artificial Sequence
  Description of Artificial Sequence: Synthetic oligonucleotide
gggcaguguguaugcuaac

SEQ ID NO: 801959 - RNA, 19 nt, Artificial Sequence
  Description of Artificial Sequence: Synthetic oligonucleotide
cucggauagcugucacggu

SEQ ID NO: 801960 - RNA, 19 nt, Artificial Sequence
  Description of Artificial Sequence: Synthetic oligonucleotide
ccaggaacguggccggaca

SEQ ID NO: 801961 - RNA, 19 nt, Artificial Sequence
  Description of Artificial Sequence: Synthetic oligonucleotide
accuaacagugugcacgaa

SEQ ID NO: 801962 - RNA, 19 nt, Artificial Sequence
  Description of Artificial Sequence: Synthetic oligonucleotide
gcguagcaucucagcaaag

SEQ ID NO: 801963 - RNA, 19 nt, Artificial Sequence
  Description of Artificial Sequence: Synthetic oligonucleotide
gaguuccaccaguccuuau

SEQ ID NO: 801964 - RNA, 19 nt, Artificial Sequence
  Description of Artificial Sequence: Synthetic oligonucleotide
cccauaccauaauguucca

SEQ ID NO: 801965 - RNA, 19 nt, Artificial Sequence
  Description of Artificial Sequence: Synthetic oligonucleotide
cgagcgcugaaggggcucc

SEQ ID NO: 801966 - RNA, 19 nt, Artificial Sequence
  Description of Artificial Sequence: Synthetic oligonucleotide
caggaacguggccggacau

SEQ ID NO: 801967 - RNA, 19 nt, Artificial Sequence
  Description of Artificial Sequence: Synthetic oligonucleotide
cguaaggaacagcaucagu

SEQ ID NO: 801968 - RNA, 19 nt, Artificial Sequence
  Description of Artificial Sequence: Synthetic oligonucleotide
gaacguggccggacauaau

SEQ ID NO: 801969 - RNA, 19 nt, Artificial Sequence
  Description of Artificial Sequence: Synthetic oligonucleotide
cacgagcgcugaaggggcu

SEQ ID NO: 801970 - RNA, 19 nt, Artificial Sequence
  Description of Artificial Sequence: Synthetic oligonucleotide
ccucaucggcaagaaagua

SEQ ID NO: 801971 - RNA, 19 nt, Artificial Sequence
  Description of Artificial Sequence: Synthetic oligonucleotide
gcgcugaaggggcuccugu

SEQ ID NO: 801972 - RNA, 19 nt, Artificial Sequence
  Description of Artificial Sequence: Synthetic oligonucleotide
gugcuggcgggcauaccau

SEQ ID NO: 801973 - RNA, 19 nt, Artificial Sequence
  Description of Artificial Sequence: Synthetic oligonucleotide
ccggaacaauggggcacag

SEQ ID NO: 801974 - RNA, 19 nt, Artificial Sequence
  Description of Artificial Sequence: Synthetic oligonucleotide
cggcugucguuaacaauaa

SEQ ID NO: 801975 - RNA, 19 nt, Artificial Sequence
  Description of Artificial Sequence: Synthetic oligonucleotide
gagcgcugaaggggcuccu

SEQ ID NO: 801976 - RNA, 19 nt, Artificial Sequence
  Description of Artificial Sequence: Synthetic oligonucleotide
ccagaacacgagcgcugaa

SEQ ID NO: 801977 - RNA, 19 nt, Artificial Sequence
  Description of Artificial Sequence: Synthetic oligonucleotide
ccauaccauaauguuccau

SEQ ID NO: 801978 - RNA, 19 nt, Artificial Sequence
  Description of Artificial Sequence: Synthetic oligonucleotide
ccuaaguguuuuggcuaau

SEQ ID NO: 801979 - RNA, 19 nt, Artificial Sequence
  Description of Artificial Sequence: Synthetic oligonucleotide
acagcuacaauguuaaucc

SEQ ID NO: 801980 - RNA, 19 nt, Artificial Sequence
  Description of Artificial Sequence: Synthetic oligonucleotide
aauaucucccuuuagguuc

SEQ ID NO: 801981 - RNA, 19 nt, Artificial Sequence
  Description of Artificial Sequence: Synthetic oligonucleotide
auuaacaacaacuugucag

SEQ ID NO: 801982 - RNA, 19 nt, Artificial Sequence
  Description of Artificial Sequence: Synthetic oligonucleotide
auuucaucguguuauagac

SEQ ID NO: 801983 - RNA, 19 nt, Artificial Sequence
  Description of Artificial Sequence: Synthetic oligonucleotide
agaaauaucucccuuuagg

SEQ ID NO: 801984 - RNA, 19 nt, Artificial Sequence
  Description of Artificial Sequence: Synthetic oligonucleotide
uguauuuugaucaaauauc

SEQ ID NO: 801985 - RNA, 19 nt, Artificial Sequence
  Description of Artificial Sequence: Synthetic oligonucleotide
aaagauaaguucaauagug

SEQ ID NO: 801986 - RNA, 19 nt, Artificial Sequence
  Description of Artificial Sequence: Synthetic oligonucleotide
aaauugcacggauagagag

SEQ ID NO: 801987 - RNA, 19 nt, Artificial Sequence
  Description of Artificial Sequence: Synthetic oligonucleotide
ucuguuggaaaauugcacg

SEQ ID NO: 801988 - RNA, 19 nt, Artificial Sequence
  Description of Artificial Sequence: Synthetic oligonucleotide
gaugcaacaacccaagagc

SEQ ID NO: 801989 - RNA, 19 nt, Artificial Sequence
  Description of Artificial Sequence: Synthetic oligonucleotide
gaaaauugcacggauagag

SEQ ID NO: 801990 - RNA, 19 nt, Artificial Sequence
  Description of Artificial Sequence: Synthetic oligonucleotide
uugaauccuacaaacacag

SEQ ID NO: 801991 - RNA, 19 nt, Artificial Sequence
  Description of Artificial Sequence: Synthetic oligonucleotide
uuucgaauuucccaaauga

SEQ ID NO: 801992 - RNA, 19 nt, Artificial Sequence
  Description of Artificial Sequence: Synthetic oligonucleotide
ucuaucauguuccuuagcu

SEQ ID NO: 801993 - RNA, 19 nt, Artificial Sequence
  Description of Artificial Sequence: Synthetic oligonucleotide
cauauaaugucgcaguccg

SEQ ID NO: 801994 - RNA, 19 nt, Artificial Sequence
  Description of Artificial Sequence: Synthetic oligonucleotide
aaaugauccaaaugaggag

SEQ ID NO: 801995 - RNA, 19 nt, Artificial Sequence
  Description of Artificial Sequence: Synthetic oligonucleotide
agaguguauucucaggacc

SEQ ID NO: 801996 - RNA, 19 nt, Artificial Sequence
  Description of Artificial Sequence: Synthetic oligonucleotide
ucuaaggaaccauacauga

SEQ ID NO: 801997 - RNA, 19 nt, Artificial Sequence
  Description of Artificial Sequence: Synthetic oligonucleotide
uuuugaucaaauaucuacu

SEQ ID NO: 801998 - RNA, 19 nt, Artificial Sequence
  Description of Artificial Sequence: Synthetic oligonucleotide
aauuucaucguguuauaga

SEQ ID NO: 801999 - RNA, 19 nt, Artificial Sequence
  Description of Artificial Sequence: Synthetic oligonucleotide
uauauguugauuucagcca

SEQ ID NO: 802000 - RNA, 19 nt, Artificial Sequence
  Description of Artificial Sequence: Synthetic oligonucleotide
uaucuaaggaaccauacau

SEQ ID NO: 802001 - RNA, 19 nt, Artificial Sequence
  Description of Artificial Sequence: Synthetic oligonucleotide
ugaugcaacaacccaagag

SEQ ID NO: 802002 - RNA, 19 nt, Artificial Sequence
  Description of Artificial Sequence: Synthetic oligonucleotide
uucucaaccuggcaaaagg

SEQ ID NO: 802003 - RNA, 19 nt, Artificial Sequence
  Description of Artificial Sequence: Synthetic oligonucleotide
aacauauaaugucgcaguc

SEQ ID NO: 802004 - RNA, 19 nt, Artificial Sequence
  Description of Artificial Sequence: Synthetic oligonucleotide
agacauacaguucuugagg

SEQ ID NO: 802005 - RNA, 19 nt, Artificial Sequence
  Description of Artificial Sequence: Synthetic oligonucleotide
uuaacaacaacuugucaga

SEQ ID NO: 802006 - RNA, 19 nt, Artificial Sequence
  Description of Artificial Sequence: Synthetic oligonucleotide
uuucuagcgagcuuaagca

SEQ ID NO: 802007 - RNA, 19 nt, Artificial Sequence
  Description of Artificial Sequence: Synthetic oligonucleotide
ugaauugaugcaacaaccc

SEQ ID NO: 802008 - RNA, 19 nt, Artificial Sequence
  Description of Artificial Sequence: Synthetic oligonucleotide
aauuucugugacugagucg

SEQ ID NO: 802009 - RNA, 19 nt, Artificial Sequence
  Description of Artificial Sequence: Synthetic oligonucleotide
uauuccuuccagcugauga

SEQ ID NO: 802010 - RNA, 19 nt, Artificial Sequence
  Description of Artificial Sequence: Synthetic oligonucleotide
ucuuaauuagcugagcaug

SEQ ID NO: 802011 - RNA, 19 nt, Artificial Sequence
  Description of Artificial Sequence: Synthetic oligonucleotide
uaauuagcugagcauggcg

SEQ ID NO: 802012 - RNA, 19 nt, Artificial Sequence
  Description of Artificial Sequence: Synthetic oligonucleotide
uucuauaauacuacauaug

SEQ ID NO: 802013 - RNA, 19 nt, Artificial Sequence
  Description of Artificial Sequence: Synthetic oligonucleotide
aaugaucuucaccacgcag

SEQ ID NO: 802014 - RNA, 19 nt, Artificial Sequence
  Description of Artificial Sequence: Synthetic oligonucleotide
cuuaauuagcugagcaugg

SEQ ID NO: 802015 - RNA, 19 nt, Artificial Sequence
  Description of Artificial Sequence: Synthetic oligonucleotide
ugagaugcaacuugucagg

SEQ ID NO: 802016 - RNA, 19 nt, Artificial Sequence
  Description of Artificial Sequence: Synthetic oligonucleotide
gaagaguuguucuagccug

SEQ ID NO: 802017 - RNA, 19 nt, Artificial Sequence
  Description of Artificial Sequence: Synthetic oligonucleotide
aaggaauagucacugaaaa

SEQ ID NO: 802018 - RNA, 19 nt, Artificial Sequence
  Description of Artificial Sequence: Synthetic oligonucleotide
aauuaguaagaaauaucuc

SEQ ID NO: 802019 - RNA, 19 nt, Artificial Sequence
  Description of Artificial Sequence: Synthetic oligonucleotide
aauaucuacucaaaugucu

SEQ ID NO: 802020 - RNA, 19 nt, Artificial Sequence
  Description of Artificial Sequence: Synthetic oligonucleotide
uuuaaacgccauuucaaug

SEQ ID NO: 802021 - RNA, 19 nt, Artificial Sequence
  Description of Artificial Sequence: Synthetic oligonucleotide
gaaguggucaaauuaucug

SEQ ID NO: 802022 - RNA, 19 nt, Artificial Sequence
  Description of Artificial Sequence: Synthetic oligonucleotide
cuuucuagcgagcuuaagc

SEQ ID NO: 802023 - RNA, 19 nt, Artificial Sequence
  Description of Artificial Sequence: Synthetic oligonucleotide
ucuagcgagcuuaagcaag

SEQ ID NO: 802024 - RNA, 19 nt, Artificial Sequence
  Description of Artificial Sequence: Synthetic oligonucleotide
auugcacggauagagagac

SEQ ID NO: 802025 - RNA, 19 nt, Artificial Sequence
  Description of Artificial Sequence: Synthetic oligonucleotide
auaauggaagaguguauuc

SEQ ID NO: 802026 - RNA, 19 nt, Artificial Sequence
  Description of Artificial Sequence: Synthetic oligonucleotide
aaauaucuacucaaauguc

SEQ ID NO: 802027 - RNA, 19 nt, Artificial Sequence
  Description of Artificial Sequence: Synthetic oligonucleotide
aauuguguacagccgucuc

SEQ ID NO: 802028 - RNA, 19 nt, Artificial Sequence
  Description of Artificial Sequence: Synthetic oligonucleotide
ugcugcuaaaggcaguagg

SEQ ID NO: 802029 - RNA, 19 nt, Artificial Sequence
  Description of Artificial Sequence: Synthetic oligonucleotide
acauauaaugucgcagucc

SEQ ID NO: 802030 - RNA, 19 nt, Artificial Sequence
  Description of Artificial Sequence: Synthetic oligonucleotide
aguucuucgaagucggcag

SEQ ID NO: 802031 - RNA, 19 nt, Artificial Sequence
  Description of Artificial Sequence: Synthetic oligonucleotide
ugaaggaagagccucccca

SEQ ID NO: 802032 - RNA, 19 nt, Artificial Sequence
  Description of Artificial Sequence: Synthetic oligonucleotide
uucaaauagcacaccaugu

SEQ ID NO: 802033 - RNA, 19 nt, Artificial Sequence
  Description of Artificial Sequence: Synthetic oligonucleotide
caauaucauccuuagguag

SEQ ID NO: 802034 - RNA, 19 nt, Artificial Sequence
  Description of Artificial Sequence: Synthetic oligonucleotide
gaaaccgccuagcugagcc

SEQ ID NO: 802035 - RNA, 19 nt, Artificial Sequence
  Description of Artificial Sequence: Synthetic oligonucleotide
aacuucaggguuugggcag

SEQ ID NO: 802036 - RNA, 19 nt, Artificial Sequence
  Description of Artificial Sequence: Synthetic oligonucleotide
acccuuguaaaacagagaa

SEQ ID NO: 802037 - RNA, 19 nt, Artificial Sequence
  Description of Artificial Sequence: Synthetic oligonucleotide
ugucuguuggaaaauugca

SEQ ID NO: 802038 - RNA, 19 nt, Artificial Sequence
  Description of Artificial Sequence: Synthetic oligonucleotide
aauuuaaacgccauuucaa

SEQ ID NO: 802039 - RNA, 19 nt, Artificial Sequence
  Description of Artificial Sequence: Synthetic oligonucleotide
caauuaguaagaaauaucu

SEQ ID NO: 802040 - RNA, 19 nt, Artificial Sequence
  Description of Artificial Sequence: Synthetic oligonucleotide
ugcuaaaggcaguaggcag

SEQ ID NO: 802041 - RNA, 19 nt, Artificial Sequence
  Description of Artificial Sequence: Synthetic oligonucleotide
uucaucguguuauagacuu

SEQ ID NO: 802042 - RNA, 19 nt, Artificial Sequence
  Description of Artificial Sequence: Synthetic oligonucleotide
uggcguuuucuucugauca

SEQ ID NO: 802043 - RNA, 19 nt, Artificial Sequence
  Description of Artificial Sequence: Synthetic oligonucleotide
aaauaucucccuuuagguu

SEQ ID NO: 802044 - RNA, 19 nt, Artificial Sequence
  Description of Artificial Sequence: Synthetic oligonucleotide
uauaaugucgcaguccgac

SEQ ID NO: 802045 - RNA, 19 nt, Artificial Sequence
  Description of Artificial Sequence: Synthetic oligonucleotide
caguccgacaauuaguaag

SEQ ID NO: 802046 - RNA, 19 nt, Artificial Sequence
  Description of Artificial Sequence: Synthetic oligonucleotide
acuaucuaaggaaccauac

SEQ ID NO: 802047 - RNA, 19 nt, Artificial Sequence
  Description of Artificial Sequence: Synthetic oligonucleotide
aaagcacggcacuggcugc

SEQ ID NO: 802048 - RNA, 19 nt, Artificial Sequence
  Description of Artificial Sequence: Synthetic oligonucleotide
aguggucaaauuaucugcc

SEQ ID NO: 802049 - RNA, 19 nt, Artificial Sequence
  Description of Artificial Sequence: Synthetic oligonucleotide
aaaauuguguacagccguc

SEQ ID NO: 802050 - RNA, 19 nt, Artificial Sequence
  Description of Artificial Sequence: Synthetic oligonucleotide
ugagccuuauuucuauaug

SEQ ID NO: 802051 - RNA, 19 nt, Artificial Sequence
  Description of Artificial Sequence: Synthetic oligonucleotide
ucccaguagcuuuagaugu

SEQ ID NO: 802052 - RNA, 19 nt, Artificial Sequence
  Description of Artificial Sequence: Synthetic oligonucleotide
aauaucauccuuagguaga

SEQ ID NO: 802053 - RNA, 19 nt, Artificial Sequence
  Description of Artificial Sequence: Synthetic oligonucleotide
ucaaauagcacaccauguu

SEQ ID NO: 802054 - RNA, 19 nt, Artificial Sequence
  Description of Artificial Sequence: Synthetic oligonucleotide
cauacuguugagcacuaag

SEQ ID NO: 802055 - RNA, 19 nt, Artificial Sequence
  Description of Artificial Sequence: Synthetic oligonucleotide
aguucaauagugaaagaug

SEQ ID NO: 802056 - RNA, 19 nt, Artificial Sequence
  Description of Artificial Sequence: Synthetic oligonucleotide
agcuuaagcaaggccaugc

SEQ ID NO: 802057 - RNA, 19 nt, Artificial Sequence
  Description of Artificial Sequence: Synthetic oligonucleotide
agauaaguucaauagugaa

SEQ ID NO: 802058 - RNA, 19 nt, Artificial Sequence
  Description of Artificial Sequence: Synthetic oligonucleotide
ugaugaagaguuguucuag

SEQ ID NO: 802059 - RNA, 19 nt, Artificial Sequence
  Description of Artificial Sequence: Synthetic oligonucleotide
caaauuaucugccuuuuca

SEQ ID NO: 802060 - RNA, 19 nt, Artificial Sequence
  Description of Artificial Sequence: Synthetic oligonucleotide
uucccaguagcuuuagaug

SEQ ID NO: 802061 - RNA, 19 nt, Artificial Sequence
  Description of Artificial Sequence: Synthetic oligonucleotide
gacugagucgugaaaacag

SEQ ID NO: 802062 - RNA, 19 nt, Artificial Sequence
  Description of Artificial Sequence: Synthetic oligonucleotide
acuggcgacaguaugcagc

SEQ ID NO: 802063 - RNA, 19 nt, Artificial Sequence
  Description of Artificial Sequence: Synthetic oligonucleotide
uuagguagauggcugcaca

SEQ ID NO: 802064 - RNA, 19 nt, Artificial Sequence
  Description of Artificial Sequence: Synthetic oligonucleotide
gucgugaaaacagacauac

SEQ ID NO: 802065 - RNA, 19 nt, Artificial Sequence
  Description of Artificial Sequence: Synthetic oligonucleotide
aauugaugcaacaacccaa

SEQ ID NO: 802066 - RNA, 19 nt, Artificial Sequence
  Description of Artificial Sequence: Synthetic oligonucleotide
gaauugaugcaacaaccca

SEQ ID NO: 802067 - RNA, 19 nt, Artificial Sequence
  Description of Artificial Sequence: Synthetic oligonucleotide
uacaaucuggaccaggauu

SEQ ID NO: 802068 - RNA, 19 nt, Artificial Sequence
  Description of Artificial Sequence: Synthetic oligonucleotide
gaaauaucucccuuuaggu

SEQ ID NO: 802069 - RNA, 19 nt, Artificial Sequence
  Description of Artificial Sequence: Synthetic oligonucleotide
ugaucaguccaguuuucag

SEQ ID NO: 802070 - RNA, 19 nt, Artificial Sequence
  Description of Artificial Sequence: Synthetic oligonucleotide
agugaugaagaugcccugc

SEQ ID NO: 802071 - RNA, 19 nt, Artificial Sequence
  Description of Artificial Sequence: Synthetic oligonucleotide
uacauaugaauugaugcaa

SEQ ID NO: 802072 - RNA, 19 nt, Artificial Sequence
  Description of Artificial Sequence: Synthetic oligonucleotide
acuaagcugagccuuauuu

SEQ ID NO: 802073 - RNA, 19 nt, Artificial Sequence
  Description of Artificial Sequence: Synthetic oligonucleotide
auggcaauuucugugacug

SEQ ID NO: 802074 - RNA, 19 nt, Artificial Sequence
  Description of Artificial Sequence: Synthetic oligonucleotide
cuacauaugaauugaugca

SEQ ID NO: 802075 - RNA, 19 nt, Artificial Sequence
  Description of Artificial Sequence: Synthetic oligonucleotide
cagacauacaguucuugag

SEQ ID NO: 802076 - RNA, 19 nt, Artificial Sequence
  Description of Artificial Sequence: Synthetic oligonucleotide
guucaauagugaaagauga

SEQ ID NO: 802077 - RNA, 19 nt, Artificial Sequence
  Description of Artificial Sequence: Synthetic oligonucleotide
aagauaaguucaauaguga

SEQ ID NO: 802078 - RNA, 19 nt, Artificial Sequence
  Description of Artificial Sequence: Synthetic oligonucleotide
aauggauuugggagcgucg

SEQ ID NO: 802079 - RNA, 19 nt, Artificial Sequence
  Description of Artificial Sequence: Synthetic oligonucleotide
ugcagucuauugaggauag

SEQ ID NO: 802080 - RNA, 19 nt, Artificial Sequence
  Description of Artificial Sequence: Synthetic oligonucleotide
aggccaauuaacaacaacu

SEQ ID NO: 802081 - RNA, 19 nt, Artificial Sequence
  Description of Artificial Sequence: Synthetic oligonucleotide
ucauccuuagguagauggc

SEQ ID NO: 802082 - RNA, 19 nt, Artificial Sequence
  Description of Artificial Sequence: Synthetic oligonucleotide
caaguaacccuuguaaaac

SEQ ID NO: 802083 - RNA, 19 nt, Artificial Sequence
  Description of Artificial Sequence: Synthetic oligonucleotide
cuagcgagcuuaagcaagg

SEQ ID NO: 802084 - RNA, 19 nt, Artificial Sequence
  Description of Artificial Sequence: Synthetic oligonucleotide
uaaugucgcaguccgacaa

SEQ ID NO: 802085 - RNA, 19 nt, Artificial Sequence
  Description of Artificial Sequence: Synthetic oligonucleotide
aauccucggacaguucuuc

SEQ ID NO: 802086 - RNA, 19 nt, Artificial Sequence
  Description of Artificial Sequence: Synthetic oligonucleotide
caucguguuauagacuucc

SEQ ID NO: 802087 - RNA, 19 nt, Artificial Sequence
  Description of Artificial Sequence: Synthetic oligonucleotide
cuaagcugagccuuauuuc

SEQ ID NO: 802088 - RNA, 19 nt, Artificial Sequence
  Description of Artificial Sequence: Synthetic oligonucleotide
ugugacugagucgugaaaa

SEQ ID NO: 802089 - RNA, 19 nt, Artificial Sequence
  Description of Artificial Sequence: Synthetic oligonucleotide
uauccuccacuacuccugg

SEQ ID NO: 802090 - RNA, 19 nt, Artificial Sequence
  Description of Artificial Sequence: Synthetic oligonucleotide
uaugcgggagucuauuccu

SEQ ID NO: 802091 - RNA, 19 nt, Artificial Sequence
  Description of Artificial Sequence: Synthetic oligonucleotide
aagaccccaaaauugugua

SEQ ID NO: 802092 - RNA, 19 nt, Artificial Sequence
  Description of Artificial Sequence: Synthetic oligonucleotide
cuaugcgggagucuauucc

SEQ ID NO: 802093 - RNA, 19 nt, Artificial Sequence
  Description of Artificial Sequence: Synthetic oligonucleotide
auugaugcaacaacccaag

SEQ ID NO: 802094 - RNA, 19 nt, Artificial Sequence
  Description of Artificial Sequence: Synthetic oligonucleotide
aacgugaauuuguuuccca

SEQ ID NO: 802095 - RNA, 19 nt, Artificial Sequence
  Description of Artificial Sequence: Synthetic oligonucleotide
aaaauugcacggauagaga

SEQ ID NO: 802096 - RNA, 19 nt, Artificial Sequence
  Description of Artificial Sequence: Synthetic oligonucleotide
agugugagccaacgaacuc

SEQ ID NO: 802097 - RNA, 19 nt, Artificial Sequence
  Description of Artificial Sequence: Synthetic oligonucleotide
ugugugcugcuuugaaucc

SEQ ID NO: 802098 - RNA, 19 nt, Artificial Sequence
  Description of Artificial Sequence: Synthetic oligonucleotide
aaggaaccauacaugaacu

SEQ ID NO: 802099 - RNA, 19 nt, Artificial Sequence
  Description of Artificial Sequence: Synthetic oligonucleotide
uuucaucguguuauagacu

SEQ ID NO: 802100 - RNA, 19 nt, Artificial Sequence
  Description of Artificial Sequence: Synthetic oligonucleotide
gucuauuccuuccagcuga

SEQ ID NO: 802101 - RNA, 19 nt, Artificial Sequence
  Description of Artificial Sequence: Synthetic oligonucleotide
agaccccaaaauuguguac

SEQ ID NO: 802102 - RNA, 19 nt, Artificial Sequence
  Description of Artificial Sequence: Synthetic oligonucleotide
ugcacggauagagagacaa

SEQ ID NO: 802103 - RNA, 19 nt, Artificial Sequence
  Description of Artificial Sequence: Synthetic oligonucleotide
uuugggagcgucgauuucu

SEQ ID NO: 802104 - RNA, 19 nt, Artificial Sequence
  Description of Artificial Sequence: Synthetic oligonucleotide
cuagccguuccucuaugcg

SEQ ID NO: 802105 - RNA, 19 nt, Artificial Sequence
  Description of Artificial Sequence: Synthetic oligonucleotide
cccaguaugccauaacugg

SEQ ID NO: 802106 - RNA, 19 nt, Artificial Sequence
  Description of Artificial Sequence: Synthetic oligonucleotide
acaguaugcagcaaucuca

SEQ ID NO: 802107 - RNA, 19 nt, Artificial Sequence
  Description of Artificial Sequence: Synthetic oligonucleotide
agaccucggugucugaguc

SEQ ID NO: 802108 - RNA, 19 nt, Artificial Sequence
  Description of Artificial Sequence: Synthetic oligonucleotide
auaauacuacauaugaauu

SEQ ID NO: 802109 - RNA, 19 nt, Artificial Sequence
  Description of Artificial Sequence: Synthetic oligonucleotide
caauagugaaagaugacua

SEQ ID NO: 802110 - RNA, 19 nt, Artificial Sequence
  Description of Artificial Sequence: Synthetic oligonucleotide
aauccuacaaacacagcua

SEQ ID NO: 802111 - RNA, 19 nt, Artificial Sequence
  Description of Artificial Sequence: Synthetic oligonucleotide
agcucguugaaagaacaag

SEQ ID NO: 802112 - RNA, 19 nt, Artificial Sequence
  Description of Artificial Sequence: Synthetic oligonucleotide
auaucucccuuuagguucc

SEQ ID NO: 802113 - RNA, 19 nt, Artificial Sequence
  Description of Artificial Sequence: Synthetic oligonucleotide
uucaccacgcaguacuuuc

SEQ ID NO: 802114 - RNA, 19 nt, Artificial Sequence
  Description of Artificial Sequence: Synthetic oligonucleotide
agucuauugaggauaggug

SEQ ID NO: 802115 - RNA, 19 nt, Artificial Sequence
  Description of Artificial Sequence: Synthetic oligonucleotide
cugagucgugaaaacagac

SEQ ID NO: 802116 - RNA, 19 nt, Artificial Sequence
  Description of Artificial Sequence: Synthetic oligonucleotide
caguaugccauaacuggug

SEQ ID NO: 802117 - RNA, 19 nt, Artificial Sequence
  Description of Artificial Sequence: Synthetic oligonucleotide
auagagagacaacacugau

SEQ ID NO: 802118 - RNA, 19 nt, Artificial Sequence
  Description of Artificial Sequence: Synthetic oligonucleotide
ucggacaguucuucgaagu

SEQ ID NO: 802119 - RNA, 19 nt, Artificial Sequence
  Description of Artificial Sequence: Synthetic oligonucleotide
aggugaaguggucaaauua

SEQ ID NO: 802120 - RNA, 19 nt, Artificial Sequence
  Description of Artificial Sequence: Synthetic oligonucleotide
ucguguuauagacuuccaa

SEQ ID NO: 802121 - RNA, 19 nt, Artificial Sequence
  Description of Artificial Sequence: Synthetic oligonucleotide
uguuggaaaauugcacgga

SEQ ID NO: 802122 - RNA, 19 nt, Artificial Sequence
  Description of Artificial Sequence: Synthetic oligonucleotide
accaaguaacccuuguaaa

SEQ ID NO: 802123 - RNA, 19 nt, Artificial Sequence
  Description of Artificial Sequence: Synthetic oligonucleotide
gucgcaguccgacaauuag

SEQ ID NO: 802124 - RNA, 19 nt, Artificial Sequence
  Description of Artificial Sequence: Synthetic oligonucleotide
uguguccaacuccaccuug

SEQ ID NO: 802125 - RNA, 19 nt, Artificial Sequence
  Description of Artificial Sequence: Synthetic oligonucleotide
aauugcacggauagagaga

SEQ ID NO: 802126 - RNA, 19 nt, Artificial Sequence
  Description of Artificial Sequence: Synthetic oligonucleotide
uccauauuaucagcuggcc

SEQ ID NO: 802127 - RNA, 19 nt, Artificial Sequence
  Description of Artificial Sequence: Synthetic oligonucleotide
aagugugagccaacgaacu

SEQ ID NO: 802128 - RNA, 19 nt, Artificial Sequence
  Description of Artificial Sequence: Synthetic oligonucleotide
agucuauuccuuccagcug

SEQ ID NO: 802129 - RNA, 19 nt, Artificial Sequence
  Description of Artificial Sequence: Synthetic oligonucleotide
acgcaguacuuuccuauuc

SEQ ID NO: 802130 - RNA, 19 nt, Artificial Sequence
  Description of Artificial Sequence: Synthetic oligonucleotide
aacgccauuucaauggcaa

SEQ ID NO: 802131 - RNA, 19 nt, Artificial Sequence
  Description of Artificial Sequence: Synthetic oligonucleotide
ccaaaauuguguacagccg

SEQ ID NO: 802132 - RNA, 19 nt, Artificial Sequence
  Description of Artificial Sequence: Synthetic oligonucleotide
acggauagagagacaacac

SEQ ID NO: 802133 - RNA, 19 nt, Artificial Sequence
  Description of Artificial Sequence: Synthetic oligonucleotide
aucuaaggaaccauacaug

SEQ ID NO: 802134 - RNA, 19 nt, Artificial Sequence
  Description of Artificial Sequence: Synthetic oligonucleotide
gcaaaaggcacuaucuaag

SEQ ID NO: 802135 - RNA, 19 nt, Artificial Sequence
  Description of Artificial Sequence: Synthetic oligonucleotide
uucuaucauguuccuuagc

SEQ ID NO: 802136 - RNA, 19 nt, Artificial Sequence
  Description of Artificial Sequence: Synthetic oligonucleotide
gagccuuauuucuauaugu

SEQ ID NO: 802137 - RNA, 19 nt, Artificial Sequence
  Description of Artificial Sequence: Synthetic oligonucleotide
uccgacaauuaguaagaaa

SEQ ID NO: 802138 - RNA, 19 nt, Artificial Sequence
  Description of Artificial Sequence: Synthetic oligonucleotide
ucgcaguccgacaauuagu

SEQ ID NO: 802139 - RNA, 19 nt, Artificial Sequence
  Description of Artificial Sequence: Synthetic oligonucleotide
cagacucuuucaagaaagc

SEQ ID NO: 802140 - RNA, 19 nt, Artificial Sequence
  Description of Artificial Sequence: Synthetic oligonucleotide
agaugacuaagcugagccu

SEQ ID NO: 802141 - RNA, 19 nt, Artificial Sequence
  Description of Artificial Sequence: Synthetic oligonucleotide
agcgucgauuucuuucuag

SEQ ID NO: 802142 - RNA, 19 nt, Artificial Sequence
  Description of Artificial Sequence: Synthetic oligonucleotide
gaaggaauagucacugaaa

SEQ ID NO: 802143 - RNA, 19 nt, Artificial Sequence
  Description of Artificial Sequence: Synthetic oligonucleotide
gaccccaaaauuguguaca

SEQ ID NO: 802144 - RNA, 19 nt, Artificial Sequence
  Description of Artificial Sequence: Synthetic oligonucleotide
acagcggucagagaagaca

SEQ ID NO: 802145 - RNA, 19 nt, Artificial Sequence
  Description of Artificial Sequence: Synthetic oligonucleotide
cuaucuaaggaaccauaca

SEQ ID NO: 802146 - RNA, 19 nt, Artificial Sequence
  Description of Artificial Sequence: Synthetic oligonucleotide
aguccgacaauuaguaaga

SEQ ID NO: 802147 - RNA, 19 nt, Artificial Sequence
  Description of Artificial Sequence: Synthetic oligonucleotide
ugcacaccaaguaacccuu

SEQ ID NO: 802148 - RNA, 19 nt, Artificial Sequence
  Description of Artificial Sequence: Synthetic oligonucleotide
auaaugucgcaguccgaca

SEQ ID NO: 802149 - RNA, 19 nt, Artificial Sequence
  Description of Artificial Sequence: Synthetic oligonucleotide
ucugugacugagucgugaa

SEQ ID NO: 802150 - RNA, 19 nt, Artificial Sequence
  Description of Artificial Sequence: Synthetic oligonucleotide
uuugcugcuaaaggcagua

SEQ ID NO: 802151 - RNA, 19 nt, Artificial Sequence
  Description of Artificial Sequence: Synthetic oligonucleotide
cuauugaggauaggugaag

SEQ ID NO: 802152 - RNA, 19 nt, Artificial Sequence
  Description of Artificial Sequence: Synthetic oligonucleotide
uucuagcgagcuuaagcaa

SEQ ID NO: 802153 - RNA, 19 nt, Artificial Sequence
  Description of Artificial Sequence: Synthetic oligonucleotide
gccuuauuucuauauguug

SEQ ID NO: 802154 - RNA, 19 nt, Artificial Sequence
  Description of Artificial Sequence: Synthetic oligonucleotide
ccaauuaacaacaacuugu

SEQ ID NO: 802155 - RNA, 19 nt, Artificial Sequence
  Description of Artificial Sequence: Synthetic oligonucleotide
uugaugcaacaacccaaga

SEQ ID NO: 802156 - RNA, 19 nt, Artificial Sequence
  Description of Artificial Sequence: Synthetic oligonucleotide
uguuuuggugggccccugc

SEQ ID NO: 802157 - RNA, 19 nt, Artificial Sequence
  Description of Artificial Sequence: Synthetic oligonucleotide
gcuuccguacugcagcugg

SEQ ID NO: 802158 - RNA, 19 nt, Artificial Sequence
  Description of Artificial Sequence: Synthetic oligonucleotide
caaaauuguguacagccgu

SEQ ID NO: 802159 - RNA, 19 nt, Artificial Sequence
  Description of Artificial Sequence: Synthetic oligonucleotide
aggcacuaucuaaggaacc

SEQ ID NO: 802160 - RNA, 19 nt, Artificial Sequence
  Description of Artificial Sequence: Synthetic oligonucleotide
cucaaggucacucaacacu

SEQ ID NO: 802161 - RNA, 19 nt, Artificial Sequence
  Description of Artificial Sequence: Synthetic oligonucleotide
uucuucgaagucggcagcc

SEQ ID NO: 802162 - RNA, 19 nt, Artificial Sequence
  Description of Artificial Sequence: Synthetic oligonucleotide
uuccguacugcagcugggg

SEQ ID NO: 802163 - RNA, 19 nt, Artificial Sequence
  Description of Artificial Sequence: Synthetic oligonucleotide
cacggauagagagacaaca

SEQ ID NO: 802164 - RNA, 19 nt, Artificial Sequence
  Description of Artificial Sequence: Synthetic oligonucleotide
auggcggaaaccgccuagc

SEQ ID NO: 802165 - RNA, 19 nt, Artificial Sequence
  Description of Artificial Sequence: Synthetic oligonucleotide
auaggugaaguggucaaau

SEQ ID NO: 802166 - RNA, 19 nt, Artificial Sequence
  Description of Artificial Sequence: Synthetic oligonucleotide
ucgugaaaacagacauaca

SEQ ID NO: 802167 - RNA, 19 nt, Artificial Sequence
  Description of Artificial Sequence: Synthetic oligonucleotide
ucuaugcgggagucuauuc

SEQ ID NO: 802168 - RNA, 19 nt, Artificial Sequence
  Description of Artificial Sequence: Synthetic oligonucleotide
gcggaaaccgccuagcuga

SEQ ID NO: 802169 - RNA, 19 nt, Artificial Sequence
  Description of Artificial Sequence: Synthetic oligonucleotide
gugacugagucgugaaaac

SEQ ID NO: 802170 - RNA, 19 nt, Artificial Sequence
  Description of Artificial Sequence: Synthetic oligonucleotide
agccguuccucuaugcggg

SEQ ID NO: 802171 - RNA, 19 nt, Artificial Sequence
  Description of Artificial Sequence: Synthetic oligonucleotide
auaucuacucaaaugucuu

SEQ ID NO: 802172 - RNA, 19 nt, Artificial Sequence
  Description of Artificial Sequence: Synthetic oligonucleotide
uucugugacugagucguga

SEQ ID NO: 802173 - RNA, 19 nt, Artificial Sequence
  Description of Artificial Sequence: Synthetic oligonucleotide
aggauaggugaagugguca

SEQ ID NO: 802174 - RNA, 19 nt, Artificial Sequence
  Description of Artificial Sequence: Synthetic oligonucleotide
ucccuuuagguuccuggaa

SEQ ID NO: 802175 - RNA, 19 nt, Artificial Sequence
  Description of Artificial Sequence: Synthetic oligonucleotide
aguguauucucaggaccag

SEQ ID NO: 802176 - RNA, 19 nt, Artificial Sequence
  Description of Artificial Sequence: Synthetic oligonucleotide
uuguguacagccgucucau

SEQ ID NO: 802177 - RNA, 19 nt, Artificial Sequence
  Description of Artificial Sequence: Synthetic oligonucleotide
augcaacaacccaagagca

SEQ ID NO: 802178 - RNA, 19 nt, Artificial Sequence
  Description of Artificial Sequence: Synthetic oligonucleotide
caagagcauggcaucucag

SEQ ID NO: 802179 - RNA, 19 nt, Artificial Sequence
  Description of Artificial Sequence: Synthetic oligonucleotide
gcugcuaaaggcaguaggc

SEQ ID NO: 802180 - RNA, 19 nt, Artificial Sequence
  Description of Artificial Sequence: Synthetic oligonucleotide
gcaacaacccaagagcaug

SEQ ID NO: 802181 - RNA, 19 nt, Artificial Sequence
  Description of Artificial Sequence: Synthetic oligonucleotide
cugacacugucccacgauc

SEQ ID NO: 802182 - RNA, 19 nt, Artificial Sequence
  Description of Artificial Sequence: Synthetic oligonucleotide
aaaccgccuagcugagcca

SEQ ID NO: 802183 - RNA, 19 nt, Artificial Sequence
  Description of Artificial Sequence: Synthetic oligonucleotide
agcacuaaggcuggcgcug

SEQ ID NO: 802184 - RNA, 19 nt, Artificial Sequence
  Description of Artificial Sequence: Synthetic oligonucleotide
guaagaaauaucucccuuu

SEQ ID NO: 802185 - RNA, 19 nt, Artificial Sequence
  Description of Artificial Sequence: Synthetic oligonucleotide
caacgugaauuuguuuccc

SEQ ID NO: 802186 - RNA, 19 nt, Artificial Sequence
  Description of Artificial Sequence: Synthetic oligonucleotide
guucuucgaagucggcagc

SEQ ID NO: 802187 - RNA, 19 nt, Artificial Sequence
  Description of Artificial Sequence: Synthetic oligonucleotide
auguuaauccaaagaacaa

SEQ ID NO: 802188 - RNA, 19 nt, Artificial Sequence
  Description of Artificial Sequence: Synthetic oligonucleotide
auaguaauccucggacagu

SEQ ID NO: 802189 - RNA, 19 nt, Artificial Sequence
  Description of Artificial Sequence: Synthetic oligonucleotide
guuaauccaaagaacaauu

SEQ ID NO: 802190 - RNA, 19 nt, Artificial Sequence
  Description of Artificial Sequence: Synthetic oligonucleotide
cuuagguagauggcugcac

SEQ ID NO: 802191 - RNA, 19 nt, Artificial Sequence
  Description of Artificial Sequence: Synthetic oligonucleotide
augauccaaaugaggagug

SEQ ID NO: 802192 - RNA, 19 nt, Artificial Sequence
  Description of Artificial Sequence: Synthetic oligonucleotide
cuuccguacugcagcuggg

SEQ ID NO: 802193 - RNA, 19 nt, Artificial Sequence
  Description of Artificial Sequence: Synthetic oligonucleotide
cucggacaguucuucgaag

SEQ ID NO: 802194 - RNA, 19 nt, Artificial Sequence
  Description of Artificial Sequence: Synthetic oligonucleotide
cccacgaucccuuugugug

SEQ ID NO: 802195 - RNA, 19 nt, Artificial Sequence
  Description of Artificial Sequence: Synthetic oligonucleotide
cugcaucauacuguugagc

SEQ ID NO: 802196 - RNA, 19 nt, Artificial Sequence
  Description of Artificial Sequence: Synthetic oligonucleotide
ccgacaauuaguaagaaau

SEQ ID NO: 802197 - RNA, 19 nt, Artificial Sequence
  Description of Artificial Sequence: Synthetic oligonucleotide
auacaaucuggaccaggau

SEQ ID NO: 802198 - RNA, 19 nt, Artificial Sequence
  Description of Artificial Sequence: Synthetic oligonucleotide
agcugagccuuauuucuau

SEQ ID NO: 802199 - RNA, 19 nt, Artificial Sequence
  Description of Artificial Sequence: Synthetic oligonucleotide
uaauccucggacaguucuu

SEQ ID NO: 802200 - RNA, 19 nt, Artificial Sequence
  Description of Artificial Sequence: Synthetic oligonucleotide
ucccacgaucccuuugugu

SEQ ID NO: 802201 - RNA, 19 nt, Artificial Sequence
  Description of Artificial Sequence: Synthetic oligonucleotide
guguuauagacuuccaauu

SEQ ID NO: 802202 - RNA, 19 nt, Artificial Sequence
  Description of Artificial Sequence: Synthetic oligonucleotide
agggacugggcuuccgugu

SEQ ID NO: 802203 - RNA, 19 nt, Artificial Sequence
  Description of Artificial Sequence: Synthetic oligonucleotide
auggauuugggagcgucga

SEQ ID NO: 802204 - RNA, 19 nt, Artificial Sequence
  Description of Artificial Sequence: Synthetic oligonucleotide
auccuuagguagauggcug

SEQ ID NO: 802205 - RNA, 19 nt, Artificial Sequence
  Description of Artificial Sequence: Synthetic oligonucleotide
cuaaggaaccauacaugaa

SEQ ID NO: 802206 - RNA, 19 nt, Artificial Sequence
  Description of Artificial Sequence: Synthetic oligonucleotide
ugauccaaaugaggagugu

SEQ ID NO: 802207 - RNA, 19 nt, Artificial Sequence
  Description of Artificial Sequence: Synthetic oligonucleotide
caagacaggcagagcccgg

SEQ ID NO: 802208 - RNA, 19 nt, Artificial Sequence
  Description of Artificial Sequence: Synthetic oligonucleotide
ucaucguguuauagacuuc

SEQ ID NO: 802209 - RNA, 19 nt, Artificial Sequence
  Description of Artificial Sequence: Synthetic oligonucleotide
acugagucgugaaaacaga

SEQ ID NO: 802210 - RNA, 19 nt, Artificial Sequence
  Description of Artificial Sequence: Synthetic oligonucleotide
guucucaaccuggcaaaag

SEQ ID NO: 802211 - RNA, 19 nt, Artificial Sequence
  Description of Artificial Sequence: Synthetic oligonucleotide
uuccuuagcuggggaagag

SEQ ID NO: 802212 - RNA, 19 nt, Artificial Sequence
  Description of Artificial Sequence: Synthetic oligonucleotide
aggcucauauccuccacua

SEQ ID NO: 802213 - RNA, 19 nt, Artificial Sequence
  Description of Artificial Sequence: Synthetic oligonucleotide
acucaacacuguguccaac

SEQ ID NO: 802214 - RNA, 19 nt, Artificial Sequence
  Description of Artificial Sequence: Synthetic oligonucleotide
ucuauuccuuccagcugau

SEQ ID NO: 802215 - RNA, 19 nt, Artificial Sequence
  Description of Artificial Sequence: Synthetic oligonucleotide
uaggugaaguggucaaauu

SEQ ID NO: 802216 - RNA, 19 nt, Artificial Sequence
  Description of Artificial Sequence: Synthetic oligonucleotide
ggcguuuucuucugaucag

SEQ ID NO: 802217 - RNA, 19 nt, Artificial Sequence
  Description of Artificial Sequence: Synthetic oligonucleotide
uacuggcgacaguaugcag

SEQ ID NO: 802218 - RNA, 19 nt, Artificial Sequence
  Description of Artificial Sequence: Synthetic oligonucleotide
gaugacuaagcugagccuu

SEQ ID NO: 802219 - RNA, 19 nt, Artificial Sequence
  Description of Artificial Sequence: Synthetic oligonucleotide
gcaguaggcaguacuggcg

SEQ ID NO: 802220 - RNA, 19 nt, Artificial Sequence
  Description of Artificial Sequence: Synthetic oligonucleotide
gauuugggagcgucgauuu

SEQ ID NO: 802221 - RNA, 19 nt, Artificial Sequence
  Description of Artificial Sequence: Synthetic oligonucleotide
gcgucgauuucuuucuagc

SEQ ID NO: 802222 - RNA, 19 nt, Artificial Sequence
  Description of Artificial Sequence: Synthetic oligonucleotide
caguaugcagcaaucucaa

SEQ ID NO: 802223 - RNA, 19 nt, Artificial Sequence
  Description of Artificial Sequence: Synthetic oligonucleotide
gagguuuggggugaaggaa

SEQ ID NO: 802224 - RNA, 19 nt, Artificial Sequence
  Description of Artificial Sequence: Synthetic oligonucleotide
guuuuggugggccccugca

SEQ ID NO: 802225 - RNA, 19 nt, Artificial Sequence
  Description of Artificial Sequence: Synthetic oligonucleotide
cugaugaagaguuguucua

SEQ ID NO: 802226 - RNA, 19 nt, Artificial Sequence
  Description of Artificial Sequence: Synthetic oligonucleotide
caacccaagagcauggcau

SEQ ID NO: 802227 - RNA, 19 nt, Artificial Sequence
  Description of Artificial Sequence: Synthetic oligonucleotide
auauuaucagcuggccaau

SEQ ID NO: 802228 - RNA, 19 nt, Artificial Sequence
  Description of Artificial Sequence: Synthetic oligonucleotide
ugucgcaguccgacaauua

SEQ ID NO: 802229 - RNA, 19 nt, Artificial Sequence
  Description of Artificial Sequence: Synthetic oligonucleotide
gaguuccuguggaagugug

SEQ ID NO: 802230 - RNA, 19 nt, Artificial Sequence
  Description of Artificial Sequence: Synthetic oligonucleotide
agccugaucuacauaaaua

SEQ ID NO: 802231 - RNA, 19 nt, Artificial Sequence
  Description of Artificial Sequence: Synthetic oligonucleotide
cgucgauuucuuucuagcg

SEQ ID NO: 802232 - RNA, 19 nt, Artificial Sequence
  Description of Artificial Sequence: Synthetic oligonucleotide
uggcggaaaccgccuagcu

SEQ ID NO: 802233 - RNA, 19 nt, Artificial Sequence
  Description of Artificial Sequence: Synthetic oligonucleotide
agaugcaacuugucagguu

SEQ ID NO: 802234 - RNA, 19 nt, Artificial Sequence
  Description of Artificial Sequence: Synthetic oligonucleotide
aggcaacauaauggaagag

SEQ ID NO: 802235 - RNA, 19 nt, Artificial Sequence
  Description of Artificial Sequence: Synthetic oligonucleotide
uggauuugggagcgucgau

SEQ ID NO: 802236 - RNA, 19 nt, Artificial Sequence
  Description of Artificial Sequence: Synthetic oligonucleotide
cacuaucuaaggaaccaua

SEQ ID NO: 802237 - RNA, 19 nt, Artificial Sequence
  Description of Artificial Sequence: Synthetic oligonucleotide
uggcaucucagcguuuaaa

SEQ ID NO: 802238 - RNA, 19 nt, Artificial Sequence
  Description of Artificial Sequence: Synthetic oligonucleotide
ugcccugcacuguuucuaa

SEQ ID NO: 802239 - RNA, 19 nt, Artificial Sequence
  Description of Artificial Sequence: Synthetic oligonucleotide
aggucacucaacacugugu

SEQ ID NO: 802240 - RNA, 19 nt, Artificial Sequence
  Description of Artificial Sequence: Synthetic oligonucleotide
uugcugcuaaaggcaguag

SEQ ID NO: 802241 - RNA, 19 nt, Artificial Sequence
  Description of Artificial Sequence: Synthetic oligonucleotide
guggcguuuucuucugauc

SEQ ID NO: 802242 - RNA, 19 nt, Artificial Sequence
  Description of Artificial Sequence: Synthetic oligonucleotide
ggcaggccaauuaacaaca

SEQ ID NO: 802243 - RNA, 19 nt, Artificial Sequence
  Description of Artificial Sequence: Synthetic oligonucleotide
cagccgucucaugucauag

SEQ ID NO: 802244 - RNA, 19 nt, Artificial Sequence
  Description of Artificial Sequence: Synthetic oligonucleotide
cugcuaaaggcaguaggca

SEQ ID NO: 802245 - RNA, 19 nt, Artificial Sequence
  Description of Artificial Sequence: Synthetic oligonucleotide
agccuuauuucuauauguu

SEQ ID NO: 802246 - RNA, 19 nt, Artificial Sequence
  Description of Artificial Sequence: Synthetic oligonucleotide
ccaaguaacccuuguaaaa

SEQ ID NO: 802247 - RNA, 19 nt, Artificial Sequence
  Description of Artificial Sequence: Synthetic oligonucleotide
guacuggcgacaguaugca

SEQ ID NO: 802248 - RNA, 19 nt, Artificial Sequence
  Description of Artificial Sequence: Synthetic oligonucleotide
ggcggaaaccgccuagcug

SEQ ID NO: 802249 - RNA, 19 nt, Artificial Sequence
  Description of Artificial Sequence: Synthetic oligonucleotide
guuguucuagccugaucua

SEQ ID NO: 802250 - RNA, 19 nt, Artificial Sequence
  Description of Artificial Sequence: Synthetic oligonucleotide
acuguuuuggugggccccu

SEQ ID NO: 802251 - RNA, 19 nt, Artificial Sequence
  Description of Artificial Sequence: Synthetic oligonucleotide
uugggagcgucgauuucuu

SEQ ID NO: 802252 - RNA, 19 nt, Artificial Sequence
  Description of Artificial Sequence: Synthetic oligonucleotide
caccuugaguuccugugga

SEQ ID NO: 802253 - RNA, 19 nt, Artificial Sequence
  Description of Artificial Sequence: Synthetic oligonucleotide
uacagccgucucaugucau

SEQ ID NO: 802254 - RNA, 19 nt, Artificial Sequence
  Description of Artificial Sequence: Synthetic oligonucleotide
ggcaacauaauggaagagu

SEQ ID NO: 802255 - RNA, 19 nt, Artificial Sequence
  Description of Artificial Sequence: Synthetic oligonucleotide
ugccauaacugguggcguu

SEQ ID NO: 802256 - RNA, 19 nt, Artificial Sequence
  Description of Artificial Sequence: Synthetic oligonucleotide
ucuuugcuuugcugcuaaa

SEQ ID NO: 802257 - RNA, 19 nt, Artificial Sequence
  Description of Artificial Sequence: Synthetic oligonucleotide
gacauugaaucugcagacu

SEQ ID NO: 802258 - RNA, 19 nt, Artificial Sequence
  Description of Artificial Sequence: Synthetic oligonucleotide
ggugaaggaagagccuccc

SEQ ID NO: 802259 - RNA, 19 nt, Artificial Sequence
  Description of Artificial Sequence: Synthetic oligonucleotide
uugcacggauagagagaca

SEQ ID NO: 802260 - RNA, 19 nt, Artificial Sequence
  Description of Artificial Sequence: Synthetic oligonucleotide
ggugaaguggucaaauuau

SEQ ID NO: 802261 - RNA, 19 nt, Artificial Sequence
  Description of Artificial Sequence: Synthetic oligonucleotide
guagugugugggcuaggaa

SEQ ID NO: 802262 - RNA, 19 nt, Artificial Sequence
  Description of Artificial Sequence: Synthetic oligonucleotide
acagccgucucaugucaua

SEQ ID NO: 802263 - RNA, 19 nt, Artificial Sequence
  Description of Artificial Sequence: Synthetic oligonucleotide
cauccuuagguagauggcu

SEQ ID NO: 802264 - RNA, 19 nt, Artificial Sequence
  Description of Artificial Sequence: Synthetic oligonucleotide
ugacuaagcugagccuuau

SEQ ID NO: 802265 - RNA, 19 nt, Artificial Sequence
  Description of Artificial Sequence: Synthetic oligonucleotide
cugagccuuauuucuauau

SEQ ID NO: 802266 - RNA, 19 nt, Artificial Sequence
  Description of Artificial Sequence: Synthetic oligonucleotide
cagcuacaauguuaaucca

SEQ ID NO: 802267 - RNA, 19 nt, Artificial Sequence
  Description of Artificial Sequence: Synthetic oligonucleotide
gcuguccaaaagcacggca

SEQ ID NO: 802268 - RNA, 19 nt, Artificial Sequence
  Description of Artificial Sequence: Synthetic oligonucleotide
aacgaacuccagggaggcu

SEQ ID NO: 802269 - RNA, 19 nt, Artificial Sequence
  Description of Artificial Sequence: Synthetic oligonucleotide
gucuucuauaauacuacau

SEQ ID NO: 802270 - RNA, 19 nt, Artificial Sequence
  Description of Artificial Sequence: Synthetic oligonucleotide
ccaaaugaggaguguucuc

SEQ ID NO: 802271 - RNA, 19 nt, Artificial Sequence
  Description of Artificial Sequence: Synthetic oligonucleotide
ccauauuaucagcuggcca

SEQ ID NO: 802272 - RNA, 19 nt, Artificial Sequence
  Description of Artificial Sequence: Synthetic oligonucleotide
agaguuguucuagccugau

SEQ ID NO: 802273 - RNA, 19 nt, Artificial Sequence
  Description of Artificial Sequence: Synthetic oligonucleotide
aucguguuauagacuucca

SEQ ID NO: 802274 - RNA, 19 nt, Artificial Sequence
  Description of Artificial Sequence: Synthetic oligonucleotide
ggucaaauuaucugccuuu

SEQ ID NO: 802275 - RNA, 19 nt, Artificial Sequence
  Description of Artificial Sequence: Synthetic oligonucleotide
cugucccacgaucccuuug

SEQ ID NO: 802276 - RNA, 19 nt, Artificial Sequence
  Description of Artificial Sequence: Synthetic oligonucleotide
gaucccuuugugugcugcu

SEQ ID NO: 802277 - RNA, 19 nt, Artificial Sequence
  Description of Artificial Sequence: Synthetic oligonucleotide
agcauggcggaaaccgccu

SEQ ID NO: 802278 - RNA, 19 nt, Artificial Sequence
  Description of Artificial Sequence: Synthetic oligonucleotide
cuggccaauucuuugcuuu

SEQ ID NO: 802279 - RNA, 19 nt, Artificial Sequence
  Description of Artificial Sequence: Synthetic oligonucleotide
gagaugcaacuugucaggu

SEQ ID NO: 802280 - RNA, 19 nt, Artificial Sequence
  Description of Artificial Sequence: Synthetic oligonucleotide
ccacgaucccuuugugugc

SEQ ID NO: 802281 - RNA, 19 nt, Artificial Sequence
  Description of Artificial Sequence: Synthetic oligonucleotide
accacgcaguacuuuccua

SEQ ID NO: 802282 - RNA, 19 nt, Artificial Sequence
  Description of Artificial Sequence: Synthetic oligonucleotide
ggcucauauccuccacuac

SEQ ID NO: 802283 - RNA, 19 nt, Artificial Sequence
  Description of Artificial Sequence: Synthetic oligonucleotide
acugggcuuccgugucuug

SEQ ID NO: 802284 - RNA, 19 nt, Artificial Sequence
  Description of Artificial Sequence: Synthetic oligonucleotide
gucccacgaucccuuugug

SEQ ID NO: 802285 - RNA, 19 nt, Artificial Sequence
  Description of Artificial Sequence: Synthetic oligonucleotide
accgccuagcugagccacc

SEQ ID NO: 802286 - RNA, 19 nt, Artificial Sequence
  Description of Artificial Sequence: Synthetic oligonucleotide
cucggugucugagucugca

SEQ ID NO: 802287 - RNA, 19 nt, Artificial Sequence
  Description of Artificial Sequence: Synthetic oligonucleotide
augacuaagcugagccuua

SEQ ID NO: 802288 - RNA, 19 nt, Artificial Sequence
  Description of Artificial Sequence: Synthetic oligonucleotide
gccgucucaugucauagua

SEQ ID NO: 802289 - RNA, 19 nt, Artificial Sequence
  Description of Artificial Sequence: Synthetic oligonucleotide
gggguagugugugggcuag

SEQ ID NO: 802290 - RNA, 19 nt, Artificial Sequence
  Description of Artificial Sequence: Synthetic oligonucleotide
cugugacugagucgugaaa

SEQ ID NO: 802291 - RNA, 19 nt, Artificial Sequence
  Description of Artificial Sequence: Synthetic oligonucleotide
guagauggcugcacaccaa

SEQ ID NO: 802292 - RNA, 19 nt, Artificial Sequence
  Description of Artificial Sequence: Synthetic oligonucleotide
acaacuugucagacucuuu

SEQ ID NO: 802293 - RNA, 19 nt, Artificial Sequence
  Description of Artificial Sequence: Synthetic oligonucleotide
ccaguuuucaggugaacau

SEQ ID NO: 802294 - RNA, 19 nt, Artificial Sequence
  Description of Artificial Sequence: Synthetic oligonucleotide
ggcgacaguaugcagcaau

SEQ ID NO: 802295 - RNA, 19 nt, Artificial Sequence
  Description of Artificial Sequence: Synthetic oligonucleotide
gcgacaguaugcagcaauc

SEQ ID NO: 802296 - RNA, 19 nt, Artificial Sequence
  Description of Artificial Sequence: Synthetic oligonucleotide
gauguacagccuccagcuu

SEQ ID NO: 802297 - RNA, 19 nt, Artificial Sequence
  Description of Artificial Sequence: Synthetic oligonucleotide
guccgacaauuaguaagaa

SEQ ID NO: 802298 - RNA, 19 nt, Artificial Sequence
  Description of Artificial Sequence: Synthetic oligonucleotide
ccaguaugccauaacuggu

SEQ ID NO: 802299 - RNA, 19 nt, Artificial Sequence
  Description of Artificial Sequence: Synthetic oligonucleotide
cuguuuuggugggccccug

SEQ ID NO: 802300 - RNA, 19 nt, Artificial Sequence
  Description of Artificial Sequence: Synthetic oligonucleotide
gcccugcacuguuucuaag

SEQ ID NO: 802301 - RNA, 19 nt, Artificial Sequence
  Description of Artificial Sequence: Synthetic oligonucleotide
gcaguccgacaauuaguaa

SEQ ID NO: 802302 - RNA, 19 nt, Artificial Sequence
  Description of Artificial Sequence: Synthetic oligonucleotide
cgcaguccgacaauuagua

SEQ ID NO: 802303 - RNA, 19 nt, Artificial Sequence
  Description of Artificial Sequence: Synthetic oligonucleotide
gacuaagcugagccuuauu

SEQ ID NO: 802304 - RNA, 19 nt, Artificial Sequence
  Description of Artificial Sequence: Synthetic oligonucleotide
cugaaccauuggauucucu

SEQ ID NO: 802305 - RNA, 19 nt, Artificial Sequence
  Description of Artificial Sequence: Synthetic oligonucleotide
cacuacuccuggagggacu

SEQ ID NO: 802306 - RNA, 19 nt, Artificial Sequence
  Description of Artificial Sequence: Synthetic oligonucleotide
caccacgcaguacuuuccu

SEQ ID NO: 802307 - RNA, 19 nt, Artificial Sequence
  Description of Artificial Sequence: Synthetic oligonucleotide
gggccccugcagucuauug

SEQ ID NO: 802308 - RNA, 19 nt, Artificial Sequence
  Description of Artificial Sequence: Synthetic oligonucleotide
ccacccaguaugccauaac

SEQ ID NO: 802309 - RNA, 19 nt, Artificial Sequence
  Description of Artificial Sequence: Synthetic oligonucleotide
ggaaaccgccuagcugagc

SEQ ID NO: 802310 - RNA, 19 nt, Artificial Sequence
  Description of Artificial Sequence: Synthetic oligonucleotide
cacgaucccuuugugugcu

SEQ ID NO: 802311 - RNA, 19 nt, Artificial Sequence
  Description of Artificial Sequence: Synthetic oligonucleotide
ccucggacaguucuucgaa

SEQ ID NO: 802312 - RNA, 19 nt, Artificial Sequence
  Description of Artificial Sequence: Synthetic oligonucleotide
cgucucaugucauaguaau

SEQ ID NO: 802313 - RNA, 19 nt, Artificial Sequence
  Description of Artificial Sequence: Synthetic oligonucleotide
ggauuugggagcgucgauu

SEQ ID NO: 802314 - RNA, 19 nt, Artificial Sequence
  Description of Artificial Sequence: Synthetic oligonucleotide
cacgcaguacuuuccuauu

SEQ ID NO: 802315 - RNA, 19 nt, Artificial Sequence
  Description of Artificial Sequence: Synthetic oligonucleotide
cgaucccuuugugugcugc

SEQ ID NO: 802316 - RNA, 19 nt, Artificial Sequence
  Description of Artificial Sequence: Synthetic oligonucleotide
ccgucucaugucauaguaa

SEQ ID NO: 802317 - RNA, 19 nt, Artificial Sequence
  Description of Artificial Sequence: Synthetic oligonucleotide
cggauagagagacaacacu

SEQ ID NO: 802318 - RNA, 19 nt, Artificial Sequence
  Description of Artificial Sequence: Synthetic oligonucleotide
ccuuagguagauggcugca

SEQ ID NO: 802319 - RNA, 19 nt, Artificial Sequence
  Description of Artificial Sequence: Synthetic oligonucleotide
ccacgcaguacuuuccuau

SEQ ID NO: 802320 - RNA, 19 nt, Artificial Sequence
  Description of Artificial Sequence: Synthetic oligonucleotide
gcccgggagaugaggcuag

SEQ ID NO: 802321 - RNA, 19 nt, Artificial Sequence
  Description of Artificial Sequence: Synthetic oligonucleotide
gcguuuucuucugaucagu

SEQ ID NO: 802322 - RNA, 19 nt, Artificial Sequence
  Description of Artificial Sequence: Synthetic oligonucleotide
cucuaugcgggagucuauu

SEQ ID NO: 802323 - RNA, 19 nt, Artificial Sequence
  Description of Artificial Sequence: Synthetic oligonucleotide
cggaaaccgccuagcugag

SEQ ID NO: 802324 - RNA, 19 nt, Artificial Sequence
  Description of Artificial Sequence: Synthetic oligonucleotide
gcacuaaggcuggcgcuga

SEQ ID NO: 802325 - RNA, 19 nt, Artificial Sequence
  Description of Artificial Sequence: Synthetic oligonucleotide
cuguguccaacuccaccuu

SEQ ID NO: 802326 - RNA, 19 nt, Artificial Sequence
  Description of Artificial Sequence: Synthetic oligonucleotide
ggcuaggaacaacacccuu

SEQ ID NO: 802327 - RNA, 19 nt, Artificial Sequence
  Description of Artificial Sequence: Synthetic oligonucleotide
cgagcuuaagcaaggccau

SEQ ID NO: 802328 - RNA, 19 nt, Artificial Sequence
  Description of Artificial Sequence: Synthetic oligonucleotide
gcgcugagaugcaacuugu

SEQ ID NO: 802329 - RNA, 19 nt, Artificial Sequence
  Description of Artificial Sequence: Synthetic oligonucleotide
gccauaacugguggcguuu

SEQ ID NO: 802330 - RNA, 19 nt, Artificial Sequence
  Description of Artificial Sequence: Synthetic oligonucleotide
gggcagugucuucuaucau

SEQ ID NO: 802331 - RNA, 19 nt, Artificial Sequence
  Description of Artificial Sequence: Synthetic oligonucleotide
cccgggagaugaggcuagc

SEQ ID NO: 802332 - RNA, 19 nt, Artificial Sequence
  Description of Artificial Sequence: Synthetic oligonucleotide
cguuccucuaugcgggagu

SEQ ID NO: 802333 - RNA, 19 nt, Artificial Sequence
  Description of Artificial Sequence: Synthetic oligonucleotide
ccuagcugagccaccucuu

SEQ ID NO: 802334 - RNA, 19 nt, Artificial Sequence
  Description of Artificial Sequence: Synthetic oligonucleotide
cgacaguaugcagcaaucu

SEQ ID NO: 802335 - RNA, 19 nt, Artificial Sequence
  Description of Artificial Sequence: Synthetic oligonucleotide
ccauaacugguggcguuuu

SEQ ID NO: 802336 - RNA, 19 nt, Artificial Sequence
  Description of Artificial Sequence: Synthetic oligonucleotide
aauauguuugaaccucucc

SEQ ID NO: 802337 - RNA, 19 nt, Artificial Sequence
  Description of Artificial Sequence: Synthetic oligonucleotide
aacagcguggcccaaaggg

SEQ ID NO: 802338 - RNA, 19 nt, Artificial Sequence
  Description of Artificial Sequence: Synthetic oligonucleotide
auuucauacaucauagugc

SEQ ID NO: 802339 - RNA, 19 nt, Artificial Sequence
  Description of Artificial Sequence: Synthetic oligonucleotide
auaucggaaagcccgaacc

SEQ ID NO: 802340 - RNA, 19 nt, Artificial Sequence
  Description of Artificial Sequence: Synthetic oligonucleotide
caugguaugccacagaccc

SEQ ID NO: 802341 - RNA, 19 nt, Artificial Sequence
  Description of Artificial Sequence: Synthetic oligonucleotide
ugauaaauauggaaacucc

SEQ ID NO: 802342 - RNA, 19 nt, Artificial Sequence
  Description of Artificial Sequence: Synthetic oligonucleotide
agacgcuagaaucauacac

SEQ ID NO: 802343 - RNA, 19 nt, Artificial Sequence
  Description of Artificial Sequence: Synthetic oligonucleotide
agagagauagccaagacag

SEQ ID NO: 802344 - RNA, 19 nt, Artificial Sequence
  Description of Artificial Sequence: Synthetic oligonucleotide
uacaucauagugcaggggc

SEQ ID NO: 802345 - RNA, 19 nt, Artificial Sequence
  Description of Artificial Sequence: Synthetic oligonucleotide
cuagaugugauuuaggaca

SEQ ID NO: 802346 - RNA, 19 nt, Artificial Sequence
  Description of Artificial Sequence: Synthetic oligonucleotide
cagaauugcacuuggagcc

SEQ ID NO: 802347 - RNA, 19 nt, Artificial Sequence
  Description of Artificial Sequence: Synthetic oligonucleotide
aacucaaagugucaccauc

SEQ ID NO: 802348 - RNA, 19 nt, Artificial Sequence
  Description of Artificial Sequence: Synthetic oligonucleotide
auacugagcacucuguggg

SEQ ID NO: 802349 - RNA, 19 nt, Artificial Sequence
  Description of Artificial Sequence: Synthetic oligonucleotide
guaaagaagaucugggcag

SEQ ID NO: 802350 - RNA, 19 nt, Artificial Sequence
  Description of Artificial Sequence: Synthetic oligonucleotide
acagucaacuggcacaagc

SEQ ID NO: 802351 - RNA, 19 nt, Artificial Sequence
  Description of Artificial Sequence: Synthetic oligonucleotide
aaguauuccagcagagucc

SEQ ID NO: 802352 - RNA, 19 nt, Artificial Sequence
  Description of Artificial Sequence: Synthetic oligonucleotide
acaacugucaucacugucc

SEQ ID NO: 802353 - RNA, 19 nt, Artificial Sequence
  Description of Artificial Sequence: Synthetic oligonucleotide
cauuucauacaucauagug

SEQ ID NO: 802354 - RNA, 19 nt, Artificial Sequence
  Description of Artificial Sequence: Synthetic oligonucleotide
uguauaaacaucucugguc

SEQ ID NO: 802355 - RNA, 19 nt, Artificial Sequence
  Description of Artificial Sequence: Synthetic oligonucleotide
auagcagccaacuucacca

SEQ ID NO: 802356 - RNA, 19 nt, Artificial Sequence
  Description of Artificial Sequence: Synthetic oligonucleotide
uauguagacgcuagaauca

SEQ ID NO: 802357 - RNA, 19 nt, Artificial Sequence
  Description of Artificial Sequence: Synthetic oligonucleotide
ugaaccucuccugauaucg

SEQ ID NO: 802358 - RNA, 19 nt, Artificial Sequence
  Description of Artificial Sequence: Synthetic oligonucleotide
aaguaauggcuacgggugc

SEQ ID NO: 802359 - RNA, 19 nt, Artificial Sequence
  Description of Artificial Sequence: Synthetic oligonucleotide
auauguuugaaccucuccu

SEQ ID NO: 802360 - RNA, 19 nt, Artificial Sequence
  Description of Artificial Sequence: Synthetic oligonucleotide
cuuuguaacagcguggccc

SEQ ID NO: 802361 - RNA, 19 nt, Artificial Sequence
  Description of Artificial Sequence: Synthetic oligonucleotide
aagagcggggucuauguag

SEQ ID NO: 802362 - RNA, 19 nt, Artificial Sequence
  Description of Artificial Sequence: Synthetic oligonucleotide
cugagcauuccaauggugg

SEQ ID NO: 802363 - RNA, 19 nt, Artificial Sequence
  Description of Artificial Sequence: Synthetic oligonucleotide
aguauuccagcagaguccc

SEQ ID NO: 802364 - RNA, 19 nt, Artificial Sequence
  Description of Artificial Sequence: Synthetic oligonucleotide
uuuccugauaaauauggaa

SEQ ID NO: 802365 - RNA, 19 nt, Artificial Sequence
  Description of Artificial Sequence: Synthetic oligonucleotide
gaaguaauggcuacgggug

SEQ ID NO: 802366 - RNA, 19 nt, Artificial Sequence
  Description of Artificial Sequence: Synthetic oligonucleotide
ugcacaucaaaggacacag

SEQ ID NO: 802367 - RNA, 19 nt, Artificial Sequence
  Description of Artificial Sequence: Synthetic oligonucleotide
agcauuucucuccaggguc

SEQ ID NO: 802368 - RNA, 19 nt, Artificial Sequence
  Description of Artificial Sequence: Synthetic oligonucleotide
uuuaugugaugcuuuggug

SEQ ID NO: 802369 - RNA, 19 nt, Artificial Sequence
  Description of Artificial Sequence: Synthetic oligonucleotide
agaaucauacacugaagca

SEQ ID NO: 802370 - RNA, 19 nt, Artificial Sequence
  Description of Artificial Sequence: Synthetic oligonucleotide
auccacgauacucuugccc

SEQ ID NO: 802371 - RNA, 19 nt, Artificial Sequence
  Description of Artificial Sequence: Synthetic oligonucleotide
ccugauaucggaaagcccg

SEQ ID NO: 802372 - RNA, 19 nt, Artificial Sequence
  Description of Artificial Sequence: Synthetic oligonucleotide
uggugcagaaggaaagggg

SEQ ID NO: 802373 - RNA, 19 nt, Artificial Sequence
  Description of Artificial Sequence: Synthetic oligonucleotide
ucggccauuguacagcuug

SEQ ID NO: 802374 - RNA, 19 nt, Artificial Sequence
  Description of Artificial Sequence: Synthetic oligonucleotide
agguacaugacauuucgga

SEQ ID NO: 802375 - RNA, 19 nt, Artificial Sequence
  Description of Artificial Sequence: Synthetic oligonucleotide
caaguauuccagcagaguc

SEQ ID NO: 802376 - RNA, 19 nt, Artificial Sequence
  Description of Artificial Sequence: Synthetic oligonucleotide
uuccggguaaagaaaacca

SEQ ID NO: 802377 - RNA, 19 nt, Artificial Sequence
  Description of Artificial Sequence: Synthetic oligonucleotide
uucauaacuguccaccauc

SEQ ID NO: 802378 - RNA, 19 nt, Artificial Sequence
  Description of Artificial Sequence: Synthetic oligonucleotide
uguccccuuuguaacagcg

SEQ ID NO: 802379 - RNA, 19 nt, Artificial Sequence
  Description of Artificial Sequence: Synthetic oligonucleotide
acuggcgccccuuagcucg

SEQ ID NO: 802380 - RNA, 19 nt, Artificial Sequence
  Description of Artificial Sequence: Synthetic oligonucleotide
cuuagcucggccauuguac

SEQ ID NO: 802381 - RNA, 19 nt, Artificial Sequence
  Description of Artificial Sequence: Synthetic oligonucleotide
agcguugagaugcagccuc

SEQ ID NO: 802382 - RNA, 19 nt, Artificial Sequence
  Description of Artificial Sequence: Synthetic oligonucleotide
augcauaccaacugcuggg

SEQ ID NO: 802383 - RNA, 19 nt, Artificial Sequence
  Description of Artificial Sequence: Synthetic oligonucleotide
uaauugcuguccuugguca

SEQ ID NO: 802384 - RNA, 19 nt, Artificial Sequence
  Description of Artificial Sequence: Synthetic oligonucleotide
caugguaggcuacagaguc

SEQ ID NO: 802385 - RNA, 19 nt, Artificial Sequence
  Description of Artificial Sequence: Synthetic oligonucleotide
aauauggaaacuccaucuu

SEQ ID NO: 802386 - RNA, 19 nt, Artificial Sequence
  Description of Artificial Sequence: Synthetic oligonucleotide
uuucggacauuccggacag

SEQ ID NO: 802387 - RNA, 19 nt, Artificial Sequence
  Description of Artificial Sequence: Synthetic oligonucleotide
acaacugagcauuccaaug

SEQ ID NO: 802388 - RNA, 19 nt, Artificial Sequence
  Description of Artificial Sequence: Synthetic oligonucleotide
gacucugacaucaugcagc

SEQ ID NO: 802389 - RNA, 19 nt, Artificial Sequence
  Description of Artificial Sequence: Synthetic oligonucleotide
ucauaacuguccaccauca

SEQ ID NO: 802390 - RNA, 19 nt, Artificial Sequence
  Description of Artificial Sequence: Synthetic oligonucleotide
uuuguaacagcguggccca

SEQ ID NO: 802391 - RNA, 19 nt, Artificial Sequence
  Description of Artificial Sequence: Synthetic oligonucleotide
uaaggggccaaguugcagc

SEQ ID NO: 802392 - RNA, 19 nt, Artificial Sequence
  Description of Artificial Sequence: Synthetic oligonucleotide
uccaauggugggaaagaag

SEQ ID NO: 802393 - RNA, 19 nt, Artificial Sequence
  Description of Artificial Sequence: Synthetic oligonucleotide
gauuuaggacagcagccag

SEQ ID NO: 802394 - RNA, 19 nt, Artificial Sequence
  Description of Artificial Sequence: Synthetic oligonucleotide
uccacaagaauauguuuga

SEQ ID NO: 802395 - RNA, 19 nt, Artificial Sequence
  Description of Artificial Sequence: Synthetic oligonucleotide
aacugagaccaagagcggg

SEQ ID NO: 802396 - RNA, 19 nt, Artificial Sequence
  Description of Artificial Sequence: Synthetic oligonucleotide
auuucggacauuccggaca

SEQ ID NO: 802397 - RNA, 19 nt, Artificial Sequence
  Description of Artificial Sequence: Synthetic oligonucleotide
uggguguauaaacaucucu

SEQ ID NO: 802398 - RNA, 19 nt, Artificial Sequence
  Description of Artificial Sequence: Synthetic oligonucleotide
ugauccaagcuguaguacu

SEQ ID NO: 802399 - RNA, 19 nt, Artificial Sequence
  Description of Artificial Sequence: Synthetic oligonucleotide
aaacuggcgccccuuagcu

SEQ ID NO: 802400 - RNA, 19 nt, Artificial Sequence
  Description of Artificial Sequence: Synthetic oligonucleotide
cugauaaauauggaaacuc

SEQ ID NO: 802401 - RNA, 19 nt, Artificial Sequence
  Description of Artificial Sequence: Synthetic oligonucleotide
aauugcuguccuuggucag

SEQ ID NO: 802402 - RNA, 19 nt, Artificial Sequence
  Description of Artificial Sequence: Synthetic oligonucleotide
uccccuuuguaacagcgug

SEQ ID NO: 802403 - RNA, 19 nt, Artificial Sequence
  Description of Artificial Sequence: Synthetic oligonucleotide
cauaccaacugcugggaag

SEQ ID NO: 802404 - RNA, 19 nt, Artificial Sequence
  Description of Artificial Sequence: Synthetic oligonucleotide
gaaucauacacugaagcaa

SEQ ID NO: 802405 - RNA, 19 nt, Artificial Sequence
  Description of Artificial Sequence: Synthetic oligonucleotide
agucaacuggcacaagcag

SEQ ID NO: 802406 - RNA, 19 nt, Artificial Sequence
  Description of Artificial Sequence: Synthetic oligonucleotide
guacaugacauuucggaca

SEQ ID NO: 802407 - RNA, 19 nt, Artificial Sequence
  Description of Artificial Sequence: Synthetic oligonucleotide
gacuuuaugugaugcuuug

SEQ ID NO: 802408 - RNA, 19 nt, Artificial Sequence
  Description of Artificial Sequence: Synthetic oligonucleotide
aucaucugcaugguaugcc

SEQ ID NO: 802409 - RNA, 19 nt, Artificial Sequence
  Description of Artificial Sequence: Synthetic oligonucleotide
guauaaacaucucuggucu

SEQ ID NO: 802410 - RNA, 19 nt, Artificial Sequence
  Description of Artificial Sequence: Synthetic oligonucleotide
aacugagcauuccaauggu

SEQ ID NO: 802411 - RNA, 19 nt, Artificial Sequence
  Description of Artificial Sequence: Synthetic oligonucleotide
aauguccccuuuguaacag

SEQ ID NO: 802412 - RNA, 19 nt, Artificial Sequence
  Description of Artificial Sequence: Synthetic oligonucleotide
agaaggcacaacggcaucc

SEQ ID NO: 802413 - RNA, 19 nt, Artificial Sequence
  Description of Artificial Sequence: Synthetic oligonucleotide
gauaauccuuccuggccag

SEQ ID NO: 802414 - RNA, 19 nt, Artificial Sequence
  Description of Artificial Sequence: Synthetic oligonucleotide
accaucaugacgcugucau

SEQ ID NO: 802415 - RNA, 19 nt, Artificial Sequence
  Description of Artificial Sequence: Synthetic oligonucleotide
uaucggaaagcccgaaccu

SEQ ID NO: 802416 - RNA, 19 nt, Artificial Sequence
  Description of Artificial Sequence: Synthetic oligonucleotide
ugccuuagccgcaucuagg

SEQ ID NO: 802417 - RNA, 19 nt, Artificial Sequence
  Description of Artificial Sequence: Synthetic oligonucleotide
caacaaaacacaugcccug

SEQ ID NO: 802418 - RNA, 19 nt, Artificial Sequence
  Description of Artificial Sequence: Synthetic oligonucleotide
uuagccgcaucuaggugag

SEQ ID NO: 802419 - RNA, 19 nt, Artificial Sequence
  Description of Artificial Sequence: Synthetic oligonucleotide
agucccaaggcgauguagc

SEQ ID NO: 802420 - RNA, 19 nt, Artificial Sequence
  Description of Artificial Sequence: Synthetic oligonucleotide
ucccgaauccuccuucucc

SEQ ID NO: 802421 - RNA, 19 nt, Artificial Sequence
  Description of Artificial Sequence: Synthetic oligonucleotide
gaugugauuuaggacagca

SEQ ID NO: 802422 - RNA, 19 nt, Artificial Sequence
  Description of Artificial Sequence: Synthetic oligonucleotide
uccggguaaagaaaaccac

SEQ ID NO: 802423 - RNA, 19 nt, Artificial Sequence
  Description of Artificial Sequence: Synthetic oligonucleotide
guagacgcuagaaucauac

SEQ ID NO: 802424 - RNA, 19 nt, Artificial Sequence
  Description of Artificial Sequence: Synthetic oligonucleotide
acgcuagaaucauacacug

SEQ ID NO: 802425 - RNA, 19 nt, Artificial Sequence
  Description of Artificial Sequence: Synthetic oligonucleotide
aauggcuacgggugcugag

SEQ ID NO: 802426 - RNA, 19 nt, Artificial Sequence
  Description of Artificial Sequence: Synthetic oligonucleotide
ugccauuccggguaaagaa

SEQ ID NO: 802427 - RNA, 19 nt, Artificial Sequence
  Description of Artificial Sequence: Synthetic oligonucleotide
accucgaaguaauggcuac

SEQ ID NO: 802428 - RNA, 19 nt, Artificial Sequence
  Description of Artificial Sequence: Synthetic oligonucleotide
cuuagccgcaucuagguga

SEQ ID NO: 802429 - RNA, 19 nt, Artificial Sequence
  Description of Artificial Sequence: Synthetic oligonucleotide
cauagcagccaacuucacc

SEQ ID NO: 802430 - RNA, 19 nt, Artificial Sequence
  Description of Artificial Sequence: Synthetic oligonucleotide
gacaucaugcagccggccc

SEQ ID NO: 802431 - RNA, 19 nt, Artificial Sequence
  Description of Artificial Sequence: Synthetic oligonucleotide
aagacccuagaugugauuu

SEQ ID NO: 802432 - RNA, 19 nt, Artificial Sequence
  Description of Artificial Sequence: Synthetic oligonucleotide
agcccgaaccucucgaauc

SEQ ID NO: 802433 - RNA, 19 nt, Artificial Sequence
  Description of Artificial Sequence: Synthetic oligonucleotide
ugucucucaaaggaaagaa

SEQ ID NO: 802434 - RNA, 19 nt, Artificial Sequence
  Description of Artificial Sequence: Synthetic oligonucleotide
ugguaggcuacagagucag

SEQ ID NO: 802435 - RNA, 19 nt, Artificial Sequence
  Description of Artificial Sequence: Synthetic oligonucleotide
ugggauaauccuuccuggc

SEQ ID NO: 802436 - RNA, 19 nt, Artificial Sequence
  Description of Artificial Sequence: Synthetic oligonucleotide
ccaacugcugggaagagcc

SEQ ID NO: 802437 - RNA, 19 nt, Artificial Sequence
  Description of Artificial Sequence: Synthetic oligonucleotide
guaacucaaagugucacca

SEQ ID NO: 802438 - RNA, 19 nt, Artificial Sequence
  Description of Artificial Sequence: Synthetic oligonucleotide
uuagcucggccauuguaca

SEQ ID NO: 802439 - RNA, 19 nt, Artificial Sequence
  Description of Artificial Sequence: Synthetic oligonucleotide
agcagcacaauagcacccc

SEQ ID NO: 802440 - RNA, 19 nt, Artificial Sequence
  Description of Artificial Sequence: Synthetic oligonucleotide
ggauaccucaaaauaauug

SEQ ID NO: 802441 - RNA, 19 nt, Artificial Sequence
  Description of Artificial Sequence: Synthetic oligonucleotide
gcuagaaucauacacugaa

SEQ ID NO: 802442 - RNA, 19 nt, Artificial Sequence
  Description of Artificial Sequence: Synthetic oligonucleotide
ccucuagccacuuaauggg

SEQ ID NO: 802443 - RNA, 19 nt, Artificial Sequence
  Description of Artificial Sequence: Synthetic oligonucleotide
acauuucggacauuccgga

SEQ ID NO: 802444 - RNA, 19 nt, Artificial Sequence
  Description of Artificial Sequence: Synthetic oligonucleotide
cuacccacugugcaaacug

SEQ ID NO: 802445 - RNA, 19 nt, Artificial Sequence
  Description of Artificial Sequence: Synthetic oligonucleotide
cauuccaauggugggaaag

SEQ ID NO: 802446 - RNA, 19 nt, Artificial Sequence
  Description of Artificial Sequence: Synthetic oligonucleotide
ucggacauuccggacagcc

SEQ ID NO: 802447 - RNA, 19 nt, Artificial Sequence
  Description of Artificial Sequence: Synthetic oligonucleotide
ucuccugauaucggaaagc

SEQ ID NO: 802448 - RNA, 19 nt, Artificial Sequence
  Description of Artificial Sequence: Synthetic oligonucleotide
cucucaaaggaaagaauga

SEQ ID NO: 802449 - RNA, 19 nt, Artificial Sequence
  Description of Artificial Sequence: Synthetic oligonucleotide
gucgagacgccacauagca

SEQ ID NO: 802450 - RNA, 19 nt, Artificial Sequence
  Description of Artificial Sequence: Synthetic oligonucleotide
uccugauaucggaaagccc

SEQ ID NO: 802451 - RNA, 19 nt, Artificial Sequence
  Description of Artificial Sequence: Synthetic oligonucleotide
uccaagcuguaguacugag

SEQ ID NO: 802452 - RNA, 19 nt, Artificial Sequence
  Description of Artificial Sequence: Synthetic oligonucleotide
aauccgguccccagaauug

SEQ ID NO: 802453 - RNA, 19 nt, Artificial Sequence
  Description of Artificial Sequence: Synthetic oligonucleotide
auaaacaucucuggucugu

SEQ ID NO: 802454 - RNA, 19 nt, Artificial Sequence
  Description of Artificial Sequence: Synthetic oligonucleotide
cuccugauaucggaaagcc

SEQ ID NO: 802455 - RNA, 19 nt, Artificial Sequence
  Description of Artificial Sequence: Synthetic oligonucleotide
gagauagccaagacaggcc

SEQ ID NO: 802456 - RNA, 19 nt, Artificial Sequence
  Description of Artificial Sequence: Synthetic oligonucleotide
gucaccauccacaagaaua

SEQ ID NO: 802457 - RNA, 19 nt, Artificial Sequence
  Description of Artificial Sequence: Synthetic oligonucleotide
gaaugcauaccaacugcug

SEQ ID NO: 802458 - RNA, 19 nt, Artificial Sequence
  Description of Artificial Sequence: Synthetic oligonucleotide
agcaaucgugccccggacg

SEQ ID NO: 802459 - RNA, 19 nt, Artificial Sequence
  Description of Artificial Sequence: Synthetic oligonucleotide
gacccuagaugugauuuag

SEQ ID NO: 802460 - RNA, 19 nt, Artificial Sequence
  Description of Artificial Sequence: Synthetic oligonucleotide
gguacaugacauuucggac

SEQ ID NO: 802461 - RNA, 19 nt, Artificial Sequence
  Description of Artificial Sequence: Synthetic oligonucleotide
acgggugcugagugggugc

SEQ ID NO: 802462 - RNA, 19 nt, Artificial Sequence
  Description of Artificial Sequence: Synthetic oligonucleotide
auaccucaaaauaauugcu

SEQ ID NO: 802463 - RNA, 19 nt, Artificial Sequence
  Description of Artificial Sequence: Synthetic oligonucleotide
ugguaacucaaagugucac

SEQ ID NO: 802464 - RNA, 19 nt, Artificial Sequence
  Description of Artificial Sequence: Synthetic oligonucleotide
aaggggccaaguugcagcu

SEQ ID NO: 802465 - RNA, 19 nt, Artificial Sequence
  Description of Artificial Sequence: Synthetic oligonucleotide
caaacuggcgccccuuagc

SEQ ID NO: 802466 - RNA, 19 nt, Artificial Sequence
  Description of Artificial Sequence: Synthetic oligonucleotide
gaucuugccauuccgggua

SEQ ID NO: 802467 - RNA, 19 nt, Artificial Sequence
  Description of Artificial Sequence: Synthetic oligonucleotide
aacuggcgccccuuagcuc

SEQ ID NO: 802468 - RNA, 19 nt, Artificial Sequence
  Description of Artificial Sequence: Synthetic oligonucleotide
gggaaugcauaccaacugc

SEQ ID NO: 802469 - RNA, 19 nt, Artificial Sequence
  Description of Artificial Sequence: Synthetic oligonucleotide
ugccauggaagaucuuccc

SEQ ID NO: 802470 - RNA, 19 nt, Artificial Sequence
  Description of Artificial Sequence: Synthetic oligonucleotide
auaccaacugcugggaaga

SEQ ID NO: 802471 - RNA, 19 nt, Artificial Sequence
  Description of Artificial Sequence: Synthetic oligonucleotide
caucauagugcaggggccg

SEQ ID NO: 802472 - RNA, 19 nt, Artificial Sequence
  Description of Artificial Sequence: Synthetic oligonucleotide
aucggaaagcccgaaccuc

SEQ ID NO: 802473 - RNA, 19 nt, Artificial Sequence
  Description of Artificial Sequence: Synthetic oligonucleotide
gucaacuggcacaagcagc

SEQ ID NO: 802474 - RNA, 19 nt, Artificial Sequence
  Description of Artificial Sequence: Synthetic oligonucleotide
guugagaugcagccucacc

SEQ ID NO: 802475 - RNA, 19 nt, Artificial Sequence
  Description of Artificial Sequence: Synthetic oligonucleotide
cagguagggagccaggcuc

SEQ ID NO: 802476 - RNA, 19 nt, Artificial Sequence
  Description of Artificial Sequence: Synthetic oligonucleotide
ugguaugccacagacccuc

SEQ ID NO: 802477 - RNA, 19 nt, Artificial Sequence
  Description of Artificial Sequence: Synthetic oligonucleotide
ggucuguacauacauuuca

SEQ ID NO: 802478 - RNA, 19 nt, Artificial Sequence
  Description of Artificial Sequence: Synthetic oligonucleotide
cagguacaugacauuucgg

SEQ ID NO: 802479 - RNA, 19 nt, Artificial Sequence
  Description of Artificial Sequence: Synthetic oligonucleotide
acuguccacaauggauacc

SEQ ID NO: 802480 - RNA, 19 nt, Artificial Sequence
  Description of Artificial Sequence: Synthetic oligonucleotide
ucgaaucucccgaauccuc

SEQ ID NO: 802481 - RNA, 19 nt, Artificial Sequence
  Description of Artificial Sequence: Synthetic oligonucleotide
auacaucauagugcagggg

SEQ ID NO: 802482 - RNA, 19 nt, Artificial Sequence
  Description of Artificial Sequence: Synthetic oligonucleotide
auguccccuuuguaacagc

SEQ ID NO: 802483 - RNA, 19 nt, Artificial Sequence
  Description of Artificial Sequence: Synthetic oligonucleotide
ggauaauccuuccuggcca

SEQ ID NO: 802484 - RNA, 19 nt, Artificial Sequence
  Description of Artificial Sequence: Synthetic oligonucleotide
cuuuaugugaugcuuuggu

SEQ ID NO: 802485 - RNA, 19 nt, Artificial Sequence
  Description of Artificial Sequence: Synthetic oligonucleotide
ucgagacgccacauagcag

SEQ ID NO: 802486 - RNA, 19 nt, Artificial Sequence
  Description of Artificial Sequence: Synthetic oligonucleotide
caugcagccggccccauuc

SEQ ID NO: 802487 - RNA, 19 nt, Artificial Sequence
  Description of Artificial Sequence: Synthetic oligonucleotide
acagcguggcccaaagggg

SEQ ID NO: 802488 - RNA, 19 nt, Artificial Sequence
  Description of Artificial Sequence: Synthetic oligonucleotide
uagacgcuagaaucauaca

SEQ ID NO: 802489 - RNA, 19 nt, Artificial Sequence
  Description of Artificial Sequence: Synthetic oligonucleotide
gauguagucccgagggaac

SEQ ID NO: 802490 - RNA, 19 nt, Artificial Sequence
  Description of Artificial Sequence: Synthetic oligonucleotide
gugcaggucuacuuucacc

SEQ ID NO: 802491 - RNA, 19 nt, Artificial Sequence
  Description of Artificial Sequence: Synthetic oligonucleotide
gggucgagacgccacauag

SEQ ID NO: 802492 - RNA, 19 nt, Artificial Sequence
  Description of Artificial Sequence: Synthetic oligonucleotide
cauuccggguaaagaaaac

SEQ ID NO: 802493 - RNA, 19 nt, Artificial Sequence
  Description of Artificial Sequence: Synthetic oligonucleotide
gacgcuagaaucauacacu

SEQ ID NO: 802494 - RNA, 19 nt, Artificial Sequence
  Description of Artificial Sequence: Synthetic oligonucleotide
ccuagaugugauuuaggac

SEQ ID NO: 802495 - RNA, 19 nt, Artificial Sequence
  Description of Artificial Sequence: Synthetic oligonucleotide
ccggguaaagaaaaccacc

SEQ ID NO: 802496 - RNA, 19 nt, Artificial Sequence
  Description of Artificial Sequence: Synthetic oligonucleotide
gcggggucuauguagacgc

SEQ ID NO: 802497 - RNA, 19 nt, Artificial Sequence
  Description of Artificial Sequence: Synthetic oligonucleotide
cacaauggauaccucaaaa

SEQ ID NO: 802498 - RNA, 19 nt, Artificial Sequence
  Description of Artificial Sequence: Synthetic oligonucleotide
uggcuacgggugcugagug

SEQ ID NO: 802499 - RNA, 19 nt, Artificial Sequence
  Description of Artificial Sequence: Synthetic oligonucleotide
agcccgggcaguuggugac

SEQ ID NO: 802500 - RNA, 19 nt, Artificial Sequence
  Description of Artificial Sequence: Synthetic oligonucleotide
cgauguagcauuucucucc

SEQ ID NO: 802501 - RNA, 19 nt, Artificial Sequence
  Description of Artificial Sequence: Synthetic oligonucleotide
agcggggucuauguagacg

SEQ ID NO: 802502 - RNA, 19 nt, Artificial Sequence
  Description of Artificial Sequence: Synthetic oligonucleotide
caucaucugcaugguaugc

SEQ ID NO: 802503 - RNA, 19 nt, Artificial Sequence
  Description of Artificial Sequence: Synthetic oligonucleotide
cauuucggacauuccggac

SEQ ID NO: 802504 - RNA, 19 nt, Artificial Sequence
  Description of Artificial Sequence: Synthetic oligonucleotide
aaucgugccccggacgcca

SEQ ID NO: 802505 - RNA, 19 nt, Artificial Sequence
  Description of Artificial Sequence: Synthetic oligonucleotide
gaauauguuugaaccucuc

SEQ ID NO: 802506 - RNA, 19 nt, Artificial Sequence
  Description of Artificial Sequence: Synthetic oligonucleotide
aggcacaacggcauccuuc

SEQ ID NO: 802507 - RNA, 19 nt, Artificial Sequence
  Description of Artificial Sequence: Synthetic oligonucleotide
auaaggggccaaguugcag

SEQ ID NO: 802508 - RNA, 19 nt, Artificial Sequence
  Description of Artificial Sequence: Synthetic oligonucleotide
augugauuuaggacagcag

SEQ ID NO: 802509 - RNA, 19 nt, Artificial Sequence
  Description of Artificial Sequence: Synthetic oligonucleotide
uccaucuuuauugggugua

SEQ ID NO: 802510 - RNA, 19 nt, Artificial Sequence
  Description of Artificial Sequence: Synthetic oligonucleotide
uguagacgcuagaaucaua

SEQ ID NO: 802511 - RNA, 19 nt, Artificial Sequence
  Description of Artificial Sequence: Synthetic oligonucleotide
aucaugacgcugucauccu

SEQ ID NO: 802512 - RNA, 19 nt, Artificial Sequence
  Description of Artificial Sequence: Synthetic oligonucleotide
cagacucugacaucaugca

SEQ ID NO: 802513 - RNA, 19 nt, Artificial Sequence
  Description of Artificial Sequence: Synthetic oligonucleotide
aguaauggcuacgggugcu

SEQ ID NO: 802514 - RNA, 19 nt, Artificial Sequence
  Description of Artificial Sequence: Synthetic oligonucleotide
aguccuacccacugugcaa

SEQ ID NO: 802515 - RNA, 19 nt, Artificial Sequence
  Description of Artificial Sequence: Synthetic oligonucleotide
gacauuccggacagcccgg

SEQ ID NO: 802516 - RNA, 19 nt, Artificial Sequence
  Description of Artificial Sequence: Synthetic oligonucleotide
gcaaucgugccccggacgc

SEQ ID NO: 802517 - RNA, 19 nt, Artificial Sequence
  Description of Artificial Sequence: Synthetic oligonucleotide
gacgccacauagcagccaa

SEQ ID NO: 802518 - RNA, 19 nt, Artificial Sequence
  Description of Artificial Sequence: Synthetic oligonucleotide
agaugggagcaaaggcuac

SEQ ID NO: 802519 - RNA, 19 nt, Artificial Sequence
  Description of Artificial Sequence: Synthetic oligonucleotide
augugaugcuuuggugugg

SEQ ID NO: 802520 - RNA, 19 nt, Artificial Sequence
  Description of Artificial Sequence: Synthetic oligonucleotide
gagaugggagcaaaggcua

SEQ ID NO: 802521 - RNA, 19 nt, Artificial Sequence
  Description of Artificial Sequence: Synthetic oligonucleotide
gcgggguugucucucaaag

SEQ ID NO: 802522 - RNA, 19 nt, Artificial Sequence
  Description of Artificial Sequence: Synthetic oligonucleotide
gugcaggugaagccucuag

SEQ ID NO: 802523 - RNA, 19 nt, Artificial Sequence
  Description of Artificial Sequence: Synthetic oligonucleotide
cacuuaaugggugcagguc

SEQ ID NO: 802524 - RNA, 19 nt, Artificial Sequence
  Description of Artificial Sequence: Synthetic oligonucleotide
agaauugcacuuggagcca

SEQ ID NO: 802525 - RNA, 19 nt, Artificial Sequence
  Description of Artificial Sequence: Synthetic oligonucleotide
gucuauguagacgcuagaa

SEQ ID NO: 802526 - RNA, 19 nt, Artificial Sequence
  Description of Artificial Sequence: Synthetic oligonucleotide
uuaaugggugcaggucuac

SEQ ID NO: 802527 - RNA, 19 nt, Artificial Sequence
  Description of Artificial Sequence: Synthetic oligonucleotide
agcauuccaauggugggaa

SEQ ID NO: 802528 - RNA, 19 nt, Artificial Sequence
  Description of Artificial Sequence: Synthetic oligonucleotide
uaaacaucucuggucugua

SEQ ID NO: 802529 - RNA, 19 nt, Artificial Sequence
  Description of Artificial Sequence: Synthetic oligonucleotide
uugaaccucuccugauauc

SEQ ID NO: 802530 - RNA, 19 nt, Artificial Sequence
  Description of Artificial Sequence: Synthetic oligonucleotide
gagcauuccaaugguggga

SEQ ID NO: 802531 - RNA, 19 nt, Artificial Sequence
  Description of Artificial Sequence: Synthetic oligonucleotide
augauuccacagcccauaa

SEQ ID NO: 802532 - RNA, 19 nt, Artificial Sequence
  Description of Artificial Sequence: Synthetic oligonucleotide
cuggucuguacauacauuu

SEQ ID NO: 802533 - RNA, 19 nt, Artificial Sequence
  Description of Artificial Sequence: Synthetic oligonucleotide
agguagggagccaggcucg

SEQ ID NO: 802534 - RNA, 19 nt, Artificial Sequence
  Description of Artificial Sequence: Synthetic oligonucleotide
agagugcagacaaggagau

SEQ ID NO: 802535 - RNA, 19 nt, Artificial Sequence
  Description of Artificial Sequence: Synthetic oligonucleotide
aggcgauguagcauuucuc

SEQ ID NO: 802536 - RNA, 19 nt, Artificial Sequence
  Description of Artificial Sequence: Synthetic oligonucleotide
uaaugggugcaggucuacu

SEQ ID NO: 802537 - RNA, 19 nt, Artificial Sequence
  Description of Artificial Sequence: Synthetic oligonucleotide
agggacauaaggggccaag

SEQ ID NO: 802538 - RNA, 19 nt, Artificial Sequence
  Description of Artificial Sequence: Synthetic oligonucleotide
cuguucuugggauaauccu

SEQ ID NO: 802539 - RNA, 19 nt, Artificial Sequence
  Description of Artificial Sequence: Synthetic oligonucleotide
gggucuauguagacgcuag

SEQ ID NO: 802540 - RNA, 19 nt, Artificial Sequence
  Description of Artificial Sequence: Synthetic oligonucleotide
cugauaucggaaagcccga

SEQ ID NO: 802541 - RNA, 19 nt, Artificial Sequence
  Description of Artificial Sequence: Synthetic oligonucleotide
cauccacgauacucuugcc

SEQ ID NO: 802542 - RNA, 19 nt, Artificial Sequence
  Description of Artificial Sequence: Synthetic oligonucleotide
ugccacagacccucggcuc

SEQ ID NO: 802543 - RNA, 19 nt, Artificial Sequence
  Description of Artificial Sequence: Synthetic oligonucleotide
ggcgauguagcauuucucu

SEQ ID NO: 802544 - RNA, 19 nt, Artificial Sequence
  Description of Artificial Sequence: Synthetic oligonucleotide
uaauggcuacgggugcuga

SEQ ID NO: 802545 - RNA, 19 nt, Artificial Sequence
  Description of Artificial Sequence: Synthetic oligonucleotide
auggcuacgggugcugagu

SEQ ID NO: 802546 - RNA, 19 nt, Artificial Sequence
  Description of Artificial Sequence: Synthetic oligonucleotide
acccuagaugugauuuagg

SEQ ID NO: 802547 - RNA, 19 nt, Artificial Sequence
  Description of Artificial Sequence: Synthetic oligonucleotide
agagcggggucuauguaga

SEQ ID NO: 802548 - RNA, 19 nt, Artificial Sequence
  Description of Artificial Sequence: Synthetic oligonucleotide
cccuagaugugauuuagga

SEQ ID NO: 802549 - RNA, 19 nt, Artificial Sequence
  Description of Artificial Sequence: Synthetic oligonucleotide
cuuaaugggugcaggucua

SEQ ID NO: 802550 - RNA, 19 nt, Artificial Sequence
  Description of Artificial Sequence: Synthetic oligonucleotide
auguagacgcuagaaucau

SEQ ID NO: 802551 - RNA, 19 nt, Artificial Sequence
  Description of Artificial Sequence: Synthetic oligonucleotide
auguagucccgagggaaca

SEQ ID NO: 802552 - RNA, 19 nt, Artificial Sequence
  Description of Artificial Sequence: Synthetic oligonucleotide
agacccuagaugugauuua

SEQ ID NO: 802553 - RNA, 19 nt, Artificial Sequence
  Description of Artificial Sequence: Synthetic oligonucleotide
ugauaucggaaagcccgaa

SEQ ID NO: 802554 - RNA, 19 nt, Artificial Sequence
  Description of Artificial Sequence: Synthetic oligonucleotide
augguaacucaaaguguca

SEQ ID NO: 802555 - RNA, 19 nt, Artificial Sequence
  Description of Artificial Sequence: Synthetic oligonucleotide
ggacagcccgggcaguugg

SEQ ID NO: 802556 - RNA, 19 nt, Artificial Sequence
  Description of Artificial Sequence: Synthetic oligonucleotide
accaagagcggggucuaug

SEQ ID NO: 802557 - RNA, 19 nt, Artificial Sequence
  Description of Artificial Sequence: Synthetic oligonucleotide
ccaaguccuacccacugug

SEQ ID NO: 802558 - RNA, 19 nt, Artificial Sequence
  Description of Artificial Sequence: Synthetic oligonucleotide
caggcucgacuuuauguga

SEQ ID NO: 802559 - RNA, 19 nt, Artificial Sequence
  Description of Artificial Sequence: Synthetic oligonucleotide
agccacuuaaugggugcag

SEQ ID NO: 802560 - RNA, 19 nt, Artificial Sequence
  Description of Artificial Sequence: Synthetic oligonucleotide
gccacuuaaugggugcagg

SEQ ID NO: 802561 - RNA, 19 nt, Artificial Sequence
  Description of Artificial Sequence: Synthetic oligonucleotide
cuguccacaauggauaccu

SEQ ID NO: 802562 - RNA, 19 nt, Artificial Sequence
  Description of Artificial Sequence: Synthetic oligonucleotide
uagccacuuaaugggugca

SEQ ID NO: 802563 - RNA, 19 nt, Artificial Sequence
  Description of Artificial Sequence: Synthetic oligonucleotide
auccaagcuguaguacuga

SEQ ID NO: 802564 - RNA, 19 nt, Artificial Sequence
  Description of Artificial Sequence: Synthetic oligonucleotide
ggugauccaagcuguagua

SEQ ID NO: 802565 - RNA, 19 nt, Artificial Sequence
  Description of Artificial Sequence: Synthetic oligonucleotide
gcucgacuuuaugugaugc

SEQ ID NO: 802566 - RNA, 19 nt, Artificial Sequence
  Description of Artificial Sequence: Synthetic oligonucleotide
cgaaucucccgaauccucc

SEQ ID NO: 802567 - RNA, 19 nt, Artificial Sequence
  Description of Artificial Sequence: Synthetic oligonucleotide
cauaaggggccaaguugca

SEQ ID NO: 802568 - RNA, 19 nt, Artificial Sequence
  Description of Artificial Sequence: Synthetic oligonucleotide
aaggcacaacggcauccuu

SEQ ID NO: 802569 - RNA, 19 nt, Artificial Sequence
  Description of Artificial Sequence: Synthetic oligonucleotide
cagccaauccgguccccag

SEQ ID NO: 802570 - RNA, 19 nt, Artificial Sequence
  Description of Artificial Sequence: Synthetic oligonucleotide
gucccacagacucugacau

SEQ ID NO: 802571 - RNA, 19 nt, Artificial Sequence
  Description of Artificial Sequence: Synthetic oligonucleotide
cccuuuguaacagcguggc

SEQ ID NO: 802572 - RNA, 19 nt, Artificial Sequence
  Description of Artificial Sequence: Synthetic oligonucleotide
acauuccggacagcccggg

SEQ ID NO: 802573 - RNA, 19 nt, Artificial Sequence
  Description of Artificial Sequence: Synthetic oligonucleotide
gcauuucucuccagggucc

SEQ ID NO: 802574 - RNA, 19 nt, Artificial Sequence
  Description of Artificial Sequence: Synthetic oligonucleotide
agggugccuguucuuggga

SEQ ID NO: 802575 - RNA, 19 nt, Artificial Sequence
  Description of Artificial Sequence: Synthetic oligonucleotide
ccccuuuguaacagcgugg

SEQ ID NO: 802576 - RNA, 19 nt, Artificial Sequence
  Description of Artificial Sequence: Synthetic oligonucleotide
cauuccggacagcccgggc

SEQ ID NO: 802577 - RNA, 19 nt, Artificial Sequence
  Description of Artificial Sequence: Synthetic oligonucleotide
cacccagggaaugcauacc

SEQ ID NO: 802578 - RNA, 19 nt, Artificial Sequence
  Description of Artificial Sequence: Synthetic oligonucleotide
uccuacccacugugcaaac

SEQ ID NO: 802579 - RNA, 19 nt, Artificial Sequence
  Description of Artificial Sequence: Synthetic oligonucleotide
ccgaaccucucgaaucucc

SEQ ID NO: 802580 - RNA, 19 nt, Artificial Sequence
  Description of Artificial Sequence: Synthetic oligonucleotide
cacgauacucuugcccuuc

SEQ ID NO: 802581 - RNA, 19 nt, Artificial Sequence
  Description of Artificial Sequence: Synthetic oligonucleotide
agccaggcucgacuuuaug

SEQ ID NO: 802582 - RNA, 19 nt, Artificial Sequence
  Description of Artificial Sequence: Synthetic oligonucleotide
gugcagaaggaaaggggca

SEQ ID NO: 802583 - RNA, 19 nt, Artificial Sequence
  Description of Artificial Sequence: Synthetic oligonucleotide
gugccuugaggaagagugc

SEQ ID NO: 802584 - RNA, 19 nt, Artificial Sequence
  Description of Artificial Sequence: Synthetic oligonucleotide
ggaaagaaugaagacccua

SEQ ID NO: 802585 - RNA, 19 nt, Artificial Sequence
  Description of Artificial Sequence: Synthetic oligonucleotide
aggcaaccagccaggcugg

SEQ ID NO: 802586 - RNA, 19 nt, Artificial Sequence
  Description of Artificial Sequence: Synthetic oligonucleotide
ggauguagucccgagggaa

SEQ ID NO: 802587 - RNA, 19 nt, Artificial Sequence
  Description of Artificial Sequence: Synthetic oligonucleotide
ggcuacgggugcugagugg

SEQ ID NO: 802588 - RNA, 19 nt, Artificial Sequence
  Description of Artificial Sequence: Synthetic oligonucleotide
gcgauguagcauuucucuc

SEQ ID NO: 802589 - RNA, 19 nt, Artificial Sequence
  Description of Artificial Sequence: Synthetic oligonucleotide
caccucgaaguaauggcua

SEQ ID NO: 802590 - RNA, 19 nt, Artificial Sequence
  Description of Artificial Sequence: Synthetic oligonucleotide
cuguaguacugagggacca

SEQ ID NO: 802591 - RNA, 19 nt, Artificial Sequence
  Description of Artificial Sequence: Synthetic oligonucleotide
aucuugccauuccggguaa

SEQ ID NO: 802592 - RNA, 19 nt, Artificial Sequence
  Description of Artificial Sequence: Synthetic oligonucleotide
cuaggggugccuugaggaa

SEQ ID NO: 802593 - RNA, 19 nt, Artificial Sequence
  Description of Artificial Sequence: Synthetic oligonucleotide
cccgagggaacaugauucc

SEQ ID NO: 802594 - RNA, 19 nt, Artificial Sequence
  Description of Artificial Sequence: Synthetic oligonucleotide
cacaacugagcauuccaau

SEQ ID NO: 802595 - RNA, 19 nt, Artificial Sequence
  Description of Artificial Sequence: Synthetic oligonucleotide
cagcaaucgugccccggac

SEQ ID NO: 802596 - RNA, 19 nt, Artificial Sequence
  Description of Artificial Sequence: Synthetic oligonucleotide
augguaggcuacagaguca

SEQ ID NO: 802597 - RNA, 19 nt, Artificial Sequence
  Description of Artificial Sequence: Synthetic oligonucleotide
acacaggcucaaugccaca

SEQ ID NO: 802598 - RNA, 19 nt, Artificial Sequence
  Description of Artificial Sequence: Synthetic oligonucleotide
caccagaauuuccauggua

SEQ ID NO: 802599 - RNA, 19 nt, Artificial Sequence
  Description of Artificial Sequence: Synthetic oligonucleotide
caacggcauccuucuuccc

SEQ ID NO: 802600 - RNA, 19 nt, Artificial Sequence
  Description of Artificial Sequence: Synthetic oligonucleotide
ggcucgacuuuaugugaug

SEQ ID NO: 802601 - RNA, 19 nt, Artificial Sequence
  Description of Artificial Sequence: Synthetic oligonucleotide
gagcggggucuauguagac

SEQ ID NO: 802602 - RNA, 19 nt, Artificial Sequence
  Description of Artificial Sequence: Synthetic oligonucleotide
cucgacuuuaugugaugcu

SEQ ID NO: 802603 - RNA, 19 nt, Artificial Sequence
  Description of Artificial Sequence: Synthetic oligonucleotide
aggggugccuugaggaaga

SEQ ID NO: 802604 - RNA, 19 nt, Artificial Sequence
  Description of Artificial Sequence: Synthetic oligonucleotide
caaucgugccccggacgcc

SEQ ID NO: 802605 - RNA, 19 nt, Artificial Sequence
  Description of Artificial Sequence: Synthetic oligonucleotide
gcaugguaugccacagacc

SEQ ID NO: 802606 - RNA, 19 nt, Artificial Sequence
  Description of Artificial Sequence: Synthetic oligonucleotide
auaauccuuccuggccagu

SEQ ID NO: 802607 - RNA, 19 nt, Artificial Sequence
  Description of Artificial Sequence: Synthetic oligonucleotide
agcccauaauguccccuuu

SEQ ID NO: 802608 - RNA, 19 nt, Artificial Sequence
  Description of Artificial Sequence: Synthetic oligonucleotide
aggcucaaugccacagcca

SEQ ID NO: 802609 - RNA, 19 nt, Artificial Sequence
  Description of Artificial Sequence: Synthetic oligonucleotide
ggucgagacgccacauagc

SEQ ID NO: 802610 - RNA, 19 nt, Artificial Sequence
  Description of Artificial Sequence: Synthetic oligonucleotide
caauccgguccccagaauu

SEQ ID NO: 802611 - RNA, 19 nt, Artificial Sequence
  Description of Artificial Sequence: Synthetic oligonucleotide
cuucauaacuguccaccau

SEQ ID NO: 802612 - RNA, 19 nt, Artificial Sequence
  Description of Artificial Sequence: Synthetic oligonucleotide
aggcucgacuuuaugugau

SEQ ID NO: 802613 - RNA, 19 nt, Artificial Sequence
  Description of Artificial Sequence: Synthetic oligonucleotide
ggaaugcauaccaacugcu

SEQ ID NO: 802614 - RNA, 19 nt, Artificial Sequence
  Description of Artificial Sequence: Synthetic oligonucleotide
gucaggcaaccagccaggc

SEQ ID NO: 802615 - RNA, 19 nt, Artificial Sequence
  Description of Artificial Sequence: Synthetic oligonucleotide
augcagccggccccauuca

SEQ ID NO: 802616 - RNA, 19 nt, Artificial Sequence
  Description of Artificial Sequence: Synthetic oligonucleotide
caaggcgauguagcauuuc

SEQ ID NO: 802617 - RNA, 19 nt, Artificial Sequence
  Description of Artificial Sequence: Synthetic oligonucleotide
guccuacccacugugcaaa

SEQ ID NO: 802618 - RNA, 19 nt, Artificial Sequence
  Description of Artificial Sequence: Synthetic oligonucleotide
accucuccugauaucggaa

SEQ ID NO: 802619 - RNA, 19 nt, Artificial Sequence
  Description of Artificial Sequence: Synthetic oligonucleotide
ggucuauguagacgcuaga

SEQ ID NO: 802620 - RNA, 19 nt, Artificial Sequence
  Description of Artificial Sequence: Synthetic oligonucleotide
ugugcaggugaagccucua

SEQ ID NO: 802621 - RNA, 19 nt, Artificial Sequence
  Description of Artificial Sequence: Synthetic oligonucleotide
accagccaggcuggugauc

SEQ ID NO: 802622 - RNA, 19 nt, Artificial Sequence
  Description of Artificial Sequence: Synthetic oligonucleotide
cucuagccacuuaaugggu

SEQ ID NO: 802623 - RNA, 19 nt, Artificial Sequence
  Description of Artificial Sequence: Synthetic oligonucleotide
cgggguugucucucaaagg

SEQ ID NO: 802624 - RNA, 19 nt, Artificial Sequence
  Description of Artificial Sequence: Synthetic oligonucleotide
gaagacccuagaugugauu

SEQ ID NO: 802625 - RNA, 19 nt, Artificial Sequence
  Description of Artificial Sequence: Synthetic oligonucleotide
acaugcccuggugccuuag

SEQ ID NO: 802626 - RNA, 19 nt, Artificial Sequence
  Description of Artificial Sequence: Synthetic oligonucleotide
acgccacauagcagccaac

SEQ ID NO: 802627 - RNA, 19 nt, Artificial Sequence
  Description of Artificial Sequence: Synthetic oligonucleotide
agacgccacauagcagcca

SEQ ID NO: 802628 - RNA, 19 nt, Artificial Sequence
  Description of Artificial Sequence: Synthetic oligonucleotide
uucggacauuccggacagc

SEQ ID NO: 802629 - RNA, 19 nt, Artificial Sequence
  Description of Artificial Sequence: Synthetic oligonucleotide
ccuuagccgcaucuaggug

SEQ ID NO: 802630 - RNA, 19 nt, Artificial Sequence
  Description of Artificial Sequence: Synthetic oligonucleotide
agcccaccuuuucccauuu

SEQ ID NO: 802631 - RNA, 19 nt, Artificial Sequence
  Description of Artificial Sequence: Synthetic oligonucleotide
cugcaugguaugccacaga

SEQ ID NO: 802632 - RNA, 19 nt, Artificial Sequence
  Description of Artificial Sequence: Synthetic oligonucleotide
gccuuagccgcaucuaggu

SEQ ID NO: 802633 - RNA, 19 nt, Artificial Sequence
  Description of Artificial Sequence: Synthetic oligonucleotide
cagcccgggcaguugguga

SEQ ID NO: 802634 - RNA, 19 nt, Artificial Sequence
  Description of Artificial Sequence: Synthetic oligonucleotide
gccggccccauucaucuuc

SEQ ID NO: 802635 - RNA, 19 nt, Artificial Sequence
  Description of Artificial Sequence: Synthetic oligonucleotide
agaccaagagcggggucua

SEQ ID NO: 802636 - RNA, 19 nt, Artificial Sequence
  Description of Artificial Sequence: Synthetic oligonucleotide
ccaugguaacucaaagugu

SEQ ID NO: 802637 - RNA, 19 nt, Artificial Sequence
  Description of Artificial Sequence: Synthetic oligonucleotide
cucgaaucucccgaauccu

SEQ ID NO: 802638 - RNA, 19 nt, Artificial Sequence
  Description of Artificial Sequence: Synthetic oligonucleotide
ccgguccccagaauugcac

SEQ ID NO: 802639 - RNA, 19 nt, Artificial Sequence
  Description of Artificial Sequence: Synthetic oligonucleotide
gccaauccgguccccagaa

SEQ ID NO: 802640 - RNA, 19 nt, Artificial Sequence
  Description of Artificial Sequence: Synthetic oligonucleotide
ggacauaaggggccaaguu

SEQ ID NO: 802641 - RNA, 19 nt, Artificial Sequence
  Description of Artificial Sequence: Synthetic oligonucleotide
cggacauuccggacagccc

SEQ ID NO: 802642 - RNA, 19 nt, Artificial Sequence
  Description of Artificial Sequence: Synthetic oligonucleotide
caagagcggggucuaugua

SEQ ID NO: 802643 - RNA, 19 nt, Artificial Sequence
  Description of Artificial Sequence: Synthetic oligonucleotide
guagggagccaggcucgac

SEQ ID NO: 802644 - RNA, 19 nt, Artificial Sequence
  Description of Artificial Sequence: Synthetic oligonucleotide
uuguaacagcguggcccaa

SEQ ID NO: 802645 - RNA, 19 nt, Artificial Sequence
  Description of Artificial Sequence: Synthetic oligonucleotide
gccgcaucuaggugagcca

SEQ ID NO: 802646 - RNA, 19 nt, Artificial Sequence
  Description of Artificial Sequence: Synthetic oligonucleotide
gcauaccaacugcugggaa

SEQ ID NO: 802647 - RNA, 19 nt, Artificial Sequence
  Description of Artificial Sequence: Synthetic oligonucleotide
cgauacucuugcccuuccc

SEQ ID NO: 802648 - RNA, 19 nt, Artificial Sequence
  Description of Artificial Sequence: Synthetic oligonucleotide
acccucggcuccagccagg

SEQ ID NO: 802649 - RNA, 19 nt, Artificial Sequence
  Description of Artificial Sequence: Synthetic oligonucleotide
ccaagagcggggucuaugu

SEQ ID NO: 802650 - RNA, 19 nt, Artificial Sequence
  Description of Artificial Sequence: Synthetic oligonucleotide
cggccauuguacagcuugc

SEQ ID NO: 802651 - RNA, 19 nt, Artificial Sequence
  Description of Artificial Sequence: Synthetic oligonucleotide
agagcccaucuggggacau

SEQ ID NO: 802652 - RNA, 19 nt, Artificial Sequence
  Description of Artificial Sequence: Synthetic oligonucleotide
cugagaccaagagcggggu

SEQ ID NO: 802653 - RNA, 19 nt, Artificial Sequence
  Description of Artificial Sequence: Synthetic oligonucleotide
ggcgggguugucucucaaa

SEQ ID NO: 802654 - RNA, 19 nt, Artificial Sequence
  Description of Artificial Sequence: Synthetic oligonucleotide
ccacuuaaugggugcaggu

SEQ ID NO: 802655 - RNA, 19 nt, Artificial Sequence
  Description of Artificial Sequence: Synthetic oligonucleotide
cuggugccuuagccgcauc

SEQ ID NO: 802656 - RNA, 19 nt, Artificial Sequence
  Description of Artificial Sequence: Synthetic oligonucleotide
guauuccagcagaguccca

SEQ ID NO: 802657 - RNA, 19 nt, Artificial Sequence
  Description of Artificial Sequence: Synthetic oligonucleotide
guccccuuuguaacagcgu

SEQ ID NO: 802658 - RNA, 19 nt, Artificial Sequence
  Description of Artificial Sequence: Synthetic oligonucleotide
ccccuuagcucggccauug

SEQ ID NO: 802659 - RNA, 19 nt, Artificial Sequence
  Description of Artificial Sequence: Synthetic oligonucleotide
cccaaggcgauguagcauu

SEQ ID NO: 802660 - RNA, 19 nt, Artificial Sequence
  Description of Artificial Sequence: Synthetic oligonucleotide
ccccacaacugagcauucc

SEQ ID NO: 802661 - RNA, 19 nt, Artificial Sequence
  Description of Artificial Sequence: Synthetic oligonucleotide
gcccuuccccaaguauucc

SEQ ID NO: 802662 - RNA, 19 nt, Artificial Sequence
  Description of Artificial Sequence: Synthetic oligonucleotide
gcguggcccaaaggggucc

SEQ ID NO: 802663 - RNA, 19 nt, Artificial Sequence
  Description of Artificial Sequence: Synthetic oligonucleotide
gcucggccauuguacagcu

SEQ ID NO: 802664 - RNA, 19 nt, Artificial Sequence
  Description of Artificial Sequence: Synthetic oligonucleotide
gugaugcuuuggugugggu

SEQ ID NO: 802665 - RNA, 19 nt, Artificial Sequence
  Description of Artificial Sequence: Synthetic oligonucleotide
gggugccuguucuugggau

SEQ ID NO: 802666 - RNA, 19 nt, Artificial Sequence
  Description of Artificial Sequence: Synthetic oligonucleotide
ccggacgccacuguccaca

SEQ ID NO: 802667 - RNA, 19 nt, Artificial Sequence
  Description of Artificial Sequence: Synthetic oligonucleotide
ggucaggggucgagacgcc

SEQ ID NO: 802668 - RNA, 19 nt, Artificial Sequence
  Description of Artificial Sequence: Synthetic oligonucleotide
ccaaguauuccagcagagu

SEQ ID NO: 802669 - RNA, 19 nt, Artificial Sequence
  Description of Artificial Sequence: Synthetic oligonucleotide
ccccuagcccagccagggg

SEQ ID NO: 802670 - RNA, 19 nt, Artificial Sequence
  Description of Artificial Sequence: Synthetic oligonucleotide
ggggucgagacgccacaua

SEQ ID NO: 802671 - RNA, 19 nt, Artificial Sequence
  Description of Artificial Sequence: Synthetic oligonucleotide
cggaaagcccgaaccucuc

SEQ ID NO: 802672 - RNA, 19 nt, Artificial Sequence
  Description of Artificial Sequence: Synthetic oligonucleotide
gccaaacuggcgccccuua

SEQ ID NO: 802673 - RNA, 19 nt, Artificial Sequence
  Description of Artificial Sequence: Synthetic oligonucleotide
ccgagggaacaugauucca

SEQ ID NO: 802674 - RNA, 19 nt, Artificial Sequence
  Description of Artificial Sequence: Synthetic oligonucleotide
agccggccccauucaucuu

SEQ ID NO: 802675 - RNA, 19 nt, Artificial Sequence
  Description of Artificial Sequence: Synthetic oligonucleotide
gcguugagaugcagccuca

SEQ ID NO: 802676 - RNA, 19 nt, Artificial Sequence
  Description of Artificial Sequence: Synthetic oligonucleotide
ccccggacgccacugucca

SEQ ID NO: 802677 - RNA, 19 nt, Artificial Sequence
  Description of Artificial Sequence: Synthetic oligonucleotide
cagcguugagaugcagccu

SEQ ID NO: 802678 - RNA, 19 nt, Artificial Sequence
  Description of Artificial Sequence: Synthetic oligonucleotide
cacaugcccuggugccuua

SEQ ID NO: 802679 - RNA, 19 nt, Artificial Sequence
  Description of Artificial Sequence: Synthetic oligonucleotide
cgacuuuaugugaugcuuu

SEQ ID NO: 802680 - RNA, 19 nt, Artificial Sequence
  Description of Artificial Sequence: Synthetic oligonucleotide
cccgaaccucucgaaucuc

SEQ ID NO: 802681 - RNA, 19 nt, Artificial Sequence
  Description of Artificial Sequence: Synthetic oligonucleotide
cccuggugccuuagccgca

SEQ ID NO: 802682 - RNA, 19 nt, Artificial Sequence
  Description of Artificial Sequence: Synthetic oligonucleotide
gggcgggguugucucucaa

SEQ ID NO: 802683 - RNA, 19 nt, Artificial Sequence
  Description of Artificial Sequence: Synthetic oligonucleotide
ccacauccacgauacucuu

SEQ ID NO: 802684 - RNA, 19 nt, Artificial Sequence
  Description of Artificial Sequence: Synthetic oligonucleotide
gcccgggcaguuggugaca

SEQ ID NO: 802685 - RNA, 19 nt, Artificial Sequence
  Description of Artificial Sequence: Synthetic oligonucleotide
ccaaggcgauguagcauuu

SEQ ID NO: 802686 - RNA, 19 nt, Artificial Sequence
  Description of Artificial Sequence: Synthetic oligonucleotide
cccuuagcucggccauugu

SEQ ID NO: 802687 - RNA, 19 nt, Artificial Sequence
  Description of Artificial Sequence: Synthetic oligonucleotide
gccccuuagcucggccauu

SEQ ID NO: 802688 - RNA, 19 nt, Artificial Sequence
  Description of Artificial Sequence: Synthetic oligonucleotide
aagauuauaucuuuggccc

SEQ ID NO: 802689 - RNA, 19 nt, Artificial Sequence
  Description of Artificial Sequence: Synthetic oligonucleotide
uguaacauuaaugucaugg

SEQ ID NO: 802690 - RNA, 19 nt, Artificial Sequence
  Description of Artificial Sequence: Synthetic oligonucleotide
aaaucguacuuguacuggc

SEQ ID NO: 802691 - RNA, 19 nt, Artificial Sequence
  Description of Artificial Sequence: Synthetic oligonucleotide
agggauauagacccaaggc

SEQ ID NO: 802692 - RNA, 19 nt, Artificial Sequence
  Description of Artificial Sequence: Synthetic oligonucleotide
auaaauagcuagcaguguc

SEQ ID NO: 802693 - RNA, 19 nt, Artificial Sequence
  Description of Artificial Sequence: Synthetic oligonucleotide
aaguuagugagagcaaugc

SEQ ID NO: 802694 - RNA, 19 nt, Artificial Sequence
  Description of Artificial Sequence: Synthetic oligonucleotide
auugagucccucuacaguc

SEQ ID NO: 802695 - RNA, 19 nt, Artificial Sequence
  Description of Artificial Sequence: Synthetic oligonucleotide
uaugccuguaacauuaaug

SEQ ID NO: 802696 - RNA, 19 nt, Artificial Sequence
  Description of Artificial Sequence: Synthetic oligonucleotide
uaccugacaccauauagcg

SEQ ID NO: 802697 - RNA, 19 nt, Artificial Sequence
  Description of Artificial Sequence: Synthetic oligonucleotide
agugcgcuggguuaggggc

SEQ ID NO: 802698 - RNA, 19 nt, Artificial Sequence
  Description of Artificial Sequence: Synthetic oligonucleotide
augccuguaacauuaaugu

SEQ ID NO: 802699 - RNA, 19 nt, Artificial Sequence
  Description of Artificial Sequence: Synthetic oligonucleotide
augacuguaugccuguaac

SEQ ID NO: 802700 - RNA, 19 nt, Artificial Sequence
  Description of Artificial Sequence: Synthetic oligonucleotide
acaggguacaguaaguacc

SEQ ID NO: 802701 - RNA, 19 nt, Artificial Sequence
  Description of Artificial Sequence: Synthetic oligonucleotide
guaaguaccagagacucgg

SEQ ID NO: 802702 - RNA, 19 nt, Artificial Sequence
  Description of Artificial Sequence: Synthetic oligonucleotide
uguuuauuucccaggagga

SEQ ID NO: 802703 - RNA, 19 nt, Artificial Sequence
  Description of Artificial Sequence: Synthetic oligonucleotide
agauagugguacuuccugc

SEQ ID NO: 802704 - RNA, 19 nt, Artificial Sequence
  Description of Artificial Sequence: Synthetic oligonucleotide
auaucuuuggcccaguaaa

SEQ ID NO: 802705 - RNA, 19 nt, Artificial Sequence
  Description of Artificial Sequence: Synthetic oligonucleotide
aguguugaggcgcaagacg

SEQ ID NO: 802706 - RNA, 19 nt, Artificial Sequence
  Description of Artificial Sequence: Synthetic oligonucleotide
cuacggaucgcaucgaccg

SEQ ID NO: 802707 - RNA, 19 nt, Artificial Sequence
  Description of Artificial Sequence: Synthetic oligonucleotide
uagaccuccagcccuacgg

SEQ ID NO: 802708 - RNA, 19 nt, Artificial Sequence
  Description of Artificial Sequence: Synthetic oligonucleotide
uaaauagcuagcaguguca

SEQ ID NO: 802709 - RNA, 19 nt, Artificial Sequence
  Description of Artificial Sequence: Synthetic oligonucleotide
gaaaugggcagcaagugcc

SEQ ID NO: 802710 - RNA, 19 nt, Artificial Sequence
  Description of Artificial Sequence: Synthetic oligonucleotide
agaagaaugacugguguag

SEQ ID NO: 802711 - RNA, 19 nt, Artificial Sequence
  Description of Artificial Sequence: Synthetic oligonucleotide
auuaaugucaugguaggcu

SEQ ID NO: 802712 - RNA, 19 nt, Artificial Sequence
  Description of Artificial Sequence: Synthetic oligonucleotide
gacguagagggccaaaccc

SEQ ID NO: 802713 - RNA, 19 nt, Artificial Sequence
  Description of Artificial Sequence: Synthetic oligonucleotide
aauagcuagcagugucaac

SEQ ID NO: 802714 - RNA, 19 nt, Artificial Sequence
  Description of Artificial Sequence: Synthetic oligonucleotide
agaacagaggcucagggau

SEQ ID NO: 802715 - RNA, 19 nt, Artificial Sequence
  Description of Artificial Sequence: Synthetic oligonucleotide
uagaagaagaaugacuggu

SEQ ID NO: 802716 - RNA, 19 nt, Artificial Sequence
  Description of Artificial Sequence: Synthetic oligonucleotide
aaagcuucgagcgcggucu

SEQ ID NO: 802717 - RNA, 19 nt, Artificial Sequence
  Description of Artificial Sequence: Synthetic oligonucleotide
aacaaaagaucuuguuuau

SEQ ID NO: 802718 - RNA, 19 nt, Artificial Sequence
  Description of Artificial Sequence: Synthetic oligonucleotide
aaaccaggugaugccagcc

SEQ ID NO: 802719 - RNA, 19 nt, Artificial Sequence
  Description of Artificial Sequence: Synthetic oligonucleotide
ucuuuggcccaguaaaucu

SEQ ID NO: 802720 - RNA, 19 nt, Artificial Sequence
  Description of Artificial Sequence: Synthetic oligonucleotide
uacacauugguaccugaca

SEQ ID NO: 802721 - RNA, 19 nt, Artificial Sequence
  Description of Artificial Sequence: Synthetic oligonucleotide
aaugcugagcagcuacaug

SEQ ID NO: 802722 - RNA, 19 nt, Artificial Sequence
  Description of Artificial Sequence: Synthetic oligonucleotide
caccauauagcgcucgugg

SEQ ID NO: 802723 - RNA, 19 nt, Artificial Sequence
  Description of Artificial Sequence: Synthetic oligonucleotide
gucacaucaagacugguga

SEQ ID NO: 802724 - RNA, 19 nt, Artificial Sequence
  Description of Artificial Sequence: Synthetic oligonucleotide
ugcaaugguccuucgagug

SEQ ID NO: 802725 - RNA, 19 nt, Artificial Sequence
  Description of Artificial Sequence: Synthetic oligonucleotide
uauaucuuuggcccaguaa

SEQ ID NO: 802726 - RNA, 19 nt, Artificial Sequence
  Description of Artificial Sequence: Synthetic oligonucleotide
agacauguaagugcgcugg

SEQ ID NO: 802727 - RNA, 19 nt, Artificial Sequence
  Description of Artificial Sequence: Synthetic oligonucleotide
gagauagugguacuuccug

SEQ ID NO: 802728 - RNA, 19 nt, Artificial Sequence
  Description of Artificial Sequence: Synthetic oligonucleotide
agcccuacggaucgcaucg

SEQ ID NO: 802729 - RNA, 19 nt, Artificial Sequence
  Description of Artificial Sequence: Synthetic oligonucleotide
agagaucuuacuuccagaa

SEQ ID NO: 802730 - RNA, 19 nt, Artificial Sequence
  Description of Artificial Sequence: Synthetic oligonucleotide
gauuauaucuuuggcccag

SEQ ID NO: 802731 - RNA, 19 nt, Artificial Sequence
  Description of Artificial Sequence: Synthetic oligonucleotide
gguaccugacaccauauag

SEQ ID NO: 802732 - RNA, 19 nt, Artificial Sequence
  Description of Artificial Sequence: Synthetic oligonucleotide
gguacaguaaguaccagag

SEQ ID NO: 802733 - RNA, 19 nt, Artificial Sequence
  Description of Artificial Sequence: Synthetic oligonucleotide
uuuggcccaguaaaucugc

SEQ ID NO: 802734 - RNA, 19 nt, Artificial Sequence
  Description of Artificial Sequence: Synthetic oligonucleotide
aaucguacuuguacuggcg

SEQ ID NO: 802735 - RNA, 19 nt, Artificial Sequence
  Description of Artificial Sequence: Synthetic oligonucleotide
ugagccgaccacucggugg

SEQ ID NO: 802736 - RNA, 19 nt, Artificial Sequence
  Description of Artificial Sequence: Synthetic oligonucleotide
gaagcucugaguguagacc

SEQ ID NO: 802737 - RNA, 19 nt, Artificial Sequence
  Description of Artificial Sequence: Synthetic oligonucleotide
ugugcagcgaagucccggg

SEQ ID NO: 802738 - RNA, 19 nt, Artificial Sequence
  Description of Artificial Sequence: Synthetic oligonucleotide
caccaaaucguacuuguac

SEQ ID NO: 802739 - RNA, 19 nt, Artificial Sequence
  Description of Artificial Sequence: Synthetic oligonucleotide
aagacgaagcgggcgagcg

SEQ ID NO: 802740 - RNA, 19 nt, Artificial Sequence
  Description of Artificial Sequence: Synthetic oligonucleotide
accauauagcgcucguggg

SEQ ID NO: 802741 - RNA, 19 nt, Artificial Sequence
  Description of Artificial Sequence: Synthetic oligonucleotide
uuaaugucaugguaggcuu

SEQ ID NO: 802742 - RNA, 19 nt, Artificial Sequence
  Description of Artificial Sequence: Synthetic oligonucleotide
aaucugcccucggaaaugg

SEQ ID NO: 802743 - RNA, 19 nt, Artificial Sequence
  Description of Artificial Sequence: Synthetic oligonucleotide
caaaucguacuuguacugg

SEQ ID NO: 802744 - RNA, 19 nt, Artificial Sequence
  Description of Artificial Sequence: Synthetic oligonucleotide
agugguacuuccugcagcu

SEQ ID NO: 802745 - RNA, 19 nt, Artificial Sequence
  Description of Artificial Sequence: Synthetic oligonucleotide
ggaagauuauaucuuuggc

SEQ ID NO: 802746 - RNA, 19 nt, Artificial Sequence
  Description of Artificial Sequence: Synthetic oligonucleotide
agcuucaacgccauccagc

SEQ ID NO: 802747 - RNA, 19 nt, Artificial Sequence
  Description of Artificial Sequence: Synthetic oligonucleotide
ggcauguagagcccaaugg

SEQ ID NO: 802748 - RNA, 19 nt, Artificial Sequence
  Description of Artificial Sequence: Synthetic oligonucleotide
uguaagugcgcuggguuag

SEQ ID NO: 802749 - RNA, 19 nt, Artificial Sequence
  Description of Artificial Sequence: Synthetic oligonucleotide
ucagacauguaagugcgcu

SEQ ID NO: 802750 - RNA, 19 nt, Artificial Sequence
  Description of Artificial Sequence: Synthetic oligonucleotide
gauauagacccaaggccag

SEQ ID NO: 802751 - RNA, 19 nt, Artificial Sequence
  Description of Artificial Sequence: Synthetic oligonucleotide
gaagcuauugaugccucgc

SEQ ID NO: 802752 - RNA, 19 nt, Artificial Sequence
  Description of Artificial Sequence: Synthetic oligonucleotide
aagcuauugaugccucgca

SEQ ID NO: 802753 - RNA, 19 nt, Artificial Sequence
  Description of Artificial Sequence: Synthetic oligonucleotide
gagccgaccacucgguggg

SEQ ID NO: 802754 - RNA, 19 nt, Artificial Sequence
  Description of Artificial Sequence: Synthetic oligonucleotide
gacgaagcgggcgagcgcg

SEQ ID NO: 802755 - RNA, 19 nt, Artificial Sequence
  Description of Artificial Sequence: Synthetic oligonucleotide
aguuagugagagcaaugca

SEQ ID NO: 802756 - RNA, 19 nt, Artificial Sequence
  Description of Artificial Sequence: Synthetic oligonucleotide
aaaucugcccucggaaaug

SEQ ID NO: 802757 - RNA, 19 nt, Artificial Sequence
  Description of Artificial Sequence: Synthetic oligonucleotide
gagcuugcggaacaugccc

SEQ ID NO: 802758 - RNA, 19 nt, Artificial Sequence
  Description of Artificial Sequence: Synthetic oligonucleotide
agcuauugaugccucgcag

SEQ ID NO: 802759 - RNA, 19 nt, Artificial Sequence
  Description of Artificial Sequence: Synthetic oligonucleotide
gaaguuagugagagcaaug

SEQ ID NO: 802760 - RNA, 19 nt, Artificial Sequence
  Description of Artificial Sequence: Synthetic oligonucleotide
ugacuguaugccuguaaca

SEQ ID NO: 802761 - RNA, 19 nt, Artificial Sequence
  Description of Artificial Sequence: Synthetic oligonucleotide
gcccaauggagacaaagcg

SEQ ID NO: 802762 - RNA, 19 nt, Artificial Sequence
  Description of Artificial Sequence: Synthetic oligonucleotide
cauagaguggccggggucc

SEQ ID NO: 802763 - RNA, 19 nt, Artificial Sequence
  Description of Artificial Sequence: Synthetic oligonucleotide
cuucgagugauguccaguc

SEQ ID NO: 802764 - RNA, 19 nt, Artificial Sequence
  Description of Artificial Sequence: Synthetic oligonucleotide
accauaggugugguguucc

SEQ ID NO: 802765 - RNA, 19 nt, Artificial Sequence
  Description of Artificial Sequence: Synthetic oligonucleotide
gaccgcuccagccaaggcc

SEQ ID NO: 802766 - RNA, 19 nt, Artificial Sequence
  Description of Artificial Sequence: Synthetic oligonucleotide
cuuuggcccaguaaaucug

SEQ ID NO: 802767 - RNA, 19 nt, Artificial Sequence
  Description of Artificial Sequence: Synthetic oligonucleotide
auagcgcaagaaaagacca

SEQ ID NO: 802768 - RNA, 19 nt, Artificial Sequence
  Description of Artificial Sequence: Synthetic oligonucleotide
agauuauaucuuuggccca

SEQ ID NO: 802769 - RNA, 19 nt, Artificial Sequence
  Description of Artificial Sequence: Synthetic oligonucleotide
ucucauccggaaagggcag

SEQ ID NO: 802770 - RNA, 19 nt, Artificial Sequence
  Description of Artificial Sequence: Synthetic oligonucleotide
aaauagcuagcagugucaa

SEQ ID NO: 802771 - RNA, 19 nt, Artificial Sequence
  Description of Artificial Sequence: Synthetic oligonucleotide
auacacauugguaccugac

SEQ ID NO: 802772 - RNA, 19 nt, Artificial Sequence
  Description of Artificial Sequence: Synthetic oligonucleotide
cucggaaaugggcagcaag

SEQ ID NO: 802773 - RNA, 19 nt, Artificial Sequence
  Description of Artificial Sequence: Synthetic oligonucleotide
gacauguaagugcgcuggg

SEQ ID NO: 802774 - RNA, 19 nt, Artificial Sequence
  Description of Artificial Sequence: Synthetic oligonucleotide
uaucuuuggcccaguaaau

SEQ ID NO: 802775 - RNA, 19 nt, Artificial Sequence
  Description of Artificial Sequence: Synthetic oligonucleotide
cacaucaagacuggugacc

SEQ ID NO: 802776 - RNA, 19 nt, Artificial Sequence
  Description of Artificial Sequence: Synthetic oligonucleotide
acgccauccagccucuguc

SEQ ID NO: 802777 - RNA, 19 nt, Artificial Sequence
  Description of Artificial Sequence: Synthetic oligonucleotide
cugugagccgaccacucgg

SEQ ID NO: 802778 - RNA, 19 nt, Artificial Sequence
  Description of Artificial Sequence: Synthetic oligonucleotide
acaucaagacuggugacca

SEQ ID NO: 802779 - RNA, 19 nt, Artificial Sequence
  Description of Artificial Sequence: Synthetic oligonucleotide
ggaacaggcuaccaaggag

SEQ ID NO: 802780 - RNA, 19 nt, Artificial Sequence
  Description of Artificial Sequence: Synthetic oligonucleotide
ggugccauaagugaggcca

SEQ ID NO: 802781 - RNA, 19 nt, Artificial Sequence
  Description of Artificial Sequence: Synthetic oligonucleotide
gagagaucaguaggggugc

SEQ ID NO: 802782 - RNA, 19 nt, Artificial Sequence
  Description of Artificial Sequence: Synthetic oligonucleotide
ggaaaugggcagcaagugc

SEQ ID NO: 802783 - RNA, 19 nt, Artificial Sequence
  Description of Artificial Sequence: Synthetic oligonucleotide
cccaauggagacaaagcgg

SEQ ID NO: 802784 - RNA, 19 nt, Artificial Sequence
  Description of Artificial Sequence: Synthetic oligonucleotide
ugcagcgaagucccgggca

SEQ ID NO: 802785 - RNA, 19 nt, Artificial Sequence
  Description of Artificial Sequence: Synthetic oligonucleotide
augcaacccagcugcagag

SEQ ID NO: 802786 - RNA, 19 nt, Artificial Sequence
  Description of Artificial Sequence: Synthetic oligonucleotide
cuggcggaagcuauugaug

SEQ ID NO: 802787 - RNA, 19 nt, Artificial Sequence
  Description of Artificial Sequence: Synthetic oligonucleotide
agcuagcagugucaacacg

SEQ ID NO: 802788 - RNA, 19 nt, Artificial Sequence
  Description of Artificial Sequence: Synthetic oligonucleotide
auuucccaggaggagguag

SEQ ID NO: 802789 - RNA, 19 nt, Artificial Sequence
  Description of Artificial Sequence: Synthetic oligonucleotide
agucacaucaagacuggug

SEQ ID NO: 802790 - RNA, 19 nt, Artificial Sequence
  Description of Artificial Sequence: Synthetic oligonucleotide
ucaguaggggugccauaag

SEQ ID NO: 802791 - RNA, 19 nt, Artificial Sequence
  Description of Artificial Sequence: Synthetic oligonucleotide
aggcgcaagacgaagcggg

SEQ ID NO: 802792 - RNA, 19 nt, Artificial Sequence
  Description of Artificial Sequence: Synthetic oligonucleotide
aggcauguagagcccaaug

SEQ ID NO: 802793 - RNA, 19 nt, Artificial Sequence
  Description of Artificial Sequence: Synthetic oligonucleotide
cacuccagccucauguaac

SEQ ID NO: 802794 - RNA, 19 nt, Artificial Sequence
  Description of Artificial Sequence: Synthetic oligonucleotide
uaggugugguguuccagca

SEQ ID NO: 802795 - RNA, 19 nt, Artificial Sequence
  Description of Artificial Sequence: Synthetic oligonucleotide
cauauagcgcucguggguc

SEQ ID NO: 802796 - RNA, 19 nt, Artificial Sequence
  Description of Artificial Sequence: Synthetic oligonucleotide
gucaacacgacagccucag

SEQ ID NO: 802797 - RNA, 19 nt, Artificial Sequence
  Description of Artificial Sequence: Synthetic oligonucleotide
gugucaacacgacagccuc

SEQ ID NO: 802798 - RNA, 19 nt, Artificial Sequence
  Description of Artificial Sequence: Synthetic oligonucleotide
uuccacucgauagcgcaag

SEQ ID NO: 802799 - RNA, 19 nt, Artificial Sequence
  Description of Artificial Sequence: Synthetic oligonucleotide
ugccuguaacauuaauguc

SEQ ID NO: 802800 - RNA, 19 nt, Artificial Sequence
  Description of Artificial Sequence: Synthetic oligonucleotide
acucgauagcgcaagaaaa

SEQ ID NO: 802801 - RNA, 19 nt, Artificial Sequence
  Description of Artificial Sequence: Synthetic oligonucleotide
ugugagccgaccacucggu

SEQ ID NO: 802802 - RNA, 19 nt, Artificial Sequence
  Description of Artificial Sequence: Synthetic oligonucleotide
ggccuuaaguccaaggacc

SEQ ID NO: 802803 - RNA, 19 nt, Artificial Sequence
  Description of Artificial Sequence: Synthetic oligonucleotide
agugucaacacgacagccu

SEQ ID NO: 802804 - RNA, 19 nt, Artificial Sequence
  Description of Artificial Sequence: Synthetic oligonucleotide
uuguguggaagggcuaggc

SEQ ID NO: 802805 - RNA, 19 nt, Artificial Sequence
  Description of Artificial Sequence: Synthetic oligonucleotide
cuacauguuggcccagcac

SEQ ID NO: 802806 - RNA, 19 nt, Artificial Sequence
  Description of Artificial Sequence: Synthetic oligonucleotide
guugaggcgcaagacgaag

SEQ ID NO: 802807 - RNA, 19 nt, Artificial Sequence
  Description of Artificial Sequence: Synthetic oligonucleotide
acucgguggguguugugug

SEQ ID NO: 802808 - RNA, 19 nt, Artificial Sequence
  Description of Artificial Sequence: Synthetic oligonucleotide
ucgagcgcggucuccaccu

SEQ ID NO: 802809 - RNA, 19 nt, Artificial Sequence
  Description of Artificial Sequence: Synthetic oligonucleotide
aaagcgggagagggccggc

SEQ ID NO: 802810 - RNA, 19 nt, Artificial Sequence
  Description of Artificial Sequence: Synthetic oligonucleotide
gcgggagaagcucugagug

SEQ ID NO: 802811 - RNA, 19 nt, Artificial Sequence
  Description of Artificial Sequence: Synthetic oligonucleotide
uguaugccuguaacauuaa

SEQ ID NO: 802812 - RNA, 19 nt, Artificial Sequence
  Description of Artificial Sequence: Synthetic oligonucleotide
aagagguucagcagaucaa

SEQ ID NO: 802813 - RNA, 19 nt, Artificial Sequence
  Description of Artificial Sequence: Synthetic oligonucleotide
acuguaugccuguaacauu

SEQ ID NO: 802814 - RNA, 19 nt, Artificial Sequence
  Description of Artificial Sequence: Synthetic oligonucleotide
cucgguggguguugugugg

SEQ ID NO: 802815 - RNA, 19 nt, Artificial Sequence
  Description of Artificial Sequence: Synthetic oligonucleotide
aaaugggcagcaagugcca

SEQ ID NO: 802816 - RNA, 19 nt, Artificial Sequence
  Description of Artificial Sequence: Synthetic oligonucleotide
uucgagcgcggucuccacc

SEQ ID NO: 802817 - RNA, 19 nt, Artificial Sequence
  Description of Artificial Sequence: Synthetic oligonucleotide
auguaagugcgcuggguua

SEQ ID NO: 802818 - RNA, 19 nt, Artificial Sequence
  Description of Artificial Sequence: Synthetic oligonucleotide
uguacuggcggaagcuauu

SEQ ID NO: 802819 - RNA, 19 nt, Artificial Sequence
  Description of Artificial Sequence: Synthetic oligonucleotide
ugcccucggaaaugggcag

SEQ ID NO: 802820 - RNA, 19 nt, Artificial Sequence
  Description of Artificial Sequence: Synthetic oligonucleotide
accugacaccauauagcgc

SEQ ID NO: 802821 - RNA, 19 nt, Artificial Sequence
  Description of Artificial Sequence: Synthetic oligonucleotide
gaucgcaucgaccgcucca

SEQ ID NO: 802822 - RNA, 19 nt, Artificial Sequence
  Description of Artificial Sequence: Synthetic oligonucleotide
agagauagugguacuuccu

SEQ ID NO: 802823 - RNA, 19 nt, Artificial Sequence
  Description of Artificial Sequence: Synthetic oligonucleotide
uacggaucgcaucgaccgc

SEQ ID NO: 802824 - RNA, 19 nt, Artificial Sequence
  Description of Artificial Sequence: Synthetic oligonucleotide
agucuggaccacaggguac

SEQ ID NO: 802825 - RNA, 19 nt, Artificial Sequence
  Description of Artificial Sequence: Synthetic oligonucleotide
ggaagcuauugaugccucg

SEQ ID NO: 802826 - RNA, 19 nt, Artificial Sequence
  Description of Artificial Sequence: Synthetic oligonucleotide
gagcggaguguugaggcgc

SEQ ID NO: 802827 - RNA, 19 nt, Artificial Sequence
  Description of Artificial Sequence: Synthetic oligonucleotide
aucgcaucgaccgcuccag

SEQ ID NO: 802828 - RNA, 19 nt, Artificial Sequence
  Description of Artificial Sequence: Synthetic oligonucleotide
uccuacggugugcagcgaa

SEQ ID NO: 802829 - RNA, 19 nt, Artificial Sequence
  Description of Artificial Sequence: Synthetic oligonucleotide
agcccuccgccagagauag

SEQ ID NO: 802830 - RNA, 19 nt, Artificial Sequence
  Description of Artificial Sequence: Synthetic oligonucleotide
uauagacccaaggccagua

SEQ ID NO: 802831 - RNA, 19 nt, Artificial Sequence
  Description of Artificial Sequence: Synthetic oligonucleotide
gaguggccgggguccaugg

SEQ ID NO: 802832 - RNA, 19 nt, Artificial Sequence
  Description of Artificial Sequence: Synthetic oligonucleotide
aagcuucgagcgcggucuc

SEQ ID NO: 802833 - RNA, 19 nt, Artificial Sequence
  Description of Artificial Sequence: Synthetic oligonucleotide
uacuggcggaagcuauuga

SEQ ID NO: 802834 - RNA, 19 nt, Artificial Sequence
  Description of Artificial Sequence: Synthetic oligonucleotide
gacuguaugccuguaacau

SEQ ID NO: 802835 - RNA, 19 nt, Artificial Sequence
  Description of Artificial Sequence: Synthetic oligonucleotide
caucaguagcagugucugc

SEQ ID NO: 802836 - RNA, 19 nt, Artificial Sequence
  Description of Artificial Sequence: Synthetic oligonucleotide
gaguguugaggcgcaagac

SEQ ID NO: 802837 - RNA, 19 nt, Artificial Sequence
  Description of Artificial Sequence: Synthetic oligonucleotide
ugugguguuccagcacgcc

SEQ ID NO: 802838 - RNA, 19 nt, Artificial Sequence
  Description of Artificial Sequence: Synthetic oligonucleotide
gguccauggggcuugguga

SEQ ID NO: 802839 - RNA, 19 nt, Artificial Sequence
  Description of Artificial Sequence: Synthetic oligonucleotide
agguagaacagaggcucag

SEQ ID NO: 802840 - RNA, 19 nt, Artificial Sequence
  Description of Artificial Sequence: Synthetic oligonucleotide
ugccauaagugaggccagg

SEQ ID NO: 802841 - RNA, 19 nt, Artificial Sequence
  Description of Artificial Sequence: Synthetic oligonucleotide
ucgaccgcuccagccaagg

SEQ ID NO: 802842 - RNA, 19 nt, Artificial Sequence
  Description of Artificial Sequence: Synthetic oligonucleotide
cacucgauagcgcaagaaa

SEQ ID NO: 802843 - RNA, 19 nt, Artificial Sequence
  Description of Artificial Sequence: Synthetic oligonucleotide
caccggguccgacaggagc

SEQ ID NO: 802844 - RNA, 19 nt, Artificial Sequence
  Description of Artificial Sequence: Synthetic oligonucleotide
gccggcagcagguagaaga

SEQ ID NO: 802845 - RNA, 19 nt, Artificial Sequence
  Description of Artificial Sequence: Synthetic oligonucleotide
cauacacauugguaccuga

SEQ ID NO: 802846 - RNA, 19 nt, Artificial Sequence
  Description of Artificial Sequence: Synthetic oligonucleotide
agggccaaacccauggccu

SEQ ID NO: 802847 - RNA, 19 nt, Artificial Sequence
  Description of Artificial Sequence: Synthetic oligonucleotide
caaagcuucgagcgcgguc

SEQ ID NO: 802848 - RNA, 19 nt, Artificial Sequence
  Description of Artificial Sequence: Synthetic oligonucleotide
auauagcgcucgugggucu

SEQ ID NO: 802849 - RNA, 19 nt, Artificial Sequence
  Description of Artificial Sequence: Synthetic oligonucleotide
ccuggcuauuuguagaguc

SEQ ID NO: 802850 - RNA, 19 nt, Artificial Sequence
  Description of Artificial Sequence: Synthetic oligonucleotide
acguagagggccaaaccca

SEQ ID NO: 802851 - RNA, 19 nt, Artificial Sequence
  Description of Artificial Sequence: Synthetic oligonucleotide
gcuagcagugucaacacga

SEQ ID NO: 802852 - RNA, 19 nt, Artificial Sequence
  Description of Artificial Sequence: Synthetic oligonucleotide
caaagcgggagagggccgg

SEQ ID NO: 802853 - RNA, 19 nt, Artificial Sequence
  Description of Artificial Sequence: Synthetic oligonucleotide
caacacgacagccucagcu

SEQ ID NO: 802854 - RNA, 19 nt, Artificial Sequence
  Description of Artificial Sequence: Synthetic oligonucleotide
gggccuuaaguccaaggac

SEQ ID NO: 802855 - RNA, 19 nt, Artificial Sequence
  Description of Artificial Sequence: Synthetic oligonucleotide
ucaacacgacagccucagc

SEQ ID NO: 802856 - RNA, 19 nt, Artificial Sequence
  Description of Artificial Sequence: Synthetic oligonucleotide
gggcaaagcuucgagcgcg

SEQ ID NO: 802857 - RNA, 19 nt, Artificial Sequence
  Description of Artificial Sequence: Synthetic oligonucleotide
gugugcagcgaagucccgg

SEQ ID NO: 802858 - RNA, 19 nt, Artificial Sequence
  Description of Artificial Sequence: Synthetic oligonucleotide
ugccaccaaaucguacuug

SEQ ID NO: 802859 - RNA, 19 nt, Artificial Sequence
  Description of Artificial Sequence: Synthetic oligonucleotide
uccgccagagauaguggua

SEQ ID NO: 802860 - RNA, 19 nt, Artificial Sequence
  Description of Artificial Sequence: Synthetic oligonucleotide
uccacucgauagcgcaaga

SEQ ID NO: 802861 - RNA, 19 nt, Artificial Sequence
  Description of Artificial Sequence: Synthetic oligonucleotide
guagaccuccagcccuacg

SEQ ID NO: 802862 - RNA, 19 nt, Artificial Sequence
  Description of Artificial Sequence: Synthetic oligonucleotide
uguuaccaggaagauuaua

SEQ ID NO: 802863 - RNA, 19 nt, Artificial Sequence
  Description of Artificial Sequence: Synthetic oligonucleotide
acauguaagugcgcugggu

SEQ ID NO: 802864 - RNA, 19 nt, Artificial Sequence
  Description of Artificial Sequence: Synthetic oligonucleotide
guacuggcggaagcuauug

SEQ ID NO: 802865 - RNA, 19 nt, Artificial Sequence
  Description of Artificial Sequence: Synthetic oligonucleotide
caaugcaacccagcugcag

SEQ ID NO: 802866 - RNA, 19 nt, Artificial Sequence
  Description of Artificial Sequence: Synthetic oligonucleotide
cugcccucggaaaugggca

SEQ ID NO: 802867 - RNA, 19 nt, Artificial Sequence
  Description of Artificial Sequence: Synthetic oligonucleotide
gcgcaagaaaagaccaugg

SEQ ID NO: 802868 - RNA, 19 nt, Artificial Sequence
  Description of Artificial Sequence: Synthetic oligonucleotide
gcuuccacucgauagcgca

SEQ ID NO: 802869 - RNA, 19 nt, Artificial Sequence
  Description of Artificial Sequence: Synthetic oligonucleotide
ggcguucucagacauguaa

SEQ ID NO: 802870 - RNA, 19 nt, Artificial Sequence
  Description of Artificial Sequence: Synthetic oligonucleotide
ggucucauccggaaagggc

SEQ ID NO: 802871 - RNA, 19 nt, Artificial Sequence
  Description of Artificial Sequence: Synthetic oligonucleotide
ggaguguugaggcgcaaga

SEQ ID NO: 802872 - RNA, 19 nt, Artificial Sequence
  Description of Artificial Sequence: Synthetic oligonucleotide
ggagugugcauaacagccc

SEQ ID NO: 802873 - RNA, 19 nt, Artificial Sequence
  Description of Artificial Sequence: Synthetic oligonucleotide
caguaaaucugcccucgga

SEQ ID NO: 802874 - RNA, 19 nt, Artificial Sequence
  Description of Artificial Sequence: Synthetic oligonucleotide
gcgcucgugggucucaucc

SEQ ID NO: 802875 - RNA, 19 nt, Artificial Sequence
  Description of Artificial Sequence: Synthetic oligonucleotide
acaccauauagcgcucgug

SEQ ID NO: 802876 - RNA, 19 nt, Artificial Sequence
  Description of Artificial Sequence: Synthetic oligonucleotide
gaugccucgcaggguuagg

SEQ ID NO: 802877 - RNA, 19 nt, Artificial Sequence
  Description of Artificial Sequence: Synthetic oligonucleotide
ugguccuucgagugauguc

SEQ ID NO: 802878 - RNA, 19 nt, Artificial Sequence
  Description of Artificial Sequence: Synthetic oligonucleotide
ccuacggaucgcaucgacc

SEQ ID NO: 802879 - RNA, 19 nt, Artificial Sequence
  Description of Artificial Sequence: Synthetic oligonucleotide
gcguucucagacauguaag

SEQ ID NO: 802880 - RNA, 19 nt, Artificial Sequence
  Description of Artificial Sequence: Synthetic oligonucleotide
auauagacccaaggccagu

SEQ ID NO: 802881 - RNA, 19 nt, Artificial Sequence
  Description of Artificial Sequence: Synthetic oligonucleotide
aguggccgggguccauggg

SEQ ID NO: 802882 - RNA, 19 nt, Artificial Sequence
  Description of Artificial Sequence: Synthetic oligonucleotide
ugcaacccagcugcagagc

SEQ ID NO: 802883 - RNA, 19 nt, Artificial Sequence
  Description of Artificial Sequence: Synthetic oligonucleotide
cagccuggcuauuuguaga

SEQ ID NO: 802884 - RNA, 19 nt, Artificial Sequence
  Description of Artificial Sequence: Synthetic oligonucleotide
gagcagcuacauguuggcc

SEQ ID NO: 802885 - RNA, 19 nt, Artificial Sequence
  Description of Artificial Sequence: Synthetic oligonucleotide
ucgugggucucauccggaa

SEQ ID NO: 802886 - RNA, 19 nt, Artificial Sequence
  Description of Artificial Sequence: Synthetic oligonucleotide
acaaagcgggagagggccg

SEQ ID NO: 802887 - RNA, 19 nt, Artificial Sequence
  Description of Artificial Sequence: Synthetic oligonucleotide
gggcgggaaagccagcgcc

SEQ ID NO: 802888 - RNA, 19 nt, Artificial Sequence
  Description of Artificial Sequence: Synthetic oligonucleotide
cuacagucacaucaagacu

SEQ ID NO: 802889 - RNA, 19 nt, Artificial Sequence
  Description of Artificial Sequence: Synthetic oligonucleotide
cauggggcuuggugagugc

SEQ ID NO: 802890 - RNA, 19 nt, Artificial Sequence
  Description of Artificial Sequence: Synthetic oligonucleotide
aggcccacgcccuguguug

SEQ ID NO: 802891 - RNA, 19 nt, Artificial Sequence
  Description of Artificial Sequence: Synthetic oligonucleotide
acggaucgcaucgaccgcu

SEQ ID NO: 802892 - RNA, 19 nt, Artificial Sequence
  Description of Artificial Sequence: Synthetic oligonucleotide
gaagcgggcgagcgcgcgc

SEQ ID NO: 802893 - RNA, 19 nt, Artificial Sequence
  Description of Artificial Sequence: Synthetic oligonucleotide
gcccauggcguucucagac

SEQ ID NO: 802894 - RNA, 19 nt, Artificial Sequence
  Description of Artificial Sequence: Synthetic oligonucleotide
accugugagccgaccacuc

SEQ ID NO: 802895 - RNA, 19 nt, Artificial Sequence
  Description of Artificial Sequence: Synthetic oligonucleotide
cacaagaucaugcucuguu

SEQ ID NO: 802896 - RNA, 19 nt, Artificial Sequence
  Description of Artificial Sequence: Synthetic oligonucleotide
acgcagagcggaguguuga

SEQ ID NO: 802897 - RNA, 19 nt, Artificial Sequence
  Description of Artificial Sequence: Synthetic oligonucleotide
ggcggaagcuauugaugcc

SEQ ID NO: 802898 - RNA, 19 nt, Artificial Sequence
  Description of Artificial Sequence: Synthetic oligonucleotide
cuggcuauuuguagagucu

SEQ ID NO: 802899 - RNA, 19 nt, Artificial Sequence
  Description of Artificial Sequence: Synthetic oligonucleotide
cugcauccacagcuccagg

SEQ ID NO: 802900 - RNA, 19 nt, Artificial Sequence
  Description of Artificial Sequence: Synthetic oligonucleotide
ggguuagggcuuccacucg

SEQ ID NO: 802901 - RNA, 19 nt, Artificial Sequence
  Description of Artificial Sequence: Synthetic oligonucleotide
uccagcccuacggaucgca

SEQ ID NO: 802902 - RNA, 19 nt, Artificial Sequence
  Description of Artificial Sequence: Synthetic oligonucleotide
cugacaccauauagcgcuc

SEQ ID NO: 802903 - RNA, 19 nt, Artificial Sequence
  Description of Artificial Sequence: Synthetic oligonucleotide
caagacgaagcgggcgagc

SEQ ID NO: 802904 - RNA, 19 nt, Artificial Sequence
  Description of Artificial Sequence: Synthetic oligonucleotide
cagcacgcagagcggagug

SEQ ID NO: 802905 - RNA, 19 nt, Artificial Sequence
  Description of Artificial Sequence: Synthetic oligonucleotide
gugaugccagccacguagc

SEQ ID NO: 802906 - RNA, 19 nt, Artificial Sequence
  Description of Artificial Sequence: Synthetic oligonucleotide
agcuugcggaacaugcccu

SEQ ID NO: 802907 - RNA, 19 nt, Artificial Sequence
  Description of Artificial Sequence: Synthetic oligonucleotide
gguuagggcuuccacucga

SEQ ID NO: 802908 - RNA, 19 nt, Artificial Sequence
  Description of Artificial Sequence: Synthetic oligonucleotide
gugcgcuggguuaggggcg

SEQ ID NO: 802909 - RNA, 19 nt, Artificial Sequence
  Description of Artificial Sequence: Synthetic oligonucleotide
acgcccuguguugccaagg

SEQ ID NO: 802910 - RNA, 19 nt, Artificial Sequence
  Description of Artificial Sequence: Synthetic oligonucleotide
ucauccggaaagggcaguu

SEQ ID NO: 802911 - RNA, 19 nt, Artificial Sequence
  Description of Artificial Sequence: Synthetic oligonucleotide
gugccauaagugaggccag

SEQ ID NO: 802912 - RNA, 19 nt, Artificial Sequence
  Description of Artificial Sequence: Synthetic oligonucleotide
ucgcaucgaccgcuccagc

SEQ ID NO: 802913 - RNA, 19 nt, Artificial Sequence
  Description of Artificial Sequence: Synthetic oligonucleotide
cagcccuacggaucgcauc

SEQ ID NO: 802914 - RNA, 19 nt, Artificial Sequence
  Description of Artificial Sequence: Synthetic oligonucleotide
gagaucaguaggggugcca

SEQ ID NO: 802915 - RNA, 19 nt, Artificial Sequence
  Description of Artificial Sequence: Synthetic oligonucleotide
ccaggugaugccagccacg

SEQ ID NO: 802916 - RNA, 19 nt, Artificial Sequence
  Description of Artificial Sequence: Synthetic oligonucleotide
aggguacaguaaguaccag

SEQ ID NO: 802917 - RNA, 19 nt, Artificial Sequence
  Description of Artificial Sequence: Synthetic oligonucleotide
ggugguugagcuugcggaa

SEQ ID NO: 802918 - RNA, 19 nt, Artificial Sequence
  Description of Artificial Sequence: Synthetic oligonucleotide
uauagcgcucgugggucuc

SEQ ID NO: 802919 - RNA, 19 nt, Artificial Sequence
  Description of Artificial Sequence: Synthetic oligonucleotide
cauguaagugcgcuggguu

SEQ ID NO: 802920 - RNA, 19 nt, Artificial Sequence
  Description of Artificial Sequence: Synthetic oligonucleotide
agcacgggcaagacguaga

SEQ ID NO: 802921 - RNA, 19 nt, Artificial Sequence
  Description of Artificial Sequence: Synthetic oligonucleotide
gguguuguguggaagggcu

SEQ ID NO: 802922 - RNA, 19 nt, Artificial Sequence
  Description of Artificial Sequence: Synthetic oligonucleotide
gcaaugguccuucgaguga

SEQ ID NO: 802923 - RNA, 19 nt, Artificial Sequence
  Description of Artificial Sequence: Synthetic oligonucleotide
ccuacggugugcagcgaag

SEQ ID NO: 802924 - RNA, 19 nt, Artificial Sequence
  Description of Artificial Sequence: Synthetic oligonucleotide
gcaucgaccgcuccagcca

SEQ ID NO: 802925 - RNA, 19 nt, Artificial Sequence
  Description of Artificial Sequence: Synthetic oligonucleotide
gagcgcggucuccaccuac

SEQ ID NO: 802926 - RNA, 19 nt, Artificial Sequence
  Description of Artificial Sequence: Synthetic oligonucleotide
cagcacgggcaagacguag

SEQ ID NO: 802927 - RNA, 19 nt, Artificial Sequence
  Description of Artificial Sequence: Synthetic oligonucleotide
cuuccacucgauagcgcaa

SEQ ID NO: 802928 - RNA, 19 nt, Artificial Sequence
  Description of Artificial Sequence: Synthetic oligonucleotide
agcgcucgugggucucauc

SEQ ID NO: 802929 - RNA, 19 nt, Artificial Sequence
  Description of Artificial Sequence: Synthetic oligonucleotide
ccugugagccgaccacucg

SEQ ID NO: 802930 - RNA, 19 nt, Artificial Sequence
  Description of Artificial Sequence: Synthetic oligonucleotide
acccugcaaugguccuucg

SEQ ID NO: 802931 - RNA, 19 nt, Artificial Sequence
  Description of Artificial Sequence: Synthetic oligonucleotide
cccuccgccagagauagug

SEQ ID NO: 802932 - RNA, 19 nt, Artificial Sequence
  Description of Artificial Sequence: Synthetic oligonucleotide
ccgacuuuccuacggugug

SEQ ID NO: 802933 - RNA, 19 nt, Artificial Sequence
  Description of Artificial Sequence: Synthetic oligonucleotide
agacucggugcuggcagca

SEQ ID NO: 802934 - RNA, 19 nt, Artificial Sequence
  Description of Artificial Sequence: Synthetic oligonucleotide
gcuacauguuggcccagca

SEQ ID NO: 802935 - RNA, 19 nt, Artificial Sequence
  Description of Artificial Sequence: Synthetic oligonucleotide
gaucaagguugggcagcug

SEQ ID NO: 802936 - RNA, 19 nt, Artificial Sequence
  Description of Artificial Sequence: Synthetic oligonucleotide
gugcagcgaagucccgggc

SEQ ID NO: 802937 - RNA, 19 nt, Artificial Sequence
  Description of Artificial Sequence: Synthetic oligonucleotide
gaucccugccccagagauc

SEQ ID NO: 802938 - RNA, 19 nt, Artificial Sequence
  Description of Artificial Sequence: Synthetic oligonucleotide
ccuccgccagagauagugg

SEQ ID NO: 802939 - RNA, 19 nt, Artificial Sequence
  Description of Artificial Sequence: Synthetic oligonucleotide
cuccaccuacaaacugcuc

SEQ ID NO: 802940 - RNA, 19 nt, Artificial Sequence
  Description of Artificial Sequence: Synthetic oligonucleotide
gacugguguaggcgcucca

SEQ ID NO: 802941 - RNA, 19 nt, Artificial Sequence
  Description of Artificial Sequence: Synthetic oligonucleotide
cucacuccagccucaugua

SEQ ID NO: 802942 - RNA, 19 nt, Artificial Sequence
  Description of Artificial Sequence: Synthetic oligonucleotide
gggaccugugagccgacca

SEQ ID NO: 802943 - RNA, 19 nt, Artificial Sequence
  Description of Artificial Sequence: Synthetic oligonucleotide
ccgccagagauagugguac

SEQ ID NO: 802944 - RNA, 19 nt, Artificial Sequence
  Description of Artificial Sequence: Synthetic oligonucleotide
gguaggcuucaagccaagc

SEQ ID NO: 802945 - RNA, 19 nt, Artificial Sequence
  Description of Artificial Sequence: Synthetic oligonucleotide
gcgcaagacgaagcgggcg

SEQ ID NO: 802946 - RNA, 19 nt, Artificial Sequence
  Description of Artificial Sequence: Synthetic oligonucleotide
gcuucaagccaagccucag

SEQ ID NO: 802947 - RNA, 19 nt, Artificial Sequence
  Description of Artificial Sequence: Synthetic oligonucleotide
ggccaguauugggaagagg

SEQ ID NO: 802948 - RNA, 19 nt, Artificial Sequence
  Description of Artificial Sequence: Synthetic oligonucleotide
ccuguaacauuaaugucau

SEQ ID NO: 802949 - RNA, 19 nt, Artificial Sequence
  Description of Artificial Sequence: Synthetic oligonucleotide
cuaggccagccacauaaau

SEQ ID NO: 802950 - RNA, 19 nt, Artificial Sequence
  Description of Artificial Sequence: Synthetic oligonucleotide
gggagaugacuguaugccu

SEQ ID NO: 802951 - RNA, 19 nt, Artificial Sequence
  Description of Artificial Sequence: Synthetic oligonucleotide
auagcgcucgugggucuca

SEQ ID NO: 802952 - RNA, 19 nt, Artificial Sequence
  Description of Artificial Sequence: Synthetic oligonucleotide
agcgcggucuccaccuaca

SEQ ID NO: 802953 - RNA, 19 nt, Artificial Sequence
  Description of Artificial Sequence: Synthetic oligonucleotide
caucgaccgcuccagccaa

SEQ ID NO: 802954 - RNA, 19 nt, Artificial Sequence
  Description of Artificial Sequence: Synthetic oligonucleotide
uggcguucucagacaugua

SEQ ID NO: 802955 - RNA, 19 nt, Artificial Sequence
  Description of Artificial Sequence: Synthetic oligonucleotide
ggaucgcaucgaccgcucc

SEQ ID NO: 802956 - RNA, 19 nt, Artificial Sequence
  Description of Artificial Sequence: Synthetic oligonucleotide
agcggaguguugaggcgca

SEQ ID NO: 802957 - RNA, 19 nt, Artificial Sequence
  Description of Artificial Sequence: Synthetic oligonucleotide
gcaagacgaagcgggcgag

SEQ ID NO: 802958 - RNA, 19 nt, Artificial Sequence
  Description of Artificial Sequence: Synthetic oligonucleotide
guccuucgagugaugucca

SEQ ID NO: 802959 - RNA, 19 nt, Artificial Sequence
  Description of Artificial Sequence: Synthetic oligonucleotide
caccuacaaacugcuccuc

SEQ ID NO: 802960 - RNA, 19 nt, Artificial Sequence
  Description of Artificial Sequence: Synthetic oligonucleotide
cccuggagugugcauaaca

SEQ ID NO: 802961 - RNA, 19 nt, Artificial Sequence
  Description of Artificial Sequence: Synthetic oligonucleotide
gaagucccgggcaaagcuu

SEQ ID NO: 802962 - RNA, 19 nt, Artificial Sequence
  Description of Artificial Sequence: Synthetic oligonucleotide
cucggugcuggcagcacgu

SEQ ID NO: 802963 - RNA, 19 nt, Artificial Sequence
  Description of Artificial Sequence: Synthetic oligonucleotide
ggcuaccaaggagugugac

SEQ ID NO: 802964 - RNA, 19 nt, Artificial Sequence
  Description of Artificial Sequence: Synthetic oligonucleotide
cacucgguggguguugugu

SEQ ID NO: 802965 - RNA, 19 nt, Artificial Sequence
  Description of Artificial Sequence: Synthetic oligonucleotide
ggcgcaagacgaagcgggc

SEQ ID NO: 802966 - RNA, 19 nt, Artificial Sequence
  Description of Artificial Sequence: Synthetic oligonucleotide
guggaagggcuaggccagc

SEQ ID NO: 802967 - RNA, 19 nt, Artificial Sequence
  Description of Artificial Sequence: Synthetic oligonucleotide
cacgcccugggccagugcu

SEQ ID NO: 802968 - RNA, 19 nt, Artificial Sequence
  Description of Artificial Sequence: Synthetic oligonucleotide
gcggaagcuauugaugccu

SEQ ID NO: 802969 - RNA, 19 nt, Artificial Sequence
  Description of Artificial Sequence: Synthetic oligonucleotide
uuccuacggugugcagcga

SEQ ID NO: 802970 - RNA, 19 nt, Artificial Sequence
  Description of Artificial Sequence: Synthetic oligonucleotide
cuguguugccaagggugga

SEQ ID NO: 802971 - RNA, 19 nt, Artificial Sequence
  Description of Artificial Sequence: Synthetic oligonucleotide
cccuuucuggcagaauguc

SEQ ID NO: 802972 - RNA, 19 nt, Artificial Sequence
  Description of Artificial Sequence: Synthetic oligonucleotide
ccccgacuuuccuacggug

SEQ ID NO: 802973 - RNA, 19 nt, Artificial Sequence
  Description of Artificial Sequence: Synthetic oligonucleotide
aucgaccgcuccagccaag

SEQ ID NO: 802974 - RNA, 19 nt, Artificial Sequence
  Description of Artificial Sequence: Synthetic oligonucleotide
ggugugcagcgaagucccg

SEQ ID NO: 802975 - RNA, 19 nt, Artificial Sequence
  Description of Artificial Sequence: Synthetic oligonucleotide
ccauauagcgcucgugggu

SEQ ID NO: 802976 - RNA, 19 nt, Artificial Sequence
  Description of Artificial Sequence: Synthetic oligonucleotide
ggcuuccacucgauagcgc

SEQ ID NO: 802977 - RNA, 19 nt, Artificial Sequence
  Description of Artificial Sequence: Synthetic oligonucleotide
cccuacggaucgcaucgac

SEQ ID NO: 802978 - RNA, 19 nt, Artificial Sequence
  Description of Artificial Sequence: Synthetic oligonucleotide
guccgacaggagccccaug

SEQ ID NO: 802979 - RNA, 19 nt, Artificial Sequence
  Description of Artificial Sequence: Synthetic oligonucleotide
cuacggugugcagcgaagu

SEQ ID NO: 802980 - RNA, 19 nt, Artificial Sequence
  Description of Artificial Sequence: Synthetic oligonucleotide
cgggcaaagcuucgagcgc

SEQ ID NO: 802981 - RNA, 19 nt, Artificial Sequence
  Description of Artificial Sequence: Synthetic oligonucleotide
ggcgggaaagccagcgcca

SEQ ID NO: 802982 - RNA, 19 nt, Artificial Sequence
  Description of Artificial Sequence: Synthetic oligonucleotide
cgacuuuccuacggugugc

SEQ ID NO: 802983 - RNA, 19 nt, Artificial Sequence
  Description of Artificial Sequence: Synthetic oligonucleotide
cggaagcuauugaugccuc

SEQ ID NO: 802984 - RNA, 19 nt, Artificial Sequence
  Description of Artificial Sequence: Synthetic oligonucleotide
cgcaagacgaagcgggcga

SEQ ID NO: 802985 - RNA, 19 nt, Artificial Sequence
  Description of Artificial Sequence: Synthetic oligonucleotide
gggcaguuugcgggagaag

SEQ ID NO: 802986 - RNA, 19 nt, Artificial Sequence
  Description of Artificial Sequence: Synthetic oligonucleotide
uagcgcucgugggucucau

SEQ ID NO: 802987 - RNA, 19 nt, Artificial Sequence
  Description of Artificial Sequence: Synthetic oligonucleotide
ggcccacgcccuguguugc

SEQ ID NO: 802988 - RNA, 19 nt, Artificial Sequence
  Description of Artificial Sequence: Synthetic oligonucleotide
cgcagagcggaguguugag

SEQ ID NO: 802989 - RNA, 19 nt, Artificial Sequence
  Description of Artificial Sequence: Synthetic oligonucleotide
gucccgggcaaagcuucga

SEQ ID NO: 802990 - RNA, 19 nt, Artificial Sequence
  Description of Artificial Sequence: Synthetic oligonucleotide
cuucaacgccauccagccu

SEQ ID NO: 802991 - RNA, 19 nt, Artificial Sequence
  Description of Artificial Sequence: Synthetic oligonucleotide
ggagcccauggcguucuca

SEQ ID NO: 802992 - RNA, 19 nt, Artificial Sequence
  Description of Artificial Sequence: Synthetic oligonucleotide
cccgacuuuccuacggugu

SEQ ID NO: 802993 - RNA, 19 nt, Artificial Sequence
  Description of Artificial Sequence: Synthetic oligonucleotide
gccgaccacucggugggug

SEQ ID NO: 802994 - RNA, 19 nt, Artificial Sequence
  Description of Artificial Sequence: Synthetic oligonucleotide
gcaaugcaacccagcugca

SEQ ID NO: 802995 - RNA, 19 nt, Artificial Sequence
  Description of Artificial Sequence: Synthetic oligonucleotide
ccaccaaaucguacuugua

SEQ ID NO: 802996 - RNA, 19 nt, Artificial Sequence
  Description of Artificial Sequence: Synthetic oligonucleotide
gcuaggccagccacauaaa

SEQ ID NO: 802997 - RNA, 19 nt, Artificial Sequence
  Description of Artificial Sequence: Synthetic oligonucleotide
ccaagccucagugcccaca

SEQ ID NO: 802998 - RNA, 19 nt, Artificial Sequence
  Description of Artificial Sequence: Synthetic oligonucleotide
ccacucgauagcgcaagaa

SEQ ID NO: 802999 - RNA, 19 nt, Artificial Sequence
  Description of Artificial Sequence: Synthetic oligonucleotide
cgaccgcuccagccaaggc

SEQ ID NO: 803000 - RNA, 19 nt, Artificial Sequence
  Description of Artificial Sequence: Synthetic oligonucleotide
gcgcaccggguccgacagg

SEQ ID NO: 803001 - RNA, 19 nt, Artificial Sequence
  Description of Artificial Sequence: Synthetic oligonucleotide
gcaagacguagagggccaa

SEQ ID NO: 803002 - RNA, 19 nt, Artificial Sequence
  Description of Artificial Sequence: Synthetic oligonucleotide
ccacucgguggguguugug

SEQ ID NO: 803003 - RNA, 19 nt, Artificial Sequence
  Description of Artificial Sequence: Synthetic oligonucleotide
gccagagauagugguacuu

SEQ ID NO: 803004 - RNA, 19 nt, Artificial Sequence
  Description of Artificial Sequence: Synthetic oligonucleotide
cauccggaaagggcaguuu

SEQ ID NO: 803005 - RNA, 19 nt, Artificial Sequence
  Description of Artificial Sequence: Synthetic oligonucleotide
cagcgaagucccgggcaaa

SEQ ID NO: 803006 - RNA, 19 nt, Artificial Sequence
  Description of Artificial Sequence: Synthetic oligonucleotide
cgcaccggguccgacagga

SEQ ID NO: 803007 - RNA, 19 nt, Artificial Sequence
  Description of Artificial Sequence: Synthetic oligonucleotide
gcacgcccugggccagugc

SEQ ID NO: 803008 - RNA, 19 nt, Artificial Sequence
  Description of Artificial Sequence: Synthetic oligonucleotide
cggaucgcaucgaccgcuc

SEQ ID NO: 803009 - RNA, 19 nt, Artificial Sequence
  Description of Artificial Sequence: Synthetic oligonucleotide
caggcauguagagcccaau

SEQ ID NO: 803010 - RNA, 19 nt, Artificial Sequence
  Description of Artificial Sequence: Synthetic oligonucleotide
cgacagccucagcuucacc

SEQ ID NO: 803011 - RNA, 19 nt, Artificial Sequence
  Description of Artificial Sequence: Synthetic oligonucleotide
gccaagccucagugcccac

SEQ ID NO: 803012 - RNA, 19 nt, Artificial Sequence
  Description of Artificial Sequence: Synthetic oligonucleotide
gcacgcagagcggaguguu

SEQ ID NO: 803013 - RNA, 19 nt, Artificial Sequence
  Description of Artificial Sequence: Synthetic oligonucleotide
ccgaccacucggugggugu

SEQ ID NO: 803014 - RNA, 19 nt, Artificial Sequence
  Description of Artificial Sequence: Synthetic oligonucleotide
gguccgacaggagccccau

SEQ ID NO: 803015 - RNA, 19 nt, Artificial Sequence
  Description of Artificial Sequence: Synthetic oligonucleotide
gcccuacggaucgcaucga

SEQ ID NO: 803016 - RNA, 19 nt, Artificial Sequence
  Description of Artificial Sequence: Synthetic oligonucleotide
gccagcccuccgccagaga

SEQ ID NO: 803017 - RNA, 19 nt, Artificial Sequence
  Description of Artificial Sequence: Synthetic oligonucleotide
cggguccgacaggagcccc

SEQ ID NO: 803018 - RNA, 19 nt, Artificial Sequence
  Description of Artificial Sequence: Synthetic oligonucleotide
ccacaagaucaugcucugu

SEQ ID NO: 803019 - RNA, 19 nt, Artificial Sequence
  Description of Artificial Sequence: Synthetic oligonucleotide
ccagcccuacggaucgcau

SEQ ID NO: 803020 - RNA, 19 nt, Artificial Sequence
  Description of Artificial Sequence: Synthetic oligonucleotide
gcagcacguggggcccgca

SEQ ID NO: 803021 - RNA, 19 nt, Artificial Sequence
  Description of Artificial Sequence: Synthetic oligonucleotide
gcggaguguugaggcgcaa

SEQ ID NO: 803022 - RNA, 19 nt, Artificial Sequence
  Description of Artificial Sequence: Synthetic oligonucleotide
gggguccauggggcuuggu

SEQ ID NO: 803023 - RNA, 19 nt, Artificial Sequence
  Description of Artificial Sequence: Synthetic oligonucleotide
cgagcgcggucuccaccua

SEQ ID NO: 803024 - RNA, 19 nt, Artificial Sequence
  Description of Artificial Sequence: Synthetic oligonucleotide
cgaccacucgguggguguu

SEQ ID NO: 803025 - RNA, 19 nt, Artificial Sequence
  Description of Artificial Sequence: Synthetic oligonucleotide
gcccuccgccagagauagu

SEQ ID NO: 803026 - RNA, 19 nt, Artificial Sequence
  Description of Artificial Sequence: Synthetic oligonucleotide
aauauauauauauauauag

SEQ ID NO: 803027 - RNA, 19 nt, Artificial Sequence
  Description of Artificial Sequence: Synthetic oligonucleotide
uauguuuggaccaacaggg

SEQ ID NO: 803028 - RNA, 19 nt, Artificial Sequence
  Description of Artificial Sequence: Synthetic oligonucleotide
auauauauaauauauauau

SEQ ID NO: 803029 - RNA, 19 nt, Artificial Sequence
  Description of Artificial Sequence: Synthetic oligonucleotide
uauauauauauauauagug

SEQ ID NO: 803030 - RNA, 19 nt, Artificial Sequence
  Description of Artificial Sequence: Synthetic oligonucleotide
uauauauauauauagugug

SEQ ID NO: 803031 - RNA, 19 nt, Artificial Sequence
  Description of Artificial Sequence: Synthetic oligonucleotide
auauauaauauauauauau

SEQ ID NO: 803032 - RNA, 19 nt, Artificial Sequence
  Description of Artificial Sequence: Synthetic oligonucleotide
aauucaaacaagccggagg

SEQ ID NO: 803033 - RNA, 19 nt, Artificial Sequence
  Description of Artificial Sequence: Synthetic oligonucleotide
uuauauauauauauaauau

SEQ ID NO: 803034 - RNA, 19 nt, Artificial Sequence
  Description of Artificial Sequence: Synthetic oligonucleotide
acauauauuauauauauau

SEQ ID NO: 803035 - RNA, 19 nt, Artificial Sequence
  Description of Artificial Sequence: Synthetic oligonucleotide
auauauauauaauauauau

SEQ ID NO: 803036 - RNA, 19 nt, Artificial Sequence
  Description of Artificial Sequence: Synthetic oligonucleotide
auaauauauauauauauau

SEQ ID NO: 803037 - RNA, 19 nt, Artificial Sequence
  Description of Artificial Sequence: Synthetic oligonucleotide
auauauuauauauauauau

SEQ ID NO: 803038 - RNA, 19 nt, Artificial Sequence
  Description of Artificial Sequence: Synthetic oligonucleotide
auuagugucaacaaacggc

SEQ ID NO: 803039 - RNA, 19 nt, Artificial Sequence
  Description of Artificial Sequence: Synthetic oligonucleotide
auauaauauauauauauau

SEQ ID NO: 803040 - RNA, 19 nt, Artificial Sequence
  Description of Artificial Sequence: Synthetic oligonucleotide
aacaaacggcuacagauac

SEQ ID NO: 803041 - RNA, 19 nt, Artificial Sequence
  Description of Artificial Sequence: Synthetic oligonucleotide
cauaguaccacucacgacc

SEQ ID NO: 803042 - RNA, 19 nt, Artificial Sequence
  Description of Artificial Sequence: Synthetic oligonucleotide
uuauuagugucaacaaacg

SEQ ID NO: 803043 - RNA, 19 nt, Artificial Sequence
  Description of Artificial Sequence: Synthetic oligonucleotide
auauuauauauauauauaa

SEQ ID NO: 803044 - RNA, 19 nt, Artificial Sequence
  Description of Artificial Sequence: Synthetic oligonucleotide
auucaaacaagccggaggg

SEQ ID NO: 803045 - RNA, 19 nt, Artificial Sequence
  Description of Artificial Sequence: Synthetic oligonucleotide
auuauauauauauauaaua

SEQ ID NO: 803046 - RNA, 19 nt, Artificial Sequence
  Description of Artificial Sequence: Synthetic oligonucleotide
ucuguuacuaccaaucaca

SEQ ID NO: 803047 - RNA, 19 nt, Artificial Sequence
  Description of Artificial Sequence: Synthetic oligonucleotide
auacauauauuauauauau

SEQ ID NO: 803048 - RNA, 19 nt, Artificial Sequence
  Description of Artificial Sequence: Synthetic oligonucleotide
uauaauauauauauauaua

SEQ ID NO: 803049 - RNA, 19 nt, Artificial Sequence
  Description of Artificial Sequence: Synthetic oligonucleotide
uauuagugucaacaaacgg

SEQ ID NO: 803050 - RNA, 19 nt, Artificial Sequence
  Description of Artificial Sequence: Synthetic oligonucleotide
agaaagucgcccucgacgc

SEQ ID NO: 803051 - RNA, 19 nt, Artificial Sequence
  Description of Artificial Sequence: Synthetic oligonucleotide
uauauuauauauauauaua

SEQ ID NO: 803052 - RNA, 19 nt, Artificial Sequence
  Description of Artificial Sequence: Synthetic oligonucleotide
uauuauauauauauauaau

SEQ ID NO: 803053 - RNA, 19 nt, Artificial Sequence
  Description of Artificial Sequence: Synthetic oligonucleotide
uuagugucaacaaacggcu

SEQ ID NO: 803054 - RNA, 19 nt, Artificial Sequence
  Description of Artificial Sequence: Synthetic oligonucleotide
uauauaauauauauauaua

SEQ ID NO: 803055 - RNA, 19 nt, Artificial Sequence
  Description of Artificial Sequence: Synthetic oligonucleotide
aaugcaguagacgcugucc

SEQ ID NO: 803056 - RNA, 19 nt, Artificial Sequence
  Description of Artificial Sequence: Synthetic oligonucleotide
auugguagcuccccaaccc

SEQ ID NO: 803057 - RNA, 19 nt, Artificial Sequence
  Description of Artificial Sequence: Synthetic oligonucleotide
ucccuaaugagaaagucgc

SEQ ID NO: 803058 - RNA, 19 nt, Artificial Sequence
  Description of Artificial Sequence: Synthetic oligonucleotide
uauauauauauauaauaua

SEQ ID NO: 803059 - RNA, 19 nt, Artificial Sequence
  Description of Artificial Sequence: Synthetic oligonucleotide
uauauauauaauauauaua

SEQ ID NO: 803060 - RNA, 19 nt, Artificial Sequence
  Description of Artificial Sequence: Synthetic oligonucleotide
auauauauauauaauauau

SEQ ID NO: 803061 - RNA, 19 nt, Artificial Sequence
  Description of Artificial Sequence: Synthetic oligonucleotide
agaauuaaauacauaauug

SEQ ID NO: 803062 - RNA, 19 nt, Artificial Sequence
  Description of Artificial Sequence: Synthetic oligonucleotide
uggguaugcaaguuuaggg

SEQ ID NO: 803063 - RNA, 19 nt, Artificial Sequence
  Description of Artificial Sequence: Synthetic oligonucleotide
ucaaucguaggaaugugcc

SEQ ID NO: 803064 - RNA, 19 nt, Artificial Sequence
  Description of Artificial Sequence: Synthetic oligonucleotide
gagaaagucgcccucgacg

SEQ ID NO: 803065 - RNA, 19 nt, Artificial Sequence
  Description of Artificial Sequence: Synthetic oligonucleotide
aacggcuacagauacauau

SEQ ID NO: 803066 - RNA, 19 nt, Artificial Sequence
  Description of Artificial Sequence: Synthetic oligonucleotide
uguauguauaaaguauugg

SEQ ID NO: 803067 - RNA, 19 nt, Artificial Sequence
  Description of Artificial Sequence: Synthetic oligonucleotide
uaauauauauauauauaua

SEQ ID NO: 803068 - RNA, 19 nt, Artificial Sequence
  Description of Artificial Sequence: Synthetic oligonucleotide
uauauauauauaauauaua

SEQ ID NO: 803069 - RNA, 19 nt, Artificial Sequence
  Description of Artificial Sequence: Synthetic oligonucleotide
auacauaauugugaaauuc

SEQ ID NO: 803070 - RNA, 19 nt, Artificial Sequence
  Description of Artificial Sequence: Synthetic oligonucleotide
uuaggggaucucaagaccc

SEQ ID NO: 803071 - RNA, 19 nt, Artificial Sequence
  Description of Artificial Sequence: Synthetic oligonucleotide
guuauuagugucaacaaac

SEQ ID NO: 803072 - RNA, 19 nt, Artificial Sequence
  Description of Artificial Sequence: Synthetic oligonucleotide
gacgcuuugagagacacag

SEQ ID NO: 803073 - RNA, 19 nt, Artificial Sequence
  Description of Artificial Sequence: Synthetic oligonucleotide
auauauauauauauagugu

SEQ ID NO: 803074 - RNA, 19 nt, Artificial Sequence
  Description of Artificial Sequence: Synthetic oligonucleotide
uuuaggggaucucaagacc

SEQ ID NO: 803075 - RNA, 19 nt, Artificial Sequence
  Description of Artificial Sequence: Synthetic oligonucleotide
uauauauaauauauauaua

SEQ ID NO: 803076 - RNA, 19 nt, Artificial Sequence
  Description of Artificial Sequence: Synthetic oligonucleotide
aaucaucuguuauuagugu

SEQ ID NO: 803077 - RNA, 19 nt, Artificial Sequence
  Description of Artificial Sequence: Synthetic oligonucleotide
agaggugacuggcaaaacg

SEQ ID NO: 803078 - RNA, 19 nt, Artificial Sequence
  Description of Artificial Sequence: Synthetic oligonucleotide
uguuauuagugucaacaaa

SEQ ID NO: 803079 - RNA, 19 nt, Artificial Sequence
  Description of Artificial Sequence: Synthetic oligonucleotide
uacguaggcgaacuugacg

SEQ ID NO: 803080 - RNA, 19 nt, Artificial Sequence
  Description of Artificial Sequence: Synthetic oligonucleotide
uucaaucguaggaaugugc

SEQ ID NO: 803081 - RNA, 19 nt, Artificial Sequence
  Description of Artificial Sequence: Synthetic oligonucleotide
aaggcggggauguugaggu

SEQ ID NO: 803082 - RNA, 19 nt, Artificial Sequence
  Description of Artificial Sequence: Synthetic oligonucleotide
uaggcgaacuugacgaagg

SEQ ID NO: 803083 - RNA, 19 nt, Artificial Sequence
  Description of Artificial Sequence: Synthetic oligonucleotide
uauuacuuugagaauuaaa

SEQ ID NO: 803084 - RNA, 19 nt, Artificial Sequence
  Description of Artificial Sequence: Synthetic oligonucleotide
uauauauauauagugugua

SEQ ID NO: 803085 - RNA, 19 nt, Artificial Sequence
  Description of Artificial Sequence: Synthetic oligonucleotide
aaucacauacucuuuugua

SEQ ID NO: 803086 - RNA, 19 nt, Artificial Sequence
  Description of Artificial Sequence: Synthetic oligonucleotide
auauauauauauauauagu

SEQ ID NO: 803087 - RNA, 19 nt, Artificial Sequence
  Description of Artificial Sequence: Synthetic oligonucleotide
ugccauaguaccacucacg

SEQ ID NO: 803088 - RNA, 19 nt, Artificial Sequence
  Description of Artificial Sequence: Synthetic oligonucleotide
gaugucgagcuccuggucc

SEQ ID NO: 803089 - RNA, 19 nt, Artificial Sequence
  Description of Artificial Sequence: Synthetic oligonucleotide
aacguagcacucuucaaaa

SEQ ID NO: 803090 - RNA, 19 nt, Artificial Sequence
  Description of Artificial Sequence: Synthetic oligonucleotide
uguuuggaccaacagggcu

SEQ ID NO: 803091 - RNA, 19 nt, Artificial Sequence
  Description of Artificial Sequence: Synthetic oligonucleotide
uuuggcacgcaguugcaag

SEQ ID NO: 803092 - RNA, 19 nt, Artificial Sequence
  Description of Artificial Sequence: Synthetic oligonucleotide
aguugcaagaggugacugg

SEQ ID NO: 803093 - RNA, 19 nt, Artificial Sequence
  Description of Artificial Sequence: Synthetic oligonucleotide
auugagcgcgcacucggcc

SEQ ID NO: 803094 - RNA, 19 nt, Artificial Sequence
  Description of Artificial Sequence: Synthetic oligonucleotide
aaucguaggaaugugccau

SEQ ID NO: 803095 - RNA, 19 nt, Artificial Sequence
  Description of Artificial Sequence: Synthetic oligonucleotide
ucacauacucuuuuguaaa

SEQ ID NO: 803096 - RNA, 19 nt, Artificial Sequence
  Description of Artificial Sequence: Synthetic oligonucleotide
agcacuauguggauggcac

SEQ ID NO: 803097 - RNA, 19 nt, Artificial Sequence
  Description of Artificial Sequence: Synthetic oligonucleotide
uucuguuacuaccaaucac

SEQ ID NO: 803098 - RNA, 19 nt, Artificial Sequence
  Description of Artificial Sequence: Synthetic oligonucleotide
aaacauucuguuacuacca

SEQ ID NO: 803099 - RNA, 19 nt, Artificial Sequence
  Description of Artificial Sequence: Synthetic oligonucleotide
uauugcuauccgcacauuc

SEQ ID NO: 803100 - RNA, 19 nt, Artificial Sequence
  Description of Artificial Sequence: Synthetic oligonucleotide
ggguaugcaaguuuagggg

SEQ ID NO: 803101 - RNA, 19 nt, Artificial Sequence
  Description of Artificial Sequence: Synthetic oligonucleotide
uuggaggggaaccagccga

SEQ ID NO: 803102 - RNA, 19 nt, Artificial Sequence
  Description of Artificial Sequence: Synthetic oligonucleotide
acauauuacuuugagaauu

SEQ ID NO: 803103 - RNA, 19 nt, Artificial Sequence
  Description of Artificial Sequence: Synthetic oligonucleotide
ucccuguaaagcaaauaca

SEQ ID NO: 803104 - RNA, 19 nt, Artificial Sequence
  Description of Artificial Sequence: Synthetic oligonucleotide
auauauauauauagugugu

SEQ ID NO: 803105 - RNA, 19 nt, Artificial Sequence
  Description of Artificial Sequence: Synthetic oligonucleotide
aguauugcuauccgcacau

SEQ ID NO: 803106 - RNA, 19 nt, Artificial Sequence
  Description of Artificial Sequence: Synthetic oligonucleotide
aaauucaaacaagccggag

SEQ ID NO: 803107 - RNA, 19 nt, Artificial Sequence
  Description of Artificial Sequence: Synthetic oligonucleotide
guuuccaguauugcuaucc

SEQ ID NO: 803108 - RNA, 19 nt, Artificial Sequence
  Description of Artificial Sequence: Synthetic oligonucleotide
auagaugcggucagcaccg

SEQ ID NO: 803109 - RNA, 19 nt, Artificial Sequence
  Description of Artificial Sequence: Synthetic oligonucleotide
accgcugggcucuaggagg

SEQ ID NO: 803110 - RNA, 19 nt, Artificial Sequence
  Description of Artificial Sequence: Synthetic oligonucleotide
uacauauauuauauauaua

SEQ ID NO: 803111 - RNA, 19 nt, Artificial Sequence
  Description of Artificial Sequence: Synthetic oligonucleotide
cauugcaggcccaucacug

SEQ ID NO: 803112 - RNA, 19 nt, Artificial Sequence
  Description of Artificial Sequence: Synthetic oligonucleotide
agacucuauagucaaacua

SEQ ID NO: 803113 - RNA, 19 nt, Artificial Sequence
  Description of Artificial Sequence: Synthetic oligonucleotide
agagggaaagagcacuaug

SEQ ID NO: 803114 - RNA, 19 nt, Artificial Sequence
  Description of Artificial Sequence: Synthetic oligonucleotide
cacucuucaaaaugaugag

SEQ ID NO: 803115 - RNA, 19 nt, Artificial Sequence
  Description of Artificial Sequence: Synthetic oligonucleotide
acgaccagcgaaucgcccg

SEQ ID NO: 803116 - RNA, 19 nt, Artificial Sequence
  Description of Artificial Sequence: Synthetic oligonucleotide
uauaaaguauugguagcuc

SEQ ID NO: 803117 - RNA, 19 nt, Artificial Sequence
  Description of Artificial Sequence: Synthetic oligonucleotide
uauccgcacauucuuggac

SEQ ID NO: 803118 - RNA, 19 nt, Artificial Sequence
  Description of Artificial Sequence: Synthetic oligonucleotide
cauauauuauauauauaua

SEQ ID NO: 803119 - RNA, 19 nt, Artificial Sequence
  Description of Artificial Sequence: Synthetic oligonucleotide
cuuccugaugucgagcucc

SEQ ID NO: 803120 - RNA, 19 nt, Artificial Sequence
  Description of Artificial Sequence: Synthetic oligonucleotide
gguacuccgcaucagugcg

SEQ ID NO: 803121 - RNA, 19 nt, Artificial Sequence
  Description of Artificial Sequence: Synthetic oligonucleotide
caaaacguagcacucuuca

SEQ ID NO: 803122 - RNA, 19 nt, Artificial Sequence
  Description of Artificial Sequence: Synthetic oligonucleotide
uacauauuacuuugagaau

SEQ ID NO: 803123 - RNA, 19 nt, Artificial Sequence
  Description of Artificial Sequence: Synthetic oligonucleotide
uguugaggucauagaugcg

SEQ ID NO: 803124 - RNA, 19 nt, Artificial Sequence
  Description of Artificial Sequence: Synthetic oligonucleotide
cucacgaccagcgaaucgc

SEQ ID NO: 803125 - RNA, 19 nt, Artificial Sequence
  Description of Artificial Sequence: Synthetic oligonucleotide
agggcaagagggaaagagc

SEQ ID NO: 803126 - RNA, 19 nt, Artificial Sequence
  Description of Artificial Sequence: Synthetic oligonucleotide
guugcaagaggugacuggc

SEQ ID NO: 803127 - RNA, 19 nt, Artificial Sequence
  Description of Artificial Sequence: Synthetic oligonucleotide
aaacuggguaugcaaguuu

SEQ ID NO: 803128 - RNA, 19 nt, Artificial Sequence
  Description of Artificial Sequence: Synthetic oligonucleotide
acuauguggauggcacacc

SEQ ID NO: 803129 - RNA, 19 nt, Artificial Sequence
  Description of Artificial Sequence: Synthetic oligonucleotide
gaucuguggggugugcgcg

SEQ ID NO: 803130 - RNA, 19 nt, Artificial Sequence
  Description of Artificial Sequence: Synthetic oligonucleotide
cauuacccgaguuucuuuc

SEQ ID NO: 803131 - RNA, 19 nt, Artificial Sequence
  Description of Artificial Sequence: Synthetic oligonucleotide
uauggaaccgccgcugccc

SEQ ID NO: 803132 - RNA, 19 nt, Artificial Sequence
  Description of Artificial Sequence: Synthetic oligonucleotide
uggguagcuauguuuggac

SEQ ID NO: 803133 - RNA, 19 nt, Artificial Sequence
  Description of Artificial Sequence: Synthetic oligonucleotide
uuacuaccaaucacauacu

SEQ ID NO: 803134 - RNA, 19 nt, Artificial Sequence
  Description of Artificial Sequence: Synthetic oligonucleotide
gcgacgaaggcucaggaag

SEQ ID NO: 803135 - RNA, 19 nt, Artificial Sequence
  Description of Artificial Sequence: Synthetic oligonucleotide
guuuggaccaacagggcug

SEQ ID NO: 803136 - RNA, 19 nt, Artificial Sequence
  Description of Artificial Sequence: Synthetic oligonucleotide
ucguucuuccugaugucga

SEQ ID NO: 803137 - RNA, 19 nt, Artificial Sequence
  Description of Artificial Sequence: Synthetic oligonucleotide
aacccgugcuccuugccca

SEQ ID NO: 803138 - RNA, 19 nt, Artificial Sequence
  Description of Artificial Sequence: Synthetic oligonucleotide
ucguucagcuacguaggcg

SEQ ID NO: 803139 - RNA, 19 nt, Artificial Sequence
  Description of Artificial Sequence: Synthetic oligonucleotide
auccgcacauucuuggacu

SEQ ID NO: 803140 - RNA, 19 nt, Artificial Sequence
  Description of Artificial Sequence: Synthetic oligonucleotide
cuggguaugcaaguuuagg

SEQ ID NO: 803141 - RNA, 19 nt, Artificial Sequence
  Description of Artificial Sequence: Synthetic oligonucleotide
gaacccgugcuccuugccc

SEQ ID NO: 803142 - RNA, 19 nt, Artificial Sequence
  Description of Artificial Sequence: Synthetic oligonucleotide
ucgcugucccuaaugagaa

SEQ ID NO: 803143 - RNA, 19 nt, Artificial Sequence
  Description of Artificial Sequence: Synthetic oligonucleotide
gcgggcauggcuaugaggg

SEQ ID NO: 803144 - RNA, 19 nt, Artificial Sequence
  Description of Artificial Sequence: Synthetic oligonucleotide
acucacgaccagcgaaucg

SEQ ID NO: 803145 - RNA, 19 nt, Artificial Sequence
  Description of Artificial Sequence: Synthetic oligonucleotide
agaacccgugcuccuugcc

SEQ ID NO: 803146 - RNA, 19 nt, Artificial Sequence
  Description of Artificial Sequence: Synthetic oligonucleotide
ugcccauugcucagagcgg

SEQ ID NO: 803147 - RNA, 19 nt, Artificial Sequence
  Description of Artificial Sequence: Synthetic oligonucleotide
guaccacucacgaccagcg

SEQ ID NO: 803148 - RNA, 19 nt, Artificial Sequence
  Description of Artificial Sequence: Synthetic oligonucleotide
gcuaugagggccuggguag

SEQ ID NO: 803149 - RNA, 19 nt, Artificial Sequence
  Description of Artificial Sequence: Synthetic oligonucleotide
uauguggauggcacaccug

SEQ ID NO: 803150 - RNA, 19 nt, Artificial Sequence
  Description of Artificial Sequence: Synthetic oligonucleotide
auugcuauccgcacauucu

SEQ ID NO: 803151 - RNA, 19 nt, Artificial Sequence
  Description of Artificial Sequence: Synthetic oligonucleotide
uugacgaaggcggggaugu

SEQ ID NO: 803152 - RNA, 19 nt, Artificial Sequence
  Description of Artificial Sequence: Synthetic oligonucleotide
ugucaacaaacggcuacag

SEQ ID NO: 803153 - RNA, 19 nt, Artificial Sequence
  Description of Artificial Sequence: Synthetic oligonucleotide
auggcuaugagggccuggg

SEQ ID NO: 803154 - RNA, 19 nt, Artificial Sequence
  Description of Artificial Sequence: Synthetic oligonucleotide
gcuauguuuggaccaacag

SEQ ID NO: 803155 - RNA, 19 nt, Artificial Sequence
  Description of Artificial Sequence: Synthetic oligonucleotide
agaucagcuguuuuccuua

SEQ ID NO: 803156 - RNA, 19 nt, Artificial Sequence
  Description of Artificial Sequence: Synthetic oligonucleotide
gguaugcaaguuuagggga

SEQ ID NO: 803157 - RNA, 19 nt, Artificial Sequence
  Description of Artificial Sequence: Synthetic oligonucleotide
aucguaggaaugugccauc

SEQ ID NO: 803158 - RNA, 19 nt, Artificial Sequence
  Description of Artificial Sequence: Synthetic oligonucleotide
uaggggaucucaagacccc

SEQ ID NO: 803159 - RNA, 19 nt, Artificial Sequence
  Description of Artificial Sequence: Synthetic oligonucleotide
ccuaaugagaaagucgccc

SEQ ID NO: 803160 - RNA, 19 nt, Artificial Sequence
  Description of Artificial Sequence: Synthetic oligonucleotide
acuaccaaucacauacucu

SEQ ID NO: 803161 - RNA, 19 nt, Artificial Sequence
  Description of Artificial Sequence: Synthetic oligonucleotide
gacucuauagucaaacuau

SEQ ID NO: 803162 - RNA, 19 nt, Artificial Sequence
  Description of Artificial Sequence: Synthetic oligonucleotide
ugccgugucacguugccau

SEQ ID NO: 803163 - RNA, 19 nt, Artificial Sequence
  Description of Artificial Sequence: Synthetic oligonucleotide
uccaugcuauggaaccgcc

SEQ ID NO: 803164 - RNA, 19 nt, Artificial Sequence
  Description of Artificial Sequence: Synthetic oligonucleotide
gaacuugacgaaggcgggg

SEQ ID NO: 803165 - RNA, 19 nt, Artificial Sequence
  Description of Artificial Sequence: Synthetic oligonucleotide
agugcguggguagccgucc

SEQ ID NO: 803166 - RNA, 19 nt, Artificial Sequence
  Description of Artificial Sequence: Synthetic oligonucleotide
caagaccccuucuucaauc

SEQ ID NO: 803167 - RNA, 19 nt, Artificial Sequence
  Description of Artificial Sequence: Synthetic oligonucleotide
ugucccuaaugagaaaguc

SEQ ID NO: 803168 - RNA, 19 nt, Artificial Sequence
  Description of Artificial Sequence: Synthetic oligonucleotide
gguagcuauguuuggacca

SEQ ID NO: 803169 - RNA, 19 nt, Artificial Sequence
  Description of Artificial Sequence: Synthetic oligonucleotide
acgugcagaacccgugcuc

SEQ ID NO: 803170 - RNA, 19 nt, Artificial Sequence
  Description of Artificial Sequence: Synthetic oligonucleotide
gaucugcccauugaagcug

SEQ ID NO: 803171 - RNA, 19 nt, Artificial Sequence
  Description of Artificial Sequence: Synthetic oligonucleotide
ucacgaccagcgaaucgcc

SEQ ID NO: 803172 - RNA, 19 nt, Artificial Sequence
  Description of Artificial Sequence: Synthetic oligonucleotide
ugagaaagucgcccucgac

SEQ ID NO: 803173 - RNA, 19 nt, Artificial Sequence
  Description of Artificial Sequence: Synthetic oligonucleotide
caagccggagggcaagagg

SEQ ID NO: 803174 - RNA, 19 nt, Artificial Sequence
  Description of Artificial Sequence: Synthetic oligonucleotide
auguuuggaccaacagggc

SEQ ID NO: 803175 - RNA, 19 nt, Artificial Sequence
  Description of Artificial Sequence: Synthetic oligonucleotide
uacccgaguuucuuucuca

SEQ ID NO: 803176 - RNA, 19 nt, Artificial Sequence
  Description of Artificial Sequence: Synthetic oligonucleotide
cuaccaaucacauacucuu

SEQ ID NO: 803177 - RNA, 19 nt, Artificial Sequence
  Description of Artificial Sequence: Synthetic oligonucleotide
aacuggguaugcaaguuua

SEQ ID NO: 803178 - RNA, 19 nt, Artificial Sequence
  Description of Artificial Sequence: Synthetic oligonucleotide
ccugaugucgagcuccugg

SEQ ID NO: 803179 - RNA, 19 nt, Artificial Sequence
  Description of Artificial Sequence: Synthetic oligonucleotide
uguuacuaccaaucacaua

SEQ ID NO: 803180 - RNA, 19 nt, Artificial Sequence
  Description of Artificial Sequence: Synthetic oligonucleotide
agcuacguaggcgaacuug

SEQ ID NO: 803181 - RNA, 19 nt, Artificial Sequence
  Description of Artificial Sequence: Synthetic oligonucleotide
agagaucagcuguuuuccu

SEQ ID NO: 803182 - RNA, 19 nt, Artificial Sequence
  Description of Artificial Sequence: Synthetic oligonucleotide
cacuauguggauggcacac

SEQ ID NO: 803183 - RNA, 19 nt, Artificial Sequence
  Description of Artificial Sequence: Synthetic oligonucleotide
ggaaugugccaucucaaga

SEQ ID NO: 803184 - RNA, 19 nt, Artificial Sequence
  Description of Artificial Sequence: Synthetic oligonucleotide
ucaagaccccuucuucaau

SEQ ID NO: 803185 - RNA, 19 nt, Artificial Sequence
  Description of Artificial Sequence: Synthetic oligonucleotide
ccgaucugcccauugaagc

SEQ ID NO: 803186 - RNA, 19 nt, Artificial Sequence
  Description of Artificial Sequence: Synthetic oligonucleotide
agcggcaccgcgacgaagg

SEQ ID NO: 803187 - RNA, 19 nt, Artificial Sequence
  Description of Artificial Sequence: Synthetic oligonucleotide
ugcuauggaaccgccgcug

SEQ ID NO: 803188 - RNA, 19 nt, Artificial Sequence
  Description of Artificial Sequence: Synthetic oligonucleotide
aggggaaccagccgaucug

SEQ ID NO: 803189 - RNA, 19 nt, Artificial Sequence
  Description of Artificial Sequence: Synthetic oligonucleotide
ggagucauccagcagccac

SEQ ID NO: 803190 - RNA, 19 nt, Artificial Sequence
  Description of Artificial Sequence: Synthetic oligonucleotide
guauaaaguauugguagcu

SEQ ID NO: 803191 - RNA, 19 nt, Artificial Sequence
  Description of Artificial Sequence: Synthetic oligonucleotide
augugccaucucaagacuc

SEQ ID NO: 803192 - RNA, 19 nt, Artificial Sequence
  Description of Artificial Sequence: Synthetic oligonucleotide
aucgcccgcuggcugaggg

SEQ ID NO: 803193 - RNA, 19 nt, Artificial Sequence
  Description of Artificial Sequence: Synthetic oligonucleotide
auacucuuuuguaaacccu

SEQ ID NO: 803194 - RNA, 19 nt, Artificial Sequence
  Description of Artificial Sequence: Synthetic oligonucleotide
cuucaccagggaaagcuca

SEQ ID NO: 803195 - RNA, 19 nt, Artificial Sequence
  Description of Artificial Sequence: Synthetic oligonucleotide
cuaaugagaaagucgcccu

SEQ ID NO: 803196 - RNA, 19 nt, Artificial Sequence
  Description of Artificial Sequence: Synthetic oligonucleotide
cauugcucagagcggcacc

SEQ ID NO: 803197 - RNA, 19 nt, Artificial Sequence
  Description of Artificial Sequence: Synthetic oligonucleotide
ugcgcggggugcauugcag

SEQ ID NO: 803198 - RNA, 19 nt, Artificial Sequence
  Description of Artificial Sequence: Synthetic oligonucleotide
guagcugaucuguggggug

SEQ ID NO: 803199 - RNA, 19 nt, Artificial Sequence
  Description of Artificial Sequence: Synthetic oligonucleotide
aucagugcguggguagccg

SEQ ID NO: 803200 - RNA, 19 nt, Artificial Sequence
  Description of Artificial Sequence: Synthetic oligonucleotide
ccaucucaagacucuauag

SEQ ID NO: 803201 - RNA, 19 nt, Artificial Sequence
  Description of Artificial Sequence: Synthetic oligonucleotide
ggugauccaggcugcgugg

SEQ ID NO: 803202 - RNA, 19 nt, Artificial Sequence
  Description of Artificial Sequence: Synthetic oligonucleotide
caacccgagagaucagcug

SEQ ID NO: 803203 - RNA, 19 nt, Artificial Sequence
  Description of Artificial Sequence: Synthetic oligonucleotide
aaacccucuuuuauugcaa

SEQ ID NO: 803204 - RNA, 19 nt, Artificial Sequence
  Description of Artificial Sequence: Synthetic oligonucleotide
ugagcgcgcacucggccug

SEQ ID NO: 803205 - RNA, 19 nt, Artificial Sequence
  Description of Artificial Sequence: Synthetic oligonucleotide
ucguuggcugcguuccuca

SEQ ID NO: 803206 - RNA, 19 nt, Artificial Sequence
  Description of Artificial Sequence: Synthetic oligonucleotide
gaaagucgcccucgacgcc

SEQ ID NO: 803207 - RNA, 19 nt, Artificial Sequence
  Description of Artificial Sequence: Synthetic oligonucleotide
uugagcgcgcacucggccu

SEQ ID NO: 803208 - RNA, 19 nt, Artificial Sequence
  Description of Artificial Sequence: Synthetic oligonucleotide
uaugcaaguuuaggggauc

SEQ ID NO: 803209 - RNA, 19 nt, Artificial Sequence
  Description of Artificial Sequence: Synthetic oligonucleotide
cuacagauacauauuacuu

SEQ ID NO: 803210 - RNA, 19 nt, Artificial Sequence
  Description of Artificial Sequence: Synthetic oligonucleotide
cauugagcgcgcacucggc

SEQ ID NO: 803211 - RNA, 19 nt, Artificial Sequence
  Description of Artificial Sequence: Synthetic oligonucleotide
cuauggaaccgccgcugcc

SEQ ID NO: 803212 - RNA, 19 nt, Artificial Sequence
  Description of Artificial Sequence: Synthetic oligonucleotide
gucguucucaggcuucuca

SEQ ID NO: 803213 - RNA, 19 nt, Artificial Sequence
  Description of Artificial Sequence: Synthetic oligonucleotide
agagcacuauguggauggc

SEQ ID NO: 803214 - RNA, 19 nt, Artificial Sequence
  Description of Artificial Sequence: Synthetic oligonucleotide
auaguaccacucacgacca

SEQ ID NO: 803215 - RNA, 19 nt, Artificial Sequence
  Description of Artificial Sequence: Synthetic oligonucleotide
augagaaagucgcccucga

SEQ ID NO: 803216 - RNA, 19 nt, Artificial Sequence
  Description of Artificial Sequence: Synthetic oligonucleotide
acaagcucguccaugcuau

SEQ ID NO: 803217 - RNA, 19 nt, Artificial Sequence
  Description of Artificial Sequence: Synthetic oligonucleotide
caucucaagacucuauagu

SEQ ID NO: 803218 - RNA, 19 nt, Artificial Sequence
  Description of Artificial Sequence: Synthetic oligonucleotide
cacgcaguugcaagaggug

SEQ ID NO: 803219 - RNA, 19 nt, Artificial Sequence
  Description of Artificial Sequence: Synthetic oligonucleotide
ggguagcuauguuuggacc

SEQ ID NO: 803220 - RNA, 19 nt, Artificial Sequence
  Description of Artificial Sequence: Synthetic oligonucleotide
cuaugacaaugacuucuuc

SEQ ID NO: 803221 - RNA, 19 nt, Artificial Sequence
  Description of Artificial Sequence: Synthetic oligonucleotide
gucaacaaacggcuacaga

SEQ ID NO: 803222 - RNA, 19 nt, Artificial Sequence
  Description of Artificial Sequence: Synthetic oligonucleotide
cucagagcggcaccgcgac

SEQ ID NO: 803223 - RNA, 19 nt, Artificial Sequence
  Description of Artificial Sequence: Synthetic oligonucleotide
uggcacgcaguugcaagag

SEQ ID NO: 803224 - RNA, 19 nt, Artificial Sequence
  Description of Artificial Sequence: Synthetic oligonucleotide
caaucguaggaaugugcca

SEQ ID NO: 803225 - RNA, 19 nt, Artificial Sequence
  Description of Artificial Sequence: Synthetic oligonucleotide
ucagagcggcaccgcgacg

SEQ ID NO: 803226 - RNA, 19 nt, Artificial Sequence
  Description of Artificial Sequence: Synthetic oligonucleotide
gccauaguaccacucacga

SEQ ID NO: 803227 - RNA, 19 nt, Artificial Sequence
  Description of Artificial Sequence: Synthetic oligonucleotide
ugacgcuuugagagacaca

SEQ ID NO: 803228 - RNA, 19 nt, Artificial Sequence
  Description of Artificial Sequence: Synthetic oligonucleotide
guagccgucccucguuggc

SEQ ID NO: 803229 - RNA, 19 nt, Artificial Sequence
  Description of Artificial Sequence: Synthetic oligonucleotide
aguagacgcuguccaccag

SEQ ID NO: 803230 - RNA, 19 nt, Artificial Sequence
  Description of Artificial Sequence: Synthetic oligonucleotide
uggcaaaacguagcacucu

SEQ ID NO: 803231 - RNA, 19 nt, Artificial Sequence
  Description of Artificial Sequence: Synthetic oligonucleotide
ucguaggaaugugccaucu

SEQ ID NO: 803232 - RNA, 19 nt, Artificial Sequence
  Description of Artificial Sequence: Synthetic oligonucleotide
auauuacuuugagaauuaa

SEQ ID NO: 803233 - RNA, 19 nt, Artificial Sequence
  Description of Artificial Sequence: Synthetic oligonucleotide
gggacauuacccgaguuuc

SEQ ID NO: 803234 - RNA, 19 nt, Artificial Sequence
  Description of Artificial Sequence: Synthetic oligonucleotide
uccgcacauucuuggacuc

SEQ ID NO: 803235 - RNA, 19 nt, Artificial Sequence
  Description of Artificial Sequence: Synthetic oligonucleotide
uuccugaugucgagcuccu

SEQ ID NO: 803236 - RNA, 19 nt, Artificial Sequence
  Description of Artificial Sequence: Synthetic oligonucleotide
augcuauggaaccgccgcu

SEQ ID NO: 803237 - RNA, 19 nt, Artificial Sequence
  Description of Artificial Sequence: Synthetic oligonucleotide
cagcgaaucgcccgcuggc

SEQ ID NO: 803238 - RNA, 19 nt, Artificial Sequence
  Description of Artificial Sequence: Synthetic oligonucleotide
cagcgucugcaccacgugc

SEQ ID NO: 803239 - RNA, 19 nt, Artificial Sequence
  Description of Artificial Sequence: Synthetic oligonucleotide
uccgcaucagugcgugggu

SEQ ID NO: 803240 - RNA, 19 nt, Artificial Sequence
  Description of Artificial Sequence: Synthetic oligonucleotide
cuugacgaaggcggggaug

SEQ ID NO: 803241 - RNA, 19 nt, Artificial Sequence
  Description of Artificial Sequence: Synthetic oligonucleotide
acuggguaugcaaguuuag

SEQ ID NO: 803242 - RNA, 19 nt, Artificial Sequence
  Description of Artificial Sequence: Synthetic oligonucleotide
ucagugcguggguagccgu

SEQ ID NO: 803243 - RNA, 19 nt, Artificial Sequence
  Description of Artificial Sequence: Synthetic oligonucleotide
caagaggugacuggcaaaa

SEQ ID NO: 803244 - RNA, 19 nt, Artificial Sequence
  Description of Artificial Sequence: Synthetic oligonucleotide
cuugcccauugcucagagc

SEQ ID NO: 803245 - RNA, 19 nt, Artificial Sequence
  Description of Artificial Sequence: Synthetic oligonucleotide
ucccugacgcuuugagaga

SEQ ID NO: 803246 - RNA, 19 nt, Artificial Sequence
  Description of Artificial Sequence: Synthetic oligonucleotide
gacuggcaaaacguagcac

SEQ ID NO: 803247 - RNA, 19 nt, Artificial Sequence
  Description of Artificial Sequence: Synthetic oligonucleotide
uaccacucacgaccagcga

SEQ ID NO: 803248 - RNA, 19 nt, Artificial Sequence
  Description of Artificial Sequence: Synthetic oligonucleotide
ugacggcugccuucacugc

SEQ ID NO: 803249 - RNA, 19 nt, Artificial Sequence
  Description of Artificial Sequence: Synthetic oligonucleotide
cagcaccgcugccaguucg

SEQ ID NO: 803250 - RNA, 19 nt, Artificial Sequence
  Description of Artificial Sequence: Synthetic oligonucleotide
cacgaccagcgaaucgccc

SEQ ID NO: 803251 - RNA, 19 nt, Artificial Sequence
  Description of Artificial Sequence: Synthetic oligonucleotide
agaccccuucuucaaucgu

SEQ ID NO: 803252 - RNA, 19 nt, Artificial Sequence
  Description of Artificial Sequence: Synthetic oligonucleotide
caucagugcguggguagcc

SEQ ID NO: 803253 - RNA, 19 nt, Artificial Sequence
  Description of Artificial Sequence: Synthetic oligonucleotide
acguagcacucuucaaaau

SEQ ID NO: 803254 - RNA, 19 nt, Artificial Sequence
  Description of Artificial Sequence: Synthetic oligonucleotide
gcccauugaagcugccgcg

SEQ ID NO: 803255 - RNA, 19 nt, Artificial Sequence
  Description of Artificial Sequence: Synthetic oligonucleotide
accgcgacgaaggcucagg

SEQ ID NO: 803256 - RNA, 19 nt, Artificial Sequence
  Description of Artificial Sequence: Synthetic oligonucleotide
agcgucugcaccacgugca

SEQ ID NO: 803257 - RNA, 19 nt, Artificial Sequence
  Description of Artificial Sequence: Synthetic oligonucleotide
gugucaacaaacggcuaca

SEQ ID NO: 803258 - RNA, 19 nt, Artificial Sequence
  Description of Artificial Sequence: Synthetic oligonucleotide
gaggggaaccagccgaucu

SEQ ID NO: 803259 - RNA, 19 nt, Artificial Sequence
  Description of Artificial Sequence: Synthetic oligonucleotide
acccgaguuucuuucucaa

SEQ ID NO: 803260 - RNA, 19 nt, Artificial Sequence
  Description of Artificial Sequence: Synthetic oligonucleotide
caguagacgcuguccacca

SEQ ID NO: 803261 - RNA, 19 nt, Artificial Sequence
  Description of Artificial Sequence: Synthetic oligonucleotide
gaucucaagaccccuucuu

SEQ ID NO: 803262 - RNA, 19 nt, Artificial Sequence
  Description of Artificial Sequence: Synthetic oligonucleotide
cagaacccgugcuccuugc

SEQ ID NO: 803263 - RNA, 19 nt, Artificial Sequence
  Description of Artificial Sequence: Synthetic oligonucleotide
caucacugaggaccaccac

SEQ ID NO: 803264 - RNA, 19 nt, Artificial Sequence
  Description of Artificial Sequence: Synthetic oligonucleotide
agaugcggucagcaccgcu

SEQ ID NO: 803265 - RNA, 19 nt, Artificial Sequence
  Description of Artificial Sequence: Synthetic oligonucleotide
cuauguggauggcacaccu

SEQ ID NO: 803266 - RNA, 19 nt, Artificial Sequence
  Description of Artificial Sequence: Synthetic oligonucleotide
gguagccgucccucguugg

SEQ ID NO: 803267 - RNA, 19 nt, Artificial Sequence
  Description of Artificial Sequence: Synthetic oligonucleotide
cgaguuucuuucucaaaac

SEQ ID NO: 803268 - RNA, 19 nt, Artificial Sequence
  Description of Artificial Sequence: Synthetic oligonucleotide
agccgucccucguuggcug

SEQ ID NO: 803269 - RNA, 19 nt, Artificial Sequence
  Description of Artificial Sequence: Synthetic oligonucleotide
gugugcgcggggugcauug

SEQ ID NO: 803270 - RNA, 19 nt, Artificial Sequence
  Description of Artificial Sequence: Synthetic oligonucleotide
acaagccggagggcaagag

SEQ ID NO: 803271 - RNA, 19 nt, Artificial Sequence
  Description of Artificial Sequence: Synthetic oligonucleotide
guacagcgucugcaccacg

SEQ ID NO: 803272 - RNA, 19 nt, Artificial Sequence
  Description of Artificial Sequence: Synthetic oligonucleotide
gacggagcugaagggguac

SEQ ID NO: 803273 - RNA, 19 nt, Artificial Sequence
  Description of Artificial Sequence: Synthetic oligonucleotide
guagcuauguuuggaccaa

SEQ ID NO: 803274 - RNA, 19 nt, Artificial Sequence
  Description of Artificial Sequence: Synthetic oligonucleotide
cagcacguaguuggagggg

SEQ ID NO: 803275 - RNA, 19 nt, Artificial Sequence
  Description of Artificial Sequence: Synthetic oligonucleotide
ucggccuggugccguguca

SEQ ID NO: 803276 - RNA, 19 nt, Artificial Sequence
  Description of Artificial Sequence: Synthetic oligonucleotide
ggcacgcaguugcaagagg

SEQ ID NO: 803277 - RNA, 19 nt, Artificial Sequence
  Description of Artificial Sequence: Synthetic oligonucleotide
gcuauggaaccgccgcugc

SEQ ID NO: 803278 - RNA, 19 nt, Artificial Sequence
  Description of Artificial Sequence: Synthetic oligonucleotide
acuugacgaaggcggggau

SEQ ID NO: 803279 - RNA, 19 nt, Artificial Sequence
  Description of Artificial Sequence: Synthetic oligonucleotide
ugcguggguagccgucccu

SEQ ID NO: 803280 - RNA, 19 nt, Artificial Sequence
  Description of Artificial Sequence: Synthetic oligonucleotide
acguugccauaguaccacu

SEQ ID NO: 803281 - RNA, 19 nt, Artificial Sequence
  Description of Artificial Sequence: Synthetic oligonucleotide
gucacugggcgaggacucg

SEQ ID NO: 803282 - RNA, 19 nt, Artificial Sequence
  Description of Artificial Sequence: Synthetic oligonucleotide
caccgcugccaguucggcc

SEQ ID NO: 803283 - RNA, 19 nt, Artificial Sequence
  Description of Artificial Sequence: Synthetic oligonucleotide
accacgugcagaacccgug

SEQ ID NO: 803284 - RNA, 19 nt, Artificial Sequence
  Description of Artificial Sequence: Synthetic oligonucleotide
cacaagcucguccaugcua

SEQ ID NO: 803285 - RNA, 19 nt, Artificial Sequence
  Description of Artificial Sequence: Synthetic oligonucleotide
ccaugcuauggaaccgccg

SEQ ID NO: 803286 - RNA, 19 nt, Artificial Sequence
  Description of Artificial Sequence: Synthetic oligonucleotide
ccgaguuucuuucucaaaa

SEQ ID NO: 803287 - RNA, 19 nt, Artificial Sequence
  Description of Artificial Sequence: Synthetic oligonucleotide
agcaccgcugccaguucgg

SEQ ID NO: 803288 - RNA, 19 nt, Artificial Sequence
  Description of Artificial Sequence: Synthetic oligonucleotide
gaaucgcccgcuggcugag

SEQ ID NO: 803289 - RNA, 19 nt, Artificial Sequence
  Description of Artificial Sequence: Synthetic oligonucleotide
auuucccuguaaagcaaau

SEQ ID NO: 803290 - RNA, 19 nt, Artificial Sequence
  Description of Artificial Sequence: Synthetic oligonucleotide
acaaacggcuacagauaca

SEQ ID NO: 803291 - RNA, 19 nt, Artificial Sequence
  Description of Artificial Sequence: Synthetic oligonucleotide
cguucagcuacguaggcga

SEQ ID NO: 803292 - RNA, 19 nt, Artificial Sequence
  Description of Artificial Sequence: Synthetic oligonucleotide
ucccucguuggcugcguuc

SEQ ID NO: 803293 - RNA, 19 nt, Artificial Sequence
  Description of Artificial Sequence: Synthetic oligonucleotide
ggcgaggacucgcuguccc

SEQ ID NO: 803294 - RNA, 19 nt, Artificial Sequence
  Description of Artificial Sequence: Synthetic oligonucleotide
gacgccccgcucauugagc

SEQ ID NO: 803295 - RNA, 19 nt, Artificial Sequence
  Description of Artificial Sequence: Synthetic oligonucleotide
auccucucguucagcuacg

SEQ ID NO: 803296 - RNA, 19 nt, Artificial Sequence
  Description of Artificial Sequence: Synthetic oligonucleotide
acgaaggcucaggaagcug

SEQ ID NO: 803297 - RNA, 19 nt, Artificial Sequence
  Description of Artificial Sequence: Synthetic oligonucleotide
uagcuauguuuggaccaac

SEQ ID NO: 803298 - RNA, 19 nt, Artificial Sequence
  Description of Artificial Sequence: Synthetic oligonucleotide
uagccgucccucguuggcu

SEQ ID NO: 803299 - RNA, 19 nt, Artificial Sequence
  Description of Artificial Sequence: Synthetic oligonucleotide
cagagcggcaccgcgacga

SEQ ID NO: 803300 - RNA, 19 nt, Artificial Sequence
  Description of Artificial Sequence: Synthetic oligonucleotide
ucgacgccccgcucauuga

SEQ ID NO: 803301 - RNA, 19 nt, Artificial Sequence
  Description of Artificial Sequence: Synthetic oligonucleotide
acggcuacagauacauauu

SEQ ID NO: 803302 - RNA, 19 nt, Artificial Sequence
  Description of Artificial Sequence: Synthetic oligonucleotide
ccauaguaccacucacgac

SEQ ID NO: 803303 - RNA, 19 nt, Artificial Sequence
  Description of Artificial Sequence: Synthetic oligonucleotide
gccccgcucauugagcgcg

SEQ ID NO: 803304 - RNA, 19 nt, Artificial Sequence
  Description of Artificial Sequence: Synthetic oligonucleotide
agcgaaucgcccgcuggcu

SEQ ID NO: 803305 - RNA, 19 nt, Artificial Sequence
  Description of Artificial Sequence: Synthetic oligonucleotide
aggcggggauguugagguc

SEQ ID NO: 803306 - RNA, 19 nt, Artificial Sequence
  Description of Artificial Sequence: Synthetic oligonucleotide
gacauuacccgaguuucuu

SEQ ID NO: 803307 - RNA, 19 nt, Artificial Sequence
  Description of Artificial Sequence: Synthetic oligonucleotide
gccgaucugcccauugaag

SEQ ID NO: 803308 - RNA, 19 nt, Artificial Sequence
  Description of Artificial Sequence: Synthetic oligonucleotide
ggccguguagucccacuug

SEQ ID NO: 803309 - RNA, 19 nt, Artificial Sequence
  Description of Artificial Sequence: Synthetic oligonucleotide
cagugcguggguagccguc

SEQ ID NO: 803310 - RNA, 19 nt, Artificial Sequence
  Description of Artificial Sequence: Synthetic oligonucleotide
ugugcgcggggugcauugc

SEQ ID NO: 803311 - RNA, 19 nt, Artificial Sequence
  Description of Artificial Sequence: Synthetic oligonucleotide
ggggaaccagccgaucugc

SEQ ID NO: 803312 - RNA, 19 nt, Artificial Sequence
  Description of Artificial Sequence: Synthetic oligonucleotide
uggcugcguuccucacccg

SEQ ID NO: 803313 - RNA, 19 nt, Artificial Sequence
  Description of Artificial Sequence: Synthetic oligonucleotide
ggcaagagggaaagagcac

SEQ ID NO: 803314 - RNA, 19 nt, Artificial Sequence
  Description of Artificial Sequence: Synthetic oligonucleotide
cucguuggcugcguuccuc

SEQ ID NO: 803315 - RNA, 19 nt, Artificial Sequence
  Description of Artificial Sequence: Synthetic oligonucleotide
guaugcaaguuuaggggau

SEQ ID NO: 803316 - RNA, 19 nt, Artificial Sequence
  Description of Artificial Sequence: Synthetic oligonucleotide
cugcguggguggagguggc

SEQ ID NO: 803317 - RNA, 19 nt, Artificial Sequence
  Description of Artificial Sequence: Synthetic oligonucleotide
aaacggcuacagauacaua

SEQ ID NO: 803318 - RNA, 19 nt, Artificial Sequence
  Description of Artificial Sequence: Synthetic oligonucleotide
ggcggggauguugagguca

SEQ ID NO: 803319 - RNA, 19 nt, Artificial Sequence
  Description of Artificial Sequence: Synthetic oligonucleotide
ggggccuucuuguagugcu

SEQ ID NO: 803320 - RNA, 19 nt, Artificial Sequence
  Description of Artificial Sequence: Synthetic oligonucleotide
gguacagcgucugcaccac

SEQ ID NO: 803321 - RNA, 19 nt, Artificial Sequence
  Description of Artificial Sequence: Synthetic oligonucleotide
ggaggugauccaggcugcg

SEQ ID NO: 803322 - RNA, 19 nt, Artificial Sequence
  Description of Artificial Sequence: Synthetic oligonucleotide
cugucccuaaugagaaagu

SEQ ID NO: 803323 - RNA, 19 nt, Artificial Sequence
  Description of Artificial Sequence: Synthetic oligonucleotide
cacucacgaccagcgaauc

SEQ ID NO: 803324 - RNA, 19 nt, Artificial Sequence
  Description of Artificial Sequence: Synthetic oligonucleotide
cgcaguugcaagaggugac

SEQ ID NO: 803325 - RNA, 19 nt, Artificial Sequence
  Description of Artificial Sequence: Synthetic oligonucleotide
aggacucgcugucccuaau

SEQ ID NO: 803326 - RNA, 19 nt, Artificial Sequence
  Description of Artificial Sequence: Synthetic oligonucleotide
gugcguggguagccguccc

SEQ ID NO: 803327 - RNA, 19 nt, Artificial Sequence
  Description of Artificial Sequence: Synthetic oligonucleotide
gcgaaucgcccgcuggcug

SEQ ID NO: 803328 - RNA, 19 nt, Artificial Sequence
  Description of Artificial Sequence: Synthetic oligonucleotide
ccguguagucccacuuggc

SEQ ID NO: 803329 - RNA, 19 nt, Artificial Sequence
  Description of Artificial Sequence: Synthetic oligonucleotide
gagcggcaccgcgacgaag

SEQ ID NO: 803330 - RNA, 19 nt, Artificial Sequence
  Description of Artificial Sequence: Synthetic oligonucleotide
cucacccgccaccaggucu

SEQ ID NO: 803331 - RNA, 19 nt, Artificial Sequence
  Description of Artificial Sequence: Synthetic oligonucleotide
cuuuggcacgcaguugcaa

SEQ ID NO: 803332 - RNA, 19 nt, Artificial Sequence
  Description of Artificial Sequence: Synthetic oligonucleotide
gcaaaacguagcacucuuc

SEQ ID NO: 803333 - RNA, 19 nt, Artificial Sequence
  Description of Artificial Sequence: Synthetic oligonucleotide
cccaacccgagagaucagc

SEQ ID NO: 803334 - RNA, 19 nt, Artificial Sequence
  Description of Artificial Sequence: Synthetic oligonucleotide
gucaaacuauaaagaaguu

SEQ ID NO: 803335 - RNA, 19 nt, Artificial Sequence
  Description of Artificial Sequence: Synthetic oligonucleotide
agagcggcaccgcgacgaa

SEQ ID NO: 803336 - RNA, 19 nt, Artificial Sequence
  Description of Artificial Sequence: Synthetic oligonucleotide
ggcaaaacguagcacucuu

SEQ ID NO: 803337 - RNA, 19 nt, Artificial Sequence
  Description of Artificial Sequence: Synthetic oligonucleotide
gagcgcgcacucggccugg

SEQ ID NO: 803338 - RNA, 19 nt, Artificial Sequence
  Description of Artificial Sequence: Synthetic oligonucleotide
cggguacuccgcaucagug

SEQ ID NO: 803339 - RNA, 19 nt, Artificial Sequence
  Description of Artificial Sequence: Synthetic oligonucleotide
ccggacgagguagaguuuc

SEQ ID NO: 803340 - RNA, 19 nt, Artificial Sequence
  Description of Artificial Sequence: Synthetic oligonucleotide
cccugacgcuuugagagac

SEQ ID NO: 803341 - RNA, 19 nt, Artificial Sequence
  Description of Artificial Sequence: Synthetic oligonucleotide
ggcccgguguagcugaucu

SEQ ID NO: 803342 - RNA, 19 nt, Artificial Sequence
  Description of Artificial Sequence: Synthetic oligonucleotide
gcaccacgugcagaacccg

SEQ ID NO: 803343 - RNA, 19 nt, Artificial Sequence
  Description of Artificial Sequence: Synthetic oligonucleotide
gugcgcggggugcauugca

SEQ ID NO: 803344 - RNA, 19 nt, Artificial Sequence
  Description of Artificial Sequence: Synthetic oligonucleotide
acgcuuugagagacacaga

SEQ ID NO: 803345 - RNA, 19 nt, Artificial Sequence
  Description of Artificial Sequence: Synthetic oligonucleotide
aggcugcguggguggaggu

SEQ ID NO: 803346 - RNA, 19 nt, Artificial Sequence
  Description of Artificial Sequence: Synthetic oligonucleotide
guggccgcgggcauggcua

SEQ ID NO: 803347 - RNA, 19 nt, Artificial Sequence
  Description of Artificial Sequence: Synthetic oligonucleotide
gcccggacgagguagaguu

SEQ ID NO: 803348 - RNA, 19 nt, Artificial Sequence
  Description of Artificial Sequence: Synthetic oligonucleotide
caccacucagggucguucu

SEQ ID NO: 803349 - RNA, 19 nt, Artificial Sequence
  Description of Artificial Sequence: Synthetic oligonucleotide
ccgugucacguugccauag

SEQ ID NO: 803350 - RNA, 19 nt, Artificial Sequence
  Description of Artificial Sequence: Synthetic oligonucleotide
gcacgcaguugcaagaggu

SEQ ID NO: 803351 - RNA, 19 nt, Artificial Sequence
  Description of Artificial Sequence: Synthetic oligonucleotide
ccaugacugugacacggga

SEQ ID NO: 803352 - RNA, 19 nt, Artificial Sequence
  Description of Artificial Sequence: Synthetic oligonucleotide
guucggccggguacuccgc

SEQ ID NO: 803353 - RNA, 19 nt, Artificial Sequence
  Description of Artificial Sequence: Synthetic oligonucleotide
caaaggcacugggcaguuc

SEQ ID NO: 803354 - RNA, 19 nt, Artificial Sequence
  Description of Artificial Sequence: Synthetic oligonucleotide
acccgugcuccuugcccau

SEQ ID NO: 803355 - RNA, 19 nt, Artificial Sequence
  Description of Artificial Sequence: Synthetic oligonucleotide
ccagccgaucugcccauug

SEQ ID NO: 803356 - RNA, 19 nt, Artificial Sequence
  Description of Artificial Sequence: Synthetic oligonucleotide
ggccggguacuccgcauca

SEQ ID NO: 803357 - RNA, 19 nt, Artificial Sequence
  Description of Artificial Sequence: Synthetic oligonucleotide
cacgugcagaacccgugcu

SEQ ID NO: 803358 - RNA, 19 nt, Artificial Sequence
  Description of Artificial Sequence: Synthetic oligonucleotide
guggguagccgucccucgu

SEQ ID NO: 803359 - RNA, 19 nt, Artificial Sequence
  Description of Artificial Sequence: Synthetic oligonucleotide
cgaccagcgaaucgcccgc

SEQ ID NO: 803360 - RNA, 19 nt, Artificial Sequence
  Description of Artificial Sequence: Synthetic oligonucleotide
caccacgugcagaacccgu

SEQ ID NO: 803361 - RNA, 19 nt, Artificial Sequence
  Description of Artificial Sequence: Synthetic oligonucleotide
caccgcgacgaaggcucag

SEQ ID NO: 803362 - RNA, 19 nt, Artificial Sequence
  Description of Artificial Sequence: Synthetic oligonucleotide
cguaggaaugugccaucuc

SEQ ID NO: 803363 - RNA, 19 nt, Artificial Sequence
  Description of Artificial Sequence: Synthetic oligonucleotide
ccgccaccaggucuuggag

SEQ ID NO: 803364 - RNA, 19 nt, Artificial Sequence
  Description of Artificial Sequence: Synthetic oligonucleotide
gcaguugcaagaggugacu

SEQ ID NO: 803365 - RNA, 19 nt, Artificial Sequence
  Description of Artificial Sequence: Synthetic oligonucleotide
gcccucgacgccccgcuca

SEQ ID NO: 803366 - RNA, 19 nt, Artificial Sequence
  Description of Artificial Sequence: Synthetic oligonucleotide
gcccgguguagcugaucug

SEQ ID NO: 803367 - RNA, 19 nt, Artificial Sequence
  Description of Artificial Sequence: Synthetic oligonucleotide
gcugacggcugccuucacu

SEQ ID NO: 803368 - RNA, 19 nt, Artificial Sequence
  Description of Artificial Sequence: Synthetic oligonucleotide
cgacgccccgcucauugag

SEQ ID NO: 803369 - RNA, 19 nt, Artificial Sequence
  Description of Artificial Sequence: Synthetic oligonucleotide
cggcuacagauacauauua

SEQ ID NO: 803370 - RNA, 19 nt, Artificial Sequence
  Description of Artificial Sequence: Synthetic oligonucleotide
ccgcacauucuuggacucc

SEQ ID NO: 803371 - RNA, 19 nt, Artificial Sequence
  Description of Artificial Sequence: Synthetic oligonucleotide
gcggcaccgcgacgaaggc

SEQ ID NO: 803372 - RNA, 19 nt, Artificial Sequence
  Description of Artificial Sequence: Synthetic oligonucleotide
ggacauuacccgaguuucu

SEQ ID NO: 803373 - RNA, 19 nt, Artificial Sequence
  Description of Artificial Sequence: Synthetic oligonucleotide
gcagccacagucucucguu

SEQ ID NO: 803374 - RNA, 19 nt, Artificial Sequence
  Description of Artificial Sequence: Synthetic oligonucleotide
cacugaggaccaccacaua

SEQ ID NO: 803375 - RNA, 19 nt, Artificial Sequence
  Description of Artificial Sequence: Synthetic oligonucleotide
gccgucccucguuggcugc

SEQ ID NO: 803376 - RNA, 19 nt, Artificial Sequence
  Description of Artificial Sequence: Synthetic oligonucleotide
cgaaucgcccgcuggcuga

SEQ ID NO: 803377 - RNA, 19 nt, Artificial Sequence
  Description of Artificial Sequence: Synthetic oligonucleotide
gcuggcaccgcugggcucu

SEQ ID NO: 803378 - RNA, 19 nt, Artificial Sequence
  Description of Artificial Sequence: Synthetic oligonucleotide
guacuccgcaucagugcgu

SEQ ID NO: 803379 - RNA, 19 nt, Artificial Sequence
  Description of Artificial Sequence: Synthetic oligonucleotide
gccggguacuccgcaucag

SEQ ID NO: 803380 - RNA, 19 nt, Artificial Sequence
  Description of Artificial Sequence: Synthetic oligonucleotide
ggaggggaaccagccgauc

SEQ ID NO: 803381 - RNA, 19 nt, Artificial Sequence
  Description of Artificial Sequence: Synthetic oligonucleotide
gccgcgggcauggcuauga

SEQ ID NO: 803382 - RNA, 19 nt, Artificial Sequence
  Description of Artificial Sequence: Synthetic oligonucleotide
cccgaguuucuuucucaaa

SEQ ID NO: 803383 - RNA, 19 nt, Artificial Sequence
  Description of Artificial Sequence: Synthetic oligonucleotide
uggcaccgcugggcucuag

SEQ ID NO: 803384 - RNA, 19 nt, Artificial Sequence
  Description of Artificial Sequence: Synthetic oligonucleotide
cccgguguagcugaucugu

SEQ ID NO: 803385 - RNA, 19 nt, Artificial Sequence
  Description of Artificial Sequence: Synthetic oligonucleotide
ccgcucauugagcgcgcac

SEQ ID NO: 803386 - RNA, 19 nt, Artificial Sequence
  Description of Artificial Sequence: Synthetic oligonucleotide
cgcccgcuggcugagggcc

SEQ ID NO: 803387 - RNA, 19 nt, Artificial Sequence
  Description of Artificial Sequence: Synthetic oligonucleotide
ccacucacgaccagcgaau

SEQ ID NO: 803388 - RNA, 19 nt, Artificial Sequence
  Description of Artificial Sequence: Synthetic oligonucleotide
gaccagcgaaucgcccgcu

SEQ ID NO: 803389 - RNA, 19 nt, Artificial Sequence
  Description of Artificial Sequence: Synthetic oligonucleotide
gguggccgcgggcauggcu

SEQ ID NO: 803390 - RNA, 19 nt, Artificial Sequence
  Description of Artificial Sequence: Synthetic oligonucleotide
ccgucccucguuggcugcg

SEQ ID NO: 803391 - RNA, 19 nt, Artificial Sequence
  Description of Artificial Sequence: Synthetic oligonucleotide
gggagcccuucaccaggga

SEQ ID NO: 803392 - RNA, 19 nt, Artificial Sequence
  Description of Artificial Sequence: Synthetic oligonucleotide
guauugcuauccgcacauu

SEQ ID NO: 803393 - RNA, 19 nt, Artificial Sequence
  Description of Artificial Sequence: Synthetic oligonucleotide
ccccgcucauugagcgcgc

SEQ ID NO: 803394 - RNA, 19 nt, Artificial Sequence
  Description of Artificial Sequence: Synthetic oligonucleotide
ccgcgacgaaggcucagga

SEQ ID NO: 803395 - RNA, 19 nt, Artificial Sequence
  Description of Artificial Sequence: Synthetic oligonucleotide
gccgugucacguugccaua

SEQ ID NO: 803396 - RNA, 19 nt, Artificial Sequence
  Description of Artificial Sequence: Synthetic oligonucleotide
ccgcgggcauggcuaugag

SEQ ID NO: 803397 - RNA, 19 nt, Artificial Sequence
  Description of Artificial Sequence: Synthetic oligonucleotide
cacccgccaccaggucuug

SEQ ID NO: 803398 - RNA, 19 nt, Artificial Sequence
  Description of Artificial Sequence: Synthetic oligonucleotide
accagccgaucugcccauu

SEQ ID NO: 803399 - RNA, 19 nt, Artificial Sequence
  Description of Artificial Sequence: Synthetic oligonucleotide
gggccguguagucccacuu

SEQ ID NO: 803400 - RNA, 19 nt, Artificial Sequence
  Description of Artificial Sequence: Synthetic oligonucleotide
ggcugacggcugccuucac

SEQ ID NO: 803401 - RNA, 19 nt, Artificial Sequence
  Description of Artificial Sequence: Synthetic oligonucleotide
ccggguacuccgcaucagu

SEQ ID NO: 803402 - RNA, 19 nt, Artificial Sequence
  Description of Artificial Sequence: Synthetic oligonucleotide
ccucucguucagcuacgua

SEQ ID NO: 803403 - RNA, 19 nt, Artificial Sequence
  Description of Artificial Sequence: Synthetic oligonucleotide
cgccccgcucauugagcgc

SEQ ID NO: 803404 - RNA, 19 nt, Artificial Sequence
  Description of Artificial Sequence: Synthetic oligonucleotide
ggcccggacgagguagagu

SEQ ID NO: 803405 - RNA, 19 nt, Artificial Sequence
  Description of Artificial Sequence: Synthetic oligonucleotide
gcaccgcgacgaaggcuca

SEQ ID NO: 803406 - RNA, 19 nt, Artificial Sequence
  Description of Artificial Sequence: Synthetic oligonucleotide
cgaggacucgcugucccua

SEQ ID NO: 803407 - RNA, 19 nt, Artificial Sequence
  Description of Artificial Sequence: Synthetic oligonucleotide
cggacgagguagaguuucu

SEQ ID NO: 803408 - RNA, 19 nt, Artificial Sequence
  Description of Artificial Sequence: Synthetic oligonucleotide
ccgcaucagugcgugggua

SEQ ID NO: 803409 - RNA, 19 nt, Artificial Sequence
  Description of Artificial Sequence: Synthetic oligonucleotide
ggugugcgcggggugcauu

SEQ ID NO: 803410 - RNA, 19 nt, Artificial Sequence
  Description of Artificial Sequence: Synthetic oligonucleotide
ccucguuggcugcguuccu

SEQ ID NO: 803411 - RNA, 19 nt, Artificial Sequence
  Description of Artificial Sequence: Synthetic oligonucleotide
cccggacgagguagaguuu

SEQ ID NO: 803412 - RNA, 19 nt, Artificial Sequence
  Description of Artificial Sequence: Synthetic oligonucleotide
cggcaccgcgacgaaggcu

SEQ ID NO: 803413 - RNA, 19 nt, Artificial Sequence
  Description of Artificial Sequence: Synthetic oligonucleotide
cgucccucguuggcugcgu

SEQ ID NO: 803414 - RNA, 19 nt, Artificial Sequence
  Description of Artificial Sequence: Synthetic oligonucleotide
cuuauuugcaaauauugcc

SEQ ID NO: 803415 - RNA, 19 nt, Artificial Sequence
  Description of Artificial Sequence: Synthetic oligonucleotide
uacacaaucauacuggaga

SEQ ID NO: 803416 - RNA, 19 nt, Artificial Sequence
  Description of Artificial Sequence: Synthetic oligonucleotide
aaauuauccuuccuuuuac

SEQ ID NO: 803417 - RNA, 19 nt, Artificial Sequence
  Description of Artificial Sequence: Synthetic oligonucleotide
auaauuguaguuuccaauc

SEQ ID NO: 803418 - RNA, 19 nt, Artificial Sequence
  Description of Artificial Sequence: Synthetic oligonucleotide
ugaaguuuagcuuugcaca

SEQ ID NO: 803419 - RNA, 19 nt, Artificial Sequence
  Description of Artificial Sequence: Synthetic oligonucleotide
uguccaaggacauaucugg

SEQ ID NO: 803420 - RNA, 19 nt, Artificial Sequence
  Description of Artificial Sequence: Synthetic oligonucleotide
ugugcuuugaucuggauac

SEQ ID NO: 803421 - RNA, 19 nt, Artificial Sequence
  Description of Artificial Sequence: Synthetic oligonucleotide
uccaagauccauauaauug

SEQ ID NO: 803422 - RNA, 19 nt, Artificial Sequence
  Description of Artificial Sequence: Synthetic oligonucleotide
uauaguacauuuuauggac

SEQ ID NO: 803423 - RNA, 19 nt, Artificial Sequence
  Description of Artificial Sequence: Synthetic oligonucleotide
ugagaucgaguucugaagg

SEQ ID NO: 803424 - RNA, 19 nt, Artificial Sequence
  Description of Artificial Sequence: Synthetic oligonucleotide
agagaugcuguucacuucc

SEQ ID NO: 803425 - RNA, 19 nt, Artificial Sequence
  Description of Artificial Sequence: Synthetic oligonucleotide
cugguguuaucaaagaugg

SEQ ID NO: 803426 - RNA, 19 nt, Artificial Sequence
  Description of Artificial Sequence: Synthetic oligonucleotide
uucaaugccaucucguagg

SEQ ID NO: 803427 - RNA, 19 nt, Artificial Sequence
  Description of Artificial Sequence: Synthetic oligonucleotide
ugugaaucuuccaaaagca

SEQ ID NO: 803428 - RNA, 19 nt, Artificial Sequence
  Description of Artificial Sequence: Synthetic oligonucleotide
aucaccagcgaguaauucc

SEQ ID NO: 803429 - RNA, 19 nt, Artificial Sequence
  Description of Artificial Sequence: Synthetic oligonucleotide
uuuguggaaacacaaggac

SEQ ID NO: 803430 - RNA, 19 nt, Artificial Sequence
  Description of Artificial Sequence: Synthetic oligonucleotide
ucaaauugacuuaaguaaa

SEQ ID NO: 803431 - RNA, 19 nt, Artificial Sequence
  Description of Artificial Sequence: Synthetic oligonucleotide
auauaguacauuuuaugga

SEQ ID NO: 803432 - RNA, 19 nt, Artificial Sequence
  Description of Artificial Sequence: Synthetic oligonucleotide
ucugcuaguggcaaggaga

SEQ ID NO: 803433 - RNA, 19 nt, Artificial Sequence
  Description of Artificial Sequence: Synthetic oligonucleotide
aaacccuuggccucugcac

SEQ ID NO: 803434 - RNA, 19 nt, Artificial Sequence
  Description of Artificial Sequence: Synthetic oligonucleotide
aaaugcaugccacugcaga

SEQ ID NO: 803435 - RNA, 19 nt, Artificial Sequence
  Description of Artificial Sequence: Synthetic oligonucleotide
uuauggacucaucugcuag

SEQ ID NO: 803436 - RNA, 19 nt, Artificial Sequence
  Description of Artificial Sequence: Synthetic oligonucleotide
cugugaaucuuccaaaagc

SEQ ID NO: 803437 - RNA, 19 nt, Artificial Sequence
  Description of Artificial Sequence: Synthetic oligonucleotide
uacuugugaacucagucca

SEQ ID NO: 803438 - RNA, 19 nt, Artificial Sequence
  Description of Artificial Sequence: Synthetic oligonucleotide
uuccuuuuacagaaagcgg

SEQ ID NO: 803439 - RNA, 19 nt, Artificial Sequence
  Description of Artificial Sequence: Synthetic oligonucleotide
guguuuaucagucagacua

SEQ ID NO: 803440 - RNA, 19 nt, Artificial Sequence
  Description of Artificial Sequence: Synthetic oligonucleotide
acucugaacauucuuacga

SEQ ID NO: 803441 - RNA, 19 nt, Artificial Sequence
  Description of Artificial Sequence: Synthetic oligonucleotide
guaaguagcacauuccuuc

SEQ ID NO: 803442 - RNA, 19 nt, Artificial Sequence
  Description of Artificial Sequence: Synthetic oligonucleotide
ucugaacauucuuacgagg

SEQ ID NO: 803443 - RNA, 19 nt, Artificial Sequence
  Description of Artificial Sequence: Synthetic oligonucleotide
augacuuuuguggaaacac

SEQ ID NO: 803444 - RNA, 19 nt, Artificial Sequence
  Description of Artificial Sequence: Synthetic oligonucleotide
uuugcauugaugucacuca

SEQ ID NO: 803445 - RNA, 19 nt, Artificial Sequence
  Description of Artificial Sequence: Synthetic oligonucleotide
uaaacuugccacaucuucu

SEQ ID NO: 803446 - RNA, 19 nt, Artificial Sequence
  Description of Artificial Sequence: Synthetic oligonucleotide
ucgacugugucucagucug

SEQ ID NO: 803447 - RNA, 19 nt, Artificial Sequence
  Description of Artificial Sequence: Synthetic oligonucleotide
uucuacauauucuucaaau

SEQ ID NO: 803448 - RNA, 19 nt, Artificial Sequence
  Description of Artificial Sequence: Synthetic oligonucleotide
auggucuccgaaauuaucc

SEQ ID NO: 803449 - RNA, 19 nt, Artificial Sequence
  Description of Artificial Sequence: Synthetic oligonucleotide
ucauucggcaaucugcaug

SEQ ID NO: 803450 - RNA, 19 nt, Artificial Sequence
  Description of Artificial Sequence: Synthetic oligonucleotide
aguuccaaaaugcaugcca

SEQ ID NO: 803451 - RNA, 19 nt, Artificial Sequence
  Description of Artificial Sequence: Synthetic oligonucleotide
agauccauauaauuguagu

SEQ ID NO: 803452 - RNA, 19 nt, Artificial Sequence
  Description of Artificial Sequence: Synthetic oligonucleotide
ucaccagcgaguaauuccc

SEQ ID NO: 803453 - RNA, 19 nt, Artificial Sequence
  Description of Artificial Sequence: Synthetic oligonucleotide
uaauuguaguuuccaaucu

SEQ ID NO: 803454 - RNA, 19 nt, Artificial Sequence
  Description of Artificial Sequence: Synthetic oligonucleotide
ucggcaaucugcaugcuug

SEQ ID NO: 803455 - RNA, 19 nt, Artificial Sequence
  Description of Artificial Sequence: Synthetic oligonucleotide
aucugagacucagugaagc

SEQ ID NO: 803456 - RNA, 19 nt, Artificial Sequence
  Description of Artificial Sequence: Synthetic oligonucleotide
ucuucuaggaugacgccca

SEQ ID NO: 803457 - RNA, 19 nt, Artificial Sequence
  Description of Artificial Sequence: Synthetic oligonucleotide
cauucggcaaucugcaugc

SEQ ID NO: 803458 - RNA, 19 nt, Artificial Sequence
  Description of Artificial Sequence: Synthetic oligonucleotide
ugucauguaaguagcacau

SEQ ID NO: 803459 - RNA, 19 nt, Artificial Sequence
  Description of Artificial Sequence: Synthetic oligonucleotide
guaccuacccuuuugagga

SEQ ID NO: 803460 - RNA, 19 nt, Artificial Sequence
  Description of Artificial Sequence: Synthetic oligonucleotide
cucauuguacucagcacgg

SEQ ID NO: 803461 - RNA, 19 nt, Artificial Sequence
  Description of Artificial Sequence: Synthetic oligonucleotide
ggggcuugaacugagaucg

SEQ ID NO: 803462 - RNA, 19 nt, Artificial Sequence
  Description of Artificial Sequence: Synthetic oligonucleotide
gaaguuuagcuuugcacac

SEQ ID NO: 803463 - RNA, 19 nt, Artificial Sequence
  Description of Artificial Sequence: Synthetic oligonucleotide
auugcccaaaguacaaugc

SEQ ID NO: 803464 - RNA, 19 nt, Artificial Sequence
  Description of Artificial Sequence: Synthetic oligonucleotide
gagguaaggguacacaauc

SEQ ID NO: 803465 - RNA, 19 nt, Artificial Sequence
  Description of Artificial Sequence: Synthetic oligonucleotide
aucucguucauagucgugg

SEQ ID NO: 803466 - RNA, 19 nt, Artificial Sequence
  Description of Artificial Sequence: Synthetic oligonucleotide
aagaaaaccaggacuccuc

SEQ ID NO: 803467 - RNA, 19 nt, Artificial Sequence
  Description of Artificial Sequence: Synthetic oligonucleotide
aguacaaugccaaaacugu

SEQ ID NO: 803468 - RNA, 19 nt, Artificial Sequence
  Description of Artificial Sequence: Synthetic oligonucleotide
aaaggggucaugggagacc

SEQ ID NO: 803469 - RNA, 19 nt, Artificial Sequence
  Description of Artificial Sequence: Synthetic oligonucleotide
uguucaggcgccauguagu

SEQ ID NO: 803470 - RNA, 19 nt, Artificial Sequence
  Description of Artificial Sequence: Synthetic oligonucleotide
uaucagucagacuacuggu

SEQ ID NO: 803471 - RNA, 19 nt, Artificial Sequence
  Description of Artificial Sequence: Synthetic oligonucleotide
uugcccaaaguacaaugcc

SEQ ID NO: 803472 - RNA, 19 nt, Artificial Sequence
  Description of Artificial Sequence: Synthetic oligonucleotide
agaucgaguucugaaggcc

SEQ ID NO: 803473 - RNA, 19 nt, Artificial Sequence
  Description of Artificial Sequence: Synthetic oligonucleotide
auaucugguugcuauuuug

SEQ ID NO: 803474 - RNA, 19 nt, Artificial Sequence
  Description of Artificial Sequence: Synthetic oligonucleotide
uguguaccuacccuuuuga

SEQ ID NO: 803475 - RNA, 19 nt, Artificial Sequence
  Description of Artificial Sequence: Synthetic oligonucleotide
ucaaugccaucucguaggg

SEQ ID NO: 803476 - RNA, 19 nt, Artificial Sequence
  Description of Artificial Sequence: Synthetic oligonucleotide
aagcgggacacugaucucg

SEQ ID NO: 803477 - RNA, 19 nt, Artificial Sequence
  Description of Artificial Sequence: Synthetic oligonucleotide
ggcgccauguaguagaggg

SEQ ID NO: 803478 - RNA, 19 nt, Artificial Sequence
  Description of Artificial Sequence: Synthetic oligonucleotide
auuggucucagguacggga

SEQ ID NO: 803479 - RNA, 19 nt, Artificial Sequence
  Description of Artificial Sequence: Synthetic oligonucleotide
aagauccauauaauuguag

SEQ ID NO: 803480 - RNA, 19 nt, Artificial Sequence
  Description of Artificial Sequence: Synthetic oligonucleotide
uguuuaucagucagacuac

SEQ ID NO: 803481 - RNA, 19 nt, Artificial Sequence
  Description of Artificial Sequence: Synthetic oligonucleotide
ucguucauagucgugguca

SEQ ID NO: 803482 - RNA, 19 nt, Artificial Sequence
  Description of Artificial Sequence: Synthetic oligonucleotide
uccgaaauuauccuuccuu

SEQ ID NO: 803483 - RNA, 19 nt, Artificial Sequence
  Description of Artificial Sequence: Synthetic oligonucleotide
uguacagucuaguucccac

SEQ ID NO: 803484 - RNA, 19 nt, Artificial Sequence
  Description of Artificial Sequence: Synthetic oligonucleotide
uccaaaaugcaugccacug

SEQ ID NO: 803485 - RNA, 19 nt, Artificial Sequence
  Description of Artificial Sequence: Synthetic oligonucleotide
aguauacuccaugucuuac

SEQ ID NO: 803486 - RNA, 19 nt, Artificial Sequence
  Description of Artificial Sequence: Synthetic oligonucleotide
agucaguauacuccauguc

SEQ ID NO: 803487 - RNA, 19 nt, Artificial Sequence
  Description of Artificial Sequence: Synthetic oligonucleotide
gaaauuauccuuccuuuua

SEQ ID NO: 803488 - RNA, 19 nt, Artificial Sequence
  Description of Artificial Sequence: Synthetic oligonucleotide
guauuuccaugacuggcgg

SEQ ID NO: 803489 - RNA, 19 nt, Artificial Sequence
  Description of Artificial Sequence: Synthetic oligonucleotide
uguaguagagggugccucc

SEQ ID NO: 803490 - RNA, 19 nt, Artificial Sequence
  Description of Artificial Sequence: Synthetic oligonucleotide
uuucaucaaucugagacuc

SEQ ID NO: 803491 - RNA, 19 nt, Artificial Sequence
  Description of Artificial Sequence: Synthetic oligonucleotide
cucugaacauucuuacgag

SEQ ID NO: 803492 - RNA, 19 nt, Artificial Sequence
  Description of Artificial Sequence: Synthetic oligonucleotide
acuauuauauauaguacau

SEQ ID NO: 803493 - RNA, 19 nt, Artificial Sequence
  Description of Artificial Sequence: Synthetic oligonucleotide
agguacgggaguuuuauaa

SEQ ID NO: 803494 - RNA, 19 nt, Artificial Sequence
  Description of Artificial Sequence: Synthetic oligonucleotide
ucugagacucagugaagcc

SEQ ID NO: 803495 - RNA, 19 nt, Artificial Sequence
  Description of Artificial Sequence: Synthetic oligonucleotide
aggucuauccuguaacacu

SEQ ID NO: 803496 - RNA, 19 nt, Artificial Sequence
  Description of Artificial Sequence: Synthetic oligonucleotide
gauggcuugguacuuggga

SEQ ID NO: 803497 - RNA, 19 nt, Artificial Sequence
  Description of Artificial Sequence: Synthetic oligonucleotide
aacauucuuacgaggucuc

SEQ ID NO: 803498 - RNA, 19 nt, Artificial Sequence
  Description of Artificial Sequence: Synthetic oligonucleotide
uucuucuaggaugacgccc

SEQ ID NO: 803499 - RNA, 19 nt, Artificial Sequence
  Description of Artificial Sequence: Synthetic oligonucleotide
uggagagaauacauccucu

SEQ ID NO: 803500 - RNA, 19 nt, Artificial Sequence
  Description of Artificial Sequence: Synthetic oligonucleotide
ucugguacuugugaacuca

SEQ ID NO: 803501 - RNA, 19 nt, Artificial Sequence
  Description of Artificial Sequence: Synthetic oligonucleotide
gagaucgaguucugaaggc

SEQ ID NO: 803502 - RNA, 19 nt, Artificial Sequence
  Description of Artificial Sequence: Synthetic oligonucleotide
ucuuacgaggucucugcug

SEQ ID NO: 803503 - RNA, 19 nt, Artificial Sequence
  Description of Artificial Sequence: Synthetic oligonucleotide
uggagguaaggguacacaa

SEQ ID NO: 803504 - RNA, 19 nt, Artificial Sequence
  Description of Artificial Sequence: Synthetic oligonucleotide
acgugcaucagguugcccu

SEQ ID NO: 803505 - RNA, 19 nt, Artificial Sequence
  Description of Artificial Sequence: Synthetic oligonucleotide
auuugaccugcuuggaggu

SEQ ID NO: 803506 - RNA, 19 nt, Artificial Sequence
  Description of Artificial Sequence: Synthetic oligonucleotide
augggagacccuucguuuc

SEQ ID NO: 803507 - RNA, 19 nt, Artificial Sequence
  Description of Artificial Sequence: Synthetic oligonucleotide
auagucguggucaauuuca

SEQ ID NO: 803508 - RNA, 19 nt, Artificial Sequence
  Description of Artificial Sequence: Synthetic oligonucleotide
uggacucaucugcuagugg

SEQ ID NO: 803509 - RNA, 19 nt, Artificial Sequence
  Description of Artificial Sequence: Synthetic oligonucleotide
uccuguaacacuggucaag

SEQ ID NO: 803510 - RNA, 19 nt, Artificial Sequence
  Description of Artificial Sequence: Synthetic oligonucleotide
uuaucaaagauggcuuggu

SEQ ID NO: 803511 - RNA, 19 nt, Artificial Sequence
  Description of Artificial Sequence: Synthetic oligonucleotide
gucaguauacuccaugucu

SEQ ID NO: 803512 - RNA, 19 nt, Artificial Sequence
  Description of Artificial Sequence: Synthetic oligonucleotide
acccaugcugacuauaaaa

SEQ ID NO: 803513 - RNA, 19 nt, Artificial Sequence
  Description of Artificial Sequence: Synthetic oligonucleotide
caugacuggcgguacuggg

SEQ ID NO: 803514 - RNA, 19 nt, Artificial Sequence
  Description of Artificial Sequence: Synthetic oligonucleotide
cacucagguguucaggcgc

SEQ ID NO: 803515 - RNA, 19 nt, Artificial Sequence
  Description of Artificial Sequence: Synthetic oligonucleotide
cagucuaguucccacugcc

SEQ ID NO: 803516 - RNA, 19 nt, Artificial Sequence
  Description of Artificial Sequence: Synthetic oligonucleotide
cugagacucagugaagccc

SEQ ID NO: 803517 - RNA, 19 nt, Artificial Sequence
  Description of Artificial Sequence: Synthetic oligonucleotide
uauggacucaucugcuagu

SEQ ID NO: 803518 - RNA, 19 nt, Artificial Sequence
  Description of Artificial Sequence: Synthetic oligonucleotide
uugugcaccuaguguacag

SEQ ID NO: 803519 - RNA, 19 nt, Artificial Sequence
  Description of Artificial Sequence: Synthetic oligonucleotide
ggacaccuuacccaaagcc

SEQ ID NO: 803520 - RNA, 19 nt, Artificial Sequence
  Description of Artificial Sequence: Synthetic oligonucleotide
gguacuugugaacucaguc

SEQ ID NO: 803521 - RNA, 19 nt, Artificial Sequence
  Description of Artificial Sequence: Synthetic oligonucleotide
ugacaaauccaugacuuuu

SEQ ID NO: 803522 - RNA, 19 nt, Artificial Sequence
  Description of Artificial Sequence: Synthetic oligonucleotide
cuaguucccacugccagag

SEQ ID NO: 803523 - RNA, 19 nt, Artificial Sequence
  Description of Artificial Sequence: Synthetic oligonucleotide
gguacgggaguuuuauaag

SEQ ID NO: 803524 - RNA, 19 nt, Artificial Sequence
  Description of Artificial Sequence: Synthetic oligonucleotide
uaucaaagauggcuuggua

SEQ ID NO: 803525 - RNA, 19 nt, Artificial Sequence
  Description of Artificial Sequence: Synthetic oligonucleotide
uuuauggacucaucugcua

SEQ ID NO: 803526 - RNA, 19 nt, Artificial Sequence
  Description of Artificial Sequence: Synthetic oligonucleotide
caaugccaaaacuguacac

SEQ ID NO: 803527 - RNA, 19 nt, Artificial Sequence
  Description of Artificial Sequence: Synthetic oligonucleotide
caugucuuacaccuuuguc

SEQ ID NO: 803528 - RNA, 19 nt, Artificial Sequence
  Description of Artificial Sequence: Synthetic oligonucleotide
ucgauggucuccgaaauua

SEQ ID NO: 803529 - RNA, 19 nt, Artificial Sequence
  Description of Artificial Sequence: Synthetic oligonucleotide
cuugugaacucaguccaag

SEQ ID NO: 803530 - RNA, 19 nt, Artificial Sequence
  Description of Artificial Sequence: Synthetic oligonucleotide
agauuggucucagguacgg

SEQ ID NO: 803531 - RNA, 19 nt, Artificial Sequence
  Description of Artificial Sequence: Synthetic oligonucleotide
uucauagucguggucaauu

SEQ ID NO: 803532 - RNA, 19 nt, Artificial Sequence
  Description of Artificial Sequence: Synthetic oligonucleotide
cagacuacugguguuauca

SEQ ID NO: 803533 - RNA, 19 nt, Artificial Sequence
  Description of Artificial Sequence: Synthetic oligonucleotide
agucguggucaauuucauc

SEQ ID NO: 803534 - RNA, 19 nt, Artificial Sequence
  Description of Artificial Sequence: Synthetic oligonucleotide
uucaucaaucugagacuca

SEQ ID NO: 803535 - RNA, 19 nt, Artificial Sequence
  Description of Artificial Sequence: Synthetic oligonucleotide
ucccugacaggguucaggu

SEQ ID NO: 803536 - RNA, 19 nt, Artificial Sequence
  Description of Artificial Sequence: Synthetic oligonucleotide
acuggucaagugcccgggc

SEQ ID NO: 803537 - RNA, 19 nt, Artificial Sequence
  Description of Artificial Sequence: Synthetic oligonucleotide
ucguagggcuccuuauuug

SEQ ID NO: 803538 - RNA, 19 nt, Artificial Sequence
  Description of Artificial Sequence: Synthetic oligonucleotide
acacuggucaagugcccgg

SEQ ID NO: 803539 - RNA, 19 nt, Artificial Sequence
  Description of Artificial Sequence: Synthetic oligonucleotide
agaugcggggcuugaacug

SEQ ID NO: 803540 - RNA, 19 nt, Artificial Sequence
  Description of Artificial Sequence: Synthetic oligonucleotide
caaauugacuuaaguaaaa

SEQ ID NO: 803541 - RNA, 19 nt, Artificial Sequence
  Description of Artificial Sequence: Synthetic oligonucleotide
guauacuccaugucuuaca

SEQ ID NO: 803542 - RNA, 19 nt, Artificial Sequence
  Description of Artificial Sequence: Synthetic oligonucleotide
gagcuaugcagcgaaccag

SEQ ID NO: 803543 - RNA, 19 nt, Artificial Sequence
  Description of Artificial Sequence: Synthetic oligonucleotide
ucucuuuagucaguauacu

SEQ ID NO: 803544 - RNA, 19 nt, Artificial Sequence
  Description of Artificial Sequence: Synthetic oligonucleotide
ugaauuugaccugcuugga

SEQ ID NO: 803545 - RNA, 19 nt, Artificial Sequence
  Description of Artificial Sequence: Synthetic oligonucleotide
aaggacauaucugguugcu

SEQ ID NO: 803546 - RNA, 19 nt, Artificial Sequence
  Description of Artificial Sequence: Synthetic oligonucleotide
ucagguacgggaguuuuau

SEQ ID NO: 803547 - RNA, 19 nt, Artificial Sequence
  Description of Artificial Sequence: Synthetic oligonucleotide
uccaugacuuuuguggaaa

SEQ ID NO: 803548 - RNA, 19 nt, Artificial Sequence
  Description of Artificial Sequence: Synthetic oligonucleotide
aaguuuagcuuugcacacu

SEQ ID NO: 803549 - RNA, 19 nt, Artificial Sequence
  Description of Artificial Sequence: Synthetic oligonucleotide
cuuuuacagaaagcgggac

SEQ ID NO: 803550 - RNA, 19 nt, Artificial Sequence
  Description of Artificial Sequence: Synthetic oligonucleotide
acgggaguuuuauaaguau

SEQ ID NO: 803551 - RNA, 19 nt, Artificial Sequence
  Description of Artificial Sequence: Synthetic oligonucleotide
uucuuacgaggucucugcu

SEQ ID NO: 803552 - RNA, 19 nt, Artificial Sequence
  Description of Artificial Sequence: Synthetic oligonucleotide
cugaaguuccaaacccaug

SEQ ID NO: 803553 - RNA, 19 nt, Artificial Sequence
  Description of Artificial Sequence: Synthetic oligonucleotide
gcuaguggcaaggagauga

SEQ ID NO: 803554 - RNA, 19 nt, Artificial Sequence
  Description of Artificial Sequence: Synthetic oligonucleotide
gugugcuguauuuccauga

SEQ ID NO: 803555 - RNA, 19 nt, Artificial Sequence
  Description of Artificial Sequence: Synthetic oligonucleotide
gaaucccugggagcuaugc

SEQ ID NO: 803556 - RNA, 19 nt, Artificial Sequence
  Description of Artificial Sequence: Synthetic oligonucleotide
cauucuuacgaggucucug

SEQ ID NO: 803557 - RNA, 19 nt, Artificial Sequence
  Description of Artificial Sequence: Synthetic oligonucleotide
auaguacauuuuauggacu

SEQ ID NO: 803558 - RNA, 19 nt, Artificial Sequence
  Description of Artificial Sequence: Synthetic oligonucleotide
uggcuggccuguaucaagu

SEQ ID NO: 803559 - RNA, 19 nt, Artificial Sequence
  Description of Artificial Sequence: Synthetic oligonucleotide
ucauagucguggucaauuu

SEQ ID NO: 803560 - RNA, 19 nt, Artificial Sequence
  Description of Artificial Sequence: Synthetic oligonucleotide
ucucguucauagucguggu

SEQ ID NO: 803561 - RNA, 19 nt, Artificial Sequence
  Description of Artificial Sequence: Synthetic oligonucleotide
acaccuuacccaaagcccu

SEQ ID NO: 803562 - RNA, 19 nt, Artificial Sequence
  Description of Artificial Sequence: Synthetic oligonucleotide
cugguacuugugaacucag

SEQ ID NO: 803563 - RNA, 19 nt, Artificial Sequence
  Description of Artificial Sequence: Synthetic oligonucleotide
ucuuucaacccaucucguu

SEQ ID NO: 803564 - RNA, 19 nt, Artificial Sequence
  Description of Artificial Sequence: Synthetic oligonucleotide
gcaaucugcaugcuuguac

SEQ ID NO: 803565 - RNA, 19 nt, Artificial Sequence
  Description of Artificial Sequence: Synthetic oligonucleotide
uauuuccaugacuggcggu

SEQ ID NO: 803566 - RNA, 19 nt, Artificial Sequence
  Description of Artificial Sequence: Synthetic oligonucleotide
aacccaugcugacuauaaa

SEQ ID NO: 803567 - RNA, 19 nt, Artificial Sequence
  Description of Artificial Sequence: Synthetic oligonucleotide
gacuacugguguuaucaaa

SEQ ID NO: 803568 - RNA, 19 nt, Artificial Sequence
  Description of Artificial Sequence: Synthetic oligonucleotide
aacccaucucguucauagu

SEQ ID NO: 803569 - RNA, 19 nt, Artificial Sequence
  Description of Artificial Sequence: Synthetic oligonucleotide
accuuacccaaagcccucc

SEQ ID NO: 803570 - RNA, 19 nt, Artificial Sequence
  Description of Artificial Sequence: Synthetic oligonucleotide
gauuggucucagguacggg

SEQ ID NO: 803571 - RNA, 19 nt, Artificial Sequence
  Description of Artificial Sequence: Synthetic oligonucleotide
cuguguaccuacccuuuug

SEQ ID NO: 803572 - RNA, 19 nt, Artificial Sequence
  Description of Artificial Sequence: Synthetic oligonucleotide
ugguacuugugaacucagu

SEQ ID NO: 803573 - RNA, 19 nt, Artificial Sequence
  Description of Artificial Sequence: Synthetic oligonucleotide
uccaugacuggcgguacug

SEQ ID NO: 803574 - RNA, 19 nt, Artificial Sequence
  Description of Artificial Sequence: Synthetic oligonucleotide
acagggcuugugcaccuag

SEQ ID NO: 803575 - RNA, 19 nt, Artificial Sequence
  Description of Artificial Sequence: Synthetic oligonucleotide
guacacaaucauacuggag

SEQ ID NO: 803576 - RNA, 19 nt, Artificial Sequence
  Description of Artificial Sequence: Synthetic oligonucleotide
uugaccugcuuggagguaa

SEQ ID NO: 803577 - RNA, 19 nt, Artificial Sequence
  Description of Artificial Sequence: Synthetic oligonucleotide
guacuuucugaagaaccac

SEQ ID NO: 803578 - RNA, 19 nt, Artificial Sequence
  Description of Artificial Sequence: Synthetic oligonucleotide
cuuacgaggucucugcugu

SEQ ID NO: 803579 - RNA, 19 nt, Artificial Sequence
  Description of Artificial Sequence: Synthetic oligonucleotide
cuacugguguuaucaaaga

SEQ ID NO: 803580 - RNA, 19 nt, Artificial Sequence
  Description of Artificial Sequence: Synthetic oligonucleotide
ucucguagggcuccuuauu

SEQ ID NO: 803581 - RNA, 19 nt, Artificial Sequence
  Description of Artificial Sequence: Synthetic oligonucleotide
acauuccuucgauggucuc

SEQ ID NO: 803582 - RNA, 19 nt, Artificial Sequence
  Description of Artificial Sequence: Synthetic oligonucleotide
auggacucaucugcuagug

SEQ ID NO: 803583 - RNA, 19 nt, Artificial Sequence
  Description of Artificial Sequence: Synthetic oligonucleotide
uagucguggucaauuucau

SEQ ID NO: 803584 - RNA, 19 nt, Artificial Sequence
  Description of Artificial Sequence: Synthetic oligonucleotide
ugugcaccuaguguacagu

SEQ ID NO: 803585 - RNA, 19 nt, Artificial Sequence
  Description of Artificial Sequence: Synthetic oligonucleotide
gguacacaaucauacugga

SEQ ID NO: 803586 - RNA, 19 nt, Artificial Sequence
  Description of Artificial Sequence: Synthetic oligonucleotide
acauaucugguugcuauuu

SEQ ID NO: 803587 - RNA, 19 nt, Artificial Sequence
  Description of Artificial Sequence: Synthetic oligonucleotide
guacgggaguuuuauaagu

SEQ ID NO: 803588 - RNA, 19 nt, Artificial Sequence
  Description of Artificial Sequence: Synthetic oligonucleotide
cuaggaugacgcccagcag

SEQ ID NO: 803589 - RNA, 19 nt, Artificial Sequence
  Description of Artificial Sequence: Synthetic oligonucleotide
caccuaguguacagucuag

SEQ ID NO: 803590 - RNA, 19 nt, Artificial Sequence
  Description of Artificial Sequence: Synthetic oligonucleotide
ugcacacugcgcucauucu

SEQ ID NO: 803591 - RNA, 19 nt, Artificial Sequence
  Description of Artificial Sequence: Synthetic oligonucleotide
aagugguucagcaggucua

SEQ ID NO: 803592 - RNA, 19 nt, Artificial Sequence
  Description of Artificial Sequence: Synthetic oligonucleotide
gugcaccuaguguacaguc

SEQ ID NO: 803593 - RNA, 19 nt, Artificial Sequence
  Description of Artificial Sequence: Synthetic oligonucleotide
agugcccgggccaacuuuc

SEQ ID NO: 803594 - RNA, 19 nt, Artificial Sequence
  Description of Artificial Sequence: Synthetic oligonucleotide
uucggcaaucugcaugcuu

SEQ ID NO: 803595 - RNA, 19 nt, Artificial Sequence
  Description of Artificial Sequence: Synthetic oligonucleotide
uucgauggucuccgaaauu

SEQ ID NO: 803596 - RNA, 19 nt, Artificial Sequence
  Description of Artificial Sequence: Synthetic oligonucleotide
uucaggcgccauguaguag

SEQ ID NO: 803597 - RNA, 19 nt, Artificial Sequence
  Description of Artificial Sequence: Synthetic oligonucleotide
cagcuucaccacucgacug

SEQ ID NO: 803598 - RNA, 19 nt, Artificial Sequence
  Description of Artificial Sequence: Synthetic oligonucleotide
uuccaugacuggcgguacu

SEQ ID NO: 803599 - RNA, 19 nt, Artificial Sequence
  Description of Artificial Sequence: Synthetic oligonucleotide
gguagauuggucucaggua

SEQ ID NO: 803600 - RNA, 19 nt, Artificial Sequence
  Description of Artificial Sequence: Synthetic oligonucleotide
gguaacuggcuuccucuug

SEQ ID NO: 803601 - RNA, 19 nt, Artificial Sequence
  Description of Artificial Sequence: Synthetic oligonucleotide
agaaagcgggacacugauc

SEQ ID NO: 803602 - RNA, 19 nt, Artificial Sequence
  Description of Artificial Sequence: Synthetic oligonucleotide
ggagcuaugcagcgaacca

SEQ ID NO: 803603 - RNA, 19 nt, Artificial Sequence
  Description of Artificial Sequence: Synthetic oligonucleotide
agguaaggguacacaauca

SEQ ID NO: 803604 - RNA, 19 nt, Artificial Sequence
  Description of Artificial Sequence: Synthetic oligonucleotide
ucagacuacugguguuauc

SEQ ID NO: 803605 - RNA, 19 nt, Artificial Sequence
  Description of Artificial Sequence: Synthetic oligonucleotide
ggugugcuguauuuccaug

SEQ ID NO: 803606 - RNA, 19 nt, Artificial Sequence
  Description of Artificial Sequence: Synthetic oligonucleotide
agggugccuccauucuuag

SEQ ID NO: 803607 - RNA, 19 nt, Artificial Sequence
  Description of Artificial Sequence: Synthetic oligonucleotide
gaugcggggcuugaacuga

SEQ ID NO: 803608 - RNA, 19 nt, Artificial Sequence
  Description of Artificial Sequence: Synthetic oligonucleotide
cagguagauuggucucagg

SEQ ID NO: 803609 - RNA, 19 nt, Artificial Sequence
  Description of Artificial Sequence: Synthetic oligonucleotide
gcaugcuuguacuuucuga

SEQ ID NO: 803610 - RNA, 19 nt, Artificial Sequence
  Description of Artificial Sequence: Synthetic oligonucleotide
accuaguguacagucuagu

SEQ ID NO: 803611 - RNA, 19 nt, Artificial Sequence
  Description of Artificial Sequence: Synthetic oligonucleotide
uuacgaggucucugcugug

SEQ ID NO: 803612 - RNA, 19 nt, Artificial Sequence
  Description of Artificial Sequence: Synthetic oligonucleotide
agguugcccuucuccaugu

SEQ ID NO: 803613 - RNA, 19 nt, Artificial Sequence
  Description of Artificial Sequence: Synthetic oligonucleotide
cuguaucaagugguucagc

SEQ ID NO: 803614 - RNA, 19 nt, Artificial Sequence
  Description of Artificial Sequence: Synthetic oligonucleotide
cugugcuuugaucuggaua

SEQ ID NO: 803615 - RNA, 19 nt, Artificial Sequence
  Description of Artificial Sequence: Synthetic oligonucleotide
accugaaguuccaaaccca

SEQ ID NO: 803616 - RNA, 19 nt, Artificial Sequence
  Description of Artificial Sequence: Synthetic oligonucleotide
cacuggucaagugcccggg

SEQ ID NO: 803617 - RNA, 19 nt, Artificial Sequence
  Description of Artificial Sequence: Synthetic oligonucleotide
gcgggugugcuguauuucc

SEQ ID NO: 803618 - RNA, 19 nt, Artificial Sequence
  Description of Artificial Sequence: Synthetic oligonucleotide
gcgaguaauucccuucuuc

SEQ ID NO: 803619 - RNA, 19 nt, Artificial Sequence
  Description of Artificial Sequence: Synthetic oligonucleotide
ugcccgggccaacuuuccc

SEQ ID NO: 803620 - RNA, 19 nt, Artificial Sequence
  Description of Artificial Sequence: Synthetic oligonucleotide
cguagggcuccuuauuugc

SEQ ID NO: 803621 - RNA, 19 nt, Artificial Sequence
  Description of Artificial Sequence: Synthetic oligonucleotide
gggaguuuuauaaguauua

SEQ ID NO: 803622 - RNA, 19 nt, Artificial Sequence
  Description of Artificial Sequence: Synthetic oligonucleotide
agcgggacacugaucucgg

SEQ ID NO: 803623 - RNA, 19 nt, Artificial Sequence
  Description of Artificial Sequence: Synthetic oligonucleotide
cucguucauagucgugguc

SEQ ID NO: 803624 - RNA, 19 nt, Artificial Sequence
  Description of Artificial Sequence: Synthetic oligonucleotide
gggagcuaugcagcgaacc

SEQ ID NO: 803625 - RNA, 19 nt, Artificial Sequence
  Description of Artificial Sequence: Synthetic oligonucleotide
acauucuuacgaggucucu

SEQ ID NO: 803626 - RNA, 19 nt, Artificial Sequence
  Description of Artificial Sequence: Synthetic oligonucleotide
agcccgcucaagcuuugcu

SEQ ID NO: 803627 - RNA, 19 nt, Artificial Sequence
  Description of Artificial Sequence: Synthetic oligonucleotide
auccuguaacacuggucaa

SEQ ID NO: 803628 - RNA, 19 nt, Artificial Sequence
  Description of Artificial Sequence: Synthetic oligonucleotide
gcagaugcggggcuugaac

SEQ ID NO: 803629 - RNA, 19 nt, Artificial Sequence
  Description of Artificial Sequence: Synthetic oligonucleotide
ggagcaaacagggcuugug

SEQ ID NO: 803630 - RNA, 19 nt, Artificial Sequence
  Description of Artificial Sequence: Synthetic oligonucleotide
acugcagaugcggggcuug

SEQ ID NO: 803631 - RNA, 19 nt, Artificial Sequence
  Description of Artificial Sequence: Synthetic oligonucleotide
ccuuuuacagaaagcggga

SEQ ID NO: 803632 - RNA, 19 nt, Artificial Sequence
  Description of Artificial Sequence: Synthetic oligonucleotide
agucuaguucccacugcca

SEQ ID NO: 803633 - RNA, 19 nt, Artificial Sequence
  Description of Artificial Sequence: Synthetic oligonucleotide
guacuugggagcugacucu

SEQ ID NO: 803634 - RNA, 19 nt, Artificial Sequence
  Description of Artificial Sequence: Synthetic oligonucleotide
caccuuacccaaagcccuc

SEQ ID NO: 803635 - RNA, 19 nt, Artificial Sequence
  Description of Artificial Sequence: Synthetic oligonucleotide
guccaagauccauauaauu

SEQ ID NO: 803636 - RNA, 19 nt, Artificial Sequence
  Description of Artificial Sequence: Synthetic oligonucleotide
ccagcgaguaauucccuuc

SEQ ID NO: 803637 - RNA, 19 nt, Artificial Sequence
  Description of Artificial Sequence: Synthetic oligonucleotide
gguaaggguacacaaucau

SEQ ID NO: 803638 - RNA, 19 nt, Artificial Sequence
  Description of Artificial Sequence: Synthetic oligonucleotide
gacgcccagcagcuucacc

SEQ ID NO: 803639 - RNA, 19 nt, Artificial Sequence
  Description of Artificial Sequence: Synthetic oligonucleotide
ugcggggcuugaacugaga

SEQ ID NO: 803640 - RNA, 19 nt, Artificial Sequence
  Description of Artificial Sequence: Synthetic oligonucleotide
cagaugcggggcuugaacu

SEQ ID NO: 803641 - RNA, 19 nt, Artificial Sequence
  Description of Artificial Sequence: Synthetic oligonucleotide
gcaggucuauccuguaaca

SEQ ID NO: 803642 - RNA, 19 nt, Artificial Sequence
  Description of Artificial Sequence: Synthetic oligonucleotide
caaugccaucucguagggc

SEQ ID NO: 803643 - RNA, 19 nt, Artificial Sequence
  Description of Artificial Sequence: Synthetic oligonucleotide
guagggcuccuuauuugca

SEQ ID NO: 803644 - RNA, 19 nt, Artificial Sequence
  Description of Artificial Sequence: Synthetic oligonucleotide
guucaggcgccauguagua

SEQ ID NO: 803645 - RNA, 19 nt, Artificial Sequence
  Description of Artificial Sequence: Synthetic oligonucleotide
cuaguggcaaggagaugaa

SEQ ID NO: 803646 - RNA, 19 nt, Artificial Sequence
  Description of Artificial Sequence: Synthetic oligonucleotide
cugucuagauucuuucuuu

SEQ ID NO: 803647 - RNA, 19 nt, Artificial Sequence
  Description of Artificial Sequence: Synthetic oligonucleotide
agcgaguaauucccuucuu

SEQ ID NO: 803648 - RNA, 19 nt, Artificial Sequence
  Description of Artificial Sequence: Synthetic oligonucleotide
gacauaucugguugcuauu

SEQ ID NO: 803649 - RNA, 19 nt, Artificial Sequence
  Description of Artificial Sequence: Synthetic oligonucleotide
cagcgaaccaggcuguucu

SEQ ID NO: 803650 - RNA, 19 nt, Artificial Sequence
  Description of Artificial Sequence: Synthetic oligonucleotide
gcaccuaguguacagucua

SEQ ID NO: 803651 - RNA, 19 nt, Artificial Sequence
  Description of Artificial Sequence: Synthetic oligonucleotide
ccugacaggguucaggugu

SEQ ID NO: 803652 - RNA, 19 nt, Artificial Sequence
  Description of Artificial Sequence: Synthetic oligonucleotide
gcacauuccuucgaugguc

SEQ ID NO: 803653 - RNA, 19 nt, Artificial Sequence
  Description of Artificial Sequence: Synthetic oligonucleotide
gaacucaguccaagaucca

SEQ ID NO: 803654 - RNA, 19 nt, Artificial Sequence
  Description of Artificial Sequence: Synthetic oligonucleotide
cuugugcaccuaguguaca

SEQ ID NO: 803655 - RNA, 19 nt, Artificial Sequence
  Description of Artificial Sequence: Synthetic oligonucleotide
ccugcgguugcucuggaga

SEQ ID NO: 803656 - RNA, 19 nt, Artificial Sequence
  Description of Artificial Sequence: Synthetic oligonucleotide
caugggagacccuucguuu

SEQ ID NO: 803657 - RNA, 19 nt, Artificial Sequence
  Description of Artificial Sequence: Synthetic oligonucleotide
ccaugacuuuuguggaaac

SEQ ID NO: 803658 - RNA, 19 nt, Artificial Sequence
  Description of Artificial Sequence: Synthetic oligonucleotide
cuucgauggucuccgaaau

SEQ ID NO: 803659 - RNA, 19 nt, Artificial Sequence
  Description of Artificial Sequence: Synthetic oligonucleotide
accacucgacugugucuca

SEQ ID NO: 803660 - RNA, 19 nt, Artificial Sequence
  Description of Artificial Sequence: Synthetic oligonucleotide
gacaggguucagguguuua

SEQ ID NO: 803661 - RNA, 19 nt, Artificial Sequence
  Description of Artificial Sequence: Synthetic oligonucleotide
acuugugaacucaguccaa

SEQ ID NO: 803662 - RNA, 19 nt, Artificial Sequence
  Description of Artificial Sequence: Synthetic oligonucleotide
aggacauaucugguugcua

SEQ ID NO: 803663 - RNA, 19 nt, Artificial Sequence
  Description of Artificial Sequence: Synthetic oligonucleotide
ccuucgauggucuccgaaa

SEQ ID NO: 803664 - RNA, 19 nt, Artificial Sequence
  Description of Artificial Sequence: Synthetic oligonucleotide
gacuggcgguacugggauc

SEQ ID NO: 803665 - RNA, 19 nt, Artificial Sequence
  Description of Artificial Sequence: Synthetic oligonucleotide
cucgacugugucucagucu

SEQ ID NO: 803666 - RNA, 19 nt, Artificial Sequence
  Description of Artificial Sequence: Synthetic oligonucleotide
ggcgguacugggaucagaa

SEQ ID NO: 803667 - RNA, 19 nt, Artificial Sequence
  Description of Artificial Sequence: Synthetic oligonucleotide
cagcgaguaauucccuucu

SEQ ID NO: 803668 - RNA, 19 nt, Artificial Sequence
  Description of Artificial Sequence: Synthetic oligonucleotide
gccauguaguagagggugc

SEQ ID NO: 803669 - RNA, 19 nt, Artificial Sequence
  Description of Artificial Sequence: Synthetic oligonucleotide
uggcgguacugggaucaga

SEQ ID NO: 803670 - RNA, 19 nt, Artificial Sequence
  Description of Artificial Sequence: Synthetic oligonucleotide
cucguagggcuccuuauuu

SEQ ID NO: 803671 - RNA, 19 nt, Artificial Sequence
  Description of Artificial Sequence: Synthetic oligonucleotide
augcggggcuugaacugag

SEQ ID NO: 803672 - RNA, 19 nt, Artificial Sequence
  Description of Artificial Sequence: Synthetic oligonucleotide
acacugcgcucauucucuu

SEQ ID NO: 803673 - RNA, 19 nt, Artificial Sequence
  Description of Artificial Sequence: Synthetic oligonucleotide
cuuacaccuuugucaugua

SEQ ID NO: 803674 - RNA, 19 nt, Artificial Sequence
  Description of Artificial Sequence: Synthetic oligonucleotide
cgaguaauucccuucuucu

SEQ ID NO: 803675 - RNA, 19 nt, Artificial Sequence
  Description of Artificial Sequence: Synthetic oligonucleotide
aacagggcuugugcaccua

SEQ ID NO: 803676 - RNA, 19 nt, Artificial Sequence
  Description of Artificial Sequence: Synthetic oligonucleotide
ccgcaucagccacuucugg

SEQ ID NO: 803677 - RNA, 19 nt, Artificial Sequence
  Description of Artificial Sequence: Synthetic oligonucleotide
ccaagagagccucauugua

SEQ ID NO: 803678 - RNA, 19 nt, Artificial Sequence
  Description of Artificial Sequence: Synthetic oligonucleotide
auucggcaaucugcaugcu

SEQ ID NO: 803679 - RNA, 19 nt, Artificial Sequence
  Description of Artificial Sequence: Synthetic oligonucleotide
gcgguugcucuggagagga

SEQ ID NO: 803680 - RNA, 19 nt, Artificial Sequence
  Description of Artificial Sequence: Synthetic oligonucleotide
ggcccugacagcgggugug

SEQ ID NO: 803681 - RNA, 19 nt, Artificial Sequence
  Description of Artificial Sequence: Synthetic oligonucleotide
cauguaguagagggugccu

SEQ ID NO: 803682 - RNA, 19 nt, Artificial Sequence
  Description of Artificial Sequence: Synthetic oligonucleotide
ccgaaauuauccuuccuuu

SEQ ID NO: 803683 - RNA, 19 nt, Artificial Sequence
  Description of Artificial Sequence: Synthetic oligonucleotide
cuggcgguacugggaucag

SEQ ID NO: 803684 - RNA, 19 nt, Artificial Sequence
  Description of Artificial Sequence: Synthetic oligonucleotide
cagguacgggaguuuuaua

SEQ ID NO: 803685 - RNA, 19 nt, Artificial Sequence
  Description of Artificial Sequence: Synthetic oligonucleotide
cggggcuugaacugagauc

SEQ ID NO: 803686 - RNA, 19 nt, Artificial Sequence
  Description of Artificial Sequence: Synthetic oligonucleotide
gcuuucccagguuuucccu

SEQ ID NO: 803687 - RNA, 19 nt, Artificial Sequence
  Description of Artificial Sequence: Synthetic oligonucleotide
ccugaaguuccaaacccau

SEQ ID NO: 803688 - RNA, 19 nt, Artificial Sequence
  Description of Artificial Sequence: Synthetic oligonucleotide
cucagcacgguugggcccu

SEQ ID NO: 803689 - RNA, 19 nt, Artificial Sequence
  Description of Artificial Sequence: Synthetic oligonucleotide
gucagacuacugguguuau

SEQ ID NO: 803690 - RNA, 19 nt, Artificial Sequence
  Description of Artificial Sequence: Synthetic oligonucleotide
ccuaguguacagucuaguu

SEQ ID NO: 803691 - RNA, 19 nt, Artificial Sequence
  Description of Artificial Sequence: Synthetic oligonucleotide
ccacucgacugugucucag

SEQ ID NO: 803692 - RNA, 19 nt, Artificial Sequence
  Description of Artificial Sequence: Synthetic oligonucleotide
cugacaggguucagguguu

SEQ ID NO: 803693 - RNA, 19 nt, Artificial Sequence
  Description of Artificial Sequence: Synthetic oligonucleotide
cagggcuugugcaccuagu

SEQ ID NO: 803694 - RNA, 19 nt, Artificial Sequence
  Description of Artificial Sequence: Synthetic oligonucleotide
gguguucaggcgccaugua

SEQ ID NO: 803695 - RNA, 19 nt, Artificial Sequence
  Description of Artificial Sequence: Synthetic oligonucleotide
ccgcucaagcuuugcucug

SEQ ID NO: 803696 - RNA, 19 nt, Artificial Sequence
  Description of Artificial Sequence: Synthetic oligonucleotide
gcgguacugggaucagaaa

SEQ ID NO: 803697 - RNA, 19 nt, Artificial Sequence
  Description of Artificial Sequence: Synthetic oligonucleotide
ccaucucguucauagucgu

SEQ ID NO: 803698 - RNA, 19 nt, Artificial Sequence
  Description of Artificial Sequence: Synthetic oligonucleotide
gcacgguugggcccugugu

SEQ ID NO: 803699 - RNA, 19 nt, Artificial Sequence
  Description of Artificial Sequence: Synthetic oligonucleotide
guugggcccuguguaccua

SEQ ID NO: 803700 - RNA, 19 nt, Artificial Sequence
  Description of Artificial Sequence: Synthetic oligonucleotide
gcccugacagcgggugugc

SEQ ID NO: 803701 - RNA, 19 nt, Artificial Sequence
  Description of Artificial Sequence: Synthetic oligonucleotide
gacagcgggugugcuguau

SEQ ID NO: 803702 - RNA, 19 nt, Artificial Sequence
  Description of Artificial Sequence: Synthetic oligonucleotide
gcggggcuugaacugagau

SEQ ID NO: 803703 - RNA, 19 nt, Artificial Sequence
  Description of Artificial Sequence: Synthetic oligonucleotide
gugugcuuccagguagauu

SEQ ID NO: 803704 - RNA, 19 nt, Artificial Sequence
  Description of Artificial Sequence: Synthetic oligonucleotide
cuggaaucccugggagcua

SEQ ID NO: 803705 - RNA, 19 nt, Artificial Sequence
  Description of Artificial Sequence: Synthetic oligonucleotide
cuucccgcaucagccacuu

SEQ ID NO: 803706 - RNA, 19 nt, Artificial Sequence
  Description of Artificial Sequence: Synthetic oligonucleotide
caagugcccgggccaacuu

SEQ ID NO: 803707 - RNA, 19 nt, Artificial Sequence
  Description of Artificial Sequence: Synthetic oligonucleotide
gggcuugaacugagaucga

SEQ ID NO: 803708 - RNA, 19 nt, Artificial Sequence
  Description of Artificial Sequence: Synthetic oligonucleotide
ccuguguaccuacccuuuu

SEQ ID NO: 803709 - RNA, 19 nt, Artificial Sequence
  Description of Artificial Sequence: Synthetic oligonucleotide
cgacugugucucagucugu

SEQ ID NO: 803710 - RNA, 19 nt, Artificial Sequence
  Description of Artificial Sequence: Synthetic oligonucleotide
ggaugacgcccagcagcuu

SEQ ID NO: 803711 - RNA, 19 nt, Artificial Sequence
  Description of Artificial Sequence: Synthetic oligonucleotide
cagcacgguugggcccugu

SEQ ID NO: 803712 - RNA, 19 nt, Artificial Sequence
  Description of Artificial Sequence: Synthetic oligonucleotide
cccagcuuucgggcacagu

SEQ ID NO: 803713 - RNA, 19 nt, Artificial Sequence
  Description of Artificial Sequence: Synthetic oligonucleotide
uuaaccuuagcucacaacg

SEQ ID NO: 803714 - RNA, 19 nt, Artificial Sequence
  Description of Artificial Sequence: Synthetic oligonucleotide
acuguuaugauccuuuucc

SEQ ID NO: 803715 - RNA, 19 nt, Artificial Sequence
  Description of Artificial Sequence: Synthetic oligonucleotide
aaauuuagcucucacccgc

SEQ ID NO: 803716 - RNA, 19 nt, Artificial Sequence
  Description of Artificial Sequence: Synthetic oligonucleotide
ucuauagucagcaaggagc

SEQ ID NO: 803717 - RNA, 19 nt, Artificial Sequence
  Description of Artificial Sequence: Synthetic oligonucleotide
uuuaauaacuguuccaugc

SEQ ID NO: 803718 - RNA, 19 nt, Artificial Sequence
  Description of Artificial Sequence: Synthetic oligonucleotide
ucuaaaagcuuuauuaaug

SEQ ID NO: 803719 - RNA, 19 nt, Artificial Sequence
  Description of Artificial Sequence: Synthetic oligonucleotide
aguaacuaguuauaguuac

SEQ ID NO: 803720 - RNA, 19 nt, Artificial Sequence
  Description of Artificial Sequence: Synthetic oligonucleotide
aauuucgcaaauauuuugc

SEQ ID NO: 803721 - RNA, 19 nt, Artificial Sequence
  Description of Artificial Sequence: Synthetic oligonucleotide
aguuauagaauucuccuuc

SEQ ID NO: 803722 - RNA, 19 nt, Artificial Sequence
  Description of Artificial Sequence: Synthetic oligonucleotide
agcuuuauuaaugucaggc

SEQ ID NO: 803723 - RNA, 19 nt, Artificial Sequence
  Description of Artificial Sequence: Synthetic oligonucleotide
aaugucaggcaguaaagag

SEQ ID NO: 803724 - RNA, 19 nt, Artificial Sequence
  Description of Artificial Sequence: Synthetic oligonucleotide
auagucuucugucugggcc

SEQ ID NO: 803725 - RNA, 19 nt, Artificial Sequence
  Description of Artificial Sequence: Synthetic oligonucleotide
aaauuucgcaaauauuuug

SEQ ID NO: 803726 - RNA, 19 nt, Artificial Sequence
  Description of Artificial Sequence: Synthetic oligonucleotide
gauuauagccguuccaccg

SEQ ID NO: 803727 - RNA, 19 nt, Artificial Sequence
  Description of Artificial Sequence: Synthetic oligonucleotide
agaauuuggaucuaaauuu

SEQ ID NO: 803728 - RNA, 19 nt, Artificial Sequence
  Description of Artificial Sequence: Synthetic oligonucleotide
  modified_base (18)..(18): a, c, u, g, unknown or other
aauguauugaggaauauna

SEQ ID NO: 803729 - RNA, 19 nt, Artificial Sequence
  Description of Artificial Sequence: Synthetic oligonucleotide
ucauauaugcuguuguaag

SEQ ID NO: 803730 - RNA, 19 nt, Artificial Sequence
  Description of Artificial Sequence: Synthetic oligonucleotide
aacuaguuauaguuacuac

SEQ ID NO: 803731 - RNA, 19 nt, Artificial Sequence
  Description of Artificial Sequence: Synthetic oligonucleotide
uccucaacgauuuucaugu

SEQ ID NO: 803732 - RNA, 19 nt, Artificial Sequence
  Description of Artificial Sequence: Synthetic oligonucleotide
auauaugcuguuguaaggc

SEQ ID NO: 803733 - RNA, 19 nt, Artificial Sequence
  Description of Artificial Sequence: Synthetic oligonucleotide
uccuguguaucuaacaaag

SEQ ID NO: 803734 - RNA, 19 nt, Artificial Sequence
  Description of Artificial Sequence: Synthetic oligonucleotide
cuaguuauaguuacuacug

SEQ ID NO: 803735 - RNA, 19 nt, Artificial Sequence
  Description of Artificial Sequence: Synthetic oligonucleotide
uuauaguuacuacuguccc

SEQ ID NO: 803736 - RNA, 19 nt, Artificial Sequence
  Description of Artificial Sequence: Synthetic oligonucleotide
acuaguuauaguuacuacu

SEQ ID NO: 803737 - RNA, 19 nt, Artificial Sequence
  Description of Artificial Sequence: Synthetic oligonucleotide
uuaauaacuguuccaugcc

SEQ ID NO: 803738 - RNA, 19 nt, Artificial Sequence
  Description of Artificial Sequence: Synthetic oligonucleotide
aauucuccuucacaccucg

SEQ ID NO: 803739 - RNA, 19 nt, Artificial Sequence
  Description of Artificial Sequence: Synthetic oligonucleotide
uuuacuguggaaaaugauu

SEQ ID NO: 803740 - RNA, 19 nt, Artificial Sequence
  Description of Artificial Sequence: Synthetic oligonucleotide
uaaauuuagcucucacccg

SEQ ID NO: 803741 - RNA, 19 nt, Artificial Sequence
  Description of Artificial Sequence: Synthetic oligonucleotide
auuccgaacaguaaugcgc

SEQ ID NO: 803742 - RNA, 19 nt, Artificial Sequence
  Description of Artificial Sequence: Synthetic oligonucleotide
guuaaauuuagcucucacc

SEQ ID NO: 803743 - RNA, 19 nt, Artificial Sequence
  Description of Artificial Sequence: Synthetic oligonucleotide
uguuguaaggccucuuccg

SEQ ID NO: 803744 - RNA, 19 nt, Artificial Sequence
  Description of Artificial Sequence: Synthetic oligonucleotide
auaggcagaauuuggaucu

SEQ ID NO: 803745 - RNA, 19 nt, Artificial Sequence
  Description of Artificial Sequence: Synthetic oligonucleotide
acaauaggaauacuugaag

SEQ ID NO: 803746 - RNA, 19 nt, Artificial Sequence
  Description of Artificial Sequence: Synthetic oligonucleotide
ucaacgauuuucaugugcu

SEQ ID NO: 803747 - RNA, 19 nt, Artificial Sequence
  Description of Artificial Sequence: Synthetic oligonucleotide
auuucgcaaauauuuugcg

SEQ ID NO: 803748 - RNA, 19 nt, Artificial Sequence
  Description of Artificial Sequence: Synthetic oligonucleotide
gaaccgaagaaauguauug

SEQ ID NO: 803749 - RNA, 19 nt, Artificial Sequence
  Description of Artificial Sequence: Synthetic oligonucleotide
cuauagucagcaaggagcc

SEQ ID NO: 803750 - RNA, 19 nt, Artificial Sequence
  Description of Artificial Sequence: Synthetic oligonucleotide
cauauaugcuguuguaagg

SEQ ID NO: 803751 - RNA, 19 nt, Artificial Sequence
  Description of Artificial Sequence: Synthetic oligonucleotide
  modified_base (6)..(6): a, c, u, g, unknown or other
aauaunaggguuggauguc

SEQ ID NO: 803752 - RNA, 19 nt, Artificial Sequence
  Description of Artificial Sequence: Synthetic oligonucleotide
  modified_base (7)..(7): a, c, u, g, unknown or other
gaauaunaggguuggaugu

SEQ ID NO: 803753 - RNA, 19 nt, Artificial Sequence
  Description of Artificial Sequence: Synthetic oligonucleotide
ugagauuccgaacaguaau

SEQ ID NO: 803754 - RNA, 19 nt, Artificial Sequence
  Description of Artificial Sequence: Synthetic oligonucleotide
agcauaacucacuucaucu

SEQ ID NO: 803755 - RNA, 19 nt, Artificial Sequence
  Description of Artificial Sequence: Synthetic oligonucleotide
agaggcuaacucuucuugc

SEQ ID NO: 803756 - RNA, 19 nt, Artificial Sequence
  Description of Artificial Sequence: Synthetic oligonucleotide
uuuacagauucuucgccag

SEQ ID NO: 803757 - RNA, 19 nt, Artificial Sequence
  Description of Artificial Sequence: Synthetic oligonucleotide
uucgcaaauauuuugcgau

SEQ ID NO: 803758 - RNA, 19 nt, Artificial Sequence
  Description of Artificial Sequence: Synthetic oligonucleotide
guuauaguuacuacugucc

SEQ ID NO: 803759 - RNA, 19 nt, Artificial Sequence
  Description of Artificial Sequence: Synthetic oligonucleotide
aguaaugcgccucuuugag

SEQ ID NO: 803760 - RNA, 19 nt, Artificial Sequence
  Description of Artificial Sequence: Synthetic oligonucleotide
uguaucuacagcugcggcc

SEQ ID NO: 803761 - RNA, 19 nt, Artificial Sequence
  Description of Artificial Sequence: Synthetic oligonucleotide
aaugaguggcaacauuugu

SEQ ID NO: 803762 - RNA, 19 nt, Artificial Sequence
  Description of Artificial Sequence: Synthetic oligonucleotide
ugcgauaucuucucgaauc

SEQ ID NO: 803763 - RNA, 19 nt, Artificial Sequence
  Description of Artificial Sequence: Synthetic oligonucleotide
aacgguacucucuuucuug

SEQ ID NO: 803764 - RNA, 19 nt, Artificial Sequence
  Description of Artificial Sequence: Synthetic oligonucleotide
ugcauuggcauaaggauuc

SEQ ID NO: 803765 - RNA, 19 nt, Artificial Sequence
  Description of Artificial Sequence: Synthetic oligonucleotide
caggcaguaaagaggaugg

SEQ ID NO: 803766 - RNA, 19 nt, Artificial Sequence
  Description of Artificial Sequence: Synthetic oligonucleotide
gauuccgaacaguaaugcg

SEQ ID NO: 803767 - RNA, 19 nt, Artificial Sequence
  Description of Artificial Sequence: Synthetic oligonucleotide
ucuucucgaauccugagau

SEQ ID NO: 803768 - RNA, 19 nt, Artificial Sequence
  Description of Artificial Sequence: Synthetic oligonucleotide
auuuguauccccaccggcc

SEQ ID NO: 803769 - RNA, 19 nt, Artificial Sequence
  Description of Artificial Sequence: Synthetic oligonucleotide
auuauagccguuccaccgg

SEQ ID NO: 803770 - RNA, 19 nt, Artificial Sequence
  Description of Artificial Sequence: Synthetic oligonucleotide
uuaacacucuccuucccag

SEQ ID NO: 803771 - RNA, 19 nt, Artificial Sequence
  Description of Artificial Sequence: Synthetic oligonucleotide
uuaucuccagcauaacuca

SEQ ID NO: 803772 - RNA, 19 nt, Artificial Sequence
  Description of Artificial Sequence: Synthetic oligonucleotide
uucuauagucagcaaggag

SEQ ID NO: 803773 - RNA, 19 nt, Artificial Sequence
  Description of Artificial Sequence: Synthetic oligonucleotide
auaguuacuacugucccag

SEQ ID NO: 803774 - RNA, 19 nt, Artificial Sequence
  Description of Artificial Sequence: Synthetic oligonucleotide
uuccgaacaguaaugcgcc

SEQ ID NO: 803775 - RNA, 19 nt, Artificial Sequence
  Description of Artificial Sequence: Synthetic oligonucleotide
auaucauccgcguauuugu

SEQ ID NO: 803776 - RNA, 19 nt, Artificial Sequence
  Description of Artificial Sequence: Synthetic oligonucleotide
aacaauuguguuugagcca

SEQ ID NO: 803777 - RNA, 19 nt, Artificial Sequence
  Description of Artificial Sequence: Synthetic oligonucleotide
uuaauuuuccagaggcuaa

SEQ ID NO: 803778 - RNA, 19 nt, Artificial Sequence
  Description of Artificial Sequence: Synthetic oligonucleotide
uauaugcuguuguaaggcc

SEQ ID NO: 803779 - RNA, 19 nt, Artificial Sequence
  Description of Artificial Sequence: Synthetic oligonucleotide
gaccuuuaauaacuguucc

SEQ ID NO: 803780 - RNA, 19 nt, Artificial Sequence
  Description of Artificial Sequence: Synthetic oligonucleotide
uaauaacuguuccaugccu

SEQ ID NO: 803781 - RNA, 19 nt, Artificial Sequence
  Description of Artificial Sequence: Synthetic oligonucleotide
uaaugcgccucuuugaguc

SEQ ID NO: 803782 - RNA, 19 nt, Artificial Sequence
  Description of Artificial Sequence: Synthetic oligonucleotide
ucuaaauuucgcaaauauu

SEQ ID NO: 803783 - RNA, 19 nt, Artificial Sequence
  Description of Artificial Sequence: Synthetic oligonucleotide
ccauuaauuuuccagaggc

SEQ ID NO: 803784 - RNA, 19 nt, Artificial Sequence
  Description of Artificial Sequence: Synthetic oligonucleotide
aguucguuuugccagguca

SEQ ID NO: 803785 - RNA, 19 nt, Artificial Sequence
  Description of Artificial Sequence: Synthetic oligonucleotide
aauaacuguuccaugccug

SEQ ID NO: 803786 - RNA, 19 nt, Artificial Sequence
  Description of Artificial Sequence: Synthetic oligonucleotide
ucuccuguguaucuaacaa

SEQ ID NO: 803787 - RNA, 19 nt, Artificial Sequence
  Description of Artificial Sequence: Synthetic oligonucleotide
uuggaucuaaauuucgcaa

SEQ ID NO: 803788 - RNA, 19 nt, Artificial Sequence
  Description of Artificial Sequence: Synthetic oligonucleotide
uuucgcaaauauuuugcga

SEQ ID NO: 803789 - RNA, 19 nt, Artificial Sequence
  Description of Artificial Sequence: Synthetic oligonucleotide
ucccauuaauuuuccagag

SEQ ID NO: 803790 - RNA, 19 nt, Artificial Sequence
  Description of Artificial Sequence: Synthetic oligonucleotide
gauaucauccgcguauuug

SEQ ID NO: 803791 - RNA, 19 nt, Artificial Sequence
  Description of Artificial Sequence: Synthetic oligonucleotide
guacucucuuucuuguucg

SEQ ID NO: 803792 - RNA, 19 nt, Artificial Sequence
  Description of Artificial Sequence: Synthetic oligonucleotide
aguuaucuccagcauaacu

SEQ ID NO: 803793 - RNA, 19 nt, Artificial Sequence
  Description of Artificial Sequence: Synthetic oligonucleotide
ucccaagcgaacaauugug

SEQ ID NO: 803794 - RNA, 19 nt, Artificial Sequence
  Description of Artificial Sequence: Synthetic oligonucleotide
guaucuacagcugcggccg

SEQ ID NO: 803795 - RNA, 19 nt, Artificial Sequence
  Description of Artificial Sequence: Synthetic oligonucleotide
guuugagguuucuuuacag

SEQ ID NO: 803796 - RNA, 19 nt, Artificial Sequence
  Description of Artificial Sequence: Synthetic oligonucleotide
aauuuagcucucacccgcc

SEQ ID NO: 803797 - RNA, 19 nt, Artificial Sequence
  Description of Artificial Sequence: Synthetic oligonucleotide
uauaguuacuacuguccca

SEQ ID NO: 803798 - RNA, 19 nt, Artificial Sequence
  Description of Artificial Sequence: Synthetic oligonucleotide
aauuguguuugagccauug

SEQ ID NO: 803799 - RNA, 19 nt, Artificial Sequence
  Description of Artificial Sequence: Synthetic oligonucleotide
  modified_base (8)..(8): a, c, u, g, unknown or other
ggaauaunaggguuggaug

SEQ ID NO: 803800 - RNA, 19 nt, Artificial Sequence
  Description of Artificial Sequence: Synthetic oligonucleotide
uauuuugcgauaucuucuc

SEQ ID NO: 803801 - RNA, 19 nt, Artificial Sequence
  Description of Artificial Sequence: Synthetic oligonucleotide
uccaguacaauaggaauac

SEQ ID NO: 803802 - RNA, 19 nt, Artificial Sequence
  Description of Artificial Sequence: Synthetic oligonucleotide
gauguuagugcuucguuaa

SEQ ID NO: 803803 - RNA, 19 nt, Artificial Sequence
  Description of Artificial Sequence: Synthetic oligonucleotide
cuuccgcucaucaaucugc

SEQ ID NO: 803804 - RNA, 19 nt, Artificial Sequence
  Description of Artificial Sequence: Synthetic oligonucleotide
aguuaacacucuccuuccc

SEQ ID NO: 803805 - RNA, 19 nt, Artificial Sequence
  Description of Artificial Sequence: Synthetic oligonucleotide
guaucuaacaaaguuaucu

SEQ ID NO: 803806 - RNA, 19 nt, Artificial Sequence
  Description of Artificial Sequence: Synthetic oligonucleotide
gaucauaauaggcagaauu

SEQ ID NO: 803807 - RNA, 19 nt, Artificial Sequence
  Description of Artificial Sequence: Synthetic oligonucleotide
ucuccaguacaauaggaau

SEQ ID NO: 803808 - RNA, 19 nt, Artificial Sequence
  Description of Artificial Sequence: Synthetic oligonucleotide
cauacuuggagcaggccac

SEQ ID NO: 803809 - RNA, 19 nt, Artificial Sequence
  Description of Artificial Sequence: Synthetic oligonucleotide
cucaacgauuuucaugugc

SEQ ID NO: 803810 - RNA, 19 nt, Artificial Sequence
  Description of Artificial Sequence: Synthetic oligonucleotide
auuaauuuuccagaggcua

SEQ ID NO: 803811 - RNA, 19 nt, Artificial Sequence
  Description of Artificial Sequence: Synthetic oligonucleotide
uggauuauagccguuccac

SEQ ID NO: 803812 - RNA, 19 nt, Artificial Sequence
  Description of Artificial Sequence: Synthetic oligonucleotide
uugguaguuauagaauucu

SEQ ID NO: 803813 - RNA, 19 nt, Artificial Sequence
  Description of Artificial Sequence: Synthetic oligonucleotide
cuucguuaaauuuagcucu

SEQ ID NO: 803814 - RNA, 19 nt, Artificial Sequence
  Description of Artificial Sequence: Synthetic oligonucleotide
uucucgaauccugagauuc

SEQ ID NO: 803815 - RNA, 19 nt, Artificial Sequence
  Description of Artificial Sequence: Synthetic oligonucleotide
ccaagucuaauugaaaugg

SEQ ID NO: 803816 - RNA, 19 nt, Artificial Sequence
  Description of Artificial Sequence: Synthetic oligonucleotide
caaaguucguuuugccagg

SEQ ID NO: 803817 - RNA, 19 nt, Artificial Sequence
  Description of Artificial Sequence: Synthetic oligonucleotide
uggacaaggaucuucuaua

SEQ ID NO: 803818 - RNA, 19 nt, Artificial Sequence
  Description of Artificial Sequence: Synthetic oligonucleotide
aauuagcuuguucccauua

SEQ ID NO: 803819 - RNA, 19 nt, Artificial Sequence
  Description of Artificial Sequence: Synthetic oligonucleotide
cauuccucugaguuaacac

SEQ ID NO: 803820 - RNA, 19 nt, Artificial Sequence
  Description of Artificial Sequence: Synthetic oligonucleotide
uuugcgauaucuucucgaa

SEQ ID NO: 803821 - RNA, 19 nt, Artificial Sequence
  Description of Artificial Sequence: Synthetic oligonucleotide
uuuaaccuuagcucacaac

SEQ ID NO: 803822 - RNA, 19 nt, Artificial Sequence
  Description of Artificial Sequence: Synthetic oligonucleotide
uuacuacugucccaggaaa

SEQ ID NO: 803823 - RNA, 19 nt, Artificial Sequence
  Description of Artificial Sequence: Synthetic oligonucleotide
cuugguaguuauagaauuc

SEQ ID NO: 803824 - RNA, 19 nt, Artificial Sequence
  Description of Artificial Sequence: Synthetic oligonucleotide
guaguuauagaauucuccu

SEQ ID NO: 803825 - RNA, 19 nt, Artificial Sequence
  Description of Artificial Sequence: Synthetic oligonucleotide
agaauuggguuccucuucu

SEQ ID NO: 803826 - RNA, 19 nt, Artificial Sequence
  Description of Artificial Sequence: Synthetic oligonucleotide
aaccgaagaaauguauuga

SEQ ID NO: 803827 - RNA, 19 nt, Artificial Sequence
  Description of Artificial Sequence: Synthetic oligonucleotide
uuagcuuguucccauuaau

SEQ ID NO: 803828 - RNA, 19 nt, Artificial Sequence
  Description of Artificial Sequence: Synthetic oligonucleotide
ucccggguuucauauaugc

SEQ ID NO: 803829 - RNA, 19 nt, Artificial Sequence
  Description of Artificial Sequence: Synthetic oligonucleotide
uccaguaacuaguuauagu

SEQ ID NO: 803830 - RNA, 19 nt, Artificial Sequence
  Description of Artificial Sequence: Synthetic oligonucleotide
gguaguuauagaauucucc

SEQ ID NO: 803831 - RNA, 19 nt, Artificial Sequence
  Description of Artificial Sequence: Synthetic oligonucleotide
uaacuaguuauaguuacua

SEQ ID NO: 803832 - RNA, 19 nt, Artificial Sequence
  Description of Artificial Sequence: Synthetic oligonucleotide
auccaaguguucuuggcca

SEQ ID NO: 803833 - RNA, 19 nt, Artificial Sequence
  Description of Artificial Sequence: Synthetic oligonucleotide
aguuccaugaggguuugag

SEQ ID NO: 803834 - RNA, 19 nt, Artificial Sequence
  Description of Artificial Sequence: Synthetic oligonucleotide
ucauaggcuucccaagcga

SEQ ID NO: 803835 - RNA, 19 nt, Artificial Sequence
  Description of Artificial Sequence: Synthetic oligonucleotide
uaucuucucgaauccugag

SEQ ID NO: 803836 - RNA, 19 nt, Artificial Sequence
  Description of Artificial Sequence: Synthetic oligonucleotide
  modified_base (9)..(9): a, c, u, g, unknown or other
aggaauaunaggguuggau

SEQ ID NO: 803837 - RNA, 19 nt, Artificial Sequence
  Description of Artificial Sequence: Synthetic oligonucleotide
aguuacuacugucccagga

SEQ ID NO: 803838 - RNA, 19 nt, Artificial Sequence
  Description of Artificial Sequence: Synthetic oligonucleotide
cucucacccgccuuggccg

SEQ ID NO: 803839 - RNA, 19 nt, Artificial Sequence
  Description of Artificial Sequence: Synthetic oligonucleotide
uaaugucaggcaguaaaga

SEQ ID NO: 803840 - RNA, 19 nt, Artificial Sequence
  Description of Artificial Sequence: Synthetic oligonucleotide
uuggaucauaauaggcaga

SEQ ID NO: 803841 - RNA, 19 nt, Artificial Sequence
  Description of Artificial Sequence: Synthetic oligonucleotide
auaggaauacuugaagaau

SEQ ID NO: 803842 - RNA, 19 nt, Artificial Sequence
  Description of Artificial Sequence: Synthetic oligonucleotide
cauuuguauccccaccggc

SEQ ID NO: 803843 - RNA, 19 nt, Artificial Sequence
  Description of Artificial Sequence: Synthetic oligonucleotide
aagucuaauugaaauggau

SEQ ID NO: 803844 - RNA, 19 nt, Artificial Sequence
  Description of Artificial Sequence: Synthetic oligonucleotide
gaauccugagauuccgaac

SEQ ID NO: 803845 - RNA, 19 nt, Artificial Sequence
  Description of Artificial Sequence: Synthetic oligonucleotide
ucucgaauccugagauucc

SEQ ID NO: 803846 - RNA, 19 nt, Artificial Sequence
  Description of Artificial Sequence: Synthetic oligonucleotide
gaaugaguggcaacauuug

SEQ ID NO: 803847 - RNA, 19 nt, Artificial Sequence
  Description of Artificial Sequence: Synthetic oligonucleotide
auggacaaggaucuucuau

SEQ ID NO: 803848 - RNA, 19 nt, Artificial Sequence
  Description of Artificial Sequence: Synthetic oligonucleotide
ucuaauugaaauggaugau

SEQ ID NO: 803849 - RNA, 19 nt, Artificial Sequence
  Description of Artificial Sequence: Synthetic oligonucleotide
ugucggaacugcucuuccg

SEQ ID NO: 803850 - RNA, 19 nt, Artificial Sequence
  Description of Artificial Sequence: Synthetic oligonucleotide
acaauuguguuugagccau

SEQ ID NO: 803851 - RNA, 19 nt, Artificial Sequence
  Description of Artificial Sequence: Synthetic oligonucleotide
ugugucauggccccacaau

SEQ ID NO: 803852 - RNA, 19 nt, Artificial Sequence
  Description of Artificial Sequence: Synthetic oligonucleotide
aggauucucucucaucgcu

SEQ ID NO: 803853 - RNA, 19 nt, Artificial Sequence
  Description of Artificial Sequence: Synthetic oligonucleotide
uucguuaaauuuagcucuc

SEQ ID NO: 803854 - RNA, 19 nt, Artificial Sequence
  Description of Artificial Sequence: Synthetic oligonucleotide
gcuucguuaaauuuagcuc

SEQ ID NO: 803855 - RNA, 19 nt, Artificial Sequence
  Description of Artificial Sequence: Synthetic oligonucleotide
aaggacuuauacagcagcu

SEQ ID NO: 803856 - RNA, 19 nt, Artificial Sequence
  Description of Artificial Sequence: Synthetic oligonucleotide
uggcauuaacuguaucuac

SEQ ID NO: 803857 - RNA, 19 nt, Artificial Sequence
  Description of Artificial Sequence: Synthetic oligonucleotide
ugguaguuauagaauucuc

SEQ ID NO: 803858 - RNA, 19 nt, Artificial Sequence
  Description of Artificial Sequence: Synthetic oligonucleotide
aggacuuauacagcagcuc

SEQ ID NO: 803859 - RNA, 19 nt, Artificial Sequence
  Description of Artificial Sequence: Synthetic oligonucleotide
ugccuggagauguacuuca

SEQ ID NO: 803860 - RNA, 19 nt, Artificial Sequence
  Description of Artificial Sequence: Synthetic oligonucleotide
gaaaaugauuuugagacuu

SEQ ID NO: 803861 - RNA, 19 nt, Artificial Sequence
  Description of Artificial Sequence: Synthetic oligonucleotide
aucauaauaggcagaauuu

SEQ ID NO: 803862 - RNA, 19 nt, Artificial Sequence
  Description of Artificial Sequence: Synthetic oligonucleotide
acaacgguacucucuuucu

SEQ ID NO: 803863 - RNA, 19 nt, Artificial Sequence
  Description of Artificial Sequence: Synthetic oligonucleotide
caucugagaauuggguucc

SEQ ID NO: 803864 - RNA, 19 nt, Artificial Sequence
  Description of Artificial Sequence: Synthetic oligonucleotide
ggcaugucgauaucauccg

SEQ ID NO: 803865 - RNA, 19 nt, Artificial Sequence
  Description of Artificial Sequence: Synthetic oligonucleotide
uuauagccguuccaccggu

SEQ ID NO: 803866 - RNA, 19 nt, Artificial Sequence
  Description of Artificial Sequence: Synthetic oligonucleotide
auaauacauuccucugagu

SEQ ID NO: 803867 - RNA, 19 nt, Artificial Sequence
  Description of Artificial Sequence: Synthetic oligonucleotide
aaauucugccccggcaugu

SEQ ID NO: 803868 - RNA, 19 nt, Artificial Sequence
  Description of Artificial Sequence: Synthetic oligonucleotide
ccauacuuuuccaggaugc

SEQ ID NO: 803869 - RNA, 19 nt, Artificial Sequence
  Description of Artificial Sequence: Synthetic oligonucleotide
uaugauccuuuuccaucug

SEQ ID NO: 803870 - RNA, 19 nt, Artificial Sequence
  Description of Artificial Sequence: Synthetic oligonucleotide
cucgaauccugagauuccg

SEQ ID NO: 803871 - RNA, 19 nt, Artificial Sequence
  Description of Artificial Sequence: Synthetic oligonucleotide
guuacuacugucccaggaa

SEQ ID NO: 803872 - RNA, 19 nt, Artificial Sequence
  Description of Artificial Sequence: Synthetic oligonucleotide
ggacaaggaucuucuauag

SEQ ID NO: 803873 - RNA, 19 nt, Artificial Sequence
  Description of Artificial Sequence: Synthetic oligonucleotide
cagaggcuaacucuucuug

SEQ ID NO: 803874 - RNA, 19 nt, Artificial Sequence
  Description of Artificial Sequence: Synthetic oligonucleotide
augucgauaucauccgcgu

SEQ ID NO: 803875 - RNA, 19 nt, Artificial Sequence
  Description of Artificial Sequence: Synthetic oligonucleotide
uuacagauucuucgccagu

SEQ ID NO: 803876 - RNA, 19 nt, Artificial Sequence
  Description of Artificial Sequence: Synthetic oligonucleotide
cacaacgguacucucuuuc

SEQ ID NO: 803877 - RNA, 19 nt, Artificial Sequence
  Description of Artificial Sequence: Synthetic oligonucleotide
cauggggucaucuggccuc

SEQ ID NO: 803878 - RNA, 19 nt, Artificial Sequence
  Description of Artificial Sequence: Synthetic oligonucleotide
ccgaagaaauguauugagg

SEQ ID NO: 803879 - RNA, 19 nt, Artificial Sequence
  Description of Artificial Sequence: Synthetic oligonucleotide
ugucauggccccacaauuu

SEQ ID NO: 803880 - RNA, 19 nt, Artificial Sequence
  Description of Artificial Sequence: Synthetic oligonucleotide
  modified_base (5)..(5): a, c, u, g, unknown or other
auaunaggguuggaugucu

SEQ ID NO: 803881 - RNA, 19 nt, Artificial Sequence
  Description of Artificial Sequence: Synthetic oligonucleotide
ggagccggaaugaacaucc

SEQ ID NO: 803882 - RNA, 19 nt, Artificial Sequence
  Description of Artificial Sequence: Synthetic oligonucleotide
  modified_base (4)..(4): a, c, u, g, unknown or other
uaunaggguuggaugucuu

SEQ ID NO: 803883 - RNA, 19 nt, Artificial Sequence
  Description of Artificial Sequence: Synthetic oligonucleotide
cagaucccuugucauaggc

SEQ ID NO: 803884 - RNA, 19 nt, Artificial Sequence
  Description of Artificial Sequence: Synthetic oligonucleotide
uguuccaugccuggaguac

SEQ ID NO: 803885 - RNA, 19 nt, Artificial Sequence
  Description of Artificial Sequence: Synthetic oligonucleotide
aaugcgccucuuugaguca

SEQ ID NO: 803886 - RNA, 19 nt, Artificial Sequence
  Description of Artificial Sequence: Synthetic oligonucleotide
cuguaucuacagcugcggc

SEQ ID NO: 803887 - RNA, 19 nt, Artificial Sequence
  Description of Artificial Sequence: Synthetic oligonucleotide
uaucauccgcguauuuguc

SEQ ID NO: 803888 - RNA, 19 nt, Artificial Sequence
  Description of Artificial Sequence: Synthetic oligonucleotide
ucauccgcguauuugucuu

SEQ ID NO: 803889 - RNA, 19 nt, Artificial Sequence
  Description of Artificial Sequence: Synthetic oligonucleotide
  modified_base (2)..(2): a, c, u, g, unknown or other
unaggguuggaugucuuuu

SEQ ID NO: 803890 - RNA, 19 nt, Artificial Sequence
  Description of Artificial Sequence: Synthetic oligonucleotide
uuccgcucaucaaucugca

SEQ ID NO: 803891 - RNA, 19 nt, Artificial Sequence
  Description of Artificial Sequence: Synthetic oligonucleotide
ggauuauagccguuccacc

SEQ ID NO: 803892 - RNA, 19 nt, Artificial Sequence
  Description of Artificial Sequence: Synthetic oligonucleotide
aggguuugagguuucuuua

SEQ ID NO: 803893 - RNA, 19 nt, Artificial Sequence
  Description of Artificial Sequence: Synthetic oligonucleotide
ugcauugcccaauuuucuu

SEQ ID NO: 803894 - RNA, 19 nt, Artificial Sequence
  Description of Artificial Sequence: Synthetic oligonucleotide
ucgaauccugagauuccga

SEQ ID NO: 803895 - RNA, 19 nt, Artificial Sequence
  Description of Artificial Sequence: Synthetic oligonucleotide
ucugccguuucauucugua

SEQ ID NO: 803896 - RNA, 19 nt, Artificial Sequence
  Description of Artificial Sequence: Synthetic oligonucleotide
acgguacucucuuucuugu

SEQ ID NO: 803897 - RNA, 19 nt, Artificial Sequence
  Description of Artificial Sequence: Synthetic oligonucleotide
gguacucucuuucuuguuc

SEQ ID NO: 803898 - RNA, 19 nt, Artificial Sequence
  Description of Artificial Sequence: Synthetic oligonucleotide
gcucuaauuuuguaggauc

SEQ ID NO: 803899 - RNA, 19 nt, Artificial Sequence
  Description of Artificial Sequence: Synthetic oligonucleotide
auaugcuguuguaaggccu

SEQ ID NO: 803900 - RNA, 19 nt, Artificial Sequence
  Description of Artificial Sequence: Synthetic oligonucleotide
caagucuaauugaaaugga

SEQ ID NO: 803901 - RNA, 19 nt, Artificial Sequence
  Description of Artificial Sequence: Synthetic oligonucleotide
ucccuugucauaggcuucc

SEQ ID NO: 803902 - RNA, 19 nt, Artificial Sequence
  Description of Artificial Sequence: Synthetic oligonucleotide
aaaguucguuuugccaggu

SEQ ID NO: 803903 - RNA, 19 nt, Artificial Sequence
  Description of Artificial Sequence: Synthetic oligonucleotide
ucaucgucgcugucggaac

SEQ ID NO: 803904 - RNA, 19 nt, Artificial Sequence
  Description of Artificial Sequence: Synthetic oligonucleotide
ucggaaccgaagaaaugua

SEQ ID NO: 803905 - RNA, 19 nt, Artificial Sequence
  Description of Artificial Sequence: Synthetic oligonucleotide
ucgcaaauauuuugcgaua

SEQ ID NO: 803906 - RNA, 19 nt, Artificial Sequence
  Description of Artificial Sequence: Synthetic oligonucleotide
aaggagccggaaugaacau

SEQ ID NO: 803907 - RNA, 19 nt, Artificial Sequence
  Description of Artificial Sequence: Synthetic oligonucleotide
cuguuaugauccuuuucca

SEQ ID NO: 803908 - RNA, 19 nt, Artificial Sequence
  Description of Artificial Sequence: Synthetic oligonucleotide
gacccugacaugggugugg

SEQ ID NO: 803909 - RNA, 19 nt, Artificial Sequence
  Description of Artificial Sequence: Synthetic oligonucleotide
uucugccccggcaugucga

SEQ ID NO: 803910 - RNA, 19 nt, Artificial Sequence
  Description of Artificial Sequence: Synthetic oligonucleotide
gaaugaacauccuguguau

SEQ ID NO: 803911 - RNA, 19 nt, Artificial Sequence
  Description of Artificial Sequence: Synthetic oligonucleotide
  modified_base (3)..(3): a, c, u, g, unknown or other
aunaggguuggaugucuuu

SEQ ID NO: 803912 - RNA, 19 nt, Artificial Sequence
  Description of Artificial Sequence: Synthetic oligonucleotide
aaggcgggccuccucugca

SEQ ID NO: 803913 - RNA, 19 nt, Artificial Sequence
  Description of Artificial Sequence: Synthetic oligonucleotide
gucgauaucauccgcguau

SEQ ID NO: 803914 - RNA, 19 nt, Artificial Sequence
  Description of Artificial Sequence: Synthetic oligonucleotide
uugcgauaucuucucgaau

SEQ ID NO: 803915 - RNA, 19 nt, Artificial Sequence
  Description of Artificial Sequence: Synthetic oligonucleotide
gaugugcgugugguugugg

SEQ ID NO: 803916 - RNA, 19 nt, Artificial Sequence
  Description of Artificial Sequence: Synthetic oligonucleotide
cacaccucggaaccgaaga

SEQ ID NO: 803917 - RNA, 19 nt, Artificial Sequence
  Description of Artificial Sequence: Synthetic oligonucleotide
gcgauaucuucucgaaucc

SEQ ID NO: 803918 - RNA, 19 nt, Artificial Sequence
  Description of Artificial Sequence: Synthetic oligonucleotide
ucggaacugcucuuccggu

SEQ ID NO: 803919 - RNA, 19 nt, Artificial Sequence
  Description of Artificial Sequence: Synthetic oligonucleotide
ccuuagcucacaacgguac

SEQ ID NO: 803920 - RNA, 19 nt, Artificial Sequence
  Description of Artificial Sequence: Synthetic oligonucleotide
ucguuaaauuuagcucuca

SEQ ID NO: 803921 - RNA, 19 nt, Artificial Sequence
  Description of Artificial Sequence: Synthetic oligonucleotide
cuccugaccuuuaauaacu

SEQ ID NO: 803922 - RNA, 19 nt, Artificial Sequence
  Description of Artificial Sequence: Synthetic oligonucleotide
cccauuaauuuuccagagg

SEQ ID NO: 803923 - RNA, 19 nt, Artificial Sequence
  Description of Artificial Sequence: Synthetic oligonucleotide
cuguguaucuaacaaaguu

SEQ ID NO: 803924 - RNA, 19 nt, Artificial Sequence
  Description of Artificial Sequence: Synthetic oligonucleotide
cuggaggagcauccaagug

SEQ ID NO: 803925 - RNA, 19 nt, Artificial Sequence
  Description of Artificial Sequence: Synthetic oligonucleotide
ugucgauaucauccgcgua

SEQ ID NO: 803926 - RNA, 19 nt, Artificial Sequence
  Description of Artificial Sequence: Synthetic oligonucleotide
agcucuaauuuuguaggau

SEQ ID NO: 803927 - RNA, 19 nt, Artificial Sequence
  Description of Artificial Sequence: Synthetic oligonucleotide
ugccccggcaugucgauau

SEQ ID NO: 803928 - RNA, 19 nt, Artificial Sequence
  Description of Artificial Sequence: Synthetic oligonucleotide
caacgauuuucaugugcuc

SEQ ID NO: 803929 - RNA, 19 nt, Artificial Sequence
  Description of Artificial Sequence: Synthetic oligonucleotide
gaggguuugagguuucuuu

SEQ ID NO: 803930 - RNA, 19 nt, Artificial Sequence
  Description of Artificial Sequence: Synthetic oligonucleotide
augaguggcaacauuugua

SEQ ID NO: 803931 - RNA, 19 nt, Artificial Sequence
  Description of Artificial Sequence: Synthetic oligonucleotide
cugucggaacugcucuucc

SEQ ID NO: 803932 - RNA, 19 nt, Artificial Sequence
  Description of Artificial Sequence: Synthetic oligonucleotide
gagcuuucaaaguucguuu

SEQ ID NO: 803933 - RNA, 19 nt, Artificial Sequence
  Description of Artificial Sequence: Synthetic oligonucleotide
gaaggcgggccuccucugc

SEQ ID NO: 803934 - RNA, 19 nt, Artificial Sequence
  Description of Artificial Sequence: Synthetic oligonucleotide
agcucucacccgccuuggc

SEQ ID NO: 803935 - RNA, 19 nt, Artificial Sequence
  Description of Artificial Sequence: Synthetic oligonucleotide
ggcauuaacuguaucuaca

SEQ ID NO: 803936 - RNA, 19 nt, Artificial Sequence
  Description of Artificial Sequence: Synthetic oligonucleotide
cugaccuuuaauaacuguu

SEQ ID NO: 803937 - RNA, 19 nt, Artificial Sequence
  Description of Artificial Sequence: Synthetic oligonucleotide
gcuccugaccuuuaauaac

SEQ ID NO: 803938 - RNA, 19 nt, Artificial Sequence
  Description of Artificial Sequence: Synthetic oligonucleotide
uuugcgguacuugguaguu

SEQ ID NO: 803939 - RNA, 19 nt, Artificial Sequence
  Description of Artificial Sequence: Synthetic oligonucleotide
gagcgauguuagugcuucg

SEQ ID NO: 803940 - RNA, 19 nt, Artificial Sequence
  Description of Artificial Sequence: Synthetic oligonucleotide
auacuuuuccaggaugcuu

SEQ ID NO: 803941 - RNA, 19 nt, Artificial Sequence
  Description of Artificial Sequence: Synthetic oligonucleotide
ggacuuauacagcagcucu

SEQ ID NO: 803942 - RNA, 19 nt, Artificial Sequence
  Description of Artificial Sequence: Synthetic oligonucleotide
cauuaauuuuccagaggcu

SEQ ID NO: 803943 - RNA, 19 nt, Artificial Sequence
  Description of Artificial Sequence: Synthetic oligonucleotide
ugacauggagaaggcgggc

SEQ ID NO: 803944 - RNA, 19 nt, Artificial Sequence
  Description of Artificial Sequence: Synthetic oligonucleotide
agcgauguuagugcuucgu

SEQ ID NO: 803945 - RNA, 19 nt, Artificial Sequence
  Description of Artificial Sequence: Synthetic oligonucleotide
ggguuugagguuucuuuac

SEQ ID NO: 803946 - RNA, 19 nt, Artificial Sequence
  Description of Artificial Sequence: Synthetic oligonucleotide
cugagauuccgaacaguaa

SEQ ID NO: 803947 - RNA, 19 nt, Artificial Sequence
  Description of Artificial Sequence: Synthetic oligonucleotide
uucacaccucggaaccgaa

SEQ ID NO: 803948 - RNA, 19 nt, Artificial Sequence
  Description of Artificial Sequence: Synthetic oligonucleotide
uuguauccccaccggccgu

SEQ ID NO: 803949 - RNA, 19 nt, Artificial Sequence
  Description of Artificial Sequence: Synthetic oligonucleotide
auguuagugcuucguuaaa

SEQ ID NO: 803950 - RNA, 19 nt, Artificial Sequence
  Description of Artificial Sequence: Synthetic oligonucleotide
ggguuggaugucuuuuccc

SEQ ID NO: 803951 - RNA, 19 nt, Artificial Sequence
  Description of Artificial Sequence: Synthetic oligonucleotide
agaucccuugucauaggcu

SEQ ID NO: 803952 - RNA, 19 nt, Artificial Sequence
  Description of Artificial Sequence: Synthetic oligonucleotide
acaugccccuuugcgguac

SEQ ID NO: 803953 - RNA, 19 nt, Artificial Sequence
  Description of Artificial Sequence: Synthetic oligonucleotide
cauugcccaauuuucuucu

SEQ ID NO: 803954 - RNA, 19 nt, Artificial Sequence
  Description of Artificial Sequence: Synthetic oligonucleotide
gccucuuugagucaaaauu

SEQ ID NO: 803955 - RNA, 19 nt, Artificial Sequence
  Description of Artificial Sequence: Synthetic oligonucleotide
cuccuguguaucuaacaaa

SEQ ID NO: 803956 - RNA, 19 nt, Artificial Sequence
  Description of Artificial Sequence: Synthetic oligonucleotide
cuaauugaaauggaugauu

SEQ ID NO: 803957 - RNA, 19 nt, Artificial Sequence
  Description of Artificial Sequence: Synthetic oligonucleotide
ggagcgauguuagugcuuc

SEQ ID NO: 803958 - RNA, 19 nt, Artificial Sequence
  Description of Artificial Sequence: Synthetic oligonucleotide
ccaguaacuaguuauaguu

SEQ ID NO: 803959 - RNA, 19 nt, Artificial Sequence
  Description of Artificial Sequence: Synthetic oligonucleotide
accucggaaccgaagaaau

SEQ ID NO: 803960 - RNA, 19 nt, Artificial Sequence
  Description of Artificial Sequence: Synthetic oligonucleotide
uauagccguuccaccgguc

SEQ ID NO: 803961 - RNA, 19 nt, Artificial Sequence
  Description of Artificial Sequence: Synthetic oligonucleotide
gcaaauauuuugcgauauc

SEQ ID NO: 803962 - RNA, 19 nt, Artificial Sequence
  Description of Artificial Sequence: Synthetic oligonucleotide
gugcgugugguuguggauc

SEQ ID NO: 803963 - RNA, 19 nt, Artificial Sequence
  Description of Artificial Sequence: Synthetic oligonucleotide
gcuguuguaaggccucuuc

SEQ ID NO: 803964 - RNA, 19 nt, Artificial Sequence
  Description of Artificial Sequence: Synthetic oligonucleotide
cucaucuggagcgauguua

SEQ ID NO: 803965 - RNA, 19 nt, Artificial Sequence
  Description of Artificial Sequence: Synthetic oligonucleotide
ucucacccgccuuggccgc

SEQ ID NO: 803966 - RNA, 19 nt, Artificial Sequence
  Description of Artificial Sequence: Synthetic oligonucleotide
uuguucgcuuuguuucuuu

SEQ ID NO: 803967 - RNA, 19 nt, Artificial Sequence
  Description of Artificial Sequence: Synthetic oligonucleotide
uaggaucugccuggagaug

SEQ ID NO: 803968 - RNA, 19 nt, Artificial Sequence
  Description of Artificial Sequence: Synthetic oligonucleotide
ucgauaucauccgcguauu

SEQ ID NO: 803969 - RNA, 19 nt, Artificial Sequence
  Description of Artificial Sequence: Synthetic oligonucleotide
uccgaacaguaaugcgccu

SEQ ID NO: 803970 - RNA, 19 nt, Artificial Sequence
  Description of Artificial Sequence: Synthetic oligonucleotide
cagcucuaauuuuguagga

SEQ ID NO: 803971 - RNA, 19 nt, Artificial Sequence
  Description of Artificial Sequence: Synthetic oligonucleotide
uaucuacagcugcggccga

SEQ ID NO: 803972 - RNA, 19 nt, Artificial Sequence
  Description of Artificial Sequence: Synthetic oligonucleotide
ugccccuuugcgguacuug

SEQ ID NO: 803973 - RNA, 19 nt, Artificial Sequence
  Description of Artificial Sequence: Synthetic oligonucleotide
gcucucacccgccuuggcc

SEQ ID NO: 803974 - RNA, 19 nt, Artificial Sequence
  Description of Artificial Sequence: Synthetic oligonucleotide
ugacauggguguggcauua

SEQ ID NO: 803975 - RNA, 19 nt, Artificial Sequence
  Description of Artificial Sequence: Synthetic oligonucleotide
cguuaaauuuagcucucac

SEQ ID NO: 803976 - RNA, 19 nt, Artificial Sequence
  Description of Artificial Sequence: Synthetic oligonucleotide
gauggacaaggaucuucua

SEQ ID NO: 803977 - RNA, 19 nt, Artificial Sequence
  Description of Artificial Sequence: Synthetic oligonucleotide
ugugcucaucuggagcgau

SEQ ID NO: 803978 - RNA, 19 nt, Artificial Sequence
  Description of Artificial Sequence: Synthetic oligonucleotide
gcaugucgauaucauccgc

SEQ ID NO: 803979 - RNA, 19 nt, Artificial Sequence
  Description of Artificial Sequence: Synthetic oligonucleotide
guaacuaguuauaguuacu

SEQ ID NO: 803980 - RNA, 19 nt, Artificial Sequence
  Description of Artificial Sequence: Synthetic oligonucleotide
auccgcguauuugucuuca

SEQ ID NO: 803981 - RNA, 19 nt, Artificial Sequence
  Description of Artificial Sequence: Synthetic oligonucleotide
gcgaacaauuguguuugag

SEQ ID NO: 803982 - RNA, 19 nt, Artificial Sequence
  Description of Artificial Sequence: Synthetic oligonucleotide
gccauugaaauggugucuc

SEQ ID NO: 803983 - RNA, 19 nt, Artificial Sequence
  Description of Artificial Sequence: Synthetic oligonucleotide
uguauccccaccggccguc

SEQ ID NO: 803984 - RNA, 19 nt, Artificial Sequence
  Description of Artificial Sequence: Synthetic oligonucleotide
ccugagauuccgaacagua

SEQ ID NO: 803985 - RNA, 19 nt, Artificial Sequence
  Description of Artificial Sequence: Synthetic oligonucleotide
cauuggcauaaggauucuc

SEQ ID NO: 803986 - RNA, 19 nt, Artificial Sequence
  Description of Artificial Sequence: Synthetic oligonucleotide
cuuugcgguacuugguagu

SEQ ID NO: 803987 - RNA, 19 nt, Artificial Sequence
  Description of Artificial Sequence: Synthetic oligonucleotide
gugucuccuguguaucuaa

SEQ ID NO: 803988 - RNA, 19 nt, Artificial Sequence
  Description of Artificial Sequence: Synthetic oligonucleotide
cucccggguuucauauaug

SEQ ID NO: 803989 - RNA, 19 nt, Artificial Sequence
  Description of Artificial Sequence: Synthetic oligonucleotide
gcauaaggauucucucuca

SEQ ID NO: 803990 - RNA, 19 nt, Artificial Sequence
  Description of Artificial Sequence: Synthetic oligonucleotide
cauccgcguauuugucuuc

SEQ ID NO: 803991 - RNA, 19 nt, Artificial Sequence
  Description of Artificial Sequence: Synthetic oligonucleotide
guaaugcgccucuuugagu

SEQ ID NO: 803992 - RNA, 19 nt, Artificial Sequence
  Description of Artificial Sequence: Synthetic oligonucleotide
cucacaacgguacucucuu

SEQ ID NO: 803993 - RNA, 19 nt, Artificial Sequence
  Description of Artificial Sequence: Synthetic oligonucleotide
ucugccccggcaugucgau

SEQ ID NO: 803994 - RNA, 19 nt, Artificial Sequence
  Description of Artificial Sequence: Synthetic oligonucleotide
cuuagcucacaacgguacu

SEQ ID NO: 803995 - RNA, 19 nt, Artificial Sequence
  Description of Artificial Sequence: Synthetic oligonucleotide
ucacaacgguacucucuuu

SEQ ID NO: 803996 - RNA, 19 nt, Artificial Sequence
  Description of Artificial Sequence: Synthetic oligonucleotide
accuuagcucacaacggua

SEQ ID NO: 803997 - RNA, 19 nt, Artificial Sequence
  Description of Artificial Sequence: Synthetic oligonucleotide
gccggaaugaacauccugu

SEQ ID NO: 803998 - RNA, 19 nt, Artificial Sequence
  Description of Artificial Sequence: Synthetic oligonucleotide
aacugcucuuccgguguuu

SEQ ID NO: 803999 - RNA, 19 nt, Artificial Sequence
  Description of Artificial Sequence: Synthetic oligonucleotide
uccgcguauuugucuucau

SEQ ID NO: 804000 - RNA, 19 nt, Artificial Sequence
  Description of Artificial Sequence: Synthetic oligonucleotide
agccguuccaccggucccu

SEQ ID NO: 804001 - RNA, 19 nt, Artificial Sequence
  Description of Artificial Sequence: Synthetic oligonucleotide
ccaccggccgucuuuccag

SEQ ID NO: 804002 - RNA, 19 nt, Artificial Sequence
  Description of Artificial Sequence: Synthetic oligonucleotide
cuguaggccuccauuuccu

SEQ ID NO: 804003 - RNA, 19 nt, Artificial Sequence
  Description of Artificial Sequence: Synthetic oligonucleotide
gauccccagaugugcgugu

SEQ ID NO: 804004 - RNA, 19 nt, Artificial Sequence
  Description of Artificial Sequence: Synthetic oligonucleotide
gccauggggucaucuggcc

SEQ ID NO: 804005 - RNA, 19 nt, Artificial Sequence
  Description of Artificial Sequence: Synthetic oligonucleotide
ugcgccucuuugagucaaa

SEQ ID NO: 804006 - RNA, 19 nt, Artificial Sequence
  Description of Artificial Sequence: Synthetic oligonucleotide
gugcuucguuaaauuuagc

SEQ ID NO: 804007 - RNA, 19 nt, Artificial Sequence
  Description of Artificial Sequence: Synthetic oligonucleotide
agucucuuuccaagucuaa

SEQ ID NO: 804008 - RNA, 19 nt, Artificial Sequence
  Description of Artificial Sequence: Synthetic oligonucleotide
uugcgguacuugguaguua

SEQ ID NO: 804009 - RNA, 19 nt, Artificial Sequence
  Description of Artificial Sequence: Synthetic oligonucleotide
gugcauugcccaauuuucu

SEQ ID NO: 804010 - RNA, 19 nt, Artificial Sequence
  Description of Artificial Sequence: Synthetic oligonucleotide
gugugucauggccccacaa

SEQ ID NO: 804011 - RNA, 19 nt, Artificial Sequence
  Description of Artificial Sequence: Synthetic oligonucleotide
guuccaugccuggaguacu

SEQ ID NO: 804012 - RNA, 19 nt, Artificial Sequence
  Description of Artificial Sequence: Synthetic oligonucleotide
ggcagaauuuggaucuaaa

SEQ ID NO: 804013 - RNA, 19 nt, Artificial Sequence
  Description of Artificial Sequence: Synthetic oligonucleotide
ugcuguuguaaggccucuu

SEQ ID NO: 804014 - RNA, 19 nt, Artificial Sequence
  Description of Artificial Sequence: Synthetic oligonucleotide
ggaguacuccacauagucu

SEQ ID NO: 804015 - RNA, 19 nt, Artificial Sequence
  Description of Artificial Sequence: Synthetic oligonucleotide
augcgccucuuugagucaa

SEQ ID NO: 804016 - RNA, 19 nt, Artificial Sequence
  Description of Artificial Sequence: Synthetic oligonucleotide
uccccaccggccgucuuuc

SEQ ID NO: 804017 - RNA, 19 nt, Artificial Sequence
  Description of Artificial Sequence: Synthetic oligonucleotide
ccgcguauuugucuucauc

SEQ ID NO: 804018 - RNA, 19 nt, Artificial Sequence
  Description of Artificial Sequence: Synthetic oligonucleotide
ccgaacaguaaugcgccuc

SEQ ID NO: 804019 - RNA, 19 nt, Artificial Sequence
  Description of Artificial Sequence: Synthetic oligonucleotide
gcggccgacaugaugaacu

SEQ ID NO: 804020 - RNA, 19 nt, Artificial Sequence
  Description of Artificial Sequence: Synthetic oligonucleotide
cgauguuagugcuucguua

SEQ ID NO: 804021 - RNA, 19 nt, Artificial Sequence
  Description of Artificial Sequence: Synthetic oligonucleotide
gcucccggguuucauauau

SEQ ID NO: 804022 - RNA, 19 nt, Artificial Sequence
  Description of Artificial Sequence: Synthetic oligonucleotide
ccucaacgauuuucaugug

SEQ ID NO: 804023 - RNA, 19 nt, Artificial Sequence
  Description of Artificial Sequence: Synthetic oligonucleotide
caucgucgcugucggaacu

SEQ ID NO: 804024 - RNA, 19 nt, Artificial Sequence
  Description of Artificial Sequence: Synthetic oligonucleotide
ccugaccuuuaauaacugu

SEQ ID NO: 804025 - RNA, 19 nt, Artificial Sequence
  Description of Artificial Sequence: Synthetic oligonucleotide
gcucacaacgguacucucu

SEQ ID NO: 804026 - RNA, 19 nt, Artificial Sequence
  Description of Artificial Sequence: Synthetic oligonucleotide
ccuguguaucuaacaaagu

SEQ ID NO: 804027 - RNA, 19 nt, Artificial Sequence
  Description of Artificial Sequence: Synthetic oligonucleotide
cacaugccccuuugcggua

SEQ ID NO: 804028 - RNA, 19 nt, Artificial Sequence
  Description of Artificial Sequence: Synthetic oligonucleotide
ucacccgccuuggccgcuc

SEQ ID NO: 804029 - RNA, 19 nt, Artificial Sequence
  Description of Artificial Sequence: Synthetic oligonucleotide
gaacaguaaugcgccucuu

SEQ ID NO: 804030 - RNA, 19 nt, Artificial Sequence
  Description of Artificial Sequence: Synthetic oligonucleotide
cgaacaguaaugcgccucu

SEQ ID NO: 804031 - RNA, 19 nt, Artificial Sequence
  Description of Artificial Sequence: Synthetic oligonucleotide
cuuguucgcuuuguuucuu

SEQ ID NO: 804032 - RNA, 19 nt, Artificial Sequence
  Description of Artificial Sequence: Synthetic oligonucleotide
gagccggaaugaacauccu

SEQ ID NO: 804033 - RNA, 19 nt, Artificial Sequence
  Description of Artificial Sequence: Synthetic oligonucleotide
gccgucuuuccaguaagau

SEQ ID NO: 804034 - RNA, 19 nt, Artificial Sequence
  Description of Artificial Sequence: Synthetic oligonucleotide
cccggguuucauauaugcu

SEQ ID NO: 804035 - RNA, 19 nt, Artificial Sequence
  Description of Artificial Sequence: Synthetic oligonucleotide
acccgccuuggccgcucaa

SEQ ID NO: 804036 - RNA, 19 nt, Artificial Sequence
  Description of Artificial Sequence: Synthetic oligonucleotide
caauuguguuugagccauu

SEQ ID NO: 804037 - RNA, 19 nt, Artificial Sequence
  Description of Artificial Sequence: Synthetic oligonucleotide
cgcaaauauuuugcgauau

SEQ ID NO: 804038 - RNA, 19 nt, Artificial Sequence
  Description of Artificial Sequence: Synthetic oligonucleotide
cggaaccgaagaaauguau

SEQ ID NO: 804039 - RNA, 19 nt, Artificial Sequence
  Description of Artificial Sequence: Synthetic oligonucleotide
caccggccgucuuuccagu

SEQ ID NO: 804040 - RNA, 19 nt, Artificial Sequence
  Description of Artificial Sequence: Synthetic oligonucleotide
ggcuucccaagcgaacaau

SEQ ID NO: 804041 - RNA, 19 nt, Artificial Sequence
  Description of Artificial Sequence: Synthetic oligonucleotide
ggcucccggguuucauaua

SEQ ID NO: 804042 - RNA, 19 nt, Artificial Sequence
  Description of Artificial Sequence: Synthetic oligonucleotide
ccccggcaugucgauauca

SEQ ID NO: 804043 - RNA, 19 nt, Artificial Sequence
  Description of Artificial Sequence: Synthetic oligonucleotide
cuucgccaguugcaucauu

SEQ ID NO: 804044 - RNA, 19 nt, Artificial Sequence
  Description of Artificial Sequence: Synthetic oligonucleotide
cccggcaugucgauaucau

SEQ ID NO: 804045 - RNA, 19 nt, Artificial Sequence
  Description of Artificial Sequence: Synthetic oligonucleotide
cacccgccuuggccgcuca

SEQ ID NO: 804046 - RNA, 19 nt, Artificial Sequence
  Description of Artificial Sequence: Synthetic oligonucleotide
ccccagaugugcguguggu

SEQ ID NO: 804047 - RNA, 19 nt, Artificial Sequence
  Description of Artificial Sequence: Synthetic oligonucleotide
ccaguacaauaggaauacu

SEQ ID NO: 804048 - RNA, 19 nt, Artificial Sequence
  Description of Artificial Sequence: Synthetic oligonucleotide
gccguuccaccggucccuc

SEQ ID NO: 804049 - RNA, 19 nt, Artificial Sequence
  Description of Artificial Sequence: Synthetic oligonucleotide
agcccgcuccugaccuuua

SEQ ID NO: 804050 - RNA, 19 nt, Artificial Sequence
  Description of Artificial Sequence: Synthetic oligonucleotide
gcgguacuugguaguuaua

SEQ ID NO: 804051 - RNA, 19 nt, Artificial Sequence
  Description of Artificial Sequence: Synthetic oligonucleotide
cugccccggcaugucgaua

SEQ ID NO: 804052 - RNA, 19 nt, Artificial Sequence
  Description of Artificial Sequence: Synthetic oligonucleotide
cgccucuuugagucaaaau

SEQ ID NO: 804053 - RNA, 19 nt, Artificial Sequence
  Description of Artificial Sequence: Synthetic oligonucleotide
cucacccgccuuggccgcu

SEQ ID NO: 804054 - RNA, 19 nt, Artificial Sequence
  Description of Artificial Sequence: Synthetic oligonucleotide
cgauaucauccgcguauuu

SEQ ID NO: 804055 - RNA, 19 nt, Artificial Sequence
  Description of Artificial Sequence: Synthetic oligonucleotide
ccguuccaccggucccucu

SEQ ID NO: 804056 - RNA, 19 nt, Artificial Sequence
  Description of Artificial Sequence: Synthetic oligonucleotide
agaacaauuaaauaccuca

SEQ ID NO: 804057 - RNA, 19 nt, Artificial Sequence
  Description of Artificial Sequence: Synthetic oligonucleotide
acacguacguccuugaacc

SEQ ID NO: 804058 - RNA, 19 nt, Artificial Sequence
  Description of Artificial Sequence: Synthetic oligonucleotide
gaagccucaauauuggagg

SEQ ID NO: 804059 - RNA, 19 nt, Artificial Sequence
  Description of Artificial Sequence: Synthetic oligonucleotide
cuuguuuccggucacaucc

SEQ ID NO: 804060 - RNA, 19 nt, Artificial Sequence
  Description of Artificial Sequence: Synthetic oligonucleotide
cuugauaggccauggaugg

SEQ ID NO: 804061 - RNA, 19 nt, Artificial Sequence
  Description of Artificial Sequence: Synthetic oligonucleotide
agaaucuacacucugggca

SEQ ID NO: 804062 - RNA, 19 nt, Artificial Sequence
  Description of Artificial Sequence: Synthetic oligonucleotide
gaagcauacagggacaugc

SEQ ID NO: 804063 - RNA, 19 nt, Artificial Sequence
  Description of Artificial Sequence: Synthetic oligonucleotide
gauggaagccucaauauug

SEQ ID NO: 804064 - RNA, 19 nt, Artificial Sequence
  Description of Artificial Sequence: Synthetic oligonucleotide
aaagccucgaccggggccc

SEQ ID NO: 804065 - RNA, 19 nt, Artificial Sequence
  Description of Artificial Sequence: Synthetic oligonucleotide
cauuuaugacauaggagcc

SEQ ID NO: 804066 - RNA, 19 nt, Artificial Sequence
  Description of Artificial Sequence: Synthetic oligonucleotide
ucugaugaggccaccuggg

SEQ ID NO: 804067 - RNA, 19 nt, Artificial Sequence
  Description of Artificial Sequence: Synthetic oligonucleotide
aguguauauugcucgccgc

SEQ ID NO: 804068 - RNA, 19 nt, Artificial Sequence
  Description of Artificial Sequence: Synthetic oligonucleotide
acuauguucuccuuuggca

SEQ ID NO: 804069 - RNA, 19 nt, Artificial Sequence
  Description of Artificial Sequence: Synthetic oligonucleotide
ugugcgaucucaaagccuc

SEQ ID NO: 804070 - RNA, 19 nt, Artificial Sequence
  Description of Artificial Sequence: Synthetic oligonucleotide
auaccucagaagcauacag

SEQ ID NO: 804071 - RNA, 19 nt, Artificial Sequence
  Description of Artificial Sequence: Synthetic oligonucleotide
aaccauacuucaccacugg

SEQ ID NO: 804072 - RNA, 19 nt, Artificial Sequence
  Description of Artificial Sequence: Synthetic oligonucleotide
uccaucuuagcaacgguga

SEQ ID NO: 804073 - RNA, 19 nt, Artificial Sequence
  Description of Artificial Sequence: Synthetic oligonucleotide
cuuagcaacggugagccgg

SEQ ID NO: 804074 - RNA, 19 nt, Artificial Sequence
  Description of Artificial Sequence: Synthetic oligonucleotide
ggggcuaccauuuugauca

SEQ ID NO: 804075 - RNA, 19 nt, Artificial Sequence
  Description of Artificial Sequence: Synthetic oligonucleotide
aagaccauggacuguugcu

SEQ ID NO: 804076 - RNA, 19 nt, Artificial Sequence
  Description of Artificial Sequence: Synthetic oligonucleotide
gaguuugcagcguggaucc

SEQ ID NO: 804077 - RNA, 19 nt, Artificial Sequence
  Description of Artificial Sequence: Synthetic oligonucleotide
uggauaagccucuccauug

SEQ ID NO: 804078 - RNA, 19 nt, Artificial Sequence
  Description of Artificial Sequence: Synthetic oligonucleotide
uacuugauaggccauggau

SEQ ID NO: 804079 - RNA, 19 nt, Artificial Sequence
  Description of Artificial Sequence: Synthetic oligonucleotide
ucugacucgaggagagagg

SEQ ID NO: 804080 - RNA, 19 nt, Artificial Sequence
  Description of Artificial Sequence: Synthetic oligonucleotide
ucucugaaaacccgaucag

SEQ ID NO: 804081 - RNA, 19 nt, Artificial Sequence
  Description of Artificial Sequence: Synthetic oligonucleotide
ugcgcguacuccauguuag

SEQ ID NO: 804082 - RNA, 19 nt, Artificial Sequence
  Description of Artificial Sequence: Synthetic oligonucleotide
uguauauugcucgccgccg

SEQ ID NO: 804083 - RNA, 19 nt, Artificial Sequence
  Description of Artificial Sequence: Synthetic oligonucleotide
accgauggcagguagugag

SEQ ID NO: 804084 - RNA, 19 nt, Artificial Sequence
  Description of Artificial Sequence: Synthetic oligonucleotide
uuugcagcguggauccagg

SEQ ID NO: 804085 - RNA, 19 nt, Artificial Sequence
  Description of Artificial Sequence: Synthetic oligonucleotide
agcccauacacugacaaag

SEQ ID NO: 804086 - RNA, 19 nt, Artificial Sequence
  Description of Artificial Sequence: Synthetic oligonucleotide
accauacuucaccacuggc

SEQ ID NO: 804087 - RNA, 19 nt, Artificial Sequence
  Description of Artificial Sequence: Synthetic oligonucleotide
aggacuauguucuccuuug

SEQ ID NO: 804088 - RNA, 19 nt, Artificial Sequence
  Description of Artificial Sequence: Synthetic oligonucleotide
aagcauacagggacaugcc

SEQ ID NO: 804089 - RNA, 19 nt, Artificial Sequence
  Description of Artificial Sequence: Synthetic oligonucleotide
aguuagcccugcuccauac

SEQ ID NO: 804090 - RNA, 19 nt, Artificial Sequence
  Description of Artificial Sequence: Synthetic oligonucleotide
caguguauauugcucgccg

SEQ ID NO: 804091 - RNA, 19 nt, Artificial Sequence
  Description of Artificial Sequence: Synthetic oligonucleotide
gcgcagaacaauuaaauac

SEQ ID NO: 804092 - RNA, 19 nt, Artificial Sequence
  Description of Artificial Sequence: Synthetic oligonucleotide
acguccuugaaccauacuu

SEQ ID NO: 804093 - RNA, 19 nt, Artificial Sequence
  Description of Artificial Sequence: Synthetic oligonucleotide
cucucugaaaacccgauca

SEQ ID NO: 804094 - RNA, 19 nt, Artificial Sequence
  Description of Artificial Sequence: Synthetic oligonucleotide
cacaucggcaaaagggucc

SEQ ID NO: 804095 - RNA, 19 nt, Artificial Sequence
  Description of Artificial Sequence: Synthetic oligonucleotide
ugccauaccgcaccaggag

SEQ ID NO: 804096 - RNA, 19 nt, Artificial Sequence
  Description of Artificial Sequence: Synthetic oligonucleotide
gaaaaucagguuguccagc

SEQ ID NO: 804097 - RNA, 19 nt, Artificial Sequence
  Description of Artificial Sequence: Synthetic oligonucleotide
ggcaaaagggucccuaagg

SEQ ID NO: 804098 - RNA, 19 nt, Artificial Sequence
  Description of Artificial Sequence: Synthetic oligonucleotide
aauauuggaggcgucugau

SEQ ID NO: 804099 - RNA, 19 nt, Artificial Sequence
  Description of Artificial Sequence: Synthetic oligonucleotide
uggcgcagaacaauuaaau

SEQ ID NO: 804100 - RNA, 19 nt, Artificial Sequence
  Description of Artificial Sequence: Synthetic oligonucleotide
uccauguuaguuagcccug

SEQ ID NO: 804101 - RNA, 19 nt, Artificial Sequence
  Description of Artificial Sequence: Synthetic oligonucleotide
ucaauauuggaggcgucug

SEQ ID NO: 804102 - RNA, 19 nt, Artificial Sequence
  Description of Artificial Sequence: Synthetic oligonucleotide
uuuaugacauaggagccau

SEQ ID NO: 804103 - RNA, 19 nt, Artificial Sequence
  Description of Artificial Sequence: Synthetic oligonucleotide
ucuggcgcagaacaauuaa

SEQ ID NO: 804104 - RNA, 19 nt, Artificial Sequence
  Description of Artificial Sequence: Synthetic oligonucleotide
gucaauuacuugauaggcc

SEQ ID NO: 804105 - RNA, 19 nt, Artificial Sequence
  Description of Artificial Sequence: Synthetic oligonucleotide
aauaccucagaagcauaca

SEQ ID NO: 804106 - RNA, 19 nt, Artificial Sequence
  Description of Artificial Sequence: Synthetic oligonucleotide
ggucaauuacuugauaggc

SEQ ID NO: 804107 - RNA, 19 nt, Artificial Sequence
  Description of Artificial Sequence: Synthetic oligonucleotide
guauauugcucgccgccgg

SEQ ID NO: 804108 - RNA, 19 nt, Artificial Sequence
  Description of Artificial Sequence: Synthetic oligonucleotide
guguauauugcucgccgcc

SEQ ID NO: 804109 - RNA, 19 nt, Artificial Sequence
  Description of Artificial Sequence: Synthetic oligonucleotide
uacaacuuucugacucgag

SEQ ID NO: 804110 - RNA, 19 nt, Artificial Sequence
  Description of Artificial Sequence: Synthetic oligonucleotide
uggaguguccaugggaacc

SEQ ID NO: 804111 - RNA, 19 nt, Artificial Sequence
  Description of Artificial Sequence: Synthetic oligonucleotide
uguuccccguaucuggcgc

SEQ ID NO: 804112 - RNA, 19 nt, Artificial Sequence
  Description of Artificial Sequence: Synthetic oligonucleotide
gaggggucuuuguagauga

SEQ ID NO: 804113 - RNA, 19 nt, Artificial Sequence
  Description of Artificial Sequence: Synthetic oligonucleotide
ugaggugggcagcuuuuag

SEQ ID NO: 804114 - RNA, 19 nt, Artificial Sequence
  Description of Artificial Sequence: Synthetic oligonucleotide
uuugauggcaaagucccau

SEQ ID NO: 804115 - RNA, 19 nt, Artificial Sequence
  Description of Artificial Sequence: Synthetic oligonucleotide
acagcgagcaccuccgacu

SEQ ID NO: 804116 - RNA, 19 nt, Artificial Sequence
  Description of Artificial Sequence: Synthetic oligonucleotide
ggccacaucggcaaaaggg

SEQ ID NO: 804117 - RNA, 19 nt, Artificial Sequence
  Description of Artificial Sequence: Synthetic oligonucleotide
auuuaugacauaggagcca

SEQ ID NO: 804118 - RNA, 19 nt, Artificial Sequence
  Description of Artificial Sequence: Synthetic oligonucleotide
ucgaccggggcccaggacu

SEQ ID NO: 804119 - RNA, 19 nt, Artificial Sequence
  Description of Artificial Sequence: Synthetic oligonucleotide
uauauugcucgccgccggc

SEQ ID NO: 804120 - RNA, 19 nt, Artificial Sequence
  Description of Artificial Sequence: Synthetic oligonucleotide
cuugaaccauacuucacca

SEQ ID NO: 804121 - RNA, 19 nt, Artificial Sequence
  Description of Artificial Sequence: Synthetic oligonucleotide
uuguaccuggcgaggaaug

SEQ ID NO: 804122 - RNA, 19 nt, Artificial Sequence
  Description of Artificial Sequence: Synthetic oligonucleotide
uuacuugauaggccaugga

SEQ ID NO: 804123 - RNA, 19 nt, Artificial Sequence
  Description of Artificial Sequence: Synthetic oligonucleotide
ccuugaaccauacuucacc

SEQ ID NO: 804124 - RNA, 19 nt, Artificial Sequence
  Description of Artificial Sequence: Synthetic oligonucleotide
auaagccucuccauugcgg

SEQ ID NO: 804125 - RNA, 19 nt, Artificial Sequence
  Description of Artificial Sequence: Synthetic oligonucleotide
uuagcaacggugagccggu

SEQ ID NO: 804126 - RNA, 19 nt, Artificial Sequence
  Description of Artificial Sequence: Synthetic oligonucleotide
uuagcccugcuccauacuu

SEQ ID NO: 804127 - RNA, 19 nt, Artificial Sequence
  Description of Artificial Sequence: Synthetic oligonucleotide
gcuacagugcuguaacucc

SEQ ID NO: 804128 - RNA, 19 nt, Artificial Sequence
  Description of Artificial Sequence: Synthetic oligonucleotide
ugcagugauggauccggcc

SEQ ID NO: 804129 - RNA, 19 nt, Artificial Sequence
  Description of Artificial Sequence: Synthetic oligonucleotide
uggcaucuccuugaaaacc

SEQ ID NO: 804130 - RNA, 19 nt, Artificial Sequence
  Description of Artificial Sequence: Synthetic oligonucleotide
cagaacaauuaaauaccuc

SEQ ID NO: 804131 - RNA, 19 nt, Artificial Sequence
  Description of Artificial Sequence: Synthetic oligonucleotide
cucgauguccacacgugac

SEQ ID NO: 804132 - RNA, 19 nt, Artificial Sequence
  Description of Artificial Sequence: Synthetic oligonucleotide
auauuggaggcgucugaug

SEQ ID NO: 804133 - RNA, 19 nt, Artificial Sequence
  Description of Artificial Sequence: Synthetic oligonucleotide
ugauggauccggccaggcc

SEQ ID NO: 804134 - RNA, 19 nt, Artificial Sequence
  Description of Artificial Sequence: Synthetic oligonucleotide
aacccggaaccccucuuug

SEQ ID NO: 804135 - RNA, 19 nt, Artificial Sequence
  Description of Artificial Sequence: Synthetic oligonucleotide
ugugcgggacaucacgcgu

SEQ ID NO: 804136 - RNA, 19 nt, Artificial Sequence
  Description of Artificial Sequence: Synthetic oligonucleotide
cacugugaauucugcacag

SEQ ID NO: 804137 - RNA, 19 nt, Artificial Sequence
  Description of Artificial Sequence: Synthetic oligonucleotide
aucacgcgugucuucauga

SEQ ID NO: 804138 - RNA, 19 nt, Artificial Sequence
  Description of Artificial Sequence: Synthetic oligonucleotide
agaaaguucccagccagga

SEQ ID NO: 804139 - RNA, 19 nt, Artificial Sequence
  Description of Artificial Sequence: Synthetic oligonucleotide
uccaagcccggcagggagg

SEQ ID NO: 804140 - RNA, 19 nt, Artificial Sequence
  Description of Artificial Sequence: Synthetic oligonucleotide
cacagaguuugcagcgugg

SEQ ID NO: 804141 - RNA, 19 nt, Artificial Sequence
  Description of Artificial Sequence: Synthetic oligonucleotide
agaccauggacuguugcug

SEQ ID NO: 804142 - RNA, 19 nt, Artificial Sequence
  Description of Artificial Sequence: Synthetic oligonucleotide
agaugcgcguacuccaugu

SEQ ID NO: 804143 - RNA, 19 nt, Artificial Sequence
  Description of Artificial Sequence: Synthetic oligonucleotide
cccuaagguagaaaguucc

SEQ ID NO: 804144 - RNA, 19 nt, Artificial Sequence
  Description of Artificial Sequence: Synthetic oligonucleotide
agacccgcugcuccaaaag

SEQ ID NO: 804145 - RNA, 19 nt, Artificial Sequence
  Description of Artificial Sequence: Synthetic oligonucleotide
cuucuaucagcgggaaggg

SEQ ID NO: 804146 - RNA, 19 nt, Artificial Sequence
  Description of Artificial Sequence: Synthetic oligonucleotide
uauugcucgccgccggcug

SEQ ID NO: 804147 - RNA, 19 nt, Artificial Sequence
  Description of Artificial Sequence: Synthetic oligonucleotide
uaucuggcgcagaacaauu

SEQ ID NO: 804148 - RNA, 19 nt, Artificial Sequence
  Description of Artificial Sequence: Synthetic oligonucleotide
augaucaggccucccuuug

SEQ ID NO: 804149 - RNA, 19 nt, Artificial Sequence
  Description of Artificial Sequence: Synthetic oligonucleotide
ucacgcgugucuucaugag

SEQ ID NO: 804150 - RNA, 19 nt, Artificial Sequence
  Description of Artificial Sequence: Synthetic oligonucleotide
ggcucggucaauuacuuga

SEQ ID NO: 804151 - RNA, 19 nt, Artificial Sequence
  Description of Artificial Sequence: Synthetic oligonucleotide
guuaguuagcccugcucca

SEQ ID NO: 804152 - RNA, 19 nt, Artificial Sequence
  Description of Artificial Sequence: Synthetic oligonucleotide
auguuccccguaucuggcg

SEQ ID NO: 804153 - RNA, 19 nt, Artificial Sequence
  Description of Artificial Sequence: Synthetic oligonucleotide
cuccauguuaguuagcccu

SEQ ID NO: 804154 - RNA, 19 nt, Artificial Sequence
  Description of Artificial Sequence: Synthetic oligonucleotide
gaaacugagccagugggua

SEQ ID NO: 804155 - RNA, 19 nt, Artificial Sequence
  Description of Artificial Sequence: Synthetic oligonucleotide
cuaucagcgggaagggcuc

SEQ ID NO: 804156 - RNA, 19 nt, Artificial Sequence
  Description of Artificial Sequence: Synthetic oligonucleotide
cugugcgggacaucacgcg

SEQ ID NO: 804157 - RNA, 19 nt, Artificial Sequence
  Description of Artificial Sequence: Synthetic oligonucleotide
gcugcuacagugcuguaac

SEQ ID NO: 804158 - RNA, 19 nt, Artificial Sequence
  Description of Artificial Sequence: Synthetic oligonucleotide
uggcgaggaauguagucuc

SEQ ID NO: 804159 - RNA, 19 nt, Artificial Sequence
  Description of Artificial Sequence: Synthetic oligonucleotide
ugucuccaaggguaggaaa

SEQ ID NO: 804160 - RNA, 19 nt, Artificial Sequence
  Description of Artificial Sequence: Synthetic oligonucleotide
ugaccgggcaaugucugcc

SEQ ID NO: 804161 - RNA, 19 nt, Artificial Sequence
  Description of Artificial Sequence: Synthetic oligonucleotide
agcaaagcgcagugcucgg

SEQ ID NO: 804162 - RNA, 19 nt, Artificial Sequence
  Description of Artificial Sequence: Synthetic oligonucleotide
auugcucgccgccggcugg

SEQ ID NO: 804163 - RNA, 19 nt, Artificial Sequence
  Description of Artificial Sequence: Synthetic oligonucleotide
agguagugagccaggcagc

SEQ ID NO: 804164 - RNA, 19 nt, Artificial Sequence
  Description of Artificial Sequence: Synthetic oligonucleotide
uuguuuccggucacaucca

SEQ ID NO: 804165 - RNA, 19 nt, Artificial Sequence
  Description of Artificial Sequence: Synthetic oligonucleotide
ucuuagcaacggugagccg

SEQ ID NO: 804166 - RNA, 19 nt, Artificial Sequence
  Description of Artificial Sequence: Synthetic oligonucleotide
agggacaugcccaugacuu

SEQ ID NO: 804167 - RNA, 19 nt, Artificial Sequence
  Description of Artificial Sequence: Synthetic oligonucleotide
ugcucgggcccaagcaaag

SEQ ID NO: 804168 - RNA, 19 nt, Artificial Sequence
  Description of Artificial Sequence: Synthetic oligonucleotide
aaacugcaacagccgguca

SEQ ID NO: 804169 - RNA, 19 nt, Artificial Sequence
  Description of Artificial Sequence: Synthetic oligonucleotide
auaccgcaccaggagcucc

SEQ ID NO: 804170 - RNA, 19 nt, Artificial Sequence
  Description of Artificial Sequence: Synthetic oligonucleotide
ccaugaaccacugugguuc

SEQ ID NO: 804171 - RNA, 19 nt, Artificial Sequence
  Description of Artificial Sequence: Synthetic oligonucleotide
gauaggccauggauggggc

SEQ ID NO: 804172 - RNA, 19 nt, Artificial Sequence
  Description of Artificial Sequence: Synthetic oligonucleotide
gugccaugcuccacgaggg

SEQ ID NO: 804173 - RNA, 19 nt, Artificial Sequence
  Description of Artificial Sequence: Synthetic oligonucleotide
ugaaaacccggaaccccuc

SEQ ID NO: 804174 - RNA, 19 nt, Artificial Sequence
  Description of Artificial Sequence: Synthetic oligonucleotide
aggacagcgagcaccuccg

SEQ ID NO: 804175 - RNA, 19 nt, Artificial Sequence
  Description of Artificial Sequence: Synthetic oligonucleotide
gcuguaacuccucagaccu

SEQ ID NO: 804176 - RNA, 19 nt, Artificial Sequence
  Description of Artificial Sequence: Synthetic oligonucleotide
gcaacagccggucauacaa

SEQ ID NO: 804177 - RNA, 19 nt, Artificial Sequence
  Description of Artificial Sequence: Synthetic oligonucleotide
ggcugugcgggacaucacg

SEQ ID NO: 804178 - RNA, 19 nt, Artificial Sequence
  Description of Artificial Sequence: Synthetic oligonucleotide
gauccaccacuugugacca

SEQ ID NO: 804179 - RNA, 19 nt, Artificial Sequence
  Description of Artificial Sequence: Synthetic oligonucleotide
ugcagcguggauccaggau

SEQ ID NO: 804180 - RNA, 19 nt, Artificial Sequence
  Description of Artificial Sequence: Synthetic oligonucleotide
ugggaaccaagaccaugga

SEQ ID NO: 804181 - RNA, 19 nt, Artificial Sequence
  Description of Artificial Sequence: Synthetic oligonucleotide
ucgggcccaagcaaagaaa

SEQ ID NO: 804182 - RNA, 19 nt, Artificial Sequence
  Description of Artificial Sequence: Synthetic oligonucleotide
aaggccggaugacacugau

SEQ ID NO: 804183 - RNA, 19 nt, Artificial Sequence
  Description of Artificial Sequence: Synthetic oligonucleotide
cacgcgugucuucaugagc

SEQ ID NO: 804184 - RNA, 19 nt, Artificial Sequence
  Description of Artificial Sequence: Synthetic oligonucleotide
ugcgugguaggaucucacu

SEQ ID NO: 804185 - RNA, 19 nt, Artificial Sequence
  Description of Artificial Sequence: Synthetic oligonucleotide
ccuaagguagaaaguuccc

SEQ ID NO: 804186 - RNA, 19 nt, Artificial Sequence
  Description of Artificial Sequence: Synthetic oligonucleotide
ucggcaaaagggucccuaa

SEQ ID NO: 804187 - RNA, 19 nt, Artificial Sequence
  Description of Artificial Sequence: Synthetic oligonucleotide
gacagcgagcaccuccgac

SEQ ID NO: 804188 - RNA, 19 nt, Artificial Sequence
  Description of Artificial Sequence: Synthetic oligonucleotide
gauggaaaaucagguuguc

SEQ ID NO: 804189 - RNA, 19 nt, Artificial Sequence
  Description of Artificial Sequence: Synthetic oligonucleotide
gaggcgucugaugaggcca

SEQ ID NO: 804190 - RNA, 19 nt, Artificial Sequence
  Description of Artificial Sequence: Synthetic oligonucleotide
cuccaagcccggcagggag

SEQ ID NO: 804191 - RNA, 19 nt, Artificial Sequence
  Description of Artificial Sequence: Synthetic oligonucleotide
cccugugcgaucucaaagc

SEQ ID NO: 804192 - RNA, 19 nt, Artificial Sequence
  Description of Artificial Sequence: Synthetic oligonucleotide
ugaagucgccaugaaccac

SEQ ID NO: 804193 - RNA, 19 nt, Artificial Sequence
  Description of Artificial Sequence: Synthetic oligonucleotide
acagaguuugcagcgugga

SEQ ID NO: 804194 - RNA, 19 nt, Artificial Sequence
  Description of Artificial Sequence: Synthetic oligonucleotide
gguagaaaguucccagcca

SEQ ID NO: 804195 - RNA, 19 nt, Artificial Sequence
  Description of Artificial Sequence: Synthetic oligonucleotide
ugcucgguacugcuugguc

SEQ ID NO: 804196 - RNA, 19 nt, Artificial Sequence
  Description of Artificial Sequence: Synthetic oligonucleotide
uguccacacgugaccgggc

SEQ ID NO: 804197 - RNA, 19 nt, Artificial Sequence
  Description of Artificial Sequence: Synthetic oligonucleotide
cggaaccccucuuugaugg

SEQ ID NO: 804198 - RNA, 19 nt, Artificial Sequence
  Description of Artificial Sequence: Synthetic oligonucleotide
caauauuggaggcgucuga

SEQ ID NO: 804199 - RNA, 19 nt, Artificial Sequence
  Description of Artificial Sequence: Synthetic oligonucleotide
auacacugacaaaggccgg

SEQ ID NO: 804200 - RNA, 19 nt, Artificial Sequence
  Description of Artificial Sequence: Synthetic oligonucleotide
ugcgggacaucacgcgugu

SEQ ID NO: 804201 - RNA, 19 nt, Artificial Sequence
  Description of Artificial Sequence: Synthetic oligonucleotide
ggacuauguucuccuuugg

SEQ ID NO: 804202 - RNA, 19 nt, Artificial Sequence
  Description of Artificial Sequence: Synthetic oligonucleotide
caucacgcgugucuucaug

SEQ ID NO: 804203 - RNA, 19 nt, Artificial Sequence
  Description of Artificial Sequence: Synthetic oligonucleotide
uuaugacauaggagccauc

SEQ ID NO: 804204 - RNA, 19 nt, Artificial Sequence
  Description of Artificial Sequence: Synthetic oligonucleotide
ugcgaucucaaagccucga

SEQ ID NO: 804205 - RNA, 19 nt, Artificial Sequence
  Description of Artificial Sequence: Synthetic oligonucleotide
uggcucauggcaguguaua

SEQ ID NO: 804206 - RNA, 19 nt, Artificial Sequence
  Description of Artificial Sequence: Synthetic oligonucleotide
gguguaguggcagccacug

SEQ ID NO: 804207 - RNA, 19 nt, Artificial Sequence
  Description of Artificial Sequence: Synthetic oligonucleotide
gaagucgccaugaaccacu

SEQ ID NO: 804208 - RNA, 19 nt, Artificial Sequence
  Description of Artificial Sequence: Synthetic oligonucleotide
cacgugaccgggcaauguc

SEQ ID NO: 804209 - RNA, 19 nt, Artificial Sequence
  Description of Artificial Sequence: Synthetic oligonucleotide
ggcaguguauauugcucgc

SEQ ID NO: 804210 - RNA, 19 nt, Artificial Sequence
  Description of Artificial Sequence: Synthetic oligonucleotide
uggcacacguacguccuug

SEQ ID NO: 804211 - RNA, 19 nt, Artificial Sequence
  Description of Artificial Sequence: Synthetic oligonucleotide
cacugauuccuggaguguc

SEQ ID NO: 804212 - RNA, 19 nt, Artificial Sequence
  Description of Artificial Sequence: Synthetic oligonucleotide
ugucggcugaggccuggug

SEQ ID NO: 804213 - RNA, 19 nt, Artificial Sequence
  Description of Artificial Sequence: Synthetic oligonucleotide
guugccugggaagguguag

SEQ ID NO: 804214 - RNA, 19 nt, Artificial Sequence
  Description of Artificial Sequence: Synthetic oligonucleotide
uacguccuugaaccauacu

SEQ ID NO: 804215 - RNA, 19 nt, Artificial Sequence
  Description of Artificial Sequence: Synthetic oligonucleotide
gucuccaaggguaggaaaa

SEQ ID NO: 804216 - RNA, 19 nt, Artificial Sequence
  Description of Artificial Sequence: Synthetic oligonucleotide
agccgguguacuucaucug

SEQ ID NO: 804217 - RNA, 19 nt, Artificial Sequence
  Description of Artificial Sequence: Synthetic oligonucleotide
cuggaguguccaugggaac

SEQ ID NO: 804218 - RNA, 19 nt, Artificial Sequence
  Description of Artificial Sequence: Synthetic oligonucleotide
uggguagucgcugcccaga

SEQ ID NO: 804219 - RNA, 19 nt, Artificial Sequence
  Description of Artificial Sequence: Synthetic oligonucleotide
uggcucggucaauuacuug

SEQ ID NO: 804220 - RNA, 19 nt, Artificial Sequence
  Description of Artificial Sequence: Synthetic oligonucleotide
augcgugguaggaucucac

SEQ ID NO: 804221 - RNA, 19 nt, Artificial Sequence
  Description of Artificial Sequence: Synthetic oligonucleotide
ccugugcgaucucaaagcc

SEQ ID NO: 804222 - RNA, 19 nt, Artificial Sequence
  Description of Artificial Sequence: Synthetic oligonucleotide
aaccaagaccauggacugu

SEQ ID NO: 804223 - RNA, 19 nt, Artificial Sequence
  Description of Artificial Sequence: Synthetic oligonucleotide
gcccugugcgaucucaaag

SEQ ID NO: 804224 - RNA, 19 nt, Artificial Sequence
  Description of Artificial Sequence: Synthetic oligonucleotide
auggauggggcuaccauuu

SEQ ID NO: 804225 - RNA, 19 nt, Artificial Sequence
  Description of Artificial Sequence: Synthetic oligonucleotide
gggaaccaagaccauggac

SEQ ID NO: 804226 - RNA, 19 nt, Artificial Sequence
  Description of Artificial Sequence: Synthetic oligonucleotide
augcgcguacuccauguua

SEQ ID NO: 804227 - RNA, 19 nt, Artificial Sequence
  Description of Artificial Sequence: Synthetic oligonucleotide
gaaccccucuuugauggca

SEQ ID NO: 804228 - RNA, 19 nt, Artificial Sequence
  Description of Artificial Sequence: Synthetic oligonucleotide
uggggccguaacccggccc

SEQ ID NO: 804229 - RNA, 19 nt, Artificial Sequence
  Description of Artificial Sequence: Synthetic oligonucleotide
uuggcucauggcaguguau

SEQ ID NO: 804230 - RNA, 19 nt, Artificial Sequence
  Description of Artificial Sequence: Synthetic oligonucleotide
aggagcggauccugcccuc

SEQ ID NO: 804231 - RNA, 19 nt, Artificial Sequence
  Description of Artificial Sequence: Synthetic oligonucleotide
guaacccggcccaugcgug

SEQ ID NO: 804232 - RNA, 19 nt, Artificial Sequence
  Description of Artificial Sequence: Synthetic oligonucleotide
aagucgccaugaaccacug

SEQ ID NO: 804233 - RNA, 19 nt, Artificial Sequence
  Description of Artificial Sequence: Synthetic oligonucleotide
cuuugauggcaaaguccca

SEQ ID NO: 804234 - RNA, 19 nt, Artificial Sequence
  Description of Artificial Sequence: Synthetic oligonucleotide
cuggcgcagaacaauuaaa

SEQ ID NO: 804235 - RNA, 19 nt, Artificial Sequence
  Description of Artificial Sequence: Synthetic oligonucleotide
gcauacagggacaugccca

SEQ ID NO: 804236 - RNA, 19 nt, Artificial Sequence
  Description of Artificial Sequence: Synthetic oligonucleotide
ccuugaaaacccggaaccc

SEQ ID NO: 804237 - RNA, 19 nt, Artificial Sequence
  Description of Artificial Sequence: Synthetic oligonucleotide
gugaccgggcaaugucugc

SEQ ID NO: 804238 - RNA, 19 nt, Artificial Sequence
  Description of Artificial Sequence: Synthetic oligonucleotide
uccacacgugaccgggcaa

SEQ ID NO: 804239 - RNA, 19 nt, Artificial Sequence
  Description of Artificial Sequence: Synthetic oligonucleotide
acccggaaccccucuuuga

SEQ ID NO: 804240 - RNA, 19 nt, Artificial Sequence
  Description of Artificial Sequence: Synthetic oligonucleotide
aaaggccggaugacacuga

SEQ ID NO: 804241 - RNA, 19 nt, Artificial Sequence
  Description of Artificial Sequence: Synthetic oligonucleotide
auauugcucgccgccggcu

SEQ ID NO: 804242 - RNA, 19 nt, Artificial Sequence
  Description of Artificial Sequence: Synthetic oligonucleotide
gcaaucucuagagcugcag

SEQ ID NO: 804243 - RNA, 19 nt, Artificial Sequence
  Description of Artificial Sequence: Synthetic oligonucleotide
accuccgacuuuucaggau

SEQ ID NO: 804244 - RNA, 19 nt, Artificial Sequence
  Description of Artificial Sequence: Synthetic oligonucleotide
uaucagcgggaagggcucc

SEQ ID NO: 804245 - RNA, 19 nt, Artificial Sequence
  Description of Artificial Sequence: Synthetic oligonucleotide
gaaaacccggaaccccucu

SEQ ID NO: 804246 - RNA, 19 nt, Artificial Sequence
  Description of Artificial Sequence: Synthetic oligonucleotide
gugguaggaucucacuugu

SEQ ID NO: 804247 - RNA, 19 nt, Artificial Sequence
  Description of Artificial Sequence: Synthetic oligonucleotide
ggaucucacuugugguuug

SEQ ID NO: 804248 - RNA, 19 nt, Artificial Sequence
  Description of Artificial Sequence: Synthetic oligonucleotide
cagaugcgcguacuccaug

SEQ ID NO: 804249 - RNA, 19 nt, Artificial Sequence
  Description of Artificial Sequence: Synthetic oligonucleotide
agcguggauccaggaugcc

SEQ ID NO: 804250 - RNA, 19 nt, Artificial Sequence
  Description of Artificial Sequence: Synthetic oligonucleotide
uccgacuuuucaggaugga

SEQ ID NO: 804251 - RNA, 19 nt, Artificial Sequence
  Description of Artificial Sequence: Synthetic oligonucleotide
caguggguagucgcugccc

SEQ ID NO: 804252 - RNA, 19 nt, Artificial Sequence
  Description of Artificial Sequence: Synthetic oligonucleotide
ucaugagcgccagggcccu

SEQ ID NO: 804253 - RNA, 19 nt, Artificial Sequence
  Description of Artificial Sequence: Synthetic oligonucleotide
cucaauauuggaggcgucu

SEQ ID NO: 804254 - RNA, 19 nt, Artificial Sequence
  Description of Artificial Sequence: Synthetic oligonucleotide
guccacacgugaccgggca

SEQ ID NO: 804255 - RNA, 19 nt, Artificial Sequence
  Description of Artificial Sequence: Synthetic oligonucleotide
gcaguguauauugcucgcc

SEQ ID NO: 804256 - RNA, 19 nt, Artificial Sequence
  Description of Artificial Sequence: Synthetic oligonucleotide
acgugaccgggcaaugucu

SEQ ID NO: 804257 - RNA, 19 nt, Artificial Sequence
  Description of Artificial Sequence: Synthetic oligonucleotide
ccguaucuggcgcagaaca

SEQ ID NO: 804258 - RNA, 19 nt, Artificial Sequence
  Description of Artificial Sequence: Synthetic oligonucleotide
gccguaacccggcccaugc

SEQ ID NO: 804259 - RNA, 19 nt, Artificial Sequence
  Description of Artificial Sequence: Synthetic oligonucleotide
ugguuuccgcugcucggua

SEQ ID NO: 804260 - RNA, 19 nt, Artificial Sequence
  Description of Artificial Sequence: Synthetic oligonucleotide
ugugaccauuuaugacaua

SEQ ID NO: 804261 - RNA, 19 nt, Artificial Sequence
  Description of Artificial Sequence: Synthetic oligonucleotide
cauacagggacaugcccau

SEQ ID NO: 804262 - RNA, 19 nt, Artificial Sequence
  Description of Artificial Sequence: Synthetic oligonucleotide
gugcgggacaucacgcgug

SEQ ID NO: 804263 - RNA, 19 nt, Artificial Sequence
  Description of Artificial Sequence: Synthetic oligonucleotide
caaagcccuucagccuugg

SEQ ID NO: 804264 - RNA, 19 nt, Artificial Sequence
  Description of Artificial Sequence: Synthetic oligonucleotide
cuggcgaggaauguagucu

SEQ ID NO: 804265 - RNA, 19 nt, Artificial Sequence
  Description of Artificial Sequence: Synthetic oligonucleotide
aucggcaaaagggucccua

SEQ ID NO: 804266 - RNA, 19 nt, Artificial Sequence
  Description of Artificial Sequence: Synthetic oligonucleotide
gugcgaucucaaagccucg

SEQ ID NO: 804267 - RNA, 19 nt, Artificial Sequence
  Description of Artificial Sequence: Synthetic oligonucleotide
gcguacuccauguuaguua

SEQ ID NO: 804268 - RNA, 19 nt, Artificial Sequence
  Description of Artificial Sequence: Synthetic oligonucleotide
gucauacaacuuucugacu

SEQ ID NO: 804269 - RNA, 19 nt, Artificial Sequence
  Description of Artificial Sequence: Synthetic oligonucleotide
gccugaagucgccaugaac

SEQ ID NO: 804270 - RNA, 19 nt, Artificial Sequence
  Description of Artificial Sequence: Synthetic oligonucleotide
ccggucauacaacuuucug

SEQ ID NO: 804271 - RNA, 19 nt, Artificial Sequence
  Description of Artificial Sequence: Synthetic oligonucleotide
guacguccuugaaccauac

SEQ ID NO: 804272 - RNA, 19 nt, Artificial Sequence
  Description of Artificial Sequence: Synthetic oligonucleotide
cugauuccuggagugucca

SEQ ID NO: 804273 - RNA, 19 nt, Artificial Sequence
  Description of Artificial Sequence: Synthetic oligonucleotide
caugcgugguaggaucuca

SEQ ID NO: 804274 - RNA, 19 nt, Artificial Sequence
  Description of Artificial Sequence: Synthetic oligonucleotide
guuccccguaucuggcgca

SEQ ID NO: 804275 - RNA, 19 nt, Artificial Sequence
  Description of Artificial Sequence: Synthetic oligonucleotide
gcugugcgggacaucacgc

SEQ ID NO: 804276 - RNA, 19 nt, Artificial Sequence
  Description of Artificial Sequence: Synthetic oligonucleotide
ucgguacugcuugguccag

SEQ ID NO: 804277 - RNA, 19 nt, Artificial Sequence
  Description of Artificial Sequence: Synthetic oligonucleotide
acaucacgcgugucuucau

SEQ ID NO: 804278 - RNA, 19 nt, Artificial Sequence
  Description of Artificial Sequence: Synthetic oligonucleotide
caccuccgacuuuucagga

SEQ ID NO: 804279 - RNA, 19 nt, Artificial Sequence
  Description of Artificial Sequence: Synthetic oligonucleotide
ggaguguccaugggaacca

SEQ ID NO: 804280 - RNA, 19 nt, Artificial Sequence
  Description of Artificial Sequence: Synthetic oligonucleotide
cagccuuguuuccggucac

SEQ ID NO: 804281 - RNA, 19 nt, Artificial Sequence
  Description of Artificial Sequence: Synthetic oligonucleotide
gcgaucucaaagccucgac

SEQ ID NO: 804282 - RNA, 19 nt, Artificial Sequence
  Description of Artificial Sequence: Synthetic oligonucleotide
cuggauaagccucuccauu

SEQ ID NO: 804283 - RNA, 19 nt, Artificial Sequence
  Description of Artificial Sequence: Synthetic oligonucleotide
gcucgauguccacacguga

SEQ ID NO: 804284 - RNA, 19 nt, Artificial Sequence
  Description of Artificial Sequence: Synthetic oligonucleotide
acagaugcgcguacuccau

SEQ ID NO: 804285 - RNA, 19 nt, Artificial Sequence
  Description of Artificial Sequence: Synthetic oligonucleotide
gcaaagcgcagugcucggg

SEQ ID NO: 804286 - RNA, 19 nt, Artificial Sequence
  Description of Artificial Sequence: Synthetic oligonucleotide
caacggugagccgguguac

SEQ ID NO: 804287 - RNA, 19 nt, Artificial Sequence
  Description of Artificial Sequence: Synthetic oligonucleotide
ggccccucuggagagauga

SEQ ID NO: 804288 - RNA, 19 nt, Artificial Sequence
  Description of Artificial Sequence: Synthetic oligonucleotide
guacuccauguuaguuagc

SEQ ID NO: 804289 - RNA, 19 nt, Artificial Sequence
  Description of Artificial Sequence: Synthetic oligonucleotide
ccgauggcagguagugagc

SEQ ID NO: 804290 - RNA, 19 nt, Artificial Sequence
  Description of Artificial Sequence: Synthetic oligonucleotide
cacguacguccuugaacca

SEQ ID NO: 804291 - RNA, 19 nt, Artificial Sequence
  Description of Artificial Sequence: Synthetic oligonucleotide
gcaacggugagccggugua

SEQ ID NO: 804292 - RNA, 19 nt, Artificial Sequence
  Description of Artificial Sequence: Synthetic oligonucleotide
ggaaccccucuuugauggc

SEQ ID NO: 804293 - RNA, 19 nt, Artificial Sequence
  Description of Artificial Sequence: Synthetic oligonucleotide
agguguaguggcagccacu

SEQ ID NO: 804294 - RNA, 19 nt, Artificial Sequence
  Description of Artificial Sequence: Synthetic oligonucleotide
ggggccguaacccggccca

SEQ ID NO: 804295 - RNA, 19 nt, Artificial Sequence
  Description of Artificial Sequence: Synthetic oligonucleotide
ccuuguuuccggucacauc

SEQ ID NO: 804296 - RNA, 19 nt, Artificial Sequence
  Description of Artificial Sequence: Synthetic oligonucleotide
ccauguuaguuagcccugc

SEQ ID NO: 804297 - RNA, 19 nt, Artificial Sequence
  Description of Artificial Sequence: Synthetic oligonucleotide
cugugcgaucucaaagccu

SEQ ID NO: 804298 - RNA, 19 nt, Artificial Sequence
  Description of Artificial Sequence: Synthetic oligonucleotide
cauguuaguuagcccugcu

SEQ ID NO: 804299 - RNA, 19 nt, Artificial Sequence
  Description of Artificial Sequence: Synthetic oligonucleotide
cgauggcagguagugagcc

SEQ ID NO: 804300 - RNA, 19 nt, Artificial Sequence
  Description of Artificial Sequence: Synthetic oligonucleotide
ccucucugaaaacccgauc

SEQ ID NO: 804301 - RNA, 19 nt, Artificial Sequence
  Description of Artificial Sequence: Synthetic oligonucleotide
gcuguugccgagcuugccu

SEQ ID NO: 804302 - RNA, 19 nt, Artificial Sequence
  Description of Artificial Sequence: Synthetic oligonucleotide
cucggucaauuacuugaua

SEQ ID NO: 804303 - RNA, 19 nt, Artificial Sequence
  Description of Artificial Sequence: Synthetic oligonucleotide
agaugaugccugggcagua

SEQ ID NO: 804304 - RNA, 19 nt, Artificial Sequence
  Description of Artificial Sequence: Synthetic oligonucleotide
guugccgagcuugccuguc

SEQ ID NO: 804305 - RNA, 19 nt, Artificial Sequence
  Description of Artificial Sequence: Synthetic oligonucleotide
guuagcccugcuccauacu

SEQ ID NO: 804306 - RNA, 19 nt, Artificial Sequence
  Description of Artificial Sequence: Synthetic oligonucleotide
guaccuggcgaggaaugua

SEQ ID NO: 804307 - RNA, 19 nt, Artificial Sequence
  Description of Artificial Sequence: Synthetic oligonucleotide
cggagcaucuuccagccca

SEQ ID NO: 804308 - RNA, 19 nt, Artificial Sequence
  Description of Artificial Sequence: Synthetic oligonucleotide
ucgaggagagaggccccuc

SEQ ID NO: 804309 - RNA, 19 nt, Artificial Sequence
  Description of Artificial Sequence: Synthetic oligonucleotide
ggcgaggaauguagucucc

SEQ ID NO: 804310 - RNA, 19 nt, Artificial Sequence
  Description of Artificial Sequence: Synthetic oligonucleotide
caccgccggcuccuguagc

SEQ ID NO: 804311 - RNA, 19 nt, Artificial Sequence
  Description of Artificial Sequence: Synthetic oligonucleotide
ccggaaccccucuuugaug

SEQ ID NO: 804312 - RNA, 19 nt, Artificial Sequence
  Description of Artificial Sequence: Synthetic oligonucleotide
cuggggccguaacccggcc

SEQ ID NO: 804313 - RNA, 19 nt, Artificial Sequence
  Description of Artificial Sequence: Synthetic oligonucleotide
cucgaccggggcccaggac

SEQ ID NO: 804314 - RNA, 19 nt, Artificial Sequence
  Description of Artificial Sequence: Synthetic oligonucleotide
cgugaccgggcaaugucug

SEQ ID NO: 804315 - RNA, 19 nt, Artificial Sequence
  Description of Artificial Sequence: Synthetic oligonucleotide
gccucaauauuggaggcgu

SEQ ID NO: 804316 - RNA, 19 nt, Artificial Sequence
  Description of Artificial Sequence: Synthetic oligonucleotide
gguccacuggggccguaac

SEQ ID NO: 804317 - RNA, 19 nt, Artificial Sequence
  Description of Artificial Sequence: Synthetic oligonucleotide
caccugucggcugaggccu

SEQ ID NO: 804318 - RNA, 19 nt, Artificial Sequence
  Description of Artificial Sequence: Synthetic oligonucleotide
ggcuaccauuuugaucaug

SEQ ID NO: 804319 - RNA, 19 nt, Artificial Sequence
  Description of Artificial Sequence: Synthetic oligonucleotide
gaugcgcguacuccauguu

SEQ ID NO: 804320 - RNA, 19 nt, Artificial Sequence
  Description of Artificial Sequence: Synthetic oligonucleotide
aguuugcagcguggaucca

SEQ ID NO: 804321 - RNA, 19 nt, Artificial Sequence
  Description of Artificial Sequence: Synthetic oligonucleotide
gcaccgccggcuccuguag

SEQ ID NO: 804322 - RNA, 19 nt, Artificial Sequence
  Description of Artificial Sequence: Synthetic oligonucleotide
uagcaacggugagccggug

SEQ ID NO: 804323 - RNA, 19 nt, Artificial Sequence
  Description of Artificial Sequence: Synthetic oligonucleotide
ggagcggauccugcccucc

SEQ ID NO: 804324 - RNA, 19 nt, Artificial Sequence
  Description of Artificial Sequence: Synthetic oligonucleotide
cgucugaugaggccaccug

SEQ ID NO: 804325 - RNA, 19 nt, Artificial Sequence
  Description of Artificial Sequence: Synthetic oligonucleotide
ugcggggaugcugcugguu

SEQ ID NO: 804326 - RNA, 19 nt, Artificial Sequence
  Description of Artificial Sequence: Synthetic oligonucleotide
gaguguccaugggaaccaa

SEQ ID NO: 804327 - RNA, 19 nt, Artificial Sequence
  Description of Artificial Sequence: Synthetic oligonucleotide
ccguaacccggcccaugcg

SEQ ID NO: 804328 - RNA, 19 nt, Artificial Sequence
  Description of Artificial Sequence: Synthetic oligonucleotide
uccccguaucuggcgcaga

SEQ ID NO: 804329 - RNA, 19 nt, Artificial Sequence
  Description of Artificial Sequence: Synthetic oligonucleotide
ccauaccgcaccaggagcu

SEQ ID NO: 804330 - RNA, 19 nt, Artificial Sequence
  Description of Artificial Sequence: Synthetic oligonucleotide
agcgagcaccuccgacuuu

SEQ ID NO: 804331 - RNA, 19 nt, Artificial Sequence
  Description of Artificial Sequence: Synthetic oligonucleotide
aagccucgaccggggccca

SEQ ID NO: 804332 - RNA, 19 nt, Artificial Sequence
  Description of Artificial Sequence: Synthetic oligonucleotide
gugaccgauggcagguagu

SEQ ID NO: 804333 - RNA, 19 nt, Artificial Sequence
  Description of Artificial Sequence: Synthetic oligonucleotide
gccgagcuugccuguccug

SEQ ID NO: 804334 - RNA, 19 nt, Artificial Sequence
  Description of Artificial Sequence: Synthetic oligonucleotide
ccgugccugcucgaugucc

SEQ ID NO: 804335 - RNA, 19 nt, Artificial Sequence
  Description of Artificial Sequence: Synthetic oligonucleotide
ggcucauggcaguguauau

SEQ ID NO: 804336 - RNA, 19 nt, Artificial Sequence
  Description of Artificial Sequence: Synthetic oligonucleotide
ccgacuuuucaggauggaa

SEQ ID NO: 804337 - RNA, 19 nt, Artificial Sequence
  Description of Artificial Sequence: Synthetic oligonucleotide
gccucgaccggggcccagg

SEQ ID NO: 804338 - RNA, 19 nt, Artificial Sequence
  Description of Artificial Sequence: Synthetic oligonucleotide
ggcaccgccggcuccugua

SEQ ID NO: 804339 - RNA, 19 nt, Artificial Sequence
  Description of Artificial Sequence: Synthetic oligonucleotide
ccggcccaugcgugguagg

SEQ ID NO: 804340 - RNA, 19 nt, Artificial Sequence
  Description of Artificial Sequence: Synthetic oligonucleotide
cagcgagcaccuccgacuu

SEQ ID NO: 804341 - RNA, 19 nt, Artificial Sequence
  Description of Artificial Sequence: Synthetic oligonucleotide
gcgaggaauguagucuccu

SEQ ID NO: 804342 - RNA, 19 nt, Artificial Sequence
  Description of Artificial Sequence: Synthetic oligonucleotide
ggcgucugaugaggccacc

SEQ ID NO: 804343 - RNA, 19 nt, Artificial Sequence
  Description of Artificial Sequence: Synthetic oligonucleotide
ggccguaacccggcccaug

SEQ ID NO: 804344 - RNA, 19 nt, Artificial Sequence
  Description of Artificial Sequence: Synthetic oligonucleotide
accugucggcugaggccug

SEQ ID NO: 804345 - RNA, 19 nt, Artificial Sequence
  Description of Artificial Sequence: Synthetic oligonucleotide
ccaugcgugguaggaucuc

SEQ ID NO: 804346 - RNA, 19 nt, Artificial Sequence
  Description of Artificial Sequence: Synthetic oligonucleotide
acccggcccaugcguggua

SEQ ID NO: 804347 - RNA, 19 nt, Artificial Sequence
  Description of Artificial Sequence: Synthetic oligonucleotide
gcucgggcccaagcaaaga

SEQ ID NO: 804348 - RNA, 19 nt, Artificial Sequence
  Description of Artificial Sequence: Synthetic oligonucleotide
cccggcccaugcgugguag

SEQ ID NO: 804349 - RNA, 19 nt, Artificial Sequence
  Description of Artificial Sequence: Synthetic oligonucleotide
agccucgaccggggcccag

SEQ ID NO: 804350 - RNA, 19 nt, Artificial Sequence
  Description of Artificial Sequence: Synthetic oligonucleotide
cguaacccggcccaugcgu

SEQ ID NO: 804351 - RNA, 19 nt, Artificial Sequence
  Description of Artificial Sequence: Synthetic oligonucleotide
cggugagccgguguacuuc

SEQ ID NO: 804352 - RNA, 19 nt, Artificial Sequence
  Description of Artificial Sequence: Synthetic oligonucleotide
ccccguaucuggcgcagaa

SEQ ID NO: 804353 - RNA, 19 nt, Artificial Sequence
  Description of Artificial Sequence: Synthetic oligonucleotide
cccaugcgugguaggaucu

SEQ ID NO: 804354 - RNA, 19 nt, Artificial Sequence
  Description of Artificial Sequence: Synthetic oligonucleotide
cgggacaucacgcgugucu

SEQ ID NO: 804355 - RNA, 19 nt, Artificial Sequence
  Description of Artificial Sequence: Synthetic oligonucleotide
gcgagcaccuccgacuuuu

SEQ ID NO: 804356 - RNA, 19 nt, Artificial Sequence
  Description of Artificial Sequence: Synthetic oligonucleotide
gccggucauacaacuuucu

SEQ ID NO: 804357 - RNA, 19 nt, Artificial Sequence
  Description of Artificial Sequence: Synthetic oligonucleotide
caugagcgccagggcccuc

SEQ ID NO: 804358 - RNA, 19 nt, Artificial Sequence
  Description of Artificial Sequence: Synthetic oligonucleotide
ccgcuuugcuuggcuguug

SEQ ID NO: 804359 - RNA, 19 nt, Artificial Sequence
  Description of Artificial Sequence: Synthetic oligonucleotide
gcgcguacuccauguuagu

SEQ ID NO: 804360 - RNA, 19 nt, Artificial Sequence
  Description of Artificial Sequence: Synthetic oligonucleotide
gcgucugaugaggccaccu

SEQ ID NO: 804361 - RNA, 19 nt, Artificial Sequence
  Description of Artificial Sequence: Synthetic oligonucleotide
cgccaugaaccacuguggu

SEQ ID NO: 804362 - RNA, 19 nt, Artificial Sequence
  Description of Artificial Sequence: Synthetic oligonucleotide
ccgagcuugccuguccugu

SEQ ID NO: 804363 - RNA, 19 nt, Artificial Sequence
  Description of Artificial Sequence: Synthetic oligonucleotide
ccucgaccggggcccagga

SEQ ID NO: 804364 - RNA, 19 nt, Artificial Sequence
  Description of Artificial Sequence: Synthetic oligonucleotide
caucggcaaaagggucccu

SEQ ID NO: 804365 - RNA, 19 nt, Artificial Sequence
  Description of Artificial Sequence: Synthetic oligonucleotide
gcgggacaucacgcguguc

SEQ ID NO: 804366 - RNA, 19 nt, Artificial Sequence
  Description of Artificial Sequence: Synthetic oligonucleotide
cggcccaugcgugguagga

SEQ ID NO: 804367 - RNA, 19 nt, Artificial Sequence
  Description of Artificial Sequence: Synthetic oligonucleotide
ccauugcggggaugcugcu

SEQ ID NO: 804368 - RNA, 19 nt, Artificial Sequence
  Description of Artificial Sequence: Synthetic oligonucleotide
gcucgccgccggcugggcu

SEQ ID NO: 804369 - RNA, 19 nt, Artificial Sequence
  Description of Artificial Sequence: Synthetic oligonucleotide
cgcguacuccauguuaguu

SEQ ID NO: 804370 - RNA, 19 nt, Artificial Sequence
  Description of Artificial Sequence: Synthetic oligonucleotide
gggccguaacccggcccau

SEQ ID NO: 804371 - RNA, 19 nt, Artificial Sequence
  Description of Artificial Sequence: Synthetic oligonucleotide
ccggcagggaggggucuuu

SEQ ID NO: 804372 - RNA, 19 nt, Artificial Sequence
  Description of Artificial Sequence: Synthetic oligonucleotide
aacagcaugaauuuaagcu

SEQ ID NO: 804373 - RNA, 19 nt, Artificial Sequence
  Description of Artificial Sequence: Synthetic oligonucleotide
ugaauuaauauuauucaag

SEQ ID NO: 804374 - RNA, 19 nt, Artificial Sequence
  Description of Artificial Sequence: Synthetic oligonucleotide
aacauuaugucccuaaugu

SEQ ID NO: 804375 - RNA, 19 nt, Artificial Sequence
  Description of Artificial Sequence: Synthetic oligonucleotide
acuauuguaugcaagaccc

SEQ ID NO: 804376 - RNA, 19 nt, Artificial Sequence
  Description of Artificial Sequence: Synthetic oligonucleotide
uguccgauaauccaggucc

SEQ ID NO: 804377 - RNA, 19 nt, Artificial Sequence
  Description of Artificial Sequence: Synthetic oligonucleotide
aaacuguuaacuaaaaucu

SEQ ID NO: 804378 - RNA, 19 nt, Artificial Sequence
  Description of Artificial Sequence: Synthetic oligonucleotide
uuagugaagaacuaguggu

SEQ ID NO: 804379 - RNA, 19 nt, Artificial Sequence
  Description of Artificial Sequence: Synthetic oligonucleotide
caugaauuuaagcuaaagg

SEQ ID NO: 804380 - RNA, 19 nt, Artificial Sequence
  Description of Artificial Sequence: Synthetic oligonucleotide
ucauuaaaggcccauguug

SEQ ID NO: 804381 - RNA, 19 nt, Artificial Sequence
  Description of Artificial Sequence: Synthetic oligonucleotide
aaucaauagagcuaguuuu

SEQ ID NO: 804382 - RNA, 19 nt, Artificial Sequence
  Description of Artificial Sequence: Synthetic oligonucleotide
uucgagauuuggcagaccg

SEQ ID NO: 804383 - RNA, 19 nt, Artificial Sequence
  Description of Artificial Sequence: Synthetic oligonucleotide
auuaccaccauaguuauag

SEQ ID NO: 804384 - RNA, 19 nt, Artificial Sequence
  Description of Artificial Sequence: Synthetic oligonucleotide
cagaagaucugcaacaggg

SEQ ID NO: 804385 - RNA, 19 nt, Artificial Sequence
  Description of Artificial Sequence: Synthetic oligonucleotide
ucuaacaugacaucuuucu

SEQ ID NO: 804386 - RNA, 19 nt, Artificial Sequence
  Description of Artificial Sequence: Synthetic oligonucleotide
cuugugaguauccaggucc

SEQ ID NO: 804387 - RNA, 19 nt, Artificial Sequence
  Description of Artificial Sequence: Synthetic oligonucleotide
aguagauacugguucuucc

SEQ ID NO: 804388 - RNA, 19 nt, Artificial Sequence
  Description of Artificial Sequence: Synthetic oligonucleotide
uguaauuaccaccauaguu

SEQ ID NO: 804389 - RNA, 19 nt, Artificial Sequence
  Description of Artificial Sequence: Synthetic oligonucleotide
ugcuacgagaucuugagug

SEQ ID NO: 804390 - RNA, 19 nt, Artificial Sequence
  Description of Artificial Sequence: Synthetic oligonucleotide
aaacauuaugucccuaaug

SEQ ID NO: 804391 - RNA, 19 nt, Artificial Sequence
  Description of Artificial Sequence: Synthetic oligonucleotide
augcauuugaggcuuuugc

SEQ ID NO: 804392 - RNA, 19 nt, Artificial Sequence
  Description of Artificial Sequence: Synthetic oligonucleotide
uguagaggucauuaaaggc

SEQ ID NO: 804393 - RNA, 19 nt, Artificial Sequence
  Description of Artificial Sequence: Synthetic oligonucleotide
ucugugacgauguacaauc

SEQ ID NO: 804394 - RNA, 19 nt, Artificial Sequence
  Description of Artificial Sequence: Synthetic oligonucleotide
acucuugagaguuagugug

SEQ ID NO: 804395 - RNA, 19 nt, Artificial Sequence
  Description of Artificial Sequence: Synthetic oligonucleotide
agugccuagaugaauaugg

SEQ ID NO: 804396 - RNA, 19 nt, Artificial Sequence
  Description of Artificial Sequence: Synthetic oligonucleotide
aaacagauacucaguaugg

SEQ ID NO: 804397 - RNA, 19 nt, Artificial Sequence
  Description of Artificial Sequence: Synthetic oligonucleotide
augguaacccucuaccucg

SEQ ID NO: 804398 - RNA, 19 nt, Artificial Sequence
  Description of Artificial Sequence: Synthetic oligonucleotide
uuauaguugugcaucuuug

SEQ ID NO: 804399 - RNA, 19 nt, Artificial Sequence
  Description of Artificial Sequence: Synthetic oligonucleotide
caugcaugaggcuagggcc

SEQ ID NO: 804400 - RNA, 19 nt, Artificial Sequence
  Description of Artificial Sequence: Synthetic oligonucleotide
ucuuaagcuaucagcaucu

SEQ ID NO: 804401 - RNA, 19 nt, Artificial Sequence
  Description of Artificial Sequence: Synthetic oligonucleotide
gacgauguacaaucaauag

SEQ ID NO: 804402 - RNA, 19 nt, Artificial Sequence
  Description of Artificial Sequence: Synthetic oligonucleotide
aauaugggcuucugcuucg

SEQ ID NO: 804403 - RNA, 19 nt, Artificial Sequence
  Description of Artificial Sequence: Synthetic oligonucleotide
auauuauucaagucucuug

SEQ ID NO: 804404 - RNA, 19 nt, Artificial Sequence
  Description of Artificial Sequence: Synthetic oligonucleotide
ucugcuacgagaucuugag

SEQ ID NO: 804405 - RNA, 19 nt, Artificial Sequence
  Description of Artificial Sequence: Synthetic oligonucleotide
acugagucaagagaacugc

SEQ ID NO: 804406 - RNA, 19 nt, Artificial Sequence
  Description of Artificial Sequence: Synthetic oligonucleotide
uuuucuguccgauaaucca

SEQ ID NO: 804407 - RNA, 19 nt, Artificial Sequence
  Description of Artificial Sequence: Synthetic oligonucleotide
uugaauuaauauuauucaa

SEQ ID NO: 804408 - RNA, 19 nt, Artificial Sequence
  Description of Artificial Sequence: Synthetic oligonucleotide
aaaugcuugagugacgacu

SEQ ID NO: 804409 - RNA, 19 nt, Artificial Sequence
  Description of Artificial Sequence: Synthetic oligonucleotide
guagaggucauuaaaggcc

SEQ ID NO: 804410 - RNA, 19 nt, Artificial Sequence
  Description of Artificial Sequence: Synthetic oligonucleotide
uuuucaagguuccaccacu

SEQ ID NO: 804411 - RNA, 19 nt, Artificial Sequence
  Description of Artificial Sequence: Synthetic oligonucleotide
uccucuguauccuugugag

SEQ ID NO: 804412 - RNA, 19 nt, Artificial Sequence
  Description of Artificial Sequence: Synthetic oligonucleotide
ugaguauccagguccuugg

SEQ ID NO: 804413 - RNA, 19 nt, Artificial Sequence
  Description of Artificial Sequence: Synthetic oligonucleotide
cuacaaucaaguuauuguc

SEQ ID NO: 804414 - RNA, 19 nt, Artificial Sequence
  Description of Artificial Sequence: Synthetic oligonucleotide
aagguaauggugguaaugu

SEQ ID NO: 804415 - RNA, 19 nt, Artificial Sequence
  Description of Artificial Sequence: Synthetic oligonucleotide
aguauccagguccuugggc

SEQ ID NO: 804416 - RNA, 19 nt, Artificial Sequence
  Description of Artificial Sequence: Synthetic oligonucleotide
uuuguuacuugaaggggug

SEQ ID NO: 804417 - RNA, 19 nt, Artificial Sequence
  Description of Artificial Sequence: Synthetic oligonucleotide
agugugcuaggagaaaugc

SEQ ID NO: 804418 - RNA, 19 nt, Artificial Sequence
  Description of Artificial Sequence: Synthetic oligonucleotide
uauugucuaccuuuguuac

SEQ ID NO: 804419 - RNA, 19 nt, Artificial Sequence
  Description of Artificial Sequence: Synthetic oligonucleotide
guacaaucaauagagcuag

SEQ ID NO: 804420 - RNA, 19 nt, Artificial Sequence
  Description of Artificial Sequence: Synthetic oligonucleotide
uuauugucuaccuuuguua

SEQ ID NO: 804421 - RNA, 19 nt, Artificial Sequence
  Description of Artificial Sequence: Synthetic oligonucleotide
gaucuagacaaucuguguc

SEQ ID NO: 804422 - RNA, 19 nt, Artificial Sequence
  Description of Artificial Sequence: Synthetic oligonucleotide
auuaacugagucaagagaa

SEQ ID NO: 804423 - RNA, 19 nt, Artificial Sequence
  Description of Artificial Sequence: Synthetic oligonucleotide
uuguuugcgaagcacuggc

SEQ ID NO: 804424 - RNA, 19 nt, Artificial Sequence
  Description of Artificial Sequence: Synthetic oligonucleotide
aucggaguuucuuuucuac

SEQ ID NO: 804425 - RNA, 19 nt, Artificial Sequence
  Description of Artificial Sequence: Synthetic oligonucleotide
ugcaugcucaguuuuaagu

SEQ ID NO: 804426 - RNA, 19 nt, Artificial Sequence
  Description of Artificial Sequence: Synthetic oligonucleotide
uaugcaagacccuuuucca

SEQ ID NO: 804427 - RNA, 19 nt, Artificial Sequence
  Description of Artificial Sequence: Synthetic oligonucleotide
uguugaguccuuuauuaac

SEQ ID NO: 804428 - RNA, 19 nt, Artificial Sequence
  Description of Artificial Sequence: Synthetic oligonucleotide
aaaacauuaugucccuaau

SEQ ID NO: 804429 - RNA, 19 nt, Artificial Sequence
  Description of Artificial Sequence: Synthetic oligonucleotide
uucuguccgauaauccagg

SEQ ID NO: 804430 - RNA, 19 nt, Artificial Sequence
  Description of Artificial Sequence: Synthetic oligonucleotide
gaugaauaugggcuucugc

SEQ ID NO: 804431 - RNA, 19 nt, Artificial Sequence
  Description of Artificial Sequence: Synthetic oligonucleotide
aagagaacugcaaaugaca

SEQ ID NO: 804432 - RNA, 19 nt, Artificial Sequence
  Description of Artificial Sequence: Synthetic oligonucleotide
caaaggagcuucauguccc

SEQ ID NO: 804433 - RNA, 19 nt, Artificial Sequence
  Description of Artificial Sequence: Synthetic oligonucleotide
aaagguaauggugguaaug

SEQ ID NO: 804434 - RNA, 19 nt, Artificial Sequence
  Description of Artificial Sequence: Synthetic oligonucleotide
uuuguucaauucagcagcc

SEQ ID NO: 804435 - RNA, 19 nt, Artificial Sequence
  Description of Artificial Sequence: Synthetic oligonucleotide
agugaagaacuaguggugg

SEQ ID NO: 804436 - RNA, 19 nt, Artificial Sequence
  Description of Artificial Sequence: Synthetic oligonucleotide
agagcuaguuuuaagaaca

SEQ ID NO: 804437 - RNA, 19 nt, Artificial Sequence
  Description of Artificial Sequence: Synthetic oligonucleotide
cuguuaacuaaaaucugug

SEQ ID NO: 804438 - RNA, 19 nt, Artificial Sequence
  Description of Artificial Sequence: Synthetic oligonucleotide
ugccucuuaagcuaucagc

SEQ ID NO: 804439 - RNA, 19 nt, Artificial Sequence
  Description of Artificial Sequence: Synthetic oligonucleotide
uucaauucagcagccaagc

SEQ ID NO: 804440 - RNA, 19 nt, Artificial Sequence
  Description of Artificial Sequence: Synthetic oligonucleotide
uaugguaacccucuaccuc

SEQ ID NO: 804441 - RNA, 19 nt, Artificial Sequence
  Description of Artificial Sequence: Synthetic oligonucleotide
uagugaagaacuaguggug

SEQ ID NO: 804442 - RNA, 19 nt, Artificial Sequence
  Description of Artificial Sequence: Synthetic oligonucleotide
uaacccucuaccucgaccu

SEQ ID NO: 804443 - RNA, 19 nt, Artificial Sequence
  Description of Artificial Sequence: Synthetic oligonucleotide
auagagcuaguuuuaagaa

SEQ ID NO: 804444 - RNA, 19 nt, Artificial Sequence
  Description of Artificial Sequence: Synthetic oligonucleotide
caccacuugaaggagaagg

SEQ ID NO: 804445 - RNA, 19 nt, Artificial Sequence
  Description of Artificial Sequence: Synthetic oligonucleotide
agugcuagguucuggaggu

SEQ ID NO: 804446 - RNA, 19 nt, Artificial Sequence
  Description of Artificial Sequence: Synthetic oligonucleotide
caagagaacugcaaaugac

SEQ ID NO: 804447 - RNA, 19 nt, Artificial Sequence
  Description of Artificial Sequence: Synthetic oligonucleotide
aacugacaauaauacaaaa

SEQ ID NO: 804448 - RNA, 19 nt, Artificial Sequence
  Description of Artificial Sequence: Synthetic oligonucleotide
cacuauuguaugcaagacc

SEQ ID NO: 804449 - RNA, 19 nt, Artificial Sequence
  Description of Artificial Sequence: Synthetic oligonucleotide
uauccuugugaguauccag

SEQ ID NO: 804450 - RNA, 19 nt, Artificial Sequence
  Description of Artificial Sequence: Synthetic oligonucleotide
ugagaguuagugugcuagg

SEQ ID NO: 804451 - RNA, 19 nt, Artificial Sequence
  Description of Artificial Sequence: Synthetic oligonucleotide
uagagcuaguuuuaagaac

SEQ ID NO: 804452 - RNA, 19 nt, Artificial Sequence
  Description of Artificial Sequence: Synthetic oligonucleotide
aaaucagcaagcagacauc

SEQ ID NO: 804453 - RNA, 19 nt, Artificial Sequence
  Description of Artificial Sequence: Synthetic oligonucleotide
gaacagcaugaauuuaagc

SEQ ID NO: 804454 - RNA, 19 nt, Artificial Sequence
  Description of Artificial Sequence: Synthetic oligonucleotide
ugacgauguacaaucaaua

SEQ ID NO: 804455 - RNA, 19 nt, Artificial Sequence
  Description of Artificial Sequence: Synthetic oligonucleotide
gaauaugggcuucugcuuc

SEQ ID NO: 804456 - RNA, 19 nt, Artificial Sequence
  Description of Artificial Sequence: Synthetic oligonucleotide
caugguuuguuugcgaagc

SEQ ID NO: 804457 - RNA, 19 nt, Artificial Sequence
  Description of Artificial Sequence: Synthetic oligonucleotide
uucacaugguuuguuugcg

SEQ ID NO: 804458 - RNA, 19 nt, Artificial Sequence
  Description of Artificial Sequence: Synthetic oligonucleotide
ugcaagacccuuuuccaca

SEQ ID NO: 804459 - RNA, 19 nt, Artificial Sequence
  Description of Artificial Sequence: Synthetic oligonucleotide
aaguggcuuaguuuucucu

SEQ ID NO: 804460 - RNA, 19 nt, Artificial Sequence
  Description of Artificial Sequence: Synthetic oligonucleotide
ugccugaaauugcagcuag

SEQ ID NO: 804461 - RNA, 19 nt, Artificial Sequence
  Description of Artificial Sequence: Synthetic oligonucleotide
uauucaagucucuuggauu

SEQ ID NO: 804462 - RNA, 19 nt, Artificial Sequence
  Description of Artificial Sequence: Synthetic oligonucleotide
uugagugccuagaugaaua

SEQ ID NO: 804463 - RNA, 19 nt, Artificial Sequence
  Description of Artificial Sequence: Synthetic oligonucleotide
uaauggugguaauguagag

SEQ ID NO: 804464 - RNA, 19 nt, Artificial Sequence
  Description of Artificial Sequence: Synthetic oligonucleotide
cuagaaaagucuuuccaga

SEQ ID NO: 804465 - RNA, 19 nt, Artificial Sequence
  Description of Artificial Sequence: Synthetic oligonucleotide
uaauuaccaccauaguuau

SEQ ID NO: 804466 - RNA, 19 nt, Artificial Sequence
  Description of Artificial Sequence: Synthetic oligonucleotide
aucaaguuauugucuaccu

SEQ ID NO: 804467 - RNA, 19 nt, Artificial Sequence
  Description of Artificial Sequence: Synthetic oligonucleotide
augcaagacccuuuuccac

SEQ ID NO: 804468 - RNA, 19 nt, Artificial Sequence
  Description of Artificial Sequence: Synthetic oligonucleotide
uagggguagaugcauuuga

SEQ ID NO: 804469 - RNA, 19 nt, Artificial Sequence
  Description of Artificial Sequence: Synthetic oligonucleotide
ugaguugcaaaggagcuuc

SEQ ID NO: 804470 - RNA, 19 nt, Artificial Sequence
  Description of Artificial Sequence: Synthetic oligonucleotide
uucucacuuuucaagguuc

SEQ ID NO: 804471 - RNA, 19 nt, Artificial Sequence
  Description of Artificial Sequence: Synthetic oligonucleotide
accaccauaguuauaguug

SEQ ID NO: 804472 - RNA, 19 nt, Artificial Sequence
  Description of Artificial Sequence: Synthetic oligonucleotide
cuacucuugagaguuagug

SEQ ID NO: 804473 - RNA, 19 nt, Artificial Sequence
  Description of Artificial Sequence: Synthetic oligonucleotide
ugaugugcuaauguguccu

SEQ ID NO: 804474 - RNA, 19 nt, Artificial Sequence
  Description of Artificial Sequence: Synthetic oligonucleotide
gaggcagaauccgaggccg

SEQ ID NO: 804475 - RNA, 19 nt, Artificial Sequence
  Description of Artificial Sequence: Synthetic oligonucleotide
agauuuggcagaccgucug

SEQ ID NO: 804476 - RNA, 19 nt, Artificial Sequence
  Description of Artificial Sequence: Synthetic oligonucleotide
agucaagagaacugcaaau

SEQ ID NO: 804477 - RNA, 19 nt, Artificial Sequence
  Description of Artificial Sequence: Synthetic oligonucleotide
caauagagcuaguuuuaag

SEQ ID NO: 804478 - RNA, 19 nt, Artificial Sequence
  Description of Artificial Sequence: Synthetic oligonucleotide
agcuaguuuuaagaacagc

SEQ ID NO: 804479 - RNA, 19 nt, Artificial Sequence
  Description of Artificial Sequence: Synthetic oligonucleotide
acaaucugugucugcuacg

SEQ ID NO: 804480 - RNA, 19 nt, Artificial Sequence
  Description of Artificial Sequence: Synthetic oligonucleotide
ugugcauaguucagaagau

SEQ ID NO: 804481 - RNA, 19 nt, Artificial Sequence
  Description of Artificial Sequence: Synthetic oligonucleotide
ugugcuaauguguccucug

SEQ ID NO: 804482 - RNA, 19 nt, Artificial Sequence
  Description of Artificial Sequence: Synthetic oligonucleotide
uaacugagucaagagaacu

SEQ ID NO: 804483 - RNA, 19 nt, Artificial Sequence
  Description of Artificial Sequence: Synthetic oligonucleotide
cuugagugacgacuucugg

SEQ ID NO: 804484 - RNA, 19 nt, Artificial Sequence
  Description of Artificial Sequence: Synthetic oligonucleotide
aucccggagugcuagguuc

SEQ ID NO: 804485 - RNA, 19 nt, Artificial Sequence
  Description of Artificial Sequence: Synthetic oligonucleotide
cuuguugaguccuuuauua

SEQ ID NO: 804486 - RNA, 19 nt, Artificial Sequence
  Description of Artificial Sequence: Synthetic oligonucleotide
cagcaugagggucaguuag

SEQ ID NO: 804487 - RNA, 19 nt, Artificial Sequence
  Description of Artificial Sequence: Synthetic oligonucleotide
cucuuaagcuaucagcauc

SEQ ID NO: 804488 - RNA, 19 nt, Artificial Sequence
  Description of Artificial Sequence: Synthetic oligonucleotide
aaguuauugucuaccuuug

SEQ ID NO: 804489 - RNA, 19 nt, Artificial Sequence
  Description of Artificial Sequence: Synthetic oligonucleotide
uuacagaaauauugccucu

SEQ ID NO: 804490 - RNA, 19 nt, Artificial Sequence
  Description of Artificial Sequence: Synthetic oligonucleotide
gugaagaacuagugguggg

SEQ ID NO: 804491 - RNA, 19 nt, Artificial Sequence
  Description of Artificial Sequence: Synthetic oligonucleotide
uagacaaucugugucugcu

SEQ ID NO: 804492 - RNA, 19 nt, Artificial Sequence
  Description of Artificial Sequence: Synthetic oligonucleotide
gcauuugaggcuuuugcag

SEQ ID NO: 804493 - RNA, 19 nt, Artificial Sequence
  Description of Artificial Sequence: Synthetic oligonucleotide
aacagauacucaguauggu

SEQ ID NO: 804494 - RNA, 19 nt, Artificial Sequence
  Description of Artificial Sequence: Synthetic oligonucleotide
ucguugaucaggaggcaga

SEQ ID NO: 804495 - RNA, 19 nt, Artificial Sequence
  Description of Artificial Sequence: Synthetic oligonucleotide
uagugugcuaggagaaaug

SEQ ID NO: 804496 - RNA, 19 nt, Artificial Sequence
  Description of Artificial Sequence: Synthetic oligonucleotide
cacaagugugcauaguuca

SEQ ID NO: 804497 - RNA, 19 nt, Artificial Sequence
  Description of Artificial Sequence: Synthetic oligonucleotide
cucuugagaguuagugugc

SEQ ID NO: 804498 - RNA, 19 nt, Artificial Sequence
  Description of Artificial Sequence: Synthetic oligonucleotide
ugcuagguucuggaggugg

SEQ ID NO: 804499 - RNA, 19 nt, Artificial Sequence
  Description of Artificial Sequence: Synthetic oligonucleotide
gauacucaguaugguaacc

SEQ ID NO: 804500 - RNA, 19 nt, Artificial Sequence
  Description of Artificial Sequence: Synthetic oligonucleotide
gaagggucguugcuguuug

SEQ ID NO: 804501 - RNA, 19 nt, Artificial Sequence
  Description of Artificial Sequence: Synthetic oligonucleotide
auuaaaggcccauguugcu

SEQ ID NO: 804502 - RNA, 19 nt, Artificial Sequence
  Description of Artificial Sequence: Synthetic oligonucleotide
uacucaguaugguaacccu

SEQ ID NO: 804503 - RNA, 19 nt, Artificial Sequence
  Description of Artificial Sequence: Synthetic oligonucleotide
ugaauaugggcuucugcuu

SEQ ID NO: 804504 - RNA, 19 nt, Artificial Sequence
  Description of Artificial Sequence: Synthetic oligonucleotide
uguaggggcugcgcgagcg

SEQ ID NO: 804505 - RNA, 19 nt, Artificial Sequence
  Description of Artificial Sequence: Synthetic oligonucleotide
ucaaguuauugucuaccuu

SEQ ID NO: 804506 - RNA, 19 nt, Artificial Sequence
  Description of Artificial Sequence: Synthetic oligonucleotide
guaauggugguaauguaga

SEQ ID NO: 804507 - RNA, 19 nt, Artificial Sequence
  Description of Artificial Sequence: Synthetic oligonucleotide
aaugcuugagugacgacuu

SEQ ID NO: 804508 - RNA, 19 nt, Artificial Sequence
  Description of Artificial Sequence: Synthetic oligonucleotide
uggcccuguagaagggucg

SEQ ID NO: 804509 - RNA, 19 nt, Artificial Sequence
  Description of Artificial Sequence: Synthetic oligonucleotide
agugugcauaguucagaag

SEQ ID NO: 804510 - RNA, 19 nt, Artificial Sequence
  Description of Artificial Sequence: Synthetic oligonucleotide
uugccucuuaagcuaucag

SEQ ID NO: 804511 - RNA, 19 nt, Artificial Sequence
  Description of Artificial Sequence: Synthetic oligonucleotide
ugcuucgagauuuggcaga

SEQ ID NO: 804512 - RNA, 19 nt, Artificial Sequence
  Description of Artificial Sequence: Synthetic oligonucleotide
uuagugugcuaggagaaau

SEQ ID NO: 804513 - RNA, 19 nt, Artificial Sequence
  Description of Artificial Sequence: Synthetic oligonucleotide
uauuguaugcaagacccuu

SEQ ID NO: 804514 - RNA, 19 nt, Artificial Sequence
  Description of Artificial Sequence: Synthetic oligonucleotide
cuugguguaaguggcuuag

SEQ ID NO: 804515 - RNA, 19 nt, Artificial Sequence
  Description of Artificial Sequence: Synthetic oligonucleotide
aguggcuuaguuuucucuu

SEQ ID NO: 804516 - RNA, 19 nt, Artificial Sequence
  Description of Artificial Sequence: Synthetic oligonucleotide
guaacccucuaccucgacc

SEQ ID NO: 804517 - RNA, 19 nt, Artificial Sequence
  Description of Artificial Sequence: Synthetic oligonucleotide
agcuuuacuuuccuuccca

SEQ ID NO: 804518 - RNA, 19 nt, Artificial Sequence
  Description of Artificial Sequence: Synthetic oligonucleotide
ucacuauuguaugcaagac

SEQ ID NO: 804519 - RNA, 19 nt, Artificial Sequence
  Description of Artificial Sequence: Synthetic oligonucleotide
uguaaguggcuuaguuuuc

SEQ ID NO: 804520 - RNA, 19 nt, Artificial Sequence
  Description of Artificial Sequence: Synthetic oligonucleotide
agccaagcuacucuugaga

SEQ ID NO: 804521 - RNA, 19 nt, Artificial Sequence
  Description of Artificial Sequence: Synthetic oligonucleotide
ugcuaggagaaaugcuuga

SEQ ID NO: 804522 - RNA, 19 nt, Artificial Sequence
  Description of Artificial Sequence: Synthetic oligonucleotide
uugucuaccuuuguuacuu

SEQ ID NO: 804523 - RNA, 19 nt, Artificial Sequence
  Description of Artificial Sequence: Synthetic oligonucleotide
acggcaaaucagcaagcag

SEQ ID NO: 804524 - RNA, 19 nt, Artificial Sequence
  Description of Artificial Sequence: Synthetic oligonucleotide
uuaagcuaucagcaucuuu

SEQ ID NO: 804525 - RNA, 19 nt, Artificial Sequence
  Description of Artificial Sequence: Synthetic oligonucleotide
aaucugugacgauguacaa

SEQ ID NO: 804526 - RNA, 19 nt, Artificial Sequence
  Description of Artificial Sequence: Synthetic oligonucleotide
uugugaguauccagguccu

SEQ ID NO: 804527 - RNA, 19 nt, Artificial Sequence
  Description of Artificial Sequence: Synthetic oligonucleotide
uccuguaauuaccaccaua

SEQ ID NO: 804528 - RNA, 19 nt, Artificial Sequence
  Description of Artificial Sequence: Synthetic oligonucleotide
gcaaaggagcuucaugucc

SEQ ID NO: 804529 - RNA, 19 nt, Artificial Sequence
  Description of Artificial Sequence: Synthetic oligonucleotide
aacggcaaaucagcaagca

SEQ ID NO: 804530 - RNA, 19 nt, Artificial Sequence
  Description of Artificial Sequence: Synthetic oligonucleotide
gaguauccagguccuuggg

SEQ ID NO: 804531 - RNA, 19 nt, Artificial Sequence
  Description of Artificial Sequence: Synthetic oligonucleotide
uuguaugcaagacccuuuu

SEQ ID NO: 804532 - RNA, 19 nt, Artificial Sequence
  Description of Artificial Sequence: Synthetic oligonucleotide
cuuggugacuuuaucuaca

SEQ ID NO: 804533 - RNA, 19 nt, Artificial Sequence
  Description of Artificial Sequence: Synthetic oligonucleotide
agcaagcagacaucggagu

SEQ ID NO: 804534 - RNA, 19 nt, Artificial Sequence
  Description of Artificial Sequence: Synthetic oligonucleotide
ucccgauccauuuucucuc

SEQ ID NO: 804535 - RNA, 19 nt, Artificial Sequence
  Description of Artificial Sequence: Synthetic oligonucleotide
ugguguaaguggcuuaguu

SEQ ID NO: 804536 - RNA, 19 nt, Artificial Sequence
  Description of Artificial Sequence: Synthetic oligonucleotide
gauugcugccugaaauugc

SEQ ID NO: 804537 - RNA, 19 nt, Artificial Sequence
  Description of Artificial Sequence: Synthetic oligonucleotide
gauaauccagguccucauc

SEQ ID NO: 804538 - RNA, 19 nt, Artificial Sequence
  Description of Artificial Sequence: Synthetic oligonucleotide
uuuaagcuaaagguauuuu

SEQ ID NO: 804539 - RNA, 19 nt, Artificial Sequence
  Description of Artificial Sequence: Synthetic oligonucleotide
ucuugagaguuagugugcu

SEQ ID NO: 804540 - RNA, 19 nt, Artificial Sequence
  Description of Artificial Sequence: Synthetic oligonucleotide
gucccuaauguuagcaucc

SEQ ID NO: 804541 - RNA, 19 nt, Artificial Sequence
  Description of Artificial Sequence: Synthetic oligonucleotide
gggguagaugcauuugagg

SEQ ID NO: 804542 - RNA, 19 nt, Artificial Sequence
  Description of Artificial Sequence: Synthetic oligonucleotide
aguuauugucuaccuuugu

SEQ ID NO: 804543 - RNA, 19 nt, Artificial Sequence
  Description of Artificial Sequence: Synthetic oligonucleotide
uuaaaggcccauguugcuc

SEQ ID NO: 804544 - RNA, 19 nt, Artificial Sequence
  Description of Artificial Sequence: Synthetic oligonucleotide
uaccaccauaguuauaguu

SEQ ID NO: 804545 - RNA, 19 nt, Artificial Sequence
  Description of Artificial Sequence: Synthetic oligonucleotide
auuuaagcuaaagguauuu

SEQ ID NO: 804546 - RNA, 19 nt, Artificial Sequence
  Description of Artificial Sequence: Synthetic oligonucleotide
uacgagaucuugagugccu

SEQ ID NO: 804547 - RNA, 19 nt, Artificial Sequence
  Description of Artificial Sequence: Synthetic oligonucleotide
cugcuucgagauuuggcag

SEQ ID NO: 804548 - RNA, 19 nt, Artificial Sequence
  Description of Artificial Sequence: Synthetic oligonucleotide
ucucuucuaacaugacauc

SEQ ID NO: 804549 - RNA, 19 nt, Artificial Sequence
  Description of Artificial Sequence: Synthetic oligonucleotide
gccaagcuacucuugagag

SEQ ID NO: 804550 - RNA, 19 nt, Artificial Sequence
  Description of Artificial Sequence: Synthetic oligonucleotide
acauuaugucccuaauguu

SEQ ID NO: 804551 - RNA, 19 nt, Artificial Sequence
  Description of Artificial Sequence: Synthetic oligonucleotide
accgucugagcacugggcu

SEQ ID NO: 804552 - RNA, 19 nt, Artificial Sequence
  Description of Artificial Sequence: Synthetic oligonucleotide
acuuguugaguccuuuauu

SEQ ID NO: 804553 - RNA, 19 nt, Artificial Sequence
  Description of Artificial Sequence: Synthetic oligonucleotide
acucaguaugguaacccuc

SEQ ID NO: 804554 - RNA, 19 nt, Artificial Sequence
  Description of Artificial Sequence: Synthetic oligonucleotide
ggugguaauguagagguca

SEQ ID NO: 804555 - RNA, 19 nt, Artificial Sequence
  Description of Artificial Sequence: Synthetic oligonucleotide
uuaugucccuaauguuagc

SEQ ID NO: 804556 - RNA, 19 nt, Artificial Sequence
  Description of Artificial Sequence: Synthetic oligonucleotide
guaauguagaggucauuaa

SEQ ID NO: 804557 - RNA, 19 nt, Artificial Sequence
  Description of Artificial Sequence: Synthetic oligonucleotide
acaaucaauagagcuaguu

SEQ ID NO: 804558 - RNA, 19 nt, Artificial Sequence
  Description of Artificial Sequence: Synthetic oligonucleotide
cuuuguuacuugaaggggu

SEQ ID NO: 804559 - RNA, 19 nt, Artificial Sequence
  Description of Artificial Sequence: Synthetic oligonucleotide
ucacaugguuuguuugcga

SEQ ID NO: 804560 - RNA, 19 nt, Artificial Sequence
  Description of Artificial Sequence: Synthetic oligonucleotide
gacaucggaguuucuuuuc

SEQ ID NO: 804561 - RNA, 19 nt, Artificial Sequence
  Description of Artificial Sequence: Synthetic oligonucleotide
caacggcaaaucagcaagc

SEQ ID NO: 804562 - RNA, 19 nt, Artificial Sequence
  Description of Artificial Sequence: Synthetic oligonucleotide
cuacgagaucuugagugcc

SEQ ID NO: 804563 - RNA, 19 nt, Artificial Sequence
  Description of Artificial Sequence: Synthetic oligonucleotide
ugcuaauguguccucugua

SEQ ID NO: 804564 - RNA, 19 nt, Artificial Sequence
  Description of Artificial Sequence: Synthetic oligonucleotide
guguaaguggcuuaguuuu

SEQ ID NO: 804565 - RNA, 19 nt, Artificial Sequence
  Description of Artificial Sequence: Synthetic oligonucleotide
ugagugccuagaugaauau

SEQ ID NO: 804566 - RNA, 19 nt, Artificial Sequence
  Description of Artificial Sequence: Synthetic oligonucleotide
ucgagauuuggcagaccgu

SEQ ID NO: 804567 - RNA, 19 nt, Artificial Sequence
  Description of Artificial Sequence: Synthetic oligonucleotide
cucuuuaguagauacuggu

SEQ ID NO: 804568 - RNA, 19 nt, Artificial Sequence
  Description of Artificial Sequence: Synthetic oligonucleotide
gaauccgaggccggucugg

SEQ ID NO: 804569 - RNA, 19 nt, Artificial Sequence
  Description of Artificial Sequence: Synthetic oligonucleotide
agaacuagugguggguaca

SEQ ID NO: 804570 - RNA, 19 nt, Artificial Sequence
  Description of Artificial Sequence: Synthetic oligonucleotide
ugguuuguuugcgaagcac

SEQ ID NO: 804571 - RNA, 19 nt, Artificial Sequence
  Description of Artificial Sequence: Synthetic oligonucleotide
gugccuagaugaauauggg

SEQ ID NO: 804572 - RNA, 19 nt, Artificial Sequence
  Description of Artificial Sequence: Synthetic oligonucleotide
agacaucggaguuucuuuu

SEQ ID NO: 804573 - RNA, 19 nt, Artificial Sequence
  Description of Artificial Sequence: Synthetic oligonucleotide
acuuuccuucccaacaacu

SEQ ID NO: 804574 - RNA, 19 nt, Artificial Sequence
  Description of Artificial Sequence: Synthetic oligonucleotide
caucagugacugguggugg

SEQ ID NO: 804575 - RNA, 19 nt, Artificial Sequence
  Description of Artificial Sequence: Synthetic oligonucleotide
acaagugugcauaguucag

SEQ ID NO: 804576 - RNA, 19 nt, Artificial Sequence
  Description of Artificial Sequence: Synthetic oligonucleotide
uugcuguguaacugugcug

SEQ ID NO: 804577 - RNA, 19 nt, Artificial Sequence
  Description of Artificial Sequence: Synthetic oligonucleotide
agcugaugugcuaaugugu

SEQ ID NO: 804578 - RNA, 19 nt, Artificial Sequence
  Description of Artificial Sequence: Synthetic oligonucleotide
gcuacgagaucuugagugc

SEQ ID NO: 804579 - RNA, 19 nt, Artificial Sequence
  Description of Artificial Sequence: Synthetic oligonucleotide
ugcagcucgugccuuuuau

SEQ ID NO: 804580 - RNA, 19 nt, Artificial Sequence
  Description of Artificial Sequence: Synthetic oligonucleotide
gacucuuagcaagaucauc

SEQ ID NO: 804581 - RNA, 19 nt, Artificial Sequence
  Description of Artificial Sequence: Synthetic oligonucleotide
gagaguuagugugcuagga

SEQ ID NO: 804582 - RNA, 19 nt, Artificial Sequence
  Description of Artificial Sequence: Synthetic oligonucleotide
cuuuguagcagcagcuuua

SEQ ID NO: 804583 - RNA, 19 nt, Artificial Sequence
  Description of Artificial Sequence: Synthetic oligonucleotide
cuagaugaauaugggcuuc

SEQ ID NO: 804584 - RNA, 19 nt, Artificial Sequence
  Description of Artificial Sequence: Synthetic oligonucleotide
aguuagugugcuaggagaa

SEQ ID NO: 804585 - RNA, 19 nt, Artificial Sequence
  Description of Artificial Sequence: Synthetic oligonucleotide
augucccuaauguuagcau

SEQ ID NO: 804586 - RNA, 19 nt, Artificial Sequence
  Description of Artificial Sequence: Synthetic oligonucleotide
gguaauguagaggucauua

SEQ ID NO: 804587 - RNA, 19 nt, Artificial Sequence
  Description of Artificial Sequence: Synthetic oligonucleotide
ugucuaccuuuguuacuug

SEQ ID NO: 804588 - RNA, 19 nt, Artificial Sequence
  Description of Artificial Sequence: Synthetic oligonucleotide
gaugugcuaauguguccuc

SEQ ID NO: 804589 - RNA, 19 nt, Artificial Sequence
  Description of Artificial Sequence: Synthetic oligonucleotide
guacucucuggcccuguag

SEQ ID NO: 804590 - RNA, 19 nt, Artificial Sequence
  Description of Artificial Sequence: Synthetic oligonucleotide
uccuucacaugguuuguuu

SEQ ID NO: 804591 - RNA, 19 nt, Artificial Sequence
  Description of Artificial Sequence: Synthetic oligonucleotide
cuaauguuagcauccacuu

SEQ ID NO: 804592 - RNA, 19 nt, Artificial Sequence
  Description of Artificial Sequence: Synthetic oligonucleotide
guuauugucuaccuuuguu

SEQ ID NO: 804593 - RNA, 19 nt, Artificial Sequence
  Description of Artificial Sequence: Synthetic oligonucleotide
uucaagucucuuggauugc

SEQ ID NO: 804594 - RNA, 19 nt, Artificial Sequence
  Description of Artificial Sequence: Synthetic oligonucleotide
uuaccaccauaguuauagu

SEQ ID NO: 804595 - RNA, 19 nt, Artificial Sequence
  Description of Artificial Sequence: Synthetic oligonucleotide
cacgucgccgccccgcucg

SEQ ID NO: 804596 - RNA, 19 nt, Artificial Sequence
  Description of Artificial Sequence: Synthetic oligonucleotide
ucuuggauugcugccugaa

SEQ ID NO: 804597 - RNA, 19 nt, Artificial Sequence
  Description of Artificial Sequence: Synthetic oligonucleotide
uacaaucaauagagcuagu

SEQ ID NO: 804598 - RNA, 19 nt, Artificial Sequence
  Description of Artificial Sequence: Synthetic oligonucleotide
uguugcccuugguaggggu

SEQ ID NO: 804599 - RNA, 19 nt, Artificial Sequence
  Description of Artificial Sequence: Synthetic oligonucleotide
gcaugaauuuaagcuaaag

SEQ ID NO: 804600 - RNA, 19 nt, Artificial Sequence
  Description of Artificial Sequence: Synthetic oligonucleotide
cuaccucgaccucugccag

SEQ ID NO: 804601 - RNA, 19 nt, Artificial Sequence
  Description of Artificial Sequence: Synthetic oligonucleotide
uccuugggcaggagaaguc

SEQ ID NO: 804602 - RNA, 19 nt, Artificial Sequence
  Description of Artificial Sequence: Synthetic oligonucleotide
gugcuaggagaaaugcuug

SEQ ID NO: 804603 - RNA, 19 nt, Artificial Sequence
  Description of Artificial Sequence: Synthetic oligonucleotide
uuaguagauacugguucuu

SEQ ID NO: 804604 - RNA, 19 nt, Artificial Sequence
  Description of Artificial Sequence: Synthetic oligonucleotide
gagugccuagaugaauaug

SEQ ID NO: 804605 - RNA, 19 nt, Artificial Sequence
  Description of Artificial Sequence: Synthetic oligonucleotide
gugcaugcucaguuuuaag

SEQ ID NO: 804606 - RNA, 19 nt, Artificial Sequence
  Description of Artificial Sequence: Synthetic oligonucleotide
aguuuucucuuuaguagau

SEQ ID NO: 804607 - RNA, 19 nt, Artificial Sequence
  Description of Artificial Sequence: Synthetic oligonucleotide
caaucugugucugcuacga

SEQ ID NO: 804608 - RNA, 19 nt, Artificial Sequence
  Description of Artificial Sequence: Synthetic oligonucleotide
gccucuuaagcuaucagca

SEQ ID NO: 804609 - RNA, 19 nt, Artificial Sequence
  Description of Artificial Sequence: Synthetic oligonucleotide
uccaacgcuugguguaagu

SEQ ID NO: 804610 - RNA, 19 nt, Artificial Sequence
  Description of Artificial Sequence: Synthetic oligonucleotide
caguuagugaagaacuagu

SEQ ID NO: 804611 - RNA, 19 nt, Artificial Sequence
  Description of Artificial Sequence: Synthetic oligonucleotide
ucccggagugcuagguucu

SEQ ID NO: 804612 - RNA, 19 nt, Artificial Sequence
  Description of Artificial Sequence: Synthetic oligonucleotide
cagccaagcuacucuugag

SEQ ID NO: 804613 - RNA, 19 nt, Artificial Sequence
  Description of Artificial Sequence: Synthetic oligonucleotide
uugguagggguagaugcau

SEQ ID NO: 804614 - RNA, 19 nt, Artificial Sequence
  Description of Artificial Sequence: Synthetic oligonucleotide
aggucauuaaaggcccaug

SEQ ID NO: 804615 - RNA, 19 nt, Artificial Sequence
  Description of Artificial Sequence: Synthetic oligonucleotide
caccauaguuauaguugug

SEQ ID NO: 804616 - RNA, 19 nt, Artificial Sequence
  Description of Artificial Sequence: Synthetic oligonucleotide
ggggcaacggcaaaucagc

SEQ ID NO: 804617 - RNA, 19 nt, Artificial Sequence
  Description of Artificial Sequence: Synthetic oligonucleotide
cuagguucuggagguggcc

SEQ ID NO: 804618 - RNA, 19 nt, Artificial Sequence
  Description of Artificial Sequence: Synthetic oligonucleotide
cugagucaagagaacugca

SEQ ID NO: 804619 - RNA, 19 nt, Artificial Sequence
  Description of Artificial Sequence: Synthetic oligonucleotide
guagggguagaugcauuug

SEQ ID NO: 804620 - RNA, 19 nt, Artificial Sequence
  Description of Artificial Sequence: Synthetic oligonucleotide
gaagaacuaguggugggua

SEQ ID NO: 804621 - RNA, 19 nt, Artificial Sequence
  Description of Artificial Sequence: Synthetic oligonucleotide
ugcuguuugugaggacugc

SEQ ID NO: 804622 - RNA, 19 nt, Artificial Sequence
  Description of Artificial Sequence: Synthetic oligonucleotide
ugucugcuacgagaucuug

SEQ ID NO: 804623 - RNA, 19 nt, Artificial Sequence
  Description of Artificial Sequence: Synthetic oligonucleotide
guuccaccacuugaaggag

SEQ ID NO: 804624 - RNA, 19 nt, Artificial Sequence
  Description of Artificial Sequence: Synthetic oligonucleotide
guagaagggucguugcugu

SEQ ID NO: 804625 - RNA, 19 nt, Artificial Sequence
  Description of Artificial Sequence: Synthetic oligonucleotide
cagaaauauugccucuuaa

SEQ ID NO: 804626 - RNA, 19 nt, Artificial Sequence
  Description of Artificial Sequence: Synthetic oligonucleotide
gcuaggagaaaugcuugag

SEQ ID NO: 804627 - RNA, 19 nt, Artificial Sequence
  Description of Artificial Sequence: Synthetic oligonucleotide
cuguccgauaauccagguc

SEQ ID NO: 804628 - RNA, 19 nt, Artificial Sequence
  Description of Artificial Sequence: Synthetic oligonucleotide
agguaauggugguaaugua

SEQ ID NO: 804629 - RNA, 19 nt, Artificial Sequence
  Description of Artificial Sequence: Synthetic oligonucleotide
ugguaacccucuaccucga

SEQ ID NO: 804630 - RNA, 19 nt, Artificial Sequence
  Description of Artificial Sequence: Synthetic oligonucleotide
ggucaguuagugaagaacu

SEQ ID NO: 804631 - RNA, 19 nt, Artificial Sequence
  Description of Artificial Sequence: Synthetic oligonucleotide
agaauccgaggccggucug

SEQ ID NO: 804632 - RNA, 19 nt, Artificial Sequence
  Description of Artificial Sequence: Synthetic oligonucleotide
gggucaguuagugaagaac

SEQ ID NO: 804633 - RNA, 19 nt, Artificial Sequence
  Description of Artificial Sequence: Synthetic oligonucleotide
ccuucacaugguuuguuug

SEQ ID NO: 804634 - RNA, 19 nt, Artificial Sequence
  Description of Artificial Sequence: Synthetic oligonucleotide
gcaaagguaauggugguaa

SEQ ID NO: 804635 - RNA, 19 nt, Artificial Sequence
  Description of Artificial Sequence: Synthetic oligonucleotide
ccuguagaagggucguugc

SEQ ID NO: 804636 - RNA, 19 nt, Artificial Sequence
  Description of Artificial Sequence: Synthetic oligonucleotide
cuaggagaaaugcuugagu

SEQ ID NO: 804637 - RNA, 19 nt, Artificial Sequence
  Description of Artificial Sequence: Synthetic oligonucleotide
ucccuaauguuagcaucca

SEQ ID NO: 804638 - RNA, 19 nt, Artificial Sequence
  Description of Artificial Sequence: Synthetic oligonucleotide
uggugacuuuaucuacaau

SEQ ID NO: 804639 - RNA, 19 nt, Artificial Sequence
  Description of Artificial Sequence: Synthetic oligonucleotide
aucugugacgauguacaau

SEQ ID NO: 804640 - RNA, 19 nt, Artificial Sequence
  Description of Artificial Sequence: Synthetic oligonucleotide
agcucgugccuuuuauuuu

SEQ ID NO: 804641 - RNA, 19 nt, Artificial Sequence
  Description of Artificial Sequence: Synthetic oligonucleotide
gguagaugcauuugaggcu

SEQ ID NO: 804642 - RNA, 19 nt, Artificial Sequence
  Description of Artificial Sequence: Synthetic oligonucleotide
caagugugcauaguucaga

SEQ ID NO: 804643 - RNA, 19 nt, Artificial Sequence
  Description of Artificial Sequence: Synthetic oligonucleotide
guuugugaggacugcuucu

SEQ ID NO: 804644 - RNA, 19 nt, Artificial Sequence
  Description of Artificial Sequence: Synthetic oligonucleotide
agggucguugcuguuugug

SEQ ID NO: 804645 - RNA, 19 nt, Artificial Sequence
  Description of Artificial Sequence: Synthetic oligonucleotide
guauccuugugaguaucca

SEQ ID NO: 804646 - RNA, 19 nt, Artificial Sequence
  Description of Artificial Sequence: Synthetic oligonucleotide
gaccgucugagcacugggc

SEQ ID NO: 804647 - RNA, 19 nt, Artificial Sequence
  Description of Artificial Sequence: Synthetic oligonucleotide
gccuagaugaauaugggcu

SEQ ID NO: 804648 - RNA, 19 nt, Artificial Sequence
  Description of Artificial Sequence: Synthetic oligonucleotide
cccauguugcuccuucucc

SEQ ID NO: 804649 - RNA, 19 nt, Artificial Sequence
  Description of Artificial Sequence: Synthetic oligonucleotide
auauugccucuuaagcuau

SEQ ID NO: 804650 - RNA, 19 nt, Artificial Sequence
  Description of Artificial Sequence: Synthetic oligonucleotide
ggucauuaaaggcccaugu

SEQ ID NO: 804651 - RNA, 19 nt, Artificial Sequence
  Description of Artificial Sequence: Synthetic oligonucleotide
aggaggucguugaucagga

SEQ ID NO: 804652 - RNA, 19 nt, Artificial Sequence
  Description of Artificial Sequence: Synthetic oligonucleotide
caagcuacucuugagaguu

SEQ ID NO: 804653 - RNA, 19 nt, Artificial Sequence
  Description of Artificial Sequence: Synthetic oligonucleotide
augugcuaauguguccucu

SEQ ID NO: 804654 - RNA, 19 nt, Artificial Sequence
  Description of Artificial Sequence: Synthetic oligonucleotide
ugcgcgagcgccgccagcu

SEQ ID NO: 804655 - RNA, 19 nt, Artificial Sequence
  Description of Artificial Sequence: Synthetic oligonucleotide
ccuaauguuagcauccacu

SEQ ID NO: 804656 - RNA, 19 nt, Artificial Sequence
  Description of Artificial Sequence: Synthetic oligonucleotide
gcauaguucagaagaucug

SEQ ID NO: 804657 - RNA, 19 nt, Artificial Sequence
  Description of Artificial Sequence: Synthetic oligonucleotide
uugacuuguugaguccuuu

SEQ ID NO: 804658 - RNA, 19 nt, Artificial Sequence
  Description of Artificial Sequence: Synthetic oligonucleotide
agaagggucguugcuguuu

SEQ ID NO: 804659 - RNA, 19 nt, Artificial Sequence
  Description of Artificial Sequence: Synthetic oligonucleotide
aagggucguugcuguuugu

SEQ ID NO: 804660 - RNA, 19 nt, Artificial Sequence
  Description of Artificial Sequence: Synthetic oligonucleotide
uuccuguaauuaccaccau

SEQ ID NO: 804661 - RNA, 19 nt, Artificial Sequence
  Description of Artificial Sequence: Synthetic oligonucleotide
ugguagggguagaugcauu

SEQ ID NO: 804662 - RNA, 19 nt, Artificial Sequence
  Description of Artificial Sequence: Synthetic oligonucleotide
uaucuacaaucaaguuauu

SEQ ID NO: 804663 - RNA, 19 nt, Artificial Sequence
  Description of Artificial Sequence: Synthetic oligonucleotide
agggucaguuagugaagaa

SEQ ID NO: 804664 - RNA, 19 nt, Artificial Sequence
  Description of Artificial Sequence: Synthetic oligonucleotide
uaccucgaccucugccagc

SEQ ID NO: 804665 - RNA, 19 nt, Artificial Sequence
  Description of Artificial Sequence: Synthetic oligonucleotide
cugguucuggugucagcuc

SEQ ID NO: 804666 - RNA, 19 nt, Artificial Sequence
  Description of Artificial Sequence: Synthetic oligonucleotide
cagaucccggagugcuagg

SEQ ID NO: 804667 - RNA, 19 nt, Artificial Sequence
  Description of Artificial Sequence: Synthetic oligonucleotide
aguugcaaaggagcuucau

SEQ ID NO: 804668 - RNA, 19 nt, Artificial Sequence
  Description of Artificial Sequence: Synthetic oligonucleotide
ugcugguuuucuguccgau

SEQ ID NO: 804669 - RNA, 19 nt, Artificial Sequence
  Description of Artificial Sequence: Synthetic oligonucleotide
guaagagggcugccuucac

SEQ ID NO: 804670 - RNA, 19 nt, Artificial Sequence
  Description of Artificial Sequence: Synthetic oligonucleotide
cugcaacagggccacaaaa

SEQ ID NO: 804671 - RNA, 19 nt, Artificial Sequence
  Description of Artificial Sequence: Synthetic oligonucleotide
gugacgauguacaaucaau

SEQ ID NO: 804672 - RNA, 19 nt, Artificial Sequence
  Description of Artificial Sequence: Synthetic oligonucleotide
guaaguggcuuaguuuucu

SEQ ID NO: 804673 - RNA, 19 nt, Artificial Sequence
  Description of Artificial Sequence: Synthetic oligonucleotide
agcaugagggucaguuagu

SEQ ID NO: 804674 - RNA, 19 nt, Artificial Sequence
  Description of Artificial Sequence: Synthetic oligonucleotide
cugugacgauguacaauca

SEQ ID NO: 804675 - RNA, 19 nt, Artificial Sequence
  Description of Artificial Sequence: Synthetic oligonucleotide
ggaucuagacaaucugugu

SEQ ID NO: 804676 - RNA, 19 nt, Artificial Sequence
  Description of Artificial Sequence: Synthetic oligonucleotide
gcagccaagcuacucuuga

SEQ ID NO: 804677 - RNA, 19 nt, Artificial Sequence
  Description of Artificial Sequence: Synthetic oligonucleotide
gucugcuacgagaucuuga

SEQ ID NO: 804678 - RNA, 19 nt, Artificial Sequence
  Description of Artificial Sequence: Synthetic oligonucleotide
gucauuaaaggcccauguu

SEQ ID NO: 804679 - RNA, 19 nt, Artificial Sequence
  Description of Artificial Sequence: Synthetic oligonucleotide
gggucguugcuguuuguga

SEQ ID NO: 804680 - RNA, 19 nt, Artificial Sequence
  Description of Artificial Sequence: Synthetic oligonucleotide
gucaguuagugaagaacua

SEQ ID NO: 804681 - RNA, 19 nt, Artificial Sequence
  Description of Artificial Sequence: Synthetic oligonucleotide
cuucgagauuuggcagacc

SEQ ID NO: 804682 - RNA, 19 nt, Artificial Sequence
  Description of Artificial Sequence: Synthetic oligonucleotide
cuauuguaugcaagacccu

SEQ ID NO: 804683 - RNA, 19 nt, Artificial Sequence
  Description of Artificial Sequence: Synthetic oligonucleotide
cgagauuuggcagaccguc

SEQ ID NO: 804684 - RNA, 19 nt, Artificial Sequence
  Description of Artificial Sequence: Synthetic oligonucleotide
agcagccaagcuacucuug

SEQ ID NO: 804685 - RNA, 19 nt, Artificial Sequence
  Description of Artificial Sequence: Synthetic oligonucleotide
cugcaccacauacuuaggu

SEQ ID NO: 804686 - RNA, 19 nt, Artificial Sequence
  Description of Artificial Sequence: Synthetic oligonucleotide
cucacuuuucaagguucca

SEQ ID NO: 804687 - RNA, 19 nt, Artificial Sequence
  Description of Artificial Sequence: Synthetic oligonucleotide
cuguaauuaccaccauagu

SEQ ID NO: 804688 - RNA, 19 nt, Artificial Sequence
  Description of Artificial Sequence: Synthetic oligonucleotide
gaaggagaaggugcaugcu

SEQ ID NO: 804689 - RNA, 19 nt, Artificial Sequence
  Description of Artificial Sequence: Synthetic oligonucleotide
uagaugcauuugaggcuuu

SEQ ID NO: 804690 - RNA, 19 nt, Artificial Sequence
  Description of Artificial Sequence: Synthetic oligonucleotide
ccugaaauugcagcuagaa

SEQ ID NO: 804691 - RNA, 19 nt, Artificial Sequence
  Description of Artificial Sequence: Synthetic oligonucleotide
ugguaauguagaggucauu

SEQ ID NO: 804692 - RNA, 19 nt, Artificial Sequence
  Description of Artificial Sequence: Synthetic oligonucleotide
ccagaucccggagugcuag

SEQ ID NO: 804693 - RNA, 19 nt, Artificial Sequence
  Description of Artificial Sequence: Synthetic oligonucleotide
agcaugaauuuaagcuaaa

SEQ ID NO: 804694 - RNA, 19 nt, Artificial Sequence
  Description of Artificial Sequence: Synthetic oligonucleotide
aggcagaauccgaggccgg

SEQ ID NO: 804695 - RNA, 19 nt, Artificial Sequence
  Description of Artificial Sequence: Synthetic oligonucleotide
gcuguaggggcugcgcgag

SEQ ID NO: 804696 - RNA, 19 nt, Artificial Sequence
  Description of Artificial Sequence: Synthetic oligonucleotide
uggggcugaugcugagcaa

SEQ ID NO: 804697 - RNA, 19 nt, Artificial Sequence
  Description of Artificial Sequence: Synthetic oligonucleotide
caccacauacuuagguccu

SEQ ID NO: 804698 - RNA, 19 nt, Artificial Sequence
  Description of Artificial Sequence: Synthetic oligonucleotide
acgagaucuugagugccua

SEQ ID NO: 804699 - RNA, 19 nt, Artificial Sequence
  Description of Artificial Sequence: Synthetic oligonucleotide
gcuucgagauuuggcagac

SEQ ID NO: 804700 - RNA, 19 nt, Artificial Sequence
  Description of Artificial Sequence: Synthetic oligonucleotide
acacgucgccgccccgcuc

SEQ ID NO: 804701 - RNA, 19 nt, Artificial Sequence
  Description of Artificial Sequence: Synthetic oligonucleotide
agguggccugaguugcaaa

SEQ ID NO: 804702 - RNA, 19 nt, Artificial Sequence
  Description of Artificial Sequence: Synthetic oligonucleotide
cuugcccagaucccggagu

SEQ ID NO: 804703 - RNA, 19 nt, Artificial Sequence
  Description of Artificial Sequence: Synthetic oligonucleotide
cagcucgugccuuuuauuu

SEQ ID NO: 804704 - RNA, 19 nt, Artificial Sequence
  Description of Artificial Sequence: Synthetic oligonucleotide
ggaggucguugaucaggag

SEQ ID NO: 804705 - RNA, 19 nt, Artificial Sequence
  Description of Artificial Sequence: Synthetic oligonucleotide
agaggucauuaaaggccca

SEQ ID NO: 804706 - RNA, 19 nt, Artificial Sequence
  Description of Artificial Sequence: Synthetic oligonucleotide
gaguugcaaaggagcuuca

SEQ ID NO: 804707 - RNA, 19 nt, Artificial Sequence
  Description of Artificial Sequence: Synthetic oligonucleotide
cagaauccgaggccggucu

SEQ ID NO: 804708 - RNA, 19 nt, Artificial Sequence
  Description of Artificial Sequence: Synthetic oligonucleotide
ggugcaugcucaguuuuaa

SEQ ID NO: 804709 - RNA, 19 nt, Artificial Sequence
  Description of Artificial Sequence: Synthetic oligonucleotide
cuggugucagcuccaaaau

SEQ ID NO: 804710 - RNA, 19 nt, Artificial Sequence
  Description of Artificial Sequence: Synthetic oligonucleotide
ccaccauaguuauaguugu

SEQ ID NO: 804711 - RNA, 19 nt, Artificial Sequence
  Description of Artificial Sequence: Synthetic oligonucleotide
ugugaguauccagguccuu

SEQ ID NO: 804712 - RNA, 19 nt, Artificial Sequence
  Description of Artificial Sequence: Synthetic oligonucleotide
cucuuggauugcugccuga

SEQ ID NO: 804713 - RNA, 19 nt, Artificial Sequence
  Description of Artificial Sequence: Synthetic oligonucleotide
gaacuagugguggguacau

SEQ ID NO: 804714 - RNA, 19 nt, Artificial Sequence
  Description of Artificial Sequence: Synthetic oligonucleotide
cugcuuuuacagaaauauu

SEQ ID NO: 804715 - RNA, 19 nt, Artificial Sequence
  Description of Artificial Sequence: Synthetic oligonucleotide
cuguaggggcugcgcgagc

SEQ ID NO: 804716 - RNA, 19 nt, Artificial Sequence
  Description of Artificial Sequence: Synthetic oligonucleotide
cuguagaagggucguugcu

SEQ ID NO: 804717 - RNA, 19 nt, Artificial Sequence
  Description of Artificial Sequence: Synthetic oligonucleotide
gugugcuaggagaaaugcu

SEQ ID NO: 804718 - RNA, 19 nt, Artificial Sequence
  Description of Artificial Sequence: Synthetic oligonucleotide
uggguacaugcugguuuuc

SEQ ID NO: 804719 - RNA, 19 nt, Artificial Sequence
  Description of Artificial Sequence: Synthetic oligonucleotide
ggccgccuggauuuuccug

SEQ ID NO: 804720 - RNA, 19 nt, Artificial Sequence
  Description of Artificial Sequence: Synthetic oligonucleotide
cccuaauguuagcauccac

SEQ ID NO: 804721 - RNA, 19 nt, Artificial Sequence
  Description of Artificial Sequence: Synthetic oligonucleotide
gaggucauuaaaggcccau

SEQ ID NO: 804722 - RNA, 19 nt, Artificial Sequence
  Description of Artificial Sequence: Synthetic oligonucleotide
gcuagggccgccuggauuu

SEQ ID NO: 804723 - RNA, 19 nt, Artificial Sequence
  Description of Artificial Sequence: Synthetic oligonucleotide
cuguguaacugugcugucu

SEQ ID NO: 804724 - RNA, 19 nt, Artificial Sequence
  Description of Artificial Sequence: Synthetic oligonucleotide
gccgccuggauuuuccugu

SEQ ID NO: 804725 - RNA, 19 nt, Artificial Sequence
  Description of Artificial Sequence: Synthetic oligonucleotide
ccgucugagcacugggcug

SEQ ID NO: 804726 - RNA, 19 nt, Artificial Sequence
  Description of Artificial Sequence: Synthetic oligonucleotide
aggugcaugcucaguuuua

SEQ ID NO: 804727 - RNA, 19 nt, Artificial Sequence
  Description of Artificial Sequence: Synthetic oligonucleotide
gcccauguugcuccuucuc

SEQ ID NO: 804728 - RNA, 19 nt, Artificial Sequence
  Description of Artificial Sequence: Synthetic oligonucleotide
ccgauaauccagguccuca

SEQ ID NO: 804729 - RNA, 19 nt, Artificial Sequence
  Description of Artificial Sequence: Synthetic oligonucleotide
acgcuugguguaaguggcu

SEQ ID NO: 804730 - RNA, 19 nt, Artificial Sequence
  Description of Artificial Sequence: Synthetic oligonucleotide
gugguaauguagaggucau

SEQ ID NO: 804731 - RNA, 19 nt, Artificial Sequence
  Description of Artificial Sequence: Synthetic oligonucleotide
ccuagaugaauaugggcuu

SEQ ID NO: 804732 - RNA, 19 nt, Artificial Sequence
  Description of Artificial Sequence: Synthetic oligonucleotide
gggaucauccuggggcuga

SEQ ID NO: 804733 - RNA, 19 nt, Artificial Sequence
  Description of Artificial Sequence: Synthetic oligonucleotide
cugcuacgagaucuugagu

SEQ ID NO: 804734 - RNA, 19 nt, Artificial Sequence
  Description of Artificial Sequence: Synthetic oligonucleotide
guccgauaauccagguccu

SEQ ID NO: 804735 - RNA, 19 nt, Artificial Sequence
  Description of Artificial Sequence: Synthetic oligonucleotide
ccggagugcuagguucugg

SEQ ID NO: 804736 - RNA, 19 nt, Artificial Sequence
  Description of Artificial Sequence: Synthetic oligonucleotide
ggguacaugcugguuuucu

SEQ ID NO: 804737 - RNA, 19 nt, Artificial Sequence
  Description of Artificial Sequence: Synthetic oligonucleotide
auccgaggccggucugguu

SEQ ID NO: 804738 - RNA, 19 nt, Artificial Sequence
  Description of Artificial Sequence: Synthetic oligonucleotide
gugacgacuucuggaucua

SEQ ID NO: 804739 - RNA, 19 nt, Artificial Sequence
  Description of Artificial Sequence: Synthetic oligonucleotide
gccgccccgcucguaagag

SEQ ID NO: 804740 - RNA, 19 nt, Artificial Sequence
  Description of Artificial Sequence: Synthetic oligonucleotide
ccaagcuacucuugagagu

SEQ ID NO: 804741 - RNA, 19 nt, Artificial Sequence
  Description of Artificial Sequence: Synthetic oligonucleotide
gcccaugcaugaggcuagg

SEQ ID NO: 804742 - RNA, 19 nt, Artificial Sequence
  Description of Artificial Sequence: Synthetic oligonucleotide
caagacccuuuuccacaua

SEQ ID NO: 804743 - RNA, 19 nt, Artificial Sequence
  Description of Artificial Sequence: Synthetic oligonucleotide
ccggucugguucugguguc

SEQ ID NO: 804744 - RNA, 19 nt, Artificial Sequence
  Description of Artificial Sequence: Synthetic oligonucleotide
gcuccaacgcuugguguaa

SEQ ID NO: 804745 - RNA, 19 nt, Artificial Sequence
  Description of Artificial Sequence: Synthetic oligonucleotide
cuuaagcuaucagcaucuu

SEQ ID NO: 804746 - RNA, 19 nt, Artificial Sequence
  Description of Artificial Sequence: Synthetic oligonucleotide
gcccagaucccggagugcu

SEQ ID NO: 804747 - RNA, 19 nt, Artificial Sequence
  Description of Artificial Sequence: Synthetic oligonucleotide
ggacucuuagcaagaucau

SEQ ID NO: 804748 - RNA, 19 nt, Artificial Sequence
  Description of Artificial Sequence: Synthetic oligonucleotide
cugcagcucgugccuuuua

SEQ ID NO: 804749 - RNA, 19 nt, Artificial Sequence
  Description of Artificial Sequence: Synthetic oligonucleotide
gcaugaggcuagggccgcc

SEQ ID NO: 804750 - RNA, 19 nt, Artificial Sequence
  Description of Artificial Sequence: Synthetic oligonucleotide
gcuacucuugagaguuagu

SEQ ID NO: 804751 - RNA, 19 nt, Artificial Sequence
  Description of Artificial Sequence: Synthetic oligonucleotide
ggcccuguagaagggucgu

SEQ ID NO: 804752 - RNA, 19 nt, Artificial Sequence
  Description of Artificial Sequence: Synthetic oligonucleotide
ccucuguauccuugugagu

SEQ ID NO: 804753 - RNA, 19 nt, Artificial Sequence
  Description of Artificial Sequence: Synthetic oligonucleotide
cccgauccauuuucucucu

SEQ ID NO: 804754 - RNA, 19 nt, Artificial Sequence
  Description of Artificial Sequence: Synthetic oligonucleotide
gcgaagcacuggcaccagu

SEQ ID NO: 804755 - RNA, 19 nt, Artificial Sequence
  Description of Artificial Sequence: Synthetic oligonucleotide
cccggagugcuagguucug

SEQ ID NO: 804756 - RNA, 19 nt, Artificial Sequence
  Description of Artificial Sequence: Synthetic oligonucleotide
aggcagcaugggaggcaaa

SEQ ID NO: 804757 - RNA, 19 nt, Artificial Sequence
  Description of Artificial Sequence: Synthetic oligonucleotide
gggccgccuggauuuuccu

SEQ ID NO: 804758 - RNA, 19 nt, Artificial Sequence
  Description of Artificial Sequence: Synthetic oligonucleotide
ggaucauccuggggcugau

SEQ ID NO: 804759 - RNA, 19 nt, Artificial Sequence
  Description of Artificial Sequence: Synthetic oligonucleotide
cuagggccgccuggauuuu

SEQ ID NO: 804760 - RNA, 19 nt, Artificial Sequence
  Description of Artificial Sequence: Synthetic oligonucleotide
cgccgccccgcucguaaga

SEQ ID NO: 804761 - RNA, 19 nt, Artificial Sequence
  Description of Artificial Sequence: Synthetic oligonucleotide
cgucgccgccccgcucgua

SEQ ID NO: 804762 - RNA, 19 nt, Artificial Sequence
  Description of Artificial Sequence: Synthetic oligonucleotide
uaaugaagaacgaaaaugc

SEQ ID NO: 804763 - RNA, 19 nt, Artificial Sequence
  Description of Artificial Sequence: Synthetic oligonucleotide
aagaauuugcaccccaagc

SEQ ID NO: 804764 - RNA, 19 nt, Artificial Sequence
  Description of Artificial Sequence: Synthetic oligonucleotide
cugaauaucaccuaucccc

SEQ ID NO: 804765 - RNA, 19 nt, Artificial Sequence
  Description of Artificial Sequence: Synthetic oligonucleotide
ugaagaacgaaaaugcuca

SEQ ID NO: 804766 - RNA, 19 nt, Artificial Sequence
  Description of Artificial Sequence: Synthetic oligonucleotide
agaacgaaaaugcucacac

SEQ ID NO: 804767 - RNA, 19 nt, Artificial Sequence
  Description of Artificial Sequence: Synthetic oligonucleotide
aacgaaaaugcucacaccu

SEQ ID NO: 804768 - RNA, 19 nt, Artificial Sequence
  Description of Artificial Sequence: Synthetic oligonucleotide
uguuuguuugacaaguuag

SEQ ID NO: 804769 - RNA, 19 nt, Artificial Sequence
  Description of Artificial Sequence: Synthetic oligonucleotide
uucuauaauaucaucguca

SEQ ID NO: 804770 - RNA, 19 nt, Artificial Sequence
  Description of Artificial Sequence: Synthetic oligonucleotide
aaaagaguuaacgugagga

SEQ ID NO: 804771 - RNA, 19 nt, Artificial Sequence
  Description of Artificial Sequence: Synthetic oligonucleotide
aaucgacugaaguucuucc

SEQ ID NO: 804772 - RNA, 19 nt, Artificial Sequence
  Description of Artificial Sequence: Synthetic oligonucleotide
acugguuacuuuuauuacc

SEQ ID NO: 804773 - RNA, 19 nt, Artificial Sequence
  Description of Artificial Sequence: Synthetic oligonucleotide
cuagaaaagaguuaacgug

SEQ ID NO: 804774 - RNA, 19 nt, Artificial Sequence
  Description of Artificial Sequence: Synthetic oligonucleotide
ucuacaacggccauggaac

SEQ ID NO: 804775 - RNA, 19 nt, Artificial Sequence
  Description of Artificial Sequence: Synthetic oligonucleotide
uagcgguugauccagaucc

SEQ ID NO: 804776 - RNA, 19 nt, Artificial Sequence
  Description of Artificial Sequence: Synthetic oligonucleotide
aaucucuaugauccugucc

SEQ ID NO: 804777 - RNA, 19 nt, Artificial Sequence
  Description of Artificial Sequence: Synthetic oligonucleotide
uguaugaucugcuaagcug

SEQ ID NO: 804778 - RNA, 19 nt, Artificial Sequence
  Description of Artificial Sequence: Synthetic oligonucleotide
auaaauguacuuuccauca

SEQ ID NO: 804779 - RNA, 19 nt, Artificial Sequence
  Description of Artificial Sequence: Synthetic oligonucleotide
auuaccagugcccaacugg

SEQ ID NO: 804780 - RNA, 19 nt, Artificial Sequence
  Description of Artificial Sequence: Synthetic oligonucleotide
ucuagcauuuucaaugaug

SEQ ID NO: 804781 - RNA, 19 nt, Artificial Sequence
  Description of Artificial Sequence: Synthetic oligonucleotide
uauagguacuccaggaaag

SEQ ID NO: 804782 - RNA, 19 nt, Artificial Sequence
  Description of Artificial Sequence: Synthetic oligonucleotide
auuucuauaauaucaucgu

SEQ ID NO: 804783 - RNA, 19 nt, Artificial Sequence
  Description of Artificial Sequence: Synthetic oligonucleotide
aggguaugaaaauucacuc

SEQ ID NO: 804784 - RNA, 19 nt, Artificial Sequence
  Description of Artificial Sequence: Synthetic oligonucleotide
ugagcaucguauuucacag

SEQ ID NO: 804785 - RNA, 19 nt, Artificial Sequence
  Description of Artificial Sequence: Synthetic oligonucleotide
uuuggguuacuacagucag

SEQ ID NO: 804786 - RNA, 19 nt, Artificial Sequence
  Description of Artificial Sequence: Synthetic oligonucleotide
aaugacuuguuuguuugac

SEQ ID NO: 804787 - RNA, 19 nt, Artificial Sequence
  Description of Artificial Sequence: Synthetic oligonucleotide
ugauaguuugcugacagag

SEQ ID NO: 804788 - RNA, 19 nt, Artificial Sequence
  Description of Artificial Sequence: Synthetic oligonucleotide
auaguuugcugacagagcu

SEQ ID NO: 804789 - RNA, 19 nt, Artificial Sequence
  Description of Artificial Sequence: Synthetic oligonucleotide
agaucuagcaauccuacug

SEQ ID NO: 804790 - RNA, 19 nt, Artificial Sequence
  Description of Artificial Sequence: Synthetic oligonucleotide
auuguaaccccagacauag

SEQ ID NO: 804791 - RNA, 19 nt, Artificial Sequence
  Description of Artificial Sequence: Synthetic oligonucleotide
aaauaccucuccaucagac

SEQ ID NO: 804792 - RNA, 19 nt, Artificial Sequence
  Description of Artificial Sequence: Synthetic oligonucleotide
agaauuugcaccccaagca

SEQ ID NO: 804793 - RNA, 19 nt, Artificial Sequence
  Description of Artificial Sequence: Synthetic oligonucleotide
ugugguguauaaaacuuca

SEQ ID NO: 804794 - RNA, 19 nt, Artificial Sequence
  Description of Artificial Sequence: Synthetic oligonucleotide
gauguuauccguguauagg

SEQ ID NO: 804795 - RNA, 19 nt, Artificial Sequence
  Description of Artificial Sequence: Synthetic oligonucleotide
agcaauagcauucuccuca

SEQ ID NO: 804796 - RNA, 19 nt, Artificial Sequence
  Description of Artificial Sequence: Synthetic oligonucleotide
aaauucccucuucagugac

SEQ ID NO: 804797 - RNA, 19 nt, Artificial Sequence
  Description of Artificial Sequence: Synthetic oligonucleotide
acgaaugccuugcagggcc

SEQ ID NO: 804798 - RNA, 19 nt, Artificial Sequence
  Description of Artificial Sequence: Synthetic oligonucleotide
accaaagaaugguaagagc

SEQ ID NO: 804799 - RNA, 19 nt, Artificial Sequence
  Description of Artificial Sequence: Synthetic oligonucleotide
agauaggcugauguuaucc

SEQ ID NO: 804800 - RNA, 19 nt, Artificial Sequence
  Description of Artificial Sequence: Synthetic oligonucleotide
aucaccuauccccagacag

SEQ ID NO: 804801 - RNA, 19 nt, Artificial Sequence
  Description of Artificial Sequence: Synthetic oligonucleotide
cuugauaguuugcugacag

SEQ ID NO: 804802 - RNA, 19 nt, Artificial Sequence
  Description of Artificial Sequence: Synthetic oligonucleotide
ucaggagauaggcugaugu

SEQ ID NO: 804803 - RNA, 19 nt, Artificial Sequence
  Description of Artificial Sequence: Synthetic oligonucleotide
caaguuaguagagaugugg

SEQ ID NO: 804804 - RNA, 19 nt, Artificial Sequence
  Description of Artificial Sequence: Synthetic oligonucleotide
ugaauaucaccuaucccca

SEQ ID NO: 804805 - RNA, 19 nt, Artificial Sequence
  Description of Artificial Sequence: Synthetic oligonucleotide
aauccuacugccuccucag

SEQ ID NO: 804806 - RNA, 19 nt, Artificial Sequence
  Description of Artificial Sequence: Synthetic oligonucleotide
gaucuagcaauccuacugc

SEQ ID NO: 804807 - RNA, 19 nt, Artificial Sequence
  Description of Artificial Sequence: Synthetic oligonucleotide
ugagcauaaauguacuuuc

SEQ ID NO: 804808 - RNA, 19 nt, Artificial Sequence
  Description of Artificial Sequence: Synthetic oligonucleotide
uaagaauuugcaccccaag

SEQ ID NO: 804809 - RNA, 19 nt, Artificial Sequence
  Description of Artificial Sequence: Synthetic oligonucleotide
aguuuggguuacuacaguc

SEQ ID NO: 804810 - RNA, 19 nt, Artificial Sequence
  Description of Artificial Sequence: Synthetic oligonucleotide
cucacuguaaaauguggcc

SEQ ID NO: 804811 - RNA, 19 nt, Artificial Sequence
  Description of Artificial Sequence: Synthetic oligonucleotide
caaaucacggugaagacca

SEQ ID NO: 804812 - RNA, 19 nt, Artificial Sequence
  Description of Artificial Sequence: Synthetic oligonucleotide
acucauuucuauaauauca

SEQ ID NO: 804813 - RNA, 19 nt, Artificial Sequence
  Description of Artificial Sequence: Synthetic oligonucleotide
ucaucaucgacuguggugu

SEQ ID NO: 804814 - RNA, 19 nt, Artificial Sequence
  Description of Artificial Sequence: Synthetic oligonucleotide
uuaguagagauguggcaag

SEQ ID NO: 804815 - RNA, 19 nt, Artificial Sequence
  Description of Artificial Sequence: Synthetic oligonucleotide
aauaucaccuauccccaga

SEQ ID NO: 804816 - RNA, 19 nt, Artificial Sequence
  Description of Artificial Sequence: Synthetic oligonucleotide
ucagacguuaggaccaaag

SEQ ID NO: 804817 - RNA, 19 nt, Artificial Sequence
  Description of Artificial Sequence: Synthetic oligonucleotide
aucaaccagaaacuugagg

SEQ ID NO: 804818 - RNA, 19 nt, Artificial Sequence
  Description of Artificial Sequence: Synthetic oligonucleotide
auaucaccuauccccagac

SEQ ID NO: 804819 - RNA, 19 nt, Artificial Sequence
  Description of Artificial Sequence: Synthetic oligonucleotide
ucgacugugguguauaaaa

SEQ ID NO: 804820 - RNA, 19 nt, Artificial Sequence
  Description of Artificial Sequence: Synthetic oligonucleotide
uauuauaaccccaggcaaa

SEQ ID NO: 804821 - RNA, 19 nt, Artificial Sequence
  Description of Artificial Sequence: Synthetic oligonucleotide
acacgaaugccuugcaggg

SEQ ID NO: 804822 - RNA, 19 nt, Artificial Sequence
  Description of Artificial Sequence: Synthetic oligonucleotide
aaguguaaaggcuuagaua

SEQ ID NO: 804823 - RNA, 19 nt, Artificial Sequence
  Description of Artificial Sequence: Synthetic oligonucleotide
uuuauuaccagugcccaac

SEQ ID NO: 804824 - RNA, 19 nt, Artificial Sequence
  Description of Artificial Sequence: Synthetic oligonucleotide
acaugcuauguucauaacu

SEQ ID NO: 804825 - RNA, 19 nt, Artificial Sequence
  Description of Artificial Sequence: Synthetic oligonucleotide
uuucuauaauaucaucguc

SEQ ID NO: 804826 - RNA, 19 nt, Artificial Sequence
  Description of Artificial Sequence: Synthetic oligonucleotide
cagagcaauagcauucucc

SEQ ID NO: 804827 - RNA, 19 nt, Artificial Sequence
  Description of Artificial Sequence: Synthetic oligonucleotide
uuaccagugcccaacuggc

SEQ ID NO: 804828 - RNA, 19 nt, Artificial Sequence
  Description of Artificial Sequence: Synthetic oligonucleotide
aauaccaaugugugugcgu

SEQ ID NO: 804829 - RNA, 19 nt, Artificial Sequence
  Description of Artificial Sequence: Synthetic oligonucleotide
uauggacucaguccugugc

SEQ ID NO: 804830 - RNA, 19 nt, Artificial Sequence
  Description of Artificial Sequence: Synthetic oligonucleotide
gaaaagaguuaacgugagg

SEQ ID NO: 804831 - RNA, 19 nt, Artificial Sequence
  Description of Artificial Sequence: Synthetic oligonucleotide
agggaucaguucuuaaagg

SEQ ID NO: 804832 - RNA, 19 nt, Artificial Sequence
  Description of Artificial Sequence: Synthetic oligonucleotide
aacacgucaucggugcagc

SEQ ID NO: 804833 - RNA, 19 nt, Artificial Sequence
  Description of Artificial Sequence: Synthetic oligonucleotide
gugaagaccagacuuagga

SEQ ID NO: 804834 - RNA, 19 nt, Artificial Sequence
  Description of Artificial Sequence: Synthetic oligonucleotide
uuagggaucaguucuuaaa

SEQ ID NO: 804835 - RNA, 19 nt, Artificial Sequence
  Description of Artificial Sequence: Synthetic oligonucleotide
ggccauaagaauuugcacc

SEQ ID NO: 804836 - RNA, 19 nt, Artificial Sequence
  Description of Artificial Sequence: Synthetic oligonucleotide
ugauguuauccguguauag

SEQ ID NO: 804837 - RNA, 19 nt, Artificial Sequence
  Description of Artificial Sequence: Synthetic oligonucleotide
gucaacuuuucugagacug

SEQ ID NO: 804838 - RNA, 19 nt, Artificial Sequence
  Description of Artificial Sequence: Synthetic oligonucleotide
uccacaacgacagggguag

SEQ ID NO: 804839 - RNA, 19 nt, Artificial Sequence
  Description of Artificial Sequence: Synthetic oligonucleotide
ugugugcguagccacaggc

SEQ ID NO: 804840 - RNA, 19 nt, Artificial Sequence
  Description of Artificial Sequence: Synthetic oligonucleotide
ugacaaguuaguagagaug

SEQ ID NO: 804841 - RNA, 19 nt, Artificial Sequence
  Description of Artificial Sequence: Synthetic oligonucleotide
ggaaaguuccaaaucacgg

SEQ ID NO: 804842 - RNA, 19 nt, Artificial Sequence
  Description of Artificial Sequence: Synthetic oligonucleotide
uaaaggcuuagauacuccu

SEQ ID NO: 804843 - RNA, 19 nt, Artificial Sequence
  Description of Artificial Sequence: Synthetic oligonucleotide
ugcaaggacgauguguggg

SEQ ID NO: 804844 - RNA, 19 nt, Artificial Sequence
  Description of Artificial Sequence: Synthetic oligonucleotide
uccuucuagauccuuguaa

SEQ ID NO: 804845 - RNA, 19 nt, Artificial Sequence
  Description of Artificial Sequence: Synthetic oligonucleotide
uguauagguacuccaggaa

SEQ ID NO: 804846 - RNA, 19 nt, Artificial Sequence
  Description of Artificial Sequence: Synthetic oligonucleotide
auagguacuccaggaaagc

SEQ ID NO: 804847 - RNA, 19 nt, Artificial Sequence
  Description of Artificial Sequence: Synthetic oligonucleotide
aggcaaauaccucuccauc

SEQ ID NO: 804848 - RNA, 19 nt, Artificial Sequence
  Description of Artificial Sequence: Synthetic oligonucleotide
gacgaaucgacugaaguuc

SEQ ID NO: 804849 - RNA, 19 nt, Artificial Sequence
  Description of Artificial Sequence: Synthetic oligonucleotide
uguuaauaccaaugugugu

SEQ ID NO: 804850 - RNA, 19 nt, Artificial Sequence
  Description of Artificial Sequence: Synthetic oligonucleotide
agaguuauuauaaccccag

SEQ ID NO: 804851 - RNA, 19 nt, Artificial Sequence
  Description of Artificial Sequence: Synthetic oligonucleotide
uguuguugcaaggacgaug

SEQ ID NO: 804852 - RNA, 19 nt, Artificial Sequence
  Description of Artificial Sequence: Synthetic oligonucleotide
gacuuaggaauuuucagcu

SEQ ID NO: 804853 - RNA, 19 nt, Artificial Sequence
  Description of Artificial Sequence: Synthetic oligonucleotide
uuuguggucccguugccca

SEQ ID NO: 804854 - RNA, 19 nt, Artificial Sequence
  Description of Artificial Sequence: Synthetic oligonucleotide
aggaccaaagaaugguaag

SEQ ID NO: 804855 - RNA, 19 nt, Artificial Sequence
  Description of Artificial Sequence: Synthetic oligonucleotide
ugauuagcgguugauccag

SEQ ID NO: 804856 - RNA, 19 nt, Artificial Sequence
  Description of Artificial Sequence: Synthetic oligonucleotide
aguuaguagagauguggca

SEQ ID NO: 804857 - RNA, 19 nt, Artificial Sequence
  Description of Artificial Sequence: Synthetic oligonucleotide
uugauuagcgguugaucca

SEQ ID NO: 804858 - RNA, 19 nt, Artificial Sequence
  Description of Artificial Sequence: Synthetic oligonucleotide
ugugcguagccacaggcaa

SEQ ID NO: 804859 - RNA, 19 nt, Artificial Sequence
  Description of Artificial Sequence: Synthetic oligonucleotide
aguagagauguggcaaggc

SEQ ID NO: 804860 - RNA, 19 nt, Artificial Sequence
  Description of Artificial Sequence: Synthetic oligonucleotide
gcuauaggcauugugaccc

SEQ ID NO: 804861 - RNA, 19 nt, Artificial Sequence
  Description of Artificial Sequence: Synthetic oligonucleotide
guuauccguguauagguac

SEQ ID NO: 804862 - RNA, 19 nt, Artificial Sequence
  Description of Artificial Sequence: Synthetic oligonucleotide
uaaccccaggcaaauaccu

SEQ ID NO: 804863 - RNA, 19 nt, Artificial Sequence
  Description of Artificial Sequence: Synthetic oligonucleotide
cccagaguuauuauaaccc

SEQ ID NO: 804864 - RNA, 19 nt, Artificial Sequence
  Description of Artificial Sequence: Synthetic oligonucleotide
auaauaucaucgucacugu

SEQ ID NO: 804865 - RNA, 19 nt, Artificial Sequence
  Description of Artificial Sequence: Synthetic oligonucleotide
ucgaggaauggguugauua

SEQ ID NO: 804866 - RNA, 19 nt, Artificial Sequence
  Description of Artificial Sequence: Synthetic oligonucleotide
uuauccguguauagguacu

SEQ ID NO: 804867 - RNA, 19 nt, Artificial Sequence
  Description of Artificial Sequence: Synthetic oligonucleotide
aaauucuucagaagaucgu

SEQ ID NO: 804868 - RNA, 19 nt, Artificial Sequence
  Description of Artificial Sequence: Synthetic oligonucleotide
cuggcuauaggcauuguga

SEQ ID NO: 804869 - RNA, 19 nt, Artificial Sequence
  Description of Artificial Sequence: Synthetic oligonucleotide
uggguuacuacagucagau

SEQ ID NO: 804870 - RNA, 19 nt, Artificial Sequence
  Description of Artificial Sequence: Synthetic oligonucleotide
aaacacgucaucggugcag

SEQ ID NO: 804871 - RNA, 19 nt, Artificial Sequence
  Description of Artificial Sequence: Synthetic oligonucleotide
ucaccuauccccagacagc

SEQ ID NO: 804872 - RNA, 19 nt, Artificial Sequence
  Description of Artificial Sequence: Synthetic oligonucleotide
gaacgaaaaugcucacacc

SEQ ID NO: 804873 - RNA, 19 nt, Artificial Sequence
  Description of Artificial Sequence: Synthetic oligonucleotide
gauaguuugcugacagagc

SEQ ID NO: 804874 - RNA, 19 nt, Artificial Sequence
  Description of Artificial Sequence: Synthetic oligonucleotide
gccgcaaucucuaugaucc

SEQ ID NO: 804875 - RNA, 19 nt, Artificial Sequence
  Description of Artificial Sequence: Synthetic oligonucleotide
acggccauggaacacauuu

SEQ ID NO: 804876 - RNA, 19 nt, Artificial Sequence
  Description of Artificial Sequence: Synthetic oligonucleotide
cucuccaucagacguuagg

SEQ ID NO: 804877 - RNA, 19 nt, Artificial Sequence
  Description of Artificial Sequence: Synthetic oligonucleotide
acccgcuggacacgaaugc

SEQ ID NO: 804878 - RNA, 19 nt, Artificial Sequence
  Description of Artificial Sequence: Synthetic oligonucleotide
gaaaguuccaaaucacggu

SEQ ID NO: 804879 - RNA, 19 nt, Artificial Sequence
  Description of Artificial Sequence: Synthetic oligonucleotide
ugaagaccagacuuaggaa

SEQ ID NO: 804880 - RNA, 19 nt, Artificial Sequence
  Description of Artificial Sequence: Synthetic oligonucleotide
auggacucaguccugugca

SEQ ID NO: 804881 - RNA, 19 nt, Artificial Sequence
  Description of Artificial Sequence: Synthetic oligonucleotide
aagaacgaaaaugcucaca

SEQ ID NO: 804882 - RNA, 19 nt, Artificial Sequence
  Description of Artificial Sequence: Synthetic oligonucleotide
uggugcucugaauaucacc

SEQ ID NO: 804883 - RNA, 19 nt, Artificial Sequence
  Description of Artificial Sequence: Synthetic oligonucleotide
ugacaggguagccuguacu

SEQ ID NO: 804884 - RNA, 19 nt, Artificial Sequence
  Description of Artificial Sequence: Synthetic oligonucleotide
uuauuaccagugcccaacu

SEQ ID NO: 804885 - RNA, 19 nt, Artificial Sequence
  Description of Artificial Sequence: Synthetic oligonucleotide
agaaaagaguuaacgugag

SEQ ID NO: 804886 - RNA, 19 nt, Artificial Sequence
  Description of Artificial Sequence: Synthetic oligonucleotide
uauuaccagugcccaacug

SEQ ID NO: 804887 - RNA, 19 nt, Artificial Sequence
  Description of Artificial Sequence: Synthetic oligonucleotide
aaugccuugcagggccgcc

SEQ ID NO: 804888 - RNA, 19 nt, Artificial Sequence
  Description of Artificial Sequence: Synthetic oligonucleotide
gaauggguugauuagcggu

SEQ ID NO: 804889 - RNA, 19 nt, Artificial Sequence
  Description of Artificial Sequence: Synthetic oligonucleotide
gaauaucaccuauccccag

SEQ ID NO: 804890 - RNA, 19 nt, Artificial Sequence
  Description of Artificial Sequence: Synthetic oligonucleotide
auaggcugauguuauccgu

SEQ ID NO: 804891 - RNA, 19 nt, Artificial Sequence
  Description of Artificial Sequence: Synthetic oligonucleotide
agacuggaaaguuccaaau

SEQ ID NO: 804892 - RNA, 19 nt, Artificial Sequence
  Description of Artificial Sequence: Synthetic oligonucleotide
uccaaaucacggugaagac

SEQ ID NO: 804893 - RNA, 19 nt, Artificial Sequence
  Description of Artificial Sequence: Synthetic oligonucleotide
uguuauccguguauaggua

SEQ ID NO: 804894 - RNA, 19 nt, Artificial Sequence
  Description of Artificial Sequence: Synthetic oligonucleotide
uccgucuguuguugcaagg

SEQ ID NO: 804895 - RNA, 19 nt, Artificial Sequence
  Description of Artificial Sequence: Synthetic oligonucleotide
cugauugccacugcugccc

SEQ ID NO: 804896 - RNA, 19 nt, Artificial Sequence
  Description of Artificial Sequence: Synthetic oligonucleotide
aacgugaggaugucauuua

SEQ ID NO: 804897 - RNA, 19 nt, Artificial Sequence
  Description of Artificial Sequence: Synthetic oligonucleotide
agauccuaccugcccagag

SEQ ID NO: 804898 - RNA, 19 nt, Artificial Sequence
  Description of Artificial Sequence: Synthetic oligonucleotide
uuuuauuaccagugcccaa

SEQ ID NO: 804899 - RNA, 19 nt, Artificial Sequence
  Description of Artificial Sequence: Synthetic oligonucleotide
acguuaggaccaaagaaug

SEQ ID NO: 804900 - RNA, 19 nt, Artificial Sequence
  Description of Artificial Sequence: Synthetic oligonucleotide
gaagaacgaaaaugcucac

SEQ ID NO: 804901 - RNA, 19 nt, Artificial Sequence
  Description of Artificial Sequence: Synthetic oligonucleotide
ucugcuaagcuggucgcug

SEQ ID NO: 804902 - RNA, 19 nt, Artificial Sequence
  Description of Artificial Sequence: Synthetic oligonucleotide
cugugguguauaaaacuuc

SEQ ID NO: 804903 - RNA, 19 nt, Artificial Sequence
  Description of Artificial Sequence: Synthetic oligonucleotide
aaaucucaucaucgacugu

SEQ ID NO: 804904 - RNA, 19 nt, Artificial Sequence
  Description of Artificial Sequence: Synthetic oligonucleotide
aucgacugaaguucuuccu

SEQ ID NO: 804905 - RNA, 19 nt, Artificial Sequence
  Description of Artificial Sequence: Synthetic oligonucleotide
acaggcaacccgcuggaca

SEQ ID NO: 804906 - RNA, 19 nt, Artificial Sequence
  Description of Artificial Sequence: Synthetic oligonucleotide
ugcguagccacaggcaacc

SEQ ID NO: 804907 - RNA, 19 nt, Artificial Sequence
  Description of Artificial Sequence: Synthetic oligonucleotide
aauggguugauuagcgguu

SEQ ID NO: 804908 - RNA, 19 nt, Artificial Sequence
  Description of Artificial Sequence: Synthetic oligonucleotide
cacaccuaauuuugagaag

SEQ ID NO: 804909 - RNA, 19 nt, Artificial Sequence
  Description of Artificial Sequence: Synthetic oligonucleotide
cucaauggugcucugaaua

SEQ ID NO: 804910 - RNA, 19 nt, Artificial Sequence
  Description of Artificial Sequence: Synthetic oligonucleotide
ccagaguuauuauaacccc

SEQ ID NO: 804911 - RNA, 19 nt, Artificial Sequence
  Description of Artificial Sequence: Synthetic oligonucleotide
uugauaguuugcugacaga

SEQ ID NO: 804912 - RNA, 19 nt, Artificial Sequence
  Description of Artificial Sequence: Synthetic oligonucleotide
ugcaccccaagcauacacu

SEQ ID NO: 804913 - RNA, 19 nt, Artificial Sequence
  Description of Artificial Sequence: Synthetic oligonucleotide
gguugauccagauccuacc

SEQ ID NO: 804914 - RNA, 19 nt, Artificial Sequence
  Description of Artificial Sequence: Synthetic oligonucleotide
cuccgaggcucaauggugc

SEQ ID NO: 804915 - RNA, 19 nt, Artificial Sequence
  Description of Artificial Sequence: Synthetic oligonucleotide
caucuagcauuuucaauga

SEQ ID NO: 804916 - RNA, 19 nt, Artificial Sequence
  Description of Artificial Sequence: Synthetic oligonucleotide
ggcauugugaccccaggug

SEQ ID NO: 804917 - RNA, 19 nt, Artificial Sequence
  Description of Artificial Sequence: Synthetic oligonucleotide
cagaguuauuauaacccca

SEQ ID NO: 804918 - RNA, 19 nt, Artificial Sequence
  Description of Artificial Sequence: Synthetic oligonucleotide
uuggguuacuacagucaga

SEQ ID NO: 804919 - RNA, 19 nt, Artificial Sequence
  Description of Artificial Sequence: Synthetic oligonucleotide
cucuucgaggaauggguug

SEQ ID NO: 804920 - RNA, 19 nt, Artificial Sequence
  Description of Artificial Sequence: Synthetic oligonucleotide
agacagcagagcaauagca

SEQ ID NO: 804921 - RNA, 19 nt, Artificial Sequence
  Description of Artificial Sequence: Synthetic oligonucleotide
acgucaucggugcagcaga

SEQ ID NO: 804922 - RNA, 19 nt, Artificial Sequence
  Description of Artificial Sequence: Synthetic oligonucleotide
ccgaauuugguccuucuag

SEQ ID NO: 804923 - RNA, 19 nt, Artificial Sequence
  Description of Artificial Sequence: Synthetic oligonucleotide
uuccacaacgacaggggua

SEQ ID NO: 804924 - RNA, 19 nt, Artificial Sequence
  Description of Artificial Sequence: Synthetic oligonucleotide
agaagaucgugguccauuu

SEQ ID NO: 804925 - RNA, 19 nt, Artificial Sequence
  Description of Artificial Sequence: Synthetic oligonucleotide
caccuauccccagacagcc

SEQ ID NO: 804926 - RNA, 19 nt, Artificial Sequence
  Description of Artificial Sequence: Synthetic oligonucleotide
gacguuaggaccaaagaau

SEQ ID NO: 804927 - RNA, 19 nt, Artificial Sequence
  Description of Artificial Sequence: Synthetic oligonucleotide
caggguaugaaaauucacu

SEQ ID NO: 804928 - RNA, 19 nt, Artificial Sequence
  Description of Artificial Sequence: Synthetic oligonucleotide
gaccuucaucuguuaauac

SEQ ID NO: 804929 - RNA, 19 nt, Artificial Sequence
  Description of Artificial Sequence: Synthetic oligonucleotide
uaucaccuauccccagaca

SEQ ID NO: 804930 - RNA, 19 nt, Artificial Sequence
  Description of Artificial Sequence: Synthetic oligonucleotide
guuccacggagagaaggcg

SEQ ID NO: 804931 - RNA, 19 nt, Artificial Sequence
  Description of Artificial Sequence: Synthetic oligonucleotide
acgaugugugggccacucc

SEQ ID NO: 804932 - RNA, 19 nt, Artificial Sequence
  Description of Artificial Sequence: Synthetic oligonucleotide
ugugagcauaaauguacuu

SEQ ID NO: 804933 - RNA, 19 nt, Artificial Sequence
  Description of Artificial Sequence: Synthetic oligonucleotide
uugcauguuagggaucagu

SEQ ID NO: 804934 - RNA, 19 nt, Artificial Sequence
  Description of Artificial Sequence: Synthetic oligonucleotide
cacaacgacagggguaggg

SEQ ID NO: 804935 - RNA, 19 nt, Artificial Sequence
  Description of Artificial Sequence: Synthetic oligonucleotide
uaccaaugugugugcguag

SEQ ID NO: 804936 - RNA, 19 nt, Artificial Sequence
  Description of Artificial Sequence: Synthetic oligonucleotide
augucauuuaaggagcauu

SEQ ID NO: 804937 - RNA, 19 nt, Artificial Sequence
  Description of Artificial Sequence: Synthetic oligonucleotide
gcccagaguuauuauaacc

SEQ ID NO: 804938 - RNA, 19 nt, Artificial Sequence
  Description of Artificial Sequence: Synthetic oligonucleotide
ggguaugaaaauucacuca

SEQ ID NO: 804939 - RNA, 19 nt, Artificial Sequence
  Description of Artificial Sequence: Synthetic oligonucleotide
guuguugcaaggacgaugu

SEQ ID NO: 804940 - RNA, 19 nt, Artificial Sequence
  Description of Artificial Sequence: Synthetic oligonucleotide
auuagcgguugauccagau

SEQ ID NO: 804941 - RNA, 19 nt, Artificial Sequence
  Description of Artificial Sequence: Synthetic oligonucleotide
acaggccgcaaucucuaug

SEQ ID NO: 804942 - RNA, 19 nt, Artificial Sequence
  Description of Artificial Sequence: Synthetic oligonucleotide
ugcccagaguuauuauaac

SEQ ID NO: 804943 - RNA, 19 nt, Artificial Sequence
  Description of Artificial Sequence: Synthetic oligonucleotide
gagcaucguauuucacagc

SEQ ID NO: 804944 - RNA, 19 nt, Artificial Sequence
  Description of Artificial Sequence: Synthetic oligonucleotide
acauuugcccacaugcuau

SEQ ID NO: 804945 - RNA, 19 nt, Artificial Sequence
  Description of Artificial Sequence: Synthetic oligonucleotide
ugacaggccgcaaucucua

SEQ ID NO: 804946 - RNA, 19 nt, Artificial Sequence
  Description of Artificial Sequence: Synthetic oligonucleotide
caggccgcaaucucuauga

SEQ ID NO: 804947 - RNA, 19 nt, Artificial Sequence
  Description of Artificial Sequence: Synthetic oligonucleotide
auugugaccccaggugaag

SEQ ID NO: 804948 - RNA, 19 nt, Artificial Sequence
  Description of Artificial Sequence: Synthetic oligonucleotide
auauggacucaguccugug

SEQ ID NO: 804949 - RNA, 19 nt, Artificial Sequence
  Description of Artificial Sequence: Synthetic oligonucleotide
auaccaaugugugugcgua

SEQ ID NO: 804950 - RNA, 19 nt, Artificial Sequence
  Description of Artificial Sequence: Synthetic oligonucleotide
cauuugcccacaugcuaug

SEQ ID NO: 804951 - RNA, 19 nt, Artificial Sequence
  Description of Artificial Sequence: Synthetic oligonucleotide
acggagagaaggcgccagg

SEQ ID NO: 804952 - RNA, 19 nt, Artificial Sequence
  Description of Artificial Sequence: Synthetic oligonucleotide
uaccagugcccaacuggcc

SEQ ID NO: 804953 - RNA, 19 nt, Artificial Sequence
  Description of Artificial Sequence: Synthetic oligonucleotide
acaacgacagggguagggu

SEQ ID NO: 804954 - RNA, 19 nt, Artificial Sequence
  Description of Artificial Sequence: Synthetic oligonucleotide
agccugacgaaucgacuga

SEQ ID NO: 804955 - RNA, 19 nt, Artificial Sequence
  Description of Artificial Sequence: Synthetic oligonucleotide
cagacguuaggaccaaaga

SEQ ID NO: 804956 - RNA, 19 nt, Artificial Sequence
  Description of Artificial Sequence: Synthetic oligonucleotide
gaauuugguccuucuagau

SEQ ID NO: 804957 - RNA, 19 nt, Artificial Sequence
  Description of Artificial Sequence: Synthetic oligonucleotide
cauagaccucuccuguauc

SEQ ID NO: 804958 - RNA, 19 nt, Artificial Sequence
  Description of Artificial Sequence: Synthetic oligonucleotide
uggguugauuagcgguuga

SEQ ID NO: 804959 - RNA, 19 nt, Artificial Sequence
  Description of Artificial Sequence: Synthetic oligonucleotide
ggcuauaggcauugugacc

SEQ ID NO: 804960 - RNA, 19 nt, Artificial Sequence
  Description of Artificial Sequence: Synthetic oligonucleotide
ccuaauuuugagaaggacu

SEQ ID NO: 804961 - RNA, 19 nt, Artificial Sequence
  Description of Artificial Sequence: Synthetic oligonucleotide
ugcuaagcuggucgcugga

SEQ ID NO: 804962 - RNA, 19 nt, Artificial Sequence
  Description of Artificial Sequence: Synthetic oligonucleotide
ccagaucuagcaauccuac

SEQ ID NO: 804963 - RNA, 19 nt, Artificial Sequence
  Description of Artificial Sequence: Synthetic oligonucleotide
gcaaggacgaugugugggc

SEQ ID NO: 804964 - RNA, 19 nt, Artificial Sequence
  Description of Artificial Sequence: Synthetic oligonucleotide
gaagaucgugguccauuuc

SEQ ID NO: 804965 - RNA, 19 nt, Artificial Sequence
  Description of Artificial Sequence: Synthetic oligonucleotide
caaucucuaugauccuguc

SEQ ID NO: 804966 - RNA, 19 nt, Artificial Sequence
  Description of Artificial Sequence: Synthetic oligonucleotide
guuaacgugaggaugucau

SEQ ID NO: 804967 - RNA, 19 nt, Artificial Sequence
  Description of Artificial Sequence: Synthetic oligonucleotide
uauccguguauagguacuc

SEQ ID NO: 804968 - RNA, 19 nt, Artificial Sequence
  Description of Artificial Sequence: Synthetic oligonucleotide
cuccgucuguuguugcaag

SEQ ID NO: 804969 - RNA, 19 nt, Artificial Sequence
  Description of Artificial Sequence: Synthetic oligonucleotide
guugauccagauccuaccu

SEQ ID NO: 804970 - RNA, 19 nt, Artificial Sequence
  Description of Artificial Sequence: Synthetic oligonucleotide
agccgagucucacuguaaa

SEQ ID NO: 804971 - RNA, 19 nt, Artificial Sequence
  Description of Artificial Sequence: Synthetic oligonucleotide
aguuaacgugaggauguca

SEQ ID NO: 804972 - RNA, 19 nt, Artificial Sequence
  Description of Artificial Sequence: Synthetic oligonucleotide
acccugaaguuuggguuac

SEQ ID NO: 804973 - RNA, 19 nt, Artificial Sequence
  Description of Artificial Sequence: Synthetic oligonucleotide
ccaaaucacggugaagacc

SEQ ID NO: 804974 - RNA, 19 nt, Artificial Sequence
  Description of Artificial Sequence: Synthetic oligonucleotide
agaucccuugcuugauagu

SEQ ID NO: 804975 - RNA, 19 nt, Artificial Sequence
  Description of Artificial Sequence: Synthetic oligonucleotide
cuucuccgucuguuguugc

SEQ ID NO: 804976 - RNA, 19 nt, Artificial Sequence
  Description of Artificial Sequence: Synthetic oligonucleotide
ccaagcauacacuugaccu

SEQ ID NO: 804977 - RNA, 19 nt, Artificial Sequence
  Description of Artificial Sequence: Synthetic oligonucleotide
gagauaggcugauguuauc

SEQ ID NO: 804978 - RNA, 19 nt, Artificial Sequence
  Description of Artificial Sequence: Synthetic oligonucleotide
guagccuguacuggcuugc

SEQ ID NO: 804979 - RNA, 19 nt, Artificial Sequence
  Description of Artificial Sequence: Synthetic oligonucleotide
cugacgaaucgacugaagu

SEQ ID NO: 804980 - RNA, 19 nt, Artificial Sequence
  Description of Artificial Sequence: Synthetic oligonucleotide
gcauugugaccccagguga

SEQ ID NO: 804981 - RNA, 19 nt, Artificial Sequence
  Description of Artificial Sequence: Synthetic oligonucleotide
uacaacggccauggaacac

SEQ ID NO: 804982 - RNA, 19 nt, Artificial Sequence
  Description of Artificial Sequence: Synthetic oligonucleotide
caaggacgaugugugggcc

SEQ ID NO: 804983 - RNA, 19 nt, Artificial Sequence
  Description of Artificial Sequence: Synthetic oligonucleotide
uguuagggaucaguucuua

SEQ ID NO: 804984 - RNA, 19 nt, Artificial Sequence
  Description of Artificial Sequence: Synthetic oligonucleotide
agaaggcgccaggugacag

SEQ ID NO: 804985 - RNA, 19 nt, Artificial Sequence
  Description of Artificial Sequence: Synthetic oligonucleotide
guuagggaucaguucuuaa

SEQ ID NO: 804986 - RNA, 19 nt, Artificial Sequence
  Description of Artificial Sequence: Synthetic oligonucleotide
gcuggcuauaggcauugug

SEQ ID NO: 804987 - RNA, 19 nt, Artificial Sequence
  Description of Artificial Sequence: Synthetic oligonucleotide
ggaccaaagaaugguaaga

SEQ ID NO: 804988 - RNA, 19 nt, Artificial Sequence
  Description of Artificial Sequence: Synthetic oligonucleotide
cacaggcaaccucaaugac

SEQ ID NO: 804989 - RNA, 19 nt, Artificial Sequence
  Description of Artificial Sequence: Synthetic oligonucleotide
ucuccgucuguuguugcaa

SEQ ID NO: 804990 - RNA, 19 nt, Artificial Sequence
  Description of Artificial Sequence: Synthetic oligonucleotide
uuccaucaaccagaaacuu

SEQ ID NO: 804991 - RNA, 19 nt, Artificial Sequence
  Description of Artificial Sequence: Synthetic oligonucleotide
ugcagucccuuggucaacu

SEQ ID NO: 804992 - RNA, 19 nt, Artificial Sequence
  Description of Artificial Sequence: Synthetic oligonucleotide
uucagccgagucucacugu

SEQ ID NO: 804993 - RNA, 19 nt, Artificial Sequence
  Description of Artificial Sequence: Synthetic oligonucleotide
gucgcuggagaguucugga

SEQ ID NO: 804994 - RNA, 19 nt, Artificial Sequence
  Description of Artificial Sequence: Synthetic oligonucleotide
uuguaaccccagacauaga

SEQ ID NO: 804995 - RNA, 19 nt, Artificial Sequence
  Description of Artificial Sequence: Synthetic oligonucleotide
acgaaucgacugaaguucu

SEQ ID NO: 804996 - RNA, 19 nt, Artificial Sequence
  Description of Artificial Sequence: Synthetic oligonucleotide
cuacaacggccauggaaca

SEQ ID NO: 804997 - RNA, 19 nt, Artificial Sequence
  Description of Artificial Sequence: Synthetic oligonucleotide
ggucgcuggagaguucugg

SEQ ID NO: 804998 - RNA, 19 nt, Artificial Sequence
  Description of Artificial Sequence: Synthetic oligonucleotide
gguagccuguacuggcuug

SEQ ID NO: 804999 - RNA, 19 nt, Artificial Sequence
  Description of Artificial Sequence: Synthetic oligonucleotide
gaucccuugcuugauaguu

SEQ ID NO: 805000 - RNA, 19 nt, Artificial Sequence
  Description of Artificial Sequence: Synthetic oligonucleotide
ggugaagaccagacuuagg

SEQ ID NO: 805001 - RNA, 19 nt, Artificial Sequence
  Description of Artificial Sequence: Synthetic oligonucleotide
gacgaugugugggccacuc

SEQ ID NO: 805002 - RNA, 19 nt, Artificial Sequence
  Description of Artificial Sequence: Synthetic oligonucleotide
cacgaaugccuugcagggc

SEQ ID NO: 805003 - RNA, 19 nt, Artificial Sequence
  Description of Artificial Sequence: Synthetic oligonucleotide
uuugcaccccaagcauaca

SEQ ID NO: 805004 - RNA, 19 nt, Artificial Sequence
  Description of Artificial Sequence: Synthetic oligonucleotide
accaugguuuguggucccg

SEQ ID NO: 805005 - RNA, 19 nt, Artificial Sequence
  Description of Artificial Sequence: Synthetic oligonucleotide
agccuguacuggcuugcca

SEQ ID NO: 805006 - RNA, 19 nt, Artificial Sequence
  Description of Artificial Sequence: Synthetic oligonucleotide
acgaaaaugcucacaccua

SEQ ID NO: 805007 - RNA, 19 nt, Artificial Sequence
  Description of Artificial Sequence: Synthetic oligonucleotide
gguaggacugguuacuuuu

SEQ ID NO: 805008 - RNA, 19 nt, Artificial Sequence
  Description of Artificial Sequence: Synthetic oligonucleotide
cuguaugaucugcuaagcu

SEQ ID NO: 805009 - RNA, 19 nt, Artificial Sequence
  Description of Artificial Sequence: Synthetic oligonucleotide
ucggaacacaggguaugaa

SEQ ID NO: 805010 - RNA, 19 nt, Artificial Sequence
  Description of Artificial Sequence: Synthetic oligonucleotide
gcaaggcaccaaaccaugg

SEQ ID NO: 805011 - RNA, 19 nt, Artificial Sequence
  Description of Artificial Sequence: Synthetic oligonucleotide
ccaaugugugugcguagcc

SEQ ID NO: 805012 - RNA, 19 nt, Artificial Sequence
  Description of Artificial Sequence: Synthetic oligonucleotide
ugugugggccacucccaua

SEQ ID NO: 805013 - RNA, 19 nt, Artificial Sequence
  Description of Artificial Sequence: Synthetic oligonucleotide
ggcaaggcaccaaaccaug

SEQ ID NO: 805014 - RNA, 19 nt, Artificial Sequence
  Description of Artificial Sequence: Synthetic oligonucleotide
caagcauacacuugaccuu

SEQ ID NO: 805015 - RNA, 19 nt, Artificial Sequence
  Description of Artificial Sequence: Synthetic oligonucleotide
uccuaccugcccagaguua

SEQ ID NO: 805016 - RNA, 19 nt, Artificial Sequence
  Description of Artificial Sequence: Synthetic oligonucleotide
gucaucggugcagcagaag

SEQ ID NO: 805017 - RNA, 19 nt, Artificial Sequence
  Description of Artificial Sequence: Synthetic oligonucleotide
gaguuaacgugaggauguc

SEQ ID NO: 805018 - RNA, 19 nt, Artificial Sequence
  Description of Artificial Sequence: Synthetic oligonucleotide
uagccuguacuggcuugcc

SEQ ID NO: 805019 - RNA, 19 nt, Artificial Sequence
  Description of Artificial Sequence: Synthetic oligonucleotide
caaggcaccaaaccauggu

SEQ ID NO: 805020 - RNA, 19 nt, Artificial Sequence
  Description of Artificial Sequence: Synthetic oligonucleotide
cacaucuagcauuuucaau

SEQ ID NO: 805021 - RNA, 19 nt, Artificial Sequence
  Description of Artificial Sequence: Synthetic oligonucleotide
gccauggaacacauuugcc

SEQ ID NO: 805022 - RNA, 19 nt, Artificial Sequence
  Description of Artificial Sequence: Synthetic oligonucleotide
ggagaguucuggagccccg

SEQ ID NO: 805023 - RNA, 19 nt, Artificial Sequence
  Description of Artificial Sequence: Synthetic oligonucleotide
acggugaagaccagacuua

SEQ ID NO: 805024 - RNA, 19 nt, Artificial Sequence
  Description of Artificial Sequence: Synthetic oligonucleotide
agaccagacuuaggaauuu

SEQ ID NO: 805025 - RNA, 19 nt, Artificial Sequence
  Description of Artificial Sequence: Synthetic oligonucleotide
gauuagcgguugauccaga

SEQ ID NO: 805026 - RNA, 19 nt, Artificial Sequence
  Description of Artificial Sequence: Synthetic oligonucleotide
ggccgcaaucucuaugauc

SEQ ID NO: 805027 - RNA, 19 nt, Artificial Sequence
  Description of Artificial Sequence: Synthetic oligonucleotide
cgaauuugguccuucuaga

SEQ ID NO: 805028 - RNA, 19 nt, Artificial Sequence
  Description of Artificial Sequence: Synthetic oligonucleotide
gugugcguagccacaggca

SEQ ID NO: 805029 - RNA, 19 nt, Artificial Sequence
  Description of Artificial Sequence: Synthetic oligonucleotide
ccugacgaaucgacugaag

SEQ ID NO: 805030 - RNA, 19 nt, Artificial Sequence
  Description of Artificial Sequence: Synthetic oligonucleotide
aucaucgacugugguguau

SEQ ID NO: 805031 - RNA, 19 nt, Artificial Sequence
  Description of Artificial Sequence: Synthetic oligonucleotide
acucuucgaggaauggguu

SEQ ID NO: 805032 - RNA, 19 nt, Artificial Sequence
  Description of Artificial Sequence: Synthetic oligonucleotide
cgacugugguguauaaaac

SEQ ID NO: 805033 - RNA, 19 nt, Artificial Sequence
  Description of Artificial Sequence: Synthetic oligonucleotide
acacgucaucggugcagca

SEQ ID NO: 805034 - RNA, 19 nt, Artificial Sequence
  Description of Artificial Sequence: Synthetic oligonucleotide
agauguggcaaggcaccaa

SEQ ID NO: 805035 - RNA, 19 nt, Artificial Sequence
  Description of Artificial Sequence: Synthetic oligonucleotide
ucagucuccgaggcucaau

SEQ ID NO: 805036 - RNA, 19 nt, Artificial Sequence
  Description of Artificial Sequence: Synthetic oligonucleotide
cauauggacucaguccugu

SEQ ID NO: 805037 - RNA, 19 nt, Artificial Sequence
  Description of Artificial Sequence: Synthetic oligonucleotide
caucgucacugucuucuaa

SEQ ID NO: 805038 - RNA, 19 nt, Artificial Sequence
  Description of Artificial Sequence: Synthetic oligonucleotide
gagaaggcgccaggugaca

SEQ ID NO: 805039 - RNA, 19 nt, Artificial Sequence
  Description of Artificial Sequence: Synthetic oligonucleotide
gcaaacauccagugacucu

SEQ ID NO: 805040 - RNA, 19 nt, Artificial Sequence
  Description of Artificial Sequence: Synthetic oligonucleotide
ccacuuccccacaucuagc

SEQ ID NO: 805041 - RNA, 19 nt, Artificial Sequence
  Description of Artificial Sequence: Synthetic oligonucleotide
caucgacugugguguauaa

SEQ ID NO: 805042 - RNA, 19 nt, Artificial Sequence
  Description of Artificial Sequence: Synthetic oligonucleotide
aggcaacccgcuggacacg

SEQ ID NO: 805043 - RNA, 19 nt, Artificial Sequence
  Description of Artificial Sequence: Synthetic oligonucleotide
aucccuugcuugauaguuu

SEQ ID NO: 805044 - RNA, 19 nt, Artificial Sequence
  Description of Artificial Sequence: Synthetic oligonucleotide
gugcguagccacaggcaac

SEQ ID NO: 805045 - RNA, 19 nt, Artificial Sequence
  Description of Artificial Sequence: Synthetic oligonucleotide
ccauauggacucaguccug

SEQ ID NO: 805046 - RNA, 19 nt, Artificial Sequence
  Description of Artificial Sequence: Synthetic oligonucleotide
agcauacacuugaccuuca

SEQ ID NO: 805047 - RNA, 19 nt, Artificial Sequence
  Description of Artificial Sequence: Synthetic oligonucleotide
ccgcccugggucuuggcag

SEQ ID NO: 805048 - RNA, 19 nt, Artificial Sequence
  Description of Artificial Sequence: Synthetic oligonucleotide
cgaaaaugcucacaccuaa

SEQ ID NO: 805049 - RNA, 19 nt, Artificial Sequence
  Description of Artificial Sequence: Synthetic oligonucleotide
cagaucuagcaauccuacu

SEQ ID NO: 805050 - RNA, 19 nt, Artificial Sequence
  Description of Artificial Sequence: Synthetic oligonucleotide
cgguugauccagauccuac

SEQ ID NO: 805051 - RNA, 19 nt, Artificial Sequence
  Description of Artificial Sequence: Synthetic oligonucleotide
aggccgcaaucucuaugau

SEQ ID NO: 805052 - RNA, 19 nt, Artificial Sequence
  Description of Artificial Sequence: Synthetic oligonucleotide
cacaagccugacgaaucga

SEQ ID NO: 805053 - RNA, 19 nt, Artificial Sequence
  Description of Artificial Sequence: Synthetic oligonucleotide
gcuugauaguuugcugaca

SEQ ID NO: 805054 - RNA, 19 nt, Artificial Sequence
  Description of Artificial Sequence: Synthetic oligonucleotide
cccuugcuugauaguuugc

SEQ ID NO: 805055 - RNA, 19 nt, Artificial Sequence
  Description of Artificial Sequence: Synthetic oligonucleotide
caggagauaggcugauguu

SEQ ID NO: 805056 - RNA, 19 nt, Artificial Sequence
  Description of Artificial Sequence: Synthetic oligonucleotide
aucagacguuaggaccaaa

SEQ ID NO: 805057 - RNA, 19 nt, Artificial Sequence
  Description of Artificial Sequence: Synthetic oligonucleotide
cggugaagaccagacuuag

SEQ ID NO: 805058 - RNA, 19 nt, Artificial Sequence
  Description of Artificial Sequence: Synthetic oligonucleotide
caugguuuguggucccguu

SEQ ID NO: 805059 - RNA, 19 nt, Artificial Sequence
  Description of Artificial Sequence: Synthetic oligonucleotide
cacaggcaacccgcuggac

SEQ ID NO: 805060 - RNA, 19 nt, Artificial Sequence
  Description of Artificial Sequence: Synthetic oligonucleotide
cauugccagcacugccaaa

SEQ ID NO: 805061 - RNA, 19 nt, Artificial Sequence
  Description of Artificial Sequence: Synthetic oligonucleotide
caucaucgacuguggugua

SEQ ID NO: 805062 - RNA, 19 nt, Artificial Sequence
  Description of Artificial Sequence: Synthetic oligonucleotide
caucagacguuaggaccaa

SEQ ID NO: 805063 - RNA, 19 nt, Artificial Sequence
  Description of Artificial Sequence: Synthetic oligonucleotide
ggucaacuuuucugagacu

SEQ ID NO: 805064 - RNA, 19 nt, Artificial Sequence
  Description of Artificial Sequence: Synthetic oligonucleotide
gacaggccgcaaucucuau

SEQ ID NO: 805065 - RNA, 19 nt, Artificial Sequence
  Description of Artificial Sequence: Synthetic oligonucleotide
ccgucuguuguugcaagga

SEQ ID NO: 805066 - RNA, 19 nt, Artificial Sequence
  Description of Artificial Sequence: Synthetic oligonucleotide
agcuggcuauaggcauugu

SEQ ID NO: 805067 - RNA, 19 nt, Artificial Sequence
  Description of Artificial Sequence: Synthetic oligonucleotide
ccucuccaucagacguuag

SEQ ID NO: 805068 - RNA, 19 nt, Artificial Sequence
  Description of Artificial Sequence: Synthetic oligonucleotide
cagauccuaccugcccaga

SEQ ID NO: 805069 - RNA, 19 nt, Artificial Sequence
  Description of Artificial Sequence: Synthetic oligonucleotide
ccgagucucacuguaaaau

SEQ ID NO: 805070 - RNA, 19 nt, Artificial Sequence
  Description of Artificial Sequence: Synthetic oligonucleotide
cuggagccccgaauuuggu

SEQ ID NO: 805071 - RNA, 19 nt, Artificial Sequence
  Description of Artificial Sequence: Synthetic oligonucleotide
cccgaauuugguccuucua

SEQ ID NO: 805072 - RNA, 19 nt, Artificial Sequence
  Description of Artificial Sequence: Synthetic oligonucleotide
ccgcuggacacgaaugccu

SEQ ID NO: 805073 - RNA, 19 nt, Artificial Sequence
  Description of Artificial Sequence: Synthetic oligonucleotide
ggguugauuagcgguugau

SEQ ID NO: 805074 - RNA, 19 nt, Artificial Sequence
  Description of Artificial Sequence: Synthetic oligonucleotide
gcaccaaaccaugguuugu

SEQ ID NO: 805075 - RNA, 19 nt, Artificial Sequence
  Description of Artificial Sequence: Synthetic oligonucleotide
gcguagccacaggcaaccc

SEQ ID NO: 805076 - RNA, 19 nt, Artificial Sequence
  Description of Artificial Sequence: Synthetic oligonucleotide
gccccgaauuugguccuuc

SEQ ID NO: 805077 - RNA, 19 nt, Artificial Sequence
  Description of Artificial Sequence: Synthetic oligonucleotide
ccacaacgacagggguagg

SEQ ID NO: 805078 - RNA, 19 nt, Artificial Sequence
  Description of Artificial Sequence: Synthetic oligonucleotide
ccucacagaucccuugcuu

SEQ ID NO: 805079 - RNA, 19 nt, Artificial Sequence
  Description of Artificial Sequence: Synthetic oligonucleotide
cagugcccaacuggccaua

SEQ ID NO: 805080 - RNA, 19 nt, Artificial Sequence
  Description of Artificial Sequence: Synthetic oligonucleotide
ccccgaauuugguccuucu

SEQ ID NO: 805081 - RNA, 19 nt, Artificial Sequence
  Description of Artificial Sequence: Synthetic oligonucleotide
ccaugguuuguggucccgu

SEQ ID NO: 805082 - RNA, 19 nt, Artificial Sequence
  Description of Artificial Sequence: Synthetic oligonucleotide
ccgcaaucucuaugauccu

SEQ ID NO: 805083 - RNA, 19 nt, Artificial Sequence
  Description of Artificial Sequence: Synthetic oligonucleotide
ccguugcccagcuggcuau

SEQ ID NO: 805084 - RNA, 19 nt, Artificial Sequence
  Description of Artificial Sequence: Synthetic oligonucleotide
gcaacccgcuggacacgaa

SEQ ID NO: 805085 - RNA, 19 nt, Artificial Sequence
  Description of Artificial Sequence: Synthetic oligonucleotide
guaauauugagucacaggg

SEQ ID NO: 805086 - RNA, 19 nt, Artificial Sequence
  Description of Artificial Sequence: Synthetic oligonucleotide
aaugcuaugaaauuaauua

SEQ ID NO: 805087 - RNA, 19 nt, Artificial Sequence
  Description of Artificial Sequence: Synthetic oligonucleotide
acuaugguaauauugaguc

SEQ ID NO: 805088 - RNA, 19 nt, Artificial Sequence
  Description of Artificial Sequence: Synthetic oligonucleotide
ugaacuacaaacaagugca

SEQ ID NO: 805089 - RNA, 19 nt, Artificial Sequence
  Description of Artificial Sequence: Synthetic oligonucleotide
ugauauaauacacuagagg

SEQ ID NO: 805090 - RNA, 19 nt, Artificial Sequence
  Description of Artificial Sequence: Synthetic oligonucleotide
ucuuuauuguaaaacauag

SEQ ID NO: 805091 - RNA, 19 nt, Artificial Sequence
  Description of Artificial Sequence: Synthetic oligonucleotide
uauguuacgcuucuggugg

SEQ ID NO: 805092 - RNA, 19 nt, Artificial Sequence
  Description of Artificial Sequence: Synthetic oligonucleotide
augaacuacaaacaagugc

SEQ ID NO: 805093 - RNA, 19 nt, Artificial Sequence
  Description of Artificial Sequence: Synthetic oligonucleotide
aaauuaauuacugaguugu

SEQ ID NO: 805094 - RNA, 19 nt, Artificial Sequence
  Description of Artificial Sequence: Synthetic oligonucleotide
aauaugauauaauacacua

SEQ ID NO: 805095 - RNA, 19 nt, Artificial Sequence
  Description of Artificial Sequence: Synthetic oligonucleotide
ucuagcaacaggaaaauug

SEQ ID NO: 805096 - RNA, 19 nt, Artificial Sequence
  Description of Artificial Sequence: Synthetic oligonucleotide
aguuguuucauguaccuac

SEQ ID NO: 805097 - RNA, 19 nt, Artificial Sequence
  Description of Artificial Sequence: Synthetic oligonucleotide
ucuacaauagaugaauggg

SEQ ID NO: 805098 - RNA, 19 nt, Artificial Sequence
  Description of Artificial Sequence: Synthetic oligonucleotide
uaacccacaaggaauaagg

SEQ ID NO: 805099 - RNA, 19 nt, Artificial Sequence
  Description of Artificial Sequence: Synthetic oligonucleotide
ggaaaauugaacuaggcag

SEQ ID NO: 805100 - RNA, 19 nt, Artificial Sequence
  Description of Artificial Sequence: Synthetic oligonucleotide
uccaacuugacuaaacaag

SEQ ID NO: 805101 - RNA, 19 nt, Artificial Sequence
  Description of Artificial Sequence: Synthetic oligonucleotide
caauuauuagccaaauacg

SEQ ID NO: 805102 - RNA, 19 nt, Artificial Sequence
  Description of Artificial Sequence: Synthetic oligonucleotide
uuacucaccaccuaaaacu

SEQ ID NO: 805103 - RNA, 19 nt, Artificial Sequence
  Description of Artificial Sequence: Synthetic oligonucleotide
aauauugagucacagggau

SEQ ID NO: 805104 - RNA, 19 nt, Artificial Sequence
  Description of Artificial Sequence: Synthetic oligonucleotide
aagagaaaucaacgggugc

SEQ ID NO: 805105 - RNA, 19 nt, Artificial Sequence
  Description of Artificial Sequence: Synthetic oligonucleotide
aaauacgauacacauucug

SEQ ID NO: 805106 - RNA, 19 nt, Artificial Sequence
  Description of Artificial Sequence: Synthetic oligonucleotide
aaaacaacaucgcacuaug

SEQ ID NO: 805107 - RNA, 19 nt, Artificial Sequence
  Description of Artificial Sequence: Synthetic oligonucleotide
gaaagagggagacugaaug

SEQ ID NO: 805108 - RNA, 19 nt, Artificial Sequence
  Description of Artificial Sequence: Synthetic oligonucleotide
uaauuguucaaaauagcac

SEQ ID NO: 805109 - RNA, 19 nt, Artificial Sequence
  Description of Artificial Sequence: Synthetic oligonucleotide
aauuauuagccaaauacga

SEQ ID NO: 805110 - RNA, 19 nt, Artificial Sequence
  Description of Artificial Sequence: Synthetic oligonucleotide
agauauguuacgcuucugg

SEQ ID NO: 805111 - RNA, 19 nt, Artificial Sequence
  Description of Artificial Sequence: Synthetic oligonucleotide
aucccugccaauuauuagc

SEQ ID NO: 805112 - RNA, 19 nt, Artificial Sequence
  Description of Artificial Sequence: Synthetic oligonucleotide
auuacucaccaccuaaaac

SEQ ID NO: 805113 - RNA, 19 nt, Artificial Sequence
  Description of Artificial Sequence: Synthetic oligonucleotide
aacaacaucgcacuauggu

SEQ ID NO: 805114 - RNA, 19 nt, Artificial Sequence
  Description of Artificial Sequence: Synthetic oligonucleotide
uuaauuacugaguuguuuc

SEQ ID NO: 805115 - RNA, 19 nt, Artificial Sequence
  Description of Artificial Sequence: Synthetic oligonucleotide
aguacacucgcaugaaggc

SEQ ID NO: 805116 - RNA, 19 nt, Artificial Sequence
  Description of Artificial Sequence: Synthetic oligonucleotide
cuacaauagaugaaugggg

SEQ ID NO: 805117 - RNA, 19 nt, Artificial Sequence
  Description of Artificial Sequence: Synthetic oligonucleotide
auagcacaaaacaacaucg

SEQ ID NO: 805118 - RNA, 19 nt, Artificial Sequence
  Description of Artificial Sequence: Synthetic oligonucleotide
uacacuagaggccccaggg

SEQ ID NO: 805119 - RNA, 19 nt, Artificial Sequence
  Description of Artificial Sequence: Synthetic oligonucleotide
uuaaguguggguacuaccu

SEQ ID NO: 805120 - RNA, 19 nt, Artificial Sequence
  Description of Artificial Sequence: Synthetic oligonucleotide
aaugggguaguacuguucu

SEQ ID NO: 805121 - RNA, 19 nt, Artificial Sequence
  Description of Artificial Sequence: Synthetic oligonucleotide
uauuagccaaauacgauac

SEQ ID NO: 805122 - RNA, 19 nt, Artificial Sequence
  Description of Artificial Sequence: Synthetic oligonucleotide
auugggaggauuucacagc

SEQ ID NO: 805123 - RNA, 19 nt, Artificial Sequence
  Description of Artificial Sequence: Synthetic oligonucleotide
aacaagugcaggcuuaagu

SEQ ID NO: 805124 - RNA, 19 nt, Artificial Sequence
  Description of Artificial Sequence: Synthetic oligonucleotide
gaaauuaauuacugaguug

SEQ ID NO: 805125 - RNA, 19 nt, Artificial Sequence
  Description of Artificial Sequence: Synthetic oligonucleotide
uacaauagaugaauggggu

SEQ ID NO: 805126 - RNA, 19 nt, Artificial Sequence
  Description of Artificial Sequence: Synthetic oligonucleotide
uguucaaaauagcacaaaa

SEQ ID NO: 805127 - RNA, 19 nt, Artificial Sequence
  Description of Artificial Sequence: Synthetic oligonucleotide
cucuacaauagaugaaugg

SEQ ID NO: 805128 - RNA, 19 nt, Artificial Sequence
  Description of Artificial Sequence: Synthetic oligonucleotide
ugacuaagcuugaagaaga

SEQ ID NO: 805129 - RNA, 19 nt, Artificial Sequence
  Description of Artificial Sequence: Synthetic oligonucleotide
caaggaauaaggucaauug

SEQ ID NO: 805130 - RNA, 19 nt, Artificial Sequence
  Description of Artificial Sequence: Synthetic oligonucleotide
gacuaaacaagacauuuuc

SEQ ID NO: 805131 - RNA, 19 nt, Artificial Sequence
  Description of Artificial Sequence: Synthetic oligonucleotide
cugaccaucagccuuagac

SEQ ID NO: 805132 - RNA, 19 nt, Artificial Sequence
  Description of Artificial Sequence: Synthetic oligonucleotide
uggguuauuuggcauaccc

SEQ ID NO: 805133 - RNA, 19 nt, Artificial Sequence
  Description of Artificial Sequence: Synthetic oligonucleotide
ugcuguauuguucaggguc

SEQ ID NO: 805134 - RNA, 19 nt, Artificial Sequence
  Description of Artificial Sequence: Synthetic oligonucleotide
aauacgauacacauucugu

SEQ ID NO: 805135 - RNA, 19 nt, Artificial Sequence
  Description of Artificial Sequence: Synthetic oligonucleotide
agagguguuaaguggcagc

SEQ ID NO: 805136 - RNA, 19 nt, Artificial Sequence
  Description of Artificial Sequence: Synthetic oligonucleotide
agaugaaugggguaguacu

SEQ ID NO: 805137 - RNA, 19 nt, Artificial Sequence
  Description of Artificial Sequence: Synthetic oligonucleotide
acaugucaagugcuaaccc

SEQ ID NO: 805138 - RNA, 19 nt, Artificial Sequence
  Description of Artificial Sequence: Synthetic oligonucleotide
aacugucuagucauacucc

SEQ ID NO: 805139 - RNA, 19 nt, Artificial Sequence
  Description of Artificial Sequence: Synthetic oligonucleotide
acuaaacaagacauuuucc

SEQ ID NO: 805140 - RNA, 19 nt, Artificial Sequence
  Description of Artificial Sequence: Synthetic oligonucleotide
agucauacuccgcucaggg

SEQ ID NO: 805141 - RNA, 19 nt, Artificial Sequence
  Description of Artificial Sequence: Synthetic oligonucleotide
gaagaagaaggguaguaac

SEQ ID NO: 805142 - RNA, 19 nt, Artificial Sequence
  Description of Artificial Sequence: Synthetic oligonucleotide
uggauggccagguacacag

SEQ ID NO: 805143 - RNA, 19 nt, Artificial Sequence
  Description of Artificial Sequence: Synthetic oligonucleotide
aucugacuaagcuugaaga

SEQ ID NO: 805144 - RNA, 19 nt, Artificial Sequence
  Description of Artificial Sequence: Synthetic oligonucleotide
gaaaucaacgggugcuugg

SEQ ID NO: 805145 - RNA, 19 nt, Artificial Sequence
  Description of Artificial Sequence: Synthetic oligonucleotide
ccaaauacgauacacauuc

SEQ ID NO: 805146 - RNA, 19 nt, Artificial Sequence
  Description of Artificial Sequence: Synthetic oligonucleotide
uucauuucgggcagcaaug

SEQ ID NO: 805147 - RNA, 19 nt, Artificial Sequence
  Description of Artificial Sequence: Synthetic oligonucleotide
uaauauugagucacaggga

SEQ ID NO: 805148 - RNA, 19 nt, Artificial Sequence
  Description of Artificial Sequence: Synthetic oligonucleotide
uuauuuggcauaccccacc

SEQ ID NO: 805149 - RNA, 19 nt, Artificial Sequence
  Description of Artificial Sequence: Synthetic oligonucleotide
uuucauuucgggcagcaau

SEQ ID NO: 805150 - RNA, 19 nt, Artificial Sequence
  Description of Artificial Sequence: Synthetic oligonucleotide
caguacacucgcaugaagg

SEQ ID NO: 805151 - RNA, 19 nt, Artificial Sequence
  Description of Artificial Sequence: Synthetic oligonucleotide
cauugggaggauuucacag

SEQ ID NO: 805152 - RNA, 19 nt, Artificial Sequence
  Description of Artificial Sequence: Synthetic oligonucleotide
ugucuagucauacuccgcu

SEQ ID NO: 805153 - RNA, 19 nt, Artificial Sequence
  Description of Artificial Sequence: Synthetic oligonucleotide
aaaucaacgggugcuuggg

SEQ ID NO: 805154 - RNA, 19 nt, Artificial Sequence
  Description of Artificial Sequence: Synthetic oligonucleotide
auauguuacgcuucuggug

SEQ ID NO: 805155 - RNA, 19 nt, Artificial Sequence
  Description of Artificial Sequence: Synthetic oligonucleotide
ucgcacuaugguaauauug

SEQ ID NO: 805156 - RNA, 19 nt, Artificial Sequence
  Description of Artificial Sequence: Synthetic oligonucleotide
agcaacaggaaaauugaac

SEQ ID NO: 805157 - RNA, 19 nt, Artificial Sequence
  Description of Artificial Sequence: Synthetic oligonucleotide
ucaagugcuaacccacaag

SEQ ID NO: 805158 - RNA, 19 nt, Artificial Sequence
  Description of Artificial Sequence: Synthetic oligonucleotide
uuagccaaauacgauacac

SEQ ID NO: 805159 - RNA, 19 nt, Artificial Sequence
  Description of Artificial Sequence: Synthetic oligonucleotide
gacugcacgaggcaggaag

SEQ ID NO: 805160 - RNA, 19 nt, Artificial Sequence
  Description of Artificial Sequence: Synthetic oligonucleotide
ucuagucauacuccgcuca

SEQ ID NO: 805161 - RNA, 19 nt, Artificial Sequence
  Description of Artificial Sequence: Synthetic oligonucleotide
aaaauugaacuaggcagug

SEQ ID NO: 805162 - RNA, 19 nt, Artificial Sequence
  Description of Artificial Sequence: Synthetic oligonucleotide
guuucauguaccuacccac

SEQ ID NO: 805163 - RNA, 19 nt, Artificial Sequence
  Description of Artificial Sequence: Synthetic oligonucleotide
gacugaaugguagccagcg

SEQ ID NO: 805164 - RNA, 19 nt, Artificial Sequence
  Description of Artificial Sequence: Synthetic oligonucleotide
uucauguaccuacccacag

SEQ ID NO: 805165 - RNA, 19 nt, Artificial Sequence
  Description of Artificial Sequence: Synthetic oligonucleotide
cuuagaccacccaagggag

SEQ ID NO: 805166 - RNA, 19 nt, Artificial Sequence
  Description of Artificial Sequence: Synthetic oligonucleotide
uuacuugccgcucuuucca

SEQ ID NO: 805167 - RNA, 19 nt, Artificial Sequence
  Description of Artificial Sequence: Synthetic oligonucleotide
uucaccaccagcccuguga

SEQ ID NO: 805168 - RNA, 19 nt, Artificial Sequence
  Description of Artificial Sequence: Synthetic oligonucleotide
cuggagacgacaugggccg

SEQ ID NO: 805169 - RNA, 19 nt, Artificial Sequence
  Description of Artificial Sequence: Synthetic oligonucleotide
cuuaaguguggguacuacc

SEQ ID NO: 805170 - RNA, 19 nt, Artificial Sequence
  Description of Artificial Sequence: Synthetic oligonucleotide
ucugagauauguuacgcuu

SEQ ID NO: 805171 - RNA, 19 nt, Artificial Sequence
  Description of Artificial Sequence: Synthetic oligonucleotide
uguaccuacccacagccuc

SEQ ID NO: 805172 - RNA, 19 nt, Artificial Sequence
  Description of Artificial Sequence: Synthetic oligonucleotide
uacgauacacauucuguac

SEQ ID NO: 805173 - RNA, 19 nt, Artificial Sequence
  Description of Artificial Sequence: Synthetic oligonucleotide
uuucuggagacgacauggg

SEQ ID NO: 805174 - RNA, 19 nt, Artificial Sequence
  Description of Artificial Sequence: Synthetic oligonucleotide
aucacuaggggccacucug

SEQ ID NO: 805175 - RNA, 19 nt, Artificial Sequence
  Description of Artificial Sequence: Synthetic oligonucleotide
agugcuaacccacaaggaa

SEQ ID NO: 805176 - RNA, 19 nt, Artificial Sequence
  Description of Artificial Sequence: Synthetic oligonucleotide
uauugagucacagggauua

SEQ ID NO: 805177 - RNA, 19 nt, Artificial Sequence
  Description of Artificial Sequence: Synthetic oligonucleotide
uguagcggggccauagccc

SEQ ID NO: 805178 - RNA, 19 nt, Artificial Sequence
  Description of Artificial Sequence: Synthetic oligonucleotide
agggagacugaaugguagc

SEQ ID NO: 805179 - RNA, 19 nt, Artificial Sequence
  Description of Artificial Sequence: Synthetic oligonucleotide
ugaguuguuucauguaccu

SEQ ID NO: 805180 - RNA, 19 nt, Artificial Sequence
  Description of Artificial Sequence: Synthetic oligonucleotide
cuuacuugccgcucuuucc

SEQ ID NO: 805181 - RNA, 19 nt, Artificial Sequence
  Description of Artificial Sequence: Synthetic oligonucleotide
agccaaauacgauacacau

SEQ ID NO: 805182 - RNA, 19 nt, Artificial Sequence
  Description of Artificial Sequence: Synthetic oligonucleotide
aaagaucccugccaauuau

SEQ ID NO: 805183 - RNA, 19 nt, Artificial Sequence
  Description of Artificial Sequence: Synthetic oligonucleotide
uuugcuuacuugccgcucu

SEQ ID NO: 805184 - RNA, 19 nt, Artificial Sequence
  Description of Artificial Sequence: Synthetic oligonucleotide
ucccugccaauuauuagcc

SEQ ID NO: 805185 - RNA, 19 nt, Artificial Sequence
  Description of Artificial Sequence: Synthetic oligonucleotide
aucaacgggugcuugggag

SEQ ID NO: 805186 - RNA, 19 nt, Artificial Sequence
  Description of Artificial Sequence: Synthetic oligonucleotide
auaugauauaauacacuag

SEQ ID NO: 805187 - RNA, 19 nt, Artificial Sequence
  Description of Artificial Sequence: Synthetic oligonucleotide
aacuaggcagugucuacca

SEQ ID NO: 805188 - RNA, 19 nt, Artificial Sequence
  Description of Artificial Sequence: Synthetic oligonucleotide
ggucaauugucacacacug

SEQ ID NO: 805189 - RNA, 19 nt, Artificial Sequence
  Description of Artificial Sequence: Synthetic oligonucleotide
ugaaugguagccagcggcu

SEQ ID NO: 805190 - RNA, 19 nt, Artificial Sequence
  Description of Artificial Sequence: Synthetic oligonucleotide
aggauuucacagccacugc

SEQ ID NO: 805191 - RNA, 19 nt, Artificial Sequence
  Description of Artificial Sequence: Synthetic oligonucleotide
acgauacacauucuguaca

SEQ ID NO: 805192 - RNA, 19 nt, Artificial Sequence
  Description of Artificial Sequence: Synthetic oligonucleotide
gguuauuuggcauacccca

SEQ ID NO: 805193 - RNA, 19 nt, Artificial Sequence
  Description of Artificial Sequence: Synthetic oligonucleotide
cugacuaagcuugaagaag

SEQ ID NO: 805194 - RNA, 19 nt, Artificial Sequence
  Description of Artificial Sequence: Synthetic oligonucleotide
uucaagguggccagauccc

SEQ ID NO: 805195 - RNA, 19 nt, Artificial Sequence
  Description of Artificial Sequence: Synthetic oligonucleotide
acagggauuacucuacaau

SEQ ID NO: 805196 - RNA, 19 nt, Artificial Sequence
  Description of Artificial Sequence: Synthetic oligonucleotide
augauauaauacacuagag

SEQ ID NO: 805197 - RNA, 19 nt, Artificial Sequence
  Description of Artificial Sequence: Synthetic oligonucleotide
gaucccugccaauuauuag

SEQ ID NO: 805198 - RNA, 19 nt, Artificial Sequence
  Description of Artificial Sequence: Synthetic oligonucleotide
cagcaaugauaaaaugugc

SEQ ID NO: 805199 - RNA, 19 nt, Artificial Sequence
  Description of Artificial Sequence: Synthetic oligonucleotide
gacgaugaacuacaaacaa

SEQ ID NO: 805200 - RNA, 19 nt, Artificial Sequence
  Description of Artificial Sequence: Synthetic oligonucleotide
acacuaaggcuaaaauuac

SEQ ID NO: 805201 - RNA, 19 nt, Artificial Sequence
  Description of Artificial Sequence: Synthetic oligonucleotide
acaacaucgcacuauggua

SEQ ID NO: 805202 - RNA, 19 nt, Artificial Sequence
  Description of Artificial Sequence: Synthetic oligonucleotide
uuguuucauguaccuaccc

SEQ ID NO: 805203 - RNA, 19 nt, Artificial Sequence
  Description of Artificial Sequence: Synthetic oligonucleotide
acaggaaaauugaacuagg

SEQ ID NO: 805204 - RNA, 19 nt, Artificial Sequence
  Description of Artificial Sequence: Synthetic oligonucleotide
agauuccucacugaccauc

SEQ ID NO: 805205 - RNA, 19 nt, Artificial Sequence
  Description of Artificial Sequence: Synthetic oligonucleotide
ccaccuaaaacuugggucc

SEQ ID NO: 805206 - RNA, 19 nt, Artificial Sequence
  Description of Artificial Sequence: Synthetic oligonucleotide
ucauuucuggagacgacau

SEQ ID NO: 805207 - RNA, 19 nt, Artificial Sequence
  Description of Artificial Sequence: Synthetic oligonucleotide
ucuuuacugguuucuugca

SEQ ID NO: 805208 - RNA, 19 nt, Artificial Sequence
  Description of Artificial Sequence: Synthetic oligonucleotide
ugaacugucuagucauacu

SEQ ID NO: 805209 - RNA, 19 nt, Artificial Sequence
  Description of Artificial Sequence: Synthetic oligonucleotide
accucacuuguguagcggg

SEQ ID NO: 805210 - RNA, 19 nt, Artificial Sequence
  Description of Artificial Sequence: Synthetic oligonucleotide
gaugaacuacaaacaagug

SEQ ID NO: 805211 - RNA, 19 nt, Artificial Sequence
  Description of Artificial Sequence: Synthetic oligonucleotide
aaaggccucugagauaugu

SEQ ID NO: 805212 - RNA, 19 nt, Artificial Sequence
  Description of Artificial Sequence: Synthetic oligonucleotide
agggauuacucuacaauag

SEQ ID NO: 805213 - RNA, 19 nt, Artificial Sequence
  Description of Artificial Sequence: Synthetic oligonucleotide
aaacaacaucgcacuaugg

SEQ ID NO: 805214 - RNA, 19 nt, Artificial Sequence
  Description of Artificial Sequence: Synthetic oligonucleotide
uguucucagaagagaaauc

SEQ ID NO: 805215 - RNA, 19 nt, Artificial Sequence
  Description of Artificial Sequence: Synthetic oligonucleotide
auauagggcguuccugaag

SEQ ID NO: 805216 - RNA, 19 nt, Artificial Sequence
  Description of Artificial Sequence: Synthetic oligonucleotide
uacacucgcaugaaggcua

SEQ ID NO: 805217 - RNA, 19 nt, Artificial Sequence
  Description of Artificial Sequence: Synthetic oligonucleotide
uuggcauaccccaccaccu

SEQ ID NO: 805218 - RNA, 19 nt, Artificial Sequence
  Description of Artificial Sequence: Synthetic oligonucleotide
aauuacugaguuguuucau

SEQ ID NO: 805219 - RNA, 19 nt, Artificial Sequence
  Description of Artificial Sequence: Synthetic oligonucleotide
ggccaggccauauagggcg

SEQ ID NO: 805220 - RNA, 19 nt, Artificial Sequence
  Description of Artificial Sequence: Synthetic oligonucleotide
cuugagcucauuugcuuac

SEQ ID NO: 805221 - RNA, 19 nt, Artificial Sequence
  Description of Artificial Sequence: Synthetic oligonucleotide
caacuugacuaaacaagac

SEQ ID NO: 805222 - RNA, 19 nt, Artificial Sequence
  Description of Artificial Sequence: Synthetic oligonucleotide
aguaacuugcuugcaagca

SEQ ID NO: 805223 - RNA, 19 nt, Artificial Sequence
  Description of Artificial Sequence: Synthetic oligonucleotide
auuaauuacugaguuguuu

SEQ ID NO: 805224 - RNA, 19 nt, Artificial Sequence
  Description of Artificial Sequence: Synthetic oligonucleotide
aacacauuggcuguccauu

SEQ ID NO: 805225 - RNA, 19 nt, Artificial Sequence
  Description of Artificial Sequence: Synthetic oligonucleotide
auacacuagaggccccagg

SEQ ID NO: 805226 - RNA, 19 nt, Artificial Sequence
  Description of Artificial Sequence: Synthetic oligonucleotide
gauauguuacgcuucuggu

SEQ ID NO: 805227 - RNA, 19 nt, Artificial Sequence
  Description of Artificial Sequence: Synthetic oligonucleotide
cauacuccgcucagggagg

SEQ ID NO: 805228 - RNA, 19 nt, Artificial Sequence
  Description of Artificial Sequence: Synthetic oligonucleotide
caguaacuugcuugcaagc

SEQ ID NO: 805229 - RNA, 19 nt, Artificial Sequence
  Description of Artificial Sequence: Synthetic oligonucleotide
auuauuagccaaauacgau

SEQ ID NO: 805230 - RNA, 19 nt, Artificial Sequence
  Description of Artificial Sequence: Synthetic oligonucleotide
uaaguguggguacuaccuc

SEQ ID NO: 805231 - RNA, 19 nt, Artificial Sequence
  Description of Artificial Sequence: Synthetic oligonucleotide
ugaacuaggcagugucuac

SEQ ID NO: 805232 - RNA, 19 nt, Artificial Sequence
  Description of Artificial Sequence: Synthetic oligonucleotide
ucacuuguguagcggggcc

SEQ ID NO: 805233 - RNA, 19 nt, Artificial Sequence
  Description of Artificial Sequence: Synthetic oligonucleotide
cugagauauguuacgcuuc

SEQ ID NO: 805234 - RNA, 19 nt, Artificial Sequence
  Description of Artificial Sequence: Synthetic oligonucleotide
acgaugaacuacaaacaag

SEQ ID NO: 805235 - RNA, 19 nt, Artificial Sequence
  Description of Artificial Sequence: Synthetic oligonucleotide
gacgacaugggccgcuugc

SEQ ID NO: 805236 - RNA, 19 nt, Artificial Sequence
  Description of Artificial Sequence: Synthetic oligonucleotide
gcuuagaccacccaaggga

SEQ ID NO: 805237 - RNA, 19 nt, Artificial Sequence
  Description of Artificial Sequence: Synthetic oligonucleotide
uaacuugcuugcaagcauu

SEQ ID NO: 805238 - RNA, 19 nt, Artificial Sequence
  Description of Artificial Sequence: Synthetic oligonucleotide
caugucaagugcuaaccca

SEQ ID NO: 805239 - RNA, 19 nt, Artificial Sequence
  Description of Artificial Sequence: Synthetic oligonucleotide
aauacacuagaggccccag

SEQ ID NO: 805240 - RNA, 19 nt, Artificial Sequence
  Description of Artificial Sequence: Synthetic oligonucleotide
cugcuuagaccacccaagg

SEQ ID NO: 805241 - RNA, 19 nt, Artificial Sequence
  Description of Artificial Sequence: Synthetic oligonucleotide
aaucaacgggugcuuggga

SEQ ID NO: 805242 - RNA, 19 nt, Artificial Sequence
  Description of Artificial Sequence: Synthetic oligonucleotide
cuugguucaccaccagccc

SEQ ID NO: 805243 - RNA, 19 nt, Artificial Sequence
  Description of Artificial Sequence: Synthetic oligonucleotide
gguucaagcaaggugggcc

SEQ ID NO: 805244 - RNA, 19 nt, Artificial Sequence
  Description of Artificial Sequence: Synthetic oligonucleotide
cauucuguacacagcuaac

SEQ ID NO: 805245 - RNA, 19 nt, Artificial Sequence
  Description of Artificial Sequence: Synthetic oligonucleotide
ucuacaugucaagugcuaa

SEQ ID NO: 805246 - RNA, 19 nt, Artificial Sequence
  Description of Artificial Sequence: Synthetic oligonucleotide
accuucaagcccaagccuc

SEQ ID NO: 805247 - RNA, 19 nt, Artificial Sequence
  Description of Artificial Sequence: Synthetic oligonucleotide
agucacagggauuacucua

SEQ ID NO: 805248 - RNA, 19 nt, Artificial Sequence
  Description of Artificial Sequence: Synthetic oligonucleotide
gguguagucaaugugggca

SEQ ID NO: 805249 - RNA, 19 nt, Artificial Sequence
  Description of Artificial Sequence: Synthetic oligonucleotide
auaauacacuagaggcccc

SEQ ID NO: 805250 - RNA, 19 nt, Artificial Sequence
  Description of Artificial Sequence: Synthetic oligonucleotide
acaauagaugaauggggua

SEQ ID NO: 805251 - RNA, 19 nt, Artificial Sequence
  Description of Artificial Sequence: Synthetic oligonucleotide
ccuucaguaacuugcuugc

SEQ ID NO: 805252 - RNA, 19 nt, Artificial Sequence
  Description of Artificial Sequence: Synthetic oligonucleotide
aacaucgcacuaugguaau

SEQ ID NO: 805253 - RNA, 19 nt, Artificial Sequence
  Description of Artificial Sequence: Synthetic oligonucleotide
uuguguagcggggccauag

SEQ ID NO: 805254 - RNA, 19 nt, Artificial Sequence
  Description of Artificial Sequence: Synthetic oligonucleotide
uguggguuauuuggcauac

SEQ ID NO: 805255 - RNA, 19 nt, Artificial Sequence
  Description of Artificial Sequence: Synthetic oligonucleotide
gggauagggaaaacaaagg

SEQ ID NO: 805256 - RNA, 19 nt, Artificial Sequence
  Description of Artificial Sequence: Synthetic oligonucleotide
caacaucgcacuaugguaa

SEQ ID NO: 805257 - RNA, 19 nt, Artificial Sequence
  Description of Artificial Sequence: Synthetic oligonucleotide
gguacuaccuccuuugucu

SEQ ID NO: 805258 - RNA, 19 nt, Artificial Sequence
  Description of Artificial Sequence: Synthetic oligonucleotide
caggcuuaaguguggguac

SEQ ID NO: 805259 - RNA, 19 nt, Artificial Sequence
  Description of Artificial Sequence: Synthetic oligonucleotide
cauuggagaggcuggagga

SEQ ID NO: 805260 - RNA, 19 nt, Artificial Sequence
  Description of Artificial Sequence: Synthetic oligonucleotide
guuguuucauguaccuacc

SEQ ID NO: 805261 - RNA, 19 nt, Artificial Sequence
  Description of Artificial Sequence: Synthetic oligonucleotide
auuagccaaauacgauaca

SEQ ID NO: 805262 - RNA, 19 nt, Artificial Sequence
  Description of Artificial Sequence: Synthetic oligonucleotide
uuagaccacccaagggaga

SEQ ID NO: 805263 - RNA, 19 nt, Artificial Sequence
  Description of Artificial Sequence: Synthetic oligonucleotide
caguuggugauguggcccc

SEQ ID NO: 805264 - RNA, 19 nt, Artificial Sequence
  Description of Artificial Sequence: Synthetic oligonucleotide
aggguaguaacaaaacaaa

SEQ ID NO: 805265 - RNA, 19 nt, Artificial Sequence
  Description of Artificial Sequence: Synthetic oligonucleotide
uguguagcggggccauagc

SEQ ID NO: 805266 - RNA, 19 nt, Artificial Sequence
  Description of Artificial Sequence: Synthetic oligonucleotide
auuugcuuacuugccgcuc

SEQ ID NO: 805267 - RNA, 19 nt, Artificial Sequence
  Description of Artificial Sequence: Synthetic oligonucleotide
ucugugcccauugggagga

SEQ ID NO: 805268 - RNA, 19 nt, Artificial Sequence
  Description of Artificial Sequence: Synthetic oligonucleotide
acaaaggggccagggcucc

SEQ ID NO: 805269 - RNA, 19 nt, Artificial Sequence
  Description of Artificial Sequence: Synthetic oligonucleotide
uagucauacuccgcucagg

SEQ ID NO: 805270 - RNA, 19 nt, Artificial Sequence
  Description of Artificial Sequence: Synthetic oligonucleotide
uguaagugaugcugaugaa

SEQ ID NO: 805271 - RNA, 19 nt, Artificial Sequence
  Description of Artificial Sequence: Synthetic oligonucleotide
caauugucacacacuguuc

SEQ ID NO: 805272 - RNA, 19 nt, Artificial Sequence
  Description of Artificial Sequence: Synthetic oligonucleotide
ucacagggauuacucuaca

SEQ ID NO: 805273 - RNA, 19 nt, Artificial Sequence
  Description of Artificial Sequence: Synthetic oligonucleotide
gguguuaaguggcagcaca

SEQ ID NO: 805274 - RNA, 19 nt, Artificial Sequence
  Description of Artificial Sequence: Synthetic oligonucleotide
uguggguacuaccuccuuu

SEQ ID NO: 805275 - RNA, 19 nt, Artificial Sequence
  Description of Artificial Sequence: Synthetic oligonucleotide
gagguguuaaguggcagca

SEQ ID NO: 805276 - RNA, 19 nt, Artificial Sequence
  Description of Artificial Sequence: Synthetic oligonucleotide
cucgcaugaaggcuagcug

SEQ ID NO: 805277 - RNA, 19 nt, Artificial Sequence
  Description of Artificial Sequence: Synthetic oligonucleotide
agggucuagcaacaggaaa

SEQ ID NO: 805278 - RNA, 19 nt, Artificial Sequence
  Description of Artificial Sequence: Synthetic oligonucleotide
aagugcuaacccacaagga

SEQ ID NO: 805279 - RNA, 19 nt, Artificial Sequence
  Description of Artificial Sequence: Synthetic oligonucleotide
aggccauauagggcguucc

SEQ ID NO: 805280 - RNA, 19 nt, Artificial Sequence
  Description of Artificial Sequence: Synthetic oligonucleotide
uguuaaguggcagcacaaa

SEQ ID NO: 805281 - RNA, 19 nt, Artificial Sequence
  Description of Artificial Sequence: Synthetic oligonucleotide
auuucacagccacugcuua

SEQ ID NO: 805282 - RNA, 19 nt, Artificial Sequence
  Description of Artificial Sequence: Synthetic oligonucleotide
ugguguagucaaugugggc

SEQ ID NO: 805283 - RNA, 19 nt, Artificial Sequence
  Description of Artificial Sequence: Synthetic oligonucleotide
augaaugggguaguacugu

SEQ ID NO: 805284 - RNA, 19 nt, Artificial Sequence
  Description of Artificial Sequence: Synthetic oligonucleotide
cugaacugucuagucauac

SEQ ID NO: 805285 - RNA, 19 nt, Artificial Sequence
  Description of Artificial Sequence: Synthetic oligonucleotide
agacugaaugguagccagc

SEQ ID NO: 805286 - RNA, 19 nt, Artificial Sequence
  Description of Artificial Sequence: Synthetic oligonucleotide
guguagcggggccauagcc

SEQ ID NO: 805287 - RNA, 19 nt, Artificial Sequence
  Description of Artificial Sequence: Synthetic oligonucleotide
guucaagcaaggugggcca

SEQ ID NO: 805288 - RNA, 19 nt, Artificial Sequence
  Description of Artificial Sequence: Synthetic oligonucleotide
auguuacgcuucugguggg

SEQ ID NO: 805289 - RNA, 19 nt, Artificial Sequence
  Description of Artificial Sequence: Synthetic oligonucleotide
gagagguguuaaguggcag

SEQ ID NO: 805290 - RNA, 19 nt, Artificial Sequence
  Description of Artificial Sequence: Synthetic oligonucleotide
aauuaauuacugaguuguu

SEQ ID NO: 805291 - RNA, 19 nt, Artificial Sequence
  Description of Artificial Sequence: Synthetic oligonucleotide
agaaaucaacgggugcuug

SEQ ID NO: 805292 - RNA, 19 nt, Artificial Sequence
  Description of Artificial Sequence: Synthetic oligonucleotide
ucacuaggggccacucugu

SEQ ID NO: 805293 - RNA, 19 nt, Artificial Sequence
  Description of Artificial Sequence: Synthetic oligonucleotide
gagggaaauuggaggauac

SEQ ID NO: 805294 - RNA, 19 nt, Artificial Sequence
  Description of Artificial Sequence: Synthetic oligonucleotide
cuaugguaauauugaguca

SEQ ID NO: 805295 - RNA, 19 nt, Artificial Sequence
  Description of Artificial Sequence: Synthetic oligonucleotide
cuugccgcucuuuccaauc

SEQ ID NO: 805296 - RNA, 19 nt, Artificial Sequence
  Description of Artificial Sequence: Synthetic oligonucleotide
acucgcaugaaggcuagcu

SEQ ID NO: 805297 - RNA, 19 nt, Artificial Sequence
  Description of Artificial Sequence: Synthetic oligonucleotide
uagggcguuccugaagcag

SEQ ID NO: 805298 - RNA, 19 nt, Artificial Sequence
  Description of Artificial Sequence: Synthetic oligonucleotide
ccaacuugacuaaacaaga

SEQ ID NO: 805299 - RNA, 19 nt, Artificial Sequence
  Description of Artificial Sequence: Synthetic oligonucleotide
auugagucacagggauuac

SEQ ID NO: 805300 - RNA, 19 nt, Artificial Sequence
  Description of Artificial Sequence: Synthetic oligonucleotide
uucuguaagugaugcugau

SEQ ID NO: 805301 - RNA, 19 nt, Artificial Sequence
  Description of Artificial Sequence: Synthetic oligonucleotide
ucuggaggauccagaugcu

SEQ ID NO: 805302 - RNA, 19 nt, Artificial Sequence
  Description of Artificial Sequence: Synthetic oligonucleotide
cacuaaggcuaaaauuaca

SEQ ID NO: 805303 - RNA, 19 nt, Artificial Sequence
  Description of Artificial Sequence: Synthetic oligonucleotide
gggaaauuggaggauacuc

SEQ ID NO: 805304 - RNA, 19 nt, Artificial Sequence
  Description of Artificial Sequence: Synthetic oligonucleotide
cuugcuugcaagcauuacu

SEQ ID NO: 805305 - RNA, 19 nt, Artificial Sequence
  Description of Artificial Sequence: Synthetic oligonucleotide
uuacgcuucugguggguuc

SEQ ID NO: 805306 - RNA, 19 nt, Artificial Sequence
  Description of Artificial Sequence: Synthetic oligonucleotide
cuccaacuugacuaaacaa

SEQ ID NO: 805307 - RNA, 19 nt, Artificial Sequence
  Description of Artificial Sequence: Synthetic oligonucleotide
augggguaguacuguucuc

SEQ ID NO: 805308 - RNA, 19 nt, Artificial Sequence
  Description of Artificial Sequence: Synthetic oligonucleotide
auugaacuaggcagugucu

SEQ ID NO: 805309 - RNA, 19 nt, Artificial Sequence
  Description of Artificial Sequence: Synthetic oligonucleotide
agggucaguuucuguaagu

SEQ ID NO: 805310 - RNA, 19 nt, Artificial Sequence
  Description of Artificial Sequence: Synthetic oligonucleotide
uugccgcucuuuccaaucu

SEQ ID NO: 805311 - RNA, 19 nt, Artificial Sequence
  Description of Artificial Sequence: Synthetic oligonucleotide
gacagaucugacuaagcuu

SEQ ID NO: 805312 - RNA, 19 nt, Artificial Sequence
  Description of Artificial Sequence: Synthetic oligonucleotide
ugccgcucuuuccaaucug

SEQ ID NO: 805313 - RNA, 19 nt, Artificial Sequence
  Description of Artificial Sequence: Synthetic oligonucleotide
cuaggcccacaguacacuc

SEQ ID NO: 805314 - RNA, 19 nt, Artificial Sequence
  Description of Artificial Sequence: Synthetic oligonucleotide
gggauuacucuacaauaga

SEQ ID NO: 805315 - RNA, 19 nt, Artificial Sequence
  Description of Artificial Sequence: Synthetic oligonucleotide
caagcauuacucaccaccu

SEQ ID NO: 805316 - RNA, 19 nt, Artificial Sequence
  Description of Artificial Sequence: Synthetic oligonucleotide
cacuaugguaauauugagu

SEQ ID NO: 805317 - RNA, 19 nt, Artificial Sequence
  Description of Artificial Sequence: Synthetic oligonucleotide
ugcccgagcugucuuuacu

SEQ ID NO: 805318 - RNA, 19 nt, Artificial Sequence
  Description of Artificial Sequence: Synthetic oligonucleotide
uggguacuaccuccuuugu

SEQ ID NO: 805319 - RNA, 19 nt, Artificial Sequence
  Description of Artificial Sequence: Synthetic oligonucleotide
cagguccuauccaggacac

SEQ ID NO: 805320 - RNA, 19 nt, Artificial Sequence
  Description of Artificial Sequence: Synthetic oligonucleotide
cauuacucaccaccuaaaa

SEQ ID NO: 805321 - RNA, 19 nt, Artificial Sequence
  Description of Artificial Sequence: Synthetic oligonucleotide
ucacugggcaagacagauc

SEQ ID NO: 805322 - RNA, 19 nt, Artificial Sequence
  Description of Artificial Sequence: Synthetic oligonucleotide
gccucucaggccaaggacg

SEQ ID NO: 805323 - RNA, 19 nt, Artificial Sequence
  Description of Artificial Sequence: Synthetic oligonucleotide
uuccucccaacagcaauga

SEQ ID NO: 805324 - RNA, 19 nt, Artificial Sequence
  Description of Artificial Sequence: Synthetic oligonucleotide
ccauuucuaaauccuucag

SEQ ID NO: 805325 - RNA, 19 nt, Artificial Sequence
  Description of Artificial Sequence: Synthetic oligonucleotide
aggucaauugucacacacu

SEQ ID NO: 805326 - RNA, 19 nt, Artificial Sequence
  Description of Artificial Sequence: Synthetic oligonucleotide
gguccuauccaggacacuc

SEQ ID NO: 805327 - RNA, 19 nt, Artificial Sequence
  Description of Artificial Sequence: Synthetic oligonucleotide
ggguuauuuggcauacccc

SEQ ID NO: 805328 - RNA, 19 nt, Artificial Sequence
  Description of Artificial Sequence: Synthetic oligonucleotide
ggguaugggccuaaguggc

SEQ ID NO: 805329 - RNA, 19 nt, Artificial Sequence
  Description of Artificial Sequence: Synthetic oligonucleotide
gggguagagcucuugguuc

SEQ ID NO: 805330 - RNA, 19 nt, Artificial Sequence
  Description of Artificial Sequence: Synthetic oligonucleotide
aagguggacuccaccuuca

SEQ ID NO: 805331 - RNA, 19 nt, Artificial Sequence
  Description of Artificial Sequence: Synthetic oligonucleotide
gcuccaacuugacuaaaca

SEQ ID NO: 805332 - RNA, 19 nt, Artificial Sequence
  Description of Artificial Sequence: Synthetic oligonucleotide
agggcuccaacuugacuaa

SEQ ID NO: 805333 - RNA, 19 nt, Artificial Sequence
  Description of Artificial Sequence: Synthetic oligonucleotide
ggacgaugaacuacaaaca

SEQ ID NO: 805334 - RNA, 19 nt, Artificial Sequence
  Description of Artificial Sequence: Synthetic oligonucleotide
ugcaggcuuaagugugggu

SEQ ID NO: 805335 - RNA, 19 nt, Artificial Sequence
  Description of Artificial Sequence: Synthetic oligonucleotide
acaaacaagugcaggcuua

SEQ ID NO: 805336 - RNA, 19 nt, Artificial Sequence
  Description of Artificial Sequence: Synthetic oligonucleotide
gucuagucauacuccgcuc

SEQ ID NO: 805337 - RNA, 19 nt, Artificial Sequence
  Description of Artificial Sequence: Synthetic oligonucleotide
aagaucccugccaauuauu

SEQ ID NO: 805338 - RNA, 19 nt, Artificial Sequence
  Description of Artificial Sequence: Synthetic oligonucleotide
gucaagugcuaacccacaa

SEQ ID NO: 805339 - RNA, 19 nt, Artificial Sequence
  Description of Artificial Sequence: Synthetic oligonucleotide
uacuaccuccuuugucuuc

SEQ ID NO: 805340 - RNA, 19 nt, Artificial Sequence
  Description of Artificial Sequence: Synthetic oligonucleotide
caccucacuuguguagcgg

SEQ ID NO: 805341 - RNA, 19 nt, Artificial Sequence
  Description of Artificial Sequence: Synthetic oligonucleotide
auagggcguuccugaagca

SEQ ID NO: 805342 - RNA, 19 nt, Artificial Sequence
  Description of Artificial Sequence: Synthetic oligonucleotide
ccacagagaaauaugauau

SEQ ID NO: 805343 - RNA, 19 nt, Artificial Sequence
  Description of Artificial Sequence: Synthetic oligonucleotide
gcagggucuagcaacagga

SEQ ID NO: 805344 - RNA, 19 nt, Artificial Sequence
  Description of Artificial Sequence: Synthetic oligonucleotide
caaugcuaugaaauuaauu

SEQ ID NO: 805345 - RNA, 19 nt, Artificial Sequence
  Description of Artificial Sequence: Synthetic oligonucleotide
aacuugcuugcaagcauua

SEQ ID NO: 805346 - RNA, 19 nt, Artificial Sequence
  Description of Artificial Sequence: Synthetic oligonucleotide
ggcaaugcuaugaaauuaa

SEQ ID NO: 805347 - RNA, 19 nt, Artificial Sequence
  Description of Artificial Sequence: Synthetic oligonucleotide
aucgcacuaugguaauauu

SEQ ID NO: 805348 - RNA, 19 nt, Artificial Sequence
  Description of Artificial Sequence: Synthetic oligonucleotide
ccauauagggcguuccuga

SEQ ID NO: 805349 - RNA, 19 nt, Artificial Sequence
  Description of Artificial Sequence: Synthetic oligonucleotide
cacagagaaauaugauaua

SEQ ID NO: 805350 - RNA, 19 nt, Artificial Sequence
  Description of Artificial Sequence: Synthetic oligonucleotide
cacugcuuagaccacccaa

SEQ ID NO: 805351 - RNA, 19 nt, Artificial Sequence
  Description of Artificial Sequence: Synthetic oligonucleotide
aguguggguacuaccuccu

SEQ ID NO: 805352 - RNA, 19 nt, Artificial Sequence
  Description of Artificial Sequence: Synthetic oligonucleotide
uguuacgcuucuggugggu

SEQ ID NO: 805353 - RNA, 19 nt, Artificial Sequence
  Description of Artificial Sequence: Synthetic oligonucleotide
gugcaggcuuaaguguggg

SEQ ID NO: 805354 - RNA, 19 nt, Artificial Sequence
  Description of Artificial Sequence: Synthetic oligonucleotide
gucauacuccgcucaggga

SEQ ID NO: 805355 - RNA, 19 nt, Artificial Sequence
  Description of Artificial Sequence: Synthetic oligonucleotide
cauauagggcguuccugaa

SEQ ID NO: 805356 - RNA, 19 nt, Artificial Sequence
  Description of Artificial Sequence: Synthetic oligonucleotide
cgaugaacuacaaacaagu

SEQ ID NO: 805357 - RNA, 19 nt, Artificial Sequence
  Description of Artificial Sequence: Synthetic oligonucleotide
ccucugagauauguuacgc

SEQ ID NO: 805358 - RNA, 19 nt, Artificial Sequence
  Description of Artificial Sequence: Synthetic oligonucleotide
gaaggcuagcugggcuggg

SEQ ID NO: 805359 - RNA, 19 nt, Artificial Sequence
  Description of Artificial Sequence: Synthetic oligonucleotide
ugguggguucacugggcaa

SEQ ID NO: 805360 - RNA, 19 nt, Artificial Sequence
  Description of Artificial Sequence: Synthetic oligonucleotide
gcuuacuugccgcucuuuc

SEQ ID NO: 805361 - RNA, 19 nt, Artificial Sequence
  Description of Artificial Sequence: Synthetic oligonucleotide
cacuaggggccacucugug

SEQ ID NO: 805362 - RNA, 19 nt, Artificial Sequence
  Description of Artificial Sequence: Synthetic oligonucleotide
cucuacaugucaagugcua

SEQ ID NO: 805363 - RNA, 19 nt, Artificial Sequence
  Description of Artificial Sequence: Synthetic oligonucleotide
gucuaccagguccuaucca

SEQ ID NO: 805364 - RNA, 19 nt, Artificial Sequence
  Description of Artificial Sequence: Synthetic oligonucleotide
agguggccagaucccaccu

SEQ ID NO: 805365 - RNA, 19 nt, Artificial Sequence
  Description of Artificial Sequence: Synthetic oligonucleotide
guagcggggccauagcccu

SEQ ID NO: 805366 - RNA, 19 nt, Artificial Sequence
  Description of Artificial Sequence: Synthetic oligonucleotide
ccucacuuguguagcgggg

SEQ ID NO: 805367 - RNA, 19 nt, Artificial Sequence
  Description of Artificial Sequence: Synthetic oligonucleotide
cucugagauauguuacgcu

SEQ ID NO: 805368 - RNA, 19 nt, Artificial Sequence
  Description of Artificial Sequence: Synthetic oligonucleotide
ggguagagcucuugguuca

SEQ ID NO: 805369 - RNA, 19 nt, Artificial Sequence
  Description of Artificial Sequence: Synthetic oligonucleotide
agaccacccaagggagagg

SEQ ID NO: 805370 - RNA, 19 nt, Artificial Sequence
  Description of Artificial Sequence: Synthetic oligonucleotide
gacagacauccaggauggg

SEQ ID NO: 805371 - RNA, 19 nt, Artificial Sequence
  Description of Artificial Sequence: Synthetic oligonucleotide
ggacuccaccuucaagccc

SEQ ID NO: 805372 - RNA, 19 nt, Artificial Sequence
  Description of Artificial Sequence: Synthetic oligonucleotide
ccugccaauuauuagccaa

SEQ ID NO: 805373 - RNA, 19 nt, Artificial Sequence
  Description of Artificial Sequence: Synthetic oligonucleotide
ggccuaaguggcugaacac

SEQ ID NO: 805374 - RNA, 19 nt, Artificial Sequence
  Description of Artificial Sequence: Synthetic oligonucleotide
cuguggguuauuuggcaua

SEQ ID NO: 805375 - RNA, 19 nt, Artificial Sequence
  Description of Artificial Sequence: Synthetic oligonucleotide
uuggugcccgagcugucuu

SEQ ID NO: 805376 - RNA, 19 nt, Artificial Sequence
  Description of Artificial Sequence: Synthetic oligonucleotide
auauugagucacagggauu

SEQ ID NO: 805377 - RNA, 19 nt, Artificial Sequence
  Description of Artificial Sequence: Synthetic oligonucleotide
acuuguguagcggggccau

SEQ ID NO: 805378 - RNA, 19 nt, Artificial Sequence
  Description of Artificial Sequence: Synthetic oligonucleotide
uugcuuacuugccgcucuu

SEQ ID NO: 805379 - RNA, 19 nt, Artificial Sequence
  Description of Artificial Sequence: Synthetic oligonucleotide
ggagacugaaugguagcca

SEQ ID NO: 805380 - RNA, 19 nt, Artificial Sequence
  Description of Artificial Sequence: Synthetic oligonucleotide
acacucgcaugaaggcuag

SEQ ID NO: 805381 - RNA, 19 nt, Artificial Sequence
  Description of Artificial Sequence: Synthetic oligonucleotide
accuaaaacuuggguccug

SEQ ID NO: 805382 - RNA, 19 nt, Artificial Sequence
  Description of Artificial Sequence: Synthetic oligonucleotide
uucaagcaaggugggccaa

SEQ ID NO: 805383 - RNA, 19 nt, Artificial Sequence
  Description of Artificial Sequence: Synthetic oligonucleotide
cucuacccaaagucucuga

SEQ ID NO: 805384 - RNA, 19 nt, Artificial Sequence
  Description of Artificial Sequence: Synthetic oligonucleotide
agacgacaugggccgcuug

SEQ ID NO: 805385 - RNA, 19 nt, Artificial Sequence
  Description of Artificial Sequence: Synthetic oligonucleotide
ggccucugagauauguuac

SEQ ID NO: 805386 - RNA, 19 nt, Artificial Sequence
  Description of Artificial Sequence: Synthetic oligonucleotide
cugguggguucacugggca

SEQ ID NO: 805387 - RNA, 19 nt, Artificial Sequence
  Description of Artificial Sequence: Synthetic oligonucleotide
gaucacuaggggccacucu

SEQ ID NO: 805388 - RNA, 19 nt, Artificial Sequence
  Description of Artificial Sequence: Synthetic oligonucleotide
gccuaaguggcugaacaca

SEQ ID NO: 805389 - RNA, 19 nt, Artificial Sequence
  Description of Artificial Sequence: Synthetic oligonucleotide
acgacaugggccgcuugcu

SEQ ID NO: 805390 - RNA, 19 nt, Artificial Sequence
  Description of Artificial Sequence: Synthetic oligonucleotide
gccauauagggcguuccug

SEQ ID NO: 805391 - RNA, 19 nt, Artificial Sequence
  Description of Artificial Sequence: Synthetic oligonucleotide
ggguacuaccuccuuuguc

SEQ ID NO: 805392 - RNA, 19 nt, Artificial Sequence
  Description of Artificial Sequence: Synthetic oligonucleotide
ggagcacaacuugagcuca

SEQ ID NO: 805393 - RNA, 19 nt, Artificial Sequence
  Description of Artificial Sequence: Synthetic oligonucleotide
ccagguccuauccaggaca

SEQ ID NO: 805394 - RNA, 19 nt, Artificial Sequence
  Description of Artificial Sequence: Synthetic oligonucleotide
gauccagaugcuggccaga

SEQ ID NO: 805395 - RNA, 19 nt, Artificial Sequence
  Description of Artificial Sequence: Synthetic oligonucleotide
gugcuaacccacaaggaau

SEQ ID NO: 805396 - RNA, 19 nt, Artificial Sequence
  Description of Artificial Sequence: Synthetic oligonucleotide
gcuuaaguguggguacuac

SEQ ID NO: 805397 - RNA, 19 nt, Artificial Sequence
  Description of Artificial Sequence: Synthetic oligonucleotide
aggaucacuaggggccacu

SEQ ID NO: 805398 - RNA, 19 nt, Artificial Sequence
  Description of Artificial Sequence: Synthetic oligonucleotide
agggaaagagggagacuga

SEQ ID NO: 805399 - RNA, 19 nt, Artificial Sequence
  Description of Artificial Sequence: Synthetic oligonucleotide
ugcuuucaagguggccaga

SEQ ID NO: 805400 - RNA, 19 nt, Artificial Sequence
  Description of Artificial Sequence: Synthetic oligonucleotide
ugggccuaaguggcugaac

SEQ ID NO: 805401 - RNA, 19 nt, Artificial Sequence
  Description of Artificial Sequence: Synthetic oligonucleotide
caaauacgauacacauucu

SEQ ID NO: 805402 - RNA, 19 nt, Artificial Sequence
  Description of Artificial Sequence: Synthetic oligonucleotide
guacacucgcaugaaggcu

SEQ ID NO: 805403 - RNA, 19 nt, Artificial Sequence
  Description of Artificial Sequence: Synthetic oligonucleotide
gucugcuuucaagguggcc

SEQ ID NO: 805404 - RNA, 19 nt, Artificial Sequence
  Description of Artificial Sequence: Synthetic oligonucleotide
cuccgcucagggagggcac

SEQ ID NO: 805405 - RNA, 19 nt, Artificial Sequence
  Description of Artificial Sequence: Synthetic oligonucleotide
cuugaagaagaaggguagu

SEQ ID NO: 805406 - RNA, 19 nt, Artificial Sequence
  Description of Artificial Sequence: Synthetic oligonucleotide
caucgcacuaugguaauau

SEQ ID NO: 805407 - RNA, 19 nt, Artificial Sequence
  Description of Artificial Sequence: Synthetic oligonucleotide
cagggucuagcaacaggaa

SEQ ID NO: 805408 - RNA, 19 nt, Artificial Sequence
  Description of Artificial Sequence: Synthetic oligonucleotide
guggguuauuuggcauacc

SEQ ID NO: 805409 - RNA, 19 nt, Artificial Sequence
  Description of Artificial Sequence: Synthetic oligonucleotide
cuggcuuggugcccgagcu

SEQ ID NO: 805410 - RNA, 19 nt, Artificial Sequence
  Description of Artificial Sequence: Synthetic oligonucleotide
auguaccuacccacagccu

SEQ ID NO: 805411 - RNA, 19 nt, Artificial Sequence
  Description of Artificial Sequence: Synthetic oligonucleotide
uggagacgacaugggccgc

SEQ ID NO: 805412 - RNA, 19 nt, Artificial Sequence
  Description of Artificial Sequence: Synthetic oligonucleotide
gagaaaucaacgggugcuu

SEQ ID NO: 805413 - RNA, 19 nt, Artificial Sequence
  Description of Artificial Sequence: Synthetic oligonucleotide
gcggaagaugauggcaggc

SEQ ID NO: 805414 - RNA, 19 nt, Artificial Sequence
  Description of Artificial Sequence: Synthetic oligonucleotide
gucaauugucacacacugu

SEQ ID NO: 805415 - RNA, 19 nt, Artificial Sequence
  Description of Artificial Sequence: Synthetic oligonucleotide
caaccaccucacuugugua

SEQ ID NO: 805416 - RNA, 19 nt, Artificial Sequence
  Description of Artificial Sequence: Synthetic oligonucleotide
uucgggcagcaaugcggaa

SEQ ID NO: 805417 - RNA, 19 nt, Artificial Sequence
  Description of Artificial Sequence: Synthetic oligonucleotide
ggagagguguuaaguggca

SEQ ID NO: 805418 - RNA, 19 nt, Artificial Sequence
  Description of Artificial Sequence: Synthetic oligonucleotide
agcacaacuugagcucauu

SEQ ID NO: 805419 - RNA, 19 nt, Artificial Sequence
  Description of Artificial Sequence: Synthetic oligonucleotide
ccauugggaggauuucaca

SEQ ID NO: 805420 - RNA, 19 nt, Artificial Sequence
  Description of Artificial Sequence: Synthetic oligonucleotide
guaccuacccacagccucu

SEQ ID NO: 805421 - RNA, 19 nt, Artificial Sequence
  Description of Artificial Sequence: Synthetic oligonucleotide
caccuucaagcccaagccu

SEQ ID NO: 805422 - RNA, 19 nt, Artificial Sequence
  Description of Artificial Sequence: Synthetic oligonucleotide
uggugcccgagcugucuuu

SEQ ID NO: 805423 - RNA, 19 nt, Artificial Sequence
  Description of Artificial Sequence: Synthetic oligonucleotide
cacugaccaucagccuuag

SEQ ID NO: 805424 - RNA, 19 nt, Artificial Sequence
  Description of Artificial Sequence: Synthetic oligonucleotide
gcauuacucaccaccuaaa

SEQ ID NO: 805425 - RNA, 19 nt, Artificial Sequence
  Description of Artificial Sequence: Synthetic oligonucleotide
gugcccgagcugucuuuac

SEQ ID NO: 805426 - RNA, 19 nt, Artificial Sequence
  Description of Artificial Sequence: Synthetic oligonucleotide
acaucgcacuaugguaaua

SEQ ID NO: 805427 - RNA, 19 nt, Artificial Sequence
  Description of Artificial Sequence: Synthetic oligonucleotide
caacgggugcuugggagaa

SEQ ID NO: 805428 - RNA, 19 nt, Artificial Sequence
  Description of Artificial Sequence: Synthetic oligonucleotide
ggggcaaugcuaugaaauu

SEQ ID NO: 805429 - RNA, 19 nt, Artificial Sequence
  Description of Artificial Sequence: Synthetic oligonucleotide
ggcuaggcccacaguacac

SEQ ID NO: 805430 - RNA, 19 nt, Artificial Sequence
  Description of Artificial Sequence: Synthetic oligonucleotide
ucccugccacugcuguauu

SEQ ID NO: 805431 - RNA, 19 nt, Artificial Sequence
  Description of Artificial Sequence: Synthetic oligonucleotide
gguagagcucuugguucac

SEQ ID NO: 805432 - RNA, 19 nt, Artificial Sequence
  Description of Artificial Sequence: Synthetic oligonucleotide
ggaucacuaggggccacuc

SEQ ID NO: 805433 - RNA, 19 nt, Artificial Sequence
  Description of Artificial Sequence: Synthetic oligonucleotide
ggucuagcaacaggaaaau

SEQ ID NO: 805434 - RNA, 19 nt, Artificial Sequence
  Description of Artificial Sequence: Synthetic oligonucleotide
caggaucacuaggggccac

SEQ ID NO: 805435 - RNA, 19 nt, Artificial Sequence
  Description of Artificial Sequence: Synthetic oligonucleotide
cuccugcccaagcugcucu

SEQ ID NO: 805436 - RNA, 19 nt, Artificial Sequence
  Description of Artificial Sequence: Synthetic oligonucleotide
cagaaagaucccugccaau

SEQ ID NO: 805437 - RNA, 19 nt, Artificial Sequence
  Description of Artificial Sequence: Synthetic oligonucleotide
ccgcuugcuggcuggcuug

SEQ ID NO: 805438 - RNA, 19 nt, Artificial Sequence
  Description of Artificial Sequence: Synthetic oligonucleotide
ggccauauagggcguuccu

SEQ ID NO: 805439 - RNA, 19 nt, Artificial Sequence
  Description of Artificial Sequence: Synthetic oligonucleotide
gcacaacuugagcucauuu

SEQ ID NO: 805440 - RNA, 19 nt, Artificial Sequence
  Description of Artificial Sequence: Synthetic oligonucleotide
caccuaaaacuuggguccu

SEQ ID NO: 805441 - RNA, 19 nt, Artificial Sequence
  Description of Artificial Sequence: Synthetic oligonucleotide
cugagggaaauuggaggau

SEQ ID NO: 805442 - RNA, 19 nt, Artificial Sequence
  Description of Artificial Sequence: Synthetic oligonucleotide
uagcggggccauagcccuu

SEQ ID NO: 805443 - RNA, 19 nt, Artificial Sequence
  Description of Artificial Sequence: Synthetic oligonucleotide
guuacgcuucugguggguu

SEQ ID NO: 805444 - RNA, 19 nt, Artificial Sequence
  Description of Artificial Sequence: Synthetic oligonucleotide
ggccaaggacgaugaacua

SEQ ID NO: 805445 - RNA, 19 nt, Artificial Sequence
  Description of Artificial Sequence: Synthetic oligonucleotide
gggccauagcccuuuucau

SEQ ID NO: 805446 - RNA, 19 nt, Artificial Sequence
  Description of Artificial Sequence: Synthetic oligonucleotide
ggcuuaaguguggguacua

SEQ ID NO: 805447 - RNA, 19 nt, Artificial Sequence
  Description of Artificial Sequence: Synthetic oligonucleotide
cagcaaugcggaagaugau

SEQ ID NO: 805448 - RNA, 19 nt, Artificial Sequence
  Description of Artificial Sequence: Synthetic oligonucleotide
ggugcccgagcugucuuua

SEQ ID NO: 805449 - RNA, 19 nt, Artificial Sequence
  Description of Artificial Sequence: Synthetic oligonucleotide
gcccaagccucuacauguc

SEQ ID NO: 805450 - RNA, 19 nt, Artificial Sequence
  Description of Artificial Sequence: Synthetic oligonucleotide
cacccaagggagagguguu

SEQ ID NO: 805451 - RNA, 19 nt, Artificial Sequence
  Description of Artificial Sequence: Synthetic oligonucleotide
cagauuccucacugaccau

SEQ ID NO: 805452 - RNA, 19 nt, Artificial Sequence
  Description of Artificial Sequence: Synthetic oligonucleotide
ccgagcugucuuuacuggu

SEQ ID NO: 805453 - RNA, 19 nt, Artificial Sequence
  Description of Artificial Sequence: Synthetic oligonucleotide
cuuguguagcggggccaua

SEQ ID NO: 805454 - RNA, 19 nt, Artificial Sequence
  Description of Artificial Sequence: Synthetic oligonucleotide
cacagccucuguggguuau

SEQ ID NO: 805455 - RNA, 19 nt, Artificial Sequence
  Description of Artificial Sequence: Synthetic oligonucleotide
cggggccauagcccuuuuc

SEQ ID NO: 805456 - RNA, 19 nt, Artificial Sequence
  Description of Artificial Sequence: Synthetic oligonucleotide
gccagcggcuggugagggu

SEQ ID NO: 805457 - RNA, 19 nt, Artificial Sequence
  Description of Artificial Sequence: Synthetic oligonucleotide
cccacacacuaaggcuaaa

SEQ ID NO: 805458 - RNA, 19 nt, Artificial Sequence
  Description of Artificial Sequence: Synthetic oligonucleotide
gcggggccauagcccuuuu

SEQ ID NO: 805459 - RNA, 19 nt, Artificial Sequence
  Description of Artificial Sequence: Synthetic oligonucleotide
gaaguugccauucagccag

SEQ ID NO: 805460 - RNA, 19 nt, Artificial Sequence
  Description of Artificial Sequence: Synthetic oligonucleotide
gaagguagggaccaggccg

SEQ ID NO: 805461 - RNA, 19 nt, Artificial Sequence
  Description of Artificial Sequence: Synthetic oligonucleotide
agaagguaagaacagccgc

SEQ ID NO: 805462 - RNA, 19 nt, Artificial Sequence
  Description of Artificial Sequence: Synthetic oligonucleotide
agacgaugcacccagacgg

SEQ ID NO: 805463 - RNA, 19 nt, Artificial Sequence
  Description of Artificial Sequence: Synthetic oligonucleotide
cagguaaugaagaaggcgg

SEQ ID NO: 805464 - RNA, 19 nt, Artificial Sequence
  Description of Artificial Sequence: Synthetic oligonucleotide
uaaccguaguacaugacgg

SEQ ID NO: 805465 - RNA, 19 nt, Artificial Sequence
  Description of Artificial Sequence: Synthetic oligonucleotide
gugauaacaaagcacaccc

SEQ ID NO: 805466 - RNA, 19 nt, Artificial Sequence
  Description of Artificial Sequence: Synthetic oligonucleotide
accguaagagcauggaugc

SEQ ID NO: 805467 - RNA, 19 nt, Artificial Sequence
  Description of Artificial Sequence: Synthetic oligonucleotide
ugaaucaugaccucugaga

SEQ ID NO: 805468 - RNA, 19 nt, Artificial Sequence
  Description of Artificial Sequence: Synthetic oligonucleotide
guaaccguaguacaugacg

SEQ ID NO: 805469 - RNA, 19 nt, Artificial Sequence
  Description of Artificial Sequence: Synthetic oligonucleotide
acaaaguccucccagcacg

SEQ ID NO: 805470 - RNA, 19 nt, Artificial Sequence
  Description of Artificial Sequence: Synthetic oligonucleotide
aaaggagugggacaugcug

SEQ ID NO: 805471 - RNA, 19 nt, Artificial Sequence
  Description of Artificial Sequence: Synthetic oligonucleotide
agugauaacaaagcacacc

SEQ ID NO: 805472 - RNA, 19 nt, Artificial Sequence
  Description of Artificial Sequence: Synthetic oligonucleotide
uuuggugcugccaacccgg

SEQ ID NO: 805473 - RNA, 19 nt, Artificial Sequence
  Description of Artificial Sequence: Synthetic oligonucleotide
ugugacgccagccaggggc

SEQ ID NO: 805474 - RNA, 19 nt, Artificial Sequence
  Description of Artificial Sequence: Synthetic oligonucleotide
acagaugaccuuucgcugc

SEQ ID NO: 805475 - RNA, 19 nt, Artificial Sequence
  Description of Artificial Sequence: Synthetic oligonucleotide
aagccagcgcuucucaccc

SEQ ID NO: 805476 - RNA, 19 nt, Artificial Sequence
  Description of Artificial Sequence: Synthetic oligonucleotide
auagcagaggaaaacagcg

SEQ ID NO: 805477 - RNA, 19 nt, Artificial Sequence
  Description of Artificial Sequence: Synthetic oligonucleotide
ucuagaccagagaagguag

SEQ ID NO: 805478 - RNA, 19 nt, Artificial Sequence
  Description of Artificial Sequence: Synthetic oligonucleotide
cucguaaacagagugaagc

SEQ ID NO: 805479 - RNA, 19 nt, Artificial Sequence
  Description of Artificial Sequence: Synthetic oligonucleotide
agcagaagaccguaagagc

SEQ ID NO: 805480 - RNA, 19 nt, Artificial Sequence
  Description of Artificial Sequence: Synthetic oligonucleotide
gaagagguaggccagcggc

SEQ ID NO: 805481 - RNA, 19 nt, Artificial Sequence
  Description of Artificial Sequence: Synthetic oligonucleotide
cauguauacuuccaacacg

SEQ ID NO: 805482 - RNA, 19 nt, Artificial Sequence
  Description of Artificial Sequence: Synthetic oligonucleotide
cuguacaccagagugaugc

SEQ ID NO: 805483 - RNA, 19 nt, Artificial Sequence
  Description of Artificial Sequence: Synthetic oligonucleotide
aagcgguacaguuccuggc

SEQ ID NO: 805484 - RNA, 19 nt, Artificial Sequence
  Description of Artificial Sequence: Synthetic oligonucleotide
ugagucaccuuguaguccc

SEQ ID NO: 805485 - RNA, 19 nt, Artificial Sequence
  Description of Artificial Sequence: Synthetic oligonucleotide
cagaaagcgguacaguucc

SEQ ID NO: 805486 - RNA, 19 nt, Artificial Sequence
  Description of Artificial Sequence: Synthetic oligonucleotide
agagucugcccauaaauca

SEQ ID NO: 805487 - RNA, 19 nt, Artificial Sequence
  Description of Artificial Sequence: Synthetic oligonucleotide
aaaacagcggcgcccagga

SEQ ID NO: 805488 - RNA, 19 nt, Artificial Sequence
  Description of Artificial Sequence: Synthetic oligonucleotide
cagauuaaggacacugacc

SEQ ID NO: 805489 - RNA, 19 nt, Artificial Sequence
  Description of Artificial Sequence: Synthetic oligonucleotide
aggagaaggucccaccucg

SEQ ID NO: 805490 - RNA, 19 nt, Artificial Sequence
  Description of Artificial Sequence: Synthetic oligonucleotide
uuuucucucgaagccagcg

SEQ ID NO: 805491 - RNA, 19 nt, Artificial Sequence
  Description of Artificial Sequence: Synthetic oligonucleotide
agagcgugaagaugaaauc

SEQ ID NO: 805492 - RNA, 19 nt, Artificial Sequence
  Description of Artificial Sequence: Synthetic oligonucleotide
cauguuccggaucaugugg

SEQ ID NO: 805493 - RNA, 19 nt, Artificial Sequence
  Description of Artificial Sequence: Synthetic oligonucleotide
ugaaagcaacaccaguccc

SEQ ID NO: 805494 - RNA, 19 nt, Artificial Sequence
  Description of Artificial Sequence: Synthetic oligonucleotide
gagcagaagaccguaagag

SEQ ID NO: 805495 - RNA, 19 nt, Artificial Sequence
  Description of Artificial Sequence: Synthetic oligonucleotide
gaugaaauccacaaccaga

SEQ ID NO: 805496 - RNA, 19 nt, Artificial Sequence
  Description of Artificial Sequence: Synthetic oligonucleotide
cuucuugacauagaacagg

SEQ ID NO: 805497 - RNA, 19 nt, Artificial Sequence
  Description of Artificial Sequence: Synthetic oligonucleotide
gguuucaccugccagacag

SEQ ID NO: 805498 - RNA, 19 nt, Artificial Sequence
  Description of Artificial Sequence: Synthetic oligonucleotide
aagagcgugaagaugaaau

SEQ ID NO: 805499 - RNA, 19 nt, Artificial Sequence
  Description of Artificial Sequence: Synthetic oligonucleotide
uaguacaugacggugugug

SEQ ID NO: 805500 - RNA, 19 nt, Artificial Sequence
  Description of Artificial Sequence: Synthetic oligonucleotide
aaguccucccagcacgggg

SEQ ID NO: 805501 - RNA, 19 nt, Artificial Sequence
  Description of Artificial Sequence: Synthetic oligonucleotide
uguauacuuccaacacggg

SEQ ID NO: 805502 - RNA, 19 nt, Artificial Sequence
  Description of Artificial Sequence: Synthetic oligonucleotide
gaccguaagagcauggaug

SEQ ID NO: 805503 - RNA, 19 nt, Artificial Sequence
  Description of Artificial Sequence: Synthetic oligonucleotide
guacaugguguucagaguc

SEQ ID NO: 805504 - RNA, 19 nt, Artificial Sequence
  Description of Artificial Sequence: Synthetic oligonucleotide
accagagugaugcagguaa

SEQ ID NO: 805505 - RNA, 19 nt, Artificial Sequence
  Description of Artificial Sequence: Synthetic oligonucleotide
accgugaagagguaggcca

SEQ ID NO: 805506 - RNA, 19 nt, Artificial Sequence
  Description of Artificial Sequence: Synthetic oligonucleotide
agcggcauguuauagggca

SEQ ID NO: 805507 - RNA, 19 nt, Artificial Sequence
  Description of Artificial Sequence: Synthetic oligonucleotide
cacggaacagguaggaggc

SEQ ID NO: 805508 - RNA, 19 nt, Artificial Sequence
  Description of Artificial Sequence: Synthetic oligonucleotide
aggaagacggugcucaugu

SEQ ID NO: 805509 - RNA, 19 nt, Artificial Sequence
  Description of Artificial Sequence: Synthetic oligonucleotide
gagcgugaagaugaaaucc

SEQ ID NO: 805510 - RNA, 19 nt, Artificial Sequence
  Description of Artificial Sequence: Synthetic oligonucleotide
ucaccuuguagucccagga

SEQ ID NO: 805511 - RNA, 19 nt, Artificial Sequence
  Description of Artificial Sequence: Synthetic oligonucleotide
aguccugaaagcaacacca

SEQ ID NO: 805512 - RNA, 19 nt, Artificial Sequence
  Description of Artificial Sequence: Synthetic oligonucleotide
cucgcugggccauugacag

SEQ ID NO: 805513 - RNA, 19 nt, Artificial Sequence
  Description of Artificial Sequence: Synthetic oligonucleotide
ugaaggggccacaagugcu

SEQ ID NO: 805514 - RNA, 19 nt, Artificial Sequence
  Description of Artificial Sequence: Synthetic oligonucleotide
ucucgaaguugccauucag

SEQ ID NO: 805515 - RNA, 19 nt, Artificial Sequence
  Description of Artificial Sequence: Synthetic oligonucleotide
ucguaaacagagugaagcu

SEQ ID NO: 805516 - RNA, 19 nt, Artificial Sequence
  Description of Artificial Sequence: Synthetic oligonucleotide
uaguaaccguaguacauga

SEQ ID NO: 805517 - RNA, 19 nt, Artificial Sequence
  Description of Artificial Sequence: Synthetic oligonucleotide
ugauaacaaagcacaccca

SEQ ID NO: 805518 - RNA, 19 nt, Artificial Sequence
  Description of Artificial Sequence: Synthetic oligonucleotide
agcggugagaacaggacac

SEQ ID NO: 805519 - RNA, 19 nt, Artificial Sequence
  Description of Artificial Sequence: Synthetic oligonucleotide
gaacauuccgagcaauguc

SEQ ID NO: 805520 - RNA, 19 nt, Artificial Sequence
  Description of Artificial Sequence: Synthetic oligonucleotide
gagucaugccucuccagag

SEQ ID NO: 805521 - RNA, 19 nt, Artificial Sequence
  Description of Artificial Sequence: Synthetic oligonucleotide
gaugacggccagcagcaag

SEQ ID NO: 805522 - RNA, 19 nt, Artificial Sequence
  Description of Artificial Sequence: Synthetic oligonucleotide
aagguaagaacagccgcug

SEQ ID NO: 805523 - RNA, 19 nt, Artificial Sequence
  Description of Artificial Sequence: Synthetic oligonucleotide
agguaagaacagccgcugc

SEQ ID NO: 805524 - RNA, 19 nt, Artificial Sequence
  Description of Artificial Sequence: Synthetic oligonucleotide
ugugugacgccagccaggg

SEQ ID NO: 805525 - RNA, 19 nt, Artificial Sequence
  Description of Artificial Sequence: Synthetic oligonucleotide
ucagaguccugaaggggcc

SEQ ID NO: 805526 - RNA, 19 nt, Artificial Sequence
  Description of Artificial Sequence: Synthetic oligonucleotide
uacagauggccauguauac

SEQ ID NO: 805527 - RNA, 19 nt, Artificial Sequence
  Description of Artificial Sequence: Synthetic oligonucleotide
uccggucucugaaucauga

SEQ ID NO: 805528 - RNA, 19 nt, Artificial Sequence
  Description of Artificial Sequence: Synthetic oligonucleotide
ggccacaagugcuugaggg

SEQ ID NO: 805529 - RNA, 19 nt, Artificial Sequence
  Description of Artificial Sequence: Synthetic oligonucleotide
cugugaugaguucuagacc

SEQ ID NO: 805530 - RNA, 19 nt, Artificial Sequence
  Description of Artificial Sequence: Synthetic oligonucleotide
uguugcuguaguaaccgua

SEQ ID NO: 805531 - RNA, 19 nt, Artificial Sequence
  Description of Artificial Sequence: Synthetic oligonucleotide
gaagaccuuguccucgccc

SEQ ID NO: 805532 - RNA, 19 nt, Artificial Sequence
  Description of Artificial Sequence: Synthetic oligonucleotide
aagacggugcucaugugug

SEQ ID NO: 805533 - RNA, 19 nt, Artificial Sequence
  Description of Artificial Sequence: Synthetic oligonucleotide
aaccguaguacaugacggu

SEQ ID NO: 805534 - RNA, 19 nt, Artificial Sequence
  Description of Artificial Sequence: Synthetic oligonucleotide
cugugcagagccagaaugc

SEQ ID NO: 805535 - RNA, 19 nt, Artificial Sequence
  Description of Artificial Sequence: Synthetic oligonucleotide
cuagaccagagaagguagg

SEQ ID NO: 805536 - RNA, 19 nt, Artificial Sequence
  Description of Artificial Sequence: Synthetic oligonucleotide
caucccaggccuagcaugg

SEQ ID NO: 805537 - RNA, 19 nt, Artificial Sequence
  Description of Artificial Sequence: Synthetic oligonucleotide
gaggcacccagauuaagga

SEQ ID NO: 805538 - RNA, 19 nt, Artificial Sequence
  Description of Artificial Sequence: Synthetic oligonucleotide
gaaaacagcggcgcccagg

SEQ ID NO: 805539 - RNA, 19 nt, Artificial Sequence
  Description of Artificial Sequence: Synthetic oligonucleotide
cugaguacagaugcugucc

SEQ ID NO: 805540 - RNA, 19 nt, Artificial Sequence
  Description of Artificial Sequence: Synthetic oligonucleotide
cuuuggugcugccaacccg

SEQ ID NO: 805541 - RNA, 19 nt, Artificial Sequence
  Description of Artificial Sequence: Synthetic oligonucleotide
agaccuugaagcuccuuca

SEQ ID NO: 805542 - RNA, 19 nt, Artificial Sequence
  Description of Artificial Sequence: Synthetic oligonucleotide
guaguaaccguaguacaug

SEQ ID NO: 805543 - RNA, 19 nt, Artificial Sequence
  Description of Artificial Sequence: Synthetic oligonucleotide
uacaugacgguguguguga

SEQ ID NO: 805544 - RNA, 19 nt, Artificial Sequence
  Description of Artificial Sequence: Synthetic oligonucleotide
ugugugaaacagccccugc

SEQ ID NO: 805545 - RNA, 19 nt, Artificial Sequence
  Description of Artificial Sequence: Synthetic oligonucleotide
gaugcacccagacggugcc

SEQ ID NO: 805546 - RNA, 19 nt, Artificial Sequence
  Description of Artificial Sequence: Synthetic oligonucleotide
ucucgcugggccauugaca

SEQ ID NO: 805547 - RNA, 19 nt, Artificial Sequence
  Description of Artificial Sequence: Synthetic oligonucleotide
ucaggaugagacuccuaca

SEQ ID NO: 805548 - RNA, 19 nt, Artificial Sequence
  Description of Artificial Sequence: Synthetic oligonucleotide
cagacgaugcacccagacg

SEQ ID NO: 805549 - RNA, 19 nt, Artificial Sequence
  Description of Artificial Sequence: Synthetic oligonucleotide
acccagauuaaggacacug

SEQ ID NO: 805550 - RNA, 19 nt, Artificial Sequence
  Description of Artificial Sequence: Synthetic oligonucleotide
ggccggaugggucaggugg

SEQ ID NO: 805551 - RNA, 19 nt, Artificial Sequence
  Description of Artificial Sequence: Synthetic oligonucleotide
gugugaaacagccccugcc

SEQ ID NO: 805552 - RNA, 19 nt, Artificial Sequence
  Description of Artificial Sequence: Synthetic oligonucleotide
gaggguuucaccugccaga

SEQ ID NO: 805553 - RNA, 19 nt, Artificial Sequence
  Description of Artificial Sequence: Synthetic oligonucleotide
cagacagaugaccuuucgc

SEQ ID NO: 805554 - RNA, 19 nt, Artificial Sequence
  Description of Artificial Sequence: Synthetic oligonucleotide
uacaguccugaaagcaaca

SEQ ID NO: 805555 - RNA, 19 nt, Artificial Sequence
  Description of Artificial Sequence: Synthetic oligonucleotide
cugaccaccaaggguaggg

SEQ ID NO: 805556 - RNA, 19 nt, Artificial Sequence
  Description of Artificial Sequence: Synthetic oligonucleotide
gaagaccguaagagcaugg

SEQ ID NO: 805557 - RNA, 19 nt, Artificial Sequence
  Description of Artificial Sequence: Synthetic oligonucleotide
gcagguaaugaagaaggcg

SEQ ID NO: 805558 - RNA, 19 nt, Artificial Sequence
  Description of Artificial Sequence: Synthetic oligonucleotide
caugacuggcucagcgugg

SEQ ID NO: 805559 - RNA, 19 nt, Artificial Sequence
  Description of Artificial Sequence: Synthetic oligonucleotide
caaaguccucccagcacgg

SEQ ID NO: 805560 - RNA, 19 nt, Artificial Sequence
  Description of Artificial Sequence: Synthetic oligonucleotide
augacggccagcagcaagg

SEQ ID NO: 805561 - RNA, 19 nt, Artificial Sequence
  Description of Artificial Sequence: Synthetic oligonucleotide
cagaccuugaagcuccuuc

SEQ ID NO: 805562 - RNA, 19 nt, Artificial Sequence
  Description of Artificial Sequence: Synthetic oligonucleotide
ucagagcauagcgccacgg

SEQ ID NO: 805563 - RNA, 19 nt, Artificial Sequence
  Description of Artificial Sequence: Synthetic oligonucleotide
ccugaaagcaacaccaguc

SEQ ID NO: 805564 - RNA, 19 nt, Artificial Sequence
  Description of Artificial Sequence: Synthetic oligonucleotide
cuuucgcugcgcuuucacc

SEQ ID NO: 805565 - RNA, 19 nt, Artificial Sequence
  Description of Artificial Sequence: Synthetic oligonucleotide
ugcaggagaaggucccacc

SEQ ID NO: 805566 - RNA, 19 nt, Artificial Sequence
  Description of Artificial Sequence: Synthetic oligonucleotide
aagaccguaagagcaugga

SEQ ID NO: 805567 - RNA, 19 nt, Artificial Sequence
  Description of Artificial Sequence: Synthetic oligonucleotide
guagggaccaggccggaug

SEQ ID NO: 805568 - RNA, 19 nt, Artificial Sequence
  Description of Artificial Sequence: Synthetic oligonucleotide
cuggaaccaaacuggccgc

SEQ ID NO: 805569 - RNA, 19 nt, Artificial Sequence
  Description of Artificial Sequence: Synthetic oligonucleotide
uguuauagggcaggcugcu

SEQ ID NO: 805570 - RNA, 19 nt, Artificial Sequence
  Description of Artificial Sequence: Synthetic oligonucleotide
caacaucagcgcauugaag

SEQ ID NO: 805571 - RNA, 19 nt, Artificial Sequence
  Description of Artificial Sequence: Synthetic oligonucleotide
uugacagaccuugaagcuc

SEQ ID NO: 805572 - RNA, 19 nt, Artificial Sequence
  Description of Artificial Sequence: Synthetic oligonucleotide
ugcucaugugugacgccag

SEQ ID NO: 805573 - RNA, 19 nt, Artificial Sequence
  Description of Artificial Sequence: Synthetic oligonucleotide
gagugggacaugcuguaca

SEQ ID NO: 805574 - RNA, 19 nt, Artificial Sequence
  Description of Artificial Sequence: Synthetic oligonucleotide
accaaacuggccgccaauc

SEQ ID NO: 805575 - RNA, 19 nt, Artificial Sequence
  Description of Artificial Sequence: Synthetic oligonucleotide
gcuguaguaaccguaguac

SEQ ID NO: 805576 - RNA, 19 nt, Artificial Sequence
  Description of Artificial Sequence: Synthetic oligonucleotide
gaagacggugcucaugugu

SEQ ID NO: 805577 - RNA, 19 nt, Artificial Sequence
  Description of Artificial Sequence: Synthetic oligonucleotide
aguaaccguaguacaugac

SEQ ID NO: 805578 - RNA, 19 nt, Artificial Sequence
  Description of Artificial Sequence: Synthetic oligonucleotide
gccaaucugcuucagagca

SEQ ID NO: 805579 - RNA, 19 nt, Artificial Sequence
  Description of Artificial Sequence: Synthetic oligonucleotide
guugccauucagccagcag

SEQ ID NO: 805580 - RNA, 19 nt, Artificial Sequence
  Description of Artificial Sequence: Synthetic oligonucleotide
aaaguccucccagcacggg

SEQ ID NO: 805581 - RNA, 19 nt, Artificial Sequence
  Description of Artificial Sequence: Synthetic oligonucleotide
agucaugccucuccagagu

SEQ ID NO: 805582 - RNA, 19 nt, Artificial Sequence
  Description of Artificial Sequence: Synthetic oligonucleotide
aguuucucgaggggaggcg

SEQ ID NO: 805583 - RNA, 19 nt, Artificial Sequence
  Description of Artificial Sequence: Synthetic oligonucleotide
uguacaccagagugaugca

SEQ ID NO: 805584 - RNA, 19 nt, Artificial Sequence
  Description of Artificial Sequence: Synthetic oligonucleotide
ucguggugcccagacacag

SEQ ID NO: 805585 - RNA, 19 nt, Artificial Sequence
  Description of Artificial Sequence: Synthetic oligonucleotide
accguaguacaugacggug

SEQ ID NO: 805586 - RNA, 19 nt, Artificial Sequence
  Description of Artificial Sequence: Synthetic oligonucleotide
cugcgcuuucaccaccugg

SEQ ID NO: 805587 - RNA, 19 nt, Artificial Sequence
  Description of Artificial Sequence: Synthetic oligonucleotide
guacaccagagugaugcag

SEQ ID NO: 805588 - RNA, 19 nt, Artificial Sequence
  Description of Artificial Sequence: Synthetic oligonucleotide
ucgcccucauuccggaucu

SEQ ID NO: 805589 - RNA, 19 nt, Artificial Sequence
  Description of Artificial Sequence: Synthetic oligonucleotide
agaccguaagagcauggau

SEQ ID NO: 805590 - RNA, 19 nt, Artificial Sequence
  Description of Artificial Sequence: Synthetic oligonucleotide
agcgcauugaaggccaaca

SEQ ID NO: 805591 - RNA, 19 nt, Artificial Sequence
  Description of Artificial Sequence: Synthetic oligonucleotide
cacccugcggcccagccag

SEQ ID NO: 805592 - RNA, 19 nt, Artificial Sequence
  Description of Artificial Sequence: Synthetic oligonucleotide
acggugcucaugugugacg

SEQ ID NO: 805593 - RNA, 19 nt, Artificial Sequence
  Description of Artificial Sequence: Synthetic oligonucleotide
uggccauguauacuuccaa

SEQ ID NO: 805594 - RNA, 19 nt, Artificial Sequence
  Description of Artificial Sequence: Synthetic oligonucleotide
gagcggugagaacaggaca

SEQ ID NO: 805595 - RNA, 19 nt, Artificial Sequence
  Description of Artificial Sequence: Synthetic oligonucleotide
gcagaagaccguaagagca

SEQ ID NO: 805596 - RNA, 19 nt, Artificial Sequence
  Description of Artificial Sequence: Synthetic oligonucleotide
agaagaccguaagagcaug

SEQ ID NO: 805597 - RNA, 19 nt, Artificial Sequence
  Description of Artificial Sequence: Synthetic oligonucleotide
ugcccagacacagcaacca

SEQ ID NO: 805598 - RNA, 19 nt, Artificial Sequence
  Description of Artificial Sequence: Synthetic oligonucleotide
uuucucgaggggaggcgca

SEQ ID NO: 805599 - RNA, 19 nt, Artificial Sequence
  Description of Artificial Sequence: Synthetic oligonucleotide
cuuuucucucgaagccagc

SEQ ID NO: 805600 - RNA, 19 nt, Artificial Sequence
  Description of Artificial Sequence: Synthetic oligonucleotide
aaccaaacuggccgccaau

SEQ ID NO: 805601 - RNA, 19 nt, Artificial Sequence
  Description of Artificial Sequence: Synthetic oligonucleotide
gaagguaagaacagccgcu

SEQ ID NO: 805602 - RNA, 19 nt, Artificial Sequence
  Description of Artificial Sequence: Synthetic oligonucleotide
cucaugugugacgccagcc

SEQ ID NO: 805603 - RNA, 19 nt, Artificial Sequence
  Description of Artificial Sequence: Synthetic oligonucleotide
agagccggcacgcuccaga

SEQ ID NO: 805604 - RNA, 19 nt, Artificial Sequence
  Description of Artificial Sequence: Synthetic oligonucleotide
acggugugugugaaacagc

SEQ ID NO: 805605 - RNA, 19 nt, Artificial Sequence
  Description of Artificial Sequence: Synthetic oligonucleotide
aaaucagguccagaacauu

SEQ ID NO: 805606 - RNA, 19 nt, Artificial Sequence
  Description of Artificial Sequence: Synthetic oligonucleotide
cucuccccaaaggaguggg

SEQ ID NO: 805607 - RNA, 19 nt, Artificial Sequence
  Description of Artificial Sequence: Synthetic oligonucleotide
uucgcugcgcuuucaccac

SEQ ID NO: 805608 - RNA, 19 nt, Artificial Sequence
  Description of Artificial Sequence: Synthetic oligonucleotide
ccgccaaucugcuucagag

SEQ ID NO: 805609 - RNA, 19 nt, Artificial Sequence
  Description of Artificial Sequence: Synthetic oligonucleotide
ggcucaagggcauguuccg

SEQ ID NO: 805610 - RNA, 19 nt, Artificial Sequence
  Description of Artificial Sequence: Synthetic oligonucleotide
cucaagggcauguuccgga

SEQ ID NO: 805611 - RNA, 19 nt, Artificial Sequence
  Description of Artificial Sequence: Synthetic oligonucleotide
ucaagggcauguuccggau

SEQ ID NO: 805612 - RNA, 19 nt, Artificial Sequence
  Description of Artificial Sequence: Synthetic oligonucleotide
agcuuuucucucgaagcca

SEQ ID NO: 805613 - RNA, 19 nt, Artificial Sequence
  Description of Artificial Sequence: Synthetic oligonucleotide
cccacaugcgcucuggggc

SEQ ID NO: 805614 - RNA, 19 nt, Artificial Sequence
  Description of Artificial Sequence: Synthetic oligonucleotide
ugcccacaugcgcucuggg

SEQ ID NO: 805615 - RNA, 19 nt, Artificial Sequence
  Description of Artificial Sequence: Synthetic oligonucleotide
guuucucgaggggaggcgc

SEQ ID NO: 805616 - RNA, 19 nt, Artificial Sequence
  Description of Artificial Sequence: Synthetic oligonucleotide
aggaaaacagcggcgccca

SEQ ID NO: 805617 - RNA, 19 nt, Artificial Sequence
  Description of Artificial Sequence: Synthetic oligonucleotide
cacaaccagaaagcgguac

SEQ ID NO: 805618 - RNA, 19 nt, Artificial Sequence
  Description of Artificial Sequence: Synthetic oligonucleotide
ggagucaugccucuccaga

SEQ ID NO: 805619 - RNA, 19 nt, Artificial Sequence
  Description of Artificial Sequence: Synthetic oligonucleotide
aucagcgcauugaaggcca

SEQ ID NO: 805620 - RNA, 19 nt, Artificial Sequence
  Description of Artificial Sequence: Synthetic oligonucleotide
ugaccaccaaggguagggc

SEQ ID NO: 805621 - RNA, 19 nt, Artificial Sequence
  Description of Artificial Sequence: Synthetic oligonucleotide
acuccuacagauggccaug

SEQ ID NO: 805622 - RNA, 19 nt, Artificial Sequence
  Description of Artificial Sequence: Synthetic oligonucleotide
ggcaggagcggugagaaca

SEQ ID NO: 805623 - RNA, 19 nt, Artificial Sequence
  Description of Artificial Sequence: Synthetic oligonucleotide
gacggugcucaugugugac

SEQ ID NO: 805624 - RNA, 19 nt, Artificial Sequence
  Description of Artificial Sequence: Synthetic oligonucleotide
cucgcccucauuccggauc

SEQ ID NO: 805625 - RNA, 19 nt, Artificial Sequence
  Description of Artificial Sequence: Synthetic oligonucleotide
cacgaggaaggccagcaga

SEQ ID NO: 805626 - RNA, 19 nt, Artificial Sequence
  Description of Artificial Sequence: Synthetic oligonucleotide
gcuuuucucucgaagccag

SEQ ID NO: 805627 - RNA, 19 nt, Artificial Sequence
  Description of Artificial Sequence: Synthetic oligonucleotide
gggccauugacagaccuug

SEQ ID NO: 805628 - RNA, 19 nt, Artificial Sequence
  Description of Artificial Sequence: Synthetic oligonucleotide
gcggcgaggagccuggcag

SEQ ID NO: 805629 - RNA, 19 nt, Artificial Sequence
  Description of Artificial Sequence: Synthetic oligonucleotide
ccugaaggggccacaagug

SEQ ID NO: 805630 - RNA, 19 nt, Artificial Sequence
  Description of Artificial Sequence: Synthetic oligonucleotide
gacacgggaggcccgcuuc

SEQ ID NO: 805631 - RNA, 19 nt, Artificial Sequence
  Description of Artificial Sequence: Synthetic oligonucleotide
ggagcagaagaccguaaga

SEQ ID NO: 805632 - RNA, 19 nt, Artificial Sequence
  Description of Artificial Sequence: Synthetic oligonucleotide
gaccaggccggauggguca

SEQ ID NO: 805633 - RNA, 19 nt, Artificial Sequence
  Description of Artificial Sequence: Synthetic oligonucleotide
uaggaggcacccagauuaa

SEQ ID NO: 805634 - RNA, 19 nt, Artificial Sequence
  Description of Artificial Sequence: Synthetic oligonucleotide
cacugaccaccaaggguag

SEQ ID NO: 805635 - RNA, 19 nt, Artificial Sequence
  Description of Artificial Sequence: Synthetic oligonucleotide
caugguguucagaguccug

SEQ ID NO: 805636 - RNA, 19 nt, Artificial Sequence
  Description of Artificial Sequence: Synthetic oligonucleotide
agcgcuucucacccaggcu

SEQ ID NO: 805637 - RNA, 19 nt, Artificial Sequence
  Description of Artificial Sequence: Synthetic oligonucleotide
agaugaccuuucgcugcgc

SEQ ID NO: 805638 - RNA, 19 nt, Artificial Sequence
  Description of Artificial Sequence: Synthetic oligonucleotide
gcgcaugacuggcucagcg

SEQ ID NO: 805639 - RNA, 19 nt, Artificial Sequence
  Description of Artificial Sequence: Synthetic oligonucleotide
cugagucugcugcaggaga

SEQ ID NO: 805640 - RNA, 19 nt, Artificial Sequence
  Description of Artificial Sequence: Synthetic oligonucleotide
acagcauagcagaggaaaa

SEQ ID NO: 805641 - RNA, 19 nt, Artificial Sequence
  Description of Artificial Sequence: Synthetic oligonucleotide
caggcuugccuucuugaca

SEQ ID NO: 805642 - RNA, 19 nt, Artificial Sequence
  Description of Artificial Sequence: Synthetic oligonucleotide
caggcucaagggcauguuc

SEQ ID NO: 805643 - RNA, 19 nt, Artificial Sequence
  Description of Artificial Sequence: Synthetic oligonucleotide
agacggugcucauguguga

SEQ ID NO: 805644 - RNA, 19 nt, Artificial Sequence
  Description of Artificial Sequence: Synthetic oligonucleotide
auguuccggaucauguggu

SEQ ID NO: 805645 - RNA, 19 nt, Artificial Sequence
  Description of Artificial Sequence: Synthetic oligonucleotide
gugacgccagccaggggcg

SEQ ID NO: 805646 - RNA, 19 nt, Artificial Sequence
  Description of Artificial Sequence: Synthetic oligonucleotide
gaaugacgggaagcagagc

SEQ ID NO: 805647 - RNA, 19 nt, Artificial Sequence
  Description of Artificial Sequence: Synthetic oligonucleotide
ucgcugcgcuuucaccacc

SEQ ID NO: 805648 - RNA, 19 nt, Artificial Sequence
  Description of Artificial Sequence: Synthetic oligonucleotide
gaugaccuuucgcugcgcu

SEQ ID NO: 805649 - RNA, 19 nt, Artificial Sequence
  Description of Artificial Sequence: Synthetic oligonucleotide
cagcggcauguuauagggc

SEQ ID NO: 805650 - RNA, 19 nt, Artificial Sequence
  Description of Artificial Sequence: Synthetic oligonucleotide
caugacggugugguccagc

SEQ ID NO: 805651 - RNA, 19 nt, Artificial Sequence
  Description of Artificial Sequence: Synthetic oligonucleotide
gagccggcacgcuccagac

SEQ ID NO: 805652 - RNA, 19 nt, Artificial Sequence
  Description of Artificial Sequence: Synthetic oligonucleotide
cacgcuccagacgaugcac

SEQ ID NO: 805653 - RNA, 19 nt, Artificial Sequence
  Description of Artificial Sequence: Synthetic oligonucleotide
ugcgcucuggggccucucu

SEQ ID NO: 805654 - RNA, 19 nt, Artificial Sequence
  Description of Artificial Sequence: Synthetic oligonucleotide
gaccacggaacagguagga

SEQ ID NO: 805655 - RNA, 19 nt, Artificial Sequence
  Description of Artificial Sequence: Synthetic oligonucleotide
gccggcacgcuccagacga

SEQ ID NO: 805656 - RNA, 19 nt, Artificial Sequence
  Description of Artificial Sequence: Synthetic oligonucleotide
cagcuuggccacccugcgg

SEQ ID NO: 805657 - RNA, 19 nt, Artificial Sequence
  Description of Artificial Sequence: Synthetic oligonucleotide
gagcauagcgccacggccu

SEQ ID NO: 805658 - RNA, 19 nt, Artificial Sequence
  Description of Artificial Sequence: Synthetic oligonucleotide
cacggggccugcagcuugg

SEQ ID NO: 805659 - RNA, 19 nt, Artificial Sequence
  Description of Artificial Sequence: Synthetic oligonucleotide
aggaaguggugcagccagg

SEQ ID NO: 805660 - RNA, 19 nt, Artificial Sequence
  Description of Artificial Sequence: Synthetic oligonucleotide
ggagcggugagaacaggac

SEQ ID NO: 805661 - RNA, 19 nt, Artificial Sequence
  Description of Artificial Sequence: Synthetic oligonucleotide
ucagcgugguguugcugua

SEQ ID NO: 805662 - RNA, 19 nt, Artificial Sequence
  Description of Artificial Sequence: Synthetic oligonucleotide
ccgagcaaugucaaacuca

SEQ ID NO: 805663 - RNA, 19 nt, Artificial Sequence
  Description of Artificial Sequence: Synthetic oligonucleotide
gaggcgcaugacuggcuca

SEQ ID NO: 805664 - RNA, 19 nt, Artificial Sequence
  Description of Artificial Sequence: Synthetic oligonucleotide
ccuagcauggcagccugcc

SEQ ID NO: 805665 - RNA, 19 nt, Artificial Sequence
  Description of Artificial Sequence: Synthetic oligonucleotide
gccaguuucucgaggggag

SEQ ID NO: 805666 - RNA, 19 nt, Artificial Sequence
  Description of Artificial Sequence: Synthetic oligonucleotide
cauugaaggccaacagggu

SEQ ID NO: 805667 - RNA, 19 nt, Artificial Sequence
  Description of Artificial Sequence: Synthetic oligonucleotide
acgaugcacccagacggug

SEQ ID NO: 805668 - RNA, 19 nt, Artificial Sequence
  Description of Artificial Sequence: Synthetic oligonucleotide
ccacaugcgcucuggggcc

SEQ ID NO: 805669 - RNA, 19 nt, Artificial Sequence
  Description of Artificial Sequence: Synthetic oligonucleotide
agccuccauaccagcuccc

SEQ ID NO: 805670 - RNA, 19 nt, Artificial Sequence
  Description of Artificial Sequence: Synthetic oligonucleotide
acauuccgagcaaugucaa

SEQ ID NO: 805671 - RNA, 19 nt, Artificial Sequence
  Description of Artificial Sequence: Synthetic oligonucleotide
ccgccucguaaacagagug

SEQ ID NO: 805672 - RNA, 19 nt, Artificial Sequence
  Description of Artificial Sequence: Synthetic oligonucleotide
acccacgaggaaggccagc

SEQ ID NO: 805673 - RNA, 19 nt, Artificial Sequence
  Description of Artificial Sequence: Synthetic oligonucleotide
ggaggcccgcuucugaguc

SEQ ID NO: 805674 - RNA, 19 nt, Artificial Sequence
  Description of Artificial Sequence: Synthetic oligonucleotide
aaacagcggcgcccaggaa

SEQ ID NO: 805675 - RNA, 19 nt, Artificial Sequence
  Description of Artificial Sequence: Synthetic oligonucleotide
cugccaacccgguagcucu

SEQ ID NO: 805676 - RNA, 19 nt, Artificial Sequence
  Description of Artificial Sequence: Synthetic oligonucleotide
gaccucugagaagguaaga

SEQ ID NO: 805677 - RNA, 19 nt, Artificial Sequence
  Description of Artificial Sequence: Synthetic oligonucleotide
ucagcgcauugaaggccaa

SEQ ID NO: 805678 - RNA, 19 nt, Artificial Sequence
  Description of Artificial Sequence: Synthetic oligonucleotide
ucucgaggggaggcgcaug

SEQ ID NO: 805679 - RNA, 19 nt, Artificial Sequence
  Description of Artificial Sequence: Synthetic oligonucleotide
cguaguacaugacggugug

SEQ ID NO: 805680 - RNA, 19 nt, Artificial Sequence
  Description of Artificial Sequence: Synthetic oligonucleotide
ccucguaaacagagugaag

SEQ ID NO: 805681 - RNA, 19 nt, Artificial Sequence
  Description of Artificial Sequence: Synthetic oligonucleotide
gccagcgcuucucacccag

SEQ ID NO: 805682 - RNA, 19 nt, Artificial Sequence
  Description of Artificial Sequence: Synthetic oligonucleotide
ggagaaggucccaccucgg

SEQ ID NO: 805683 - RNA, 19 nt, Artificial Sequence
  Description of Artificial Sequence: Synthetic oligonucleotide
gagcauggaugccuuuggu

SEQ ID NO: 805684 - RNA, 19 nt, Artificial Sequence
  Description of Artificial Sequence: Synthetic oligonucleotide
ccaggggcggcgaggagcc

SEQ ID NO: 805685 - RNA, 19 nt, Artificial Sequence
  Description of Artificial Sequence: Synthetic oligonucleotide
cuagcauggcagccugcca

SEQ ID NO: 805686 - RNA, 19 nt, Artificial Sequence
  Description of Artificial Sequence: Synthetic oligonucleotide
gccucguaaacagagugaa

SEQ ID NO: 805687 - RNA, 19 nt, Artificial Sequence
  Description of Artificial Sequence: Synthetic oligonucleotide
gcucaagggcauguuccgg

SEQ ID NO: 805688 - RNA, 19 nt, Artificial Sequence
  Description of Artificial Sequence: Synthetic oligonucleotide
ggcacgcuccagacgaugc

SEQ ID NO: 805689 - RNA, 19 nt, Artificial Sequence
  Description of Artificial Sequence: Synthetic oligonucleotide
cauuccgagcaaugucaaa

SEQ ID NO: 805690 - RNA, 19 nt, Artificial Sequence
  Description of Artificial Sequence: Synthetic oligonucleotide
acaccagucccaggcugug

SEQ ID NO: 805691 - RNA, 19 nt, Artificial Sequence
  Description of Artificial Sequence: Synthetic oligonucleotide
gcaggagcggugagaacag

SEQ ID NO: 805692 - RNA, 19 nt, Artificial Sequence
  Description of Artificial Sequence: Synthetic oligonucleotide
cugcuggacacgggaggcc

SEQ ID NO: 805693 - RNA, 19 nt, Artificial Sequence
  Description of Artificial Sequence: Synthetic oligonucleotide
gagcagacagaugaccuuu

SEQ ID NO: 805694 - RNA, 19 nt, Artificial Sequence
  Description of Artificial Sequence: Synthetic oligonucleotide
ggaagacggugcucaugug

SEQ ID NO: 805695 - RNA, 19 nt, Artificial Sequence
  Description of Artificial Sequence: Synthetic oligonucleotide
ugccaacccgguagcucuc

SEQ ID NO: 805696 - RNA, 19 nt, Artificial Sequence
  Description of Artificial Sequence: Synthetic oligonucleotide
uggugcugccaacccggua

SEQ ID NO: 805697 - RNA, 19 nt, Artificial Sequence
  Description of Artificial Sequence: Synthetic oligonucleotide
gccuuuggugcugccaacc

SEQ ID NO: 805698 - RNA, 19 nt, Artificial Sequence
  Description of Artificial Sequence: Synthetic oligonucleotide
caggagcggugagaacagg

SEQ ID NO: 805699 - RNA, 19 nt, Artificial Sequence
  Description of Artificial Sequence: Synthetic oligonucleotide
acaugacggugugugugaa

SEQ ID NO: 805700 - RNA, 19 nt, Artificial Sequence
  Description of Artificial Sequence: Synthetic oligonucleotide
gcgugaagaugaaauccac

SEQ ID NO: 805701 - RNA, 19 nt, Artificial Sequence
  Description of Artificial Sequence: Synthetic oligonucleotide
uucucgaggggaggcgcau

SEQ ID NO: 805702 - RNA, 19 nt, Artificial Sequence
  Description of Artificial Sequence: Synthetic oligonucleotide
aucguggugcccagacaca

SEQ ID NO: 805703 - RNA, 19 nt, Artificial Sequence
  Description of Artificial Sequence: Synthetic oligonucleotide
aggccggaugggucaggug

SEQ ID NO: 805704 - RNA, 19 nt, Artificial Sequence
  Description of Artificial Sequence: Synthetic oligonucleotide
gcauccggucucugaauca

SEQ ID NO: 805705 - RNA, 19 nt, Artificial Sequence
  Description of Artificial Sequence: Synthetic oligonucleotide
caugacggugugugugaaa

SEQ ID NO: 805706 - RNA, 19 nt, Artificial Sequence
  Description of Artificial Sequence: Synthetic oligonucleotide
acgccagccaggggcggcg

SEQ ID NO: 805707 - RNA, 19 nt, Artificial Sequence
  Description of Artificial Sequence: Synthetic oligonucleotide
auccggucucugaaucaug

SEQ ID NO: 805708 - RNA, 19 nt, Artificial Sequence
  Description of Artificial Sequence: Synthetic oligonucleotide
gacgccagccaggggcggc

SEQ ID NO: 805709 - RNA, 19 nt, Artificial Sequence
  Description of Artificial Sequence: Synthetic oligonucleotide
cagccccugccugugauga

SEQ ID NO: 805710 - RNA, 19 nt, Artificial Sequence
  Description of Artificial Sequence: Synthetic oligonucleotide
ggggagucaugccucucca

SEQ ID NO: 805711 - RNA, 19 nt, Artificial Sequence
  Description of Artificial Sequence: Synthetic oligonucleotide
aggccagcggcauguuaua

SEQ ID NO: 805712 - RNA, 19 nt, Artificial Sequence
  Description of Artificial Sequence: Synthetic oligonucleotide
ccagcacggggccugcagc

SEQ ID NO: 805713 - RNA, 19 nt, Artificial Sequence
  Description of Artificial Sequence: Synthetic oligonucleotide
ccuuucgcugcgcuuucac

SEQ ID NO: 805714 - RNA, 19 nt, Artificial Sequence
  Description of Artificial Sequence: Synthetic oligonucleotide
ugcugccaacccgguagcu

SEQ ID NO: 805715 - RNA, 19 nt, Artificial Sequence
  Description of Artificial Sequence: Synthetic oligonucleotide
caggagcagaagaccguaa

SEQ ID NO: 805716 - RNA, 19 nt, Artificial Sequence
  Description of Artificial Sequence: Synthetic oligonucleotide
guucuagaccagagaaggu

SEQ ID NO: 805717 - RNA, 19 nt, Artificial Sequence
  Description of Artificial Sequence: Synthetic oligonucleotide
gcaggagaaggucccaccu

SEQ ID NO: 805718 - RNA, 19 nt, Artificial Sequence
  Description of Artificial Sequence: Synthetic oligonucleotide
guaagagcauggaugccuu

SEQ ID NO: 805719 - RNA, 19 nt, Artificial Sequence
  Description of Artificial Sequence: Synthetic oligonucleotide
caagagcgugaagaugaaa

SEQ ID NO: 805720 - RNA, 19 nt, Artificial Sequence
  Description of Artificial Sequence: Synthetic oligonucleotide
guaggccagcggcauguua

SEQ ID NO: 805721 - RNA, 19 nt, Artificial Sequence
  Description of Artificial Sequence: Synthetic oligonucleotide
cucguacaugguguucaga

SEQ ID NO: 805722 - RNA, 19 nt, Artificial Sequence
  Description of Artificial Sequence: Synthetic oligonucleotide
acggggccugcagcuuggc

SEQ ID NO: 805723 - RNA, 19 nt, Artificial Sequence
  Description of Artificial Sequence: Synthetic oligonucleotide
gacgaugcacccagacggu

SEQ ID NO: 805724 - RNA, 19 nt, Artificial Sequence
  Description of Artificial Sequence: Synthetic oligonucleotide
ggcgcccaccgugaagagg

SEQ ID NO: 805725 - RNA, 19 nt, Artificial Sequence
  Description of Artificial Sequence: Synthetic oligonucleotide
cagcgcauugaaggccaac

SEQ ID NO: 805726 - RNA, 19 nt, Artificial Sequence
  Description of Artificial Sequence: Synthetic oligonucleotide
gcggcauguuauagggcag

SEQ ID NO: 805727 - RNA, 19 nt, Artificial Sequence
  Description of Artificial Sequence: Synthetic oligonucleotide
ggccagcggcauguuauag

SEQ ID NO: 805728 - RNA, 19 nt, Artificial Sequence
  Description of Artificial Sequence: Synthetic oligonucleotide
gcacggggccugcagcuug

SEQ ID NO: 805729 - RNA, 19 nt, Artificial Sequence
  Description of Artificial Sequence: Synthetic oligonucleotide
ggaaccaaacuggccgcca

SEQ ID NO: 805730 - RNA, 19 nt, Artificial Sequence
  Description of Artificial Sequence: Synthetic oligonucleotide
gcaguuggccaucaggcuu

SEQ ID NO: 805731 - RNA, 19 nt, Artificial Sequence
  Description of Artificial Sequence: Synthetic oligonucleotide
cuucaggaugagacuccua

SEQ ID NO: 805732 - RNA, 19 nt, Artificial Sequence
  Description of Artificial Sequence: Synthetic oligonucleotide
gccacaagugcuugagggu

SEQ ID NO: 805733 - RNA, 19 nt, Artificial Sequence
  Description of Artificial Sequence: Synthetic oligonucleotide
ccggucucugaaucaugac

SEQ ID NO: 805734 - RNA, 19 nt, Artificial Sequence
  Description of Artificial Sequence: Synthetic oligonucleotide
gacacccagccaagucaga

SEQ ID NO: 805735 - RNA, 19 nt, Artificial Sequence
  Description of Artificial Sequence: Synthetic oligonucleotide
ugccugccucguacauggu

SEQ ID NO: 805736 - RNA, 19 nt, Artificial Sequence
  Description of Artificial Sequence: Synthetic oligonucleotide
gcgcccaggaaugacggga

SEQ ID NO: 805737 - RNA, 19 nt, Artificial Sequence
  Description of Artificial Sequence: Synthetic oligonucleotide
acccgguagcucuccccaa

SEQ ID NO: 805738 - RNA, 19 nt, Artificial Sequence
  Description of Artificial Sequence: Synthetic oligonucleotide
gccuccauaccagcucccc

SEQ ID NO: 805739 - RNA, 19 nt, Artificial Sequence
  Description of Artificial Sequence: Synthetic oligonucleotide
gcugccaacccgguagcuc

SEQ ID NO: 805740 - RNA, 19 nt, Artificial Sequence
  Description of Artificial Sequence: Synthetic oligonucleotide
cggcauguuauagggcagg

SEQ ID NO: 805741 - RNA, 19 nt, Artificial Sequence
  Description of Artificial Sequence: Synthetic oligonucleotide
gcuggacacgggaggcccg

SEQ ID NO: 805742 - RNA, 19 nt, Artificial Sequence
  Description of Artificial Sequence: Synthetic oligonucleotide
gcacgcuccagacgaugca

SEQ ID NO: 805743 - RNA, 19 nt, Artificial Sequence
  Description of Artificial Sequence: Synthetic oligonucleotide
guaguacaugacggugugu

SEQ ID NO: 805744 - RNA, 19 nt, Artificial Sequence
  Description of Artificial Sequence: Synthetic oligonucleotide
ggccccagagccggcacgc

SEQ ID NO: 805745 - RNA, 19 nt, Artificial Sequence
  Description of Artificial Sequence: Synthetic oligonucleotide
cauccggucucugaaucau

SEQ ID NO: 805746 - RNA, 19 nt, Artificial Sequence
  Description of Artificial Sequence: Synthetic oligonucleotide
ccaacccgguagcucuccc

SEQ ID NO: 805747 - RNA, 19 nt, Artificial Sequence
  Description of Artificial Sequence: Synthetic oligonucleotide
ggaccaggccggauggguc

SEQ ID NO: 805748 - RNA, 19 nt, Artificial Sequence
  Description of Artificial Sequence: Synthetic oligonucleotide
gcugcgcuuucaccaccug

SEQ ID NO: 805749 - RNA, 19 nt, Artificial Sequence
  Description of Artificial Sequence: Synthetic oligonucleotide
gcaacaccagucccaggcu

SEQ ID NO: 805750 - RNA, 19 nt, Artificial Sequence
  Description of Artificial Sequence: Synthetic oligonucleotide
cguaagagcauggaugccu

SEQ ID NO: 805751 - RNA, 19 nt, Artificial Sequence
  Description of Artificial Sequence: Synthetic oligonucleotide
gcucuggggccucucucga

SEQ ID NO: 805752 - RNA, 19 nt, Artificial Sequence
  Description of Artificial Sequence: Synthetic oligonucleotide
cucuggggccucucucgaa

SEQ ID NO: 805753 - RNA, 19 nt, Artificial Sequence
  Description of Artificial Sequence: Synthetic oligonucleotide
ccguaagagcauggaugcc

SEQ ID NO: 805754 - RNA, 19 nt, Artificial Sequence
  Description of Artificial Sequence: Synthetic oligonucleotide
agacggugccugccucgua

SEQ ID NO: 805755 - RNA, 19 nt, Artificial Sequence
  Description of Artificial Sequence: Synthetic oligonucleotide
cgaagccagcgcuucucac

SEQ ID NO: 805756 - RNA, 19 nt, Artificial Sequence
  Description of Artificial Sequence: Synthetic oligonucleotide
cuggggccucucucgaagu

SEQ ID NO: 805757 - RNA, 19 nt, Artificial Sequence
  Description of Artificial Sequence: Synthetic oligonucleotide
gccaacccgguagcucucc

SEQ ID NO: 805758 - RNA, 19 nt, Artificial Sequence
  Description of Artificial Sequence: Synthetic oligonucleotide
cuccuacagauggccaugu

SEQ ID NO: 805759 - RNA, 19 nt, Artificial Sequence
  Description of Artificial Sequence: Synthetic oligonucleotide
ccacggccuggcugcauac

SEQ ID NO: 805760 - RNA, 19 nt, Artificial Sequence
  Description of Artificial Sequence: Synthetic oligonucleotide
cgccucguaaacagaguga

SEQ ID NO: 805761 - RNA, 19 nt, Artificial Sequence
  Description of Artificial Sequence: Synthetic oligonucleotide
agcacggggccugcagcuu

SEQ ID NO: 805762 - RNA, 19 nt, Artificial Sequence
  Description of Artificial Sequence: Synthetic oligonucleotide
ccaagagcgugaagaugaa

SEQ ID NO: 805763 - RNA, 19 nt, Artificial Sequence
  Description of Artificial Sequence: Synthetic oligonucleotide
caccagagugaugcaggua

SEQ ID NO: 805764 - RNA, 19 nt, Artificial Sequence
  Description of Artificial Sequence: Synthetic oligonucleotide
ggcggcgaggagccuggca

SEQ ID NO: 805765 - RNA, 19 nt, Artificial Sequence
  Description of Artificial Sequence: Synthetic oligonucleotide
gcgugaggaagacggugcu

SEQ ID NO: 805766 - RNA, 19 nt, Artificial Sequence
  Description of Artificial Sequence: Synthetic oligonucleotide
gcgcucuggggccucucuc

SEQ ID NO: 805767 - RNA, 19 nt, Artificial Sequence
  Description of Artificial Sequence: Synthetic oligonucleotide
gcgaggagccuggcaguug

SEQ ID NO: 805768 - RNA, 19 nt, Artificial Sequence
  Description of Artificial Sequence: Synthetic oligonucleotide
cccagacggugccugccuc

SEQ ID NO: 805769 - RNA, 19 nt, Artificial Sequence
  Description of Artificial Sequence: Synthetic oligonucleotide
ccaucguggugcccagaca

SEQ ID NO: 805770 - RNA, 19 nt, Artificial Sequence
  Description of Artificial Sequence: Synthetic oligonucleotide
ggucccaccucggcccuuc

SEQ ID NO: 805771 - RNA, 19 nt, Artificial Sequence
  Description of Artificial Sequence: Synthetic oligonucleotide
ucggcccuucuggcccugu

SEQ ID NO: 805772 - RNA, 19 nt, Artificial Sequence
  Description of Artificial Sequence: Synthetic oligonucleotide
gccacggccuggcugcaua

SEQ ID NO: 805773 - RNA, 19 nt, Artificial Sequence
  Description of Artificial Sequence: Synthetic oligonucleotide
gggaccaggccggaugggu

SEQ ID NO: 805774 - RNA, 19 nt, Artificial Sequence
  Description of Artificial Sequence: Synthetic oligonucleotide
cccugccugugaugaguuc

SEQ ID NO: 805775 - RNA, 19 nt, Artificial Sequence
  Description of Artificial Sequence: Synthetic oligonucleotide
gccagaccacggaacaggu

SEQ ID NO: 805776 - RNA, 19 nt, Artificial Sequence
  Description of Artificial Sequence: Synthetic oligonucleotide
cagacggugccugccucgu

SEQ ID NO: 805777 - RNA, 19 nt, Artificial Sequence
  Description of Artificial Sequence: Synthetic oligonucleotide
cguaaacagagugaagcuu

SEQ ID NO: 805778 - RNA, 19 nt, Artificial Sequence
  Description of Artificial Sequence: Synthetic oligonucleotide
cccuuuggacuccagcuuu

SEQ ID NO: 805779 - RNA, 19 nt, Artificial Sequence
  Description of Artificial Sequence: Synthetic oligonucleotide
caggccggaugggucaggu

SEQ ID NO: 805780 - RNA, 19 nt, Artificial Sequence
  Description of Artificial Sequence: Synthetic oligonucleotide
cccgguagcucuccccaaa

SEQ ID NO: 805781 - RNA, 19 nt, Artificial Sequence
  Description of Artificial Sequence: Synthetic oligonucleotide
gcccgcuucugagucaccu

SEQ ID NO: 805782 - RNA, 19 nt, Artificial Sequence
  Description of Artificial Sequence: Synthetic oligonucleotide
gcccucauuccggaucugu

SEQ ID NO: 805783 - RNA, 19 nt, Artificial Sequence
  Description of Artificial Sequence: Synthetic oligonucleotide
ccacaaccagaaagcggua

SEQ ID NO: 805784 - RNA, 19 nt, Artificial Sequence
  Description of Artificial Sequence: Synthetic oligonucleotide
ccacccugcggcccagcca

SEQ ID NO: 805785 - RNA, 19 nt, Artificial Sequence
  Description of Artificial Sequence: Synthetic oligonucleotide
ccagagugaugcagguaau

SEQ ID NO: 805786 - RNA, 19 nt, Artificial Sequence
  Description of Artificial Sequence: Synthetic oligonucleotide
cacaugcgcucuggggccu

SEQ ID NO: 805787 - RNA, 19 nt, Artificial Sequence
  Description of Artificial Sequence: Synthetic oligonucleotide
cagcggcgcccaggaauga

SEQ ID NO: 805788 - RNA, 19 nt, Artificial Sequence
  Description of Artificial Sequence: Synthetic oligonucleotide
cggcacgcuccagacgaug

SEQ ID NO: 805789 - RNA, 19 nt, Artificial Sequence
  Description of Artificial Sequence: Synthetic oligonucleotide
cacccagauuaaggacacu

SEQ ID NO: 805790 - RNA, 19 nt, Artificial Sequence
  Description of Artificial Sequence: Synthetic oligonucleotide
cccgccucguaaacagagu

SEQ ID NO: 805791 - RNA, 19 nt, Artificial Sequence
  Description of Artificial Sequence: Synthetic oligonucleotide
ggacacgggaggcccgcuu

SEQ ID NO: 805792 - RNA, 19 nt, Artificial Sequence
  Description of Artificial Sequence: Synthetic oligonucleotide
acccugcggcccagccagu

SEQ ID NO: 805793 - RNA, 19 nt, Artificial Sequence
  Description of Artificial Sequence: Synthetic oligonucleotide
cggcgcccaccgugaagag

SEQ ID NO: 805794 - RNA, 19 nt, Artificial Sequence
  Description of Artificial Sequence: Synthetic oligonucleotide
cgcugcgcuuucaccaccu

SEQ ID NO: 805795 - RNA, 19 nt, Artificial Sequence
  Description of Artificial Sequence: Synthetic oligonucleotide
ccccugccugugaugaguu

SEQ ID NO: 805796 - RNA, 19 nt, Artificial Sequence
  Description of Artificial Sequence: Synthetic oligonucleotide
cacccaggacagccaucuu

SEQ ID NO: 805797 - RNA, 19 nt, Artificial Sequence
  Description of Artificial Sequence: Synthetic oligonucleotide
cgcccucauuccggaucug

SEQ ID NO: 805798 - RNA, 19 nt, Artificial Sequence
  Description of Artificial Sequence: Synthetic oligonucleotide
ccuuguccucgcccucauu

SEQ ID NO: 805799 - RNA, 19 nt, Artificial Sequence
  Description of Artificial Sequence: Synthetic oligonucleotide
cggugccugccucguacau

SEQ ID NO: 805800 - RNA, 19 nt, Artificial Sequence
  Description of Artificial Sequence: Synthetic oligonucleotide
caggggcggcgaggagccu

SEQ ID NO: 805801 - RNA, 19 nt, Artificial Sequence
  Description of Artificial Sequence: Synthetic oligonucleotide
ccggcacgcuccagacgau

SEQ ID NO: 805802 - RNA, 19 nt, Artificial Sequence
  Description of Artificial Sequence: Synthetic oligonucleotide
cgcccaccgugaagaggua

SEQ ID NO: 805803 - RNA, 19 nt, Artificial Sequence
  Description of Artificial Sequence: Synthetic oligonucleotide
aaaaguaucuccuuugccc

SEQ ID NO: 805804 - RNA, 19 nt, Artificial Sequence
  Description of Artificial Sequence: Synthetic oligonucleotide
aacuuagauucauagaugc

SEQ ID NO: 805805 - RNA, 19 nt, Artificial Sequence
  Description of Artificial Sequence: Synthetic oligonucleotide
uauaauuucacaauucccc

SEQ ID NO: 805806 - RNA, 19 nt, Artificial Sequence
  Description of Artificial Sequence: Synthetic oligonucleotide
aacaccauaaccuucguug

SEQ ID NO: 805807 - RNA, 19 nt, Artificial Sequence
  Description of Artificial Sequence: Synthetic oligonucleotide
aauuuccuguaauaagucc

SEQ ID NO: 805808 - RNA, 19 nt, Artificial Sequence
  Description of Artificial Sequence: Synthetic oligonucleotide
caaauaaucguacucaucc

SEQ ID NO: 805809 - RNA, 19 nt, Artificial Sequence
  Description of Artificial Sequence: Synthetic oligonucleotide
uguaugauguuauuuauca

SEQ ID NO: 805810 - RNA, 19 nt, Artificial Sequence
  Description of Artificial Sequence: Synthetic oligonucleotide
aauaaucguacucauccuc

SEQ ID NO: 805811 - RNA, 19 nt, Artificial Sequence
  Description of Artificial Sequence: Synthetic oligonucleotide
uaacagaucacuauggaac

SEQ ID NO: 805812 - RNA, 19 nt, Artificial Sequence
  Description of Artificial Sequence: Synthetic oligonucleotide
auauuucuauaccagcacc

SEQ ID NO: 805813 - RNA, 19 nt, Artificial Sequence
  Description of Artificial Sequence: Synthetic oligonucleotide
aaaaguccacguuuguaac

SEQ ID NO: 805814 - RNA, 19 nt, Artificial Sequence
  Description of Artificial Sequence: Synthetic oligonucleotide
agaaguagcaaguaguuca

SEQ ID NO: 805815 - RNA, 19 nt, Artificial Sequence
  Description of Artificial Sequence: Synthetic oligonucleotide
auuaagauuccuucuacag

SEQ ID NO: 805816 - RNA, 19 nt, Artificial Sequence
  Description of Artificial Sequence: Synthetic oligonucleotide
ugucccuaaacagagaccg

SEQ ID NO: 805817 - RNA, 19 nt, Artificial Sequence
  Description of Artificial Sequence: Synthetic oligonucleotide
uaaacagagaccgaaguag

SEQ ID NO: 805818 - RNA, 19 nt, Artificial Sequence
  Description of Artificial Sequence: Synthetic oligonucleotide
uuaacauccauacccgugc

SEQ ID NO: 805819 - RNA, 19 nt, Artificial Sequence
  Description of Artificial Sequence: Synthetic oligonucleotide
gaucuaauccuucaguggc

SEQ ID NO: 805820 - RNA, 19 nt, Artificial Sequence
  Description of Artificial Sequence: Synthetic oligonucleotide
uaggacauguucaaaauac

SEQ ID NO: 805821 - RNA, 19 nt, Artificial Sequence
  Description of Artificial Sequence: Synthetic oligonucleotide
uauaucguaauacaaucuc

SEQ ID NO: 805822 - RNA, 19 nt, Artificial Sequence
  Description of Artificial Sequence: Synthetic oligonucleotide
uucacaauuccccuuagcu

SEQ ID NO: 805823 - RNA, 19 nt, Artificial Sequence
  Description of Artificial Sequence: Synthetic oligonucleotide
ucaaguauaucguaauaca

SEQ ID NO: 805824 - RNA, 19 nt, Artificial Sequence
  Description of Artificial Sequence: Synthetic oligonucleotide
uuuguaaccucaacaagca

SEQ ID NO: 805825 - RNA, 19 nt, Artificial Sequence
  Description of Artificial Sequence: Synthetic oligonucleotide
acaaucucaaucgagguuc

SEQ ID NO: 805826 - RNA, 19 nt, Artificial Sequence
  Description of Artificial Sequence: Synthetic oligonucleotide
uuucccaugauuucaauaa

SEQ ID NO: 805827 - RNA, 19 nt, Artificial Sequence
  Description of Artificial Sequence: Synthetic oligonucleotide
ucguaauacaaucucaauc

SEQ ID NO: 805828 - RNA, 19 nt, Artificial Sequence
  Description of Artificial Sequence: Synthetic oligonucleotide
uccgacaccacccacaacu

SEQ ID NO: 805829 - RNA, 19 nt, Artificial Sequence
  Description of Artificial Sequence: Synthetic oligonucleotide
gauauuagaguucuucuga

SEQ ID NO: 805830 - RNA, 19 nt, Artificial Sequence
  Description of Artificial Sequence: Synthetic oligonucleotide
uuugccauuccacuuaaac

SEQ ID NO: 805831 - RNA, 19 nt, Artificial Sequence
  Description of Artificial Sequence: Synthetic oligonucleotide
aaucguuucuucauccggc

SEQ ID NO: 805832 - RNA, 19 nt, Artificial Sequence
  Description of Artificial Sequence: Synthetic oligonucleotide
gaaugauuaagauuccuuc

SEQ ID NO: 805833 - RNA, 19 nt, Artificial Sequence
  Description of Artificial Sequence: Synthetic oligonucleotide
aguaaacuacauaagcagc

SEQ ID NO: 805834 - RNA, 19 nt, Artificial Sequence
  Description of Artificial Sequence: Synthetic oligonucleotide
uuuaacauccauacccgug

SEQ ID NO: 805835 - RNA, 19 nt, Artificial Sequence
  Description of Artificial Sequence: Synthetic oligonucleotide
uuaagauuccuucuacaga

SEQ ID NO: 805836 - RNA, 19 nt, Artificial Sequence
  Description of Artificial Sequence: Synthetic oligonucleotide
agauuuuaacauccauacc

SEQ ID NO: 805837 - RNA, 19 nt, Artificial Sequence
  Description of Artificial Sequence: Synthetic oligonucleotide
uucgccaagguaaaagugc

SEQ ID NO: 805838 - RNA, 19 nt, Artificial Sequence
  Description of Artificial Sequence: Synthetic oligonucleotide
uucguuguuauguaugaug

SEQ ID NO: 805839 - RNA, 19 nt, Artificial Sequence
  Description of Artificial Sequence: Synthetic oligonucleotide
uuguaugauuccaaguuca

SEQ ID NO: 805840 - RNA, 19 nt, Artificial Sequence
  Description of Artificial Sequence: Synthetic oligonucleotide
agcuaguaaagaaaugugc

SEQ ID NO: 805841 - RNA, 19 nt, Artificial Sequence
  Description of Artificial Sequence: Synthetic oligonucleotide
agaugcauggcucugcaag

SEQ ID NO: 805842 - RNA, 19 nt, Artificial Sequence
  Description of Artificial Sequence: Synthetic oligonucleotide
ucucaaucgagguucaaca

SEQ ID NO: 805843 - RNA, 19 nt, Artificial Sequence
  Description of Artificial Sequence: Synthetic oligonucleotide
ucguuguuauguaugaugu

SEQ ID NO: 805844 - RNA, 19 nt, Artificial Sequence
  Description of Artificial Sequence: Synthetic oligonucleotide
uucuauaccagcacccuug

SEQ ID NO: 805845 - RNA, 19 nt, Artificial Sequence
  Description of Artificial Sequence: Synthetic oligonucleotide
aaauuuugggaauaucaua

SEQ ID NO: 805846 - RNA, 19 nt, Artificial Sequence
  Description of Artificial Sequence: Synthetic oligonucleotide
cacaauuccccuuagcuug

SEQ ID NO: 805847 - RNA, 19 nt, Artificial Sequence
  Description of Artificial Sequence: Synthetic oligonucleotide
uguaauaaguccugaggga

SEQ ID NO: 805848 - RNA, 19 nt, Artificial Sequence
  Description of Artificial Sequence: Synthetic oligonucleotide
acaucugacaaauaaucgu

SEQ ID NO: 805849 - RNA, 19 nt, Artificial Sequence
  Description of Artificial Sequence: Synthetic oligonucleotide
gaaaagucagccguggaag

SEQ ID NO: 805850 - RNA, 19 nt, Artificial Sequence
  Description of Artificial Sequence: Synthetic oligonucleotide
ucuuaggacauguucaaaa

SEQ ID NO: 805851 - RNA, 19 nt, Artificial Sequence
  Description of Artificial Sequence: Synthetic oligonucleotide
aacuacauaagcagcauga

SEQ ID NO: 805852 - RNA, 19 nt, Artificial Sequence
  Description of Artificial Sequence: Synthetic oligonucleotide
uaucguaauacaaucucaa

SEQ ID NO: 805853 - RNA, 19 nt, Artificial Sequence
  Description of Artificial Sequence: Synthetic oligonucleotide
aaauaaucguacucauccu

SEQ ID NO: 805854 - RNA, 19 nt, Artificial Sequence
  Description of Artificial Sequence: Synthetic oligonucleotide
auucaugugagccauccga

SEQ ID NO: 805855 - RNA, 19 nt, Artificial Sequence
  Description of Artificial Sequence: Synthetic oligonucleotide
aaaggauucucaaugaguu

SEQ ID NO: 805856 - RNA, 19 nt, Artificial Sequence
  Description of Artificial Sequence: Synthetic oligonucleotide
ugauuaagauuccuucuac

SEQ ID NO: 805857 - RNA, 19 nt, Artificial Sequence
  Description of Artificial Sequence: Synthetic oligonucleotide
uaacccuuccaccauggag

SEQ ID NO: 805858 - RNA, 19 nt, Artificial Sequence
  Description of Artificial Sequence: Synthetic oligonucleotide
uuaaugaggaucccuuccu

SEQ ID NO: 805859 - RNA, 19 nt, Artificial Sequence
  Description of Artificial Sequence: Synthetic oligonucleotide
uacacuuacucccaggaua

SEQ ID NO: 805860 - RNA, 19 nt, Artificial Sequence
  Description of Artificial Sequence: Synthetic oligonucleotide
gauucuuaggacauguuca

SEQ ID NO: 805861 - RNA, 19 nt, Artificial Sequence
  Description of Artificial Sequence: Synthetic oligonucleotide
aaacacguuagugugccag

SEQ ID NO: 805862 - RNA, 19 nt, Artificial Sequence
  Description of Artificial Sequence: Synthetic oligonucleotide
uauggagcagguaccauga

SEQ ID NO: 805863 - RNA, 19 nt, Artificial Sequence
  Description of Artificial Sequence: Synthetic oligonucleotide
augcucaauugcaagagcc

SEQ ID NO: 805864 - RNA, 19 nt, Artificial Sequence
  Description of Artificial Sequence: Synthetic oligonucleotide
uaagcagcaugauucuuag

SEQ ID NO: 805865 - RNA, 19 nt, Artificial Sequence
  Description of Artificial Sequence: Synthetic oligonucleotide
uuguagcuaguaaagaaau

SEQ ID NO: 805866 - RNA, 19 nt, Artificial Sequence
  Description of Artificial Sequence: Synthetic oligonucleotide
gacauuauguugucaucag

SEQ ID NO: 805867 - RNA, 19 nt, Artificial Sequence
  Description of Artificial Sequence: Synthetic oligonucleotide
acaaaggauucucaaugag

SEQ ID NO: 805868 - RNA, 19 nt, Artificial Sequence
  Description of Artificial Sequence: Synthetic oligonucleotide
uguagcuaguaaagaaaug

SEQ ID NO: 805869 - RNA, 19 nt, Artificial Sequence
  Description of Artificial Sequence: Synthetic oligonucleotide
aaguagaccugucuucaug

SEQ ID NO: 805870 - RNA, 19 nt, Artificial Sequence
  Description of Artificial Sequence: Synthetic oligonucleotide
ucuauaccagcacccuugg

SEQ ID NO: 805871 - RNA, 19 nt, Artificial Sequence
  Description of Artificial Sequence: Synthetic oligonucleotide
acguuagugugccagacug

SEQ ID NO: 805872 - RNA, 19 nt, Artificial Sequence
  Description of Artificial Sequence: Synthetic oligonucleotide
ucaaacacguuagugugcc

SEQ ID NO: 805873 - RNA, 19 nt, Artificial Sequence
  Description of Artificial Sequence: Synthetic oligonucleotide
agauaacagaucacuaugg

SEQ ID NO: 805874 - RNA, 19 nt, Artificial Sequence
  Description of Artificial Sequence: Synthetic oligonucleotide
aaccugacaugcucaauug

SEQ ID NO: 805875 - RNA, 19 nt, Artificial Sequence
  Description of Artificial Sequence: Synthetic oligonucleotide
cagauaacagaucacuaug

SEQ ID NO: 805876 - RNA, 19 nt, Artificial Sequence
  Description of Artificial Sequence: Synthetic oligonucleotide
aaguauaucguaauacaau

SEQ ID NO: 805877 - RNA, 19 nt, Artificial Sequence
  Description of Artificial Sequence: Synthetic oligonucleotide
aauaaguccugagggaacu

SEQ ID NO: 805878 - RNA, 19 nt, Artificial Sequence
  Description of Artificial Sequence: Synthetic oligonucleotide
gauaacagaucacuaugga

SEQ ID NO: 805879 - RNA, 19 nt, Artificial Sequence
  Description of Artificial Sequence: Synthetic oligonucleotide
uaugguuucauuguagcua

SEQ ID NO: 805880 - RNA, 19 nt, Artificial Sequence
  Description of Artificial Sequence: Synthetic oligonucleotide
ucucacuacugccuucagg

SEQ ID NO: 805881 - RNA, 19 nt, Artificial Sequence
  Description of Artificial Sequence: Synthetic oligonucleotide
ucugacaaauaaucguacu

SEQ ID NO: 805882 - RNA, 19 nt, Artificial Sequence
  Description of Artificial Sequence: Synthetic oligonucleotide
caugaaccacauaauggcc

SEQ ID NO: 805883 - RNA, 19 nt, Artificial Sequence
  Description of Artificial Sequence: Synthetic oligonucleotide
uucagaaaagucagccgug

SEQ ID NO: 805884 - RNA, 19 nt, Artificial Sequence
  Description of Artificial Sequence: Synthetic oligonucleotide
uucaacacaucugacaaau

SEQ ID NO: 805885 - RNA, 19 nt, Artificial Sequence
  Description of Artificial Sequence: Synthetic oligonucleotide
uaaugcucaucaaggaagu

SEQ ID NO: 805886 - RNA, 19 nt, Artificial Sequence
  Description of Artificial Sequence: Synthetic oligonucleotide
auaacagaucacuauggaa

SEQ ID NO: 805887 - RNA, 19 nt, Artificial Sequence
  Description of Artificial Sequence: Synthetic oligonucleotide
gauuaagauuccuucuaca

SEQ ID NO: 805888 - RNA, 19 nt, Artificial Sequence
  Description of Artificial Sequence: Synthetic oligonucleotide
agaccugucuucauggugg

SEQ ID NO: 805889 - RNA, 19 nt, Artificial Sequence
  Description of Artificial Sequence: Synthetic oligonucleotide
uuguuauguaugauguuau

SEQ ID NO: 805890 - RNA, 19 nt, Artificial Sequence
  Description of Artificial Sequence: Synthetic oligonucleotide
uggagauauuuucuugucu

SEQ ID NO: 805891 - RNA, 19 nt, Artificial Sequence
  Description of Artificial Sequence: Synthetic oligonucleotide
uggucaagcacauauuaua

SEQ ID NO: 805892 - RNA, 19 nt, Artificial Sequence
  Description of Artificial Sequence: Synthetic oligonucleotide
uuagcuuguucagaaaagu

SEQ ID NO: 805893 - RNA, 19 nt, Artificial Sequence
  Description of Artificial Sequence: Synthetic oligonucleotide
acguuuguaaccucaacaa

SEQ ID NO: 805894 - RNA, 19 nt, Artificial Sequence
  Description of Artificial Sequence: Synthetic oligonucleotide
caaucguuucuucauccgg

SEQ ID NO: 805895 - RNA, 19 nt, Artificial Sequence
  Description of Artificial Sequence: Synthetic oligonucleotide
accguagacaucugaguuc

SEQ ID NO: 805896 - RNA, 19 nt, Artificial Sequence
  Description of Artificial Sequence: Synthetic oligonucleotide
auacaaucucaaucgaggu

SEQ ID NO: 805897 - RNA, 19 nt, Artificial Sequence
  Description of Artificial Sequence: Synthetic oligonucleotide
accugacaugcucaauugc

SEQ ID NO: 805898 - RNA, 19 nt, Artificial Sequence
  Description of Artificial Sequence: Synthetic oligonucleotide
uuaggacauguucaaaaua

SEQ ID NO: 805899 - RNA, 19 nt, Artificial Sequence
  Description of Artificial Sequence: Synthetic oligonucleotide
aggcauuuacagcagauaa

SEQ ID NO: 805900 - RNA, 19 nt, Artificial Sequence
  Description of Artificial Sequence: Synthetic oligonucleotide
ccaugaaccacauaauggc

SEQ ID NO: 805901 - RNA, 19 nt, Artificial Sequence
  Description of Artificial Sequence: Synthetic oligonucleotide
uagcaaguaguucauuuau

SEQ ID NO: 805902 - RNA, 19 nt, Artificial Sequence
  Description of Artificial Sequence: Synthetic oligonucleotide
ucgagguucaacacaucug

SEQ ID NO: 805903 - RNA, 19 nt, Artificial Sequence
  Description of Artificial Sequence: Synthetic oligonucleotide
uaauaaguccugagggaac

SEQ ID NO: 805904 - RNA, 19 nt, Artificial Sequence
  Description of Artificial Sequence: Synthetic oligonucleotide
augugagccauccgacacc

SEQ ID NO: 805905 - RNA, 19 nt, Artificial Sequence
  Description of Artificial Sequence: Synthetic oligonucleotide
caacuuagauucauagaug

SEQ ID NO: 805906 - RNA, 19 nt, Artificial Sequence
  Description of Artificial Sequence: Synthetic oligonucleotide
gaaaugugccaaaacuccc

SEQ ID NO: 805907 - RNA, 19 nt, Artificial Sequence
  Description of Artificial Sequence: Synthetic oligonucleotide
uucaugugagccauccgac

SEQ ID NO: 805908 - RNA, 19 nt, Artificial Sequence
  Description of Artificial Sequence: Synthetic oligonucleotide
uaggcuucaccaaaacaac

SEQ ID NO: 805909 - RNA, 19 nt, Artificial Sequence
  Description of Artificial Sequence: Synthetic oligonucleotide
uguaugauuccaaguucac

SEQ ID NO: 805910 - RNA, 19 nt, Artificial Sequence
  Description of Artificial Sequence: Synthetic oligonucleotide
aucucaaucgagguucaac

SEQ ID NO: 805911 - RNA, 19 nt, Artificial Sequence
  Description of Artificial Sequence: Synthetic oligonucleotide
gcuaguaaagaaaugugcc

SEQ ID NO: 805912 - RNA, 19 nt, Artificial Sequence
  Description of Artificial Sequence: Synthetic oligonucleotide
aaccugucccuaaacagag

SEQ ID NO: 805913 - RNA, 19 nt, Artificial Sequence
  Description of Artificial Sequence: Synthetic oligonucleotide
guaaacuacauaagcagca

SEQ ID NO: 805914 - RNA, 19 nt, Artificial Sequence
  Description of Artificial Sequence: Synthetic oligonucleotide
gaagcugauugugaauucc

SEQ ID NO: 805915 - RNA, 19 nt, Artificial Sequence
  Description of Artificial Sequence: Synthetic oligonucleotide
uuucacaauuccccuuagc

SEQ ID NO: 805916 - RNA, 19 nt, Artificial Sequence
  Description of Artificial Sequence: Synthetic oligonucleotide
ugggaauaucauaaugcuc

SEQ ID NO: 805917 - RNA, 19 nt, Artificial Sequence
  Description of Artificial Sequence: Synthetic oligonucleotide
agaucacagaaaauuguag

SEQ ID NO: 805918 - RNA, 19 nt, Artificial Sequence
  Description of Artificial Sequence: Synthetic oligonucleotide
uuuuaacauccauacccgu

SEQ ID NO: 805919 - RNA, 19 nt, Artificial Sequence
  Description of Artificial Sequence: Synthetic oligonucleotide
gauucaugugagccauccg

SEQ ID NO: 805920 - RNA, 19 nt, Artificial Sequence
  Description of Artificial Sequence: Synthetic oligonucleotide
ggugagauucaugugagcc

SEQ ID NO: 805921 - RNA, 19 nt, Artificial Sequence
  Description of Artificial Sequence: Synthetic oligonucleotide
aucugacaaauaaucguac

SEQ ID NO: 805922 - RNA, 19 nt, Artificial Sequence
  Description of Artificial Sequence: Synthetic oligonucleotide
ggauauuagaguucuucug

SEQ ID NO: 805923 - RNA, 19 nt, Artificial Sequence
  Description of Artificial Sequence: Synthetic oligonucleotide
gcucaacuuagauucauag

SEQ ID NO: 805924 - RNA, 19 nt, Artificial Sequence
  Description of Artificial Sequence: Synthetic oligonucleotide
cauagaaguagcaaguagu

SEQ ID NO: 805925 - RNA, 19 nt, Artificial Sequence
  Description of Artificial Sequence: Synthetic oligonucleotide
auauuagaguucuucugau

SEQ ID NO: 805926 - RNA, 19 nt, Artificial Sequence
  Description of Artificial Sequence: Synthetic oligonucleotide
guuagugugccagacugcc

SEQ ID NO: 805927 - RNA, 19 nt, Artificial Sequence
  Description of Artificial Sequence: Synthetic oligonucleotide
aacuacuucucagauuuaa

SEQ ID NO: 805928 - RNA, 19 nt, Artificial Sequence
  Description of Artificial Sequence: Synthetic oligonucleotide
cuauggaacugaauuucug

SEQ ID NO: 805929 - RNA, 19 nt, Artificial Sequence
  Description of Artificial Sequence: Synthetic oligonucleotide
acaaauaaucguacucauc

SEQ ID NO: 805930 - RNA, 19 nt, Artificial Sequence
  Description of Artificial Sequence: Synthetic oligonucleotide
uugcaguacacaguucucc

SEQ ID NO: 805931 - RNA, 19 nt, Artificial Sequence
  Description of Artificial Sequence: Synthetic oligonucleotide
agaaaauuguaggcuucac

SEQ ID NO: 805932 - RNA, 19 nt, Artificial Sequence
  Description of Artificial Sequence: Synthetic oligonucleotide
ucgccaagguaaaagugcu

SEQ ID NO: 805933 - RNA, 19 nt, Artificial Sequence
  Description of Artificial Sequence: Synthetic oligonucleotide
aacucgaucuucaaguaua

SEQ ID NO: 805934 - RNA, 19 nt, Artificial Sequence
  Description of Artificial Sequence: Synthetic oligonucleotide
auucuuaggacauguucaa

SEQ ID NO: 805935 - RNA, 19 nt, Artificial Sequence
  Description of Artificial Sequence: Synthetic oligonucleotide
cuacuucucagauuuaaaa

SEQ ID NO: 805936 - RNA, 19 nt, Artificial Sequence
  Description of Artificial Sequence: Synthetic oligonucleotide
guagcuaguaaagaaaugu

SEQ ID NO: 805937 - RNA, 19 nt, Artificial Sequence
  Description of Artificial Sequence: Synthetic oligonucleotide
caaguauaucguaauacaa

SEQ ID NO: 805938 - RNA, 19 nt, Artificial Sequence
  Description of Artificial Sequence: Synthetic oligonucleotide
cuuccaacucaauggaguc

SEQ ID NO: 805939 - RNA, 19 nt, Artificial Sequence
  Description of Artificial Sequence: Synthetic oligonucleotide
guuguuauguaugauguua

SEQ ID NO: 805940 - RNA, 19 nt, Artificial Sequence
  Description of Artificial Sequence: Synthetic oligonucleotide
ugauguuauuuaucauaga

SEQ ID NO: 805941 - RNA, 19 nt, Artificial Sequence
  Description of Artificial Sequence: Synthetic oligonucleotide
cacguuuguaaccucaaca

SEQ ID NO: 805942 - RNA, 19 nt, Artificial Sequence
  Description of Artificial Sequence: Synthetic oligonucleotide
auaucguaauacaaucuca

SEQ ID NO: 805943 - RNA, 19 nt, Artificial Sequence
  Description of Artificial Sequence: Synthetic oligonucleotide
agaccauauccuuccaacu

SEQ ID NO: 805944 - RNA, 19 nt, Artificial Sequence
  Description of Artificial Sequence: Synthetic oligonucleotide
gguucaacacaucugacaa

SEQ ID NO: 805945 - RNA, 19 nt, Artificial Sequence
  Description of Artificial Sequence: Synthetic oligonucleotide
agcaccucaaacacguuag

SEQ ID NO: 805946 - RNA, 19 nt, Artificial Sequence
  Description of Artificial Sequence: Synthetic oligonucleotide
acccgugcaauccacaaaa

SEQ ID NO: 805947 - RNA, 19 nt, Artificial Sequence
  Description of Artificial Sequence: Synthetic oligonucleotide
auauacaaccaugaagcaa

SEQ ID NO: 805948 - RNA, 19 nt, Artificial Sequence
  Description of Artificial Sequence: Synthetic oligonucleotide
gcagugauggaucucguug

SEQ ID NO: 805949 - RNA, 19 nt, Artificial Sequence
  Description of Artificial Sequence: Synthetic oligonucleotide
acaccauaaccuucguugu

SEQ ID NO: 805950 - RNA, 19 nt, Artificial Sequence
  Description of Artificial Sequence: Synthetic oligonucleotide
uuacucccaggauauauuu

SEQ ID NO: 805951 - RNA, 19 nt, Artificial Sequence
  Description of Artificial Sequence: Synthetic oligonucleotide
ugauuccaaguucacucaa

SEQ ID NO: 805952 - RNA, 19 nt, Artificial Sequence
  Description of Artificial Sequence: Synthetic oligonucleotide
cugaugugcgcacugugac

SEQ ID NO: 805953 - RNA, 19 nt, Artificial Sequence
  Description of Artificial Sequence: Synthetic oligonucleotide
uauuagaguucuucugaua

SEQ ID NO: 805954 - RNA, 19 nt, Artificial Sequence
  Description of Artificial Sequence: Synthetic oligonucleotide
ucaugugagccauccgaca

SEQ ID NO: 805955 - RNA, 19 nt, Artificial Sequence
  Description of Artificial Sequence: Synthetic oligonucleotide
caucugacaaauaaucgua

SEQ ID NO: 805956 - RNA, 19 nt, Artificial Sequence
  Description of Artificial Sequence: Synthetic oligonucleotide
uaaucguacucauccuccu

SEQ ID NO: 805957 - RNA, 19 nt, Artificial Sequence
  Description of Artificial Sequence: Synthetic oligonucleotide
agcacauauuauauaauau

SEQ ID NO: 805958 - RNA, 19 nt, Artificial Sequence
  Description of Artificial Sequence: Synthetic oligonucleotide
guaauaaguccugagggaa

SEQ ID NO: 805959 - RNA, 19 nt, Artificial Sequence
  Description of Artificial Sequence: Synthetic oligonucleotide
cauaaugcucaucaaggaa

SEQ ID NO: 805960 - RNA, 19 nt, Artificial Sequence
  Description of Artificial Sequence: Synthetic oligonucleotide
gcuugagauuuuaacaucc

SEQ ID NO: 805961 - RNA, 19 nt, Artificial Sequence
  Description of Artificial Sequence: Synthetic oligonucleotide
uucccaugauuucaauaaa

SEQ ID NO: 805962 - RNA, 19 nt, Artificial Sequence
  Description of Artificial Sequence: Synthetic oligonucleotide
ugugacgccuguaguuuca

SEQ ID NO: 805963 - RNA, 19 nt, Artificial Sequence
  Description of Artificial Sequence: Synthetic oligonucleotide
aaggauucucaaugaguuu

SEQ ID NO: 805964 - RNA, 19 nt, Artificial Sequence
  Description of Artificial Sequence: Synthetic oligonucleotide
auuucuauaccagcacccu

SEQ ID NO: 805965 - RNA, 19 nt, Artificial Sequence
  Description of Artificial Sequence: Synthetic oligonucleotide
uuagugugccagacugccc

SEQ ID NO: 805966 - RNA, 19 nt, Artificial Sequence
  Description of Artificial Sequence: Synthetic oligonucleotide
uccauacccgugcaaucca

SEQ ID NO: 805967 - RNA, 19 nt, Artificial Sequence
  Description of Artificial Sequence: Synthetic oligonucleotide
gguaaaagugcucaacuua

SEQ ID NO: 805968 - RNA, 19 nt, Artificial Sequence
  Description of Artificial Sequence: Synthetic oligonucleotide
uuguaaccucaacaagcac

SEQ ID NO: 805969 - RNA, 19 nt, Artificial Sequence
  Description of Artificial Sequence: Synthetic oligonucleotide
aguaucuccuuugcccuuc

SEQ ID NO: 805970 - RNA, 19 nt, Artificial Sequence
  Description of Artificial Sequence: Synthetic oligonucleotide
uguuauguaugauguuauu

SEQ ID NO: 805971 - RNA, 19 nt, Artificial Sequence
  Description of Artificial Sequence: Synthetic oligonucleotide
uuucuauaccagcacccuu

SEQ ID NO: 805972 - RNA, 19 nt, Artificial Sequence
  Description of Artificial Sequence: Synthetic oligonucleotide
aaccuucguuguuauguau

SEQ ID NO: 805973 - RNA, 19 nt, Artificial Sequence
  Description of Artificial Sequence: Synthetic oligonucleotide
cagcaugauucuuaggaca

SEQ ID NO: 805974 - RNA, 19 nt, Artificial Sequence
  Description of Artificial Sequence: Synthetic oligonucleotide
ucccuaaacagagaccgaa

SEQ ID NO: 805975 - RNA, 19 nt, Artificial Sequence
  Description of Artificial Sequence: Synthetic oligonucleotide
acguucgccaagguaaaag

SEQ ID NO: 805976 - RNA, 19 nt, Artificial Sequence
  Description of Artificial Sequence: Synthetic oligonucleotide
augaaaagcucugcugaug

SEQ ID NO: 805977 - RNA, 19 nt, Artificial Sequence
  Description of Artificial Sequence: Synthetic oligonucleotide
guaguuucacauugcagua

SEQ ID NO: 805978 - RNA, 19 nt, Artificial Sequence
  Description of Artificial Sequence: Synthetic oligonucleotide
auugcaguacacaguucuc

SEQ ID NO: 805979 - RNA, 19 nt, Artificial Sequence
  Description of Artificial Sequence: Synthetic oligonucleotide
guagcaaguaguucauuua

SEQ ID NO: 805980 - RNA, 19 nt, Artificial Sequence
  Description of Artificial Sequence: Synthetic oligonucleotide
agcuaugguuucauuguag

SEQ ID NO: 805981 - RNA, 19 nt, Artificial Sequence
  Description of Artificial Sequence: Synthetic oligonucleotide
gacaaauaaucguacucau

SEQ ID NO: 805982 - RNA, 19 nt, Artificial Sequence
  Description of Artificial Sequence: Synthetic oligonucleotide
cauggagauauuuucuugu

SEQ ID NO: 805983 - RNA, 19 nt, Artificial Sequence
  Description of Artificial Sequence: Synthetic oligonucleotide
uaaugaggaucccuuccuu

SEQ ID NO: 805984 - RNA, 19 nt, Artificial Sequence
  Description of Artificial Sequence: Synthetic oligonucleotide
auaagcagcaugauucuua

SEQ ID NO: 805985 - RNA, 19 nt, Artificial Sequence
  Description of Artificial Sequence: Synthetic oligonucleotide
uuuaccucagaggccuuac

SEQ ID NO: 805986 - RNA, 19 nt, Artificial Sequence
  Description of Artificial Sequence: Synthetic oligonucleotide
ucucacgagggcccuuggc

SEQ ID NO: 805987 - RNA, 19 nt, Artificial Sequence
  Description of Artificial Sequence: Synthetic oligonucleotide
uuaccucagaggccuuaca

SEQ ID NO: 805988 - RNA, 19 nt, Artificial Sequence
  Description of Artificial Sequence: Synthetic oligonucleotide
accuucguuguuauguaug

SEQ ID NO: 805989 - RNA, 19 nt, Artificial Sequence
  Description of Artificial Sequence: Synthetic oligonucleotide
acauccauacccgugcaau

SEQ ID NO: 805990 - RNA, 19 nt, Artificial Sequence
  Description of Artificial Sequence: Synthetic oligonucleotide
caguauuuugugagcuaug

SEQ ID NO: 805991 - RNA, 19 nt, Artificial Sequence
  Description of Artificial Sequence: Synthetic oligonucleotide
uuccaacucaauggaguca

SEQ ID NO: 805992 - RNA, 19 nt, Artificial Sequence
  Description of Artificial Sequence: Synthetic oligonucleotide
gcuaaauguaaucuugaua

SEQ ID NO: 805993 - RNA, 19 nt, Artificial Sequence
  Description of Artificial Sequence: Synthetic oligonucleotide
aagucagccguggaagaaa

SEQ ID NO: 805994 - RNA, 19 nt, Artificial Sequence
  Description of Artificial Sequence: Synthetic oligonucleotide
ucagggcugaaaaguccac

SEQ ID NO: 805995 - RNA, 19 nt, Artificial Sequence
  Description of Artificial Sequence: Synthetic oligonucleotide
agcaugauucuuaggacau

SEQ ID NO: 805996 - RNA, 19 nt, Artificial Sequence
  Description of Artificial Sequence: Synthetic oligonucleotide
ucacguucgccaagguaaa

SEQ ID NO: 805997 - RNA, 19 nt, Artificial Sequence
  Description of Artificial Sequence: Synthetic oligonucleotide
uggugagauucaugugagc

SEQ ID NO: 805998 - RNA, 19 nt, Artificial Sequence
  Description of Artificial Sequence: Synthetic oligonucleotide
guagaucacagaaaauugu

SEQ ID NO: 805999 - RNA, 19 nt, Artificial Sequence
  Description of Artificial Sequence: Synthetic oligonucleotide
uucucacgagggcccuugg

SEQ ID NO: 806000 - RNA, 19 nt, Artificial Sequence
  Description of Artificial Sequence: Synthetic oligonucleotide
cacuuaaacugguuuccca

SEQ ID NO: 806001 - RNA, 19 nt, Artificial Sequence
  Description of Artificial Sequence: Synthetic oligonucleotide
guaaccucaacaagcaccu

SEQ ID NO: 806002 - RNA, 19 nt, Artificial Sequence
  Description of Artificial Sequence: Synthetic oligonucleotide
acacuuacucccaggauau

SEQ ID NO: 806003 - RNA, 19 nt, Artificial Sequence
  Description of Artificial Sequence: Synthetic oligonucleotide
acuacauaagcagcaugau

SEQ ID NO: 806004 - RNA, 19 nt, Artificial Sequence
  Description of Artificial Sequence: Synthetic oligonucleotide
augugcgcacugugacgcc

SEQ ID NO: 806005 - RNA, 19 nt, Artificial Sequence
  Description of Artificial Sequence: Synthetic oligonucleotide
aggguacacuuacucccag

SEQ ID NO: 806006 - RNA, 19 nt, Artificial Sequence
  Description of Artificial Sequence: Synthetic oligonucleotide
ccucaugacaggcauuuac

SEQ ID NO: 806007 - RNA, 19 nt, Artificial Sequence
  Description of Artificial Sequence: Synthetic oligonucleotide
guauaucguaauacaaucu

SEQ ID NO: 806008 - RNA, 19 nt, Artificial Sequence
  Description of Artificial Sequence: Synthetic oligonucleotide
cuuaggacauguucaaaau

SEQ ID NO: 806009 - RNA, 19 nt, Artificial Sequence
  Description of Artificial Sequence: Synthetic oligonucleotide
caauaucaucugguagacc

SEQ ID NO: 806010 - RNA, 19 nt, Artificial Sequence
  Description of Artificial Sequence: Synthetic oligonucleotide
aggaucccuuccuugcagu

SEQ ID NO: 806011 - RNA, 19 nt, Artificial Sequence
  Description of Artificial Sequence: Synthetic oligonucleotide
caaucgagguucaacacau

SEQ ID NO: 806012 - RNA, 19 nt, Artificial Sequence
  Description of Artificial Sequence: Synthetic oligonucleotide
gagacuacaugggucaccu

SEQ ID NO: 806013 - RNA, 19 nt, Artificial Sequence
  Description of Artificial Sequence: Synthetic oligonucleotide
auaauggccagggcaaaua

SEQ ID NO: 806014 - RNA, 19 nt, Artificial Sequence
  Description of Artificial Sequence: Synthetic oligonucleotide
ugacagugucacccucaug

SEQ ID NO: 806015 - RNA, 19 nt, Artificial Sequence
  Description of Artificial Sequence: Synthetic oligonucleotide
ggcaccguagacaucugag

SEQ ID NO: 806016 - RNA, 19 nt, Artificial Sequence
  Description of Artificial Sequence: Synthetic oligonucleotide
acugugacgccuguaguuu

SEQ ID NO: 806017 - RNA, 19 nt, Artificial Sequence
  Description of Artificial Sequence: Synthetic oligonucleotide
agcuauggagcagguacca

SEQ ID NO: 806018 - RNA, 19 nt, Artificial Sequence
  Description of Artificial Sequence: Synthetic oligonucleotide
ccacauaauggccagggca

SEQ ID NO: 806019 - RNA, 19 nt, Artificial Sequence
  Description of Artificial Sequence: Synthetic oligonucleotide
caugauucuuaggacaugu

SEQ ID NO: 806020 - RNA, 19 nt, Artificial Sequence
  Description of Artificial Sequence: Synthetic oligonucleotide
cuauaccagcacccuuggc

SEQ ID NO: 806021 - RNA, 19 nt, Artificial Sequence
  Description of Artificial Sequence: Synthetic oligonucleotide
aggagacuacaugggucac

SEQ ID NO: 806022 - RNA, 19 nt, Artificial Sequence
  Description of Artificial Sequence: Synthetic oligonucleotide
uccccuuagcuuguucaga

SEQ ID NO: 806023 - RNA, 19 nt, Artificial Sequence
  Description of Artificial Sequence: Synthetic oligonucleotide
ggugaaugauuaagauucc

SEQ ID NO: 806024 - RNA, 19 nt, Artificial Sequence
  Description of Artificial Sequence: Synthetic oligonucleotide
ugugagcuaugguuucauu

SEQ ID NO: 806025 - RNA, 19 nt, Artificial Sequence
  Description of Artificial Sequence: Synthetic oligonucleotide
ugacgccuguaguuucaca

SEQ ID NO: 806026 - RNA, 19 nt, Artificial Sequence
  Description of Artificial Sequence: Synthetic oligonucleotide
agcagauaacagaucacua

SEQ ID NO: 806027 - RNA, 19 nt, Artificial Sequence
  Description of Artificial Sequence: Synthetic oligonucleotide
gugcaauccacaaaaguau

SEQ ID NO: 806028 - RNA, 19 nt, Artificial Sequence
  Description of Artificial Sequence: Synthetic oligonucleotide
cugugacgccuguaguuuc

SEQ ID NO: 806029 - RNA, 19 nt, Artificial Sequence
  Description of Artificial Sequence: Synthetic oligonucleotide
ugugcgcacugugacgccu

SEQ ID NO: 806030 - RNA, 19 nt, Artificial Sequence
  Description of Artificial Sequence: Synthetic oligonucleotide
gucagcuaaauguaaucuu

SEQ ID NO: 806031 - RNA, 19 nt, Artificial Sequence
  Description of Artificial Sequence: Synthetic oligonucleotide
ccauggugaaugauuaaga

SEQ ID NO: 806032 - RNA, 19 nt, Artificial Sequence
  Description of Artificial Sequence: Synthetic oligonucleotide
cauacccgugcaauccaca

SEQ ID NO: 806033 - RNA, 19 nt, Artificial Sequence
  Description of Artificial Sequence: Synthetic oligonucleotide
cguuuguaaccucaacaag

SEQ ID NO: 806034 - RNA, 19 nt, Artificial Sequence
  Description of Artificial Sequence: Synthetic oligonucleotide
uagaugcauggcucugcaa

SEQ ID NO: 806035 - RNA, 19 nt, Artificial Sequence
  Description of Artificial Sequence: Synthetic oligonucleotide
gcagauaacagaucacuau

SEQ ID NO: 806036 - RNA, 19 nt, Artificial Sequence
  Description of Artificial Sequence: Synthetic oligonucleotide
ggaggagacuacauggguc

SEQ ID NO: 806037 - RNA, 19 nt, Artificial Sequence
  Description of Artificial Sequence: Synthetic oligonucleotide
guucucacgagggcccuug

SEQ ID NO: 806038 - RNA, 19 nt, Artificial Sequence
  Description of Artificial Sequence: Synthetic oligonucleotide
caggguacacuuacuccca

SEQ ID NO: 806039 - RNA, 19 nt, Artificial Sequence
  Description of Artificial Sequence: Synthetic oligonucleotide
agcaaguaguucauuuaua

SEQ ID NO: 806040 - RNA, 19 nt, Artificial Sequence
  Description of Artificial Sequence: Synthetic oligonucleotide
cccuaaacagagaccgaag

SEQ ID NO: 806041 - RNA, 19 nt, Artificial Sequence
  Description of Artificial Sequence: Synthetic oligonucleotide
gaccgaaguagaccugucu

SEQ ID NO: 806042 - RNA, 19 nt, Artificial Sequence
  Description of Artificial Sequence: Synthetic oligonucleotide
cagugauggaucucguugu

SEQ ID NO: 806043 - RNA, 19 nt, Artificial Sequence
  Description of Artificial Sequence: Synthetic oligonucleotide
acgccuguaguuucacauu

SEQ ID NO: 806044 - RNA, 19 nt, Artificial Sequence
  Description of Artificial Sequence: Synthetic oligonucleotide
guaugauuccaaguucacu

SEQ ID NO: 806045 - RNA, 19 nt, Artificial Sequence
  Description of Artificial Sequence: Synthetic oligonucleotide
gaccugucuucauggugga

SEQ ID NO: 806046 - RNA, 19 nt, Artificial Sequence
  Description of Artificial Sequence: Synthetic oligonucleotide
aaucucaaucgagguucaa

SEQ ID NO: 806047 - RNA, 19 nt, Artificial Sequence
  Description of Artificial Sequence: Synthetic oligonucleotide
gagaccgaaguagaccugu

SEQ ID NO: 806048 - RNA, 19 nt, Artificial Sequence
  Description of Artificial Sequence: Synthetic oligonucleotide
agaccgaaguagaccuguc

SEQ ID NO: 806049 - RNA, 19 nt, Artificial Sequence
  Description of Artificial Sequence: Synthetic oligonucleotide
cgagguucaacacaucuga

SEQ ID NO: 806050 - RNA, 19 nt, Artificial Sequence
  Description of Artificial Sequence: Synthetic oligonucleotide
ccuucguuguuauguauga

SEQ ID NO: 806051 - RNA, 19 nt, Artificial Sequence
  Description of Artificial Sequence: Synthetic oligonucleotide
cagcagauaacagaucacu

SEQ ID NO: 806052 - RNA, 19 nt, Artificial Sequence
  Description of Artificial Sequence: Synthetic oligonucleotide
acucgaucuucaaguauau

SEQ ID NO: 806053 - RNA, 19 nt, Artificial Sequence
  Description of Artificial Sequence: Synthetic oligonucleotide
acaauuccccuuagcuugu

SEQ ID NO: 806054 - RNA, 19 nt, Artificial Sequence
  Description of Artificial Sequence: Synthetic oligonucleotide
agugcucaacuuagauuca

SEQ ID NO: 806055 - RNA, 19 nt, Artificial Sequence
  Description of Artificial Sequence: Synthetic oligonucleotide
cacuacugccuucagggcu

SEQ ID NO: 806056 - RNA, 19 nt, Artificial Sequence
  Description of Artificial Sequence: Synthetic oligonucleotide
cucacgagggcccuuggcu

SEQ ID NO: 806057 - RNA, 19 nt, Artificial Sequence
  Description of Artificial Sequence: Synthetic oligonucleotide
agaucacuauggaacugaa

SEQ ID NO: 806058 - RNA, 19 nt, Artificial Sequence
  Description of Artificial Sequence: Synthetic oligonucleotide
cuucacguucgccaaggua

SEQ ID NO: 806059 - RNA, 19 nt, Artificial Sequence
  Description of Artificial Sequence: Synthetic oligonucleotide
gucucacuacugccuucag

SEQ ID NO: 806060 - RNA, 19 nt, Artificial Sequence
  Description of Artificial Sequence: Synthetic oligonucleotide
cucgaucuucaaguauauc

SEQ ID NO: 806061 - RNA, 19 nt, Artificial Sequence
  Description of Artificial Sequence: Synthetic oligonucleotide
gcuuggauauuagaguucu

SEQ ID NO: 806062 - RNA, 19 nt, Artificial Sequence
  Description of Artificial Sequence: Synthetic oligonucleotide
ugcgcacugugacgccugu

SEQ ID NO: 806063 - RNA, 19 nt, Artificial Sequence
  Description of Artificial Sequence: Synthetic oligonucleotide
caauggagucagcuaugga

SEQ ID NO: 806064 - RNA, 19 nt, Artificial Sequence
  Description of Artificial Sequence: Synthetic oligonucleotide
agagaccgaaguagaccug

SEQ ID NO: 806065 - RNA, 19 nt, Artificial Sequence
  Description of Artificial Sequence: Synthetic oligonucleotide
gaaguagaccugucuucau

SEQ ID NO: 806066 - RNA, 19 nt, Artificial Sequence
  Description of Artificial Sequence: Synthetic oligonucleotide
ggcugaaaaguccacguuu

SEQ ID NO: 806067 - RNA, 19 nt, Artificial Sequence
  Description of Artificial Sequence: Synthetic oligonucleotide
ccacuuaaacugguuuccc

SEQ ID NO: 806068 - RNA, 19 nt, Artificial Sequence
  Description of Artificial Sequence: Synthetic oligonucleotide
acgagggcccuuggcuugg

SEQ ID NO: 806069 - RNA, 19 nt, Artificial Sequence
  Description of Artificial Sequence: Synthetic oligonucleotide
caccguagacaucugaguu

SEQ ID NO: 806070 - RNA, 19 nt, Artificial Sequence
  Description of Artificial Sequence: Synthetic oligonucleotide
guagaccugucuucauggu

SEQ ID NO: 806071 - RNA, 19 nt, Artificial Sequence
  Description of Artificial Sequence: Synthetic oligonucleotide
cgccuguaguuucacauug

SEQ ID NO: 806072 - RNA, 19 nt, Artificial Sequence
  Description of Artificial Sequence: Synthetic oligonucleotide
guacacuuacucccaggau

SEQ ID NO: 806073 - RNA, 19 nt, Artificial Sequence
  Description of Artificial Sequence: Synthetic oligonucleotide
caaacacguuagugugcca

SEQ ID NO: 806074 - RNA, 19 nt, Artificial Sequence
  Description of Artificial Sequence: Synthetic oligonucleotide
ccauacccgugcaauccac

SEQ ID NO: 806075 - RNA, 19 nt, Artificial Sequence
  Description of Artificial Sequence: Synthetic oligonucleotide
gcaugauucuuaggacaug

SEQ ID NO: 806076 - RNA, 19 nt, Artificial Sequence
  Description of Artificial Sequence: Synthetic oligonucleotide
gcaauccacaaaaguaucu

SEQ ID NO: 806077 - RNA, 19 nt, Artificial Sequence
  Description of Artificial Sequence: Synthetic oligonucleotide
cacugugacgccuguaguu

SEQ ID NO: 806078 - RNA, 19 nt, Artificial Sequence
  Description of Artificial Sequence: Synthetic oligonucleotide
ccacguuuguaaccucaac

SEQ ID NO: 806079 - RNA, 19 nt, Artificial Sequence
  Description of Artificial Sequence: Synthetic oligonucleotide
gugacgccuguaguuucac

SEQ ID NO: 806080 - RNA, 19 nt, Artificial Sequence
  Description of Artificial Sequence: Synthetic oligonucleotide
cccgugcaauccacaaaag

SEQ ID NO: 806081 - RNA, 19 nt, Artificial Sequence
  Description of Artificial Sequence: Synthetic oligonucleotide
ccagaucuaauccuucagu

SEQ ID NO: 806082 - RNA, 19 nt, Artificial Sequence
  Description of Artificial Sequence: Synthetic oligonucleotide
uggcacccgccucucuauu

SEQ ID NO: 806083 - RNA, 19 nt, Artificial Sequence
  Description of Artificial Sequence: Synthetic oligonucleotide
gcucugcaagucucacuac

SEQ ID NO: 806084 - RNA, 19 nt, Artificial Sequence
  Description of Artificial Sequence: Synthetic oligonucleotide
gugcgcacugugacgccug

SEQ ID NO: 806085 - RNA, 19 nt, Artificial Sequence
  Description of Artificial Sequence: Synthetic oligonucleotide
ccccuuagcuuguucagaa

SEQ ID NO: 806086 - RNA, 19 nt, Artificial Sequence
  Description of Artificial Sequence: Synthetic oligonucleotide
cacguuagugugccagacu

SEQ ID NO: 806087 - RNA, 19 nt, Artificial Sequence
  Description of Artificial Sequence: Synthetic oligonucleotide
gucccuaaacagagaccga

SEQ ID NO: 806088 - RNA, 19 nt, Artificial Sequence
  Description of Artificial Sequence: Synthetic oligonucleotide
gucagcuauggagcaggua

SEQ ID NO: 806089 - RNA, 19 nt, Artificial Sequence
  Description of Artificial Sequence: Synthetic oligonucleotide
cuucguuguuauguaugau

SEQ ID NO: 806090 - RNA, 19 nt, Artificial Sequence
  Description of Artificial Sequence: Synthetic oligonucleotide
ccguagacaucugaguucu

SEQ ID NO: 806091 - RNA, 19 nt, Artificial Sequence
  Description of Artificial Sequence: Synthetic oligonucleotide
cuuggauauuagaguucuu

SEQ ID NO: 806092 - RNA, 19 nt, Artificial Sequence
  Description of Artificial Sequence: Synthetic oligonucleotide
ccgugcaauccacaaaagu

SEQ ID NO: 806093 - RNA, 19 nt, Artificial Sequence
  Description of Artificial Sequence: Synthetic oligonucleotide
cguucgccaagguaaaagu

SEQ ID NO: 806094 - RNA, 19 nt, Artificial Sequence
  Description of Artificial Sequence: Synthetic oligonucleotide
guggcacccgccucucuau

SEQ ID NO: 806095 - RNA, 19 nt, Artificial Sequence
  Description of Artificial Sequence: Synthetic oligonucleotide
cacguucgccaagguaaaa

SEQ ID NO: 806096 - RNA, 19 nt, Artificial Sequence
  Description of Artificial Sequence: Synthetic oligonucleotide
gcccuuggcuuggauauua

SEQ ID NO: 806097 - RNA, 19 nt, Artificial Sequence
  Description of Artificial Sequence: Synthetic oligonucleotide
gggcugaaaaguccacguu

SEQ ID NO: 806098 - RNA, 19 nt, Artificial Sequence
  Description of Artificial Sequence: Synthetic oligonucleotide
cacuuacucccaggauaua

SEQ ID NO: 806099 - RNA, 19 nt, Artificial Sequence
  Description of Artificial Sequence: Synthetic oligonucleotide
cguggaagaaagcuccauu

SEQ ID NO: 806100 - RNA, 19 nt, Artificial Sequence
  Description of Artificial Sequence: Synthetic oligonucleotide
gccuuacagucagcuaaau

SEQ ID NO: 806101 - RNA, 19 nt, Artificial Sequence
  Description of Artificial Sequence: Synthetic oligonucleotide
caauuccccuuagcuuguu

SEQ ID NO: 806102 - RNA, 19 nt, Artificial Sequence
  Description of Artificial Sequence: Synthetic oligonucleotide
ccguggaagaaagcuccau

SEQ ID NO: 806103 - RNA, 19 nt, Artificial Sequence
  Description of Artificial Sequence: Synthetic oligonucleotide
gcgcacugugacgccugua

SEQ ID NO: 806104 - RNA, 19 nt, Artificial Sequence
  Description of Artificial Sequence: Synthetic oligonucleotide
agacauaucaccuagacug

SEQ ID NO: 806105 - RNA, 19 nt, Artificial Sequence
  Description of Artificial Sequence: Synthetic oligonucleotide
uucggaaccgcucaaaccg

SEQ ID NO: 806106 - RNA, 19 nt, Artificial Sequence
  Description of Artificial Sequence: Synthetic oligonucleotide
uguuagacauaucaccuag

SEQ ID NO: 806107 - RNA, 19 nt, Artificial Sequence
  Description of Artificial Sequence: Synthetic oligonucleotide
ucuguuagacauaucaccu

SEQ ID NO: 806108 - RNA, 19 nt, Artificial Sequence
  Description of Artificial Sequence: Synthetic oligonucleotide
uugucaugcacgauagugg

SEQ ID NO: 806109 - RNA, 19 nt, Artificial Sequence
  Description of Artificial Sequence: Synthetic oligonucleotide
aaggucguucuauucuugc

SEQ ID NO: 806110 - RNA, 19 nt, Artificial Sequence
  Description of Artificial Sequence: Synthetic oligonucleotide
uuagacauaucaccuagac

SEQ ID NO: 806111 - RNA, 19 nt, Artificial Sequence
  Description of Artificial Sequence: Synthetic oligonucleotide
ugucaugcacgauaguggg

SEQ ID NO: 806112 - RNA, 19 nt, Artificial Sequence
  Description of Artificial Sequence: Synthetic oligonucleotide
acaucacucgcacauugcc

SEQ ID NO: 806113 - RNA, 19 nt, Artificial Sequence
  Description of Artificial Sequence: Synthetic oligonucleotide
aucacucgcacauugccac

SEQ ID NO: 806114 - RNA, 19 nt, Artificial Sequence
  Description of Artificial Sequence: Synthetic oligonucleotide
ugaggaccaaccaacaggu

SEQ ID NO: 806115 - RNA, 19 nt, Artificial Sequence
  Description of Artificial Sequence: Synthetic oligonucleotide
auagacagcaacaacaccu

SEQ ID NO: 806116 - RNA, 19 nt, Artificial Sequence
  Description of Artificial Sequence: Synthetic oligonucleotide
aguggggugacaaaacacc

SEQ ID NO: 806117 - RNA, 19 nt, Artificial Sequence
  Description of Artificial Sequence: Synthetic oligonucleotide
acacaaaaggcaccuugcc

SEQ ID NO: 806118 - RNA, 19 nt, Artificial Sequence
  Description of Artificial Sequence: Synthetic oligonucleotide
agucagagcaaacauguca

SEQ ID NO: 806119 - RNA, 19 nt, Artificial Sequence
  Description of Artificial Sequence: Synthetic oligonucleotide
aaggucucaucuugacacc

SEQ ID NO: 806120 - RNA, 19 nt, Artificial Sequence
  Description of Artificial Sequence: Synthetic oligonucleotide
uagcggauugagaaggagg

SEQ ID NO: 806121 - RNA, 19 nt, Artificial Sequence
  Description of Artificial Sequence: Synthetic oligonucleotide
aacaccaagggagggaggg

SEQ ID NO: 806122 - RNA, 19 nt, Artificial Sequence
  Description of Artificial Sequence: Synthetic oligonucleotide
ugucaaauucuucacuggu

SEQ ID NO: 806123 - RNA, 19 nt, Artificial Sequence
  Description of Artificial Sequence: Synthetic oligonucleotide
cugaggaccaaccaacagg

SEQ ID NO: 806124 - RNA, 19 nt, Artificial Sequence
  Description of Artificial Sequence: Synthetic oligonucleotide
agccuuaacaccaagggag

SEQ ID NO: 806125 - RNA, 19 nt, Artificial Sequence
  Description of Artificial Sequence: Synthetic oligonucleotide
aggcaaacagcauaucauc

SEQ ID NO: 806126 - RNA, 19 nt, Artificial Sequence
  Description of Artificial Sequence: Synthetic oligonucleotide
ucuauucuugccaguuggg

SEQ ID NO: 806127 - RNA, 19 nt, Artificial Sequence
  Description of Artificial Sequence: Synthetic oligonucleotide
aggaauagagcaaggaccg

SEQ ID NO: 806128 - RNA, 19 nt, Artificial Sequence
  Description of Artificial Sequence: Synthetic oligonucleotide
agcggauugagaaggaggc

SEQ ID NO: 806129 - RNA, 19 nt, Artificial Sequence
  Description of Artificial Sequence: Synthetic oligonucleotide
gucacaucaggucagcuug

SEQ ID NO: 806130 - RNA, 19 nt, Artificial Sequence
  Description of Artificial Sequence: Synthetic oligonucleotide
agggcggacccauuaaccc

SEQ ID NO: 806131 - RNA, 19 nt, Artificial Sequence
  Description of Artificial Sequence: Synthetic oligonucleotide
ugacuagugucacagccca

SEQ ID NO: 806132 - RNA, 19 nt, Artificial Sequence
  Description of Artificial Sequence: Synthetic oligonucleotide
cacacucucuacaaagucc

SEQ ID NO: 806133 - RNA, 19 nt, Artificial Sequence
  Description of Artificial Sequence: Synthetic oligonucleotide
ucugguguucugcugccgg

SEQ ID NO: 806134 - RNA, 19 nt, Artificial Sequence
  Description of Artificial Sequence: Synthetic oligonucleotide
guaggcucuaucugggugg

SEQ ID NO: 806135 - RNA, 19 nt, Artificial Sequence
  Description of Artificial Sequence: Synthetic oligonucleotide
ucaugcacgauagugggug

SEQ ID NO: 806136 - RNA, 19 nt, Artificial Sequence
  Description of Artificial Sequence: Synthetic oligonucleotide
uguaggcucuaucugggug

SEQ ID NO: 806137 - RNA, 19 nt, Artificial Sequence
  Description of Artificial Sequence: Synthetic oligonucleotide
aaaucaggcgagcugcgga

SEQ ID NO: 806138 - RNA, 19 nt, Artificial Sequence
  Description of Artificial Sequence: Synthetic oligonucleotide
cuugucaugcacgauagug

SEQ ID NO: 806139 - RNA, 19 nt, Artificial Sequence
  Description of Artificial Sequence: Synthetic oligonucleotide
aucagcuucacuggaggcc

SEQ ID NO: 806140 - RNA, 19 nt, Artificial Sequence
  Description of Artificial Sequence: Synthetic oligonucleotide
aaguggggugacaaaacac

SEQ ID NO: 806141 - RNA, 19 nt, Artificial Sequence
  Description of Artificial Sequence: Synthetic oligonucleotide
uaugagagugccaggcccc

SEQ ID NO: 806142 - RNA, 19 nt, Artificial Sequence
  Description of Artificial Sequence: Synthetic oligonucleotide
aggaccaaccaacagguga

SEQ ID NO: 806143 - RNA, 19 nt, Artificial Sequence
  Description of Artificial Sequence: Synthetic oligonucleotide
agguucaacaccuugucau

SEQ ID NO: 806144 - RNA, 19 nt, Artificial Sequence
  Description of Artificial Sequence: Synthetic oligonucleotide
aauuucauggaagcagccu

SEQ ID NO: 806145 - RNA, 19 nt, Artificial Sequence
  Description of Artificial Sequence: Synthetic oligonucleotide
uccgacaucacucgcacau

SEQ ID NO: 806146 - RNA, 19 nt, Artificial Sequence
  Description of Artificial Sequence: Synthetic oligonucleotide
aggucguucuauucuugcc

SEQ ID NO: 806147 - RNA, 19 nt, Artificial Sequence
  Description of Artificial Sequence: Synthetic oligonucleotide
uuaaccccaguucauccca

SEQ ID NO: 806148 - RNA, 19 nt, Artificial Sequence
  Description of Artificial Sequence: Synthetic oligonucleotide
aggucaaucaggucacauc

SEQ ID NO: 806149 - RNA, 19 nt, Artificial Sequence
  Description of Artificial Sequence: Synthetic oligonucleotide
gaugcgugggaugagcucc

SEQ ID NO: 806150 - RNA, 19 nt, Artificial Sequence
  Description of Artificial Sequence: Synthetic oligonucleotide
uagacauaucaccuagacu

SEQ ID NO: 806151 - RNA, 19 nt, Artificial Sequence
  Description of Artificial Sequence: Synthetic oligonucleotide
auggcgcagaaacacauug

SEQ ID NO: 806152 - RNA, 19 nt, Artificial Sequence
  Description of Artificial Sequence: Synthetic oligonucleotide
ucaaaucaggcgagcugcg

SEQ ID NO: 806153 - RNA, 19 nt, Artificial Sequence
  Description of Artificial Sequence: Synthetic oligonucleotide
guaugagagugccaggccc

SEQ ID NO: 806154 - RNA, 19 nt, Artificial Sequence
  Description of Artificial Sequence: Synthetic oligonucleotide
cacauugccacucaccauc

SEQ ID NO: 806155 - RNA, 19 nt, Artificial Sequence
  Description of Artificial Sequence: Synthetic oligonucleotide
guagcuccaggucuguagg

SEQ ID NO: 806156 - RNA, 19 nt, Artificial Sequence
  Description of Artificial Sequence: Synthetic oligonucleotide
uaccugaggaccaaccaac

SEQ ID NO: 806157 - RNA, 19 nt, Artificial Sequence
  Description of Artificial Sequence: Synthetic oligonucleotide
agucauaguggguagcgga

SEQ ID NO: 806158 - RNA, 19 nt, Artificial Sequence
  Description of Artificial Sequence: Synthetic oligonucleotide
uucgcagguccucauagac

SEQ ID NO: 806159 - RNA, 19 nt, Artificial Sequence
  Description of Artificial Sequence: Synthetic oligonucleotide
cuugacaccuagauuggug

SEQ ID NO: 806160 - RNA, 19 nt, Artificial Sequence
  Description of Artificial Sequence: Synthetic oligonucleotide
ggggcuucauauuugaccc

SEQ ID NO: 806161 - RNA, 19 nt, Artificial Sequence
  Description of Artificial Sequence: Synthetic oligonucleotide
aaggcaaacagcauaucau

SEQ ID NO: 806162 - RNA, 19 nt, Artificial Sequence
  Description of Artificial Sequence: Synthetic oligonucleotide
acccauuaaccccaguuca

SEQ ID NO: 806163 - RNA, 19 nt, Artificial Sequence
  Description of Artificial Sequence: Synthetic oligonucleotide
uaucaccuagacuggaagu

SEQ ID NO: 806164 - RNA, 19 nt, Artificial Sequence
  Description of Artificial Sequence: Synthetic oligonucleotide
uguucggaaccgcucaaac

SEQ ID NO: 806165 - RNA, 19 nt, Artificial Sequence
  Description of Artificial Sequence: Synthetic oligonucleotide
cugacuagugucacagccc

SEQ ID NO: 806166 - RNA, 19 nt, Artificial Sequence
  Description of Artificial Sequence: Synthetic oligonucleotide
cucaaaccguucauggcgc

SEQ ID NO: 806167 - RNA, 19 nt, Artificial Sequence
  Description of Artificial Sequence: Synthetic oligonucleotide
auaguggguggauuguucu

SEQ ID NO: 806168 - RNA, 19 nt, Artificial Sequence
  Description of Artificial Sequence: Synthetic oligonucleotide
gacaccuagauuggugagg

SEQ ID NO: 806169 - RNA, 19 nt, Artificial Sequence
  Description of Artificial Sequence: Synthetic oligonucleotide
ugcggaacgcgucagccca

SEQ ID NO: 806170 - RNA, 19 nt, Artificial Sequence
  Description of Artificial Sequence: Synthetic oligonucleotide
ugcacagaauccccaaggu

SEQ ID NO: 806171 - RNA, 19 nt, Artificial Sequence
  Description of Artificial Sequence: Synthetic oligonucleotide
gguaaugucuguuagacau

SEQ ID NO: 806172 - RNA, 19 nt, Artificial Sequence
  Description of Artificial Sequence: Synthetic oligonucleotide
acagaguucuguccggaug

SEQ ID NO: 806173 - RNA, 19 nt, Artificial Sequence
  Description of Artificial Sequence: Synthetic oligonucleotide
accuagauuggugaggucu

SEQ ID NO: 806174 - RNA, 19 nt, Artificial Sequence
  Description of Artificial Sequence: Synthetic oligonucleotide
gaaguggggugacaaaaca

SEQ ID NO: 806175 - RNA, 19 nt, Artificial Sequence
  Description of Artificial Sequence: Synthetic oligonucleotide
ucaggcgagcugcggaacg

SEQ ID NO: 806176 - RNA, 19 nt, Artificial Sequence
  Description of Artificial Sequence: Synthetic oligonucleotide
gucguucuauucuugccag

SEQ ID NO: 806177 - RNA, 19 nt, Artificial Sequence
  Description of Artificial Sequence: Synthetic oligonucleotide
aauagagcaaggaccggga

SEQ ID NO: 806178 - RNA, 19 nt, Artificial Sequence
  Description of Artificial Sequence: Synthetic oligonucleotide
cacgauaguggguggauug

SEQ ID NO: 806179 - RNA, 19 nt, Artificial Sequence
  Description of Artificial Sequence: Synthetic oligonucleotide
ugggaacacaaaaggcacc

SEQ ID NO: 806180 - RNA, 19 nt, Artificial Sequence
  Description of Artificial Sequence: Synthetic oligonucleotide
ucgcugacuagugucacag

SEQ ID NO: 806181 - RNA, 19 nt, Artificial Sequence
  Description of Artificial Sequence: Synthetic oligonucleotide
gacccauuaaccccaguuc

SEQ ID NO: 806182 - RNA, 19 nt, Artificial Sequence
  Description of Artificial Sequence: Synthetic oligonucleotide
ucauggcgcagaaacacau

SEQ ID NO: 806183 - RNA, 19 nt, Artificial Sequence
  Description of Artificial Sequence: Synthetic oligonucleotide
guggguagcggauugagaa

SEQ ID NO: 806184 - RNA, 19 nt, Artificial Sequence
  Description of Artificial Sequence: Synthetic oligonucleotide
aucaccuagacuggaagug

SEQ ID NO: 806185 - RNA, 19 nt, Artificial Sequence
  Description of Artificial Sequence: Synthetic oligonucleotide
ucuccgacaucacucgcac

SEQ ID NO: 806186 - RNA, 19 nt, Artificial Sequence
  Description of Artificial Sequence: Synthetic oligonucleotide
gcugacuagugucacagcc

SEQ ID NO: 806187 - RNA, 19 nt, Artificial Sequence
  Description of Artificial Sequence: Synthetic oligonucleotide
caacaccugucaaaucagg

SEQ ID NO: 806188 - RNA, 19 nt, Artificial Sequence
  Description of Artificial Sequence: Synthetic oligonucleotide
uucauggcgcagaaacaca

SEQ ID NO: 806189 - RNA, 19 nt, Artificial Sequence
  Description of Artificial Sequence: Synthetic oligonucleotide
accaaccaacaggugagcc

SEQ ID NO: 806190 - RNA, 19 nt, Artificial Sequence
  Description of Artificial Sequence: Synthetic oligonucleotide
aaucaggcgagcugcggaa

SEQ ID NO: 806191 - RNA, 19 nt, Artificial Sequence
  Description of Artificial Sequence: Synthetic oligonucleotide
ggaggaauagagcaaggac

SEQ ID NO: 806192 - RNA, 19 nt, Artificial Sequence
  Description of Artificial Sequence: Synthetic oligonucleotide
ugacaccuagauuggugag

SEQ ID NO: 806193 - RNA, 19 nt, Artificial Sequence
  Description of Artificial Sequence: Synthetic oligonucleotide
guucauggcgcagaaacac

SEQ ID NO: 806194 - RNA, 19 nt, Artificial Sequence
  Description of Artificial Sequence: Synthetic oligonucleotide
cauaguggguagcggauug

SEQ ID NO: 806195 - RNA, 19 nt, Artificial Sequence
  Description of Artificial Sequence: Synthetic oligonucleotide
ugcagcuucguaccuggac

SEQ ID NO: 806196 - RNA, 19 nt, Artificial Sequence
  Description of Artificial Sequence: Synthetic oligonucleotide
auagagcaaggaccgggag

SEQ ID NO: 806197 - RNA, 19 nt, Artificial Sequence
  Description of Artificial Sequence: Synthetic oligonucleotide
ucagcuucacuggaggccu

SEQ ID NO: 806198 - RNA, 19 nt, Artificial Sequence
  Description of Artificial Sequence: Synthetic oligonucleotide
ucgcacauugccacucacc

SEQ ID NO: 806199 - RNA, 19 nt, Artificial Sequence
  Description of Artificial Sequence: Synthetic oligonucleotide
ggaauuucauggaagcagc

SEQ ID NO: 806200 - RNA, 19 nt, Artificial Sequence
  Description of Artificial Sequence: Synthetic oligonucleotide
ggugugaugggugagucgc

SEQ ID NO: 806201 - RNA, 19 nt, Artificial Sequence
  Description of Artificial Sequence: Synthetic oligonucleotide
uaacaccaagggagggagg

SEQ ID NO: 806202 - RNA, 19 nt, Artificial Sequence
  Description of Artificial Sequence: Synthetic oligonucleotide
aaaccguucauggcgcaga

SEQ ID NO: 806203 - RNA, 19 nt, Artificial Sequence
  Description of Artificial Sequence: Synthetic oligonucleotide
uggugugaugggugagucg

SEQ ID NO: 806204 - RNA, 19 nt, Artificial Sequence
  Description of Artificial Sequence: Synthetic oligonucleotide
uccucgcugacuaguguca

SEQ ID NO: 806205 - RNA, 19 nt, Artificial Sequence
  Description of Artificial Sequence: Synthetic oligonucleotide
ugccaagagaaggucucgg

SEQ ID NO: 806206 - RNA, 19 nt, Artificial Sequence
  Description of Artificial Sequence: Synthetic oligonucleotide
gcucauuggagaugcgugg

SEQ ID NO: 806207 - RNA, 19 nt, Artificial Sequence
  Description of Artificial Sequence: Synthetic oligonucleotide
auuguggagggcucccaug

SEQ ID NO: 806208 - RNA, 19 nt, Artificial Sequence
  Description of Artificial Sequence: Synthetic oligonucleotide
uccaggugaccugaggucu

SEQ ID NO: 806209 - RNA, 19 nt, Artificial Sequence
  Description of Artificial Sequence: Synthetic oligonucleotide
uggguggauuguucuuugg

SEQ ID NO: 806210 - RNA, 19 nt, Artificial Sequence
  Description of Artificial Sequence: Synthetic oligonucleotide
uguuccccacgucugugga

SEQ ID NO: 806211 - RNA, 19 nt, Artificial Sequence
  Description of Artificial Sequence: Synthetic oligonucleotide
uguggauuguggagggcuc

SEQ ID NO: 806212 - RNA, 19 nt, Artificial Sequence
  Description of Artificial Sequence: Synthetic oligonucleotide
acaccuagauuggugaggu

SEQ ID NO: 806213 - RNA, 19 nt, Artificial Sequence
  Description of Artificial Sequence: Synthetic oligonucleotide
caccugucaaaucaggcga

SEQ ID NO: 806214 - RNA, 19 nt, Artificial Sequence
  Description of Artificial Sequence: Synthetic oligonucleotide
caccaguacauggaagcgg

SEQ ID NO: 806215 - RNA, 19 nt, Artificial Sequence
  Description of Artificial Sequence: Synthetic oligonucleotide
gaacgcgucagcccaggac

SEQ ID NO: 806216 - RNA, 19 nt, Artificial Sequence
  Description of Artificial Sequence: Synthetic oligonucleotide
uaguggguagcggauugag

SEQ ID NO: 806217 - RNA, 19 nt, Artificial Sequence
  Description of Artificial Sequence: Synthetic oligonucleotide
uuggugaggucuugccuca

SEQ ID NO: 806218 - RNA, 19 nt, Artificial Sequence
  Description of Artificial Sequence: Synthetic oligonucleotide
accccuuuccguuggucag

SEQ ID NO: 806219 - RNA, 19 nt, Artificial Sequence
  Description of Artificial Sequence: Synthetic oligonucleotide
augagguucaacaccuugu

SEQ ID NO: 806220 - RNA, 19 nt, Artificial Sequence
  Description of Artificial Sequence: Synthetic oligonucleotide
gcaucuccgacaucacucg

SEQ ID NO: 806221 - RNA, 19 nt, Artificial Sequence
  Description of Artificial Sequence: Synthetic oligonucleotide
uuccccacgucuguggaca

SEQ ID NO: 806222 - RNA, 19 nt, Artificial Sequence
  Description of Artificial Sequence: Synthetic oligonucleotide
caugcacgauagugggugg

SEQ ID NO: 806223 - RNA, 19 nt, Artificial Sequence
  Description of Artificial Sequence: Synthetic oligonucleotide
acugcgcagcuucccaauc

SEQ ID NO: 806224 - RNA, 19 nt, Artificial Sequence
  Description of Artificial Sequence: Synthetic oligonucleotide
uggcgcagaaacacauugu

SEQ ID NO: 806225 - RNA, 19 nt, Artificial Sequence
  Description of Artificial Sequence: Synthetic oligonucleotide
gaccccuuuccguugguca

SEQ ID NO: 806226 - RNA, 19 nt, Artificial Sequence
  Description of Artificial Sequence: Synthetic oligonucleotide
cagcuucguaccuggacag

SEQ ID NO: 806227 - RNA, 19 nt, Artificial Sequence
  Description of Artificial Sequence: Synthetic oligonucleotide
ccguucauggcgcagaaac

SEQ ID NO: 806228 - RNA, 19 nt, Artificial Sequence
  Description of Artificial Sequence: Synthetic oligonucleotide
gagggcggacccauuaacc

SEQ ID NO: 806229 - RNA, 19 nt, Artificial Sequence
  Description of Artificial Sequence: Synthetic oligonucleotide
uaggcucuaucuggguggg

SEQ ID NO: 806230 - RNA, 19 nt, Artificial Sequence
  Description of Artificial Sequence: Synthetic oligonucleotide
uccagcgacugcaggccag

SEQ ID NO: 806231 - RNA, 19 nt, Artificial Sequence
  Description of Artificial Sequence: Synthetic oligonucleotide
gaguuggugugauggguga

SEQ ID NO: 806232 - RNA, 19 nt, Artificial Sequence
  Description of Artificial Sequence: Synthetic oligonucleotide
ucuaucugggugggcacca

SEQ ID NO: 806233 - RNA, 19 nt, Artificial Sequence
  Description of Artificial Sequence: Synthetic oligonucleotide
ggucguucuauucuugcca

SEQ ID NO: 806234 - RNA, 19 nt, Artificial Sequence
  Description of Artificial Sequence: Synthetic oligonucleotide
caaggucguucuauucuug

SEQ ID NO: 806235 - RNA, 19 nt, Artificial Sequence
  Description of Artificial Sequence: Synthetic oligonucleotide
ggaccaaccaacaggugag

SEQ ID NO: 806236 - RNA, 19 nt, Artificial Sequence
  Description of Artificial Sequence: Synthetic oligonucleotide
ucacaucaggucagcuugu

SEQ ID NO: 806237 - RNA, 19 nt, Artificial Sequence
  Description of Artificial Sequence: Synthetic oligonucleotide
gaucgcucugguguucugc

SEQ ID NO: 806238 - RNA, 19 nt, Artificial Sequence
  Description of Artificial Sequence: Synthetic oligonucleotide
caccuagacuggaagugug

SEQ ID NO: 806239 - RNA, 19 nt, Artificial Sequence
  Description of Artificial Sequence: Synthetic oligonucleotide
caacauguccaggucaguc

SEQ ID NO: 806240 - RNA, 19 nt, Artificial Sequence
  Description of Artificial Sequence: Synthetic oligonucleotide
agcugcggaacgcgucagc

SEQ ID NO: 806241 - RNA, 19 nt, Artificial Sequence
  Description of Artificial Sequence: Synthetic oligonucleotide
cuccucgcugacuaguguc

SEQ ID NO: 806242 - RNA, 19 nt, Artificial Sequence
  Description of Artificial Sequence: Synthetic oligonucleotide
ucuccucgcugacuagugu

SEQ ID NO: 806243 - RNA, 19 nt, Artificial Sequence
  Description of Artificial Sequence: Synthetic oligonucleotide
ggguggauuguucuuuggc

SEQ ID NO: 806244 - RNA, 19 nt, Artificial Sequence
  Description of Artificial Sequence: Synthetic oligonucleotide
caaaucaggcgagcugcgg

SEQ ID NO: 806245 - RNA, 19 nt, Artificial Sequence
  Description of Artificial Sequence: Synthetic oligonucleotide
gaugggugagucgcccggg

SEQ ID NO: 806246 - RNA, 19 nt, Artificial Sequence
  Description of Artificial Sequence: Synthetic oligonucleotide
accuagacuggaagugugg

SEQ ID NO: 806247 - RNA, 19 nt, Artificial Sequence
  Description of Artificial Sequence: Synthetic oligonucleotide
aaccgcucaaaccguucau

SEQ ID NO: 806248 - RNA, 19 nt, Artificial Sequence
  Description of Artificial Sequence: Synthetic oligonucleotide
ucaaaccguucauggcgca

SEQ ID NO: 806249 - RNA, 19 nt, Artificial Sequence
  Description of Artificial Sequence: Synthetic oligonucleotide
ggugcgguugaguuccugc

SEQ ID NO: 806250 - RNA, 19 nt, Artificial Sequence
  Description of Artificial Sequence: Synthetic oligonucleotide
guagcggauugagaaggag

SEQ ID NO: 806251 - RNA, 19 nt, Artificial Sequence
  Description of Artificial Sequence: Synthetic oligonucleotide
guaccugaggaccaaccaa

SEQ ID NO: 806252 - RNA, 19 nt, Artificial Sequence
  Description of Artificial Sequence: Synthetic oligonucleotide
ucggaaccgcucaaaccgu

SEQ ID NO: 806253 - RNA, 19 nt, Artificial Sequence
  Description of Artificial Sequence: Synthetic oligonucleotide
cacgucuguggacagccac

SEQ ID NO: 806254 - RNA, 19 nt, Artificial Sequence
  Description of Artificial Sequence: Synthetic oligonucleotide
caucacucgcacauugcca

SEQ ID NO: 806255 - RNA, 19 nt, Artificial Sequence
  Description of Artificial Sequence: Synthetic oligonucleotide
agagaaguggggugacaaa

SEQ ID NO: 806256 - RNA, 19 nt, Artificial Sequence
  Description of Artificial Sequence: Synthetic oligonucleotide
ugagucgcccgggaggaca

SEQ ID NO: 806257 - RNA, 19 nt, Artificial Sequence
  Description of Artificial Sequence: Synthetic oligonucleotide
gcugccccgagucagagca

SEQ ID NO: 806258 - RNA, 19 nt, Artificial Sequence
  Description of Artificial Sequence: Synthetic oligonucleotide
gacccgcugcugcauggcg

SEQ ID NO: 806259 - RNA, 19 nt, Artificial Sequence
  Description of Artificial Sequence: Synthetic oligonucleotide
uccggauggugucucugaa

SEQ ID NO: 806260 - RNA, 19 nt, Artificial Sequence
  Description of Artificial Sequence: Synthetic oligonucleotide
guggguggauuguucuuug

SEQ ID NO: 806261 - RNA, 19 nt, Artificial Sequence
  Description of Artificial Sequence: Synthetic oligonucleotide
accccaguucaucccacug

SEQ ID NO: 806262 - RNA, 19 nt, Artificial Sequence
  Description of Artificial Sequence: Synthetic oligonucleotide
cucaucuugacaccuagau

SEQ ID NO: 806263 - RNA, 19 nt, Artificial Sequence
  Description of Artificial Sequence: Synthetic oligonucleotide
cuauucuugccaguuggga

SEQ ID NO: 806264 - RNA, 19 nt, Artificial Sequence
  Description of Artificial Sequence: Synthetic oligonucleotide
cauaucaccuagacuggaa

SEQ ID NO: 806265 - RNA, 19 nt, Artificial Sequence
  Description of Artificial Sequence: Synthetic oligonucleotide
gcagcuucguaccuggaca

SEQ ID NO: 806266 - RNA, 19 nt, Artificial Sequence
  Description of Artificial Sequence: Synthetic oligonucleotide
acauaucaccuagacugga

SEQ ID NO: 806267 - RNA, 19 nt, Artificial Sequence
  Description of Artificial Sequence: Synthetic oligonucleotide
uggccuguucggaaccgcu

SEQ ID NO: 806268 - RNA, 19 nt, Artificial Sequence
  Description of Artificial Sequence: Synthetic oligonucleotide
cuuccgaggagcugugcca

SEQ ID NO: 806269 - RNA, 19 nt, Artificial Sequence
  Description of Artificial Sequence: Synthetic oligonucleotide
ugggcgaggcuugugguaa

SEQ ID NO: 806270 - RNA, 19 nt, Artificial Sequence
  Description of Artificial Sequence: Synthetic oligonucleotide
guucuguccggaugguguc

SEQ ID NO: 806271 - RNA, 19 nt, Artificial Sequence
  Description of Artificial Sequence: Synthetic oligonucleotide
aguuggugugaugggugag

SEQ ID NO: 806272 - RNA, 19 nt, Artificial Sequence
  Description of Artificial Sequence: Synthetic oligonucleotide
caccccaacagccagccaa

SEQ ID NO: 806273 - RNA, 19 nt, Artificial Sequence
  Description of Artificial Sequence: Synthetic oligonucleotide
ucguucuauucuugccagu

SEQ ID NO: 806274 - RNA, 19 nt, Artificial Sequence
  Description of Artificial Sequence: Synthetic oligonucleotide
augagagugccaggccccg

SEQ ID NO: 806275 - RNA, 19 nt, Artificial Sequence
  Description of Artificial Sequence: Synthetic oligonucleotide
aggucucaucuugacaccu

SEQ ID NO: 806276 - RNA, 19 nt, Artificial Sequence
  Description of Artificial Sequence: Synthetic oligonucleotide
uguccggauggugucucug

SEQ ID NO: 806277 - RNA, 19 nt, Artificial Sequence
  Description of Artificial Sequence: Synthetic oligonucleotide
ggaguuggugugaugggug

SEQ ID NO: 806278 - RNA, 19 nt, Artificial Sequence
  Description of Artificial Sequence: Synthetic oligonucleotide
gcagggaucgcucuggugu

SEQ ID NO: 806279 - RNA, 19 nt, Artificial Sequence
  Description of Artificial Sequence: Synthetic oligonucleotide
aggacccaugucaaucaag

SEQ ID NO: 806280 - RNA, 19 nt, Artificial Sequence
  Description of Artificial Sequence: Synthetic oligonucleotide
gccuuaacaccaagggagg

SEQ ID NO: 806281 - RNA, 19 nt, Artificial Sequence
  Description of Artificial Sequence: Synthetic oligonucleotide
cuagauuggugaggucuug

SEQ ID NO: 806282 - RNA, 19 nt, Artificial Sequence
  Description of Artificial Sequence: Synthetic oligonucleotide
ccuucgcagguccucauag

SEQ ID NO: 806283 - RNA, 19 nt, Artificial Sequence
  Description of Artificial Sequence: Synthetic oligonucleotide
caccuugucaugcacgaua

SEQ ID NO: 806284 - RNA, 19 nt, Artificial Sequence
  Description of Artificial Sequence: Synthetic oligonucleotide
caaaccguucauggcgcag

SEQ ID NO: 806285 - RNA, 19 nt, Artificial Sequence
  Description of Artificial Sequence: Synthetic oligonucleotide
cagucaggaucccagcgga

SEQ ID NO: 806286 - RNA, 19 nt, Artificial Sequence
  Description of Artificial Sequence: Synthetic oligonucleotide
acgauaguggguggauugu

SEQ ID NO: 806287 - RNA, 19 nt, Artificial Sequence
  Description of Artificial Sequence: Synthetic oligonucleotide
aucuccgacaucacucgca

SEQ ID NO: 806288 - RNA, 19 nt, Artificial Sequence
  Description of Artificial Sequence: Synthetic oligonucleotide
gccaccauugcccacccca

SEQ ID NO: 806289 - RNA, 19 nt, Artificial Sequence
  Description of Artificial Sequence: Synthetic oligonucleotide
aaggaccgggaggcagugg

SEQ ID NO: 806290 - RNA, 19 nt, Artificial Sequence
  Description of Artificial Sequence: Synthetic oligonucleotide
acucgcacauugccacuca

SEQ ID NO: 806291 - RNA, 19 nt, Artificial Sequence
  Description of Artificial Sequence: Synthetic oligonucleotide
uuccgaggagcugugccaa

SEQ ID NO: 806292 - RNA, 19 nt, Artificial Sequence
  Description of Artificial Sequence: Synthetic oligonucleotide
ucccaguggguaugagagu

SEQ ID NO: 806293 - RNA, 19 nt, Artificial Sequence
  Description of Artificial Sequence: Synthetic oligonucleotide
ugagagugccaggccccgg

SEQ ID NO: 806294 - RNA, 19 nt, Artificial Sequence
  Description of Artificial Sequence: Synthetic oligonucleotide
cagggaugggcgaggcuug

SEQ ID NO: 806295 - RNA, 19 nt, Artificial Sequence
  Description of Artificial Sequence: Synthetic oligonucleotide
ugcacgauaguggguggau

SEQ ID NO: 806296 - RNA, 19 nt, Artificial Sequence
  Description of Artificial Sequence: Synthetic oligonucleotide
ugggugcagcuucguaccu

SEQ ID NO: 806297 - RNA, 19 nt, Artificial Sequence
  Description of Artificial Sequence: Synthetic oligonucleotide
uccgaggagcugugccaag

SEQ ID NO: 806298 - RNA, 19 nt, Artificial Sequence
  Description of Artificial Sequence: Synthetic oligonucleotide
gggcggacccauuaacccc

SEQ ID NO: 806299 - RNA, 19 nt, Artificial Sequence
  Description of Artificial Sequence: Synthetic oligonucleotide
agggaucccaguggguaug

SEQ ID NO: 806300 - RNA, 19 nt, Artificial Sequence
  Description of Artificial Sequence: Synthetic oligonucleotide
cucgcacauugccacucac

SEQ ID NO: 806301 - RNA, 19 nt, Artificial Sequence
  Description of Artificial Sequence: Synthetic oligonucleotide
auaguggguagcggauuga

SEQ ID NO: 806302 - RNA, 19 nt, Artificial Sequence
  Description of Artificial Sequence: Synthetic oligonucleotide
uccuucgcagguccucaua

SEQ ID NO: 806303 - RNA, 19 nt, Artificial Sequence
  Description of Artificial Sequence: Synthetic oligonucleotide
gaccugaggucuccagcga

SEQ ID NO: 806304 - RNA, 19 nt, Artificial Sequence
  Description of Artificial Sequence: Synthetic oligonucleotide
aguggguagcggauugaga

SEQ ID NO: 806305 - RNA, 19 nt, Artificial Sequence
  Description of Artificial Sequence: Synthetic oligonucleotide
agaauccccaaggucucau

SEQ ID NO: 806306 - RNA, 19 nt, Artificial Sequence
  Description of Artificial Sequence: Synthetic oligonucleotide
gcaggaccagucaggaucc

SEQ ID NO: 806307 - RNA, 19 nt, Artificial Sequence
  Description of Artificial Sequence: Synthetic oligonucleotide
ccugaggaccaaccaacag

SEQ ID NO: 806308 - RNA, 19 nt, Artificial Sequence
  Description of Artificial Sequence: Synthetic oligonucleotide
ggagggcggacccauuaac

SEQ ID NO: 806309 - RNA, 19 nt, Artificial Sequence
  Description of Artificial Sequence: Synthetic oligonucleotide
aggcgagcugcggaacgcg

SEQ ID NO: 806310 - RNA, 19 nt, Artificial Sequence
  Description of Artificial Sequence: Synthetic oligonucleotide
cuucgcagguccucauaga

SEQ ID NO: 806311 - RNA, 19 nt, Artificial Sequence
  Description of Artificial Sequence: Synthetic oligonucleotide
gagucgcccgggaggacag

SEQ ID NO: 806312 - RNA, 19 nt, Artificial Sequence
  Description of Artificial Sequence: Synthetic oligonucleotide
ggcucuaucugggugggca

SEQ ID NO: 806313 - RNA, 19 nt, Artificial Sequence
  Description of Artificial Sequence: Synthetic oligonucleotide
uccccacgucuguggacag

SEQ ID NO: 806314 - RNA, 19 nt, Artificial Sequence
  Description of Artificial Sequence: Synthetic oligonucleotide
ccuuaacaccaagggaggg

SEQ ID NO: 806315 - RNA, 19 nt, Artificial Sequence
  Description of Artificial Sequence: Synthetic oligonucleotide
augggcgaggcuuguggua

SEQ ID NO: 806316 - RNA, 19 nt, Artificial Sequence
  Description of Artificial Sequence: Synthetic oligonucleotide
gauuguggagggcucccau

SEQ ID NO: 806317 - RNA, 19 nt, Artificial Sequence
  Description of Artificial Sequence: Synthetic oligonucleotide
gaggaccaaccaacaggug

SEQ ID NO: 806318 - RNA, 19 nt, Artificial Sequence
  Description of Artificial Sequence: Synthetic oligonucleotide
cacucgcacauugccacuc

SEQ ID NO: 806319 - RNA, 19 nt, Artificial Sequence
  Description of Artificial Sequence: Synthetic oligonucleotide
uugaccccuuuccguuggu

SEQ ID NO: 806320 - RNA, 19 nt, Artificial Sequence
  Description of Artificial Sequence: Synthetic oligonucleotide
caggugaccugaggucucc

SEQ ID NO: 806321 - RNA, 19 nt, Artificial Sequence
  Description of Artificial Sequence: Synthetic oligonucleotide
agucaggaucccagcggag

SEQ ID NO: 806322 - RNA, 19 nt, Artificial Sequence
  Description of Artificial Sequence: Synthetic oligonucleotide
cuugccaguugggaugaga

SEQ ID NO: 806323 - RNA, 19 nt, Artificial Sequence
  Description of Artificial Sequence: Synthetic oligonucleotide
guaaugucuguuagacaua

SEQ ID NO: 806324 - RNA, 19 nt, Artificial Sequence
  Description of Artificial Sequence: Synthetic oligonucleotide
gccaaggucguucuauucu

SEQ ID NO: 806325 - RNA, 19 nt, Artificial Sequence
  Description of Artificial Sequence: Synthetic oligonucleotide
gcgcagaaacacauuguug

SEQ ID NO: 806326 - RNA, 19 nt, Artificial Sequence
  Description of Artificial Sequence: Synthetic oligonucleotide
caggcgagcugcggaacgc

SEQ ID NO: 806327 - RNA, 19 nt, Artificial Sequence
  Description of Artificial Sequence: Synthetic oligonucleotide
uggcccguucuuccaggaa

SEQ ID NO: 806328 - RNA, 19 nt, Artificial Sequence
  Description of Artificial Sequence: Synthetic oligonucleotide
cccacgucuguggacagcc

SEQ ID NO: 806329 - RNA, 19 nt, Artificial Sequence
  Description of Artificial Sequence: Synthetic oligonucleotide
cuugccucacugggugcag

SEQ ID NO: 806330 - RNA, 19 nt, Artificial Sequence
  Description of Artificial Sequence: Synthetic oligonucleotide
gcauaucaucaucuuucuc

SEQ ID NO: 806331 - RNA, 19 nt, Artificial Sequence
  Description of Artificial Sequence: Synthetic oligonucleotide
gcgacugcaggccagcucu

SEQ ID NO: 806332 - RNA, 19 nt, Artificial Sequence
  Description of Artificial Sequence: Synthetic oligonucleotide
cacaucaggucagcuuguc

SEQ ID NO: 806333 - RNA, 19 nt, Artificial Sequence
  Description of Artificial Sequence: Synthetic oligonucleotide
gggcuucauauuugacccc

SEQ ID NO: 806334 - RNA, 19 nt, Artificial Sequence
  Description of Artificial Sequence: Synthetic oligonucleotide
ccaguggguaugagagugc

SEQ ID NO: 806335 - RNA, 19 nt, Artificial Sequence
  Description of Artificial Sequence: Synthetic oligonucleotide
caacagccagccaaagccu

SEQ ID NO: 806336 - RNA, 19 nt, Artificial Sequence
  Description of Artificial Sequence: Synthetic oligonucleotide
cuaucugggugggcaccag

SEQ ID NO: 806337 - RNA, 19 nt, Artificial Sequence
  Description of Artificial Sequence: Synthetic oligonucleotide
gccuguucggaaccgcuca

SEQ ID NO: 806338 - RNA, 19 nt, Artificial Sequence
  Description of Artificial Sequence: Synthetic oligonucleotide
gcuggagccaaggucguuc

SEQ ID NO: 806339 - RNA, 19 nt, Artificial Sequence
  Description of Artificial Sequence: Synthetic oligonucleotide
gagcugcggaacgcgucag

SEQ ID NO: 806340 - RNA, 19 nt, Artificial Sequence
  Description of Artificial Sequence: Synthetic oligonucleotide
cuggccuguucggaaccgc

SEQ ID NO: 806341 - RNA, 19 nt, Artificial Sequence
  Description of Artificial Sequence: Synthetic oligonucleotide
cgcacauugccacucacca

SEQ ID NO: 806342 - RNA, 19 nt, Artificial Sequence
  Description of Artificial Sequence: Synthetic oligonucleotide
gugugaugggugagucgcc

SEQ ID NO: 806343 - RNA, 19 nt, Artificial Sequence
  Description of Artificial Sequence: Synthetic oligonucleotide
gacuagugucacagcccac

SEQ ID NO: 806344 - RNA, 19 nt, Artificial Sequence
  Description of Artificial Sequence: Synthetic oligonucleotide
ggcgaucagcagcuuuggc

SEQ ID NO: 806345 - RNA, 19 nt, Artificial Sequence
  Description of Artificial Sequence: Synthetic oligonucleotide
aggcucuaucugggugggc

SEQ ID NO: 806346 - RNA, 19 nt, Artificial Sequence
  Description of Artificial Sequence: Synthetic oligonucleotide
gcucuaucugggugggcac

SEQ ID NO: 806347 - RNA, 19 nt, Artificial Sequence
  Description of Artificial Sequence: Synthetic oligonucleotide
ggacccauuaaccccaguu

SEQ ID NO: 806348 - RNA, 19 nt, Artificial Sequence
  Description of Artificial Sequence: Synthetic oligonucleotide
cgcucaaaccguucauggc

SEQ ID NO: 806349 - RNA, 19 nt, Artificial Sequence
  Description of Artificial Sequence: Synthetic oligonucleotide
gagggaucccaguggguau

SEQ ID NO: 806350 - RNA, 19 nt, Artificial Sequence
  Description of Artificial Sequence: Synthetic oligonucleotide
ugcgugggaugagcuccag

SEQ ID NO: 806351 - RNA, 19 nt, Artificial Sequence
  Description of Artificial Sequence: Synthetic oligonucleotide
ggcgcagaaacacauuguu

SEQ ID NO: 806352 - RNA, 19 nt, Artificial Sequence
  Description of Artificial Sequence: Synthetic oligonucleotide
gcgugggaugagcuccagg

SEQ ID NO: 806353 - RNA, 19 nt, Artificial Sequence
  Description of Artificial Sequence: Synthetic oligonucleotide
cagccucacaccaggucaa

SEQ ID NO: 806354 - RNA, 19 nt, Artificial Sequence
  Description of Artificial Sequence: Synthetic oligonucleotide
ggcggacccauuaacccca

SEQ ID NO: 806355 - RNA, 19 nt, Artificial Sequence
  Description of Artificial Sequence: Synthetic oligonucleotide
caccuagauuggugagguc

SEQ ID NO: 806356 - RNA, 19 nt, Artificial Sequence
  Description of Artificial Sequence: Synthetic oligonucleotide
gucauaguggguagcggau

SEQ ID NO: 806357 - RNA, 19 nt, Artificial Sequence
  Description of Artificial Sequence: Synthetic oligonucleotide
cgaggcuugugguaauguc

SEQ ID NO: 806358 - RNA, 19 nt, Artificial Sequence
  Description of Artificial Sequence: Synthetic oligonucleotide
ccuagacuggaagugugga

SEQ ID NO: 806359 - RNA, 19 nt, Artificial Sequence
  Description of Artificial Sequence: Synthetic oligonucleotide
acgcgucagcccaggacug

SEQ ID NO: 806360 - RNA, 19 nt, Artificial Sequence
  Description of Artificial Sequence: Synthetic oligonucleotide
ggaaccgcucaaaccguuc

SEQ ID NO: 806361 - RNA, 19 nt, Artificial Sequence
  Description of Artificial Sequence: Synthetic oligonucleotide
ucccagcggagggcggacc

SEQ ID NO: 806362 - RNA, 19 nt, Artificial Sequence
  Description of Artificial Sequence: Synthetic oligonucleotide
cuggagccaaggucguucu

SEQ ID NO: 806363 - RNA, 19 nt, Artificial Sequence
  Description of Artificial Sequence: Synthetic oligonucleotide
uggugaggucuugccucac

SEQ ID NO: 806364 - RNA, 19 nt, Artificial Sequence
  Description of Artificial Sequence: Synthetic oligonucleotide
ggaaccaggggaauuucau

SEQ ID NO: 806365 - RNA, 19 nt, Artificial Sequence
  Description of Artificial Sequence: Synthetic oligonucleotide
gacuggaaguguggauugu

SEQ ID NO: 806366 - RNA, 19 nt, Artificial Sequence
  Description of Artificial Sequence: Synthetic oligonucleotide
gguguguggaugggugaca

SEQ ID NO: 806367 - RNA, 19 nt, Artificial Sequence
  Description of Artificial Sequence: Synthetic oligonucleotide
ccaaccaacaggugagccu

SEQ ID NO: 806368 - RNA, 19 nt, Artificial Sequence
  Description of Artificial Sequence: Synthetic oligonucleotide
gggguggcaugcuggcuca

SEQ ID NO: 806369 - RNA, 19 nt, Artificial Sequence
  Description of Artificial Sequence: Synthetic oligonucleotide
cuccgacaucacucgcaca

SEQ ID NO: 806370 - RNA, 19 nt, Artificial Sequence
  Description of Artificial Sequence: Synthetic oligonucleotide
ggcgcggcaggugcgguug

SEQ ID NO: 806371 - RNA, 19 nt, Artificial Sequence
  Description of Artificial Sequence: Synthetic oligonucleotide
gcgguugaguuccugcagu

SEQ ID NO: 806372 - RNA, 19 nt, Artificial Sequence
  Description of Artificial Sequence: Synthetic oligonucleotide
cccagcggagggcggaccc

SEQ ID NO: 806373 - RNA, 19 nt, Artificial Sequence
  Description of Artificial Sequence: Synthetic oligonucleotide
aggugaccugaggucucca

SEQ ID NO: 806374 - RNA, 19 nt, Artificial Sequence
  Description of Artificial Sequence: Synthetic oligonucleotide
ggcgaggcuugugguaaug

SEQ ID NO: 806375 - RNA, 19 nt, Artificial Sequence
  Description of Artificial Sequence: Synthetic oligonucleotide
gccuugccagucuggccug

SEQ ID NO: 806376 - RNA, 19 nt, Artificial Sequence
  Description of Artificial Sequence: Synthetic oligonucleotide
accguucauggcgcagaaa

SEQ ID NO: 806377 - RNA, 19 nt, Artificial Sequence
  Description of Artificial Sequence: Synthetic oligonucleotide
ggaucccagcggagggcgg

SEQ ID NO: 806378 - RNA, 19 nt, Artificial Sequence
  Description of Artificial Sequence: Synthetic oligonucleotide
gucaugcacgauagugggu

SEQ ID NO: 806379 - RNA, 19 nt, Artificial Sequence
  Description of Artificial Sequence: Synthetic oligonucleotide
cacagaguucuguccggau

SEQ ID NO: 806380 - RNA, 19 nt, Artificial Sequence
  Description of Artificial Sequence: Synthetic oligonucleotide
cauggcgcagaaacacauu

SEQ ID NO: 806381 - RNA, 19 nt, Artificial Sequence
  Description of Artificial Sequence: Synthetic oligonucleotide
ggugaggucuugccucacu

SEQ ID NO: 806382 - RNA, 19 nt, Artificial Sequence
  Description of Artificial Sequence: Synthetic oligonucleotide
caccaagggagggagggau

SEQ ID NO: 806383 - RNA, 19 nt, Artificial Sequence
  Description of Artificial Sequence: Synthetic oligonucleotide
uggcgcggcaggugcgguu

SEQ ID NO: 806384 - RNA, 19 nt, Artificial Sequence
  Description of Artificial Sequence: Synthetic oligonucleotide
agccucacaccaggucaau

SEQ ID NO: 806385 - RNA, 19 nt, Artificial Sequence
  Description of Artificial Sequence: Synthetic oligonucleotide
gcggauugagaaggaggca

SEQ ID NO: 806386 - RNA, 19 nt, Artificial Sequence
  Description of Artificial Sequence: Synthetic oligonucleotide
ggaacgcgucagcccagga

SEQ ID NO: 806387 - RNA, 19 nt, Artificial Sequence
  Description of Artificial Sequence: Synthetic oligonucleotide
ccuaaggucucagcaaagu

SEQ ID NO: 806388 - RNA, 19 nt, Artificial Sequence
  Description of Artificial Sequence: Synthetic oligonucleotide
ggccuguucggaaccgcuc

SEQ ID NO: 806389 - RNA, 19 nt, Artificial Sequence
  Description of Artificial Sequence: Synthetic oligonucleotide
cgcugacuagugucacagc

SEQ ID NO: 806390 - RNA, 19 nt, Artificial Sequence
  Description of Artificial Sequence: Synthetic oligonucleotide
ccaaggucguucuauucuu

SEQ ID NO: 806391 - RNA, 19 nt, Artificial Sequence
  Description of Artificial Sequence: Synthetic oligonucleotide
auggcgcggcaggugcggu

SEQ ID NO: 806392 - RNA, 19 nt, Artificial Sequence
  Description of Artificial Sequence: Synthetic oligonucleotide
ggucucaucuugacaccua

SEQ ID NO: 806393 - RNA, 19 nt, Artificial Sequence
  Description of Artificial Sequence: Synthetic oligonucleotide
gcuugugguaaugucuguu

SEQ ID NO: 806394 - RNA, 19 nt, Artificial Sequence
  Description of Artificial Sequence: Synthetic oligonucleotide
cagggaucgcucugguguu

SEQ ID NO: 806395 - RNA, 19 nt, Artificial Sequence
  Description of Artificial Sequence: Synthetic oligonucleotide
cgagcugcggaacgcguca

SEQ ID NO: 806396 - RNA, 19 nt, Artificial Sequence
  Description of Artificial Sequence: Synthetic oligonucleotide
ccaggucagucauggggaa

SEQ ID NO: 806397 - RNA, 19 nt, Artificial Sequence
  Description of Artificial Sequence: Synthetic oligonucleotide
gcggagggcggacccauua

SEQ ID NO: 806398 - RNA, 19 nt, Artificial Sequence
  Description of Artificial Sequence: Synthetic oligonucleotide
cccaaucuguucaggaguu

SEQ ID NO: 806399 - RNA, 19 nt, Artificial Sequence
  Description of Artificial Sequence: Synthetic oligonucleotide
gcgagcugcggaacgcguc

SEQ ID NO: 806400 - RNA, 19 nt, Artificial Sequence
  Description of Artificial Sequence: Synthetic oligonucleotide
gugagucgcccgggaggac

SEQ ID NO: 806401 - RNA, 19 nt, Artificial Sequence
  Description of Artificial Sequence: Synthetic oligonucleotide
gcaaggaccgggaggcagu

SEQ ID NO: 806402 - RNA, 19 nt, Artificial Sequence
  Description of Artificial Sequence: Synthetic oligonucleotide
gugcagcuucguaccugga

SEQ ID NO: 806403 - RNA, 19 nt, Artificial Sequence
  Description of Artificial Sequence: Synthetic oligonucleotide
gcgucagcccaggacugga

SEQ ID NO: 806404 - RNA, 19 nt, Artificial Sequence
  Description of Artificial Sequence: Synthetic oligonucleotide
ggucaggacccaugucaau

SEQ ID NO: 806405 - RNA, 19 nt, Artificial Sequence
  Description of Artificial Sequence: Synthetic oligonucleotide
gcggaacgcgucagcccag

SEQ ID NO: 806406 - RNA, 19 nt, Artificial Sequence
  Description of Artificial Sequence: Synthetic oligonucleotide
gggaucgcucugguguucu

SEQ ID NO: 806407 - RNA, 19 nt, Artificial Sequence
  Description of Artificial Sequence: Synthetic oligonucleotide
ccgaggagcugugccaaga

SEQ ID NO: 806408 - RNA, 19 nt, Artificial Sequence
  Description of Artificial Sequence: Synthetic oligonucleotide
gcggacccauuaaccccag

SEQ ID NO: 806409 - RNA, 19 nt, Artificial Sequence
  Description of Artificial Sequence: Synthetic oligonucleotide
cggaacgcgucagcccagg

SEQ ID NO: 806410 - RNA, 19 nt, Artificial Sequence
  Description of Artificial Sequence: Synthetic oligonucleotide
gcgaggcuugugguaaugu

SEQ ID NO: 806411 - RNA, 19 nt, Artificial Sequence
  Description of Artificial Sequence: Synthetic oligonucleotide
cgcgucagcccaggacugg

SEQ ID NO: 806412 - RNA, 19 nt, Artificial Sequence
  Description of Artificial Sequence: Synthetic oligonucleotide
ccccacgucuguggacagc

SEQ ID NO: 806413 - RNA, 19 nt, Artificial Sequence
  Description of Artificial Sequence: Synthetic oligonucleotide
ccacgucuguggacagcca

SEQ ID NO: 806414 - RNA, 19 nt, Artificial Sequence
  Description of Artificial Sequence: Synthetic oligonucleotide
gcacgauaguggguggauu

SEQ ID NO: 806415 - RNA, 19 nt, Artificial Sequence
  Description of Artificial Sequence: Synthetic oligonucleotide
ggcgagcugcggaacgcgu

SEQ ID NO: 806416 - RNA, 19 nt, Artificial Sequence
  Description of Artificial Sequence: Synthetic oligonucleotide
gcgcagcuucccaaucugu

SEQ ID NO: 806417 - RNA, 19 nt, Artificial Sequence
  Description of Artificial Sequence: Synthetic oligonucleotide
cuugccagucuggccuguu

SEQ ID NO: 806418 - RNA, 19 nt, Artificial Sequence
  Description of Artificial Sequence: Synthetic oligonucleotide
cagcggagggcggacccau

SEQ ID NO: 806419 - RNA, 19 nt, Artificial Sequence
  Description of Artificial Sequence: Synthetic oligonucleotide
cggagggcggacccauuaa

SEQ ID NO: 806420 - RNA, 19 nt, Artificial Sequence
  Description of Artificial Sequence: Synthetic oligonucleotide
gggcgaggcuugugguaau

SEQ ID NO: 806421 - RNA, 19 nt, Artificial Sequence
  Description of Artificial Sequence: Synthetic oligonucleotide
cugcugggucaggacccau

SEQ ID NO: 806422 - RNA, 19 nt, Artificial Sequence
  Description of Artificial Sequence: Synthetic oligonucleotide
cggaaccgcucaaaccguu

SEQ ID NO: 806423 - RNA, 19 nt, Artificial Sequence
  Description of Artificial Sequence: Synthetic oligonucleotide
cggacccauuaaccccagu

SEQ ID NO: 806424 - RNA, 19 nt, Artificial Sequence
  Description of Artificial Sequence: Synthetic oligonucleotide
gacauuguaacccagaagc

SEQ ID NO: 806425 - RNA, 19 nt, Artificial Sequence
  Description of Artificial Sequence: Synthetic oligonucleotide
aaauuauuaaugugggacg

SEQ ID NO: 806426 - RNA, 19 nt, Artificial Sequence
  Description of Artificial Sequence: Synthetic oligonucleotide
gauagcagguucuacagcg

SEQ ID NO: 806427 - RNA, 19 nt, Artificial Sequence
  Description of Artificial Sequence: Synthetic oligonucleotide
aaggauugggcauagagga

SEQ ID NO: 806428 - RNA, 19 nt, Artificial Sequence
  Description of Artificial Sequence: Synthetic oligonucleotide
ugaggugagacccugaggc

SEQ ID NO: 806429 - RNA, 19 nt, Artificial Sequence
  Description of Artificial Sequence: Synthetic oligonucleotide
aauuauuaaugugggacgg

SEQ ID NO: 806430 - RNA, 19 nt, Artificial Sequence
  Description of Artificial Sequence: Synthetic oligonucleotide
aauggguuaggggaggggc

SEQ ID NO: 806431 - RNA, 19 nt, Artificial Sequence
  Description of Artificial Sequence: Synthetic oligonucleotide
aauaaucacaccaaugggu

SEQ ID NO: 806432 - RNA, 19 nt, Artificial Sequence
  Description of Artificial Sequence: Synthetic oligonucleotide
augaaaagggaaaggaugc

SEQ ID NO: 806433 - RNA, 19 nt, Artificial Sequence
  Description of Artificial Sequence: Synthetic oligonucleotide
uguugaaccgggcugacug

SEQ ID NO: 806434 - RNA, 19 nt, Artificial Sequence
  Description of Artificial Sequence: Synthetic oligonucleotide
caaugcuacgcaaacagcc

SEQ ID NO: 806435 - RNA, 19 nt, Artificial Sequence
  Description of Artificial Sequence: Synthetic oligonucleotide
ucugcaaguaggcagcacc

SEQ ID NO: 806436 - RNA, 19 nt, Artificial Sequence
  Description of Artificial Sequence: Synthetic oligonucleotide
uggggagucacguugagca

SEQ ID NO: 806437 - RNA, 19 nt, Artificial Sequence
  Description of Artificial Sequence: Synthetic oligonucleotide
acaccaauggguuagggga

SEQ ID NO: 806438 - RNA, 19 nt, Artificial Sequence
  Description of Artificial Sequence: Synthetic oligonucleotide
cacaaugcuacgcaaacag

SEQ ID NO: 806439 - RNA, 19 nt, Artificial Sequence
  Description of Artificial Sequence: Synthetic oligonucleotide
aaucacaccaauggguuag

SEQ ID NO: 806440 - RNA, 19 nt, Artificial Sequence
  Description of Artificial Sequence: Synthetic oligonucleotide
agggcugggacauuguaac

SEQ ID NO: 806441 - RNA, 19 nt, Artificial Sequence
  Description of Artificial Sequence: Synthetic oligonucleotide
acguccaccaccuugggag

SEQ ID NO: 806442 - RNA, 19 nt, Artificial Sequence
  Description of Artificial Sequence: Synthetic oligonucleotide
uguuccagcgccaagcgcu

SEQ ID NO: 806443 - RNA, 19 nt, Artificial Sequence
  Description of Artificial Sequence: Synthetic oligonucleotide
uguaguagucuuccugugc

SEQ ID NO: 806444 - RNA, 19 nt, Artificial Sequence
  Description of Artificial Sequence: Synthetic oligonucleotide
gagacaugacgugaggucg

SEQ ID NO: 806445 - RNA, 19 nt, Artificial Sequence
  Description of Artificial Sequence: Synthetic oligonucleotide
uggauagcagguucuacag

SEQ ID NO: 806446 - RNA, 19 nt, Artificial Sequence
  Description of Artificial Sequence: Synthetic oligonucleotide
uuauuaaugugggacgggc

SEQ ID NO: 806447 - RNA, 19 nt, Artificial Sequence
  Description of Artificial Sequence: Synthetic oligonucleotide
cucaaagggaggccgaugg

SEQ ID NO: 806448 - RNA, 19 nt, Artificial Sequence
  Description of Artificial Sequence: Synthetic oligonucleotide
uucuacagcggcuugucgc

SEQ ID NO: 806449 - RNA, 19 nt, Artificial Sequence
  Description of Artificial Sequence: Synthetic oligonucleotide
caugacgugaggucgggcg

SEQ ID NO: 806450 - RNA, 19 nt, Artificial Sequence
  Description of Artificial Sequence: Synthetic oligonucleotide
cauagaggagaagaaaagc

SEQ ID NO: 806451 - RNA, 19 nt, Artificial Sequence
  Description of Artificial Sequence: Synthetic oligonucleotide
uccgcguaagacaugucag

SEQ ID NO: 806452 - RNA, 19 nt, Artificial Sequence
  Description of Artificial Sequence: Synthetic oligonucleotide
guaaggaagagggaccugg

SEQ ID NO: 806453 - RNA, 19 nt, Artificial Sequence
  Description of Artificial Sequence: Synthetic oligonucleotide
cacacugcgcuccagcucg

SEQ ID NO: 806454 - RNA, 19 nt, Artificial Sequence
  Description of Artificial Sequence: Synthetic oligonucleotide
agcggcacgaaguacaggu

SEQ ID NO: 806455 - RNA, 19 nt, Artificial Sequence
  Description of Artificial Sequence: Synthetic oligonucleotide
uauuaaugugggacgggca

SEQ ID NO: 806456 - RNA, 19 nt, Artificial Sequence
  Description of Artificial Sequence: Synthetic oligonucleotide
cauuguaacccagaagccc

SEQ ID NO: 806457 - RNA, 19 nt, Artificial Sequence
  Description of Artificial Sequence: Synthetic oligonucleotide
auuaaugugggacgggcaa

SEQ ID NO: 806458 - RNA, 19 nt, Artificial Sequence
  Description of Artificial Sequence: Synthetic oligonucleotide
acccuugccacuucccacc
